(19) United States
(12) Patent Application Publication
(10) Pub. No.: US 2018/0305408 A1
(43) Pub. Date: Oct. 25, 2018

(54) COMPOUNDS FOR INDUCING TISSUE FORMATION AND USES THEREOF

(71) Applicant: HISTIDE AG, Schindellegi (CH)

(72) Inventor: Omar F. ZOUANI, Einsiedeln (CH)

(21) Appl. No.: 15/744,994

(22) PCT Filed: Aug. 25, 2016
(86) PCT No.: PCT/EP2016/070132

§ 371 Date: Jan. 15, 2018

Related U.S. Application Data
(60) Provisional application No. 62/209,419, filed on Aug. 25, 2015.

(51) Int. Cl. C07K 7/64; C07K 14/51; A61K 8/64; A61Q 7/00; A61P 19/00

(52) U.S. Cl. CPC C07K 7/64; C07K 14/51; A61P 19/00; A61Q 7/00; A61K 8/64

(57) ABSTRACT

The present disclosure provides a cyclic peptide, or a variant or analog thereof, or a cyclic peptidomimetic, with between 15 and 35 amino acids, having a growth factor receptor-binding capability and comprising a peptide with four amino acids PEP1, and a peptide with five amino acids PEP2; wherein PEP1 is selected from the group consisting of SAIS, SSLS, NAIS, SATS, SPIS, EPIS, SPIN, KPLS, EPLP, EPLT, SNIT, RSVK and RPVQ; and wherein PEP2 is selected from the group consisting of LKNYQ, LKVYP, LKKYR, LRKHR, LKYHY, KFKYE, YGKIP, YKQYE, DHHKD, EQLSN, IGEMS, LGEMS, KEVQV and KKATV.

### FIELD OF THE INVENTION

[0001] The invention relates to compounds for inducing tissue formation, biomaterials and medical devices comprising such compounds, such compounds for use in medical methods and use of such compounds in non-medical methods.

### BACKGROUND

[0002] Tissue regeneration forms an important part of the healing process subsequent to disease, trauma, or surgery. In situations where disease or trauma produces a tissue defect, for example a bone, cartilage, skin, vascular tissue, or eye retina defect, tissue regeneration is a central goal of recovery. It is not, however, a goal that is always or easily achieved and much research has been devoted to newer and more effective ways to promote tissue repair and regeneration. Conventional technics to achieve tissue regeneration involve the activation of tissue-specific stem cells present in adult tissues with repair and/or regenerative capabilities called mesenchymal stem cell(s) or MSC(s) using recombinant proteins called growth factors (GFs). MSCs or MSC-like cells may be found in the bone marrow, but also in tissues such as fat, umbilical cord blood, amniotic fluid, placenta, dental pulp, tendons, synovial membrane and skeletal muscle. Natural regulation of the MSCs is effected through the participation of a number of growth factors (GFs), including vascular endothelial growth factors (VEGF), which trigger angiogenesis crucial for the repair of most tissues, bone morphogenetic proteins (BMP), which induce the formation of new bone and regulate capillary stem cell activation, transforming growth factors (TGF), which induce cartilage formation, and platelet-derived growth factor-BB (PDGF-BB), which is involved in the formation of granulation tissues and the recruitment of stem cells. Naturally occurring growth factors are found within the tissues themselves and are only present in small amounts. Thus, to provide industrially useful and reproducible amounts of human growth factors, traditional technics involve the production of GFs by genetic recombination. These recombinant molecules are typically grafted onto the surface of a biocompatible material and placed, where needed, inside or on the body of a patient.

[0003] Bone

[0004] It is conventionally known that mature osteoblasts are the cells responsible for bone formation and are derived from osteoblast precursors. Differentiation of human bone marrow mesenchymal stem cells and osteoblast precursors is one of the important processes for bone regeneration. Osteoblasts differentiate from mesenchymal stem cells. Mature osteoblasts differentiate from osteoblast precursors and into osteocytes which are non-dividing cells. Upon cell activation osteoblasts begin to secrete some extracellular matrix around themselves. Calcification, i.e., deposition of insoluble calcium salts in the bone matrix, begins a short time after the matrix has been secreted. Upon termination of bone matrix synthesis, osteoblasts either undergo cell death by apoptosis or differentiate into osteocytes or bone lining cells. Mesenchymal stem cells are found in large numbers in the periosteum, the fibrous-like layer on the outside surface of bones, and in the bone marrow. During cellular differentiation of osteoblasts, the developing progenitor cells express the regulatory transcription factor Cbfa1/Runx2. A second important transcription factor required for osteoblastic differentiation is osterix. Osteoprogenitors differentiate under the influence of growth factors. Important growth factors in skeletal differentiation include bone morphogenetic proteins (BMPs), transforming growth factor beta (TGF-β) and fibroblast growth factors (FGFs). Differentiation of osteoblasts is also characterized by the expression of alkaline phosphatase as an early marker of pre-osteoblasts. As a result, acting on the differentiation cycle of mammal bone marrow mesenchymal stem cells and osteoblast precursors may have applications in bone tissue regeneration.

[0005] Osteoporosis

[0006] Osteoporosis is a progressive bone disease that is characterized by a decrease in bone mass and density which can lead to an increased risk of fracture. In osteoporosis, the bone mineral density (BMD) is reduced, bone microarchitecture deteriorates, and the amount and variety of proteins in bone are altered. Osteoporosis is defined by the World Health Organization as a bone mineral density of 2.5 standard deviations or more below the mean peak bone mass (average of young, healthy adults) as measured by dual-energy X-ray absorptiometry; the term “established osteoporosis” includes the presence of a fragility fracture. The treatment of osteoporotic fractures is often hindered by reduced bone healing and higher rates of complications. Studies in osteoporotic animal models revealed delayed callus formation and enchondral ossification, resulting in impaired biomechanical properties of the bone. The cellular sources of fracture healing are mesenchymal stem cells (MSCs). MSCs migrate to the fracture site, where they proliferate and differentiate into osteoblasts upon stimulation with osteoinductive cytokines. Molecular biological alterations of MSCs, such as decreased proliferative capacity, production of collagen I deficient matrix, preferableness of adipogenic differentiation, and impaired osteogenic differentiation have been described in osteoporotic patients. With regards to the osteoinduction of MSCs, key agents are BMPs. Of these, BMP-2 is one of the most potent osteoinductive cytokines which physiologically contributes to the early phase of fracture healing. Beyond that, BMP-2 is already clinically approved for the treatment of distinct fracture entities. The predominant role of BMP-2 in osteoinduction and bone formation led to a scientific quest regarding its involvement in the pathophysiology of osteoporosis. Osteoporotic animal models revealed inconsistent data with regard to BMP-2 expression levels. BMP-2 was found to be overexpressed in the callus of mandibles and down-regulated in MSCs derived from tibial and femoral bone. In humans, genetic polymorphisms in BMP-2 have been identified as risk factors for the development of familial osteoporosis and osteoporotic fractures. All these findings directly link the BMP pathways to osteoporosis. Other studies investigated the therapeutic potential of BMP-2 in osteoporotic animal models. The systemic administration of rhBMP-2 increased the volume of trabecular bone and stimulated bone formation in osteoporotic mice. The local application of adenoviral BMP-2 at the site of injury enhanced callus formation and improved mechanical properties of the healing bone in osteoporotic sheep. Stimulating the differentiation of MSCs and/or inducing growth factor activity, in particular of BMPs, may thus lead to the development of new osteoporosis treatments.

[0007] Cartilage

[0008] Although native chondrocytes offer little assistance to injured articular cartilage, these cells are responsible for the synthesis and turnover of the cartilage extracellular matrix (ECM), which provides an environment of nutrition diffusion for chondrocytes and provides the joint surface with biomechanical competence. Chondrogenic cells arise from pluripotential adult mesenchymal stem cells (MSCs) through a series of differentiation pathways. Subsequently, it was shown that a number of cytokines and transcription factors are involved in chondrocyte maturation and cartilage formation. Chondrogenic differentiation of MSCs is induced by various intrinsic and extrinsic factors. Growth factors play the most important role in this process. They represent a group of biologically active polypeptides produced by the body, which can stimulate cell proliferation, differentiation and maturation. In the hyaline cartilage, growth factors regulate homeostasis and integrity, as well as development. Important growth factors intervening in cartilage regeneration include TGF-β1, TGF-β3, BMP-2, BMP-4, BMP-7 and GDF-5. As a result, acting on the differentiation cycle of mammal mesenchymal stem cells and chondroblast precursors may have applications in cartilage tissue regeneration.

[0009] Muscles

[0010] Skeletal muscle is a highly complex and heterogeneous tissue serving a multitude of functions in the organism. The process of generating muscle—myogenesis—can be divided into several distinct phases. During embryonic myogenesis, mesoderm-derived structures generate the first muscle fibers of the body proper, and in subsequent waves additional fibers are generated along these template fibers. In the perinatal phase, muscle resident myogenic progenitors initially proliferate extensively but, later on, decrease as the number of myonuclei reaches a steady state and myofibrillar protein synthesis peaks. Once the muscle has matured, these progenitors will enter quiescence and henceforth reside within it as satellite cells. Adult skeletal muscle, like all renewing organs, relies on a mechanism that compensates for the turnover of terminally differentiated cells to maintain tissue homeostasis. This type of myogenesis depends on the activation of satellite cells that have the potential to differentiate into new fibers. The most comprehensively studied form of myogenesis takes place when mature muscle is damaged and large cohorts of satellite cells expand mitotically and differentiate to repair the tissue and reestablish homeostasis. Many similarities, such as common transcription factors and signaling molecules, between embryonic myogenesis and regeneration in the mature skeletal musculature have been discovered. It is now generally accepted that satellite cells are closely related to progenitors of somitic origin. The activation of the network of transcription factors that controls skeletal muscle development depends on paracrine factors that are released by adjacent tissues, such as the neural tube, notochord, surface ectoderm and lateral mesoderm. Several secreted factors have been identified that determine the spatial and temporal onset of myogenesis. However, no consensus has been reached as to whether these molecules instruct naive cells (instructive induction), amplify a pool of committed progenitors and/or enable a default differentiation pathway (permissive induction) or primarily prevent programmed cell death of muscle progenitor cells. Sonic hedgehog (SHH) and WNT signaling have been reported to have pivotal roles in the induction of myogenesis. Likewise, other signalling molecules, such as Noggin and bone morphogenetic proteins (BMPs)—which inactivate and activate receptors of the transforming growth factor-β (TGFβ) superfamily, respectively—are known to play an important part in orchestrating the activation of myogenesis.

[0011] Vascular

[0012] The vasculature in the human body forms through two distinct processes: vasculogenesis and angiogenesis. Vasculogenesis is defined as the process of de novo blood vessel formation occurring when endothelial precursor cells (angioblasts) migrate and differentiate into endothelial cells which form the new vessel. These vascular trees are then extended through angiogenesis which is defined as the new vessel formation secondary to proliferation of endothelial cells from pre-existing vessels. Vasculogenesis as well as angiogenesis occur during the embryologic development of the circulatory system but also in the adult organism from circulating endothelial progenitor cells (derivatives of stem cells) able to contribute, albeit to varying degrees, to neovascularization. An example of where these processes can occur in adults is the revascularization following trauma, e.g., after cardiac ischemia. It is known that the ablation of the endothelial progenitor cells (EPCs) in the bone marrow leads to a significant decrease in the vasculature development which would place endothelial progenitor cells as a novel therapeutic target. The differentiation of the EPCs is a consequence of the interplay amongst different signaling molecules such as growth factors. These include FGF, VEGF, PDGF and others. Vascular endothelial growth factor (VEGF) is a signal protein produced by cells that stimulates vasculogenesis and angiogenesis. It is part of the system that restores the oxygen supply to tissues when blood circulation is inadequate. VEGF is a sub-family of growth factors, to be specific, the platelet-derived growth factor family of cystine-knot growth factors. VEGF causes an important signaling cascade in endothelial cells. Binding to VEGF receptor-2 (VEGFR-2) starts a tyrosine kinase signaling cascade that stimulates the production of factors that variously stimulate vessel permeability, proliferation/survival, migration and finally differentiation into mature blood vessels. Recent reports have also indicated that different somatic cells (other than the EPCs) could be reprogrammed towards distinct endothelial cell lineages. This somatic reprogramming as well as the stimulation of EPCs differentiation, both represent promising therapeutic targets in regenerative vascular medicine.

[0013] Wound Healing

[0014] Wound healing is a complex and dynamic process of replacing devitalized and missing cellular structures and tissue layers. Upon injury to the skin, a set of complex biochemical events takes place in a closely orchestrated cascade to repair the damage and restore the protective barrier which in the normal skin is formed by the epidermis (outermost layer) and the dermis (inner or deeper layer) which exist in a steady-state equilibrium. The human adult wound healing process can be divided into 4 distinct phases: hemostasis, inflammatory, fibroblastic, and maturation (or remodeling). These phases are initiated and regulated by various secreted factors such as growth factors. In the first phase, the damaged blood vessels are sealed via different substances secreted by the platelets such as the platelet-derived growth factor (PDGF). The second phase corresponds to an inflammatory response which causes the blood vessels to become leaky thus releasing plasma and PMN's into the surrounding tissue. The neutrophils phagocytize debris and microorganisms and provide the first line of defence against infection. The cells macrophages are able to phagocytize bacteria and provide a second line of defence. They also secrete a variety of chemotactic and growth factors such as fibroblast growth factor (FGF), epidermal growth factor (EGF), transforming growth factor beta (TGF β and interleukin-1 (IL-1) which appears to direct the next stages of wound healing. The third phase involves the replacement of dermal and subdermal tissues. The fibroblasts secrete the collagen framework onto which further dermal regeneration occurs. The pericytes which regenerate the outer layers of capillaries and the endothelial cells which produce the lining are involved in the angiogenesis. The keratinocytes are responsible for the epithelialization. In the final stage of epithelializtion, contracture occurs as the keratinocytes differentiate to form the protective outer layer or stratum corneum. The last and 4th phase of wound healing involves remodeling the dermal tissues to produce greater tensile strength. The principle cells involved in this process are the fibroblasts. For a wound to heal successfully, all four phases must occur in the proper sequence and time frame. Many factors can interfere with one or more phases of this process, thus causing improper or impaired wound healing. Recent research has also shown that adult stem cells could be involved in wound healing. In particular hematopoietic progenitor cells (that give rise to mature cells in the blood) may have the ability to de-differentiate back into hematopoietic stem cells and/or trans-differentiate into non-lineage cells, such as fibroblasts. It is thought that the extent of the stem cell involvement in skin wound healing is complex as the epidermis and dermis could be reconstituted by mitotically active stem cells that reside at the apex of rete ridges (basal stem cells or BSC), the bulge of hair follicles (hair follicular stem cell or HFSC), and the papillary dermis (dermal stem cells). Moreover, the bone marrow may also contain stem cells that could play a major role in cutaneous wound healing. Therefore, activating adult stem cells as well as the different cells and growth factors intervening during the four phases of the skin wound healing process, most certainly represents a promising therapeutic target.

[0015] Tissue Closure

[0016] Wound healing not only applies to skin tissue repair but also to the closure of all tissue layers damaged e.g. in an injury or during surgery. For instance, during bone repair surgery, the different layers of tissues incised in order for the surgeon to reach the damaged bone part and repair it would all need to be closed for the overall healing process to occur. The mediation of this complex, “multi-layered” healing process, involves the participation of many different factors such as growth factors.

[0017] Neurons

[0018] For a long time, the human nervous system has been considered fixed and incapable or regeneration since neurons do not divide within the central nervous system (CNS). Recently in has been discovered that neural cells can be regenerated from neural stem cells (NSCs). These are self-renewing, multipotent adult stem cells that generate the main phenotype of the nervous system. They undergo asymmetric cell division into two daughter cells, one non-specialized and one specialized. NSCs primarily differentiate into neurons, astrocytes, and oligodendrocytes. NSCs are generated throughout an adult's life via the process of neurogenesis. NSCs can be differentiated to replace lost or injured neurons or in many cases even glial cells. NSCs are stimulated to begin differentiation via exogenous cues from their microenvironment, or the neural stem cell niche. This niche defines a zone in which stem cells are retained after embryonic development for the production of new cells of the nervous system. This continual supply of new neurons and glia then provides the postnatal and adult brain with an added capacity for cellular plasticity. Critical to the maintenance of the stem cell niche are microenvironmental cues and cell-cell interactions that act to balance stem cell quiescence with proliferation and to direct neurogenesis versus gliogenesis lineage decisions. Several proteins like different growth factors are involved in the mechanisms of the neural stem cell niche as well as in the maintenance and growth of the newly formed neurons. These include the BMPs, FGFs, PDGF, VEGF, TGF β, BDNF and others. Nerve growth factor (NGF) is a small secreted protein that is important for the growth, maintenance, and survival of certain target neurons (nerve cells). It also functions as a signaling molecule. While “nerve growth factor” refers to a single factor, “nerve growth factors” refers to a family of factors also known as neurotrophins. Other members of the neurotrophin family that are well recognized include Brain-Derived Neurotrophic Factor (BDNF), Neurotrophin-3 (NT-3), and Neurotrophin 4/5 (NT-4/5). NGF is critical for the survival and maintenance of sympathetic and sensory neurons. Without it, these neurons undergo apoptosis. Nerve growth factor causes axonal growth. Studies have shown that it causes also axonal branching and elongation. Several brain diseases are considered to be caused by disorders in the neural stem cell niche and especially in the precise signaling of this microenvironment. Therefore restoring correct growth factor signaling is a promising target for the treatment of brain diseases.

[0019] Eye Retina

[0020] The vertebrate retina is a light-sensitive layer of tissue, lining the inner surface of the eye. Light striking the retina initiates a cascade of chemical and electrical events that ultimately trigger nerve impulses. These are sent to various visual centers of the brain through the fibers of the optic nerve. In vertebrate embryonic development, the retina and the optic nerve originate as outgrowths of the developing brain, so the retina is considered part of the central nervous system (CNS) and is actually brain tissue. Retinal development involves a complex progression of tissue induction, proliferation of retinal progenitor cell (RPC) populations and terminal differentiation of these cells into specific functional types. Growing evidence indicates that several extrinsic cues play a critical role in the retinal cell development. One such extrinsic molecule type, bone morphogenetic protein (BMP), is a member of the transforming growth factor (TGF)-β family of signaling molecules, which are known to regulate a variety of cell functions in the developing nervous system, including neural induction, cell fate determination, apoptosis, and proliferation. BMP-2, -4, and -7 and their receptors (BMPRs) are expressed in the eye during embryogenesis and are essential for multiple aspects of retinal development. There are many inherited and acquired diseases or disorders that may affect the retina like for example the macular degeneration. It is a degenerative disease that usually affects older adults and results in a loss of vision in the center of the visual field (the macula) because of damage to the retina. Age-related macular degeneration is the leading cause of irreversible blindness in North America. Regenerating the retina via the growth factor signaling responsible for its development is thus a significant potential therapeutic target.

[0021] Kidneys

[0022] The kidney is a complex tissue consisting of several different cell types including glomerular podocytes, endothelial cells, mesangial cells, interstitial cells, tubular epithelial cells, and connecting duct cells. These cell types interact to establish a precise cellular environment that functions as an efficient tissue. Kidney diseases are currently a global public health problem, with an incidence that has reached epidemic proportions and continues to climb worldwide. Kidney failure can be associated with chronic kidney disease (CKD), which is a progressive loss in renal function over a period of months or years. Renal fibrosis, the common pathological feature of CKDs, is characterized by excessive accumulation of ECM (extracellular matrix). TGF-β (transforming growth factor-β) and BMP-7 (bone morphogenetic protein-7), two key members in the TGF-β superfamily, play important but diverse roles in CKDs (chronic kidney diseases). Both TGF-β and BMP-7 share similar downstream Smad signalling pathways, but counter-regulate each other to maintain the balance of their biological activities. During renal injury in CKDs, this balance is significantly altered because TGF-β signalling is up-regulated by inducing TGF-β1 and activating Smad3, whereas BMP-7 and its downstream Smad1/5/8 are down-regulated. In the context of renal fibrosis, Smad3 is pathogenic, whereas Smad2 and Smad7 are renoprotective. However, this counter-balancing mechanism is also altered because TGF-β1 induces Smurf2, an ubiquitin E3-ligase, to target Smad7 as well as Smad2 for degradation. Thus overexpression of renal Smad7 restores the balance of TGF-β/Smad signaling and has therapeutic effect on CKDs. It may this be that restoring the BMP-7 signaling is a potential therapeutic target in renal regenerative therapies.

[0023] Ligaments and Tendons

[0024] Tendons and ligaments (T/L) are dense connective tissues of mesodermal origin. They connect and transmit force from muscle to bone and bone to bone, respectively. Both tissues are able to store elastic energy and withstand hightensile forces, on which locomotion is entirely dependent. T/L are predominantly composed of collagen type I fibrils organized in a highly hierarchical manner that is unique for the T/L. Other collagens (types XI, XII, XIV, and XV) and various proteoglycans (decorin, cartilage oligomeric matrix protein (COMP), byglican, lumican, fibromodulin, tenascin-C, etc.) are building the remaining T/L substance. The cellular content of T/L is dominated by tendon-specific fibroblasts named tenocytes. During embryonic development, the tendon-specific cells descend from a sub-set of mesenchymal progenitors condensed in the syndetome, a dorsolateral domain of the sclerotome. Moreover, Mesenchymal stem cells (MSCs), multipotent adult cells that give rise to tissues of mesodermal origin, have been shown to generate in vitro T/L progenitor cells. Several tendon injuries result from gradual wear and tear to the tendon from overuse or aging. Tendon healing is a complex and highly-regulated process that is initiated, sustained and eventually terminated by a large number and variety of molecules. Growth factors represent one of the most important molecule families involved in regeneration. The activity of five growth factors has been best characterized during this process: insulin-like growth factor-I (IGF-I), transforming growth factor beta (TGFbeta), vascular endothelial growth factor (VEGF), platelet-derived growth factor (PDGF), and basic fibroblast growth factor (bFGF). Stimulating the differentiation of MSCs and/or inducing growth factor activity thus represent two potentially significant therapeutic targets in T/L regeneration and healing.

[0025] Fertility and Reproduction

[0026] Reproduction (or procreation) is the biological process by which new offspring individual organisms are produced from their parents. Sexual reproduction is a biological process by which organisms create descendants that have a combination of genetic material contributed from two (usually) different members of the species. Fertility is the natural capability to produce offspring. The development and physiological functions of basic structures in the mammalian reproductive system are influenced by the tissue-specific expression of members of different growth factors families like the BMP family. The establishment of the germ line is a fundamental aspect of reproduction. Germ cell determination is induced in epiblast cells by the extraembryonic ectoderm, and is not acquired through the inheritance of preformed germ plasma. There is some strong evidence that BMP-4 and -8b play a central role in determining primordial germ cell (PGC) formation in the embryo. The genes encoding BMP-4 and -8b have overlapping expression in the extraembryonic ectoderm before gastrulation, i.e., before PGCs are seen. Thus, PGC formation requires BMP-4 expression. There is also evidence from knockout mammals that BMP-8b is required for PGC formation. Furthermore, there is increasing evidence that locally produced BMPs play a major role in the differentiation of the pituitary gonadotrope. Restoring the BMPs signaling would thus be an important factor in infertility therapies.

[0027] Hair

[0028] Tissue homeostasis and regeneration are regulated through balancing quiescence and activation of quiescent epithelial stem cells (SCs). Hair follicles (HFs) follow this process. Throughout adult life, they undergo dynamic, synchronized cycles of degeneration (catagen), quiescence (telogen), and regeneration (anagen). During telogen, which can last for months, HFSCs are quiescent and reside within a specialized microenvironment called the bulge. Within this niche, HFSCs surround the hair shaft produced in the previous cycle. Throughout telogen, the base of the bulge, called the secondary hair germ (HG), directly abuts the underlying mesenchymal dermal papillae (DP), a key signaling center for HFSCs. The telogen/anagen transition relies upon DP-HFSC crosstalk to generate the necessary threshold of activating factors. Upon activation, HFSCs in the HG are the first to proliferate and initiate HF regeneration, whereas HFSCs within the bulge become active several days later. As the new HF emerges, the DP stimulus is pushed increasingly further from niche SCs, which return to quiescence. In contrast, throughout anagen, relatively undifferentiated bulge cell progeny along the outer root sheath (ORS) accelerate proliferation as they approach the DP. This fuels a steady production of transiently amplifying matrix cells, which undergo a few divisions while in contact with DP and then terminally differentiate to form the hair and inner root sheath (IRS). At the anagen/catagen transition, matrix cells apoptosis and the DP retracts upward along with the dying/differentiating epithelial strand. As the HF reenters telogen, growth factors from the inner layer of non-SC niche cells and from surrounding dermal tissue impose a threshold, which must be overcome to initiate the next cycle. When cells in the telogen phase are not able to reenter into the anagen phase, hair stop their growth, and conditions such as hair loss emerge. As a result, acting on the differentiation cycle of mammal hair follicle mesenchymal stem cells and precursor cells may have applications in hair follicle tissue regeneration thus preventing hair-loss and activating hair-growth, preventing/treating alopecia areata, alopecia totalis, alopecia universalis, androgenic alopecia (male pattern baldness), telogen effluvium, anagen effluvium or chemotherapy-induced alopecia, but is not limited.

[0029] Skin

[0030] The skin constantly renews itself throughout adult life. Stem cells (SCs) residing in the epidermis ensure the maintenance of adult skin homeostasis, but they also participate in the repair of the epidermis after injuries. The skin protects the body from dehydration, injury and infection. The skin consists of an underlying dermis, separated by a basement membrane from the multilayered overlaying epidermis. The dermis is of mesodermal embryonic origin and contains as adult stem cells fibroblastic mesenchymal stem-cell-like cells. These cells have a multi-lineage differentiation potential, being also able to form adipose tissue or bones. The stratified epidermis is of ectodermal origin and composed of keratinocytes that differentiate to a water-impermeable stratum corneum. The terminally differentiated cells in the epidermis are shed from the skin, necessitating a continuous delivery of newly differentiating cells. The epidermis is completely renewed about every four weeks. Given that the differentiated cells cannot divide anymore, their replacement depends on epidermal stem cells. There is strong evidence that the hair bulge forms a reservoir of epidermal stem cells. From there, stem cells periodically migrate to the matrix of the hair follicle, the sebaceous gland and the basal layer in the interfollicular epidermis to produce progenitors that differentiate into hair cells, gland cells or cells of the upper epidermal layers respectively.

[0031] The basal layer of the epidermis contains two different types of cell populations: (I) the slowly dividing epidermal stem cells and (II) their progeny that are rapidly dividing cells in order to supply new cells to replace those that get lost by desquamation. The basal layer of the epidermis contains two different types of cell populations: (I) the slowly dividing epidermal stem cells and (II) their progeny that are rapidly dividing cells in order to supply new cells to replace those that get lost by desquamation. In the skin, Wnt and β-catenin play diverse roles in HF (Hair Follicle) morphogenesis, Stem Cells maintenance and/or activation and hair shaft differentiation. Activation of Wnt/β-catenin signaling is critical during the first stage of HF morphogenesis, as evidenced by the absence of placode formation on conditional ablation of β-catenin or constitutive expression of a soluble Wnt inhibitor (Dkk1). Although the source and identity of the putative Wnt signal required to induce placode formation remain elusive, it may be the first dermal signal to instruct epidermal cells to make hair. Consistent with this notion is the activation in both the placode and the postnatal hair germ of a Wnt reporter gene driving lacZ under the control of an enhancer composed of multimerized binding sites for the Lef1/Tcf DNA-binding proteins that interact with and are activated by association with β-catenin. Nuclear β-catenin and Left expression are also seen in embryonic placodes and postnatal hair germs at this time. Noggin, a soluble inhibitor of BMPs, is expressed by the mesenchymal condensate and is required in the early stage of HF morphogenesis and cycling. It appears to act at least in part by promoting expression of Lef1 Skin stem cells are of special interest because they are easily accessible. In recent years, several products said to have a link with skin stem cells have found their way to the cosmetic products market such as AMATOKIN®, a face care product line commercialised by Voss Laboratories and said to stimulate stem cells in the skin, or Dior's CAPTURE® R60/80 XP product line used as anti-wrinkles whose mechanism is said to be based on the protection of the life force of stem cells. As a result, there is thus some potential in acting on the differentiation cycle of mammal skin mesenchymal stem cells and precursor cells with potential applications in skin tissue regeneration thus preventing wrinkles formation and generally improving skin appearance.

[0032] Blood

[0033] Blood is a bodily fluid in animals that delivers necessary substances such as nutrients and oxygen to the cells and transports metabolic waste products away from those cells. When it reaches the lungs, gas exchange occurs wherein carbon dioxide is diffused out of the blood into the alveoli and oxygen is diffused into the blood. This oxygenated blood is pumped to the left hand side of the heart in the pulmonary vein and enters the left atrium. From here it passes through the bicuspid valve, through the ventricle and taken all around the body by the aorta. Blood contains antibodies, nutrients, oxygen and much more to help the body work. In vertebrates, it is composed of blood cells suspended in blood plasma. Plasma, which constitutes 55% of blood fluid, is mostly water (92% by volume), and contains dissipated proteins, glucose, mineral ions, hormones, carbon dioxide (plasma being the main medium for excretory product transportation), and blood cells themselves. Albumin is the main protein in plasma, and it functions to regulate the colloidal osmotic pressure of blood. Hematopoietic stem cells (HSCs) are the blood cells that give rise to all the other blood cells and are derived from the mesoderm. They are located in the red bone marrow, which is contained in the core of most bones. The HSCs give rise to the myeloid lineage (monocytes and macrophages, neutrophils, basophils, eosinophils, erythrocytes, megakaryocytes/platelets, dendritic cells), and to the lymphoid lineages (T-cells, B-cells, NK-cells). The most abundant cells in the vertebrate blood are red blood cells (also called RBSs or erythrocytes). These contain hemoglobin, an iron-containing protein, which facilitates oxygen transport by reversibly binding to this respiratory gas and greatly increasing its solubility in blood. Blood cell degeneration-related diseases, conditions or disorders include, but are not limited to, Anemia, Iron-deficiency anemia, Anemia of chronic disease, Pernicious anemia, Aplastic anemia, Autoimmune hemolytic anemia, Thalassemia, Sickle cell anemia, Polycythemia vera, Vitamin deficiency anemia, Hemolytic anemia, Thrombocytopenia, Idiopathic thrombocytopenic purpura, Heparin-induced thrombocytopenia, Thrombotic thrombocytopenic purpura, Essential thrombocytosis (primary thrombocythemia), Thrombosis, Hemophilia, von Willebrand disease, Hypercoaguable state (hypercoagulable state), Deep venous thrombosis, Disseminated intravascular coagulation (DIC), Thrombocytopenia, Immune Thrombocytopenia (ITP), Drug-induced thrombocytopenia (DITP), Gestational thrombocytopenia, Thrombotic microangiopathies (TMA), Drug-induced thrombotic microangiopathies, Complement-mediated thrombotic microangiopathies, Mixed cryoglobulinemia, Eosinophilia, Eosinopenia, Idiopathic hypereosinophilic syndrome, Antiphospholipid syndrome (Hughes syndrome), Glanzmann's thrombasthenia, WiskottAldrich syndrome (WAS), Leishmania infection, Toxoplasmosis, Hereditary hypogammaglobulinemia, Nonfamilial hypogammaglobulinemia, Leukopenia, Agranulocytosis, Basopenia, BernardSoulier syndrome (BSS), Malaria, Sepsis, or Hemolytic uremic syndrome (HUS).

[0034] Adipose Tissue

[0035] Adipose tissue is loose connective tissue composed mostly of adipocytes. In addition to adipocytes, adipose tissue contains the stromal vascular fraction (SVF) of cells including preadipocytes, fibroblasts, vascular endothelial cells and a variety of immune cells (i.e. adipose tissue macrophages (ATMs)). Adipose tissue is derived from preadipocytes. Its main role is to store energy in the form of lipids, although it also cushions and insulates the body. Pre-adipocytes are thought to be undifferentiated fibroblasts that can be stimulated to form adipocytes. The pre-adipocytes originate from mesenchymal stem cells. Areolar connective tissue is composed of adipocytes. The term “lipoblast” is used to describe the precursor of the adult cell. Adipose tissue degeneration-related diseases, conditions or disorders include, but are not limited to, Obesity, Dercum's disease (DD), Multiple symmetric lipomatosis (MSL), Familial multiple lipomatosis (FML), Lipodystrophy, Lipedema, or Atherosclerosis.

[0036] Lung

[0037] The lung is the essential respiration organ in many air-breathing animals. In mammals the two lungs are located near the backbone on either side of the heart. Their principal function is to transport oxygen from the atmosphere into the bloodstream, and to release carbon dioxide from the bloodstream into the atmosphere. A large surface area is needed for this exchange of gases, which is accomplished by the mosaic of specialized cells that form millions of tiny, exceptionally thin-walled air sacs called alveoli. Lung cells include, but are not limited to, type I pneumocytes, type II pneumocytes, clara cells and goblet cells. Lung tissue degeneration-related diseases, conditions or disorders include, but are not limited to, Asthma, Chronic obstructive pulmonary disease (COPD), Chronic bronchitis, Emphysema, Cystic fibrosis, Pulmonary edema, Acute respiratory distress syndrome (ARDS), Pneumoconiosis, Interstitial lung disease (ILD), Sarcoidosis, Idiopathic pulmonary fibrosis, Pulmonary embolism (PE), Pulmonary hypertension, Pleural effusion, Pneumothorax, Mesothelioma, Granulomatosis with polyangiitis (GPA), Goodpasture syndrome (GPS), Pulmonary hyperplasia, Infant respiratory distress syndrome (IRDS), Chronic obstructive pulmonary disease (COPD), Silicosis, Sleep Apnea, Severe Acute Respiratory Syndrome (SARS), Pulmonary fibrosis, Primary ciliary dyskinesia (PCD), Pneumoconiosis (Black Lung Disease), Hypersensitivity Pneumonitis, Cryptogenic Organizing Pneumonia (Bronchiolitis Obliterans Organizing Pneumonia (BOOP)), Byssinosis, Bronchopulmonary Dysplasia, Bronchiolitis, Bronchiectasis, Asbestosis, Pertussis, Middle Eastern Respiratory Syndrome (MERS), Pneumonia, Tuberculosis, Bronchitis, Histoplasmosis, Coccidioidomycosis (Cocci), or Acute bronchitis.

[0038] The present invention thus provides cyclic compounds, compositions, microenvironments, functionalised bioactive carriers, medical devices, and kits comprising them, methods and processes for the design, preparation, manufacture and/or formulation of such cyclic compounds, compositions, functionalised bioactive carriers, medical devices and kits comprising them, and methods and uses thereof for regenerating or recoding mammalian tissues.

### BRIEF DESCRIPTION OF THE DRAWINGS

[0039] FIG. 1 is a representation showing hMSCs cytoskeletal formation and organization when treated using compounds of the invention. Fluorescence image of F-actin structures (green) and focal adhesion (vinculin antibody was used, red) of osteoblast precursors with and without compounds of the invention after 24 hours of incubation.

[0040] FIG. 2 is a diagram representing a commitment of human Bone Marrow Mesenchymal Stem Cells towards osteoblast-like cells after 62 hours of culture on titanium biomaterials covalently modified according to the invention using Runx2 and Osterix immunofluorescent stainings.

[0041] FIG. 3 is a representation of a fluorescence intensity of osteogenic compounds of the invention mixed with type-I collagen or with apatite ceramics substrates. The images represent surfaces non-covalently coated with osteogenic peptides-FITC.

[0042] FIG. 4 is a representation of a fluorescence intensity of osteogenic compounds of the invention mixed with a type-I collagen substrate after 3, 7 and 10 days. The images represent surfaces non-covalently coated with osteogenic peptides-FITC.

[0043] FIG. 5 is a diagram representing a quantification of the proliferation of osteoblast precursors after 48 hours of cell culture on apatite ceramics and on collagen coated with osteogenic compounds of the invention.

[0044] FIG. 6 is a representation of the commitment of hMSCs towards osteoblast-like cells after 48 hours of culture on collagen and on apatite ceramics coated with osteogenic compounds of the invention using Runx2 and Osterix immunofluorescent stainings.

[0045] FIG. 7 is a representation of an immunofluorescent staining of F-actin (green) and Osteopontin (red) for hMSC showing their differentiation into osteoblast cells after 96 hours of culture on a type-I collagen scaffold non-covalently modified with a compound of the invention.

[0046] FIG. 8 is a representation of a Quantitative Real Time PCR analysis of the expression of Runx2 in cells cultured on native apatite ceramics and on apatite ceramics non-covalently modified with the different osteogenic compounds of the invention, (P<0.005). (b) is the micrographs for Alkaline Phosphatase Activity.

[0047] FIG. 9 is (a) representation of a quantification of the relative Sox9 intensity on hMSCs cultured with and without compounds of the invention. hMSCs committed towards chondrocyte differentiation as seen by positive Sox9 (Transcription factor) immunofluorescent staining.

[0048] FIG. 10 is a representation of a distribution of the endothelial cell adherens junction's size. The results were obtained from immunofluorescence staining with an antibody against CD31 (PECAM1).

[0049] FIG. 11 is confocal images of endothelial cells cultured with and without compounds of the invention. The fluorescence intensities corresponding to F-actin filaments (Phalloidin staining) was represented in green.

[0050] FIG. 12 is a representation of (a) a Phase-contrast Micrograph showing the progression of migrating cells after scratching and (b) a Mean epithelial cell velocity measured for cells cultured with and without compounds of the invention.

[0051] FIG. 13 is (a) a diagram representing the results of a Quantitative Real Time PCR analysis for the expression of Sox2 for cells cultured with or without compounds of the invention. (b) The total BMP-6 immunofluorescence intensity in the cell culture medium was quantified for Hair Follicle Stem Cells cultured for 96 h.

[0052] FIG. 14 is (a) a quantification of the cell area of hMSCs cultured with or without compounds of the invention. The average cell area was estimated from approximately 25 cells from 2 different passages. (b) is a Quantitative Real Time PCR analysis for the expression of the COMP gene (Cartilage Oligomeric Matrix Protein, a tendon/ligament lineage gene).

[0053] FIG. 15 is a diagram representing the results of a Quantitative Real Time PCR analysis of the expression of the Growth Associated Protein 43 (GAP43) gene for cells cultured with and without compounds of the invention.

[0054] FIG. 16 is diagram representing the amount of STRO-1 (a hMSC stemness marker) present in the cells expressed as an average fluorescence intensity, normalized by the number of cells.

### DETAILED DESCRIPTION

[0055] Cellular differentiation is the process by which a cell type becomes specialized, and involves a highly controlled switch from one gene expression pattern to another. In each specific lineage, cells progress through various stages of differentiation and maturation. In the case of bone lineage, osteoblast progenitors are derived from adult bone marrow mesenchymal stem cells, followed by osteoblast precursors, mature osteoblasts and osteocytes.

[0056] Mesenchymal stem cells or MSCs are multipotent stromal cells that can differentiate into a variety of cell types including osteoblasts (bone cells), chondrocytes (cartilage cells), neurons, endothelial cells and adipocytes (fat cells). Growth factors generally modulate MSC activity through non-covalent binding to specific receptors called growth factor receptors (GFRs). Growth factors (GF) bind to serine-threonine kinase receptors on the cell surface, triggering specific intracellular pathways that activate and influence gene transcription, having effects in cell proliferation and/or differentiation. There are three or more receptors (types I, II and III) for GF members but only types I and II are required for binding and signalling. After binding of signal molecule, receptors are activated which leads into induction of SMAD pathway. Type I receptors phosphorylate receptor-regulated Smads (R-Smads) which form a complex with common-partner Smad (Co-Smad). This complex is translocated into the nucleus and modulates gene transcription with other transcription factors required for chondrogenic differentiation.

[0057] Modulation of such an activity may typically be performed using recombinant growth factors. However, studies indicated that prior attempts using this technology, for instance, in the field of spinal fusion, may be harmful to the patient treated and lead in certain cases to the development of tumors and other serious side-effects. The real clinical advantage over previously employed technics not involving the use of recombinant growth factors may also be questioned.

[0058] Other attempts to induce tissue formation involve the use of synthetic peptides reproducing parts of the natural sequences of growth factors. For example, these synthetic peptides have been studied for their potential use in improving bone repair. However, these peptides generally often lack sufficient biological activity and suffer from poor in-vitro and/or in-vivo stability. Furthermore, the tissue-induction activity of conventional synthetic peptides is not rapid. For example, in-vitro osteogenic differentiation of mesenchymal stem cells cultured on biomaterials using such conventional peptides is generally observed after 3 weeks of cell culture.

[0059] The present invention thus provides embodiments for:
[0060] Modifying and/or enhancing and/or modulating and/or promoting and/or activating tissue regeneration in mammals, preferably humans;
[0061] Modifying and/or enhancing and/or modulating and/or promoting and/or activating bone, and/or cartilage, and/or vascular, and/or neuronal, and/or retinal, and/or organs such as kidneys or lungs, and/or ligament/tendon, and/or hair follicle, and/or skin, and/or blood, and/or adipose, tissue regeneration;
[0062] Modifying and/or enhancing and/or modulating and/or promoting and/or activating embryonic patterning;
[0063] Modifying and/or enhancing and/or modulating and/or promoting and/or activating cellular migration and wound healing;
[0064] Modifying and/or enhancing and/or modulating and/or promoting and/or activating the closure of any type of living tissues;
[0065] Modifying and/or enhancing and/or modulating and/or promoting and/or activating female fertility;
[0066] Preventing and/or suppressing or avoiding or reducing tissue degeneration in mammals, preferably humans;
[0067] Preventing and/or suppressing or avoiding or reducing bone, and/or cartilage, and/or vascular, and/or neuronal, and/or retinal, and/or organs such as kidneys or lungs, and/or ligament/tendon, and/or hair follicle, and/or skin, and/or blood, and/or adipose, tissue degeneration;
[0068] Protecting a subject from a tissue degeneration disease, disorder or condition;
[0069] Protecting a subject from osteoporosis;
[0070] Preventing and/or suppressing or avoiding or reducing cellular immobilization and wound formation and/or progression;
[0071] Preventing and/or suppressing or avoiding or reducing the misclosure of any type of living tissue;
[0072] Preventing and/or suppressing or avoiding or reducing female infertility;
[0073] Preventing and/or suppressing or avoiding or reducing hair-loss;
[0074] Preventing/treating alopecia areata, alopecia totalis, alopecia universalis, androgenic alopecia (male pattern baldness), telogen effluvium, anagen effluvium or chemotherapy-induced alopecia,
[0075] Modifying and/or enhancing and/or modulating and/or promoting and/or activating the osteogenicity, and/or the chondrogenecity, and/or the endothelization and vascularization ability, and/or hair growth ability, and/or the wound healing ability, and/or the skin repair ability, and/or the tissue defect closure ability, and/or the neuroregeneration ability, and/or the ligament/tendon tissue regeneration ability, and/or the female fertility ability, of a bioactive carrier such as a biomaterial which may be useful in the manufacturing of medical devices;
[0076] Modifying and/or enhancing and/or activating anti-aging/anti-wrinkle effects/properties in cosmetic products;
[0077] Modifying and/or enhancing and/or activating hair growth effects/properties in cosmetic products;
[0078] Modifying and/or enhancing and/or modulating and/or promoting and/or inducing and/or activating stem cells, preferably adult stem cells, more preferably mesenchymal stem cells, commitment and/or differentiation in a specific lineage of cells;
[0079] Modifying and/or enhancing and/or modulating and/or promoting and/or inducing and/or activating progenitor cells differentiation and/or maturation;
[0080] Obtaining/producing functional differentiated cells;
[0081] Obtaining/producing differentiated cells with modified and/or improved functionality and/or physiological activity.

### I. Definitions

[0082] Those skilled in the art will recognize, or be able to ascertain using no more than routine experimentation, many equivalents to the specific embodiments in accordance with the invention described herein. The scope of the present invention is not intended to be limited to the present description, but rather is as set forth in the appended claims.

[0083] In the claims, articles such as “a”, “an”, and “the” may mean one or more than one unless indicated to the contrary or otherwise evident from the context. Claims or descriptions that include “or” between one or more members of a group are considered satisfied if one, more than one, or all of the group members are present in, employed in, or otherwise relevant to a given product or process unless indicated to the contrary or otherwise evident from the context. The invention includes embodiments in which exactly one member of the group is present in, employed in, or otherwise relevant to a given product or process. The invention includes embodiments in which more than one, or all of the group members are present in, employed in, or otherwise relevant to a given product or process.

[0084] It is also noted that the term “comprising” is intended to be open and permits but does not require the inclusion of additional elements or steps. When the term “comprising” is used herein, the terms “consisting of”, “consisting essentially of”, “consisting substantially of” and “consisting exclusively of” are thus also encompassed and disclosed.

[0085] As used herein, the term “approximately” or “about,” as applied to one or more values of interest, refers to a value that is similar to a stated reference value. In certain embodiments, the term “approximately” or “about” refers to a range of values that fall within 25%, 20%, 19%, 18%, 17%, 16%, 15%, 14%, 13%, 12%, 11%, 10%, 9%, 8%, 7%, 6%, 5%, 4%, 3%, 2%, 1%, or less in either direction (greater than or less than) of the stated reference value unless otherwise indicated, self-evident or contradictory in context (e.g. except where such number would exceed 100% of a possible value).

[0086] As used herein and unless otherwise indicated or contradictory in context, the term “with” followed by a specific number of amino acids, when used to define a particular peptide, variant or analog thereof, such as in “a peptide with three amino acids”, means that such peptide, variant or analog thereof, contains exclusively the specific number of amino acids specified after this term.

[0087] As used herein and unless otherwise indicated or contradictory in context, the term “Ci-alkyl” is intended to specifically and individually disclose any branched or unbranched radical, moiety or functional group having “i” carbon atom(s).

[0088] The carbon atom content of the various hydrocarbon-containing moieties herein may be indicated by a prefix designating the minimum and maximum number of carbon atoms in the moiety. For example, in certain embodiments, (Ca-Cb)alkyl indicates an alkyl moiety of the integer “a” to the integer “b” carbon atoms, inclusive.

[0089] At various places in the present specification, substituents of compounds of the present disclosure may be disclosed in groups or in ranges. It is specifically intended that the present disclosure include each and every individual sub-combination of the members of such groups and ranges. For example, in certain embodiments, the term “C1-C5 alkyl” is an abbreviation for (and thus is specifically intended to individually disclose) C1-alkyl (i.e. methyl), C2-alkyl (i.e. ethyl), C3-alkyl (i.e. 1-propyl and 2-propyl), C4-alkyl (i.e. 1-butyl, sec-butyl, iso-butyl and tert-butyl), and C5-alkyl (i.e. 1-pentyl, 2-pentyl, 3-pentyl, 2-methyl-1-butyl, 3 methyl 1 butyl, 2-methyl-2-butyl, 3-methyl-2-butyl, 2,2-dimethyl--1-propyl and 1,1-dimethyl-1-propyl).

[0090] As used herein, unless indicated otherwise or contradictory in context, the terms “alkyl” and “(Ca-Cb)alkyl” refer to monovalent hydrocarbon radicals containing the requisite number of carbon atoms as described above, having straight or branched moieties or combinations thereof. As used herein, alkyl groups may be optionally substituted with between one to four substitutes. Non-limiting examples of alkyl groups include, e.g. methyl, ethyl, n-propyl, isopropyl, n-butyl, isobutyl, sec-butyl, t-butyl, etc. Of course, other alkyl groups will be readily apparent to those of skilled in the art given the benefit of the present disclosure.

[0091] Where ranges are given, endpoints are included. Furthermore, it is to be understood that unless otherwise indicated or otherwise evident from the context and understanding of one of ordinary skill in the art, values that are expressed as ranges can assume any specific value or sub-range within the stated ranges in different embodiments of the invention, to the tenth of the unit of the lower limit of the range, unless the context clearly dictates otherwise. For example, in certain embodiments, a disclosed 0-10 range would, for example, in certain embodiments, also specifically and individually disclose the following values and ranges: 0, 1, 2, 3, 4, 5, 6, 7, 8, 9, 10, 0.1, 0.2, 0.3, 0.4, 0.5, 0.6, 0.7, 0.8, 0.9, 1, 1.1, 1.2, 1.3, 1.4, 1.5, 1.6, 1.7, 1.8, 1.9, 2, 2.1, 2.2, 2.3, 2.4, 2.5, 2.6, 2.7, 2.8, 2.9, 3, 3.1, 3.2, 3.3, 3.4, 3.5, 3.6, 3.7, 3.8, 3.9, 4, 4.1, 4.2, 4.3, 4.4, 4.5, 4.6, 4.7, 4.8, 4.9, 5, 5.1, 5.2, 5.3, 5.4, 5.5, 5.6, 5.7, 5.8, 5.9, 6, 6.1, 6.2, 6.3, 6.4, 6.5, 6.6, 6.7, 6.8, 6.9, 7, 7.1, 7.2, 7.3, 7.4, 7.5, 7.6, 7.7, 7.8, 7.9, 8, 8.1, 8.2, 8.3, 8.4, 8.5, 8.6, 8.7, 8.8, 8.9, 9, 9.1, 9.2, 9.3, 9.4, 9.5, 9.6, 9.7, 9.8, 9.9, 10, 0-1, 0-2, 0-3, 0-4, 0-5, 0-6, 0-7, 0-8, 0-9, 1-2, 1-3, 1-4, 1-5, 1-6, 1-7, 1-8, 1-9, 2-3, 2-4, 2-5, 2-6, 2-7, 2-8, 2-9, 2-10, 3-4, 3-5, 3-6, 3-7, 3-8, 3-9, 3-10, 4-5, 4-6, 4-7, 4-8, 4-9, 4-10, 5-6, 5-7, 5-8, 5-9, 5-10, 6-7, 6-8, 6-9, 6-10, 7-8, 7-9, 7-10, 8-9, 8-10, 9-10, 0-0.1, 0-0.2, 0-0.3, 0-0.4, 0-0.5, 0-0.6, 0-0.7, 0-0.8, 0-0.9, 0-1.1, 0-1.2, etc.

[0092] As used herein and unless otherwise indicated or contradictory in context, the term “substantially” refers to the qualitative condition of exhibiting total or near-total extent or degree of a characteristic or property of interest. One of ordinary skill in the biological arts will understand that biological and chemical phenomena rarely, if ever, go to completion and/or proceed to completeness or achieve or avoid an absolute result. The term “substantially” is therefore used herein to capture the potential lack of completeness inherent in many biological and chemical phenomena.

[0093] In addition, it is to be understood that any particular embodiment of the present invention that falls within the prior art may be explicitly excluded from any one or more of the claims using the appropriate disclaimer(s) or proviso(s). Since such embodiments are deemed to be known to one of ordinary skill in the art, they may be excluded even if the exclusion is not set forth explicitly herein. Any particular embodiment of the compositions of the invention (e.g., any nucleic acid or protein encoded thereby; any method of production; any method of use; etc.) can be excluded from any one or more claims, for any reason, whether or not related to the existence of prior art.

[0094] All cited sources, for example, in certain embodiments, references, publications, databases, database entries, and art cited herein, are incorporated into this application by reference in their entirety, even if not expressly stated in the citation. In case of conflicting statements of a cited source and the instant application, the statement in the instant application shall control.

[0095] As the case may be, and unless otherwise indicated or contradictory in context, macromolecules molecular weights should be understood in the present description as being number averaged molecular weights.

[0096] The peptides mentioned in the present description may not follow the usual representation conventions. For instance, the N-terminal amino acid of a peptide sequence may be the first amino acid in the sequence or the last amino acid. Likewise, the C-terminal amino acid of a peptide sequence may be the first amino acid in the sequence or the last amino acid. For example, in the peptide sequence NAIS, “N” may be N-terminal or C-terminal, and “S” may be N-terminal or C-terminal.

[0097] In the present application, when reference is made to a certain peptide (e.g. a cyclic GFR-binding compound as provided herein) comprising one or more other peptide(s), said one or more other peptide(s) is(are) understood to be stably (in most cases, covalently) attached/bound to at least one part of said peptide. The attachment/binding may be located anywhere on the peptide unless indicated otherwise, contradictory in context or contradictory to general scientific rules. No specific attachment/binding location of said one or more other peptide(s) to said peptide shall be assumed unless specifically mentioned.

[0098] Peptide or polypeptide: As used herein, the term “peptide” or “polypeptide” are used interchangeably and refers to a polymer of less than or equal to 100 amino acids long, e.g., about 2, 3, 4, 5, 10, 15, 20, 25, 30, 35, 40, 45, 50, 55, 60, 65, 70, 75, 80, 85, 90, 95 or 100 amino acids long. The terms apply to amino acid polymers in which one or more amino acid residue is an artificial chemical mimetic of a corresponding naturally occurring amino acid, as well as to naturally occurring amino acid polymers, non-naturally occurring amino acid polymers, peptide analogs, peptide variants and peptide mimetics. Conventional techniques for synthesising peptides involve the activation of the carboxylic acid function of an amino acid or of a peptide, using a coupling agent. This activated acid is then contacted with an amino acid or a peptide in which the N-terminal amino acid is not protected, thus forming an amide bond also called peptide bond. Coupling reaction conditions together with coupling agents are well known in the art and described, for instance, in Greene, “Protective Groups in Organic Synthesis”, Wiley, New York, 2007 4th edition. In addition, suitable peptide synthesis routes are described, for instance, in Hojo H., Recent progress in the chemical synthesis of proteins, Curr Opin Struct Biol. 2014; 26C:16-23 and Saranya Chandrudu, et al., Chemical Methods for Peptide and Protein Production, Molecules, 2013, 18, 4373-4388, each of which is incorporated herein by reference in its entirety. There are two main strategies for peptide synthesis i.e. liquid-phase peptide synthesis and solid-phase peptide synthesis (SPPS) which is now most commonly used for peptide synthesis. Instead of C-terminal protection with a chemical group, the C-terminus of the first amino acid is coupled to an activated solid support, such as polystyrene or polyacrylamide. This type of approach has a two-fold function: the resin acts as the C-terminal protecting group and provides a rapid method to separate the growing peptide product from the different reaction mixtures during synthesis. As with many different biological manufacturing processes, peptide synthesizers have been developed for automation and high-throughput peptide production. SPPS allows the synthesis of natural peptides which are difficult to express in bacteria, the incorporation of unnatural amino acids, peptide/protein backbone modification, and the synthesis of D-proteins, which consist of D-amino acids. Very long peptide can be accessed by using native chemical ligation to couple two peptides together with quantitative yields.

[0099] Peptide analogs: As used herein, unless indicated otherwise or contradictory in context, the term “peptide analogs” refers to polypeptide variants which differ by one or more amino acid alterations, e.g., substitutions, additions or deletions of amino acid residues that still maintain one or more of the properties of the parent or starting peptide.

[0100] Peptide variants: As used herein, unless indicated otherwise or contradictory in context, the term “peptide variants” refers to a peptide which has a certain identity with a native or reference compound sequence. In one example, the peptide variant refers to any post-administration, application, injection modified peptide. Such post-administration, application, injection modifications include, but are not limited to, phosphorylation, acetylation, glutamylation, tyrosination, palmitoylation, glycosylation, myristoylation, palmitoylation, isoprenylation, glypiation, lipoylation, phosphopantetheinylation, acylation, alkylation, amidation, arginylation, polyglutamylation, polyglycylation, butyrylation, gamma-carboxylation, glycosylation, polysialylation, malonylation, hydroxylation, iodination, nucleotide addition, oxidation, adenylylation, propionylation, pyroglutamate formation, S-glutathionylation, S-nitrosylation, succinylation, sulfation, glycation, biotinylation, pegylation, ISGylation, SUMOylation, ubiquitination, Neddylation, Pupylation, citrullination, deamidation, eliminylation, carbamylation, and racemization.

[0101] Peptido-mimetic: As used herein, unless indicated otherwise or contradictory in context, the term “peptido-mimetic” or “peptidomimetic” refers to a synthetic chemical compound which comprises amino acids but not only and that is able to mimic the biological action of a peptide, often because the mimetic has a basic structure that mimics the basic structure of the peptide and/or has the salient biological properties of that peptide. In one particular example, a peptidomimetic is a hybrid molecule containing both, at least one peptide, and at least one of a polysaccharide, a polynucleotide or a linear or branched, saturated or unsaturated, hydrocarbon chain.

[0102] Linear peptide: As used herein, unless indicated otherwise or contradictory in context, the term “linear peptide” means a peptide in which the C-terminal and the N-terminal amino acid residues do not covalently interact with each other and none of the C-terminal or the N-terminal amino acid residues covalently interacts with another amino acid residue of the peptide chain.

[0103] cyclic peptide: As used herein, unless indicated otherwise or contradictory in context, the term “cyclic peptide” means peptide in which the C-terminal and N-terminal amino acid residues do covalently interact with each other or the C-terminal and/or the N-terminal amino acid residues covalently interact with at least one other amino acid residue of the peptide chain so as to form a ring-like structure.

[0104] Amino acid: As used herein, unless indicated otherwise or contradictory in context, the term “amino acid” refers to naturally occurring and non-naturally occurring amino acids including amino acid analogs. Naturally occurring amino acids are those encoded by the genetic code, as well as those amino acids that are later modified, e.g., hydroxyproline, [gamma]-carboxyglutamate, and O-phosphoserine. Naturally encoded amino acids are the 20 common amino acids glycine (Gly, G), alanine (Ala, A), valine (Val, V), leucine (Leu, L), isoleucine (Ile, I), serine (Ser, S), threonine (Thr, T), phenylalanine (Phe, F), tyrosine (Tyr, Y), tryptophane (Trp, W), cysteine (Cys, C), methionine (Met, M), proline (Pro, P), aspartic acid (Asp, D), asparagine (Asn, N), glutamine (Gln, Q), glutamic acid (Glu, E), histidine (His, H), arginine (Arg, R) et lysine (Lys, K) and pyrrolysine and selenocysteine. Non-naturally occurring amino acids include, but are not limited to, the dextrogyre (D) isomers of the above-cited naturally-occurring amino acids. Amino acid analogs refers to compounds that have the same basic chemical structure as a naturally occurring amino acid i.e., an [alpha] carbon that is bound to a hydrogen, a carboxyl group, an amino group, and an R group (i.e. side chain), and which may be used in replacement thereof without substantially affecting the overall function of the peptide to which it belongs. Amino acid analogs (or non-naturally occurring amino acids) that may be suitable for implementing embodiments of the present invention include, but are not limited to, amino acids comprising a photoactivatable cross-linker, spin-labeled amino acids, fluorescent amino acids, metal binding amino acids, metal-containing amino acids, radioactive amino acids, amino acids with novel functional groups, amino acids that covalently or noncovalently interact with other molecules, photocaged and/or photoisomerizable amino acids, amino acids comprising biotin or a biotin analogue, glycosylated amino acids such as a sugar substituted serine, other carbohydrate modified amino acids, keto-containing amino acids, amino acids comprising polyethylene glycol or polyether, heavy atom substituted amino acids, chemically cleavable and/or photocleavable amino acids, amino acids with an elongated side chains as compared to natural amino acids, including but not limited to, polyethers or long chain hydrocarbons, including but not limited to, greater than about 5 or greater than about 10 carbons, carbon-linked sugar-containing amino acids, redox-active amino acids, amino thioacid containing amino acids, and amino acids comprising one or more toxic moiety. The term “AA^{I}” (AA roman numeral one) may be used in the description and refers to an amino acid which may be any amino acid as defined above in particular any naturally occurring and non-naturally occurring amino acids.

[0105] Amino acid side chain: As used herein, unless indicated otherwise or contradictory in context, the term “amino acid side chain” means the functional group of an amino acid that differentiates it from other amino acids. All amino acid structures have a carboxyl group, an amine group and a specific side chain.

[0106] AA^{II} (AA roman numeral two): As used herein, unless indicated otherwise or contradictory in context, the terms “polar amino acid” or “AA^{II}” means amino acids having a polar, non-charged group-containing side chain. Polar amino acids are protonated at physiological pH (about 7). Examples of polar amino acids include, but are not limited to, Cys (C), Asn (N), Gln (Q), Ser (S), Thr (T), or Tyr (Y).

[0107] AA^{III} (AA roman numeral three): As used herein, unless indicated otherwise or contradictory in context, the terms “acidic amino acid” or “AA^{III}” means amino acids having an acidic group-containing side chain. Acidic amino acid deprotonated forms predominate at physiological pH (about 7). Examples of acidic amino acids include, but are not limited to, Asn (N) and Glu (E).

[0108] AA^{IV} (AA roman numeral four): As used herein, unless indicated otherwise or contradictory in context, the terms “aliphatic amino acid” or “AA^{IV}” means amino acids having an aliphatic side chain. Examples of aliphatic amino acids include, but are not limited to, Ala (A), Leu (L), Ile (I), Gly (G), Val (V) and any analogs and derivatives thereof.

[0109] AA^{V} (AA roman numeral five): As used herein, unless indicated otherwise or contradictory in context, the terms “apolar amino acid” or “AA^{V}” means amino acids having an apolar side chain. Examples of apolar amino acids include, but are not limited to, Ala (A), Phe (F), Gly (G), Ile (I), Leu (L), Met (M), Pro (P), Val (V) or Trp (W).

[0110] AA^{VI} (AA roman numeral six): As used herein, unless indicated otherwise or contradictory in context, the term “aromatic amino acid” or “AA^{VI}” means amino acids having an aromatic group-containing side chain. Examples of aromatic amino acids include, but are not limited to, Trp (W), Tyr (Y) or Phe (F).

[0111] AA^{VII} (AA roman numeral seven): As used herein, unless indicated otherwise or contradictory in context, the term “basic amino acid” or “AA^{VII}” means amino acids having a basic group-containing side chain.

[0112] Basic amino acid protonated forms predominate at physiological pH (about 7). Examples of basic amino acids include, but are not limited to, Arg (R), His (H), or Lys (K).

[0113] AA^{VIII} (AA roman numeral eight): As used herein, unless indicated otherwise or contradictory in context, the term “AA^{VIII}” means Leu (L) or Ile (I) and any analogs and derivatives thereof.

[0114] AA^{IX} (AA roman numeral nine): As used herein, unless indicated otherwise or contradictory in context, the term “charged amino acid” or “AA^{IX}” means amino acids having either an acidic group-containing side chain or an basic group-containing side chain. Charged amino acid charged forms predominate at physiological pH (about 7). Examples of charged amino acids include, but are not limited to, Asn (N), Glu (E), His (H), Lys (K) or Arg (R).

[0115] AAⁿ: As used herein, unless indicated otherwise or contradictory in context, the term “AAⁿ”, in which n is a positive integer arbitrarily chosen to identify a specific position within the primary sequence of a peptide. For instance, AA¹³ means the amino acid of position 13. The terms “amino acid” and “AA” are interchangeably used in the present description.

[0116] N-terminal: As used herein, unless indicated otherwise or contradictory in context, the term “N-terminal” means the amine (—NH₂) function/group/moiety located at one (terminal) end of a protein or polypeptide. This functional group is the only amine group which is not engage in n amide peptide bond.

[0117] C-terminal: As used herein, unless indicated otherwise or contradictory in context, the term “C-terminal” means the carboxylate (—CO₂H) function/group/moiety located at one (terminal) end of a protein or polypeptide. This functional group is the only carboxylic acid group which is not engage in n amide peptide bond.

[0118] Naturally-occurring peptide: As used herein, unless indicated otherwise or contradictory in context, the terms “naturally-occurring peptide” or “natural peptide” means a peptide which may be found in nature without human direct intervention (except for its extraction and/or isolation).

[0119] Synthetic peptide: As used herein, unless indicated otherwise or contradictory in context, the terms “synthetic peptide” or “non-natural peptide” means a peptide which may not be found in nature without human direct intervention (except for its extraction and/or isolation). For example, in certain embodiments, a synthetic peptide may have the amino acid sequence of a natural peptide except for at least one amino acid deletion or substitution relative to the natural sequence. In the case of a substitution, an amino acid from the natural sequence is replaced by another, different, naturally-occurring or non-naturally occurring amino acid. For example, in certain embodiments, a synthetic peptide may not possess a post-translational modification of the natural peptide such as the attachment of an acetate group, a phosphate group, a lipid, a carbohydrate, or the formation of a disulfide bridge.

[0120] Covalent interaction: As used herein, unless indicated otherwise or contradictory in context, the term “interact covalently”, “covalent interaction” or “covalent bond” are interchangeably used and means a chemical bond or interaction that involves the sharing of electron pairs between atoms. Examples of such interactions are σ-bonding and π-bonding.

[0121] Non-covalent interaction: As used herein, unless indicated otherwise or contradictory in context, the term “interact non-covalently”, “non-covalent interaction” or “non-covalent bond” are interchangeably used and means a chemical bond or interaction that does not involve the sharing of electron pairs between atoms but rather involves more dispersed variations of electromagnetic interactions between molecules or within a molecule. Non-covalent interactions can be generally classified into four categories, electrostatic interactions, π-interactions, van der Waals forces, and hydrophobic interactions.

[0122] Electrophile: As used herein, unless indicated otherwise or contradictory in context, the term “electrophile” means an organic molecule attracted to electrons that participates in a chemical reaction by accepting an electron pair in order to bond to a nucleophile. Most electrophiles are positively charged, have an atom that carries a partial positive charge, or have an atom that does not have an octet of electrons.

[0123] Nucleophile: As used herein, unless indicated otherwise or contradictory in context, the term “nucleophile” means an organic molecule that donates an electron pair to an electrophile to form a chemical bond in relation to a reaction. All molecules or ions with a free pair of electrons or at least one pi bond can act as nucleophiles.

[0124] Polysaccharide: As used herein, unless indicated otherwise or contradictory in context, the term “polysaccharide” means polymeric carbohydrate molecules composed of long chains of monosaccharide units bound together by glycosidic linkages and which upon hydrolysis provide monosaccharides or oligosaccharides. They range in structure from linear to highly branched polymers.

[0125] Polynucleotide: As used herein, the term “polynucleotide” or “nucleic acid”, which are used interchangeably, refers to the phosphate ester polymeric form of ribonucleosides (“RNA molecules”) or deoxyribonucleosides (“DNA molecules”), or any phosphoester analogs thereof, such as phosphorothioates and thioesters, in either single stranded form, or a double-stranded helix. The term “nucleic acid” includes double-stranded DNA round, inter alia, in linear (e.g., restriction fragments) or circular DNA molecules. In particular, nucleic acids as used herein refer to nucleic acids such as RNAs encoding for agonist of growth factor receptors as defined herein.

[0126] Nucleoside: As used herein, the term “nucleoside” refers to a compound containing a sugar molecule (e.g., a pentose or ribose) or derivative thereof in combination with an organic base (e.g., a purine or pyrimidine) or a derivative thereof (also referred to herein as “nucleobase”).

[0127] Nucleotide: As used herein, the term “nucleotide” refers to a nucleoside including a phosphate group.

[0128] Dendrimer: As used herein, unless indicated otherwise or contradictory in context, the term “dendrimer” means any repetitively branched molecules. Examples of dendrimers are phosphorous dendrimers, polylysine dendrimers, polypropylenimine dendrimers and PAMAM dendrimers, such as the ones described, for instance, in Scientific World Journal. 2013; 2013:732340; Curr Opin Chem Biol. 1998; 2(6):733-42; J Pept Sci. 1999; 5(5):203-20; and J Pept Sci. 2008; 14(1):2-43, which may be used for implementing embodiments of the present invention, each of which being herein incorporated by reference in its entirety.

[0129] Synthetic molecule: As used herein, unless indicated otherwise or contradictory in context, the term “synthetic molecule” means a molecule which may not be found in nature without human direct intervention (except for its extraction and/or isolation).

[0130] Synthetic polymers: As used herein, unless indicated otherwise or contradictory in context, the term “synthetic polymer” refers to a macromolecule or polymer which may not be found in nature without human direct intervention (except for its extraction and/or isolation).

[0131] Biocompatible: As used herein, unless indicated otherwise or contradictory in context, the term “biocompatible” means compatible with living cells, tissues, organs or systems posing little to no risk of injury, toxicity or rejection by the immune system.

[0132] Biologically active: As used herein, unless indicated otherwise or contradictory in context, the term “biologically active” refers to a characteristic of any substance that has activity in a biological system and/or organism. For instance, a substance that, when administered to an organism, has a biological effect on that organism, is considered to be biologically active. In particular examples, a compound, substance or pharmaceutical composition of the present disclosure may be considered biologically active even if a portion of the compound, substance or pharmaceutical composition is biologically active or mimics an activity considered biologically relevant.

[0133] Stem cells: As used herein, unless indicated otherwise or contradictory in context, the term “stem cell” refers to the term as it is generally understood in the art. For example, in certain embodiments, stem cells, regardless of their source, are cells that are capable of dividing and renewing themselves for long periods, are at least to a degree unspecialized (undifferentiated), and can give rise to (differentiate into) specialized cell types (i.e., they are progenitor or precursor cells for a variety of different, specialized cell types).

[0134] Mesenchymal stem cells: As used herein, unless indicated otherwise or contradictory in context, the term “mesenchymal stem cells” generally means multipotent adult stromal cells that can differentiate into a variety of cell types, such as osteoblasts, chondrocytes, and adipocytes.

[0135] Stem cell-like: As used herein, unless indicated otherwise or contradictory in context, the term “Stem cell-like” refers to a cell which is not a stem cell by its origin but functions as a stem cell and presents similar characteristics such as, for example, the expression of stemness markers like Stro-1 and/or is multipotent thus has the ability to differentiate into various cell types.

[0136] Progenitor cells: As used herein, unless indicated otherwise or contradictory in context, the term “progenitor cells” generally means a biological cell that, like any stem cell, has a tendency to differentiate into a specific type of cell, but is already more specific than a stem cell and is pushed to differentiate into its “target” cell. Stem cells can generally replicate indefinitely, whereas progenitor cells can divide only a limited number of times.

[0137] Adult stem cells: As used herein, unless indicated otherwise or contradictory in context, the term “adult stem cells” means undifferentiated cells, found throughout the body after development, that multiply by cell division to replenish dying cells and regenerate damaged tissues. Also known as somatic stem cells, they can be found in juvenile as well as adult animals and human bodies.

[0138] Differentiation: As used herein, unless indicated otherwise or contradictory in context, the term “differentiation” refers to the process by which a less specialized cell becomes a more specialized cell type and involves a switch from one gene expression pattern to another.

[0139] Differentiated cells: As used herein, unless indicated otherwise or contradictory in context, the term “differentiated cells” generally means any cell of a specific lineage at the exception of cells containing stem cell specific markers.

[0140] Non-terminally differentiated: As used herein, unless indicated otherwise or contradictory in context, the term “non-terminally differentiated”, when used in relation to a cell, refers to a differentiated cell as defined herein which has not reached its final state of differentiation. For example, in certain embodiments, in the Osteoblast cell lineage, a non-terminally differentiated cell is any differentiated cell of the lineage at the exception of an osteocyte.

[0141] Terminally differentiated: As used herein, unless indicated otherwise or contradictory in context, the term “terminally differentiated”, when used in relation to a cell, refers to a differentiated cell as defined herein which has reached its final state of differentiation. For example, in certain embodiments, in the Osteoblast cell lineage, a terminally differentiated cell is an osteocyte.

[0142] Methods for obtaining stem cells: Methods for obtaining such stem cells and providing initial culture conditions, such as a liquid culture or semi-solid culture medium, are known in the art. The cells are initially expanded in vivo or in vitro, by contacting the source of the stem cells with a suitable reagent that expands or enriches such cells in the tissue source or in culture. Preferably, adult stem cells are isolated from a tissue source and then expanded or enriched in vitro by exposure to a suitable agent. Cells are obtained from an individual by any suitable method for obtaining a cell sample from an animal, including, but not limited, to, collection of bone marrow collection of a bodily fluid (e.g., blood), collection of umbilical cord blood, tissue punch, and tissue dissection, including particularly, but not limited to, any biopsies of skin, intestine, cornea, spinal cord, brain tissue, scalp, stomach, breast, lung (e.g., including lavage and bronchioschopy), fine needle aspirates of the bone marrow, amniotic fluid, placenta and yolk sac.

[0143] Osteogenesis: As used herein, unless indicated otherwise or contradictory in context, the term “osteogenesis” refers to the process by which bone is produced. An entity, molecule, compound, association, combination or composition may be said to be “osteogenic” when it has an effect on the development, growth, or repair of bone. This process involves the participation of stem cells.

[0144] Chondrogenesis: As used herein, unless indicated otherwise or contradictory in context, the term “chondrogenesis” refers to the process by which cartilage is produced. An entity, molecule, compound, association, combination or composition may be said to be “chondrogenic” when it has an effect on the development, growth, or repair of cartilage. This process involves the participation of stem cells.

[0145] Endothelialisation: As used herein, unless indicated otherwise or contradictory in context, the term “endothelialization” or “re-endothelialization” refers to the process that maintains or restores normal vascular homeostasis and regulates neointimal hyperplasia. In native tissue, the endothelium maintains vessel integrity with dynamic mechanisms that prevent thrombosis and intimal hyperplasia. The endothelial progenitor cells are an important component of the response to vascular injury, having the potential to accelerate vascular repair through rapid re-endothelialization. For example, drug-eluting stents are generally implanted during angioplasty into patients suffering from atherosclerosis and resulting in stenosis or restenosis. In drug-eluting stents, the drug is typically coated onto a metal alloy framework and is mainly employed to inhibit neointimal growth (due to proliferation of smooth muscle cells) which would cause restenosis. Because much of the neointimal hyperplasia seems to be caused by inflammation, immunosuppressive and antiproliferative drugs are conventionally used. Drugs such as sirolimus and paclitaxel are currently used. Re-endothelialization in drug-eluting stents is generally delayed which can increase the risk for late stent thrombosis which thus may also require the administration of antiplatelet drugs such as Clopidogrel and aspirin.

[0146] Vascularization/angiogenesis: As used herein, unless indicated otherwise or contradictory in context, the term “vascularization/angiogenesis” refers to a physiological process through which new blood vessels are produced from pre-existing vessels. This process involves the participation of stem cells.

[0147] Wound healing: As used herein, unless indicated otherwise or contradictory in context, the term “wound healing” refers to a process whereby the skin (or another organ-tissue) repairs itself after injury. This process involves the participation of stem cells.

[0148] Skin repair: As used herein, unless indicated otherwise or contradictory in context, the term “skin repair” means the reparation of the dermis through the participation of stem cells. These active cells produce collagenous fibers and ground substance. Blood vessels soon grow into the dermis, restoring circulation.

[0149] Neuron-regeneration: As used herein, unless indicated otherwise or contradictory in context, the term “neuron-regeneration” or “neuroregeneration” refers to the regrowth or repair of nervous tissues, cells or cell products involving the participation of stem cells. Such mechanisms may include generation of new neurons, glia, axons, myelin, or synapses.

[0150] Tissue closure: As used herein, unless indicated otherwise or contradictory in context, the term “tissue closure” refers to the closure of all tissue layers damaged e.g. in an injury or during surgery. For instance, during bone repair surgery, the different layers of tissues incised in order for the surgeon to reach the damaged bone part and repair it would all need to be closed for the overall healing process to occur.

[0151] Cell lineage: As used herein, unless indicated otherwise or contradictory in context, the term “cell lineage” refers to the developmental history of a particular cell from its primary state in the fertilized egg or embryo through to its fully differentiated state. The different steps and phases involved in the development of a cell produces many intermediate cells which may be referred to as progenitor or precursor cells in the present application and form an integral part of the cell lineage.

[0152] Osteoblast cell lineage: As used herein, unless indicated otherwise or contradictory in context, the term “osteoblast cell lineage” refers to bone cells at any stage of their development and thus include, but are not limited to, mesenchymal stem cells, osteoblasts, osteocytes or any precursors thereof.

[0153] Chondrocytic cell lineage: As used herein, unless indicated otherwise or contradictory in context, the term “chondrocytic cell lineage” refers to cartilage cells at any stage of their development and thus include, but are not limited to, mesenchymal stem cells,

[0154] Muscle cell lineage: As used herein, unless indicated otherwise or contradictory in context, the term “muscle cell lineage” refers to muscle cells at any stage of their development and thus include, but are not limited to, mesenchymal stem cells, myoblasts, myocytes or any precursors thereof.

[0155] Vascular cell lineage: As used herein, unless indicated otherwise or contradictory in context, the term “vascular cell lineage” refers to vascular cells at any stage of their development and thus include, but are not limited to, mesenchymal stem cells, angioblast, pericytes and endothelial cells or any precursors thereof.

[0156] Neuronal cell lineage: As used herein, unless indicated otherwise or contradictory in context, the term “neuron lineage” refers to brain cells at any stage of their development and thus include, but are not limited to, neural stem cells, neuroblast, neurocyte and neuroglial cells or any precursors thereof.

[0157] Retinal cell lineage: As used herein, unless indicated otherwise or contradictory in context, the term “retinal cell lineage” refers to eye retina cells at any stage of their development and thus include, but are not limited to, photoreceptor, bipolar cells, rod and cone cells or any precursors thereof.

[0158] Renal cell lineage: As used herein, unless indicated otherwise or contradictory in context, the term “renal cell lineage” refers to renal cells at any stage of their development and thus include, but are not limited to, mesenchymal stem cells, podocytes, or any precursors thereof.

[0159] Ligament and tendon cell lineage: As used herein, unless indicated otherwise or contradictory in context, the term “ligament and tendon cell lineage” or “UT cell lineage” refers to bone or cartilage cells at any stage of their development and thus include, but are not limited to, mesenchymal stem cells, fibroblasts, fibrocytes, or any precursors thereof.

[0160] Fibroblast lineage: As used herein, unless indicated otherwise or contradictory in context, the term “fibroblast lineage” refers to skin cells at any stage of their development and thus include, but are not limited to, mesenchymal stem cells, fibroblasts, keratinocytes, Merkel cells, melanocytes, Langerhans cells, and any precursor cells thereof.

[0161] Reproduction system lineage: As used herein, unless indicated otherwise or contradictory in context, the term “reproduction system lineage” refers to Sertoli cells, Leydig cell and Germ cell at any stage of their development, in particular, mesenchymal stem cells.

[0162] Blood cell lineages (myeloid lineage and lymphoid lineage): As used herein, unless indicated otherwise or contradictory in context, the term “blood cell lineages” refers to blood cells at any stage of their development from the myeloid or from the lymphoid lineage, and thus include, but are not limited to, hematopoietic stem cells (HSC), myeloid progenitors, lymphoid progenitors, mast cells, myeloblasts, monocytes, macrophages, neutrophils, basophils, eosinophils, erythrocytes, megakaryocytes, thrombocytes, dendritic cells, small lymphocytes, T-lymphocytes (T-cells), B-lymphocytes (B-cells), natural killer (NK)-cells, and any precursor cells thereof.

[0163] Adipocyte lineage: As used herein, unless indicated otherwise or contradictory in context, the term “adipocyte cell lineage” refers to adipocyte cells at any stage of their development and thus include, but are not limited to, mesenchymal stem cells, areolar connective cells, adipocytes, pre-adipocytes/lipoblasts, and any precursor cells thereof.

[0164] Lung cell Lineages: As used herein, unless indicated otherwise or contradictory in context, the term “lung cell Lineage” refers to lung cells at any stage of their development and thus include, but are not limited to, epithelial cells, erythrocytes, alveolar cells and any precursor cells thereof.

[0165] Ratio: As used herein, unless indicated otherwise or contradictory in context, the term “ratio”, when used in relation to cyclic GFR-binding compound with respect to the bioactive carrier in the pharmaceutical association or composition disclosed herein, refers to the (molar, weight or part as specified) ratio between the quantity of cyclic GFR-binding compound and the quantity of bioactive carrier. The ratio may be a molar ratio, a weight ratio or a part ratio and will be specified as needed on a case by case basis. Quantity units may conventionally be mole, millimole, gram, milligram or parts. For example, in certain embodiments, it is convenient to express the relative quantity between cyclic GFR-binding compounds and bioactive carriers using densities. It shall be understood that this ratio may be varied according to the cell type to be treated.

[0166] Density: As used herein, unless indicated otherwise or contradictory in context, the term “density”, when used in relation to cyclic GFR-binding compound with respect to the bioactive carrier in the pharmaceutical composition disclosed herein, refers to the quantity of cyclic GFR-binding compounds, expressed in e.g. mole, millimole, gram, or milligram, with respect to one standardised surface unit e.g. squared millimetre (mm²), squared micrometre (μm²), or squared nanometre (nm²)). For example, in certain embodiments, the ratio between a cyclic GFR-binding compound and a bioactive carrier in the pharmaceutical association or composition disclosed herein may be expressed in pmol per mm² or pmol/mm².

[0167] Recoding: As used herein, unless indicated otherwise or contradictory in context, the term “recoding”, when used in relation to a cell (in particular a mesenchymal stem cell or progenitor stem cell), refers to the action of contacting (in-vitro, ex-vivo or in-vivo) a stem cell to be treated with a suitable extracellular micro-environment (e.g. containing a peptide, variant or analog thereof, peptidomimetic, a biomaterial, a medical device, or a medical or cosmetic composition as defined herein) thus providing appropriate extracellular signals so that the cell may undergo efficient differentiation into a more specialised cell type.

[0168] Recoding therapy: As used herein, unless indicated otherwise or contradictory in context, the term “recoding therapy” refers to a therapy that promotes efficient stem cell differentiation in an aim to regenerate mammalian tissues.

[0169] Extracellular micro-environment: As used herein, unless indicated otherwise or contradictory in context, the term “extracellular micro-environment” refers to the environment surrounding (in functional proximity with) a specific stem cell which is characterized by biophysical, mechanical and biochemical properties specific for each tissue and is able to regulate cell behavior. Modification of the extracellular micro-environment of a specific mesenchymal stem cell using, for instance, a peptide, variant or analog thereof, peptidomimetic, a biomaterial, a medical device, or a medical or cosmetic composition as defined herein, allows for the efficient differentiation of this cell into a more specialised cell type.

[0170] Physiologically functional cell: As used herein, unless indicated otherwise or contradictory in context, the term “physiologically functional cell” refers to a cell which is able to perform normally all of the cell functions associated with a particular cell type and necessary for the normal physiology of a cell. These functions include all of the intracellular molecular mechanisms but also all of the activities necessary for a normal communication between the cell and its microenvironment. One method which may be used to verify if a cell is physiologically functional is the grafting of the cell, after the introduction of fluorescent markers, in other mammalian model organisms such as mouse models. The cell is grafted in the tissue corresponding to its cell type. The cell characteristics and normal functions are monitored after a period of time with various methods such as in vivo microscopy or histological staining. The term “functional” when used in relation to a molecule, compound or substance refers to a biological molecule in a form in which it exhibits a property and/or activity by which it is characterized.

[0171] Shorter period of time: As used herein, unless indicated otherwise or contradictory in context, the term “shorter period of time”, when used in relation to differentiation or recoding duration, means substantially shorter to provide a substantial benefit for the treated patient in comparison with existing treatments. In certain embodiments, a shorter period of time includes at least 1.5-fold, at least 2-fold, at least 2.5-fold, at least 3-fold, at least 3.5-fold, at least 4-fold, at least 4.5-fold, at least 5-fold, at least 6-fold, at least 7-fold, at least 8-fold, at least 9-fold or at least 10-fold reduction with respect to an existing treatment.

[0172] Exogenous: As used herein, unless indicated otherwise or contradictory in context, the term “exogenous” refers to a substance coming from outside a living system such as a cell, an organ, or an individual organism. For example, in certain embodiments, exogenous factors in medicine include pathogens and therapeutics. DNA introduced into a cell via transfection or viral infection may be considered as an exogenous factor. Carcinogens are also commonly referred to as exogenous factors.

[0173] Endogenous: As used herein, unless indicated otherwise or contradictory in context, the term “endogenous” refers to substances that originate from within an organism, tissue, or cell.

[0174] Intracellular: As used herein, unless indicated otherwise or contradictory in context, the term “intracellular” generally means “inside the cell”. In vertebrates, such as animals, the cell membrane is the barrier between the inside of the cell and the outside of the cell (the extracellular milieu). Thus, treatments and therapies in which at least one substance, compound, pharmaceutical association, combination or composition penetrates the cell wall of a cell to be treated in order to produce/deliver its (effective) biological effect are considered as intracellular treatments and therapies.

[0175] Extracellular: As used herein, unless indicated otherwise or contradictory in context, the term “extracellular” means “outside the cell”. In vertebrates, such as animals, the cell membrane is the barrier between the inside of the cell (the intracellular milieu) and the outside of the cell. Thus, treatments and therapies in which no substance, compound, pharmaceutical association, combination or composition requires penetration of the cell membrane in order to produce/deliver its (effective) biological effect (e.g. by interacting with trans-membrane receptors) are considered as extracellular treatments and therapies. In other words, a therapy using a plurality of substances in order to provide the desired biological effect wherein one or more of these substances require the entry into the intracellular compartment to provide (or deliver) its biological effect is not considered as an extracellular therapy in the sense of the present disclosure.

[0176] In vitro: As used herein, unless indicated otherwise or contradictory in context, the term “in vitro” refers to events that occur in an artificial environment, e.g., in a test tube or reaction vessel, in cell culture, in a Petri dish, etc., rather than within an organism (e.g., animal, plant, or microbe).

[0177] In vivo: As used herein, unless indicated otherwise or contradictory in context, the term “in vivo” refers to events that occur within an organism (e.g., animal, plant, or microbe or cell or tissue thereof).

[0178] Ex vivo: As used herein, unless indicated otherwise or contradictory in context, the term “ex vivo” refers to events that occur in an external environment on tissues sourced from an organism (e.g., animal, plant, or microbe) in an attempt to replicate natural living conditions outside such an organism.

[0179] Patient/subject: As used herein, unless indicated otherwise or contradictory in context, the term “patient” or “subject”, which are used interchangeably, refers to any organism to which a composition in accordance with the invention may be administered, e.g., for experimental, diagnostic, prophylactic, and/or therapeutic purposes. Typical subjects include animals (e.g., mammals such as mice, rats, rabbits, non-human primates, and humans) and/or plants. As used herein, patients/subjects include those individuals who may seek or be in need of treatment, requires treatment, is receiving treatment, will receive treatment, or a subject who is under care by a trained professional for a particular disease or condition.

[0180] Purified: As used herein, unless indicated otherwise or contradictory in context, the term “purify,” “purified,” “purification” means to make substantially pure or clear from unwanted components, material defilement, admixture or imperfection.

[0181] Targeted Cells: As used herein, unless indicated otherwise or contradictory in context, the term “targeted cells” refers to any one or more cells of interest. The cells may be found in vitro, in vivo, in situ or in the tissue or organ of an organism. The organism may be an animal, preferably a mammal, more preferably a human and most preferably a patient.

[0182] Molecule length: As used herein, unless indicated otherwise or contradictory in context, the term molecule or peptide “length” or “size” means the longest 2D or 3D distance which may possibly be measured within the molecule. For cyclic molecules, “length” or “size” means the longest measurable distance across the cyclic structure. Throughout the present disclosure, when a molecule size or length is given (in general using the nanometre, nm, unit), the following procedures were used to calculate them:
[0183] The so-called «2D» procedure: a 2D chemical structure was drawn in e.g. the Chem Draw® Software. Then, size measurement was carried out via the available ChemDraw length measurement tools. The length value given herein corresponds to the longest 2D length of the molecule using the default settings 2D bond sizes and angles of the software.
[0184] Alternatively, the so-called “3D” procedure may be followed:
[0185] (1) Drawing of the chemical structure of the molecule using suitable softwares (such as ChemDraw).
[0186] (2) Creating a 3D structure model of the molecule hereby drawn using SCWRL (Protein Sci. 2003; 12(9):2001-14) or MODELLER (Current Protocols in Bioinformatics. 15:5.6:5.6.1-5.6.30), each of which is hereby incorporated by reference in its entirety.
[0187] (3) Incubating the obtained 3D structure model in a box simulation containing water for few milliseconds using AMBER (J. Computat. Chem. 2005; 26, 1668-1688), which is hereby incorporated by reference in its entirety.
[0188] (4) Measuring the size of the molecule hereby obtained using softwares such as Pymol® using available Pymol length measurement tools (DeLano Scientific LLC, http://www.pymol.org).

### II. Growth Factor Receptor-Binding Compounds

[0189] In one aspect, the present disclosure provides for cyclic growth factor receptor-binding compounds having the ability to induce stem cell differentiation and promote tissue regeneration.

[0190] As used herein, the term “cyclic growth factor receptor-binding compound”, “cyclic GFR-binding compound” or “cyclic GFRBC” refers to an exogenous or endogenous cyclic compound, molecule or substance having an (binding) affinity for a growth factor receptor as defined herein, and optionally comprising the ability to associate or combine with a bioactive carrier as defined herein.

[0191] There are many ways to test, measure and present the binding affinity of a given substance for a given receptor, but for the purpose of the present disclosure, and for the avoidance of any doubts, the (binding) affinity values of a given cyclic GFR-binding compound to a given GFR are provided using the method of fluorescence anisotropy. In this method, a cyclic GFR-binding compound is fluorescently labelled using technics well established in the art. Binding of the resulting labelled compound to a growth factor receptor results in a fluctuation of fluorescence anisotropy which is used to construct an affinity binding curve from which the cyclic GFR-binding compound binding affinity value is derived. Using this technique, binding affinity values are given in the form of dissociation constants Kd. In certain embodiments, cyclic GFR-binding compounds of the present disclosure have Kd values as measured by fluorescence anisotropy of more than 1 (one) picomolar (pM). In certain embodiments, cyclic GFR-binding compounds of the present disclosure have Kd values as measured by fluorescence anisotropy of more than 1 (one) nanomolar (nM). In certain embodiments, cyclic GFR-binding compounds of the present disclosure have Kd values as measured by fluorescence anisotropy of more than 10 (ten) nanomolar (nM). In certain embodiments, cyclic GFR-binding compounds of the present disclosure have Kd values as measured by fluorescence anisotropy of more than 100 (one hundred) nanomolar (nM). In certain embodiments, cyclic GFR-binding compounds of the present disclosure have Kd values as measured by fluorescence anisotropy of more than 1 (one) micromolar (μM). In certain embodiments, cyclic GFR-binding compounds of the present disclosure have Kd values as measured by fluorescence anisotropy of more than 10 (ten) micromolar (μM). In certain embodiments, cyclic GFR-binding compounds of the present disclosure have Kd values as measured by fluorescence anisotropy of more than 100 (one hundred) micromolar (μM).

[0192] A cyclic GFR-binding compound is said to possess the ability to associate or combine with a bioactive carrier if it comprises a functional chemical element, function or group allowing for the covalent or non-covalent assembly of the cyclic GFR-binding compound and the bioactive carrier. Such a functional chemical element, function or group, also referred to as a bioactive carrier-affinity-containing group or bioactive carrier-high-affinity-containing group, include, but is not limited to, a thiol-containing compound, a cysteine-containing compound, a cysteine, or a GTPGP or a WWFWG peptide fragment.

[0193] Growth factor receptor: As used herein, unless indicated otherwise or contradictory in context, the term “growth factor receptor” or “GFR” is a receptor which binds to growth factors which are naturally occurring substances capable of stimulating, for instance, cellular growth, proliferation, healing, and cellular differentiation. Suitable as growth factor receptors for implementing embodiments of the present invention include epidermal growth factor receptors (EGFR), fibroblast growth factor receptors (FGFR), vascular endothelial growth factor receptors (VEGFR), nerve growth factor receptors (NGFR), Insulin receptor family, Trk receptor family, Eph receptor family, AXL receptor family, LTK receptor family, TIE receptor family, ROR receptor family, DDR receptor family, RET receptor family, KLG receptor family, RYK receptor family, MuSK receptor family, hepatocyte growth factor receptors (HGFR), somatomedin or insulin-like growth factor receptors (SGFR), platelet-derived growth factor receptors (PDGFR), transforming growth factor beta (TGF-β) superfamily proteins such as AMH, ARTN, BMP10, BMP15, BMP2, BMP3, BMP4, BMP5, BMP6, BMP7, BMP8A, BMP8B, GDF1, GDF10, GDF11, GDF15, GDF2, GDF3, GDF3A, GDF5, GDF6, GDF7, GDF8, GDF9, GDNF, INHA, INHBA, INHBB, INHBC, INHBE, LEFTY1, LEFTY2, MSTN, NODAL, NRTN, PSPN, TGFB1, TGFB2 and TGFB3, and any combination thereof.

[0194] Growth factor: As used herein, unless indicated otherwise or contradictory in context, the term “growth factor” refers to any substance(s) having the ability to bind to a growth factor receptor and produce (a) biological effect(s) or reaction(s), such as promoting the growth of tissues, by activating such a growth factor receptor. Exemplary growth factors include, but are not limited to, platelet-derived growth factor (PDGF), platelet-derived angiogenesis factor (PDAF), vascular endotheial growth factor (VEGF), platelet-derived epidermal growth factor (PDEGF), transforming growth factor beta (TGF-β), transforming growth factor A (TGF-A), epidermal growth factor (EGF), fibroblast growth factor (FGF), acidic fibroblast growth factor (FGF-A), basic fibroblast growth factor (FGF-B), insulin-like growth factors 1 and 2 (IGF-I and IGF-2), keratinocyte growth factor (KGF), tumor necrosis factor (TNF), fibroblast growth factor (FGF) and interleukin-1 (IL-I), Keratinocyte Growth Factor-2 (KGF-2), and combinations thereof.

[0195] Activation of growth factor receptors: As used herein, unless indicated otherwise or contradictory in context, the term “activating” or “activation of”, when used in relation to a growth factor receptor, refers to the phosphorylation of the tyrosine kinase domain of such a growth factor receptor.

[0196] In one aspect, the present disclosure provides a cyclic GFR-binding compound having mesenchymal stem cell and progenitor cell commitment and/or differentiation and/or maturation capacities resulting in tissue regeneration.

[0197] In one example, said cyclic GFR-binding compound has a molecular weight of less than 5,000 Daltons. In one example, said cyclic GFR-binding compound has a molecular weight of less than 4,000 Daltons. In one particular example, said cyclic GFR-binding compound has a molecular weight comprised between 1,500 and 5,000 Daltons. In one particular example, said cyclic GFR-binding compound has a molecular weight comprised between 1,500 and 4,000 Daltons.

[0198] In one example, said cyclic GFR-binding compound has a molecular weight of less than 7,000 Daltons. In one example, said cyclic GFR-binding compound has a molecular weight of less than 6,000 Daltons. In one example, said cyclic GFR-binding compound has a molecular weight of less than 5,000 Daltons. In one particular example, said cyclic GFR-binding compound has a molecular weight comprised between 1,500 and 7,000 Daltons. In one particular example, said cyclic GFR-binding compound has a molecular weight comprised between 1,500 and 6,000 Daltons. In one particular example, said cyclic GFR-binding compound has a molecular weight comprised between 2,000 and 7,000 Daltons. In one particular example, said cyclic GFR-binding compound has a molecular weight comprised between 3,000 and 7,000 Daltons. In one particular example, said cyclic GFR-binding compound has a molecular weight comprised between 4,000 and 7,000 Daltons. In one particular example, said cyclic GFR-binding compound has a molecular weight comprised between 2,000 and 6,000 Daltons. In one particular example, said cyclic GFR-binding compound has a molecular weight comprised between 3,000 and 6,000 Daltons. In one particular example, said cyclic GFR-binding compound has a molecular weight comprised between 4,000 and 6,000 Daltons.

[0199] In one particular example, the growth factor receptor involved in the interaction with said cyclic GFR-binding compound is an epidermal growth factor receptor. In one particular example, the growth factor receptor involved in the interaction with said cyclic GFR-binding compound is a fibroblast growth factor receptor. In one particular example, the growth factor receptor involved in the interaction with said cyclic GFR-binding compound is a vascular endothelial growth factor receptor. In one particular example, the growth factor receptor involved in the interaction with said cyclic GFR-binding compound is a nerve growth factor receptor. In one particular example, the growth factor receptor involved in the interaction with said cyclic GFR-binding compound is a hepatocyte growth factor receptor. In one particular example, the growth factor receptor involved in the interaction with said cyclic GFR-binding compound is a somatomedin or insulin-like growth factor receptor. In one particular example, the growth factor receptor involved in the interaction with said cyclic GFR-binding compound is a platelet-derived growth factor receptor. In one particular example, the growth factor receptor involved in the interaction with said cyclic GFR-binding compound is a protein from the transforming growth factor beta (TGF-β) superfamily.

[0200] In one particular example, the growth factor receptor(s) involved in the interaction with said cyclic GFR-binding compound is (are) preferably selected from epidermal growth factor receptors, fibroblast growth factor receptors, vascular endothelial growth factor receptors, nerve growth factor receptors, hepatocyte growth factor receptors, somatomedin or insulin-like growth factor receptors, platelet-derived growth factor receptors, and transforming growth factor beta (TGF-β) superfamily proteins.

[0201] In one particular example, said cyclic GFR-binding compound is a peptide, or a variant or analog thereof, having growth factor receptor-binding capability or capabilities, with (exclusively consisting of, or constituted of) between 15-60 amino acids, in particular between 15-55 amino acids, more particularly between 19-60 amino acids, and even more particularly between 19-55 amino acids, or between 15-35 amino acids, in particular between 15-30 amino acids, more particularly between 19-35 amino acids, and even more particularly between 19-30 amino acids.

[0202] In one particular example, said cyclic GFR-binding compound is a cyclic peptidomimetic as defined herein, having growth factor receptor-binding capability or capabilities, comprising (consecutively or non consecutively) between 15-60 amino acids, in particular between 15-55 amino acids, more particularly between 19-60 amino acids, and even more particularly between 19-55 amino acids, or between 15-60 amino acids, in particular between 15-55 amino acids, more particularly between 19-60 amino acids, and even more particularly between 19-55 amino acids, or between 15-35 amino acids, in particular between 15-30 amino acids, more particularly between 19-35 amino acids, and even more particularly between 19-30 amino acids; wherein said cyclic GFR-binding compound has a molecular weight comprised between 1,500 and 7,000 Daltons.

[0203] In one particular example, said cyclic GFR-binding compound is a cyclic peptidomimetic as defined herein, having growth factor receptor-binding capability or capabilities, comprising (consecutively or non consecutively) between 15-60 amino acids, in particular between 15-55 amino acids, more particularly between 19-60 amino acids, and even more particularly between 19-55 amino acids, or between 15-35 amino acids, in particular between 15-30 amino acids, more particularly between 19-35 amino acids, and even more particularly between 19-30 amino acids; and containing at least one peptide portion or fragment with between 5-20 amino acids (in particular containing two peptide portions or fragments, each of which with between 5-20 amino acids); wherein said cyclic GFR-binding compound has a molecular weight comprised between 1,500 and 7,000 Daltons.

[0204] In one aspect, the present disclosure provides a cyclic GFR-binding compound, wherein said cyclic GFR-binding compound is a cyclic peptide, a variant or analog thereof, or a cyclic peptidomimetic as defined herein, having growth factor receptor-binding capability or capabilities, having a molecular weight of less than 5,000 Da, in particular of between 1,500 and 7,000 Da.

[0205] In one aspect, the present disclosure provides a cyclic GFR-binding compound, wherein said cyclic GFR-binding compound is a cyclic peptide, a variant or analog thereof, or a cyclic peptidomimetic as defined herein, having growth factor receptor-binding capability or capabilities, with between 15-60 (in particular between 15-55, more particularly between 19-60, and even more particularly between 19-55) amino acids, or between 15-35 (in particular between 15-30, more particularly between 19-35, and even more particularly between 19-30) amino acids, comprising a peptide with four amino acids (PEP1) and a peptide with five amino acids (PEP2).

[0206] In one aspect, the present disclosure provides a cyclic GFR-binding compound, wherein said cyclic GFR-binding compound is a cyclic peptide, a variant or analog thereof, or a cyclic peptidomimetic as defined herein, with between 15-60 (in particular between 15-55, more particularly between 19-60, and even more particularly between 19-55) amino acids, or between 15-35 (in particular between 15-30, more particularly between 19-35, and even more particularly between 19-30) amino acids, comprising a peptide with eight amino acids (PEP12) and a peptide with five amino acids (PEP2).

[0207] In one aspect, the present disclosure provides a cyclic GFR-binding compound, wherein said cyclic GFR-binding compound is a cyclic peptide, a variant or analog thereof, or a cyclic peptidomimetic as defined herein, with between 15-60 (in particular between 15-55, more particularly between 19-60, and even more particularly between 19-55) amino acids, or between 15-35 (in particular between 15-30, more particularly between 19-35, and even more particularly between 19-30) amino acids, comprising a peptide with four amino acids (PEP1) and a peptide with five amino acids (PEP2); wherein said cyclic GFR-binding compound further comprises a peptide with three amino acids (PEP3) and a peptide with three amino acids (PEP4).

[0208] In one aspect, the present disclosure provides a cyclic GFR-binding compound, wherein said cyclic GFR-binding compound is a cyclic peptide, a variant or analog thereof, or a cyclic peptidomimetic as defined herein, with between 15-60 (in particular between 15-55, more particularly between 19-60, and even more particularly between 19-55) amino acids, or between 15-35 (in particular between 15-30, more particularly between 19-35, and even more particularly between 19-30) amino acids, comprising a peptide with eight amino acids (PEP12) and a peptide with five amino acids (PEP2); wherein said cyclic GFR-binding compound further comprises a peptide with three amino acids (PEP3) and a peptide with three amino acids (PEP4).

[0209] In one aspect, the present disclosure provides a cyclic GFR-binding compound, wherein said cyclic GFR-binding compound is a cyclic peptide, a variant or analog thereof, or a cyclic peptidomimetic as defined herein, with between 15-60 (in particular between 15-55, more particularly between 19-60, and even more particularly between 19-55) amino acids, or between 15-35 (in particular between 15-30, more particularly between 19-35, and even more particularly between 19-30) amino acids, comprising a peptide with four amino acids (PEP1) and a peptide with five amino acids (PEP2); wherein said cyclic GFR-binding compound further comprises a peptide with five amino acids (PEP5) and a peptide with between five and seven amino acids (PEP6).

[0210] In one aspect, the present disclosure provides a cyclic GFR-binding compound, wherein said cyclic GFR-binding compound is a cyclic peptide, a variant or analog thereof, or a cyclic peptidomimetic as defined herein, with between 15-60 (in particular between 15-55, more particularly between 19-60, and even more particularly between 19-55) amino acids, or between 15-35 (in particular between 15-30, more particularly between 19-35, and even more particularly between 19-30) amino acids, comprising a peptide with eight amino acids (PEP12) and a peptide with five amino acids (PEP2); wherein said cyclic GFR-binding compound further comprises a peptide with five amino acids (PEP5) and a peptide with between five and seven amino acids (PEP6).

[0211] In one aspect, the present disclosure provides a cyclic GFR-binding compound, wherein said cyclic GFR-binding compound is a cyclic peptide, a variant or analog thereof, or a cyclic peptidomimetic as defined herein, with between 15-60 (in particular between 15-55, more particularly between 19-60, and even more particularly between 19-55) amino acids, or between 15-35 (in particular between 15-30, more particularly between 19-35, and even more particularly between 19-30) amino acids, comprising a peptide with four amino acids (PEP1) and a peptide with five amino acids (PEP2); wherein said cyclic GFR-binding compound further comprises a peptide with between six and twelve amino acids (PEP9) and a peptide with between six and eleven amino acids (PEP10).

[0212] In one aspect, the present disclosure provides a cyclic GFR-binding compound, wherein said cyclic GFR-binding compound is a cyclic peptide, a variant or analog thereof, or a cyclic peptidomimetic as defined herein, with between 15-60 (in particular between 15-55, more particularly between 19-60, and even more particularly between 19-55) amino acids, or between 15-35 (in particular between 15-30, more particularly between 19-35, and even more particularly between 19-30) amino acids, comprising a peptide with eight amino acids (PEP12) and a peptide with five amino acids (PEP2); wherein said cyclic GFR-binding compound further comprises a peptide with between six and twelve amino acids (PEP9) and a peptide with between six and eleven amino acids (PEP10).

[0213] In one aspect, the present disclosure provides a cyclic GFR-binding compound, wherein said cyclic GFR-binding compound is a cyclic peptide, a variant or analog thereof, or a cyclic peptidomimetic as defined herein, with between 15-60 (in particular between 15-55, more particularly between 19-60, and even more particularly between 19-55) amino acids, or between 15-35 (in particular between 15-30, more particularly between 19-35, and even more particularly between 19-30) amino acids, comprising a peptide with four amino acids (PEP1) and a peptide with five amino acids (PEP2); wherein said cyclic GFR-binding compound further comprises a peptide with three amino acids (PEP3) and a peptide with between five and seven amino acids (PEP6).

[0214] In one aspect, the present disclosure provides a cyclic GFR-binding compound, wherein said cyclic GFR-binding compound is a cyclic peptide, a variant or analog thereof, or a cyclic peptidomimetic as defined herein, with between 15-60 (in particular between 15-55, more particularly between 19-60, and even more particularly between 19-55) amino acids, or between 15-35 (in particular between 15-30, more particularly between 19-35, and even more particularly between 19-30) amino acids, comprising a peptide with eight amino acids (PEP12) and a peptide with five amino acids (PEP2); wherein said cyclic GFR-binding compound further comprises a peptide with three amino acids (PEP3) and a peptide with between five and seven amino acids (PEP6).

[0215] In one aspect, the present disclosure provides a cyclic GFR-binding compound, wherein said cyclic GFR-binding compound is a cyclic peptide, a variant or analog thereof, or a cyclic peptidomimetic as defined herein, with between 15-60 (in particular between 15-55, more particularly between 19-60, and even more particularly between 19-55) amino acids, or between 15-35 (in particular between 15-30, more particularly between 19-35, and even more particularly between 19-30) amino acids, comprising a peptide with four amino acids (PEP1) and a peptide with five amino acids (PEP2); wherein said cyclic GFR-binding compound further comprises a peptide with three amino acids (PEP3) and a peptide with between six and eleven amino acids (PEP10).

[0216] In one aspect, the present disclosure provides a cyclic GFR-binding compound, wherein said cyclic GFR-binding compound is a cyclic peptide, a variant or analog thereof, or a cyclic peptidomimetic as defined herein, with between 15-60 (in particular between 15-55, more particularly between 19-60, and even more particularly between 19-55) amino acids, or between 15-35 (in particular between 15-30, more particularly between 19-35, and even more particularly between 19-30) amino acids, comprising a peptide with eight amino acids (PEP12) and a peptide with five amino acids (PEP2); wherein said cyclic GFR-binding compound further comprises a peptide with three amino acids (PEP3) and a peptide with between six and eleven amino acids (PEP10).

[0217] In one aspect, the present disclosure provides a cyclic GFR-binding compound, wherein said cyclic GFR-binding compound is a cyclic peptide, a variant or analog thereof, or a cyclic peptidomimetic as defined herein, with between 15-60 (in particular between 15-55, more particularly between 19-60, and even more particularly between 19-55) amino acids, or between 15-35 (in particular between 15-30, more particularly between 19-35, and even more particularly between 19-30) amino acids, comprising a peptide with four amino acids (PEP1) and a peptide with five amino acids (PEP2); wherein said cyclic GFR-binding compound further comprises a peptide with five amino acids (PEP5) and a peptide with three amino acids (PEP4).

[0218] In one aspect, the present disclosure provides a cyclic GFR-binding compound, wherein said cyclic GFR-binding compound is a cyclic peptide, a variant or analog thereof, or a cyclic peptidomimetic as defined herein, with between 15-60 (in particular between 15-55, more particularly between 19-60, and even more particularly between 19-55) amino acids, or between 15-35 (in particular between 15-30, more particularly between 19-35, and even more particularly between 19-30) amino acids, comprising a peptide with four amino acids (PEP12) and a peptide with five amino acids (PEP2); wherein said cyclic GFR-binding compound further comprises a peptide with five amino acids (PEP5) and a peptide with three amino acids (PEP4).

[0219] In one aspect, the present disclosure provides a cyclic GFR-binding compound, wherein said cyclic GFR-binding compound is a cyclic peptide, a variant or analog thereof, or a cyclic peptidomimetic as defined herein, with between 15-60 (in particular between 15-55, more particularly between 19-60, and even more particularly between 19-55) amino acids, or between 15-35 (in particular between 15-30, more particularly between 19-35, and even more particularly between 19-30) amino acids, comprising a peptide with four amino acids (PEP1) and a peptide with five amino acids (PEP2); wherein said cyclic GFR-binding compound further comprises a peptide with between six and twelve amino acids (PEP9) and a peptide with three amino acids (PEP4).

[0220] In one aspect, the present disclosure provides a cyclic GFR-binding compound, wherein said cyclic GFR-binding compound is a cyclic peptide, a variant or analog thereof, or a cyclic peptidomimetic as defined herein, with between 15-60 (in particular between 15-55, more particularly between 19-60, and even more particularly between 19-55) amino acids, or between 15-35 (in particular between 15-30, more particularly between 19-35, and even more particularly between 19-30) amino acids, comprising a peptide with four amino acids (PEP12) and a peptide with five amino acids (PEP2); wherein said cyclic GFR-binding compound further comprises a peptide with between six and twelve amino acids (PEP9) and a peptide with three amino acids (PEP4).

[0221] In one aspect, the present disclosure provides a cyclic GFR-binding compound, wherein said cyclic GFR-binding compound is a cyclic peptide, a variant or analog thereof, or a cyclic peptidomimetic as defined herein, with between 15-60 (in particular between 15-55, more particularly between 19-60, and even more particularly between 19-55) amino acids, or between 15-35 (in particular between 15-30, more particularly between 19-35, and even more particularly between 19-30) amino acids, comprising a peptide with four amino acids (PEP1) and a peptide with five amino acids (PEP2); wherein said cyclic GFR-binding compound further comprises a peptide with five amino acids (PEP5) and a peptide with between six and eleven amino acids (PEP10).

[0222] In one aspect, the present disclosure provides a cyclic GFR-binding compound, wherein said cyclic GFR-binding compound is a cyclic peptide, a variant or analog thereof, or a cyclic peptidomimetic as defined herein, with between 15-60 (in particular between 15-55, more particularly between 19-60, and even more particularly between 19-55) amino acids, or between 15-35 (in particular between 15-30, more particularly between 19-35, and even more particularly between 19-30) amino acids, comprising a peptide with four amino acids (PEP12) and a peptide with five amino acids (PEP2); wherein said cyclic GFR-binding compound further comprises a peptide with five amino acids (PEP5) and a peptide with between six and eleven amino acids (PEP10).

[0223] In one aspect, the present disclosure provides a cyclic GFR-binding compound, wherein said cyclic GFR-binding compound is a cyclic peptide, a variant or analog thereof, or a cyclic peptidomimetic as defined herein, with between 15-60 (in particular between 15-55, more particularly between 19-60, and even more particularly between 19-55) amino acids, or between 15-35 (in particular between 15-30, more particularly between 19-35, and even more particularly between 19-30) amino acids, comprising a peptide with four amino acids (PEP1) and a peptide with five amino acids (PEP2); wherein said cyclic GFR-binding compound further comprises a peptide with between six and twelve amino acids (PEP9) and a peptide with between five and seven amino acids (PEP6).

[0224] In one aspect, the present disclosure provides a cyclic GFR-binding compound, wherein said cyclic GFR-binding compound is a cyclic peptide, a variant or analog thereof, or a cyclic peptidomimetic as defined herein, with between 15-60 (in particular between 15-55, more particularly between 19-60, and even more particularly between 19-55) amino acids, or between 15-35 (in particular between 15-30, more particularly between 19-35, and even more particularly between 19-30) amino acids, comprising a peptide with four amino acids (PEP12) and a peptide with five amino acids (PEP2); wherein said cyclic GFR-binding compound further comprises a peptide with between six and twelve amino acids (PEP9) and a peptide with between five and seven amino acids (PEP6).

[0225] In one aspect, the present disclosure provides a cyclic GFR-binding compound, wherein said cyclic GFR-binding compound is a cyclic peptide, a variant or analog thereof, or a cyclic peptidomimetic as defined herein, with between 15-60 (in particular between 15-55, more particularly between 19-60, and even more particularly between 19-55) amino acids, or between 15-35 (in particular between 15-30, more particularly between 19-35, and even more particularly between 19-30) amino acids, comprising a peptide with four amino acids (PEP1) and a peptide with five amino acids (PEP2); wherein said cyclic GFR-binding compound further comprises a peptide with three amino acids (PEP3), an amino acid or a peptide with between two and seven amino acids (PEP7), and a peptide with three amino acids (PEP4).

[0226] In one aspect, the present disclosure provides a cyclic GFR-binding compound, wherein said cyclic GFR-binding compound is a cyclic peptide, a variant or analog thereof, or a cyclic peptidomimetic as defined herein, with between 15-60 (in particular between 15-55, more particularly between 19-60, and even more particularly between 19-55) amino acids, or between 15-35 (in particular between 15-30, more particularly between 19-35, and even more particularly between 19-30) amino acids, comprising a peptide with four amino acids (PEP12) and a peptide with five amino acids (PEP2); wherein said cyclic GFR-binding compound further comprises a peptide with three amino acids (PEP3), an amino acid or a peptide with between two and seven amino acids (PEP7), and a peptide with three amino acids (PEP4).

[0227] In one aspect, the present disclosure provides a cyclic GFR-binding compound, wherein said cyclic GFR-binding compound is a cyclic peptide, a variant or analog thereof, or a cyclic peptidomimetic as defined herein, with between 15-60 (in particular between 15-55, more particularly between 19-60, and even more particularly between 19-55) amino acids, or between 15-35 (in particular between 15-30, more particularly between 19-35, and even more particularly between 19-30) amino acids, comprising a peptide with four amino acids (PEP1) and a peptide with five amino acids (PEP2); wherein said cyclic GFR-binding compound further comprises a peptide with three amino acids (PEP3), an amino acid or a peptide with between two and seven amino acids (PEP7), and a peptide with between five and seven amino acids (PEP6).

[0228] In one aspect, the present disclosure provides a cyclic GFR-binding compound, wherein said cyclic GFR-binding compound is a cyclic peptide, a variant or analog thereof, or a cyclic peptidomimetic as defined herein, with between 15-60 (in particular between 15-55, more particularly between 19-60, and even more particularly between 19-55) amino acids, or between 15-35 (in particular between 15-30, more particularly between 19-35, and even more particularly between 19-30) amino acids, comprising a peptide with four amino acids (PEP12) and a peptide with five amino acids (PEP2); wherein said cyclic GFR-binding compound further comprises a peptide with three amino acids (PEP3), an amino acid or a peptide with between two and seven amino acids (PEP7), and a peptide with between five and seven amino acids (PEP6).

[0229] In one aspect, the present disclosure provides a cyclic GFR-binding compound, wherein said cyclic GFR-binding compound is a cyclic peptide, a variant or analog thereof, or a cyclic peptidomimetic as defined herein, with between 15-60 (in particular between 15-55, more particularly between 19-60, and even more particularly between 19-55) amino acids, or between 15-35 (in particular between 15-30, more particularly between 19-35, and even more particularly between 19-30) amino acids, comprising a peptide with four amino acids (PEP1) and a peptide with five amino acids (PEP2); wherein said cyclic GFR-binding compound further comprises a peptide with three amino acids (PEP3), an amino acid or a peptide with between two and seven amino acids (PEP7), and a peptide with between six and eleven amino acids (PEP10).

[0230] In one aspect, the present disclosure provides a cyclic GFR-binding compound, wherein said cyclic GFR-binding compound is a cyclic peptide, a variant or analog thereof, or a cyclic peptidomimetic as defined herein, with between 15-60 (in particular between 15-55, more particularly between 19-60, and even more particularly between 19-55) amino acids, or between 15-35 (in particular between 15-30, more particularly between 19-35, and even more particularly between 19-30) amino acids, comprising a peptide with four amino acids (PEP12) and a peptide with five amino acids (PEP2); wherein said cyclic GFR-binding compound further comprises a peptide with three amino acids (PEP3), an amino acid or a peptide with between two and seven amino acids (PEP7), and a peptide with between six and eleven amino acids (PEP10).

[0231] In one aspect, the present disclosure provides a cyclic GFR-binding compound, wherein said cyclic GFR-binding compound is a cyclic peptide, a variant or analog thereof, or a cyclic peptidomimetic as defined herein, with between 15-60 (in particular between 15-55, more particularly between 19-60, and even more particularly between 19-55) amino acids, or between 15-35 (in particular between 15-30, more particularly between 19-35, and even more particularly between 19-30) amino acids, comprising a peptide with four amino acids (PEP1) and a peptide with five amino acids (PEP2); wherein said cyclic GFR-binding compound further comprises a peptide with three amino acids (PEP3), an amino acid or a peptide with between two and seven amino acids (PEP7), a peptide with three amino acids (PEP4), and an amino acid or a peptide with between two and six amino acids (PEP8).

[0232] In one aspect, the present disclosure provides a cyclic GFR-binding compound, wherein said cyclic GFR-binding compound is a cyclic peptide, a variant or analog thereof, or a cyclic peptidomimetic as defined herein, with between 15-60 (in particular between 15-55, more particularly between 19-60, and even more particularly between 19-55) amino acids, or between 15-35 (in particular between 15-30, more particularly between 19-35, and even more particularly between 19-30) amino acids, comprising a peptide with four amino acids (PEP12) and a peptide with five amino acids (PEP2); wherein said cyclic GFR-binding compound further comprises a peptide with three amino acids (PEP3), an amino acid or a peptide with between two and seven amino acids (PEP7), a peptide with three amino acids (PEP4), and an amino acid or a peptide with between two and six amino acids (PEP8).

[0233] In one aspect, the present disclosure provides a cyclic GFR-binding compound, wherein said cyclic GFR-binding compound is a cyclic peptide, a variant or analog thereof, or a cyclic peptidomimetic as defined herein, with between 15-60 (in particular between 15-55, more particularly between 19-60, and even more particularly between 19-55) amino acids, or between 15-35 (in particular between 15-30, more particularly between 19-35, and even more particularly between 19-30) amino acids, comprising a peptide with four amino acids (PEP1) and a peptide with five amino acids (PEP2); wherein said cyclic GFR-binding compound further comprises a peptide with three amino acids (PEP3), an amino acid or a peptide with between two and seven amino acids (PEP7), a peptide with between five and seven amino acids (PEP6), and an amino acid or a peptide with between two and six amino acids (PEP8).

[0234] In one aspect, the present disclosure provides a cyclic GFR-binding compound, wherein said cyclic GFR-binding compound is a cyclic peptide, a variant or analog thereof, or a cyclic peptidomimetic as defined herein, with between 15-60 (in particular between 15-55, more particularly between 19-60, and even more particularly between 19-55) amino acids, or between 15-35 (in particular between 15-30, more particularly between 19-35, and even more particularly between 19-30) amino acids, comprising a peptide with four amino acids (PEP12) and a peptide with five amino acids (PEP2); wherein said cyclic GFR-binding compound further comprises a peptide with three amino acids (PEP3), an amino acid or a peptide with between two and seven amino acids (PEP7), a peptide with between five and seven amino acids (PEP6), and an amino acid or a peptide with between two and six amino acids (PEP8).

[0235] In one aspect, the present disclosure provides a cyclic GFR-binding compound, wherein said cyclic GFR-binding compound is a cyclic peptide, a variant or analog thereof, or a cyclic peptidomimetic as defined herein, with between 15-60 (in particular between 15-55, more particularly between 19-60, and even more particularly between 19-55) amino acids, or between 15-35 (in particular between 15-30, more particularly between 19-35, and even more particularly between 19-30) amino acids, comprising a peptide with four amino acids (PEP1) and a peptide with five amino acids (PEP2); wherein said cyclic GFR-binding compound further comprises a peptide with five amino acids (PEP5), an amino acid or a peptide with between two and seven amino acids (PEP7), and a peptide with three amino acids (PEP4).

[0236] In one aspect, the present disclosure provides a cyclic GFR-binding compound, wherein said cyclic GFR-binding compound is a cyclic peptide, a variant or analog thereof, or a cyclic peptidomimetic as defined herein, with between 15-60 (in particular between 15-55, more particularly between 19-60, and even more particularly between 19-55) amino acids, or between 15-35 (in particular between 15-30, more particularly between 19-35, and even more particularly between 19-30) amino acids, comprising a peptide with four amino acids (PEP12) and a peptide with five amino acids (PEP2); wherein said cyclic GFR-binding compound further comprises a peptide with five amino acids (PEP5), an amino acid or a peptide with between two and seven amino acids (PEP7), and a peptide with three amino acids (PEP4).

[0237] In one aspect, the present disclosure provides a cyclic GFR-binding compound, wherein said cyclic GFR-binding compound is a cyclic peptide, a variant or analog thereof, or a cyclic peptidomimetic as defined herein, with between 15-60 (in particular between 15-55, more particularly between 19-60, and even more particularly between 19-55) amino acids, or between 15-35 (in particular between 15-30, more particularly between 19-35, and even more particularly between 19-30) amino acids, comprising a peptide with four amino acids (PEP1) and a peptide with five amino acids (PEP2); wherein said cyclic GFR-binding compound further comprises a peptide with five amino acids (PEP5), an amino acid or a peptide with between two and seven amino acids (PEP7), and a peptide with between five and seven amino acids (PEP6).

[0238] In one aspect, the present disclosure provides a cyclic GFR-binding compound, wherein said cyclic GFR-binding compound is a cyclic peptide, a variant or analog thereof, or a cyclic peptidomimetic as defined herein, with between 15-60 (in particular between 15-55, more particularly between 19-60, and even more particularly between 19-55) amino acids, or between 15-35 (in particular between 15-30, more particularly between 19-35, and even more particularly between 19-30) amino acids, comprising a peptide with four amino acids (PEP12) and a peptide with five amino acids (PEP2); wherein said cyclic GFR-binding compound further comprises a peptide with five amino acids (PEP5), an amino acid or a peptide with between two and seven amino acids (PEP7), and a peptide with between five and seven amino acids (PEP6).

[0239] In one aspect, the present disclosure provides a cyclic GFR-binding compound, wherein said cyclic GFR-binding compound is a cyclic peptide, a variant or analog thereof, or a cyclic peptidomimetic as defined herein, with between 15-60 (in particular between 15-55, more particularly between 19-60, and even more particularly between 19-55) amino acids, or between 15-35 (in particular between 15-30, more particularly between 19-35, and even more particularly between 19-30) amino acids, comprising a peptide with four amino acids (PEP1) and a peptide with five amino acids (PEP2); wherein said cyclic GFR-binding compound further comprises a peptide with five amino acids (PEP5), an amino acid or a peptide with between two and seven amino acids (PEP7), and a peptide with between six and eleven amino acids (PEP10).

[0240] In one aspect, the present disclosure provides a cyclic GFR-binding compound, wherein said cyclic GFR-binding compound is a cyclic peptide, a variant or analog thereof, or a cyclic peptidomimetic as defined herein, with between 15-60 (in particular between 15-55, more particularly between 19-60, and even more particularly between 19-55) amino acids, or between 15-35 (in particular between 15-30, more particularly between 19-35, and even more particularly between 19-30) amino acids, comprising a peptide with four amino acids (PEP12) and a peptide with five amino acids (PEP2); wherein said cyclic GFR-binding compound further comprises a peptide with five amino acids (PEP5), an amino acid or a peptide with between two and seven amino acids (PEP7), and a peptide with between six and eleven amino acids (PEP10).

[0241] In one aspect, the present disclosure provides a cyclic GFR-binding compound, wherein said cyclic GFR-binding compound is a cyclic peptide, a variant or analog thereof, or a cyclic peptidomimetic as defined herein, with between 15-60 (in particular between 15-55, more particularly between 19-60, and even more particularly between 19-55) amino acids, or between 15-35 (in particular between 15-30, more particularly between 19-35, and even more particularly between 19-30) amino acids, comprising a peptide with four amino acids (PEP1) and a peptide with five amino acids (PEP2); wherein said cyclic GFR-binding compound further comprises a peptide with five amino acids (PEP5), an amino acid or a peptide with between two and seven amino acids (PEP7), a peptide with three amino acids (PEP4), and an amino acid or a peptide with between two and six amino acids (PEP8).

[0242] In one aspect, the present disclosure provides a cyclic GFR-binding compound, wherein said cyclic GFR-binding compound is a cyclic peptide, a variant or analog thereof, or a cyclic peptidomimetic as defined herein, with between 15-60 (in particular between 15-55, more particularly between 19-60, and even more particularly between 19-55) amino acids, or between 15-35 (in particular between 15-30, more particularly between 19-35, and even more particularly between 19-30) amino acids, comprising a peptide with four amino acids (PEP12) and a peptide with five amino acids (PEP2); wherein said cyclic GFR-binding compound further comprises a peptide with five amino acids (PEP5), an amino acid or a peptide with between two and seven amino acids (PEP7), a peptide with three amino acids (PEP4), and an amino acid or a peptide with between two and six amino acids (PEP8).

[0243] In one aspect, the present disclosure provides a cyclic GFR-binding compound, wherein said cyclic GFR-binding compound is a cyclic peptide, a variant or analog thereof, or a cyclic peptidomimetic as defined herein, with between 15-60 (in particular between 15-55, more particularly between 19-60, and even more particularly between 19-55) amino acids, or between 15-35 (in particular between 15-30, more particularly between 19-35, and even more particularly between 19-30) amino acids, comprising a peptide with four amino acids (PEP1) and a peptide with five amino acids (PEP2); wherein said cyclic GFR-binding compound further comprises a peptide with five amino acids (PEP5), an amino acid or a peptide with between two and seven amino acids (PEP7), a peptide with between five and seven amino acids (PEP6), and an amino acid or a peptide with between two and six amino acids (PEP8).

[0244] In one aspect, the present disclosure provides a cyclic GFR-binding compound, wherein said cyclic GFR-binding compound is a cyclic peptide, a variant or analog thereof, or a cyclic peptidomimetic as defined herein, with between 15-60 (in particular between 15-55, more particularly between 19-60, and even more particularly between 19-55) amino acids, or between 15-35 (in particular between 15-30, more particularly between 19-35, and even more particularly between 19-30) amino acids, comprising a peptide with four amino acids (PEP12) and a peptide with five amino acids (PEP2); wherein said cyclic GFR-binding compound further comprises a peptide with five amino acids (PEP5), an amino acid or a peptide with between two and seven amino acids (PEP7), a peptide with between five and seven amino acids (PEP6), and an amino acid or a peptide with between two and six amino acids (PEP8).

[0245] In one aspect, the present disclosure provides a cyclic GFR-binding compound, wherein said cyclic GFR-binding compound is a cyclic peptide, a variant or analog thereof, or a cyclic peptidomimetic as defined herein, with between 15-60 (in particular between 15-55, more particularly between 19-60, and even more particularly between 19-55) amino acids, or between 15-35 (in particular between 15-30, more particularly between 19-35, and even more particularly between 19-30) amino acids, comprising a peptide with four amino acids (PEP1) and a peptide with five amino acids (PEP2); wherein said cyclic GFR-binding compound further comprises a peptide with between six and twelve amino acids (PEP9), a peptide with three amino acids (PEP4), and an amino acid or a peptide with between two and six amino acids (PEP8).

[0246] In one aspect, the present disclosure provides a cyclic GFR-binding compound, wherein said cyclic GFR-binding compound is a cyclic peptide, a variant or analog thereof, or a cyclic peptidomimetic as defined herein, with between 15-60 (in particular between 15-55, more particularly between 19-60, and even more particularly between 19-55) amino acids, or between 15-35 (in particular between 15-30, more particularly between 19-35, and even more particularly between 19-30) amino acids, comprising a peptide with four amino acids (PEP12) and a peptide with five amino acids (PEP2); wherein said cyclic GFR-binding compound further comprises a peptide with between six and twelve amino acids (PEP9), a peptide with three amino acids (PEP4), and an amino acid or a peptide with between two and six amino acids (PEP8).

[0247] In one aspect, the present disclosure provides a cyclic GFR-binding compound, wherein said cyclic GFR-binding compound is a cyclic peptide, a variant or analog thereof, or a cyclic peptidomimetic as defined herein, with between 15-60 (in particular between 15-55, more particularly between 19-60, and even more particularly between 19-55) amino acids, or between 15-35 (in particular between 15-30, more particularly between 19-35, and even more particularly between 19-30) amino acids, comprising a peptide with four amino acids (PEP1) and a peptide with five amino acids (PEP2); wherein said cyclic GFR-binding compound further comprises a peptide with between six and twelve amino acids (PEP9), a peptide with between five and seven amino acids (PEP6), and an amino acid or a peptide with between two and six amino acids (PEP8).

[0248] In one aspect, the present disclosure provides a cyclic GFR-binding compound, wherein said cyclic GFR-binding compound is a cyclic peptide, a variant or analog thereof, or a cyclic peptidomimetic as defined herein, with between 15-60 (in particular between 15-55, more particularly between 19-60, and even more particularly between 19-55) amino acids, or between 15-35 (in particular between 15-30, more particularly between 19-35, and even more particularly between 19-30) amino acids, comprising a peptide with four amino acids (PEP12) and a peptide with five amino acids (PEP2); wherein said cyclic GFR-binding compound further comprises a peptide with between six and twelve amino acids (PEP9), a peptide with between five and seven amino acids (PEP6), and an amino acid or a peptide with between two and six amino acids (PEP8).

[0249] In one aspect, the present disclosure provides a cyclic GFR-binding compound, wherein said cyclic GFR-binding compound is a cyclic peptide, a variant or analog thereof, or a cyclic peptidomimetic as defined herein, with between 15-60 (in particular between 15-55, more particularly between 19-60, and even more particularly between 19-55) amino acids, or between 15-35 (in particular between 15-30, more particularly between 19-35, and even more particularly between 19-30) amino acids, comprising a peptide, a variant or analog thereof, or a peptidomimetic having the following general formula (Ia) (hereinafter may also be referred to as compound (Ia) or peptide (Ia)):

PEP(A)-LINKER-PEP(B) (Ia)

[0250] wherein one end of LINKER interacts covalently with one end of PEP(A); wherein another end of LINKER interacts covalently with one end of PEP(B); wherein PEP(A) comprises PEP1; wherein PEP(B) comprises PEP2; wherein LINKER is a linear or branched organic divalent radical, moiety or compound having a molecular weight (Mw) comprised between about 28 and about 2,000 Da, in particular, between about 300 and about 1000 Da, more particularly between about 300 and about 800 Da.

[0251] In one aspect, the present disclosure provides a cyclic GFR-binding compound, wherein said cyclic GFR-binding compound is a cyclic peptide, a variant or analog thereof, or a cyclic peptidomimetic as defined herein, with between 15-60 (in particular between 15-55, more particularly between 19-60, and even more particularly between 19-55) amino acids, or between 15-35 (in particular between 15-30, more particularly between 19-35, and even more particularly between 19-30) amino acids, comprising a peptide, a variant or analog thereof, or a peptidomimetic having the following general formula (Ib) (hereinafter may also be referred to as compound (Ib) or peptide (Ib)):

PEP(A)-LINKER-PEP(B)-LINKER (Ib)

[0252] wherein one end of a first LINKER interacts covalently with one end of PEP(A); wherein another end of a first LINKER interacts covalently with one end of PEP(B); wherein one end of a second LINKER interacts covalently with another end of PEP(B); wherein another end of a second LINKER interacts covalently with another end of PEP(A); wherein PEP(A) comprises PEP1; wherein PEP(B) comprises PEP2; wherein LINKER are independently a linear or branched organic divalent radical, moiety or compound having a molecular weight (Mw) comprised between about 28 and about 2,000 Da, in particular, between about 300 and about 1000 Da, more particularly between about 300 and about 800 Da.

[0253] In the present description, the molecular weight of LINKER refer to the calculated molecular weight prior to being connected to/reacted with any of the elements it is configured to connect to or react with e.g. PEP(A), PEP(B) or any other groups defined herein.

[0254] 15-60 (in particular between 15-55, more particularly between 19-60, and even more particularly between 19-55) amino acids, or between 15-35 (in particular between 15-30, In one aspect, the present disclosure provides a cyclic GFR-binding compound comprising compounds (Ia) or (Ib), wherein PEP(A) comprises PEP1; wherein PEP(B) comprises PEP2; wherein PEP(A) further comprises PEP3; wherein PEP(B) further comprises PEP4.

[0255] In one aspect, the present disclosure provides a cyclic GFR-binding compound comprising compounds (Ia) or (Ib), wherein PEP(A) comprises PEP12; wherein PEP(B) comprises PEP2; wherein PEP(A) further comprises PEP3; wherein PEP(B) further comprises PEP4.

[0256] In one aspect, the present disclosure provides a cyclic GFR-binding compound comprising compounds (Ia) or (Ib), wherein PEP(A) comprises PEP1; wherein PEP(B) comprises PEP2; wherein PEP(A) further comprises PEP5; wherein PEP(B) further comprises PEP6.

[0257] In one aspect, the present disclosure provides a cyclic GFR-binding compound comprising compounds (Ia) or (Ib), wherein PEP(A) comprises PEP12; wherein PEP(B) comprises PEP2; wherein PEP(A) further comprises PEP5; wherein PEP(B) further comprises PEP6.

[0258] In one aspect, the present disclosure provides a cyclic GFR-binding compound comprising compounds (Ia) or (Ib), wherein PEP(A) comprises PEP1; wherein PEP(B) comprises PEP2; wherein PEP(A) further comprises PEP9; wherein PEP(B) further comprises PEP10.

[0259] In one aspect, the present disclosure provides a cyclic GFR-binding compound comprising compounds (Ia) or (Ib), wherein PEP(A) comprises PEP12; wherein PEP(B) comprises PEP2; wherein PEP(A) further comprises PEP9; wherein PEP(B) further comprises PEP10.

[0260] In one aspect, the present disclosure provides a cyclic GFR-binding compound comprising compounds (Ia) or (Ib), wherein PEP(A) comprises PEP1; wherein PEP(B) comprises PEP2; wherein PEP(A) further comprises PEP3; wherein PEP(B) further comprises PEP6.

[0261] In one aspect, the present disclosure provides a cyclic GFR-binding compound comprising compounds (Ia) or (Ib), wherein PEP(A) comprises PEP12; wherein PEP(B) comprises PEP2; wherein PEP(A) further comprises PEP3; wherein PEP(B) further comprises PEP6.

[0262] In one aspect, the present disclosure provides a cyclic GFR-binding compound comprising compounds (Ia) or (Ib), wherein PEP(A) comprises PEP1; wherein PEP(B) comprises PEP2; wherein PEP(A) further comprises PEP3; wherein PEP(B) further comprises PEP10.

[0263] In one aspect, the present disclosure provides a cyclic GFR-binding compound comprising compounds (Ia) or (Ib), wherein PEP(A) comprises PEP12; wherein PEP(B) comprises PEP2; wherein PEP(A) further comprises PEP3; wherein PEP(B) further comprises PEP10.

[0264] In one aspect, the present disclosure provides a cyclic GFR-binding compound comprising compounds (Ia) or (Ib), wherein PEP(A) comprises PEP1; wherein PEP(B) comprises PEP2; wherein PEP(A) further comprises PEP5; wherein PEP(B) further comprises PEP4.

[0265] In one aspect, the present disclosure provides a cyclic GFR-binding compound comprising compounds (Ia) or (Ib), wherein PEP(A) comprises PEP12; wherein PEP(B) comprises PEP2; wherein PEP(A) further comprises PEP5; wherein PEP(B) further comprises PEP4.

[0266] In one aspect, the present disclosure provides a cyclic GFR-binding compound comprising compounds (Ia) or (Ib), wherein PEP(A) comprises PEP1; wherein PEP(B) comprises PEP2; wherein PEP(A) further comprises PEP9; wherein PEP(B) further comprises PEP4.

[0267] In one aspect, the present disclosure provides a cyclic GFR-binding compound comprising compounds (Ia) or (Ib), wherein PEP(A) comprises PEP12; wherein PEP(B) comprises PEP2; wherein PEP(A) further comprises PEP9; wherein PEP(B) further comprises PEP4.

[0268] In one aspect, the present disclosure provides a cyclic GFR-binding compound comprising compounds (Ia) or (Ib), wherein PEP(A) comprises PEP1; wherein PEP(B) comprises PEP2; wherein PEP(A) further comprises PEP5; wherein PEP(B) further comprises PEP10.

[0269] In one aspect, the present disclosure provides a cyclic GFR-binding compound comprising compounds (Ia) or (Ib), wherein PEP(A) comprises PEP12; wherein PEP(B) comprises PEP2; wherein PEP(A) further comprises PEP5; wherein PEP(B) further comprises PEP10.

[0270] In one aspect, the present disclosure provides a cyclic GFR-binding compound comprising compounds (Ia) or (Ib), wherein PEP(A) comprises PEP1; wherein PEP(B) comprises PEP2; wherein PEP(A) further comprises PEP9; wherein PEP(B) further comprises PEP6.

[0271] In one aspect, the present disclosure provides a cyclic GFR-binding compound comprising compounds (Ia) or (Ib), wherein PEP(A) comprises PEP12; wherein PEP(B) comprises PEP2; wherein PEP(A) further comprises PEP9; wherein PEP(B) further comprises PEP6.

[0272] In one aspect, the present disclosure provides a cyclic GFR-binding compound comprising compounds (Ia) or (Ib), wherein PEP(A) comprises PEP1; wherein PEP(B) comprises PEP2; wherein PEP(A) further comprises PEP3 and PEP7; wherein PEP(B) further comprises PEP4.

[0273] In one aspect, the present disclosure provides a cyclic GFR-binding compound comprising compounds (Ia) or (Ib), wherein PEP(A) comprises PEP12; wherein PEP(B) comprises PEP2; wherein PEP(A) further comprises PEP3 and PEP7; wherein PEP(B) further comprises PEP4.

[0274] In one aspect, the present disclosure provides a cyclic GFR-binding compound comprising compounds (Ia) or (Ib), wherein PEP(A) comprises PEP1; wherein PEP(B) comprises PEP2; wherein PEP(A) further comprises PEP3 and PEP7; wherein PEP(B) further comprises PEP6.

[0275] In one aspect, the present disclosure provides a cyclic GFR-binding compound comprising compounds (Ia) or (Ib), wherein PEP(A) comprises PEP12; wherein PEP(B) comprises PEP2; wherein PEP(A) further comprises PEP3 and PEP7; wherein PEP(B) further comprises PEP6.

[0276] In one aspect, the present disclosure provides a cyclic GFR-binding compound comprising compounds (Ia) or (Ib), wherein PEP(A) comprises PEP1; wherein PEP(B) comprises PEP2; wherein PEP(A) further comprises PEP3 and PEP7; wherein PEP(B) further comprises PEP10.

[0277] In one aspect, the present disclosure provides a cyclic GFR-binding compound comprising compounds (Ia) or (Ib), wherein PEP(A) comprises PEP12; wherein PEP(B) comprises PEP2; wherein PEP(A) further comprises PEP3 and PEP7; wherein PEP(B) further comprises PEP10.

[0278] In one aspect, the present disclosure provides a cyclic GFR-binding compound comprising compounds (Ia) or (Ib), wherein PEP(A) comprises PEP1; wherein PEP(B) comprises PEP2; wherein PEP(A) further comprises PEP7; wherein PEP(B) further comprises PEP4 and PEP8.

[0279] In one aspect, the present disclosure provides a cyclic GFR-binding compound comprising compounds (Ia) or (Ib), wherein PEP(A) comprises PEP12; wherein PEP(B) comprises PEP2; wherein PEP(A) further comprises PEP7; wherein PEP(B) further comprises PEP4 and PEP8.

[0280] In one aspect, the present disclosure provides a cyclic GFR-binding compound comprising compounds (Ia) or (Ib), wherein PEP(A) comprises PEP1; wherein PEP(B) comprises PEP2; wherein PEP(A) further comprises PEP7; wherein PEP(B) further comprises PEP6 and PEP8.

[0281] In one aspect, the present disclosure provides a cyclic GFR-binding compound comprising compounds (Ia) or (Ib), wherein PEP(A) comprises PEP12; wherein PEP(B) comprises PEP2; wherein PEP(A) further comprises PEP7; wherein PEP(B) further comprises PEP6 and PEP8.

[0282] In one aspect, the present disclosure provides a cyclic GFR-binding compound comprising compounds (Ia) or (Ib), wherein PEP(A) comprises PEP1; wherein PEP(B) comprises PEP2; wherein PEP(A) further comprises PEP5 and PEP7; wherein PEP(B) further comprises PEP4.

[0283] In one aspect, the present disclosure provides a cyclic GFR-binding compound comprising compounds (Ia) or (Ib), wherein PEP(A) comprises PEP12; wherein PEP(B) comprises PEP2; wherein PEP(A) further comprises PEP5 and PEP7; wherein PEP(B) further comprises PEP4.

[0284] In one aspect, the present disclosure provides a cyclic GFR-binding compound comprising compounds (Ia) or (Ib), wherein PEP(A) comprises PEP1; wherein PEP(B) comprises PEP2; wherein PEP(A) further comprises PEP5 and PEP7; wherein PEP(B) further comprises PEP6.

[0285] In one aspect, the present disclosure provides a cyclic GFR-binding compound comprising compounds (Ia) or (Ib), wherein PEP(A) comprises PEP12; wherein PEP(B) comprises PEP2; wherein PEP(A) further comprises PEP5 and PEP7; wherein PEP(B) further comprises PEP6.

[0286] In one aspect, the present disclosure provides a cyclic GFR-binding compound comprising compounds (Ia) or (Ib), wherein PEP(A) comprises PEP1; wherein PEP(B) comprises PEP2; wherein PEP(A) further comprises PEP5 and PEP7; wherein PEP(B) further comprises PEP10.

[0287] In one aspect, the present disclosure provides a cyclic GFR-binding compound comprising compounds (Ia) or (Ib), wherein PEP(A) comprises PEP12; wherein PEP(B) comprises PEP2; wherein PEP(A) further comprises PEP5 and PEP7; wherein PEP(B) further comprises PEP10.

[0288] In one aspect, the present disclosure provides a cyclic GFR-binding compound comprising compounds (Ia) or (Ib), wherein PEP(A) comprises PEP1; wherein PEP(B) comprises PEP2; wherein PEP(A) further comprises PEP5 and PEP7; wherein PEP(B) further comprises PEP4 and PEP8.

[0289] In one aspect, the present disclosure provides a cyclic GFR-binding compound comprising compounds (Ia) or (Ib), wherein PEP(A) comprises PEP12; wherein PEP(B) comprises PEP2; wherein PEP(A) further comprises PEP5 and PEP7; wherein PEP(B) further comprises PEP4 and PEP8.

[0290] In one aspect, the present disclosure provides a cyclic GFR-binding compound comprising compounds (Ia) or (Ib), wherein PEP(A) comprises PEP1; wherein PEP(B) comprises PEP2; wherein PEP(A) further comprises PEP5 and PEP7; wherein PEP(B) further comprises PEP6 and PEP8.

[0291] In one aspect, the present disclosure provides a cyclic GFR-binding compound comprising compounds (Ia) or (Ib), wherein PEP(A) comprises PEP12; wherein PEP(B) comprises PEP2; wherein PEP(A) further comprises PEP5 and PEP7; wherein PEP(B) further comprises PEP6 and PEP8.

[0292] In one aspect, the present disclosure provides a cyclic GFR-binding compound comprising compounds (Ia) or (Ib), wherein PEP(A) comprises PEP1; wherein PEP(B) comprises PEP2; wherein PEP(A) further comprises PEP9; wherein PEP(B) further comprises PEP4 and PEP8.

[0293] In one aspect, the present disclosure provides a cyclic GFR-binding compound comprising compounds (Ia) or (Ib), wherein PEP(A) comprises PEP12; wherein PEP(B) comprises PEP2; wherein PEP(A) further comprises PEP9; wherein PEP(B) further comprises PEP4 and PEP8.

[0294] In one aspect, the present disclosure provides a cyclic GFR-binding compound comprising compounds (Ia) or (Ib), wherein PEP(A) comprises PEP1; wherein PEP(B) comprises PEP2; wherein PEP(A) further comprises PEP9; wherein PEP(B) further comprises PEP6 and PEP8.

[0295] In one aspect, the present disclosure provides a cyclic GFR-binding compound comprising compounds (Ia) or (Ib), wherein PEP(A) comprises PEP12; wherein PEP(B) comprises PEP2; wherein PEP(A) further comprises PEP9; wherein PEP(B) further comprises PEP6 and PEP8.

[0296] In one aspect, the present disclosure provides a cyclic GFR-binding compound, wherein said cyclic GFR-binding compound is a cyclic peptide, a variant or analog thereof, or a cyclic peptidomimetic as defined herein, with between 15-60 (in particular between 15-55, more particularly between 19-60, and even more particularly between 19-55) amino acids, or between 15-35 (in particular between 15-30, more particularly between 19-35, and even more particularly between 19-30) amino acids, comprising a peptide, a variant or analog thereof, or a peptidomimetic having the following general formula (IIIa) (hereinafter may also be referred to as compound (IIIa) or peptide (IIIa)):

PEP(C)-PEP12-LINKER-PEP2-PEP(D) (IIIa)

[0297] wherein LINKER is a linear or branched organic divalent radical, moiety or compound having a molecular weight (Mw) comprised between about 28 and about 2,000 Da, in particular, between about 300 and about 1000 Da, more particularly between about 300 and about 800 Da; wherein PEP12 is a peptide with 8 amino acids of formula PEP1-AA¹⁷-PEP11 as defined herein; wherein PEP2 is a peptide with five amino acids as already defined herein; wherein one end of PEP(C) interacts covalently with PEP12 via one end of PEP1; wherein one end of PEP(D) interacts covalently with one end of PEP2; wherein one end of LINKER interacts covalently with one end of PEP12 via one end of PEP11; wherein another end of LINKER interacts covalently with another end of PEP2; wherein PEP(C) is a peptide with at least 5 amino acids, in particular a peptide with between 5 and 12 amino acids; wherein PEP(D) is a peptide with at least 5 amino acids, in particular a peptide with between 5 and 11 amino acids.

[0298] In one aspect, the present disclosure provides a cyclic GFR-binding compound, wherein said cyclic GFR-binding compound is a cyclic peptide, a variant or analog thereof, or a cyclic peptidomimetic as defined herein, with between 15-60 (in particular between 15-55, more particularly between 19-60, and even more particularly between 19-55) amino acids, or between 15-35 (in particular between 15-30, more particularly between 19-35, and even more particularly between 19-30) amino acids, comprising a peptide, a variant or analog thereof, or a peptidomimetic having the following general formula (IIb) (hereinafter may also be referred to as compound (IIb) or peptide (IIb)):

PEP(C)-PEP12-LINKER-PEP2-PEP(D)-LINKER (IIb)

[0299] wherein LINKER are independently a linear or branched organic divalent radical, moiety or compound having a molecular weight (Mw) comprised between about 28 and about 2,000 Da, in particular, between about 300 and about 1000 Da, more particularly between about 300 and about 800 Da; wherein PEP12 is a peptide with 8 amino acids of formula PEP1-AA¹⁷-PEP11 as defined herein; wherein PEP2 is a peptide with five amino acids as already defined herein; wherein one end of PEP(C) interacts covalently with PEP12 via one end of PEP1; wherein one end of PEP(D) interacts covalently with one end of PEP2; wherein one end of a first LINKER interacts covalently with one end of PEP12 via one end of PEP11; wherein another end of a first LINKER interacts covalently with another end of PEP2; wherein one end of a second LINKER interacts covalently with another end of PEP(D); wherein another end of a second LINKER interacts covalently with another end of PEP(C); wherein PEP(C) is a peptide with at least 5 amino acids, in particular a peptide with between 5 and 12 amino acids; wherein PEP(D) is a peptide with at least 5 amino acids, in particular a peptide with between 5 and 11 amino acids.

[0300] In one aspect, the present disclosure provides a cyclic GFR-binding compound comprising compounds (IIa) or (IIb), wherein PEP(C) comprises PEP3; wherein PEP(D) comprises PEP4.

[0301] In one aspect, the present disclosure provides a cyclic GFR-binding compound comprising compounds (IIa) or (IIb), wherein PEP(C) comprises PEP5; wherein PEP(D) comprises PEP6. In one particular example, PEP(C) is PEP5; and PEP(D) is PEP6.

[0302] In one aspect, the present disclosure provides a cyclic GFR-binding compound comprising compounds (IIa) or (IIb), wherein PEP(C) comprises PEP9; wherein PEP(D) comprises PEP10. In one particular example, PEP(C) is PEP9; and PEP(D) is PEP10.

[0303] In one aspect, the present disclosure provides a cyclic GFR-binding compound comprising compounds (IIa) or (IIb), wherein PEP(C) comprises PEP3; wherein PEP(D) comprises PEP6. In one particular example, PEP(C) comprises PEP3 and PEP(D) is PEP6.

[0304] In one aspect, the present disclosure provides a cyclic GFR-binding compound comprising compounds (IIa) or (IIb), wherein PEP(C) comprises PEP3; wherein PEP(D) comprises PEP10. In one particular example, PEP(C) comprises PEP3 and PEP(D) is PEP10.

[0305] In one aspect, the present disclosure provides a cyclic GFR-binding compound comprising compounds (IIa) or (IIb), wherein PEP(C) comprises PEP5; wherein PEP(D) comprises PEP4. In one particular example, PEP(C) is PEP5 and PEP(D) comprises PEP4.

[0306] In one aspect, the present disclosure provides a cyclic GFR-binding compound comprising compounds (IIa) or (IIb), wherein PEP(C) comprises PEP9; wherein PEP(D) comprises PEP4. In one particular example, PEP(C) is PEP9 and PEP(D) comprises PEP4.

[0307] In one aspect, the present disclosure provides a cyclic GFR-binding compound comprising compounds (IIa) or (IIb), wherein PEP(C) comprises PEP5; wherein PEP(D) comprises PEP10. In one particular example, PEP(C) is PEP5 and PEP(D) is PEP10.

[0308] In one aspect, the present disclosure provides a cyclic GFR-binding compound comprising compounds (IIa) or (IIb), wherein PEP(C) comprises PEP9; wherein PEP(D) comprises PEP6. In one particular example, PEP(C) is PEP9 and PEP(D) is PEP6.

[0309] In one aspect, the present disclosure provides a cyclic GFR-binding compound comprising compounds (IIa) or (IIb), wherein PEP(C) comprises PEP3 and PEP7; wherein PEP(D) comprises PEP4.

[0310] In one aspect, the present disclosure provides a cyclic GFR-binding compound comprising compounds (IIa) or (IIb), wherein PEP(C) comprises PEP3 and PEP7; wherein PEP(D) comprises PEP6. In one particular example, PEP(C) comprises PEP3 and PEP7, and PEP(D) is PEP6.

[0311] In one aspect, the present disclosure provides a cyclic GFR-binding compound comprising compounds (IIa) or (IIb), wherein PEP(C) comprises PEP3 and PEP7; wherein PEP(D) comprises PEP10. In one particular example, PEP(C) comprises PEP3 and PEP7, and PEP(D) is PEP10.

[0312] In one aspect, the present disclosure provides a cyclic GFR-binding compound comprising compounds (IIa) or (IIb), wherein PEP(C) comprises PEP7; wherein PEP(D) comprises PEP4 and PEP8.

[0313] In one aspect, the present disclosure provides a cyclic GFR-binding compound comprising compounds (IIa) or (IIb), wherein PEP(C) comprises PEP7; wherein PEP(D) comprises PEP6 and PEP8.

[0314] In one aspect, the present disclosure provides a cyclic GFR-binding compound comprising compounds (IIa) or (IIb), wherein PEP(C) comprises PEP5 and PEP7; wherein PEP(D) comprises PEP4.

[0315] In one aspect, the present disclosure provides a cyclic GFR-binding compound comprising compounds (IIa) or (IIb), wherein PEP(C) comprises PEP5 and PEP7; wherein PEP(D) comprises PEP6.

[0316] In one aspect, the present disclosure provides a cyclic GFR-binding compound comprising compounds (IIa) or (IIb), wherein PEP(C) comprises PEP5 and PEP7; wherein PEP(D) comprises PEP10.

[0317] In one aspect, the present disclosure provides a cyclic GFR-binding compound comprising compounds (IIa) or (IIb), wherein PEP(C) comprises PEP5 and PEP7; wherein PEP(D) comprises PEP4 and PEP8.

[0318] In one aspect, the present disclosure provides a cyclic GFR-binding compound comprising compounds (IIa) or (IIb), wherein PEP(C) comprises PEP5 and PEP7; wherein PEP(D) comprises PEP6 and PEP8.

[0319] In one aspect, the present disclosure provides a cyclic GFR-binding compound comprising compounds (IIa) or (IIb), wherein PEP(C) comprises PEP9; wherein PEP(D) comprises PEP4 and PEP8.

[0320] In one aspect, the present disclosure provides a cyclic GFR-binding compound comprising compounds (IIa) or (IIb), wherein PEP(C) comprises PEP9; wherein PEP(D) comprises PEP6 and PEP8.

[0321] In one aspect, the present disclosure provides a cyclic GFR-binding compound comprising compounds (IIa) or (IIb), wherein PEP(C) is PEP5 or PEP9 and wherein PEP(D) is PEP6 or PEP10.

[0322] In one aspect, the present disclosure provides a cyclic GFR-binding compound, wherein said cyclic GFR-binding compound is a cyclic peptide, a variant or analog thereof, or a cyclic peptidomimetic as defined herein, with between 15-60 (in particular between 15-55, more particularly between 19-60, and even more particularly between 19-55) amino acids, or between 15-35 (in particular between 15-30, more particularly between 19-35, and even more particularly between 19-30) amino acids, comprising a peptide, a variant or analog thereof, or a peptidomimetic having the following general formula (IIIa) (hereinafter may also be referred to as compound (IIIa) or peptide (IIIa)):

PEP7-PEP5-PEP12-LINKER-PEP2-PEP6-PEP8 (IIIa)

[0323] wherein LINKER is a linear or branched organic divalent radical, moiety or compound having a molecular weight (Mw) comprised between about 28 and about 2,000 Da, in particular, between about 300 and about 1000 Da, more particularly between about 300 and about 800 Da; wherein PEP12 is a peptide with 8 amino acids of formula PEP1-AA¹⁷-PEP11 as defined herein; wherein PEP2 is a peptide with five amino acids as already defined herein; wherein PEP5 is a peptide with five amino acids as already defined herein; wherein PEP6 is a peptide with between five and seven amino acids as already defined herein; wherein PEP7 an amino acid or a peptide with between two and seven amino acids as already defined herein; wherein PEP8 an amino acid or a peptide with between two and six amino acids as already defined herein; wherein one end of LINKER interacts covalently with one end of PEP12 via AA²⁰; wherein another end of LINKER interacts covalently with one end of PEP2 via AA²¹; wherein one end of PEP5 interacts covalently with another end of PEP12 via AA¹²; wherein another end of PEP5 interacts covalently with one end of PEP7 via AA⁸; wherein one end of PEP6 interacts covalently with another end of PEP2 via AA²⁶; wherein another end of PEP6 interacts covalently with one end of PEP8 via AA³².

[0324] In one aspect, the present disclosure provides a cyclic GFR-binding compound, wherein said cyclic GFR-binding compound is a cyclic peptide, a variant or analog thereof, or a cyclic peptidomimetic as defined herein, with between 15-60 (in particular between 15-55, more particularly between 19-60, and even more particularly between 19-55) amino acids, or between 15-35 (in particular between 15-30, more particularly between 19-35, and even more particularly between 19-30) amino acids, comprising a peptide, a variant or analog thereof, or a peptidomimetic having the following general formula (IIIa) (hereinafter may also be referred to as compound (IIIb) or peptide (IIIb)):

PEP7-PEP5-PEP12-LINKER-PEP2-PEP6-PEP8-LINKER (IIIb)

[0325] wherein LINKER are independently a linear or branched organic divalent radical, moiety or compound having a molecular weight (Mw) comprised between about 28 and about 2,000 Da, in particular, between about 300 and about 1000 Da, more particularly between about 300 and about 800 Da; wherein PEP12 is a peptide with 8 amino acids of formula PEP1-AA¹-PEP11 as defined herein; wherein PEP2 is a peptide with five amino acids as already defined herein; wherein PEP5 is a peptide with five amino acids as already defined herein; wherein PEP6 is a peptide with between five and seven amino acids as already defined herein; wherein PEP7 an amino acid or a peptide with between two and seven amino acids as already defined herein; wherein PEP8 an amino acid or a peptide with between two and six amino acids as already defined herein; wherein one end of a first LINKER interacts covalently with one end of PEP12 via AA²⁰; wherein another end of a first LINKER interacts covalently with one end of PEP2 via AA²¹; wherein one end of a second LINKER interacts covalently with another end of PEP8; wherein another end of a second LINKER interacts covalently with another end of PEP7; wherein one end of PEP5 interacts covalently with another end of PEP12 via AA¹²; wherein another end of PEP5 interacts covalently with one end of PEP7 via AA⁸; wherein one end of PEP6 interacts covalently with another end of PEP2 via AA²⁶; wherein another end of PEP6 interacts covalently with one end of PEP8 via AA³².

[0326] In one aspect, the present disclosure provides a cyclic GFR-binding compound, wherein said cyclic GFR-binding compound is a cyclic peptide, a variant or analog thereof, or a cyclic peptidomimetic as defined herein, with between 15-60 (in particular between 15-55, more particularly between 19-60, and even more particularly between 19-55) amino acids, or between 15-35 (in particular between 15-30, more particularly between 19-35, and even more particularly between 19-30) amino acids, comprising a peptide, a variant or analog thereof, or a peptidomimetic having the following general formula (IVa) (hereinafter may also be referred to as compound (IVa) or peptide (IVa)):

AA¹-AA²-AA³-AA⁴-AA⁵-AA⁶-AA⁷-AA⁸-AA⁹-AA¹⁰-AA¹¹-AA¹²-AA¹³-AA¹⁴-AA¹⁵-AA¹⁶-AA¹⁷-AA¹⁸-AA¹⁹-AA²⁰-LINKER-AA²¹-AA²²-AA²³-AA²⁴-AA²⁵-AA²⁶-AA²⁷-AA²⁸-AA²⁹-AA³⁰-AA³¹-AA³²-AA³³-AA³⁴-AA³⁵-AA³⁶-AA³⁷-AA³⁸ (IVa)

[0327] wherein LINKER is a linear or branched organic divalent radical, moiety or compound having a molecular weight (Mw) comprised between about 28 and about 2,000 Da, in particular, between about 300 and about 1000 Da, more particularly between about 300 and about 800 Da; wherein AA¹-AA²-AA³-AA⁴-AA⁵-AA⁶-AA⁷ is PEP7 as defined herein; wherein AA¹³-AA¹⁴-AA¹⁵-AA¹⁶-AA¹⁷-AA¹⁸-AA¹⁹-AA²⁰ is PEP12 as defined herein; wherein AA²¹-AA²²-AA²³-AA²⁴-AA²⁵ is PEP2 as already defined herein; wherein AA⁸-AA⁹-AA¹⁰ is PEP3 as defined herein; wherein AA³⁰-AA³¹-AA³² is PEP4 as defined herein; wherein AA³³-AA³⁴-AA³⁵-AA³⁶-AA³⁷-AA³⁸ is PEP8 as defined herein; wherein AA¹¹, AA¹², AA²⁶, AA²⁷, AA²⁸, and AA²⁹ are as defined herein; wherein one end of LINKER interacts covalently with AA²⁰; wherein another end of LINKER interacts covalently with AA²¹; wherein AA¹ and AA²¹ may be both N-terminal amino acids or both C-terminal amino acids; wherein AA³⁸ and AA²⁰ may be both N-terminal amino acids or both C-terminal amino acids.

[0328] In one aspect, the present disclosure provides a cyclic GFR-binding compound, wherein said cyclic GFR-binding compound is a cyclic peptide, a variant or analog thereof, or a cyclic peptidomimetic as defined herein, with between 15-60 (in particular between 15-55, more particularly between 19-60, and even more particularly between 19-55) amino acids, or between 15-35 (in particular between 15-30, more particularly between 19-35, and even more particularly between 19-30) amino acids, comprising a peptide, a variant or analog thereof, or a peptidomimetic having the following general formula (IVb) (hereinafter may also be referred to as compound (IVb) or peptide (IVb)):

AA¹-AA²-AA³-AA⁴-AA⁵-AA⁶-AA⁷-AA⁸-AA⁹-AA¹⁰-AA¹¹-AA¹²-AA¹³-AA¹⁴-AA¹⁵-AA¹⁶-AA¹⁷-AA¹⁸-AA¹⁹-AA²⁰-LINKER-AA²¹-AA²²-AA²³-AA²⁴-AA²⁵-AA²⁶-AA-AA²⁸-AA²⁹-AA³⁰-AA³¹-AA³²-AA³³-AA³⁴-AA³⁵-AA³⁶-AA³⁷-AA³⁸-LINKER (IVb)

[0329] wherein LINKER are independently a linear or branched organic divalent radical, moiety or compound having a molecular weight (Mw) comprised between about 28 and about 2,000 Da, in particular, between about 300 and about 1000 Da, more particularly between about 300 and about 800 Da; wherein AA¹-AA²-AA³-AA⁴-AA⁵-AA⁶-AA⁷ is PEP7 as defined herein; wherein AA¹³-AA¹⁴-AA¹⁵-AA¹⁶-AA¹⁷-AA¹⁸-AA¹⁹-AA²⁰ is PEP12 as defined herein; wherein AA²¹-AA²²-AA²³-AA²⁴-AA²⁵ is PEP2 as already defined herein; wherein AA⁸-AA⁹-AA¹⁰ is PEP3 as defined herein; wherein AA³⁰-AA³¹-AA³² is PEP4 as defined herein; wherein AA³³-AA³⁴-AA³⁵-AA³⁶-AA³⁷-AA³⁸ is PEP8 as defined herein; wherein AA¹¹, AA¹², AA²⁶, AA²⁷, AA²⁸, and AA²⁹ are as defined herein; wherein one end of a first LINKER interacts covalently with AA²⁰; wherein another end of a first LINKER interacts covalently with AA²; wherein one end of a second LINKER interacts covalently with AA³⁸; wherein another end of a second LINKER interacts covalently with AA¹; wherein AA¹ may be an N-terminal amino acids or a C-terminal amino acid.

[0330] In one aspect, the present disclosure provides a cyclic GFR-binding compound, wherein said cyclic GFR-binding compound is a cyclic peptide, a variant or analog thereof, or a cyclic peptidomimetic as defined herein, with between 15-60 (in particular between 15-55, more particularly between 19-60, and even more particularly between 19-55) amino acids, or between 15-35 (in particular between 15-30, more particularly between 19-35, and even more particularly between 19-30) amino acids, comprising two LINKERs.

[0331] In one aspect, the present disclosure provides a cyclic GFR-binding compound, wherein said cyclic GFR-binding compound is a cyclic peptide, a variant or analog thereof, or a cyclic peptidomimetic as defined herein, with between 15-60 (in particular between 15-55, more particularly between 19-60, and even more particularly between 19-55) amino acids, or between 15-35 (in particular between 15-30, more particularly between 19-35, and even more particularly between 19-30) amino acids, having any one of the following schematic general formulae (V) to (XXVIII) (hereinafter may also be referred to as compounds (V) to (XXVIII) or peptides (V) to (XXVIII)):

[0332] wherein LINKER is a linear or branched organic divalent radical, moiety or compound having a molecular weight (Mw) comprised between about 28 and about 2,000 Da, in particular, between about 300 and about 1000 Da, more particularly between about 300 and about 800 Da; wherein PEP12 is a peptide with 8 amino acids of formula PEP1-AA¹⁷-PEP11 as defined herein; wherein PEP2 is a peptide with five amino acids as already defined herein; wherein PEP5 is a peptide with five amino acids as already defined herein; wherein PEP6 is a peptide with between five and seven amino acids as already defined herein; wherein PEP7 an amino acid or a peptide with between two and seven amino acids as already defined herein; wherein PEP8 an amino acid or a peptide with between two and six amino acids as already defined herein; wherein PEP9 is a peptide with between six and twelve amino acids; wherein PEP10 is a peptide with between six and eleven amino acids; wherein curved lines represents covalent bonds between LINKERs and PEP1 to PEP12 “boxes”. Curved lines' lengths may not be representative of the actual relative distance between the LINKERs and PEP1 to PEP12.

[0333] In one aspect, the present disclosure provides a cyclic GFR-binding compound, wherein said cyclic GFR-binding compound is a cyclic peptide, a variant or analog thereof, or a cyclic peptidomimetic as defined herein, with between 15-60 (in particular between 15-55, more particularly between 19-60, and even more particularly between 19-55) amino acids, or between 15-35 (in particular between 15-30, more particularly between 19-35, and even more particularly between 19-30) amino acids, having any one of the following schematic general formulae (XXIX) to (XXXIV) (hereinafter may also be referred to as compounds (XXIX) to (XXXIV) or peptides (XXIX) to (XXXIV)):

[0334] wherein LINKER is a linear or branched organic divalent radical, moiety or compound having a molecular weight (Mw) comprised between about 28 and about 2,000 Da, in particular, between about 300 and about 1000 Da, more particularly between about 300 and about 800 Da; wherein AA¹³-AA¹⁴-AA¹⁵-AA¹⁸-AA¹⁷-AA¹⁸-AA¹⁹-AA²⁰ is PEP12 as defined herein; wherein AA²¹-AA²²-AA²³-AA²⁴-AA²⁵ is PEP2 as already defined herein; wherein AA⁸-AA⁹-AA¹⁰ is PEP3 as defined herein; wherein AA³⁰-AA³¹-AA³² is PEP4 as defined herein; wherein AA¹¹, AA¹², AA²⁸, AA²⁷, AA²⁸, and AA²⁹ are as defined herein; wherein one end of LINKER interacts covalently with AA¹⁶ or AA²⁰; wherein another end of LINKER interacts covalently with AA²¹; and wherein curved lines represents covalent bonds between LINKERs and AAs “boxes”. Curved lines' lengths may not be representative of the actual relative distance between the LINKERs and AAs.

[0335] In certain embodiments, PEP1 is selected from the group consisting of SAIS, SSLS, NAIS, SATS, SPIS, EPIS, SPIN, KPLS, EPLP, EPLT, SNIT, RSVK and RPVQ.

[0336] In certain embodiments, PEP2 is selected from the group consisting of LKNYQ, LKVYP, LKKYR, LRKHR, LKYHY, KFKYE, YGKIP, YKQYE, DHHKD, EQLSN, IGEMS, LGEMS, KEVQV and KKATV.

[0337] In certain embodiments, the pair PEP1:PEP2 is selected from the group consisting of SAIS:LKNYQ, SSLS:LKVYP, NAIS:LKKYR, SATS:LRKHR, SPIS:LKYHY, EPIS:KFKYE, SPIN:YGKIP, SPIS:YKQYE, KPLS:DHHKD, EPLP:EQLSN, EPLT:EQLSN, SNIT:IGEMS, SNIT:LGEMS, RSVK:KEVQV and RPVQ:KKATV.

[0338] In certain embodiments, PEP3 is selected from the group consisting of VPT, VPE, APT, TPT, VPA, APV, VPQ, VSQ, SRV and TQV.

[0339] In certain embodiments, PEP4 is selected from the group consisting of VVE, TVE, VVR, VVK, VAE, AVS, VVD, VEE, VRS, VKS, QHN, EHS, EEH and EDH.

[0340] In certain embodiments, PEP5 is a peptide of general formula PEP3-AA¹¹-AA¹²; wherein PEP3 is selected from the group consisting of VPT, VPE, APT, TPT, VPA, APV, VPQ, VSQ, SRV and TQV; wherein AA¹¹ is selected from the group consisting of E, K, Q, R, A, D, G and H; and wherein AA¹² is selected from the group consisting of L, M, T, E, Q and H. In one particular example, PEP5 is selected from the group consisting of VPTEL, VPEKM, APTKL, APTQL, VPTKL, TPTKM, VPARL, VPTRL, APVKT, VPQAL, VSQDL, VPQDL, VPTEE, VPTGQ, SRVHH and TQVQL.

[0341] In certain embodiments, PEP6 is a peptide of general formula AA²⁶-AA²⁷-AA²⁸-AA²⁹-PEP4; wherein PEP4 is selected from the group consisting of VVE, TVE, VVR, VVK, VAE, AVS, VVD, VEE, VRS, VKS, QHN, EHS, EEH and EDH; wherein AA²⁶ is absent or selected from the group consisting of AA^{III} amino acids, preferably is absent or is E; wherein AA²⁷ and AA²⁸ are independently selected from the group consisting of AA^{III} and AA^{V} amino acids; and wherein AA²⁹ is absent or selected from the group consisting of AA^{II} amino acids, preferably is absent or is S. In one particular example, PEP6 is selected from the group consisting of DMVVE, NMTVE, EMVVE, NMVVR, NMVVK, EGMSVAE, GMAVS, GMVVD, MIVEE, MIVRS, MIVKS, MVVKS, FLQHN, LEEHS, RLEEH and TLEDH.

[0342] In certain embodiments, PEP7 is an amino acid or a peptide with between two and seven amino acids of general formula AA¹-AA²-AA³-AA⁴-AA⁵-AA⁶-AA⁷; wherein wherein AA¹, AA², AA³, AA⁴, and AA⁵ are independently absent or AA^{I} as defined herein; wherein AA⁶ is absent or selected from the group consisting of S, T, C, E, Q, P and R; wherein AA⁷ is absent or is selected from the group consisting of S, T, C, E, Q, P and R, and wherein at least one of AA¹, AA², AA³, AA⁴, AA⁵, AA⁶ or AA⁷ is not absent. In one particular example, PEP7 is selected from the group consisting of KIPKAXX, GIPEPXX, SIPKAXX, HVTKPTX, YVPKPXX, TVPKPXX, AVPKAXX, KVGKAXX, KASKAXX, GSAGPXX, AAPASXX, STPPTXX, HVPKPXX, RVPSTXX, ASAAPXX, ASASPXX, NDEGLEX, SSVKXQP and RNVQXRP, wherein X is C or S throughout the present description.

[0343] In certain embodiments, PEP8 is an amino acid or a peptide with between two and six amino acids of general formula AA³³-AA³⁴-AA³⁵-AA³⁶-AA³⁷-AA³⁸; wherein AA³³ is absent or is selected from the group consisting of AA^{I} amino acids at the exception of AA^{VI} amino acids; AA³⁴ is absent or is selected from the group consisting of AA^{III} and AA^{IV} amino acids; wherein AA³⁵ is absent or is selected from the group consisting of AA^{II} amino acids, preferably is S or C; wherein AA³⁶ is absent or is selected from the group consisting of AA^{III} and AA^{IV} amino acids; wherein AA³⁷ is absent or is selected from the group consisting of AA^{II} amino acids, preferably is S or C; wherein AA³⁸ is absent or is selected from the group consisting of AA^{I}; and wherein at least one of AA³³, AA³⁴, AA³⁵, AA³⁶, AA³⁷ or AA³⁸ is not absent. In one particular example, PEP8 is selected from the group consisting of GXGXR, SXAXR, SXGXH, AXGXH, XGXR, EXGXR, RXGXS, AXGXR, SXGXR, XGXL, XKXS, KXEXR, QXEXR, LEXAXA and LAXKXE.

[0344] In certain embodiments, PEP9 is a peptide of general formula PEP7-PEP5; wherein PEP5 is a peptide of formula PEP3-AA¹¹-AA¹²; wherein PEP3 is selected from the group consisting of VPT, VPE, APT, TPT, VPA, APV, VPQ, VSQ, SRV and TQV; wherein AA¹ is selected from the group consisting of E, K, Q, R, A, D, G and H; and wherein AA¹² is selected from the group consisting of L, M, T, E, Q and H; wherein PEP7 is an amino acid or a peptide with between two and seven amino acids of general formula AA¹-AA²-AA³-AA⁴-AA⁵-AA⁶-AA⁷; wherein AA¹, AA², AA³, AA⁴, and AA⁵ are independently absent or AA^{I} as defined herein; wherein AA⁶ is absent or selected from the group consisting of S, T, C, E, Q, P and R; wherein AA⁷ is absent or is selected from the group consisting of S, T, C, E, Q, P and R. In one particular example, PEP9 is selected from the group consisting of KIPKAXXVPTEL, GIPEPXXVPEKM, SIPKAXXVPTEL, HVTKPTXAPTKL, YVPKPXXAPTKL, TVPKPXXAPTQL, AVPKAXXAPTKL, KVGKAXXVPTKL, KASKAXXVPTKL, GSAGPXXTPTKM, AAPASXXVPARL, STPPTXXVPTRL, HVPKPXXAPTKL, RVPSTXXAPVKT, ASAAPXXVPQAL, ASASPXXVSQDL, ASASPXXVPQDL, NDEGLEXVPTEE, NDEGLEXVPTGQ, SSVKXQPSRVHH and RNVQXRPTQVQL, wherein X is C or S throughout the present description.

[0345] In certain embodiments, PEP10 is a peptide of general formula PEP6-PEP8; wherein PEP6 is a peptide of formula AA²⁶-AA²⁷-AA²⁸-AA²⁹-PEP4; wherein PEP4 is selected from the group consisting of VVE, TVE, VVR, VVK, VAE, AVS, VVD, VEE, VRS, VKS, QHN, EHS, EEH and EDH; wherein AA²⁶ is absent or selected from the group consisting of AA^{III} amino acids, preferably is absent or is E; wherein AA²⁷ and AA²⁸ are independently selected from the group consisting of AA^{III} and AA^{V} amino acids; and wherein AA²⁹ is absent or selected from the group consisting of AA^{II} amino acids, preferably is absent or is S; wherein PEP8 is an amino acid or a peptide with between two and six amino acids of general formula AA³³-AA³⁴-AA³⁵-AA³⁶-AA³⁷-AA³⁸; AA³³ is absent or is selected from the group consisting of AA^{I} amino acids at the exception of AA^{VI} amino acids; AA³⁴ is absent or is selected from the group consisting of AA^{II} and AA^{V} amino acids; wherein AA³⁵ is absent or is selected from the group consisting of AA^{II} amino acids, preferably is S or C; wherein AA³⁶ is absent or is selected from the group consisting of AA^{III} and AA^{V} amino acids; wherein AA³⁷ is absent or is selected from the group consisting of AA^{II} amino acids, preferably is S or C; wherein AA³⁸ is absent or is selected from the group consisting of AA^{I}. In one particular example, PEP10 is selected from the group consisting of DMVVEGXGXR, NMTVESXAXR, EMVVEGXGXR, NMVVRSXGXH, NMVVRAXGXH, NMVVKAXGXH, EGMSVAEXGXR, GMAVSEXGXR, GMVVDRXGXS, DMVVEAXGXR, DMVVESXGXR, MIVEEXGXL, MIVRSXKXS, MIVKSXKXS, MVVKSXKXS, FLQHNKXEXR, LEEHSQXEXR, RLEEHLEXAXA and TLEDHLAXKXE.

[0346] In certain embodiments, PEP12 is a peptide of general formula PEP1-AA¹⁷-PEP11; wherein AA¹ is selected from the group consisting of G, A, V, L, I, P, F, M, W, T and S (in particular is selected from the group consisting of M, I, L, V and T); wherein PEP1 is selected from the group consisting of SAIS, SSLS, NAIS, SATS, SPIS, EPIS, SPIN, KPLS, EPLP, EPLT, SNIT, RSVK and RPVQ.

[0347] In certain embodiments, the pair PEP12:PEP2 is selected from the group consisting of SAIS-AA¹⁷-LYL:LKNYQ, SSLS-AA¹⁷-LFF:LKVYP, NAIS-AA¹-LYF:LKKYR, SATS-AA¹⁷-LYY:LRKHR, SPIS-AA¹⁷-LYK:LKYHY, EPIS-AA¹⁷-LYL:KFKYE, SPIN-AA¹-LYF:YGKIP, SPIS-AA¹⁷-LYI:YKQYE, SPIS-AA¹⁷-LFI:YKQYE, KPLS-AA¹⁷-LYV:DHHKD, EPLP-AA¹⁷-VYY:EQLSN, EPLT-AA¹⁷-LYY:EQLSN, SNIT-AA¹⁷-QIM:IGEMS, SNIT-AA¹⁷-QIM:LGEMS, RSVK-AA¹⁷-AKV:KEVQV and RPVQ-AA¹⁷-RKI:KKATV; wherein AA¹⁷ is selected from the group consisting of G, A, V, L, I, P, F, M, W, T and S (in particular is selected from the group consisting of M, I, L, V and T).

[0348] In certain embodiments, PEP11 is a peptide with 3 amino acids of general formula AA¹⁸-AA¹⁹-AA²⁰ wherein AA¹⁸ is selected from the group consisting of L, V, Q, A and R; wherein AA¹⁹ is selected from the group consisting of F, W, H, Y, I and K; wherein AA²⁰ is selected from the group consisting of L, F, Y, K, I, V and M. In one particular example, PEP11 is selected from the group consisting of LYL, LFF, LYF, LYY, LYK, LYI, LFI, LYV, VYY, QIM, AKV and RKI.

[0349] In certain embodiments, PEP3 is selected from the group consisting of VPT, VPE, APT, TPT, VPA, APV, VPQ, VSQ, SRV and TQV; PEP4 is selected from the group consisting of VVE, TVE, VVR, VVK, VAE, AVS, VVD, VEE, VRS, VKS, QHN, EHS, EEH and EDH; and wherein the pair PEP3:PEP4 is selected from the group consisting of VPT:VVE, VPE:TVE, APT:VVR, APT:VVK, VPT:VAE, VPT:AVS, TPT:VVD, VPA:VVE, APV:VEE, VPQ:VRS, VSQ:VKS, VPQ:VKS, VPT:QHN, VPT:EHS, SRV:EEH and TQV:EDH.

[0350] In certain embodiments, PEP5 is selected from the group consisting of VPT-AA¹¹-AA¹², VPE-AA¹¹-AA¹²-AA¹¹-AA¹², APT-AA¹¹-AA¹², TPT-AA¹¹-AA¹², VPA-AA¹¹-AA¹², VPT-AA¹¹-AA¹², APV-AA¹¹-AA¹², VPQ-AA¹¹-AA¹², VSQ-AA¹¹-AA¹², VPQ-AA¹-AA¹², SRV-AA¹¹-AA¹² and TQV-AA¹¹-AA¹²; wherein AA¹ is selected from the group consisting of E, K, Q, R, A, D, G and H; and wherein AA¹² is selected from the group consisting of L, M, T, E, Q and H; PEP6 is selected from the group consisting of AA²⁶-AA²⁷-AA²⁸-AA²⁹-VVE, AA²⁶-AA²⁷-AA²⁸-AA²⁹-TVE, AA²⁶-AA²⁷-AA²⁸-AA²⁹-VVR, AA²⁶-AA²⁷-AA²⁸-AA²⁹-VVK, AA²⁶-AA²⁷-AA²⁸-AA²⁹-VAE, AA²⁶-AA²⁷-AA²⁸-AA²⁹-AVS, AA²⁶-AA²⁷-AA²⁸-AA²⁹-VVD, AA²⁶-AA²⁷-AA²⁸-AA²⁹-VEE, AA²⁶-AA²⁷-AA²⁸-AA²⁹-VRS, AA²⁶-AA²⁷-AA²⁸-AA²⁹-VKS, AA²⁶-AA²⁷-AA²⁸-AA²⁹-QHN, AA²⁶-AA²⁷-AA²⁸-AA²⁹-EHS, AA²⁶-AA²⁷-AA²⁸-AA²⁹-EEH and AA²⁶-AA²⁷-AA²⁸-AA²⁹-EDH; wherein AA²⁶ is absent or selected from the group consisting of AA^{III} amino acids, preferably is absent or is E; wherein AA²⁷ and AA²⁸ are independently selected from the group consisting of AA^{III} and AA^{V} amino acids; and wherein AA²⁹ is absent or selected from the group consisting of AA^{II} amino acids, preferably is absent or is S; wherein the pair PEP5:PEP6 is selected from the group consisting of VPT-AA¹¹-AA¹²:AA²⁶-AA²⁷-AA²⁸-AA²⁹-VVE, VPE-AA-AA¹²:AA²⁶-AA²⁷-AA²⁸-AA²⁹-TVE, APT-AA¹¹-AA¹²:AA²⁶-AA²⁷-AA²⁸-AA²⁹-VVR, APT-AA¹¹-AA¹²:AA²⁶-AA²⁷-AA²⁸-AA²⁹-VVK, VPT-AA¹¹-AA¹²:AA²⁶-AA²⁷-AA²⁸-AA²⁹-VAE, VPT-AA¹¹-AA¹²:AA²⁶-AA²⁷-AA²⁸-AA²⁹-AVS, TPT-AA¹¹-AA¹²:AA²⁶-AA²⁷-AA²⁸-AA²⁹-VVD, VPA-AA¹¹-AA¹²:AA²⁶-AA²⁷-AA²⁸-AA²⁹-VVE, APV-AA¹¹-AA¹²:AA²⁶-AA²⁷-AA²⁸-AA²⁹-VEE, VPQ-AA¹¹-AA¹²:AA²⁶-AA²⁷-AA²⁸-AA²⁹-VRS, VSQ-AA¹¹-AA¹²:AA²⁶-AA²⁷-AA²⁸-AA²⁹-VKS, VPQ-AA¹¹-AA¹²:AA²⁶-AA²⁷-AA²⁸-AA²⁹-VKS, VPT-AA¹¹-AA¹²:AA²⁶-AA²⁷-AA²⁸-AA²⁹-QHN, VPT-AA¹¹-AA¹²:AA²⁶-AA²⁷-AA²⁸-AA²⁹-EHS, SRV-AA¹¹-AA¹²:AA²⁶-AA²⁷-AA²⁸-AA²⁹-EEH and TQV-AA¹¹-AA¹²:AA²⁶-AA²⁷-AA²⁸-AA²⁹-EDH.

[0351] In certain embodiments, PEP5 is selected from the group consisting of VPTEL, VPEKM, APTKL, APTQL, VPTKL, TPTKM, VPARL, VPTRL, APVKT, VPQAL, VSQDL, VPQDL, VPTEE, VPTGQ, SRVHH and TQVQL; PEP6 is selected from the group consisting of DMVVE, NMTVE, EMVVE, NMVVR, NMVVK, EGMSVAE, GMAVS, GMVVD, MIVEE, MIVRS, MIVKS, MVVKS, FLQHN, LEEHS, RLEEH and TLEDH; and wherein the pair PEP5:PEP6 is selected from the group consisting of VPTEL:DMVVE, VPEKM:NMTVE, VPTEL:EMVVE, APTKL:NMVVR, APTQL:NMVVR, APTKL:NMVVK, VPTKL:EGMSVAE, VPTKL:GMAVS, TPTKM:GMVVD, VPARL:DMVVE, VPTRL:DMVVE, APVKT:MIVEE, VPQAL:MIVRS, VSQDL:MIVKS, VPQDL:MVVKS, VPTEE:FLQHN, VPTGQ:LEEHS, SRVHH:RLEEH and TQVQL:TLEDH.

[0352] In certain embodiments, PEP7 is selected from the group consisting of KIPKAXX, GIPEPXX, SIPKAXX, HVTKPTX, YVPKPXX, TVPKPXX, AVPKAXX, KVGKAXX, KASKAXX, GSAGPXX, AAPASXX, STPPTXX, HVPKPXX, RVPSTXX, ASAAPXX, ASASPXX, NDEGLEX, SSVKXQP and RNVQXRP; wherein PEP8 is selected from the group consisting of GXGXR, SXAXR, SXGXH, AXGXH, XGXR, EXGXR, RXGXS, AXGXR, SXGXR, XGXL, XKXS, KXEXR, QXEXR, LEXAXA and LAXKXE; and wherein the pair PEP7:PEP8 is selected from the group consisting of KIPKAXX:GXGXR, GIPEPXX:SXAXR, SIPKAXX:GXGXR, HVTKPTX:SXGXH, YVPKPXX:SXGXH, TVPKPXX:AXGXH, AVPKAXX:AXGXH, KVGKAXX:XGXR, KASKAXX:EXGXR, GSAGPXX:RXGXS, AAPASXX:AXGXR, STPPTXX:SXGXR, HVPKPXX:SXGXH, RVPSTXX:XGXL, ASAAPXX:XKXS, ASASPXX:XKXS, NDEGLEX:KXEXR, NDEGLEX:QXEXR, SSVKXQP:LEXAXA and RNVQXRP:LAXKXE.

[0353] In certain embodiments, PEP9 is selected from the group consisting of KIPKAXXVPT-AA¹¹-AA¹², GIPEPXXVPE-AA¹¹-AA¹², SIPKAXXVPT-AA¹¹-AA¹², HVTKPTXAPT-AA¹¹-AA¹², YVPKPXXAPT-AA¹¹-AA¹², TVPKPXXAPT-AA¹¹-AA¹², AVPKAXXAPT-AA¹¹-AA¹², KVGKAXXVPT-AA¹¹-AA¹², KASKAXXVPT-AA¹¹-AA¹², GSAGPXXTPT-AA¹¹-AA¹², AAPASXXVPA-AA¹¹-AA¹², STPPTXXVPT-AA¹¹-AA¹², HVPKPXXAPT-AA¹¹-AA¹², RVPSTXXAPV-AA¹¹-AA¹², ASAAPXXVPQ-AA¹¹-AA¹², ASASPXXVSQ-AA¹¹-AA¹², ASASPXXVPQ-AA¹¹-AA¹², NDEGLEXVPT-AA¹¹-AA¹², NDEGLEXVPT-AA¹¹-AA¹², SSVKXQPSRV-AA¹¹-AA¹² and RNVQXRPTQV-AA¹¹-AA¹²; wherein AA¹¹ is selected from the group consisting of E, K, Q, R, A, D, G and H; and wherein AA¹² is selected from the group consisting of L, M, T, E, Q and H; PEP10 is selected from the group consisting of AA²⁶-AA²⁷-AA²⁸-AA²⁹-VVEGXGXR, AA²⁶-AA²⁷-AA²⁸-AA²⁹-TVESXAXR, AA²⁶-AA²⁷-AA²⁸-AA²⁹-VVEGXGX R, AA²⁶-AA²⁷-AA²⁸-AA²⁹-VVRSXGXH, AA²⁶-AA²⁷-AA²⁸-AA²⁹-VVRAXGXH, AA²⁶-AA²⁷-AA²⁸-AA²⁹-VVKAXGXH, AA²⁶-AA²⁷-AA²⁸-AA²⁹-VAEXGXR, AA²⁶-AA²⁷-AA²⁸-AA²⁹-AVSEXGXR, AA²⁶-AA²⁷-AA²⁸-AA²⁹-VVDRXGXS, AA²⁶-AA²⁷-AA²⁸-AA²⁹-VVEAXGXR, AA²⁶-AA²⁷-AA²⁸-AA²⁹-VVESXGXR, AA²⁶-AA²⁷-AA²⁸-AA²⁹-VEEXGXL, AA²⁶-AA²⁷-AA²⁸-AA²⁹-VRSXKXS, AA²⁶-AA²⁷-AA²⁸-AA²⁹-VKSXKXS, AA²⁶-AA²⁷-AA²⁸-AA²⁹-VKSXKXS, AA²⁶-AA²⁷-AA²⁸-AA²⁹-QHNKXEXR, AA²⁶-AA²⁷-AA²⁸-AA²⁹-EHSQXEXR, AA²⁶-AA²⁷-AA²⁸-AA²⁹-EEHLEXAXA and AA²⁶-AA²⁷-AA²⁸-AA²⁹-EDHLAXKXE; wherein AA²⁶ is absent or selected from the group consisting of AA^{III} amino acids, preferably is absent or is E; wherein AA²⁷ and AA²⁸ are independently selected from the group consisting of AA^{III} and AA^{V} amino acids; and wherein AA²⁹ is absent or selected from the group consisting of AA^{II} amino acids, preferably is absent or is S; and wherein the pair PEP9:PEP10 is selected from the group consisting of KIPKAXXVPT-AA¹¹-AA¹²:AA²⁶-AA²⁷-AA²⁸-AA²⁹-VVEGXGX R, GIPEPXXVPE-AA-AA¹²:AA²⁶-AA²⁷-AA²⁸-AA²⁹-TVESXAXR, SIPKAXXVPT-AA¹¹-AA¹²:AA²⁶-AA²⁷-AA²⁸-AA²⁹-VVEGXGXR, HVTKPTXAPT-AA¹¹-AA¹²:AA²⁶-AA²⁷-AA²⁸-AA²⁹-VVRSXGXH, YVPKPXXAPT-AA¹-AA¹²:AA²⁶-AA²⁷-AA²⁸-AA²⁹-VVRSXGXH, TVPKPXXAPT-AA¹¹-AA¹²:AA²⁶-AA²⁷-AA²⁸-AA²⁹-VVRAXGXH, AVPKAXXAPT-AA¹¹-AA¹²:AA²⁶-AA²⁷-AA²⁸-AA²⁹-VVKAXGXH, KVGKAXXVPT-AA¹¹-AA¹²:AA²⁶-AA²⁷-AA²⁸-AA²⁹-VAEXGXR, KASKAXXVPT-AA¹¹-AA¹²-AA¹¹-AA¹²:AA²⁶-AA²⁷-AA²⁸-AA²⁹-AVSEXGXR, GSAGPXXTPT-AA¹-AA¹²:AA²⁶-AA²⁷-AA²⁸-AA²⁹-VVDRXGXS, AAPASXXVPA-AA¹¹-AA¹²:AA²⁶-AA²⁷-AA²⁸-AA²⁹-VVEAXGXR, STPPTXXVPT-AA¹¹-AA¹²-AA¹¹-AA¹²:AA²⁶-AA²⁷-AA²⁸-AA²⁹-VVESXGXR, HVPKPXXAPT-AA¹¹-AA¹²:AA²⁶-AA²⁷-AA²⁸-AA²⁹-VVRSXGXH, RVPSTXXAPV-AA¹¹-AA¹²:AA²⁶-AA²⁷-AA²⁸-AA²⁹-VEEXGXL, ASAAPXXVPQ-AA¹¹-AA²:AA²⁶-AA²⁷-AA²⁸-AA²⁹-VRSXKXS, ASASPXXVSQ-AA¹¹-AA¹²:AA²⁶-AA²⁷-AA²⁸-AA²⁹-VKSXKXS, ASASPXXVPQ-AA¹¹-AA¹²:AA²⁶-AA²⁷-AA²⁸-AA²⁹-VKSXKXS, NDEGLEXVPT-AA¹¹-AA¹²:AA²⁶-AA²⁷-AA²⁸-AA²⁹-QHNKXEXR, NDEGLEXVPT-AA¹¹-AA¹²:AA²⁶-AA²⁷-AA²⁸-AA²⁹-EHSQXEXR, SSVKXQPSRV-AA¹-AA¹²:AA²⁶-AA²⁷-AA²⁸-AA²⁹-EEHLEXAXA and RNVQXRPTQV-AA¹¹-AA¹²:AA²⁶-AA²⁷-AA²⁸-AA²⁹-EDHLAXKXE.

[0354] In certain embodiments, PEP9 is selected from the group consisting of KIPKAXXVPTEL, GIPEPXXVPEKM, SIPKAXXVPTEL, HVTKPTXAPTKL, YVPKPXXAPTKL, TVPKPXXAPTQL, AVPKAXXAPTKL, KVGKAXXVPTKL, KASKAXXVPTKL, GSAGPXXTPTKM, AAPASXXVPARL, STPPTXXVPTRL, HVPKPXXAPTKL, RVPSTXXAPVKT, ASAAPXXVPQAL, ASASPXXVSQDL, ASASPXXVPQDL, NDEGLEXVPTEE, NDEGLEXVPTGQ, SSVKXQPSRVHH and RNVQXRPTQVQL; PEP10 is selected from the group consisting of DMVVEGXGXR, NMTVESXAXR, EMVVEGXGXR, NMVVRSXGXH, NMVVRAXGXH, NMVVKAXGXH, EGMSVAEXGXR, GMAVSEXGXR, GMVVDRXGXS, DMVVEAXGXR, DMVVESXGXR, MIVEEXGXL, MIVRSXKXS, MIVKSXKXS, MVVKSXKXS, FLQHNKXEXR, LEEHSQXEXR, RLEEHLEXAXA and TLEDHLAXKXE; and wherein the pair PEP9:PEP10 is selected from the group consisting of KIPKAXXVPTEL:DMVVEGXGXR, GIPEPXXVPEKM:NMTVESXAXR, SIPKAXXVPTEL:EMVVEGXGXR, HVTKPTXAPTKL:NMVVRSXGXH, YVPKPXXAPTKL:NMVVRSXGXH, TVPKPXXAPTQL:NMVVRAXGXH, AVPKAXXAPTKL:NMVVKAXGXH, KVGKAXXVPTKL:EGMSVAEXGXR, KASKAXXVPTKL:GMAVSEXGXR, GSAGPXXTPTKM:GMVVDRXGXS, AAPASXXVPARL:DMVVEAXGXR, STPPTXXVPTRL:DMVVESXGXR, HVPKPXXAPTKL:NMVVRSXGXH, RVPSTXXAPVKT:MIVEEXGXL, ASAAPXXVPQAL:MIVRSXKXS, ASASPXXVSQDL:MIVKSXKXS, ASASPXXVPQDL:MVVKSXKXS, NDEGLEXVPTEE:FLQHNKXEXR, NDEGLEXVPTGQ:LEEHSQXEXR, NDEGLEXVPTEE:FLQHNKXEXR, NDEGLEXVPTEE:FLQHNKXEXR, SSVKXQPSRVHH:RLEEHLEXAXA and RNVQXRPTQVQL:TLEDHLAXKXE.

[0355] In certain embodiments, PEP5 is selected from the group consisting of VPTEL, VPEKM, APTKL, APTQL, VPTKL, TPTKM, VPARL, VPTRL, APVKT, VPQAL, VSQDL, VPQDL, VPTEE, VPTGQ, SRVHH and TQVQL; PEP6 is selected from the group consisting of DMVVE, NMTVE, EMVVE, NMVVR, NMVVK, EGMSVAE, GMAVS, GMVVD, MIVEE, MIVRS, MIVKS, MVVKS, FLQHN, LEEHS, RLEEH and TLEDH; wherein the pair PEP5:PEP6 is selected from the group consisting of VPTEL:DMVVE, VPEKM:NMTVE, VPTEL:EMVVE, APTKL:NMVVR, APTQL:NMVVR, APTKL:NMVVK, VPTKL:EGMSVAE, VPTKL:GMAVS, TPTKM:GMVVD, VPARL:DMVVE, VPTRL:DMVVE, APVKT:MIVEE, VPQAL:MIVRS, VSQDL:MIVKS, VPQDL:MVVKS, VPTEE:FLQHN, VPTGQ:LEEHS, SRVHH:RLEEH and TQVQL:TLEDH; and wherein the pair PEP5:PEP6 is not VPTEL:DMVVE when PEP1 is SAIS and PEP2 is LKNYQ; wherein the pair PEP5:PEP6 is not VPEKM:NMTVE when PEP1 is SSLS and PEP2 is LKVYP; wherein the pair PEP5:PEP6 is not VPTEL:EMVVE when PEP1 is SAIS and PEP2 is LKNYQ; wherein the pair PEP5:PEP6 is not APTKL:NMVVR when PEP1 is NAIS and PEP2 is LKKYR; wherein the pair PEP5:PEP6 is not APTQL:NMVVR when PEP1 is NAIS and PEP2 is LKKYR; wherein the pair PEP5:PEP6 is not APTKL:NMVVK when PEP1 is SATS and PEP2 is LRKHR; wherein the pair PEP5:PEP6 is not VPTKL:EGMSVAE when PEP1 is SPIS and PEP2 is LKYHY; wherein the pair PEP5:PEP6 is not VPTKL:GMAVS when PEP1 is EPIS and PEP2 is KFKYE; wherein the pair PEP5:PEP6 is not TPTKM:GMVVD when PEP1 is SPIN and PEP2 is YGKIP; wherein the pair PEP5:PEP6 is not VPARL:DMVVE when PEP1 is SPIS and PEP2 is YKQYE; wherein the pair PEP5:PEP6 is not VPTRL:DMVVE when PEP1 is SPIS and PEP2 is YKQYE; wherein the pair PEP5:PEP6 is not APVKT:MIVEE when PEP1 is KPLS and PEP2 is DHHKD; wherein the pair PEP5:PEP6 is not VPQAL:MIVRS when PEP1 is EPLP and PEP2 is EQLSN; wherein the pair PEP5:PEP6 is not VSQDL:MIVKS when PEP1 is EPLT and PEP2 is EQLSN; wherein the pair PEP5:PEP6 is not VPQDL:MVVKS when PEP1 is EPLT and PEP2 is EQLSN; wherein the pair PEP5:PEP6 is not VPTEE:FLQHN when PEP1 is SNIT and PEP2 is IGEMS; wherein the pair PEP5:PEP6 is not VPTGQ:LEEHS when PEP1 is SNIT and PEP2 is LGEMS; wherein the pair PEP5:PEP6 is not SRVHH:RLEEH when PEP1 is RSVK and PEP2 is KEVQV; and wherein the pair PEP5:PEP6 is not TQVQL:TLEDH when PEP1 is RPVQ and PEP2 is KKATV.

[0356] In certain embodiments, PEP9 is selected from the group consisting of KIPKAXXVPT-AA¹¹-AA¹², GIPEPXXVPE-AA¹¹-AA¹², SIPKAXXVPT-AA¹¹-AA¹², HVTKPTXAPT-AA¹¹-AA¹², YVPKPXXAPT-AA¹-AA¹², TVPKPXXAPT-AA¹¹-AA¹², AVPKAXXAPT-AA¹¹-AA¹², KVGKAXXVPT-AA¹¹-AA¹², KASKAXXVPT-AA¹¹-AA¹², GSAGPXXTPT-AA¹¹-AA¹², AAPASXXVPA-AA¹¹-AA¹², STPPTXXVPT-AA¹¹-AA¹², HVPKPXXAPT-AA¹¹-AA¹², RVPSTXXAPV-AA¹¹-AA¹², ASAAPXXVPQ-AA¹¹-AA¹², ASASPXXVSQ-AA¹¹-AA¹², ASASPXXVPQ-AA¹¹-AA¹², NDEGLEXVPT-AA¹¹-AA¹², NDEGLEXVPT-AA¹¹-AA¹², SSVKXQPSRV-AA¹-AA¹² and RNVQXRPTQV-AA¹¹-AA¹²; wherein AA¹¹ is selected from the group consisting of E, K, Q, R, A, D, G and H; and wherein AA¹² is selected from the group consisting of L, M, T, E, Q and H; PEP10 is selected from the group consisting of AA²⁶-AA²⁷-AA²⁸-AA²⁹-VVEGXGXR, AA²⁶-AA²⁷-AA²⁸-AA²⁹-TVESXAXR, AA²⁶-AA²⁷-AA²⁸-AA²⁹-VVEGXGX R, AA²⁶-AA²⁷-AA²⁸-AA²⁹-VVRSXGXH, AA²⁶-AA²⁷-AA²⁸-AA²⁹-VVRAXGXH, AA²⁶-AA²⁷-AA²⁸-AA²⁹-VVKAXGXH, AA²⁶-AA²⁷-AA²⁸-AA²⁹-VAEXGXR, AA²⁶-AA²⁷-AA²⁸-AA²⁹-AVSEXGXR, AA²⁶-AA²⁷-AA²⁸-AA²⁹-VVDRXGXS, AA²⁶-AA²⁷-AA²⁸-AA²⁹-VVEAXGXR, AA²⁶-AA²⁷-AA²⁸-AA²⁹-VVESXGXR, AA²⁶-AA²⁷-AA²⁸-AA²⁹-VEEXGXL, AA²⁶-AA²⁷-AA²⁸-AA²⁹-VRSXKXS, AA²⁶-AA²⁷-AA²⁸-AA²⁹-VKSXKXS, AA²⁶-AA²⁷-AA²⁸-AA²⁹-VKSXKXS, AA²⁶-AA²⁷-AA²⁸-AA²⁹-QHNKXEXR, AA²⁶-AA²⁷-AA²⁸-AA²⁹-EHSQXEXR, AA²⁶-AA²⁷-AA²⁸-AA²⁹-EEHLEXAXA and AA²⁶-AA²⁷-AA²⁸-AA²⁹-EDHLAXKXE; wherein AA²⁶ is absent or selected from the group consisting of AA^{II} amino acids, preferably is absent or is E; wherein AA²⁷ and AA²⁸ are independently selected from the group consisting of AA^{III} and AA^{V} amino acids; and wherein AA²⁹ is absent or selected from the group consisting of AA^{II} amino acids, preferably is absent or is S; and wherein the pair PEP9:PEP10 is selected from the group consisting of KIPKAXXVPT-AA¹¹-AA¹²:AA²⁶-AA²⁷-AA²⁸-AA²⁹-VVEGXGXGXR, GIPEPXXVPE-AA-AA¹²:AA²⁶-AA²⁷-AA²⁸-AA²⁹-TVESXAXR, SIPKAXXVPT-AA¹¹-AA¹²:AA²⁶-AA²⁷-AA²⁸-AA²⁹-VVEGXGXR, HVTKPTXAPT-AA¹¹-AA¹²:AA²⁶-AA²⁷-AA²⁸-AA²⁹-VVRSXGXH, YVPKPXXAPT-AA¹-AA¹²:AA²⁶-AA²⁷-AA²⁸-AA²⁹-VVRSXGXH, TVPKPXXAPT-AA¹¹-AA¹²:AA²⁶-AA²⁷-AA²⁸-AA²⁹-VVRAXGXH, AVPKAXXAPT-AA¹¹-AA¹²:AA²⁶-AA²⁷-AA²⁸-AA²⁹-VVKAXGXH, KVGKAXXVPT-AA¹¹-AA¹²:AA²⁶-AA²⁷-AA²⁸-AA²⁹-VAEXGXR, KASKAXXVPT-AA¹¹-AA¹²-AA¹¹-AA¹²:AA²⁶-AA²⁷-AA²⁸-AA²⁹-AVSEXGXR, GSAGPXXTPT-AA¹¹-AA¹²:AA²⁶-AA²⁷-AA²⁸-AA²⁹-VVDRXGXS, AAPASXXVPA-AA¹¹-AA¹²:AA²⁶-AA²⁷-AA²⁸-AA²⁹-VVEAXGXR, STPPTXXVPT-AA¹¹-AA¹²-AA¹¹-AA¹²:AA²⁶-AA²⁷-AA²⁸-AA²⁹-VVESXGXR, HVPKPXXAPT-AA¹¹-AA¹²:AA²⁶-AA²⁷-AA²⁸-AA²⁹-VVRSXGXH, RVPSTXXAPV-AA¹¹-AA¹²:AA²⁶-AA²⁷-AA²⁸-AA²⁹-VEEXGXL, ASAAPXXVPQ-AA¹¹-AA¹²:AA²⁶-AA²⁷-AA²⁸-AA²⁹-VRSXKXS, ASASPXXVSQ-AA¹¹-AA¹²:AA²⁶-AA²⁷-AA²⁸-AA²⁹-VKSXKXS, ASASPXXVPQ-AA¹¹-AA¹²:AA²⁶-AA²⁷-AA²⁸-AA²⁹-VKSXKXS, NDEGLEXVPT-AA¹¹-AA¹²:AA²⁶-AA²⁷-AA²⁸-AA²⁹-QHNKXEXR, NDEGLEXVPT-AA¹¹-AA¹²:AA²⁶-AA²⁷-AA²⁸-AA²⁹-EHSQXEXR, SSVKXQPSRV-AA¹¹-AA¹²:AA²⁶-AA²⁷-AA²⁸-AA²⁹-EEHLEXAXA and RNVQXRPTQV-AA¹¹-AA¹²:AA²⁶-AA²⁷-AA²⁸-AA²⁹-EDHLAXKXE; and wherein PEP9:PEP10 is not KIPKAXXVPT-AA¹¹-AA¹²:AA²⁶-AA²⁷-AA²⁸-AA²⁹-VVEGXGXR when PEP1 is SAIS and PEP2 is LKNYQ; wherein PEP9:PEP10 is not GIPEPXXVPE-AA¹¹-AA¹²:AA²⁶-AA²⁷-AA²⁸-AA²⁹-TVESXAXR when PEP1 is SSLS and PEP2 is LKVYP; wherein PEP9:PEP10 is not SIPKAXXVPT-AA¹¹-AA¹²:AA²⁶-AA²⁷-AA²⁸-AA²⁹-VVEGXGXR when PEP1 is SAIS and PEP2 is LKNYQ; wherein PEP9:PEP10 is not HVTKPTXAPT-AA¹¹-AA¹²:AA²⁶-AA²⁷-AA²⁸-AA²⁹-VVRSXGXH when PEP1 is NAIS and PEP2 is LKKYR; wherein PEP9:PEP10 is not YVPKPXXAPT-AA¹¹-AA¹²:AA²⁶-AA²⁷-AA²⁸-AA²⁹-VVRSXGXH when PEP1 is NAIS and PEP2 is LKKYR; wherein PEP9:PEP10 is not TVPKPXXAPT-AA¹¹-AA¹²:AA²⁶-AA²⁷-AA²⁸-AA²⁹-VVRAXGXH when PEP1 is NAIS and PEP2 is LKKYR; wherein PEP9:PEP10 is not AVPKAXXAPT-AA¹¹-AA¹²:AA²⁶-AA²⁷-AA²⁸-AA²⁹-VVKAXGXH when PEP1 is SATS and PEP2 is LRKHR; wherein PEP9:PEP10 is not KVGKAXXVPT-AA¹¹-AA¹²:AA²⁶-AA²⁷-AA²⁸-AA²⁹-VAEXGXR when PEP1 is SPIS and PEP2 is LKYHY; wherein PEP9:PEP10 is not KASKAXXVPT-AA¹¹-AA¹²-AA¹¹-AA¹²:AA²⁶-AA²⁷-AA²⁸-AA²⁹-AVSEXGXR when PEP1 is EPIS and PEP2 is KFKYE; wherein PEP9:PEP10 is not GSAGPXXTPT-AA¹¹-AA¹²:AA²⁶-AA²⁷-AA²⁸-AA²⁹-VVDRXGXS when PEP1 is SPIN and PEP2 is YGKIP; wherein PEP9:PEP10 is not AAPASXXVPA-AA¹¹-AA¹²:AA²⁶-AA²⁷-AA²⁸-AA²⁹-VVEAXGXR when PEP1 is SPIS and PEP2 is YKQYE; wherein PEP9:PEP10 is not STPPTXXVPT-AA¹¹-AA¹²-AA¹¹-AA¹²:AA²⁶-AA²⁷-AA²⁸-AA²⁹-VVESXGXR when PEP1 is SPIS and PEP2 is YKQYE; wherein PEP9:PEP10 is not HVPKPXXAPT-AA¹¹-AA¹²:AA²⁶-AA²⁷-AA²⁸-AA²⁹-VVRSXGXH when PEP1 is NAIS and PEP2 is LKKYR; wherein PEP9:PEP10 is not RVPSTXXAPV-AA¹¹-AA¹²:AA²⁶-AA²⁷-AA²⁸-AA²⁹-VEEXGXL when PEP1 is KPLS and PEP2 is DHHKD; wherein PEP9:PEP10 is not ASAAPXXVPQ-AA¹¹-AA¹²:AA²⁶-AA²⁷-AA²⁸-AA²⁹-VRSXKXS when PEP1 is EPLP and PEP2 is EQLSN; ASASPXXVSQ-AA¹¹-AA¹²:AA²⁶-AA²⁷-AA²⁸-AA²⁹-VKSXKXS when PEP1 is EPLT and PEP2 is EQLSN; wherein PEP9:PEP10 is not ASASPXXVPQ-AA¹¹-AA¹²:AA²⁶-AA²⁷-AA²⁸-AA²⁹-VKSXKXS when PEP1 is EPLT and PEP2 is EQLSN; wherein PEP9:PEP10 is not NDEGLEXVPT-AA¹¹-AA¹²:AA²⁶-AA²⁷-AA²⁸-AA²⁹-QHNKXEXR when PEP1 is SNIT and PEP2 is IGEMS; wherein PEP9:PEP10 is not NDEGLEXVPT-AA¹¹-AA¹²:AA²⁶-AA²⁷-AA²⁸-AA²⁹-EHSQXEXR when PEP1 is SNIT and PEP2 is LGEMS; wherein PEP9:PEP10 is not SSVKXQPSRV-AA¹¹-AA¹²:AA²⁶-AA²⁷-AA²⁸-AA²⁹-EEHLEXAXA when PEP1 is RSVK and PEP2 is KEVQV; and wherein PEP9:PEP10 is not RNVQXRPTQV-AA¹¹-AA¹²:AA²⁶-AA²⁷-AA²⁸-AA²⁹-EDHLAXKXE when PEP1 is RPVQ and PEP2 is KKATV.

[0357] In certain embodiments, PEP9 is selected from the group consisting of KIPKAXXVPTEL, GIPEPXXVPEKM, SIPKAXXVPTEL, HVTKPTXAPTKL, YVPKPXXAPTKL, TVPKPXXAPTQL, AVPKAXXAPTKL, KVGKAXXVPTKL, KASKAXXVPTKL, GSAGPXXTPTKM, AAPASXXVPARL, STPPTXXVPTRL, HVPKPXXAPTKL, RVPSTXXAPVKT, ASAAPXXVPQAL, ASASPXXVSQDL, ASASPXXVPQDL, NDEGLEXVPTEE, NDEGLEXVPTGQ, SSVKXQPSRVHH and RNVQXRPTQVQL; PEP10 is selected from the group consisting of DMVVEGXGXR, NMTVESXAXR, EMVVEGXGXR, NMVVRSXGXH, NMVVRAXGXH, NMVVKAXGXH, EGMSVAEXGXR, GMAVSEXGXR, GMVVDRXGXS, DMVVEAXGXR, DMVVESXGXR, MIVEEXGXL, MIVRSXKXS, MIVKSXKXS, MVVKSXKXS, FLQHNKXEXR, LEEHSQXEXR, RLEEHLEXAXA and TLEDHLAXKXE; and wherein the pair PEP9:PEP10 is selected from the group consisting of KIPKAXXVPTEL:DMVVEGXGXR, GIPEPXXVPEKM:NMTVESXAXR, SIPKAXXVPTEL:EMVVEGXGXR, HVTKPTXAPTKL:NMVVRSXGXH, YVPKPXXAPTKL:NMVVRSXGXH, TVPKPXXAPTQL:NMVVRAXGXH, AVPKAXXAPTKL:NMVVKAXGXH, KVGKAXXVPTKL:EGMSVAEXGXR, KASKAXXVPTKL:GMAVSEXGXR, GSAGPXXTPTKM:GMVVDRXGXS, AAPASXXVPARL:DMVVEAXGXR, STPPTXXVPTRL:DMVVESXGXR, HVPKPXXAPTKL:NMVVRSXGXH, RVPSTXXAPVKT:MIVEEXGXL, ASAAPXXVPQAL:MIVRSXKXS, ASASPXXVSQDL:MIVKSXKXS, ASASPXXVPQDL:MVVKSXKXS, NDEGLEXVPTEE:FLQHNKXEXR, NDEGLEXVPTGQ:LEEHSQXEXR, NDEGLEXVPTEE:FLQHNKXEXR, NDEGLEXVPTEE:FLQHNKXEXR, SSVKXQPSRVHH:RLEEHLEXAXA and RNVQXRPTQVQL:TLEDHLAXKXE; and wherein PEP9:PEP10 is not KIPKAXXVPTEL:DMVVEGXGXR when PEP1 is SAIS and PEP2 is LKNYQ; wherein PEP9:PEP10 is not GIPEPXXVPEKM:NMTVESXAXR when PEP1 is SSLS and PEP2 is LKVYP; wherein PEP9:PEP10 is not SIPKAXXVPTEL:EMVVEGXGXR when PEP1 is SAIS and PEP2 is LKNYQ; wherein PEP9:PEP10 is not HVTKPTXAPTKL:NMVVRSXGXH when PEP1 is NAIS and PEP2 is LKKYR; wherein PEP9:PEP10 is not YVPKPXXAPTKL:NMVVRSXGXH when PEP1 is NAIS and PEP2 is LKKYR; wherein PEP9:PEP10 is not TVPKPXXAPTQL:NMVVRAXGXH when PEP1 is NAIS and PEP2 is LKKYR; wherein PEP9:PEP10 is not AVPKAXXAPTKL:NMVVKAXGXH when PEP1 is SATS and PEP2 is LRKHR; wherein PEP9:PEP10 is not KVGKAXXVPTKL:EGMSVAEXGXR when PEP1 is SPIS and PEP2 is LKYHY; wherein PEP9:PEP10 is not KASKAXXVPTKL:GMAVSEXGXR when PEP1 is EPIS and PEP2 is KFKYE; wherein PEP9:PEP10 is not GSAGPXXTPTKM:GMVVDRXGXS when PEP1 is SPIN and PEP2 is YGKIP; wherein PEP9:PEP10 is not AAPASXXVPARL:DMVVEAXGXR when PEP1 is SPIS and PEP2 is YKQYE; wherein PEP9:PEP10 is not STPPTXXVPTRL:DMVVESXGXR when PEP1 is SPIS and PEP2 is YKQYE; wherein PEP9:PEP10 is not HVPKPXXAPTKL:NMVVRSXGXH when PEP1 is NAIS and PEP2 is LKKYR; wherein PEP9:PEP10 is not RVPSTXXAPVKT:MIVEEXGXL when PEP1 is KPLS and PEP2 is DHHKD; wherein PEP9:PEP10 is not ASAAPXXVPQAL:MIVRSXKXS when PEP1 is EPLP and PEP2 is EQLSN; ASASPXXVSQDL:MIVKSXKXS when PEP1 is EPLT and PEP2 is EQLSN; wherein PEP9:PEP10 is not ASASPXXVPQDL:MVVKSXKXS when PEP1 is EPLT and PEP2 is EQLSN; wherein PEP9:PEP10 is not NDEGLEXVPTEE:FLQHNKXEXR when PEP1 is SNIT and PEP2 is IGEMS; wherein PEP9:PEP10 is not NDEGLEXVPTGQ:LEEHSQXEXR when PEP1 is SNIT and PEP2 is LGEMS; wherein PEP9:PEP10 is not NDEGLEXVPTEE:FLQHNKXEXR when PEP1 is SNIT and PEP2 is IGEMS; wherein PEP9:PEP10 is not NDEGLEXVPTEE:FLQHNKXEXR when PEP1 is SNIT and PEP2 is IGEMS; wherein PEP9:PEP10 is not SSVKXQPSRVHH:RLEEHLEXAXA when PEP1 is RSVK and PEP2 is KEVQV; and wherein PEP9:PEP10 is not RNVQXRPTQVQL:TLEDHLAXKXE when PEP1 is RPVQ and PEP2 is KKATV.

[0358] In certain embodiments, PEP1 is selected from the group consisting of SAIS, SSLS, NAIS, SATS, SPIS, EPIS, SPIN, KPLS, EPLP, EPLT, SNIT, RSVK and RPVQ; PEP11 is selected from the group consisting of LYL, LFF, LYF, LYY, LYK, LYI, LFI, LYV, VYY, QIM, AKV and RKI; and the pair PEP1:PEP11 is selected from the group consisting of SAIS:LYL, SSLS:LFF, NAIS:LYF, SATS:LYY, SPIS:LYK, SPIS:LYI, SPIS:LFI, EPIS:LYL, SPIN:LYF, KPLS:LYV, EPLP:VYY, EPLT:LYY, SNIT:QIM, RSVK:AKV and RPVQ:RKI.

[0359] In one aspect, the present disclosure provides a cyclic GFR-binding compound, wherein said cyclic GFR-binding compound is a cyclic peptide, a variant or analog thereof, or a cyclic peptidomimetic as defined herein, with between 15-60 (in particular between 15-55, more particularly between 19-60, and even more particularly between 19-55) amino acids, or between 15-35 (in particular between 15-30, more particularly between 19-35, and even more particularly between 19-30) amino acids, comprising a peptide with four amino acids (PEP1) or a peptide with eight amino acids (PEP12), a peptide with five amino acids (PEP2), and optionally a pair of peptides selected form the group consisting of PEP3:PEP4, PEP3:PEP6, PEP3:PEP10, PEP5:PEP4, PEP9:PEP4, PEP5:PEP6, PEP5:PEP10, PEP9:PEP6 and PEP9:PEP10; wherein said cyclic GFR-binding compound does not comprise the pair of peptides VPTEL:DMVVE when PEP1 is SAIS and PEP2 is LKNYQ; wherein said cyclic GFR-binding compound does not comprise the pair of peptides VPEKM:NMTVE when PEP1 is SSLS and PEP2 is LKVYP; wherein said cyclic GFR-binding compound does not comprise the pair of peptides VPTEL:EMVVE when PEP1 is SAIS and PEP2 is LKNYQ; wherein said cyclic GFR-binding compound does not comprise the pair of peptides APTKL:NMVVR when PEP1 is NAIS and PEP2 is LKKYR; wherein said cyclic GFR-binding compound does not comprise the pair of peptides APTQL:NMVVR when PEP1 is NAIS and PEP2 is LKKYR; wherein said cyclic GFR-binding compound does not comprise the pair of peptides APTKL:NMVVK when PEP1 is SATS and PEP2 is LRKHR; wherein said cyclic GFR-binding compound does not comprise the pair of peptides VPTKL:EGMSVAE when PEP1 is SPIS and PEP2 is LKYHY; wherein said cyclic GFR-binding compound does not comprise the pair of peptides VPTKL:GMAVS when PEP1 is EPIS and PEP2 is KFKYE; wherein said cyclic GFR-binding compound does not comprise the pair of peptides TPTKM:GMVVD when PEP1 is SPIN and PEP2 is YGKIP; wherein said cyclic GFR-binding compound does not comprise the pair of peptides VPARL:DMVVE when PEP1 is SPIS and PEP2 is YKQYE; wherein said cyclic GFR-binding compound does not comprise the pair of peptides VPTRL:DMVVE when PEP1 is SPIS and PEP2 is YKQYE; wherein said cyclic GFR-binding compound does not comprise the pair of peptides APVKT:MIVEE when PEP1 is KPLS and PEP2 is DHHKD; wherein said cyclic GFR-binding compound does not comprise the pair of peptides VPQAL:MIVRS when PEP1 is EPLP and PEP2 is EQLSN; wherein said cyclic GFR-binding compound does not comprise the pair of peptides VSQDL:MIVKS when PEP1 is EPLT and PEP2 is EQLSN; wherein said cyclic GFR-binding compound does not comprise the pair of peptides VPQDL:MVVKS when PEP1 is EPLT and PEP2 is EQLSN; wherein said cyclic GFR-binding compound does not comprise the pair of peptides VPTEE:FLQHN when PEP1 is SNIT and PEP2 is IGEMS; wherein said cyclic GFR-binding compound does not comprise the pair of peptides VPTGQ:LEEHS when PEP1 is SNIT and PEP2 is LGEMS; wherein said cyclic GFR-binding compound does not comprise the pair of peptides SRVHH:RLEEH when PEP1 is RSVK and PEP2 is KEVQV; and wherein said cyclic GFR-binding compound does not comprise the pair of peptides TQVQL:TLEDH when PEP1 is RPVQ and PEP2 is KKATV.

[0360] In one aspect, the present disclosure provides a cyclic GFR-binding compound, wherein said cyclic GFR-binding compound is a cyclic peptide, a variant or analog thereof, or a cyclic peptidomimetic as defined herein, with between 15-60 (in particular between 15-55, more particularly between 19-60, and even more particularly between 19-55) amino acids, or between 15-35 (in particular between 15-30, more particularly between 19-35, and even more particularly between 19-30) amino acids, comprising a peptide with four amino acids (PEP1) or a peptide with eight amino acids (PEP12), a peptide with five amino acids (PEP2), and optionally a pair of peptides selected form the group consisting of PEP3:PEP4, PEP3:PEP6, PEP3:PEP10, PEP5:PEP4, PEP9:PEP4, PEP5:PEP6, PEP5:PEP10, PEP9:PEP6 and PEP9:PEP10; wherein said cyclic GFR-binding compound does not comprise the pair of peptides KIPKAXXVPTEL:DMVVEGXGXR when PEP1 is SAIS and PEP2 is LKNYQ; wherein said cyclic GFR-binding compound does not comprise the pair of peptides GIPEPXXVPEKM:NMTVESXAXR when PEP1 is SSLS and PEP2 is LKVYP; wherein said cyclic GFR-binding compound does not comprise the pair of peptides SIPKAXXVPTEL:EMVVEGXGXR when PEP1 is SAIS and PEP2 is LKNYQ; wherein said cyclic GFR-binding compound does not comprise the pair of peptides HVTKPTXAPTKL:NMVVRSXGXH when PEP1 is NAIS and PEP2 is LKKYR; wherein said cyclic GFR-binding compound does not comprise the pair of peptides YVPKPXXAPTKL:NMVVRSXGXH when PEP1 is NAIS and PEP2 is LKKYR; wherein said cyclic GFR-binding compound does not comprise the pair of peptides TVPKPXXAPTQL:NMVVRAXGXH when PEP1 is NAIS and PEP2 is LKKYR; wherein said cyclic GFR-binding compound does not comprise the pair of peptides AVPKAXXAPTKL:NMVVKAXGXH when PEP1 is SATS and PEP2 is LRKHR; wherein said cyclic GFR-binding compound does not comprise the pair of peptides KVGKAXXVPTKL:EGMSVAEXGXR when PEP1 is SPIS and PEP2 is LKYHY; wherein said cyclic GFR-binding compound does not comprise the pair of peptides KASKAXXVPTKL:GMAVSEXGXR when PEP1 is EPIS and PEP2 is KFKYE; wherein said cyclic GFR-binding compound does not comprise the pair of peptides GSAGPXXTPTKM:GMVVDRXGXS when PEP1 is SPIN and PEP2 is YGKIP; wherein said cyclic GFR-binding compound does not comprise the pair of peptides AAPASXXVPARL:DMVVEAXGXR when PEP1 is SPIS and PEP2 is YKQYE; wherein said cyclic GFR-binding compound does not comprise the pair of peptides STPPTXXVPTRL:DMVVESXGXR when PEP1 is SPIS and PEP2 is YKQYE; wherein said cyclic GFR-binding compound does not comprise the pair of peptides HVPKPXXAPTKL:NMVVRSXGXH when PEP1 is NAIS and PEP2 is LKKYR; wherein said cyclic GFR-binding compound does not comprise the pair of peptides RVPSTXXAPVKT:MIVEEXGXL when PEP1 is KPLS and PEP2 is DHHKD; wherein said cyclic GFR-binding compound does not comprise the pair of peptides ASAAPXXVPQAL:MIVRSXKXS when PEP1 is EPLP and PEP2 is EQLSN; ASASPXXVSQDL:MIVKSXKXS when PEP1 is EPLT and PEP2 is EQLSN; wherein said cyclic GFR-binding compound does not comprise the pair of peptides ASASPXXVPQDL:MVVKSXKXS when PEP1 is EPLT and PEP2 is EQLSN; wherein said cyclic GFR-binding compound does not comprise the pair of peptides NDEGLEXVPTEE:FLQHNKXEXR when PEP1 is SNIT and PEP2 is IGEMS; wherein said cyclic GFR-binding compound does not comprise the pair of peptides NDEGLEXVPTGQ:LEEHSQXEXR when PEP1 is SNIT and PEP2 is LGEMS; wherein said cyclic GFR-binding compound does not comprise the pair of peptides NDEGLEXVPTEE:FLQHNKXEXR when PEP1 is SNIT and PEP2 is IGEMS; wherein said cyclic GFR-binding compound does not comprise the pair of peptides NDEGLEXVPTEE:FLQHNKXEXR when PEP1 is SNIT and PEP2 is IGEMS; wherein said cyclic GFR-binding compound does not comprise the pair of peptides SSVKXQPSRVHH:RLEEHLEXAXA when PEP1 is RSVK and PEP2 is KEVQV; wherein said cyclic GFR-binding compound does not comprise the pair of peptides RNVQXRPTQVQL:TLEDHLAXKXE when PEP1 is RPVQ and PEP2 is KKATV.

[0361] In particular, in certain embodiments, the quadruplet PEP3:PEP1:PEP2:PEP4 is selected from the group consisting of VPT:SAIS:LKNYQ:VVE, VPE:SAIS:LKNYQ:TVE, APT:SAIS:LKNYQ:VVR, APT:SAIS:LKNYQ:VVK, VPT:SAIS:LKNYQ:VAE, VPT:SAIS:LKNYQ:AVS, TPT:SAIS:LKNYQ:VVD, VPA:SAIS:LKNYQ:VVE, APV:SAIS:LKNYQ:VEE, VPQ:SAIS:LKNYQ:VRS, VSQ:SAIS:LKNYQ:VKS, VPQ:SAIS:LKNYQ:VKS, VPT:SAIS:LKNYQ:QHN, VPT:SAIS:LKNYQ:EHS, SRV:SAIS:LKNYQ:EEH, TQV:SAIS:LKNYQ:EDH, VPE:SSLS:LKVYP:TVE, VPT:SSLS:LKVYP:VVE, APT:SSLS:LKVYP:VVR, APT:SSLS:LKVYP:VVK, VPT:SSLS:LKVYP:VAE, VPT:SSLS:LKVYP:AVS, TPT:SSLS:LKVYP:VVD, VPA:SSLS:LKVYP:VVE, APV:SSLS:LKVYP:VEE, VPQ:SSLS:LKVYP:VRS, VSQ:SSLS:LKVYP:VKS, VPQ:SSLS:LKVYP:VKS, VPT:SSLS:LKVYP:QHN, VPT:SSLS:LKVYP:EHS, SRV:SSLS:LKVYP:EEH, TQV:SSLS:LKVYP:EDH, APT:NAIS:LKKYR:VVR, VPT:NAIS:LKKYR:VVE, VPE:NAIS:LKKYR:TVE, APT:NAIS:LKKYR:VVK, VPT:NAIS:LKKYR:VAE, VPT:NAIS:LKKYR:AVS, TPT:NAIS:LKKYR:VVD, VPA:NAIS:LKKYR:VVE, APV:NAIS:LKKYR:VEE, VPQ:NAIS:LKKYR:VRS, VSQ:NAIS:LKKYR:VKS, VPQ:NAIS:LKKYR:VKS, VPT:NAIS:LKKYR:QHN, VPT:NAIS:LKKYR:EHS, SRV:NAIS:LKKYR:EEH, TQV:NAIS:LKKYR:EDH, APT:SATS:LRKHR:VVK, VPT:SATS:LRKHR:VVE, VPE:SATS:LRKHR:TVE, APT:SATS:LRKHR:VVR, VPT:SATS:LRKHR:VAE, VPT:SATS:LRKHR:AVS, TPT:SATS:LRKHR:VVD, VPA:SATS:LRKHR:VVE, APV:SATS:LRKHR:VEE, VPQ:SATS:LRKHR:VRS, VSQ:SATS:LRKHR:VKS, VPQ:SATS:LRKHR:VKS, VPT:SATS:LRKHR:QHN, VPT:SATS:LRKHR:EHS, SRV:SATS:LRKHR:EEH, TQV:SATS:LRKHR:EDH, VPT:SPIS:LKYHY:VAE, VPT:SPIS:LKYHY:VVE, VPE:SPIS:LKYHY:TVE, APT:SPIS:LKYHY:VVR, APT:SPIS:LKYHY:VVK, VPT:SPIS:LKYHY:AVS, TPT:SPIS:LKYHY:VVD, VPA:SPIS:LKYHY:VVE, APV:SPIS:LKYHY:VEE, VPQ:SPIS:LKYHY:VRS, VSQ:SPIS:LKYHY:VKS, VPQ:SPIS:LKYHY:VKS, VPT:SPIS:LKYHY:QHN, VPT:SPIS:LKYHY:EHS, SRV:SPIS:LKYHY:EEH, TQV:SPIS:LKYHY:EDH, VPT:EPIS:KFKYE:AVS, VPT:EPIS:KFKYE:VVE, VPE:EPIS:KFKYE:TVE, APT:EPIS:KFKYE:VVR, APT:EPIS:KFKYE:VVK, VPT:EPIS:KFKYE:VAE, TPT:EPIS:KFKYE:VVD, VPA:EPIS:KFKYE:VVE, APV:EPIS:KFKYE:VEE, VPQ:EPIS:KFKYE:VRS, VSQ:EPIS:KFKYE:VKS, VPQ:EPIS:KFKYE:VKS, VPT:EPIS:KFKYE:QHN, VPT:EPIS:KFKYE:EHS, SRV:EPIS:KFKYE:EEH, TQV:EPIS:KFKYE:EDH, TPT:SPIN:YGKIP:VVD, VPT:SPIN:YGKIP:VVE, VPE:SPIN:YGKIP:TVE, APT:SPIN:YGKIP:VVR, APT:SPIN:YGKIP:VVK, VPT:SPIN:YGKIP:VAE, VPT:SPIN:YGKIP:AVS, VPA:SPIN:YGKIP:VVE, APV:SPIN:YGKIP:VEE, VPQ:SPIN:YGKIP:VRS, VSQ:SPIN:YGKIP:VKS, VPQ:SPIN:YGKIP:VKS, VPT:SPIN:YGKIP:QHN, VPT:SPIN:YGKIP:EHS, SRV:SPIN:YGKIP:EEH, TQV:SPIN:YGKIP:EDH, VPA:SPIS:YKQYE:VVE, VPT:SPIS:YKQYE:VVE, VPE:SPIS:YKQYE:TVE, APT:SPIS:YKQYE:VVR, APT:SPIS:YKQYE:VVK, VPT:SPIS:YKQYE:VAE, VPT:SPIS:YKQYE:AVS, TPT:SPIS:YKQYE:VVD, APV:SPIS:YKQYE:VEE, VPQ:SPIS:YKQYE:VRS, VSQ:SPIS:YKQYE:VKS, VPQ:SPIS:YKQYE:VKS, VPT:SPIS:YKQYE:QHN, VPT:SPIS:YKQYE:EHS, SRV:SPIS:YKQYE:EEH, TQV:SPIS:YKQYE:EDH, APV:KPLS:DHHKD:VEE, VPT:KPLS:DHHKD:VVE, VPE:KPLS:DHHKD:TVE, APT:KPLS:DHHKD:VVR, APT:KPLS:DHHKD:VVK, VPT:KPLS:DHHKD:VAE, VPT:KPLS:DHHKD:AVS, TPT:KPLS:DHHKD:VVD, VPA:KPLS:DHHKD:VVE, VPQ:KPLS:DHHKD:VRS, VSQ:KPLS:DHHKD:VKS, VPQ:KPLS:DHHKD:VKS, VPT:KPLS:DHHKD:QHN, VPT:KPLS:DHHKD:EHS, SRV:KPLS:DHHKD:EEH, TQV:KPLS:DHHKD:EDH, VPQ:EPLP:EQLSN:VRS, VPT:EPLP:EQLSN:VVE, VPE:EPLP:EQLSN:TVE, APT:EPLP:EQLSN:VVR, APT:EPLP:EQLSN:VVK, VPT:EPLP:EQLSN:VAE, VPT:EPLP:EQLSN:AVS, TPT:EPLP:EQLSN:VVD, VPA:EPLP:EQLSN:VVE, APV:EPLP:EQLSN:VEE, VSQ:EPLP:EQLSN:VKS, VPQ:EPLP:EQLSN:VKS, VPT:EPLP:EQLSN:QHN, VPT:EPLP:EQLSN:EHS, SRV:EPLP:EQLSN:EEH, TQV:EPLP:EQLSN:EDH, VSQ:EPLT:EQLSN:VKS, VPT:EPLT:EQLSN:VVE, VPE:EPLT:EQLSN:TVE, APT:EPLT:EQLSN:VVR, APT:EPLT:EQLSN:VVK, VPT:EPLT:EQLSN:VAE, VPT:EPLT:EQLSN:AVS, TPT:EPLT:EQLSN:VVD, VPA:EPLT:EQLSN:VVE, APV:EPLT:EQLSN:VEE, VPQ:EPLT:EQLSN:VRS, VPQ:EPLT:EQLSN:VKS, VPT:EPLT:EQLSN:QHN, VPT:EPLT:EQLSN:EHS, SRV:EPLT:EQLSN:EEH, TQV:EPLT:EQLSN:EDH, VPT:SNIT:IGEMS:QHN, VPT:SNIT:IGEMS:VVE, VPE:SNIT:IGEMS:TVE, APT:SNIT:IGEMS:VVR, APT:SNIT:IGEMS:VVK, VPT:SNIT:IGEMS:VAE, VPT:SNIT:IGEMS:AVS, TPT:SNIT:IGEMS:VVD, VPA:SNIT:IGEMS:VVE, APV:SNIT:IGEMS:VEE, VPQ:SNIT:IGEMS:VRS, VSQ:SNIT:IGEMS:VKS, VPQ:SNIT:IGEMS:VKS, VPT:SNIT:IGEMS:EHS, SRV:SNIT:IGEMS:EEH, TQV:SNIT:IGEMS:EDH, VPT:SNIT:LGEMS:EHS, VPT:SNIT:LGEMS:VVE, VPE:SNIT:LGEMS:TVE, APT:SNIT:LGEMS:VVR, APT:SNIT:LGEMS:VVK, VPT:SNIT:LGEMS:VAE, VPT:SNIT:LGEMS:AVS, TPT:SNIT:LGEMS:VVD, VPA:SNIT:LGEMS:VVE, APV:SNIT:LGEMS:VEE, VPQ:SNIT:LGEMS:VRS, VSQ:SNIT:LGEMS:VKS, VPQ:SNIT:LGEMS:VKS, VPT:SNIT:LGEMS:QHN, SRV:SNIT:LGEMS:EEH, TQV:SNIT:LGEMS:EDH, SRV:RSVK:KEVQV:EEH, VPT:RSVK:KEVQV:VVE, VPE:RSVK:KEVQV:TVE, APT:RSVK:KEVQV:VVR, APT:RSVK:KEVQV:VVK, VPT:RSVK:KEVQV:VAE, VPT:RSVK:KEVQV:AVS, TPT:RSVK:KEVQV:VVD, VPA:RSVK:KEVQV:VVE, APV:RSVK:KEVQV:VEE, VPQ:RSVK:KEVQV:VRS, VSQ:RSVK:KEVQV:VKS, VPQ:RSVK:KEVQV:VKS, VPT:RSVK:KEVQV:QHN, VPT:RSVK:KEVQV:EHS, TQV:RSVK:KEVQV:EDH, TQV:RPVQ:KKATV:EDH, VPT:RPVQ:KKATV:VVE, VPE:RPVQ:KKATV:TVE, APT:RPVQ:KKATV:VVR, APT:RPVQ:KKATV:VVK, VPT:RPVQ:KKATV:VAE, VPT:RPVQ:KKATV:AVS, TPT:RPVQ:KKATV:VVD, VPA:RPVQ:KKATV:VVE, APV:RPVQ:KKATV:VEE, VPQ:RPVQ:KKATV:VRS, VSQ:RPVQ:KKATV:VKS, VPQ:RPVQ:KKATV:VKS, VPT:RPVQ:KKATV:QHN, VPT:RPVQ:KKATV:EHS and SRV:RPVQ:KKATV:EEH.

[0362] In particular, in certain embodiments, the quadruplet PEP3:PEP12:PEP2:PEP4 is selected from the group consisting of VPT:SAIS-AA¹⁷-LYL:LKNYQ:VVE, VPE:SAIS-AA¹⁷-LYL:LKNYQ:TVE, APT:SAIS-AA¹⁷-LYL:LKNYQ:VVR, APT:SAIS-AA¹⁷-LYL:LKNYQ:VVK, VPT:SAIS-AA¹⁷-LYL:LKNYQ:VAE, VPT:SAIS-AA¹⁷-LYL:LKNYQ:AVS, TPT:SAIS-AA¹⁷-LYL:LKNYQ:VVD, VPA:SAIS-AA¹⁷-LYL:LKNYQ:VVE, APV:SAIS-AA¹⁷-LYL:LKNYQ:VEE, VPQ:SAIS-AA¹⁷-LYL:LKNYQ:VRS, VSQ:SAIS-AA¹⁷-LYL:LKNYQ:VKS, VPQ:SAIS-AA¹⁷-LYL:LKNYQ:VKS, VPT:SAIS-AA¹⁷-LYL:LKNYQ:QHN, VPT:SAIS-AA¹⁷-LYL:LKNYQ:EHS, SRV:SAIS-AA¹⁷-LYL:LKNYQ:EEH, TQV:SAIS-AA¹⁷-LYL:LKNYQ:EDH, VPE:SSLS-AA¹⁷-LFF:LKVYP:TVE, VPT:SSLS-AA¹⁷-LFF:LKVYP:VVE, APT:SSLS-AA¹⁷-LFF:LKVYP:VVR, APT:SSLS-AA¹⁷-LFF:LKVYP:VVK, VPT:SSLS-AA¹⁷-LFF:LKVYP:VAE, VPT:SSLS-AA¹⁷-LFF:LKVYP:AVS, TPT:SSLS-AA¹⁷-LFF:LKVYP:VVD, VPA:SSLS-AA¹⁷-LFF:LKVYP:VVE, APV:SSLS-AA¹⁷-LFF:LFF:LKYP:EE, VPQ:SSLS-AA¹⁷-LFF:LKVYP:VRS, VSQ:SSLS-AA¹⁷-LFF:LKVYP:VKS, VPQ:SSLS-AA¹⁷-LFF:LKVYP:VKS, VPT:SSLS-AA¹⁷-LFF:LKVYP:QHN, VPT:SSLS-AA¹⁷-LFF:LKVYP:EHS, SRV:SSLS-AA¹⁷-LFF:LKVYP:EEH, TQV:SSLS-AA¹⁷-LFF:LKVYP:EDH, APT:NAIS-AA¹⁷-LYF:LKKYR:VVR, VPT:NAIS-AA¹⁷-LYF:LKKYR:VVE, VPE:NAIS-AA¹⁷-LYF:LKKYR:TVE, APT:NAIS-AA¹⁷-LYF:LKKYR:VVK, VPT:NAIS-AA¹⁷-LYF:LKKYR:VAE, VPT:NAIS-AA¹⁷-LYF:LKKYR:AVS, TPT:NAIS-AA¹⁷-LYF:LKKYR:VVD, VPA:NAIS-AA¹⁷-LYF:LKKYR:VVE, APV:NAIS-AA¹⁷-LYF:LKKYR:VEE, VPQ:NAIS-AA¹⁷-LYF:LKKYR:VRS, VSQ:NAIS-AA¹⁷-LYF:LKKYR:VKS, VPQ:NAIS-AA¹⁷-LYF:LKKYR:VKS, VPT:NAIS-AA¹⁷-LYF:LKKYR:QHN, VPT:NAIS-AA¹⁷-LYF:LKKYR:EHS, SRV:NAIS-AA¹⁷-LYF:LKKYR:EEH, TQV:NAIS-AA¹⁷¹-LYF:LKKYR:E, DH, APT:SATS-AA¹⁷-LYY:LRKHR:VVK, VPT:SATS-AA¹⁷-LYY:LRKHR:VVE, VPE:SATS-AA¹⁷-LYY:LRKHR:TVE, APT:SATS-AA¹⁷-LYY:LRKHR:VVR, VPT:SATS-AA¹⁷-LYY:LRKHR:VAE, VPT:SATS-AA¹⁷-LYY:LRKHR:AVS, TPT:SATS-AA¹⁷-LYY:LRKHR:VVD, VPA:SATS-AA¹⁷-LYY:LRKHR:VVE, APV:SATS-AA¹⁷-LYY:LRKHR:VEE, VPQ:SATS-AA¹⁷-LYY:LRKHR:VRS, VSQ:SATS-AA¹⁷-LYY:LRKHR:VKS, VPQ:SATS-AA¹⁷-LYY:LRKHR:VKS, VPT:SATS-AA¹⁷-LYY:LRKHR:QHN, VPT:SATS-AA¹⁷-LYY:LRKHR:EHS, SRV:SATS-AA¹⁷-LYY:LRKHR:EEH, TQV:SATS-AA¹⁷-LYY:LRKHR:EDH, VPT:SPIS-AA¹⁷-LYK:LKYHY:VAE, VPT:SPIS-AA¹⁷-LYK:LKYHY:VVE, VPE:SPIS-AA¹-LY, V:SS-AA¹⁷-LYK:LKYHY:TVE, APT:SPIS-AA¹⁷-LYK:LKYHY:VVR, APT:SPIS-AAT¹⁷-LYK:LKYHY:VVK, VPT:SPIS-AA¹⁷-LYK:LKYHY:AVS, TPT:SPIS-AA¹⁷-LYK:LKYHY:VVD, VPA:SPIS-AA¹⁷-LYK:LKYHY:VVE, APV:SPIS-AA¹⁷-LYK:LKYHY:VEE, VPQ:SPIS-AA¹⁷-LYK:LKYHY:VRS, VSQ:SPIS-AA¹⁷-LYK:LKYHY:VKS, VPQ:SPIS-AA¹⁷-LYK:LKYHY:VKS, VPT:SPIS-AA¹⁷-LYK:LKYHY:QHN, VPT:SPIS-AA¹⁷-LYK:LKYHY:EHS, SRV:SPIS-AA¹⁷-LYK:LKYHY:EEH, TQV:SPIS-AA¹⁷-LYK:LKYHY:EDH, VPT:EPIS-AA¹⁷-LYL:KFKYE:AVS, VPT:EPIS-AA¹⁷-LYL:KFKYE:VVE, VPE:EPIS-AA¹⁷-LYL:KFKYE:TVE, APT:EPIS-AA¹⁷-LYL:KFKYE:VVR, APT:EPIS-AA¹⁷-LYL:KFKYE:VVK, VPT:EPIS-AA¹⁷-LYL:KFKYE:VAE, TPT:EPIS-AA¹⁷-LYL:KFKYE:VVD, VPA:EPIS-AA¹⁷-LYL:KFKYE:VVE, APV:EPIS-AA¹⁷-LYL:KFKYE:VEE, VPQ:EPIS-AA¹⁷-LYL:KFKYE:VRS, VSQ:EPIS-AA¹⁷-LYL:KFKYE:VKS, VPQ:EPIS-AA¹⁷-LYL:KFKYE:VKS, VPT:EPIS-AA¹⁷-LYL:KFKYE:QHN, VPT:EPIS-AA¹⁷-LYL:KFKYE:EHS, SRV:EPIS-AA¹⁷-LYL:KFKYE:EEH, TQV:EPIS-AA¹⁷-LYL:KFKYE:EDH, TPT:SPIN-AA¹⁷-LYF:YGKIP:VVD, VPT:SPIN-AA¹⁷-LYF:YGKIP:VVE, VPE:SPIN-AA¹⁷-LYF:YGKIP:TVE, APT:SPIN-AA¹⁷-LYF:YGKIP:VVR, APT:SPIN-AA¹⁷-LYF:YGKIP:VVK, VPT:SPIN-AA¹⁷-LYF:YGKIP:VAE, VPT:SPIN-AA¹⁷-LYF:YGKIP:AVS, VPA:SPIN-AA¹⁷-LYF:YGKIP:VVE, APV:SPIN-AA¹⁷-LYF:YGKIP:VEE, VPQ:SPIN-AA¹⁷-LYF:YGKIP:VRS, VSQ:SPIN-AA¹⁷-LYF:YGKIP:VKS, VPQ:SPIN-AA¹⁷-LYF:YGKIP:VKS, VPT:SPIN-AA¹⁷-LYF:YGKIP:QHN, VPT:SPIN-AA¹⁷-LYF:YGKIP:EHS, SRV:SPIN-AA¹⁷-LYF:YGKIP:EEH, TQV:SPIN-AA¹⁷-LYF:YGKIP:EDH, VPA:SPIS-AA¹⁷-LYI:YKQYE:VVE, VPT:SPIS-AA¹⁷-LYI:YKQYE:VVE, VPE:SPIS-AA¹⁷-LYI:YKQYE:TVE, APT:SPIS-AA¹⁷-LYI:YKQYE:VVR, APT:SPIS-AA¹⁷-LYI:YKQYE:VVK, VPT:SPIS-AA¹⁷-LYI:YKQYE:VAE, VPT:SPIS-AA¹⁷-LYI:YKQYE:AVS, TPT:SPIS-AA¹⁷-LYI:YKQYE:VVD, APV:SPIS-AA¹⁷-LYI:YKQYE:VEE, VPQ:SPIS-AA¹⁷-LYI:YKQYE:VRS, VSQ:SPIS-AA¹⁷-LYI:YKQYE:VKS, VPQ:SPIS-AA¹⁷-LYI:YKQYE:VKS, VPT:SPIS-AA¹⁷-LYI:YKQYE:QHN, VPT:SPIS-AA¹⁷-LYI:YKQYE:EHS, SRV:SPIS-AA¹⁷-LYI:YKQYE:EEH, TQV:SPIS-AA¹⁷-LYI:YKQYE:EDH, VPT:SPIS-AA¹⁷-LFI:YKQYE:VVE, VPE:SPIS-AA¹⁷-LFI:YKQYE:TVE, APT:SPIS-AA¹⁷-LFI:YKQYE:VVR, APT:SPIS-AA¹⁷-LFI:YKQYE:VVK, VPT:SPIS-AA¹⁷-LFI:YKQYE:VAE, VPT:SPIS-AA¹⁷-LFI:YKQYE:AVS, TPT:SPIS-AA¹⁷-LFI:YKQYE:VVD, VPA:SPIS-AA¹⁷-LFI:YKQYE:VVE, APV:SPIS-AA¹⁷-LFI:YKQYE:VEE, VPQ:SPIS-AA¹⁷-LFI:YKQYE:VRS, VSQ:SPIS-AA¹⁷-LFI:YKQYE:VKS, VPQ:SPIS-AA¹⁷-LFI:YKQYE:VKS, VPT:SPIS-AA¹⁷-LFI:YKQYE:QHN, VPT:SPIS-AA¹⁷-LFI:YKQYE:EHS, SRV:SPIS-AA¹⁷-LFI:YKQYE:EEH, TQV:SPIS-AA¹⁷-LFI:YKQYE:EDH, APV:KPLS-AA¹⁷-LYV:DHHKD:VEE, VPT:KPLS-AA¹⁷-LYV:DHHKD:VVE, VPE:KPLS-AA¹⁷-LYV:DHHKD:TVE, APT:KPLS-AA¹⁷-LYV:DHHKD:VVR, APT:KPLS-AA¹⁷-LYV:DHHKD:VVK, VPT:KPLS-AA¹⁷-LYV:DHHKD:VAE, VPT:KPLS-AA¹⁷-LYV:DHHKD:AVS, TPT:KPLS-AA¹⁷-LYV:DHHKD:VVD, VPA:KPLS-AA¹⁷-LYV:DHHKD:VVE, VPQ:KPLS-AA¹⁷-LYV:DHHKD:VRS, VSQ:KPLS-AA¹⁷-LYV:DHHKD:VKS, VPQ:KPLS-AA¹⁷-LYV:DHHKD:VKS, VPT:KPLS-AA¹⁷-LYV:DHHKD:QHN, VPT:KPLS-AA¹⁷-LYV:DHHKD:EHS, SRV:KPLS-AA¹⁷-LYV:DHHKD:EEH, TQV:KPLS-AA¹⁷-LYV:DHHKD:EDH, VPQ:EPLP-AA¹⁷-VYY:EQLSN:VRS, VPT:EPLP-AA¹⁷-VYY:EQLSN:VVE, VPE:EPLP-AA¹⁷-VYY:EQLSN:TVE, APT:EPLP-AA¹⁷-VYY:EQLSN:VVR, APT:EPLP-AA¹⁷-VYY:EQLSN:VVK, VPT:EPLP-AA¹⁷-VYY:EQLSN:VAE, VPT:EPLP-AA¹⁷-VYY:EQLSN:AVS, TPT:EPLP-AA¹⁷-VYY:EQLSN:VVD, VPA:EPLP-AA¹⁷-VYY:EQLSN:VVE, APV:EPLP-AA¹⁷-VYY:EQLSN:VEE, VSQ:EPLP-AA¹⁷-VYY:EQLSN:VKS, VPQ:EPLP-AA¹⁷-VYY:EQLSN:VKS, VPT:EPLP-AA¹⁷-VYY:EQLSN:QHN, VPT:EPLP-AA¹⁷-VYY:EQLSN:EHS, SRV:EPLP-AA¹⁷-VYY:EQLSN:EEH, TQV:EPLP-AA¹⁷-VYY:EQLSN:EDH, VSQ:EPLT-AA¹⁷-LYY:EQLSN:VKS, VPT:EPLT-AA¹⁷-LYY:EQLSN:VVE, VPE:EPLT-AA¹⁷-LYY:EQLSN:TVE, APT:EPLT-AA¹⁷-LYY:EQLSN:VVR, APT:EPLT-AA¹⁷-LYY:EQLSN:VVK, VPT:EPLT-AA¹⁷-LYY:EQLSN:VAE, VPT:EPLT-AA¹⁷-LYY:EQLSN:AVS, TPT:EPLT-AA¹⁷-LYY:EQLSN:VVD, VPA:EPLT-AA¹⁷-LYY:EQLSN:VVE, APV:EPLT-AA¹⁷-LYY:EQLSN:VEE, VPQ:EPLT-AA¹⁷-LYY:EQLSN:VRS, VPQ:EPLT-AA¹⁷-LYY:EQLSN:VKS, VPT:EPLT-AA¹⁷-LYY:EQLSN:QHN, VPT:EPLT-AA¹⁷-LYY:EQLSN:EHS, SRV:EPLT-AA¹⁷-LYY:EQLSN:EEH, TQV:EPLT-AA¹⁷-LYY:EQLSN:EDH, VPT:SNIT-AA¹⁷-QIM:IGEMS:QHN, VPT:SNIT-AA¹⁷-QIM:IGEMS:VVE, VPE:SNIT-AA¹⁷-QIM:IGEMS:TVE, APT:SNIT-AA¹⁷-QIM:IGEMS:VVR, APT:SNIT-AA¹⁷-QIM:IGEMS:VVK, VPT:SNIT-AA¹⁷-QIM:IGEMS:VAE, VPT:SNIT-AA¹⁷-QIM:IGEMS:AVS, TPT:SNIT-AA¹⁷-QIM:IGEMS:VVD, VPA:SNIT-AA¹⁷-QIM:IGEMS:VVE, APV:SNIT-AA¹⁷-QIM:IGEMS:VEE, VPQ:SNIT-AA¹⁷-QIM:IGEMS:VRS, VSQ:SNIT-AA¹⁷-QIM:IGEMS:VKS, VPQ:SNIT-AA¹⁷-QIM:IGEMS:VKS, VPT:SNIT-AA¹⁷-QIM:IGEMS:EHS, SRV:SNIT-AA¹⁷-QIM:IGEMS:EEH, TQV:SNIT-AA¹⁷-QIM:IGEMS:EDH, VPT:SNIT-AA¹⁷-QIM:LGEMS:EHS, VPT:SNIT-AA¹⁷-QIM:LGEMS:VVE, VPE:SNIT-AA¹⁷-QIM:LGEMS:TVE, APT:SNIT-AA¹⁷-QIM:LGEMS:VVR, APT:SNIT-AA¹⁷-QIM:LGEMS:VVK, VPT:SNIT-AA¹⁷-QIM:LGEMS:VAE, VPT:SNIT-AA¹⁷-QIM:LGEMS:AVS, TPT:SNIT-AA¹⁷-QIM:LGEMS:VVD, VPA:SNIT-AA¹⁷-QIM:LGEMS:VVE, APV:SNIT-AA¹⁷-QIM:LGEMS:VEE, VPQ:SNIT-AA¹⁷-QIM:LGEMS:VRS, VSQ:SNIT-AA¹⁷-QIM:LGEMS:VKS, VPQ:SNIT-AA¹⁷-QIM:LGEMS:VKS, VPT:SNIT-AA¹⁷-QIM:LGEMS:QHN, SRV:SNIT-AA¹⁷-QIM:LGEMS:EEH, TQV:SNIT-AA¹⁷-QIM:LGEMS:EDH, SRV:RSVK-AA¹⁷-AKV:KEVQV:EEH, VPT:RSVK-AA¹⁷-AKV:KEVQV:VVE, VPE:RSVK-AA¹⁷-AKV:KEVQV:TVE, APT:RSVK-AA¹⁷-AKV:KEVQV:VVR, APT:RSVK-AA¹⁷-AKV:KEVQV:VVK, VPT:RSVK-AA¹⁷-AKV:KEVQV:VAE, VPT:RSVK-AA¹⁷-AKV:KEVQV:AVS, TPT:RSVK-AA¹⁷-AKV:KEVQV:VVD, VPA:RSVK-AA¹⁷-AKV:KEVQV:VVE, APV:RSVK-AA¹⁷-AKV:KEVQV:VEE, VPQ:RSVK-AA¹⁷-AKV:KEVQV:VRS, VSQ:RSVK-AA¹⁷-AKV:KEVQV:VKS, VPQ:RSVK-AA¹⁷-AKV:KEVQV:VKS, VPT:RSVK-AA¹⁷-AKV:KEVQV:QHN, VPT:RSVK-AA¹⁷-AKV:KEVQV:EHS, TQV:RSVK-AA¹⁷-AKV:KEVQV:EDH, TQV:RPVQ-AA¹⁷-RKI:KKATV:EDH, VPT:RPVQ-AA¹⁷-RKI:KKATV:VVE, VPE:RPVQ-AA¹⁷-RKI:KKATV:TVE, APT:RPVQ-AA¹⁷-RKI:KKATV:VVR, APT:RPVQ-AA¹⁷-RKI:KKATV:VVK, VPT:RPVQ-AA¹⁷-RKI:KKATV:VAE, VPT:RPVQ-AA¹⁷-RKI:KKATV:AVS, TPT:RPVQ-AA¹⁷-RKI:KKATV:VVD, VPA:RPVQ-AA¹⁷-RKI:KKATV:VVE, APV:RPVQ-AA¹⁷-RKI:KKATV:VEE, VPQ:RPVQ-AA¹⁷-RKI:KKATV:VRS, VSQ:RPVQ-AA¹⁷-RKI:KKATV:VKS, VPQ:RPVQ-AA¹⁷-RKI:KKATV:VKS, VPT:RPVQ-AA¹⁷-RKI:KKATV:QHN, VPT:RPVQ-AA¹⁷-RKI:KKATV:EHS and SRV:RPVQ-AA¹⁷-RKI:KKATV:EEH; and wherein AA¹⁷ is selected from the group consisting of G, A, V, L, I, P, F, M, W, T and S (in particular is selected from the group consisting of M, I, L, V and T).

[0363] In particular, in certain embodiments, the quadruplet PEP5:PEP1:PEP2:PEP6 is selected from the group consisting of VPTKM:SAIS:LKNYQ:NMVVE, VPTEL:SAIS:LKNYQ:EMVVE, VPTKL:SAIS:LKNYQ:NMVVE, VPTQL:SAIS:LKNYQ:NMVVE, VPTKL:SAIS:LKNYQ:EGMSVVE, VPTKL:SAIS:LKNYQ:GMVVE, VPTKM:SAIS:LKNYQ:GMVVE, VPTRL:SAIS:LKNYQ:DMVVE, VPTKT:SAIS:LKNYQ:MIVVE, VPTAL:SAIS:LKNYQ:MIVVE, VPTDL:SAIS:LKNYQ:MIVVE, VPTDL:SAIS:LKNYQ:MVVVE, VPTEE:SAIS:LKNYQ:FLVVE, VPTGQ:SAIS:LKNYQ:LEVVE, VPTHH:SAIS:LKNYQ:RLVVE, VPTQL:SAIS:LKNYQ:TLVVE, VPEKM:SAIS:LKNYQ:NMTVE, APTKL:SAIS:LKNYQ:NMVVR, APTQL:SAIS:LKNYQ:NMVVR, APTKL:SAIS:LKNYQ:NMVVK, VPTKL:SAIS:LKNYQ:EGMSVAE, VPTKL:SAIS:LKNYQ:GMAVS, TPTKM:SAIS:LKNYQ:GMVVD, VPARL:SAIS:LKNYQ:DMVVE, APVKT:SAIS:LKNYQ:MIVEE, VPQAL:SAIS:LKNYQ:MIVRS, VSQDL:SAIS:LKNYQ:MIVKS, VPQDL:SAIS:LKNYQ:MVVKS, VPTEE:SAIS:LKNYQ:FLQHN, VPTGQ:SAIS:LKNYQ:LEEHS, SRVHH:SAIS:LKNYQ:RLEEH, TQVQL:SAIS:LKNYQ:TLEDH, VPEEL:SSLS:LKVYP:DMTVE, VPEEL:SSLS:LKVYP:EMTVE, VPEKL:SSLS:LKVYP:NMTVE, VPEQL:SSLS:LKVYP:NMTVE, VPEKL:SSLS:LKVYP:EGMSTVE, VPEKL:SSLS:LKVYP:GMTVE, VPEKM:SSLS:LKVYP:GMTVE, VPERL:SSLS:LKVYP:DMTVE, VPEKT:SSLS:LKVYP:MITVE, VPEAL:SSLS:LKVYP:MITVE, VPEDL:SSLS:LKVYP:MITVE, VPEDL:SSLS:LKVYP:MVTVE, VPEEE:SSLS:LKVYP:FLTVE, VPEGQ:SSLS:LKVYP:LETVE, VPEHH:SSLS:LKVYP:RLTVE, VPEQL:SSLS:LKVYP:TLTVE, VPTEL:SSLS:LKVYP:DMVVE, VPTEL:SSLS:LKVYP:EMVVE, APTKL:SSLS:LKVYP:NMVVR, APTQL:SSLS:LKVYP:NMVVR, APTKL:SSLS:LKVYP:NMVVK, VPTKL:SSLS:LKVYP:EGMSVAE, VPTKL:SSLS:LKVYP:GMAVS, TPTKM:SSLS:LKVYP:GMVVD, VPARL:SSLS:LKVYP:DMVVE, VPTRL:SSLS:LKVYP:DMVVE, APVKT:SSLS:LKVYP:MIVEE, VPQAL:SSLS:LKVYP:MIVRS, VSQDL:SSLS:LKVYP:MIVKS, VPQDL:SSLS:LKVYP:MVVKS, VPTEE:SSLS:LKVYP:FLQHN, VPTGQ:SSLS:LKVYP:LEEHS, SRVHH:SSLS:LKVYP:RLEEH, TQVQL:SSLS:LKVYP:TLEDH, VPTEL:SAIS:LKNYQ:DMVVE, APTEL:NAIS:LKKYR:DMVVR, APTKM:NAIS:LKKYR:NMVVR, APTEL:NAIS:LKKYR:EMVVR, APTKL:NAIS:LKKYR:NMVVR, APTQL:NAIS:LKKYR:NMVVR, APTKL:NAIS:LKKYR:EGMSVVR, APTKL:NAIS:LKKYR:GMVVR, APTKM:NAIS:LKKYR:GMVVR, APTRL:NAIS:LKKYR:DMVVR, APTKT:NAIS:LKKYR:MIVVR, APTAL:NAIS:LKKYR:MIVVR, APTDL:NAIS:LKKYR:MIVVR, APTDL:NAIS:LKKYR:MVVVR, APTEE:NAIS:LKKYR:FLVVR, APTGQ:NAIS:LKKYR:LEVVR, APTHH:NAIS:LKKYR:RLVVR, APTQL:NAIS:LKKYR:TLVVR, VPTEL:NAIS:LKKYR:DMVVE, VPEKM:NAIS:LKKYR:NMTVE, VPTEL:NAIS:LKKYR:EMVVE, APTKL:NAIS:LKKYR:NMVVK, VPTKL:NAIS:LKKYR:EGMSVAE, VPTKL:NAIS:LKKYR:GMAVS, TPTKM:NAIS:LKKYR:GMVVD, VPARL:NAIS:LKKYR:DMVVE, VPTRL:NAIS:LKKYR:DMVVE, APVKT:NAIS:LKKYR:MIVEE, VPQAL:NAIS:LKKYR:MIVRS, VSQDL:NAIS:LKKYR:MIVKS, VPQDL:NAIS:LKKYR:MVVKS, VPTEE:NAIS:LKKYR:FLQHN, VPTGQ:NAIS:LKKYR:LEEHS, SRVHH:NAIS:LKKYR:RLEEH, TQVQL:NAIS:LKKYR:TLEDH, APTEL:SATS:LRKHR:DMVVK, APTKM:SATS:LRKHR:NMVVK, APTEL:SATS:LRKHR:EMVVK, APTKL:SATS:LRKHR:NMVVK, APTQL:SATS:LRKHR:NMVVK, APTKL:SATS:LRKHR:EGMSVVK, APTKL:SATS:LRKHR:GMVVK, APTKM:SATS:LRKHR:GMVVK, APTRL:SATS:LRKHR:DMVVK, APTKT:SATS:LRKHR:MIVVK, APTAL:SATS:LRKHR:MIVVK, APTDL:SATS:LRKHR:MIVVK, APTDL:SATS:LRKHR:MVVVK, APTEE:SATS:LRKHR:FLVVK, APTGQ:SATS:LRKHR:LEVVK, APTHH:SATS:LRKHR:RLVVK, APTQL:SATS:LRKHR:TLVVK, VPTEL:SATS:LRKHR:DMVVE, VPEKM:SATS:LRKHR:NMTVE, VPTEL:SATS:LRKHR:EMVVE, APTKL:SATS:LRKHR:NMVVR, APTQL:SATS:LRKHR:NMVVR, VPTKL:SATS:LRKHR:EGMSVAE, VPTKL:SATS:LRKHR:GMAVS, TPTKM:SATS:LRKHR:GMVVD, VPARL:SATS:LRKHR:DMVVE, VPTRL:SATS:LRKHR:DMVVE, APVKT:SATS:LRKHR:MIVEE, VPQAL:SATS:LRKHR:MIVRS, VSQDL:SATS:LRKHR:MIVKS, VPQDL:SATS:LRKHR:MVVKS, VPTEE:SATS:LRKHR:FLQHN, VPTGQ:SATS:LRKHR:LEEHS, SRVHH:SATS:LRKHR:RLEEH, TQVQL:SATS:LRKHR:TLEDH, VPTEL:SPIS:LKYHY:DMVAE, VPTKM:SPIS:LKYHY:NMVAE, VPTEL:SPIS:LKYHY:EMVAE, VPTKL:SPIS:LKYHY:NMVAE, VPTQL:SPIS:LKYHY:NMVAE, VPTKL:SPIS:LKYHY:GMVAE, VPTKM:SPIS:LKYHY:GMVAE, VPTRL:SPIS:LKYHY:DMVAE, VPTKT:SPIS:LKYHY:MIVAE, VPTAL:SPIS:LKYHY:MIVAE, VPTDL:SPIS:LKYHY:MIVAE, VPTDL:SPIS:LKYHY:MVVAE, VPTEE:SPIS:LKYHY:FLVAE, VPTGQ:SPIS:LKYHY:LEVAE, VPTHH:SPIS:LKYHY:RLVAE, VPTQL:SPIS:LKYHY:TLVAE, VPTEL:SPIS:LKYHY:DMVVE, VPEKM:SPIS:LKYHY:NMTVE, VPTEL:SPIS:LKYHY:EMVVE, APTKL:SPIS:LKYHY:NMVVR, APTQL:SPIS:LKYHY:NMVVR, APTKL:SPIS:LKYHY:NMVVK, VPTKL:SPIS:LKYHY:GMAVS, TPTKM:SPIS:LKYHY:GMVVD, VPARL:SPIS:LKYHY:DMVVE, VPTRL:SPIS:LKYHY:DMVVE, APVKT:SPIS:LKYHY:MIVEE, VPQAL:SPIS:LKYHY:MIVRS, VSQDL:SPIS:LKYHY:MIVKS, VPQDL:SPIS:LKYHY:MVVKS, VPTEE:SPIS:LKYHY:FLQHN, VPTGQ:SPIS:LKYHY:LEEHS, SRVHH:SPIS:LKYHY:RLEEH, TQVQL:SPIS:LKYHY:TLEDH, VPTEL:EPIS:KFKYE:DMAVS, VPTKM:EPIS:KFKYE:NMAVS, VPTEL:EPIS:KFKYE:EMAVS, VPTKL:EPIS:KFKYE:NMAVS, VPTQL:EPIS:KFKYE:NMAVS, VPTKL:EPIS:KFKYE:EGMSAVS, VPTKM:EPIS:KFKYE:GMAVS, VPTRL:EPIS:KFKYE:DMAVS, VPTKT:EPIS:KFKYE:MIAVS, VPTAL:EPIS:KFKYE:MIAVS, VPTDL:EPIS:KFKYE:MIAVS, VPTDL:EPIS:KFKYE:MVAVS, VPTEE:EPIS:KFKYE:FLAVS, VPTGQ:EPIS:KFKYE:LEAVS, VPTHH:EPIS:KFKYE:RLAVS, VPTQL:EPIS:KFKYE:TLAVS, VPTEL:EPIS:KFKYE:DMVVE, VPEKM:EPIS:KFKYE:NMTVE, VPTEL:EPIS:KFKYE:EMVVE, APTKL:EPIS:KFKYE:NMVVR, APTQL:EPIS:KFKYE:NMVVR, APTKL:EPIS:KFKYE:NMVVK, VPTKL:EPIS:KFKYE:EGMSVAE, TPTKM:EPIS:KFKYE:GMVVD, VPARL:EPIS:KFKYE:DMVVE, VPTRL:EPIS:KFKYE:DMVVE, APVKT:EPIS:KFKYE:MIVEE, VPQAL:EPIS:KFKYE:MIVRS, VSQDL:EPIS:KFKYE:MIVKS, VPQDL:EPIS:KFKYE:MVVKS, VPTEE:EPIS:KFKYE:FLQHN, VPTGQ:EPIS:KFKYE:LEEHS, SRVHH:EPIS:KFKYE:RLEEH, TQVQL:EPIS:KFKYE:TLEDH, TPTEL:SPIN:YGKIP:DMVVD, TPTKM:SPIN:YGKIP:NMVVD, TPTEL:SPIN:YGKIP:EMVVD, TPTKL:SPIN:YGKIP:NMVVD, TPTQL:SPIN:YGKIP:NMVVD, TPTKL:SPIN:YGKIP:EGMSVVD, TPTKL:SPIN:YGKIP:GMVVD, TPTRL:SPIN:YGKIP:DMVVD, TPTKT:SPIN:YGKIP:MIVVD, TPTAL:SPIN:YGKIP:MIVVD, TPTDL:SPIN:YGKIP:MIVVD, TPTDL:SPIN:YGKIP:MVVVD, TPTEE:SPIN:YGKIP:FLVVD, TPTGQ:SPIN:YGKIP:LEVVD, TPTHH:SPIN:YGKIP:RLVVD, TPTQL:SPIN:YGKIP:TLVVD, VPTEL:SPIN:YGKIP:DMVVE, VPEKM:SPIN:YGKIP:NMTVE, VPTEL:SPIN:YGKIP:EMVVE, APTKL:SPIN:YGKIP:NMVVR, APTQL:SPIN:YGKIP:NMVVR, APTKL:SPIN:YGKIP:NMVVK, VPTKL:SPIN:YGKIP:EGMSVAE, VPTKL:SPIN:YGKIP:GMAVS, VPARL:SPIN:YGKIP:DMVVE, VPTRL:SPIN:YGKIP:DMVVE, APVKT:SPIN:YGKIP:MIVEE, VPQAL:SPIN:YGKIP:MIVRS, VSQDL:SPIN:YGKIP:MIVKS, VPQDL:SPIN:YGKIP:MVVKS, VPTEE:SPIN:YGKIP:FLQHN, VPTGQ:SPIN:YGKIP:LEEHS, SRVHH:SPIN:YGKIP:RLEEH, TQVQL:SPIN:YGKIP:TLEDH, VPAEL:SPIS:YKQYE:DMVVE, VPAKM:SPIS:YKQYE:NMVVE, VPAEL:SPIS:YKQYE:EMVVE, VPAKL:SPIS:YKQYE:NMVVE, VPAQL:SPIS:YKQYE:NMVVE, VPAKL:SPIS:YKQYE:EGMSVVE, VPAKL:SPIS:YKQYE:GMVVE, VPAKM:SPIS:YKQYE:GMVVE, VPARL:SPIS:YKQYE:DMVVE, VPAKT:SPIS:YKQYE:MIVVE, VPAAL:SPIS:YKQYE:MIVVE, VPADL:SPIS:YKQYE:MIVVE, VPADL:SPIS:YKQYE:MVVVE, VPAEE:SPIS:YKQYE:FLVVE, VPAGQ:SPIS:YKQYE:LEVVE, VPAHH:SPIS:YKQYE:RLVVE, VPAQL:SPIS:YKQYE:TLVVE, VPTEL:SPIS:YKQYE:DMVVE, VPEKM:SPIS:YKQYE:NMTVE, VPTEL:SPIS:YKQYE:EMVVE, APTKL:SPIS:YKQYE:NMVVR, APTQL:SPIS:YKQYE:NMVVR, APTKL:SPIS:YKQYE:NMVVK, VPTKL:SPIS:YKQYE:EGMSVAE, VPTKL:SPIS:YKQYE:GMAVS, TPTKM:SPIS:YKQYE:GMVVD, VPTRL:SPIS:YKQYE:DMVVE, APVKT:SPIS:YKQYE:MIVEE, VPQAL:SPIS:YKQYE:MIVRS, VSQDL:SPIS:YKQYE:MIVKS, VPQDL:SPIS:YKQYE:MVVKS, VPTEE:SPIS:YKQYE:FLQHN, VPTGQ:SPIS:YKQYE:LEEHS, SRVHH:SPIS:YKQYE:RLEEH, TQVQL:SPIS:YKQYE:TLEDH, VPTKM:SPIS:YKQYE:NMVVE, VPTKL:SPIS:YKQYE:NMVVE, VPTQL:SPIS:YKQYE:NMVVE, VPTKL:SPIS:YKQYE:EGMSVVE, VPTKL:SPIS:YKQYE:GMVVE, VPTKM:SPIS:YKQYE:GMVVE, VPTKT:SPIS:YKQYE:MIVVE, VPTAL:SPIS:YKQYE:MIVVE, VPTDL:SPIS:YKQYE:MIVVE, VPTDL:SPIS:YKQYE:MVVVE, VPTEE:SPIS:YKQYE:FLVVE, VPTGQ:SPIS:YKQYE:LEVVE, VPTHH:SPIS:YKQYE:RLVVE, VPTQL:SPIS:YKQYE:TLVVE, APVEL:KPLS:DHHKD:DMVEE, APVKM:KPLS:DHHKD:NMVEE, APVEL:KPLS:DHHKD:EMVEE, APVKL:KPLS:DHHKD:NMVEE, APVQL:KPLS:DHHKD:NMVEE, APVKL:KPLS:DHHKD:EGMSVEE, APVKL:KPLS:DHHKD:GMVEE, APVKM:KPLS:DHHKD:GMVEE, APVRL:KPLS:DHHKD:DMVEE, APVAL:KPLS:DHHKD:MIVEE, APVDL:KPLS:DHHKD:MIVEE, APVDL:KPLS:DHHKD:MVVEE, APVEE:KPLS:DHHKD:FLVEE, APVGQ:KPLS:DHHKD:LEVEE, APVHH:KPLS:DHHKD:RLVEE, APVQL:KPLS:DHHKD:TLVEE, VPTEL:KPLS:DHHKD:DMVVE, VPEKM:KPLS:DHHKD:NMTVE, VPTEL:KPLS:DHHKD:EMVVE, APTKL:KPLS:DHHKD:NMVVR, APTQL:KPLS:DHHKD:NMVVR, APTKL:KPLS:DHHKD:NMVVK, VPTKL:KPLS:DHHKD:EGMSVAE, VPTKL:KPLS:DHHKD:GMAVS, TPTKM:KPLS:DHHKD:GMVVD, VPARL:KPLS:DHHKD:DMVVE, VPTRL:KPLS:DHHKD:DMVVE, VPQAL:KPLS:DHHKD:MIVRS, VSQDL:KPLS:DHHKD:MIVKS, VPQDL:KPLS:DHHKD:MVVKS, VPTEE:KPLS:DHHKD:FLQHN, VPTGQ:KPLS:DHHKD:LEEHS, SRVHH:KPLS:DHHKD:RLEEH, TQVQL:KPLS:DHHKD:TLEDH, VPQEL:EPLP:EQLSN:DMVRS, VPQKM:EPLP:EQLSN:NMVRS, VPQEL:EPLP:EQLSN:EMVRS, VPQKL:EPLP:EQLSN:NMVRS, VPQQL:EPLP:EQLSN:NMVRS, VPQKL:EPLP:EQLSN:EGMSVRS, VPQKL:EPLP:EQLSN:GMVRS, VPQKM:EPLP:EQLSN:GMVRS, VPQRL:EPLP:EQLSN:DMVRS, VPQKT:EPLP:EQLSN:MIVRS, VPQDL:EPLP:EQLSN:MIVRS, VPQDL:EPLP:EQLSN:MVVRS, VPQEE:EPLP:EQLSN:FLVRS, VPQGQ:EPLP:EQLSN:LEVRS, VPQHH:EPLP:EQLSN:RLVRS, VPQQL:EPLP:EQLSN:TLVRS, VPTEL:EPLP:EQLSN:DMVVE, VPEKM:EPLP:EQLSN:NMTVE, VPTEL:EPLP:EQLSN:EMVVE, APTKL:EPLP:EQLSN:NMVVR, APTQL:EPLP:EQLSN:NMVVR, APTKL:EPLP:EQLSN:NMVVK, VPTKL:EPLP:EQLSN:EGMSVAE, VPTKL:EPLP:EQLSN:GMAVS, TPTKM:EPLP:EQLSN:GMVVD, VPARL:EPLP:EQLSN:DMVVE, VPTRL:EPLP:EQLSN:DMVVE, APVKT:EPLP:EQLSN:MIVEE, VSQDL:EPLP:EQLSN:MIVKS, VPQDL:EPLP:EQLSN:MVVKS, VPTEE:EPLP:EQLSN:FLQHN, VPTGQ:EPLP:EQLSN:LEEHS, SRVHH:EPLP:EQLSN:RLEEH, TQVQL:EPLP:EQLSN:TLEDH, VSQEL:EPLT:EQLSN:DMVKS, VSQKM:EPLT:EQLSN:NMVKS, VSQEL:EPLT:EQLSN:EMVKS, VSQKL:EPLT:EQLSN:NMVKS, VSQQL:EPLT:EQLSN:NMVKS, VSQKL:EPLT:EQLSN:EGMSVKS, VSQKL:EPLT:EQLSN:GMVKS, VSQKM:EPLT:EQLSN:GMVKS, VSQRL:EPLT:EQLSN:DMVKS, VSQKT:EPLT:EQLSN:MIVKS, VSQAL:EPLT:EQLSN:MIVKS, VSQDL:EPLT:EQLSN:MVVKS, VSQEE:EPLT:EQLSN:FLVKS, VSQGQ:EPLT:EQLSN:LEVKS, VSQHH:EPLT:EQLSN:RLVKS, VSQQL:EPLT:EQLSN:TLVKS, VPTEL:EPLT:EQLSN:DMVVE, VPEKM:EPLT:EQLSN:NMTVE, VPTEL:EPLT:EQLSN:EMVVE, APTKL:EPLT:EQLSN:NMVVR, APTQL:EPLT:EQLSN:NMVVR, APTKL:EPLT:EQLSN:NMVVK, VPTKL:EPLT:EQLSN:EGMSVAE, VPTKL:EPLT:EQLSN:GMAVS, TPTKM:EPLT:EQLSN:GMVVD, VPARL:EPLT:EQLSN:DMVVE, VPTRL:EPLT:EQLSN:DMVVE, APVKT:EPLT:EQLSN:MIVEE, VPQAL:EPLT:EQLSN:MIVRS, VPQDL:EPLT:EQLSN:MVVKS, VPTEE:EPLT:EQLSN:FLQHN, VPTGQ:EPLT:EQLSN:LEEHS, SRVHH:EPLT:EQLSN:RLEEH, TQVQL:EPLT:EQLSN:TLEDH, VPQEL:EPLT:EQLSN:DMVKS, VPQKM:EPLT:EQLSN:NMVKS, VPQEL:EPLT:EQLSN:EMVKS, VPQKL:EPLT:EQLSN:NMVKS, VPQQL:EPLT:EQLSN:NMVKS, VPQKL:EPLT:EQLSN:EGMSVKS, VPQKL:EPLT:EQLSN:GMVKS, VPQKM:EPLT:EQLSN:GMVKS, VPQRL:EPLT:EQLSN:DMVKS, VPQKT:EPLT:EQLSN:MIVKS, VPQAL:EPLT:EQLSN:MIVKS, VPQDL:EPLT:EQLSN:MIVKS, VPQEE:EPLT:EQLSN:FLVKS, VPQGQ:EPLT:EQLSN:LEVKS, VPQHH:EPLT:EQLSN:RLVKS, VPQQL:EPLT:EQLSN:TLVKS, VSQDL:EPLT:EQLSN:MIVKS, VPTEL:SNIT:IGEMS:DMQHN, VPTKM:SNIT:IGEMS:NMQHN, VPTEL:SNIT:IGEMS:EMQHN, VPTKL:SNIT:IGEMS:NMQHN, VPTQL:SNIT:IGEMS:NMQHN, VPTKL:SNIT:IGEMS:EGMSQHN, VPTKL:SNIT:IGEMS:GMQHN, VPTKM:SNIT:IGEMS:GMQHN, VPTRL:SNIT:IGEMS:DMQHN, VPTKT:SNIT:IGEMS:MIQHN, VPTAL:SNIT:IGEMS:MIQHN, VPTDL:SNIT:IGEMS:MIQHN, VPTDL:SNIT:IGEMS:MVQHN, VPTGQ:SNIT:IGEMS:LEQHN, VPTEE:SNIT:IGEMS:FLQHN, VPTHH:SNIT:IGEMS:RLQHN, VPTQL:SNIT:IGEMS:TLQHN, VPTEL:SNIT:IGEMS:DMVVE, VPEKM:SNIT:IGEMS:NMTVE, VPTEL:SNIT:IGEMS:EMVVE, APTKL:SNIT:IGEMS:NMVVR, APTQL:SNIT:IGEMS:NMVVR, APTKL:SNIT:IGEMS:NMVVK, VPTKL:SNIT:IGEMS:EGMSVAE, VPTKL:SNIT:IGEMS:GMAVS, TPTKM:SNIT:IGEMS:GMVVD, VPARL:SNIT:IGEMS:DMVVE, VPTRL:SNIT:IGEMS:DMVVE, APVKT:SNIT:IGEMS:MIVEE, VPQAL:SNIT:IGEMS:MIVRS, VSQDL:SNIT:IGEMS:MIVKS, VPQDL:SNIT:IGEMS:MVVKS, VPTGQ:SNIT:IGEMS:LEEHS, SRVHH:SNIT:IGEMS:RLEEH, TQVQL:SNIT:IGEMS:TLEDH, VPTEL:SNIT:LGEMS:DMEHS, VPTKM:SNIT:LGEMS:NMEHS, VPTEL:SNIT:LGEMS:EMEHS, VPTKL:SNIT:LGEMS:NMEHS, VPTQL:SNIT:LGEMS:NMEHS, VPTKL:SNIT:LGEMS:EGMSEHS, VPTKL:SNIT:LGEMS:GMEHS, VPTKM:SNIT:LGEMS:GMEHS, VPTRL:SNIT:LGEMS:DMEHS, VPTKT:SNIT:LGEMS:MIEHS, VPTAL:SNIT:LGEMS:MIEHS, VPTDL:SNIT:LGEMS:MIEHS, VPTDL:SNIT:LGEMS:MVEHS, VPTEE:SNIT:LGEMS:FLEHS, VPTHH:SNIT:LGEMS:RLEHS, VPTQL:SNIT:LGEMS:TLEHS, VPTEL:SNIT:LGEMS:DMVVE, VPEKM:SNIT:LGEMS:NMTVE, VPTEL:SNIT:LGEMS:EMVVE, APTKL:SNIT:LGEMS:NMVVR, APTQL:SNIT:LGEMS:NMVVR, APTKL:SNIT:LGEMS:NMVVK, VPTKL:SNIT:LGEMS:EGMSVAE, VPTKL:SNIT:LGEMS:GMAVS, TPTKM:SNIT:LGEMS:GMVVD, VPARL:SNIT:LGEMS:DMVVE, VPTRL:SNIT:LGEMS:DMVVE, APVKT:SNIT:LGEMS:MIVEE, VPQAL:SNIT:LGEMS:MIVRS, VSQDL:SNIT:LGEMS:MIVKS, VPQDL:SNIT:LGEMS:MVVKS, VPTEE:SNIT:LGEMS:FLQHN, SRVHH:SNIT:LGEMS:RLEEH, TQVQL:SNIT:LGEMS:TLEDH, SRVEL:RSVK:KEVQV:DMEEH, SRVKM:RSVK:KEVQV:NMEEH, SRVEL:RSVK:KEVQV:EMEEH, SRVKL:RSVK:KEVQV:NMEEH, SRVQL:RSVK:KEVQV:NMEEH, SRVKL:RSVK:KEVQV:EGMSEEH, SRVKL:RSVK:KEVQV:GMEEH, SRVKM:RSVK:KEVQV:GMEEH, SRVRL:RSVK:KEVQV:DMEEH, SRVKT:RSVK:KEVQV:MIEEH, SRVAL:RSVK:KEVQV:MIEEH, SRVDL:RSVK:KEVQV:MIEEH, SRVDL:RSVK:KEVQV:MVEEH, SRVEE:RSVK:KEVQV:FLEEH, SRVGQ:RSVK:KEVQV:LEEEH, SRVQL:RSVK:KEVQV:TLEEH, VPTEL:RSVK:KEVQV:DMVVE, VPEKM:RSVK:KEVQV:NMTVE, VPTEL:RSVK:KEVQV:EMVVE, APTKL:RSVK:KEVQV:NMVVR, APTQL:RSVK:KEVQV:NMVVR, APTKL:RSVK:KEVQV:NMVVK, VPTKL:RSVK:KEVQV:EGMSVAE, VPTKL:RSVK:KEVQV:GMAVS, TPTKM:RSVK:KEVQV:GMVVD, VPARL:RSVK:KEVQV:DMVVE, VPTRL:RSVK:KEVQV:DMVVE, APVKT:RSVK:KEVQV:MIVEE, VPQAL:RSVK:KEVQV:MIVRS, VSQDL:RSVK:KEVQV:MIVKS, VPQDL:RSVK:KEVQV:MVVKS, VPTEE:RSVK:KEVQV:FLQHN, VPTGQ:RSVK:KEVQV:LEEHS, TQVQL:RSVK:KEVQV:TLEDH, TQVEL:RPVQ:KKATV:DMEDH, TQVKM:RPVQ:KKATV:NMEDH, TQVEL:RPVQ:KKATV:EMEDH, TQVKL:RPVQ:KKATV:NMEDH, TQVQL:RPVQ:KKATV:NMEDH, TQVKL:RPVQ:KKATV:EGMSEDH, TQVKL:RPVQ:KKATV:GMEDH, TQVKM:RPVQ:KKATV:GMEDH, TQVRL:RPVQ:KKATV:DMEDH, TQVKT:RPVQ:KKATV:MIEDH, TQVAL:RPVQ:KKATV:MIEDH, TQVDL:RPVQ:KKATV:MIEDH, TQVDL:RPVQ:KKATV:MVEDH, TQVEE:RPVQ:KKATV:FLEDH, TQVGQ:RPVQ:KKATV:LEEDH, TQVHH:RPVQ:KKATV:RLEDH, VPTEL:RPVQ:KKATV:DMVVE, VPEKM:RPVQ:KKATV:NMTVE, VPTEL:RPVQ:KKATV:EMVVE, APTKL:RPVQ:KKATV:NMVVR, APTQL:RPVQ:KKATV:NMVVR, APTKL:RPVQ:KKATV:NMVVK, VPTKL:RPVQ:KKATV:EGMSVAE, VPTKL:RPVQ:KKATV:GMAVS, TPTKM:RPVQ:KKATV:GMVVD, VPARL:RPVQ:KKATV:DMVVE, VPTRL:RPVQ:KKATV:DMVVE, APVKT:RPVQ:KKATV:MIVEE, VPQAL:RPVQ:KKATV:MIVRS, VSQDL:RPVQ:KKATV:MIVKS, VPQDL:RPVQ:KKATV:MVVKS, VPTEE:RPVQ:KKATV:FLQHN, VPTGQ:RPVQ:KKATV:LEEHS and SRVHH:RPVQ:KKATV:RLEEH. More particularly, the quadruplet PEP5:PEP1:PEP2:PEP6 is selected from the group consisting of VPTKM:SAIS:LKNYQ:NMVVE, VPTKL:SAIS:LKNYQ:NMVVE, VPTQL:SAIS:LKNYQ:NMVVE, VPTKL:SAIS:LKNYQ:EGMSVVE, VPTKL:SAIS:LKNYQ:GMVVE, VPTKM:SAIS:LKNYQ:GMVVE, VPTRL:SAIS:LKNYQ:DMVVE, VPTKT:SAIS:LKNYQ:MIVVE, VPTAL:SAIS:LKNYQ:MIVVE, VPTDL:SAIS:LKNYQ:MIVVE, VPTDL:SAIS:LKNYQ:MVVVE, VPEKM:SAIS:LKNYQ:NMTVE, APTKL:SAIS:LKNYQ:NMVVR, APTQL:SAIS:LKNYQ:NMVVR, APTKL:SAIS:LKNYQ:NMVVK, VPTKL:SAIS:LKNYQ:EGMSVAE, VPTKL:SAIS:LKNYQ:GMAVS, TPTKM:SAIS:LKNYQ:GMVVD, VPARL:SAIS:LKNYQ:DMVVE, APVKT:SAIS:LKNYQ:MIVEE, VPQAL:SAIS:LKNYQ:MIVRS, VSQDL:SAIS:LKNYQ:MIVKS, VPQDL:SAIS:LKNYQ:MVVKS, VPTEE:SAIS:LKNYQ:FLQHN, VPTGQ:SAIS:LKNYQ:LEEHS, SRVHH:SAIS:LKNYQ:RLEEH, TQVQL:SAIS:LKNYQ:TLEDH, VPEEL:SSLS:LKVYP:DMTVE, VPEEL:SSLS:LKVYP:EMTVE, VPEKL:SSLS:LKVYP:NMTVE, VPEQL:SSLS:LKVYP:NMTVE, VPEKL:SSLS:LKVYP:EGMSTVE, VPEKL:SSLS:LKVYP:GMTVE, VPEKM:SSLS:LKVYP:GMTVE, VPERL:SSLS:LKVYP:DMTVE, VPEKT:SSLS:LKVYP:MITVE, VPEAL:SSLS:LKVYP:MITVE, VPEDL:SSLS:LKVYP:MITVE, VPEDL:SSLS:LKVYP:MVTVE, VPTEL:SSLS:LKVYP:DMVVE, VPTEL:SSLS:LKVYP:EMVVE, APTKL:SSLS:LKVYP:NMVVR, APTQL:SSLS:LKVYP:NMVVR, APTKL:SSLS:LKVYP:NMVVK, VPTKL:SSLS:LKVYP:EGMSVAE, VPTKL:SSLS:LKVYP:GMAVS, TPTKM:SSLS:LKVYP:GMVVD, VPARL:SSLS:LKVYP:DMVVE, VPTRL:SSLS:LKVYP:DMVVE, APVKT:SSLS:LKVYP:MIVEE, VPQAL:SSLS:LKVYP:MIVRS, VSQDL:SSLS:LKVYP:MIVKS, VPQDL:SSLS:LKVYP:MVVKS, VPTEE:SSLS:LKVYP:FLQHN, VPTGQ:SSLS:LKVYP:LEEHS, SRVHH:SSLS:LKVYP:RLEEH, TQVQL:SSLS:LKVYP:TLEDH, APTEL:NAIS:LKKYR:DMVVR, APTKM:NAIS:LKKYR:NMVVR, APTEL:NAIS:LKKYR:EMVVR, APTKL:NAIS:LKKYR:NMVVR, APTKL:NAIS:LKKYR:EGMSVVR, APTKL:NAIS:LKKYR:GMVVR, APTKM:NAIS:LKKYR:GMVVR, APTRL:NAIS:LKKYR:DMVVR, APTKT:NAIS:LKKYR:MIVVR, APTAL:NAIS:LKKYR:MIVVR, APTDL:NAIS:LKKYR:MIVVR, APTDL:NAIS:LKKYR:MVVVR, VPTEL:NAIS:LKKYR:DMVVE, VPEKM:NAIS:LKKYR:NMTVE, VPTEL:NAIS:LKKYR:EMVVE, APTKL:NAIS:LKKYR:NMVVK, VPTKL:NAIS:LKKYR:EGMSVAE, VPTKL:NAIS:LKKYR:GMAVS, TPTKM:NAIS:LKKYR:GMVVD, VPARL:NAIS:LKKYR:DMVVE, VPTRL:NAIS:LKKYR:DMVVE, APVKT:NAIS:LKKYR:MIVEE, VPQAL:NAIS:LKKYR:MIVRS, VSQDL:NAIS:LKKYR:MIVKS, VPQDL:NAIS:LKKYR:MVVKS, VPTEE:NAIS:LKKYR:FLQHN, VPTGQ:NAIS:LKKYR:LEEHS, SRVHH:NAIS:LKKYR:RLEEH, TQVQL:NAIS:LKKYR:TLEDH, APTEL:SATS:LRKHR:DMVVK, APTKM:SATS:LRKHR:NMVVK, APTEL:SATS:LRKHR:EMVVK, APTKL:SATS:LRKHR:NMVVK, APTQL:SATS:LRKHR:NMVVK, APTKL:SATS:LRKHR:EGMSVVK, APTKL:SATS:LRKHR:GMVVK, APTKM:SATS:LRKHR:GMVVK, APTRL:SATS:LRKHR:DMVVK, APTKT:SATS:LRKHR:MIVVK, APTAL:SATS:LRKHR:MIVVK, APTDL:SATS:LRKHR:MIVVK, APTDL:SATS:LRKHR:MVVVK, VPTEL:SATS:LRKHR:DMVVE, VPEKM:SATS:LRKHR:NMTVE, VPTEL:SATS:LRKHR:EMVVE, APTKL:SATS:LRKHR:NMVVR, APTQL:SATS:LRKHR:NMVVR, VPTKL:SATS:LRKHR:EGMSVAE, VPTKL:SATS:LRKHR:GMAVS, TPTKM:SATS:LRKHR:GMVVD, VPARL:SATS:LRKHR:DMVVE, VPTRL:SATS:LRKHR:DMVVE, APVKT:SATS:LRKHR:MIVEE, VPQAL:SATS:LRKHR:MIVRS, VSQDL:SATS:LRKHR:MIVKS, VPQDL:SATS:LRKHR:MVVKS, VPTEE:SATS:LRKHR:FLQHN, VPTGQ:SATS:LRKHR:LEEHS, SRVHH:SATS:LRKHR:RLEEH, TQVQL:SATS:LRKHR:TLEDH, VPTEL:SPIS:LKYHY:DMVAE, VPTKM:SPIS:LKYHY:NMVAE, VPTEL:SPIS:LKYHY:EMVAE, VPTKL:SPIS:LKYHY:NMVAE, VPTQL:SPIS:LKYHY:NMVAE, VPTKL:SPIS:LKYHY:GMVAE, VPTKM:SPIS:LKYHY:GMVAE, VPTRL:SPIS:LKYHY:DMVAE, VPTKT:SPIS:LKYHY:MIVAE, VPTAL:SPIS:LKYHY:MIVAE, VPTDL:SPIS:LKYHY:MIVAE, VPTDL:SPIS:LKYHY:MVVAE, VPTEL:SPIS:LKYHY:DMVVE, VPEKM:SPIS:LKYHY:NMTVE, VPTEL:SPIS:LKYHY:EMVVE, APTKL:SPIS:LKYHY:NMVVR, APTQL:SPIS:LKYHY:NMVVR, APTKL:SPIS:LKYHY:NMVVK, VPTKL:SPIS:LKYHY:GMAVS, TPTKM:SPIS:LKYHY:GMVVD, VPARL:SPIS:LKYHY:DMVVE, VPTRL:SPIS:LKYHY:DMVVE, APVKT:SPIS:LKYHY:MIVEE, VPQAL:SPIS:LKYHY:MIVRS, VSQDL:SPIS:LKYHY:MIVKS, VPQDL:SPIS:LKYHY:MVVKS, VPTEE:SPIS:LKYHY:FLQHN, VPTGQ:SPIS:LKYHY:LEEHS, SRVHH:SPIS:LKYHY:RLEEH, TQVQL:SPIS:LKYHY:TLEDH, VPTEL:EPIS:KFKYE:DMAVS, VPTKM:EPIS:KFKYE:NMAVS, VPTEL:EPIS:KFKYE:EMAVS, VPTKL:EPIS:KFKYE:NMAVS, VPTQL:EPIS:KFKYE:NMAVS, VPTKL:EPIS:KFKYE:EGMSAVS, VPTKM:EPIS:KFKYE:GMAVS, VPTRL:EPIS:KFKYE:DMAVS, VPTKT:EPIS:KFKYE:MIAVS, VPTAL:EPIS:KFKYE:MIAVS, VPTDL:EPIS:KFKYE:MIAVS, VPTDL:EPIS:KFKYE:MVAVS, VPTEL:EPIS:KFKYE:DMVVE, VPEKM:EPIS:KFKYE:NMTVE, VPTEL:EPIS:KFKYE:EMVVE, APTKL:EPIS:KFKYE:NMVVR, APTQL:EPIS:KFKYE:NMVVR, APTKL:EPIS:KFKYE:NMVVK, VPTKL:EPIS:KFKYE:EGMSVAE, TPTKM:EPIS:KFKYE:GMVVD, VPARL:EPIS:KFKYE:DMVVE, VPTRL:EPIS:KFKYE:DMVVE, APVKT:EPIS:KFKYE:MIVEE, VPQAL:EPIS:KFKYE:MIVRS, VSQDL:EPIS:KFKYE:MIVKS, VPQDL:EPIS:KFKYE:MVVKS, VPTEE:EPIS:KFKYE:FLQHN, VPTGQ:EPIS:KFKYE:LEEHS, SRVHH:EPIS:KFKYE:RLEEH, TQVQL:EPIS:KFKYE:TLEDH, TPTEL:SPIN:YGKIP:DMVVD, TPTKM:SPIN:YGKIP:NMVVD, TPTEL:SPIN:YGKIP:EMVVD, TPTKL:SPIN:YGKIP:NMVVD, TPTQL:SPIN:YGKIP:NMVVD, TPTKL:SPIN:YGKIP:EGMSVVD, TPTKL:SPIN:YGKIP:GMVVD, TPTRL:SPIN:YGKIP:DMVVD, TPTKT:SPIN:YGKIP:MIVVD, TPTAL:SPIN:YGKIP:MIVVD, TPTDL:SPIN:YGKIP:MIVVD, TPTDL:SPIN:YGKIP:MVVVD, VPTEL:SPIN:YGKIP:DMVVE, VPEKM:SPIN:YGKIP:NMTVE, VPTEL:SPIN:YGKIP:EMVVE, APTKL:SPIN:YGKIP:NMVVR, APTQL:SPIN:YGKIP:NMVVR, APTKL:SPIN:YGKIP:NMVVK, VPTKL:SPIN:YGKIP:EGMSVAE, VPTKL:SPIN:YGKIP:GMAVS, VPARL:SPIN:YGKIP:DMVVE, VPTRL:SPIN:YGKIP:DMVVE, APVKT:SPIN:YGKIP:MIVEE, VPQAL:SPIN:YGKIP:MIVRS, VSQDL:SPIN:YGKIP:MIVKS, VPQDL:SPIN:YGKIP:MVVKS, VPTEE:SPIN:YGKIP:FLQHN, VPTGQ:SPIN:YGKIP:LEEHS, SRVHH:SPIN:YGKIP:RLEEH, TQVQL:SPIN:YGKIP:TLEDH, VPAEL:SPIS:YKQYE:DMVVE, VPAKM:SPIS:YKQYE:NMVVE, VPAEL:SPIS:YKQYE:EMVVE, VPAKL:SPIS:YKQYE:NMVVE, VPAQL:SPIS:YKQYE:NMVVE, VPAKL:SPIS:YKQYE:EGMSVVE, VPAKL:SPIS:YKQYE:GMVVE, VPAKM:SPIS:YKQYE:GMVVE, VPARL:SPIS:YKQYE:DMVVE, VPAKT:SPIS:YKQYE:MIVVE, VPAAL:SPIS:YKQYE:MIVVE, VPADL:SPIS:YKQYE:MIVVE, VPADL:SPIS:YKQYE:MVVVE, VPTEL:SPIS:YKQYE:DMVVE, VPEKM:SPIS:YKQYE:NMTVE, VPTEL:SPIS:YKQYE:EMVVE, APTKL:SPIS:YKQYE:NMVVR, APTQL:SPIS:YKQYE:NMVVR, APTKL:SPIS:YKQYE:NMVVK, VPTKL:SPIS:YKQYE:EGMSVAE, VPTKL:SPIS:YKQYE:GMAVS, TPTKM:SPIS:YKQYE:GMVVD, VPTRL:SPIS:YKQYE:DMVVE, APVKT:SPIS:YKQYE:MIVEE, VPQAL:SPIS:YKQYE:MIVRS, VSQDL:SPIS:YKQYE:MIVKS, VPQDL:SPIS:YKQYE:MVVKS, VPTEE:SPIS:YKQYE:FLQHN, VPTGQ:SPIS:YKQYE:LEEHS, SRVHH:SPIS:YKQYE:RLEEH, TQVQL:SPIS:YKQYE:TLEDH, VPTKM:SPIS:YKQYE:NMVVE, VPTKL:SPIS:YKQYE:NMVVE, VPTQL:SPIS:YKQYE:NMVVE, VPTKL:SPIS:YKQYE:EGMSVVE, VPTKL:SPIS:YKQYE:GMVVE, VPTKM:SPIS:YKQYE:GMVVE, VPTKT:SPIS:YKQYE:MIVVE, VPTAL:SPIS:YKQYE:MIVVE, VPTDL:SPIS:YKQYE:MIVVE, VPTDL:SPIS:YKQYE:MVVVE, APVEL:KPLS:DHHKD:DMVEE, APVKM:KPLS:DHHKD:NMVEE, APVEL:KPLS:DHHKD:EMVEE, APVKL:KPLS:DHHKD:NMVEE, APVQL:KPLS:DHHKD:NMVEE, APVKL:KPLS:DHHKD:EGMSVEE, APVKL:KPLS:DHHKD:GMVEE, APVKM:KPLS:DHHKD:GMVEE, APVRL:KPLS:DHHKD:DMVEE, APVAL:KPLS:DHHKD:MIVEE, APVDL:KPLS:DHHKD:MIVEE, APVDL:KPLS:DHHKD:MVVEE, VPTEL:KPLS:DHHKD:DMVVE, VPEKM:KPLS:DHHKD:NMTVE, VPTEL:KPLS:DHHKD:EMVVE, APTKL:KPLS:DHHKD:NMVVR, APTQL:KPLS:DHHKD:NMVVR, APTKL:KPLS:DHHKD:NMVVK, VPTKL:KPLS:DHHKD:EGMSVAE, VPTKL:KPLS:DHHKD:GMAVS, TPTKM:KPLS:DHHKD:GMVVD, VPARL:KPLS:DHHKD:DMVVE, VPTRL:KPLS:DHHKD:DMVVE, VPQAL:KPLS:DHHKD:MIVRS, VSQDL:KPLS:DHHKD:MIVKS, VPQDL:KPLS:DHHKD:MVVKS, VPTEE:KPLS:DHHKD:FLQHN, VPTGQ:KPLS:DHHKD:LEEHS, SRVHH:KPLS:DHHKD:RLEEH, TQVQL:KPLS:DHHKD:TLEDH, VPQEL:EPLP:EQLSN:DMVRS, VPQKM:EPLP:EQLSN:NMVRS, VPQEL:EPLP:EQLSN:EMVRS, VPQKL:EPLP:EQLSN:NMVRS, VPQQL:EPLP:EQLSN:NMVRS, VPQKL:EPLP:EQLSN:EGMSVRS, VPQKL:EPLP:EQLSN:GMVRS, VPQKM:EPLP:EQLSN:GMVRS, VPQRL:EPLP:EQLSN:DMVRS, VPQKT:EPLP:EQLSN:MIVRS, VPQDL:EPLP:EQLSN:MIVRS, VPQDL:EPLP:EQLSN:MVVRS, VPTEL:EPLP:EQLSN:DMVVE, VPEKM:EPLP:EQLSN:NMTVE, VPTEL:EPLP:EQLSN:EMVVE, APTKL:EPLP:EQLSN:NMVVR, APTQL:EPLP:EQLSN:NMVVR, APTKL:EPLP:EQLSN:NMVVK, VPTKL:EPLP:EQLSN:EGMSVAE, VPTKL:EPLP:EQLSN:GMAVS, TPTKM:EPLP:EQLSN:GMVVD, VPARL:EPLP:EQLSN:DMVVE, VPTRL:EPLP:EQLSN:DMVVE, APVKT:EPLP:EQLSN:MIVEE, VSQDL:EPLP:EQLSN:MIVKS, VPQDL:EPLP:EQLSN:MVVKS, VPTEE:EPLP:EQLSN:FLQHN, VPTGQ:EPLP:EQLSN:LEEHS, SRVHH:EPLP:EQLSN:RLEEH, TQVQL:EPLP:EQLSN:TLEDH, VSQEL:EPLT:EQLSN:DMVKS, VSQKM:EPLT:EQLSN:NMVKS, VSQEL:EPLT:EQLSN:EMVKS, VSQKL:EPLT:EQLSN:NMVKS, VSQQL:EPLT:EQLSN:NMVKS, VSQKL:EPLT:EQLSN:EGMSVKS, VSQKL:EPLT:EQLSN:GMVKS, VSQKM:EPLT:EQLSN:GMVKS, VSQRL:EPLT:EQLSN:DMVKS, VSQKT:EPLT:EQLSN:MIVKS, VSQAL:EPLT:EQLSN:MIVKS, VSQDL:EPLT:EQLSN:MVVKS, VPTEL:EPLT:EQLSN:DMVVE, VPEKM:EPLT:EQLSN:NMTVE, VPTEL:EPLT:EQLSN:EMVVE, APTKL:EPLT:EQLSN:NMVVR, APTQL:EPLT:EQLSN:NMVVR, APTKL:EPLT:EQLSN:NMVVK, VPTKL:EPLT:EQLSN:EGMSVAE, VPTKL:EPLT:EQLSN:GMAVS, TPTKM:EPLT:EQLSN:GMVVD, VPARL:EPLT:EQLSN:DMVVE, VPTRL:EPLT:EQLSN:DMVVE, APVKT:EPLT:EQLSN:MIVEE, VPQAL:EPLT:EQLSN:MIVRS, VPTEE:EPLT:EQLSN:FLQHN, VPTGQ:EPLT:EQLSN:LEEHS, SRVHH:EPLT:EQLSN:RLEEH, TQVQL:EPLT:EQLSN:TLEDH, VPQEL:EPLT:EQLSN:DMVKS, VPQKM:EPLT:EQLSN:NMVKS, VPQEL:EPLT:EQLSN:EMVKS, VPQKL:EPLT:EQLSN:NMVKS, VPQQL:EPLT:EQLSN:NMVKS, VPQKL:EPLT:EQLSN:EGMSVKS, VPQKL:EPLT:EQLSN:GMVKS, VPQKM:EPLT:EQLSN:GMVKS, VPQRL:EPLT:EQLSN:DMVKS, VPQKT:EPLT:EQLSN:MIVKS, VPQAL:EPLT:EQLSN:MIVKS, VPQDL:EPLT:EQLSN:MIVKS, VPTGQ:SNIT:IGEMS:LEQHN, VPTEL:SNIT:IGEMS:DMVVE, VPEKM:SNIT:IGEMS:NMTVE, VPTEL:SNIT:IGEMS:EMVVE, APTKL:SNIT:IGEMS:NMVVR, APTQL:SNIT:IGEMS:NMVVR, APTKL:SNIT:IGEMS:NMVVK, VPTKL:SNIT:IGEMS:EGMSVAE, VPTKL:SNIT:IGEMS:GMAVS, TPTKM:SNIT:IGEMS:GMVVD, VPARL:SNIT:IGEMS:DMVVE, VPTRL:SNIT:IGEMS:DMVVE, APVKT:SNIT:IGEMS:MIVEE, VPQAL:SNIT:IGEMS:MIVRS, VSQDL:SNIT:IGEMS:MIVKS, VPQDL:SNIT:IGEMS:MVVKS, VPTGQ:SNIT:IGEMS:LEEHS, SRVHH:SNIT:IGEMS:RLEEH, TQVQL:SNIT:IGEMS:TLEDH, VPTEE:SNIT:LGEMS:FLEHS, VPTEL:SNIT:LGEMS:DMVVE, VPEKM:SNIT:LGEMS:NMTVE, VPTEL:SNIT:LGEMS:EMVVE, APTKL:SNIT:LGEMS:NMVVR, APTQL:SNIT:LGEMS:NMVVR, APTKL:SNIT:LGEMS:NMVVK, VPTKL:SNIT:LGEMS:EGMSVAE, VPTKL:SNIT:LGEMS:GMAVS, TPTKM:SNIT:LGEMS:GMVVD, VPARL:SNIT:LGEMS:DMVVE, VPTRL:SNIT:LGEMS:DMVVE, APVKT:SNIT:LGEMS:MIVEE, VPQAL:SNIT:LGEMS:MIVRS, VSQDL:SNIT:LGEMS:MIVKS, VPQDL:SNIT:LGEMS:MVVKS, VPTEE:SNIT:LGEMS:FLQHN, SRVHH:SNIT:LGEMS:RLEEH, TQVQL:SNIT:LGEMS:TLEDH, SRVQL:RSVK:KEVQV:TLEEH, VPTEL:RSVK:KEVQV:DMVVE, VPEKM:RSVK:KEVQV:NMTVE, VPTEL:RSVK:KEVQV:EMVVE, APTKL:RSVK:KEVQV:NMVVR, APTQL:RSVK:KEVQV:NMVVR, APTKL:RSVK:KEVQV:NMVVK, VPTKL:RSVK:KEVQV:EGMSVAE, VPTKL:RSVK:KEVQV:GMAVS, TPTKM:RSVK:KEVQV:GMVVD, VPARL:RSVK:KEVQV:DMVVE, VPTRL:RSVK:KEVQV:DMVVE, APVKT:RSVK:KEVQV:MIVEE, VPQAL:RSVK:KEVQV:MIVRS, VSQDL:RSVK:KEVQV:MIVKS, VPQDL:RSVK:KEVQV:MVVKS, VPTEE:RSVK:KEVQV:FLQHN, VPTGQ:RSVK:KEVQV:LEEHS, TQVQL:RSVK:KEVQV:TLEDH, TQVHH:RPVQ:KKATV:RLEDH, VPTEL:RPVQ:KKATV:DMVVE, VPEKM:RPVQ:KKATV:NMTVE, VPTEL:RPVQ:KKATV:EMVVE, APTKL:RPVQ:KKATV:NMVVR, APTQL:RPVQ:KKATV:NMVVR, APTKL:RPVQ:KKATV:NMVVK, VPTKL:RPVQ:KKATV:EGMSVAE, VPTKL:RPVQ:KKATV:GMAVS, TPTKM:RPVQ:KKATV:GMVVD, VPARL:RPVQ:KKATV:DMVVE, VPTRL:RPVQ:KKATV:DMVVE, APVKT:RPVQ:KKATV:MIVEE, VPQAL:RPVQ:KKATV:MIVRS, VSQDL:RPVQ:KKATV:MIVKS, VPQDL:RPVQ:KKATV:MVVKS, VPTEE:RPVQ:KKATV:FLQHN, VPTGQ:RPVQ:KKATV:LEEHS and SRVHH:RPVQ:KKATV:RLEEH.

[0364] In particular, in certain embodiments, the quadruplet PEP5:PEP12:PEP2:PEP6 is selected from the group consisting of VPTKM:SAIS-AA¹⁷-LYL:LKNYQ:NMVVE, VPTEL:SAIS-AA¹⁷-LYL:LKNYQ:EMVVE, VPTKL:SAIS-AA¹⁷-LYL:LKNYQ:NMVVE, VPTQL:SAIS-AA¹⁷-LYL:LKNYQ:NMVVE, VPTKL:SAIS-AA¹⁷-LYL:LKNYQ:EGMSVVE, VPTKL:SAIS-AA¹⁷-LYL:LKNYQ:GMVVE, VPTKM:SAIS-AA¹⁷-LYL:LKNYQ:GMVVE, VPTRL:SAIS-AA¹⁷-LYL:LKNYQ:DMVVE, VPTKT:SAIS-AA¹⁷-LYL:LKNYQ:MIVVE, VPTAL:SAIS-AA¹⁷-LYL:LKNYQ:MIVVE, VPTDL:SAIS-AA¹⁷-LYL:LKNYQ:MIVVE, VPTDL:SAIS-AA¹⁷-LYL:LKNYQ:MVVVE, VPTEE:SAIS-AA¹⁷-LYL:LKNYQ:FLVVE, VPTGQ:SAIS-AA¹⁷-LYL:LKNYQ:LEVVE, VPTHH:SAIS-AA¹⁷-LYL:LKNYQ:RLVVE, VPTQL:SAIS-AA¹⁷-LYL:LKNYQ:TLVVE, VPEKM:SAIS-AA¹⁷-LYL:LKNYQ:NMTVE, APTKL:SAIS-AA¹⁷-LYL:LKNYQ:NMVVR, APTQL:SAIS-AA¹⁷-LYL:LKNYQ:NMVVR, APTKL:SAIS-AA¹⁷-LYL:LKNYQ:NMVVK, VPTKL:SAIS-AA¹⁷-LYL:LKNYQ:EGMSVAE, VPTKL:SAIS-AA¹⁷-LYL:LKNYQ:GMAVS, TPTKM:SAIS-AA¹⁷-LYL:LKNYQ:GMVVD, VPARL:SAIS-AA¹⁷-LYL:LKNYQ:DMVVE, APVKT:SAIS-AA¹⁷-LYL:LKNYQ:MIVEE, VPQAL:SAIS-AA¹⁷-LYL:LKNYQ:MIVRS, VSQDL:SAIS-AA¹⁷-LYL:LKNYQ:MIVKS, VPQDL:SAIS-AA¹⁷-LYL:LKNYQ:MVVKS, VPTEE:SAIS-AA¹⁷-LYL:LKNYQ:FLQHN, VPTGQ:SAIS-AA¹⁷-LYL:LKNYQ:LEEHS, SRVHH:SAIS-AA¹⁷-LYL:LKNYQ:RLEEH, TQVQL:SAIS-AA¹⁷-LYL:LKNYQ:TLEDH, VPEEL:SSLS-AA¹⁷-LFF:LKVYP:DMTVE, VPEEL:SSLS-AA¹⁷-LFF:LKVYP:EMTVE, VPEKL:SSLS-AA¹⁷-LFF:LKVYP:NMTVE, VPEQL:SSLS-AA¹⁷-LFF:LKVYP:NMTVE, VPEKL:SSLS-AA¹⁷-LFF:LKVYP:EGMSTVE, VPEKL:SSLS-AA¹⁷-LFF:LKVYP:GMTVE, VPEKM:SSLS-AA¹⁷-LFF:LKVYP:GMTVE, VPERL:SSLS-AA¹⁷-LFF:LKVYP:DMTVE, VPEKT:SSLS-AA¹⁷-LFF:LKVYP:MITVE, VPEAL:SSLS-AA¹⁷-LFF:LKVYP:MITVE, VPEDL:SSLS-AA¹⁷-LFF:LKVYP:MITVE, VPEDL:SSLS-AA¹⁷-LFF:LKVYP:MVTVE, VPEEE:SSLS-AA¹⁷-LFF:LKVYP:FLTVE, VPEGQ:SSLS-AA¹⁷-LFF:LKVYP:LETVE, VPEHH:SSLS-AA¹⁷-LFF:LKVYP:RLTVE, VPEQL:SSLS-AA¹⁷-LFF:LKVYP:TLTVE, VPTEL:SSLS-AA¹⁷-LFF:LKVYP:DMVVE, VPTEL:SSLS-AA¹⁷-LFF:LKVYP:EMVVE, APTKL:SSLS-AA¹⁷-LFF:LKVYP:NMVVR, APTQL:SSLS-AA¹⁷-LFF:LKVYP:NMVVR, APTKL:SSLS-AA¹⁷-LFF:LKVYP:NMVVK, VPTKL:SSLS-AA¹⁷-LFF:LKVYP:EGMSVAE, VPTKL:SSLS-AA¹⁷-LFF:LKVYP:GMAVS, TPTKM:SSLS-AA¹⁷-LFF:LKVYP:GMVVD, VPARL:SSLS-AA¹⁷-LFF:LKVYP:DMVVE, VPTRL:SSLS-AA¹⁷-LFF:LKVYP:DMVVE, APVKT:SSLS-AA¹⁷-LFF:LKVYP:MIVEE, VPQAL:SSLS-AA¹⁷-LFF:LKVYP:MIVRS, VSQDL:SSLS-AA¹⁷-LFF:LKVYP:MIVKS, VPQDL:SSLS-AA¹⁷-LFF:LKVYP:MVVKS, VPTEE:SSLS-AA¹⁷-LFF:LKVYP:FLQHN, VPTGQ:SSLS-AA¹⁷-LFF:LKVYP:LEEHS, SRVHH:SSLS-AA¹⁷-LFF:LKVYP:RLEEH, TQVQL:SSLS-AA¹⁷-LFF:LKVYP:TLEDH, VPTEL:SAIS-AA¹⁷-LYL:LKNYQ:DMVVE, APTEL:NAIS-AA¹⁷-LYF:LKKYR:DMVVR, APTKM:NAIS-AA¹⁷-LYF:LKKYR:NMVVR, APTEL:NAIS-AA¹⁷-LYF:LKKYR:EMVVR, APTKL:NAIS-AA¹⁷-LYF:LKKYR:NMVVR, APTQL:NAIS-AA¹⁷-LYF:LKKYR:NMVVR, APTKL:NAIS-AA¹⁷-LYF:LKKYR:EGMSVVR, APTKL:NAIS-AA¹⁷-LYF:LKKYR:GMVVR, APTKM:NAIS-AA¹⁷-LYF:LKKYR:GMVVR, APTRL:NAIS-AA¹⁷-LYF:LKKYR:DMVVR, APTKT:NAIS-AA¹⁷-LYF:LKKYR:MIVVR, APTAL:NAIS-AA¹⁷-LYF:LKKYR:MIVVR, APTDL:NAIS-AA¹⁷-LYF:LKKYR:MIVVR, APTDL:NAIS-AA¹⁷-LYF:LKKYR:MVVVR, APTEE:NAIS-AA¹⁷-LYF:LKKYR:FLVVR, APTGQ:NAIS-AA¹⁷-LYF:LKKYR:LEVVR, APTHH:NAIS-AA¹⁷-LYF:LKKYR:RLVVR, APTQL:NAIS-AA¹⁷-LYF:LKKYR:TLVVR, VPTEL:NAIS-AA¹⁷-LYF:LKKYR:DMVVE, VPEKM:NAIS-AA¹⁷-LYF:LKKYR:NMTVE, VPTEL:NAIS-AA¹⁷-LYF:LKKYR:EMVVE, APTKL:NAIS-AA¹⁷-LYF:LKKYR:NMVVK, VPTKL:NAIS-AA¹⁷-LYF:LKKYR:EGMSVAE, VPTKL:NAIS-AA¹⁷-LYF:LKKYR:GMAVS, TPTKM:NAIS-AA¹⁷-LYF:LKKYR:GMVVD, VPARL:NAIS-AA¹⁷-LYF:LKKYR:DMVVE, VPTRL:NAIS-AA¹⁷-LYF:LKKYR:DMVVE, APVKT:NAIS-AA¹⁷-LYF:LKKYR:MIVEE, VPQAL:NAIS-AA¹⁷-LYF:LKKYR:MIVRS, VSQDL:NAIS-AA¹⁷-LYF:LKKYR:MIVKS, VPQDL:NAIS-AA¹⁷-LYF:LKKYR:MVVKS, VPTEE:NAIS-AA¹⁷-LYF:LKKYR:FLQHN, VPTGQ:NAIS-AA¹⁷-LYF:LKKYR:LEEHS, SRVHH:NAIS-AA¹⁷-LYF:LKKYR:RLEEH, TQVQL:NAIS-AA¹⁷-LYF:LKKYR:TLEDH, APTEL:SATS-AA¹⁷-LYY:LRKHR:DMVVK, APTKM:SATS-AA¹⁷-LYY:LRKHR:NMVVK, APTEL:SATS-AA¹⁷-LYY:LRKHR:EMVVK, APTKL:SATS-AA¹⁷-LYY:LRKHR:NMVVK, APTQL:SATS-AA¹⁷-LYY:LRKHR:NMVVK, APTKL:SATS-AA¹⁷-LYY:LRKHR:EGMSVVK, APTKL:SATS-AA¹⁷-LYY:LRKHR:GMVVK, APTKM:SATS-AA¹⁷-LYY:LRKHR:GMVVK, APTRL:SATS-AA¹⁷-LYY:LRKHR:DMVVK, APTKT:SATS-AA¹⁷-LYY:LRKHR:MIVVK, APTAL:SATS-AA¹⁷-LYY:LRKHR:MIVVK, APTDL:SATS-AA¹⁷-LYY:LRKHR:MIVVK, APTDL:SATS-AA¹⁷-LYY:LRKHR:MVVVK, APTEE:SATS-AA¹⁷-LYY:LRKHR:FLVVK, APTGQ:SATS-AA¹⁷-LYY:LRKHR:LEVVK, APTHH:SATS-AA¹⁷-LYY:LRKHR:RLVVK, APTEL:SATS-AA¹⁷-LYY:LRKHR:TLVVK, VPTEL:SATS-AA¹⁷-LYY:LRKHR:DMVVE, VPEKM:SATS-AA¹⁷-LYY:LRKHR:NMTVE, VPTEL:SATS-AA¹⁷-LYY:LRKHR:EMVVE, APTKL:SATS-AA¹⁷-LYY:LRKHR:NMVVR, APTQL:SATS-AA¹⁷-LYY:LRKHR:NMVVR, VPTKL:SATS-AA¹⁷-LYY:LRKHR:EGMSVAE, VPTKL:SATS-AA¹⁷-LYY:LRKHR:GMAVS, TPTKM:SATS-AA¹⁷-LYY:LRKHR:GMVV^{D}, VPARL:SATS-AA¹⁷-LYY:LRKHR:DMVVE, VPTRL:SATS-AA¹⁷-LYY:LRKHR:DMVVE, APVKT:SATS-AA¹⁷-LYY:LRKHR:MIVEE, VPQAL:SATS-AA¹⁷-LYY:LRKHR:MIVRS, VSQDL:SATS-AA¹⁷-LYY:LRKHR:MIVKS, VPQDL:SATS-AA¹⁷-LYY:LRKHR:MVVKS, VPTEE:SATS-AA¹⁷-LYY:LRKHR:FLQHN, VPTGQ:SATS-AA¹⁷-LYY:LRKHR:LEEHS, SRVHH:SATS-AA¹⁷-LYY:LRKHR:RLEEH, TQVQL:SATS-AA¹⁷-LYY:LRKHR:TLEDH, VPTEL:SPIS-AA¹⁷-LYK:LKYHY:DMVAE, VPTKM:SPIS-AA¹⁷-LYK:LKYHY:NMVAE, VPTEL:SPIS-AA¹⁷-LYK:LKYHY:EMVAE, VPTKL:SPIS-AA¹⁷-LYK:LKYHY:NMVAE, VPTQL:SPIS-AA¹⁷-LYK:LKYHY:NMVAE, VPTKL:SPIS-AA¹⁷-LYK:LKYHY:GMVAE, VPTKM:SPIS-AA¹⁷-LYK:LKYHY:GMVAE, VPTRL:SPIS-AA¹⁷-LYK:LKYHY:DMVAE, VPTKT:SPIS-AA¹⁷-LYK:LKYHY:MIVAE, VPTAL:SPIS-AA¹⁷-LYK:LKYHY:MIVAE, VPTDL:SPIS-AA¹⁷-LYK:LKYHY:MIVAE, VPTDL:SPIS-AA¹⁷-LYK:LKYHY:MVVAE, VPTEE:SPIS-AA¹⁷-LYK:LKYHY:FLVAE, VPTGQ:SPIS-AA¹⁷-LYK:LKYHY:LEVAE, VPTHH:SPIS-AA¹⁷-LYK:LKYHY:RLVAE, VPTQL:SPIS-AA¹⁷-LYK:LKYHY:TLVAE, VPTEL:SPIS-AA¹⁷-LYK:LKYHY:DMVVE, VPEKM:SPIS-AA¹⁷-LYK:LKYHY:NMTVE, VPTEL:SPIS-AA¹⁷-LYK:LKYHY:EMVVE, APTKL:SPIS-AA¹⁷-LYK:LKYHY:NMVVR, APTQL:SPIS-AA¹⁷-LYK:LKYHY:NMVVR, APTKL:SPIS-AA¹⁷-LYK:LKYHY:NMVVK, VPTKL:SPIS-AA¹⁷-LYK:LKYHY:GMAVS, TPTKM:SPIS-AA¹⁷-LYK:LKYHY:GMVVD, VPARL:SPIS-AA¹⁷-LYK:LKYHY:DMVVE, VPTRL:SPIS-AA¹⁷-LYK:LKYHY:DMVVE, APVKT:SPIS-AA¹⁷-LYK:LKYHY:MIVEE, VPQAL:SPIS-AA¹⁷-LYK:LKYHY:MIVRS, VSQDL:SPIS-AA¹⁷-LYK:LKYHY:MIVKS, VPQDL:SPIS-AA¹⁷-LYK:LKYHY:MVVKS, VPTEE:SPIS-AA¹⁷-LYK:LKYHY:FLQHN, VPTGQ:SPIS-AA¹⁷-LYK:LKYHY:LEEHS, SRVHH:SPIS-AA¹⁷-LYK:LKYHY:RLEEH, TQVQL:SPIS-AA¹⁷-LYK:LKYHY:TLEDH, VPTEL:EPIS-AA¹⁷-LYL:KFKYE:DMAVS, VPTKM:EPIS-AA¹⁷-LYL:KFKYE:NMAVS, VPTEL:EPIS-AA¹⁷-LYL:KFKYE:EMAVS, VPTKL:EPIS-AA¹⁷-LYL:KFKYE:NMAVS, VPTQL:EPIS-AA¹⁷-LYL:KFKYE:NMAVS, VPTKL:EPIS-AA¹⁷-LYL:KFKYE:EGMSAVS, VPTKM:EPIS-AA¹⁷-LYL:KFKYE:GMAVS, VPTRL:EPIS-AA¹⁷-LYL:KFKYE:DMAVS, VPTKT:EPIS-AA¹⁷-LYL:KFKYE:MIAVS, VPTAL:EPIS-AA¹⁷-LYL:KFKYE:MIAVS, VPTDL:EPIS-AA¹⁷-LYL:KFKYE:MIAVS, VPTDL:EPIS-AA¹⁷-LYL:KFKYE:MVAVS, VPTEE:EPIS-AA¹⁷-LYL:KFKYE:FLAVS, VPTGQ:EPIS-AA¹⁷-LYL:KFKYE:LEAVS, VPTHH:EPIS-AA¹⁷-LYL:KFKYE:RLAVS, VPTQL:EPIS-AA¹⁷-LYL:KFKYE:TLAVS, VPTEL:EPIS-AA¹⁷-LYL:KFKYE:DMVVE, VPEKM:EPIS-AA¹⁷-LYL:KFKYE:NMTVE, VPTEL:EPIS-AA¹⁷-LYL:KFKYE:EMVVE, APTKL:EPIS-AA¹⁷-LYL:KFKYE:NMVVR, APTQL:EPIS-AA¹⁷-LYL:KFKYE:NMVVR, APTKL:EPIS-AA¹⁷-LYL:KFKYE:NMVVK, VPTKL:EPIS-AA¹⁷-LYL:KFKYE:EGMSVAE, TPTKM:EPIS-AA¹⁷-LYL:KFKYE:GMVVD, VPARL:EPIS-AA¹⁷-LYL:KFKYE:DMVVE, VPTRL:EPIS-AA¹⁷-LYL:KFKYE:DMVVE, APVKT:EPIS-AA¹⁷-LYL:KFKYE:MIVEE, VPQAL:EPIS-AA¹⁷-LYL:KFKYE:MIVRS, VSQDL:EPIS-AA¹⁷-LYL:KFKYE:MIVKS, VPQDL:EPIS-AA¹⁷-LYL:KFKYE:MVVKS, VPTEE:EPIS-AA¹⁷-LYL:KFKYE:FLQHN, VPTGQ:EPIS-AA¹⁷-LYL:KFKYE:LEEHS, SRVHH:EPIS-AA¹⁷-LYL:KFKYE:RLEEH, TQVQL:EPIS-AA¹⁷-LYL:KFKYE:TLEDH, TPTEL:SPIN-AA¹⁷-LYF:YGKIP:DMVVD, TPTKM:SPIN-AA¹⁷-LYF:YGKIP:NMVVD, TPTEL:SPIN-AA¹⁷-LYF:YGKIP:EMVVD, TPTKL:SPIN-AA¹⁷-LYF:YGKIP:NMVVD, TPTQL:SPIN-AA¹⁷-LYF:YGKIP:NMVVD, TPTKL:SPIN-AA¹⁷-LYF:YGKIP:EGMSVVD, TPTKL:SPIN-AA¹⁷-LYF:YGKIP:GMVVD, TPTRL:SPIN-AA¹⁷-LYF:YGKIP:DMVVD, TPTKT:SPIN-AA¹⁷-LYF:YGKIP:MIVVD, TPTAL:SPI-AA¹⁷-LYF:YGKIP:MIVVD, TPTDL:SPIN-AA¹⁷-LYF:YGKIP:MIVVD, TPTDL:SPIN-AA¹⁷-LYF:YGKIP:MVVVD, TPTEE:SPIN-AA¹⁷-LYF:YGKIP:FLVVD, TPTGQ:SPIN-AA¹⁷-LYF:YGKIP:LEVVD, TPTHH:SPIN-AA¹⁷-LYF:YGKIP:RLVVD, TPTEL:SPIN-AA¹⁷-LYF:YGKIP:TLVVD, VPTEL:SPIN-AA¹⁷-LYF:YGKIP:DMVVE, VPEKM:SPIN-AA¹⁷-LYF:YGKIP:NMTVE, VPTEL:SPIN-AA¹⁷-LYF:YGKIP:EMVVE, APTKL:SPIN-AA¹⁷-LYF:YGKIP:NMVVR, APTKL:SPIN-AA¹⁷-LYF:YGKIP:NMVVR, APTKL:SPIN-AA¹⁷-LYF:YGKIP:NMVVK, VPTKL:SPIN-AA¹⁷-LYF:YGKIP:EGMSVAE, VPTKL:SPIN-AA¹⁷-LYF:YGKIP:GMAVS, VPARL:SPIN-AA¹⁷-LYF:YGKIP:DMVVE, VPTRL:SPIN-AA¹⁷-LYF:YGKIP:DMVVE, APVKT:SPIN-AA¹⁷-LYF:YGKIP:MIVEE, VPQAL:SPIN-AA¹⁷-LYF:YGKIP:MIVRS, VSQDL:SPIN-AA¹⁷-LYF:YGKIP:MIVKS, VPQDL:SPIN-AA¹⁷-LYF:YGKIP:MVVKS, VPTEE:SPIN-AA¹⁷-LYF:YGKIP:FLQHN, VPTGQ:SPIN-AA¹⁷-LYF:YGKIP:LEEHS, SRVHH:SPIN-AA¹⁷-LYF:YGKIP:RLEEH, TQVQL:SPIN-AA¹⁷-LYF:YGKIP:TLEDH, VPAEL:SPIS-AA¹⁷-LYI:YKQYE:DMVVE, VPAKM:SPIS-AA¹⁷-LYI:YKQYE:NMVVE, VPAEL:SPIS-AA¹⁷-LYI:YKQYE:EMVVE, VPAKL:SPIS-AA¹⁷-LYI:YKQYE:NMVVE, VPAQL:SPIS-AA¹⁷-LYI:YKQYE:NMVVE, VPAKL:SPIS-AA¹⁷-LYI:YKQYE:EGMSVVE, VPAKL:SPIS-AA¹⁷-LYI:YKQYE:GMVVE, VPAKM:SPIS-AA¹⁷-LYI:YKQYE:GMVVE, VPARL:SPIS-AA¹⁷-LYI:YKQYE:DMVVE, VPAKT:SPIS-AA¹⁷-LYI:YKQYE:MIVVE, VPAAL:SPIS-AA¹⁷-LYI:YKQYE:MIVVE, VPADL:SPIS-AA¹⁷-LYI:YKQYE:MIVVE, VPADL:SPIS-AA¹⁷-LYI:YKQYE:MVVVE, VPAEE:SPIS-AA¹⁷-LYI:YKQYE:FLVVE, VPAGQ:SPIS-AA¹⁷-LYI:YKQYE:LEVVE, VPAHH:SPIS-AA¹⁷-LYI:YKQYE:RLVVE, VPAQL:SPIS-AA¹⁷-LYI:YKQYE:TLVVE, VPTEL:SPIS-AA¹⁷-LYI:YKQYE:DMVVE, VPEKM:SPIS-AA¹⁷-LYI:YKQYE:NMTVE, VPTEL:SPIS-AA¹⁷-LYI:YKQYE:EMVVE, APTKL:SPIS-AA¹⁷-LYI:YKQYE:NMVVR, APTQL:SPIS-AA¹⁷-LYI:YKQYE:NMVVR, APTKL:SPIS-AA¹⁷-LYI:YKQYE:NMVVK, VPTKL:SPIS-AA¹⁷-LYI:YKQYE:EGMSVAE, VPTKL:SPIS-AA¹⁷-LYI:YKQYE:GMAVS, TPTKM:SPIS-AA¹⁷-LYI:YKQYE:GMVVD, VPTRL:SPIS-AA¹⁷-LYI:YKQYE:DMVVE, APVKT:SPIS-AA¹⁷-LYI:YKQYE:MIVEE, VPQAL:SPIS-AA¹⁷-LYI:YKQYE:MIVRS, VSQDL:SPIS-AA¹⁷-LYI:YKQYE:MIVKS, VPQDL:SPIS-AA¹⁷-LYI:YKQYE:MVVKS, VPTEE:SPIS-AA¹⁷-LYI:YKQYE:FLQHN, VPTGQ:SPIS-AA¹⁷-LYI:YKQYE:LEEHS, SRVHH:SPIS-AA¹⁷-LYI:YKQYE:RLEEH, TQVQL:SPIS-AA¹⁷-LYI:YKQYE:TLEDH, VPTEL:SPIS-AA¹⁷-LFI:YKQYE:DMVVE, VPTKM:SPIS-AA¹⁷-LFI:YKQYE:NMVVE, VPTEL:SPIS-AA¹⁷-LFI:YKQYE:EMVVE, VPTKL:SPIS-AA¹⁷-LFI:YKQYE:NMVVE, VPTQL:SPIS-AA¹⁷-LFI:YKQYE:NMVVE, VPTKL:SPIS-AA¹⁷-LFI:YKQYE:EGMSVVE, VPTKL:SPIS-AA¹⁷-LFI:YKQYE:GMVVE, VPTKM:SPIS-AA¹⁷-LFI:YKQYE:GMVVE, VPTRL:SPIS-AA¹⁷-LFI:YKQYE:DMVVE, VPTKT:SPIS-AA¹⁷-LFI:YKQYE:MIVVE, VPTAL:SPIS-AA¹⁷-LFI:YKQYE:MIVVE, VPTDL:SPIS-AA¹⁷-LFI:YKQYE:MIVVE, VPTDL:SPIS-AA¹⁷-LFI:YKQYE:MVVVE, VPTEE:SPIS-AA¹⁷-LFI:YKQYE:FLVVE, VPTGQ:SPIS-AA¹⁷-LFI:YKQYE:LEVVE, VPTHH:SPIS-AA¹⁷-LFI:YKQYE:RLVVE, VPTQL:SPIS-AA¹⁷-LFI:YKQYE:TLVVE, VPEKM:SPIS-AA¹⁷-LFI:YKQYE:NMTVE, APTKL:SPIS-AA¹⁷-LFI:YKQYE:NMVVR, APTQL:SPIS-AA¹⁷-LFI:YKQYE:NMVVR, APTKL:SPIS-AA¹⁷-LFI:YKQYE:NMVVK, VPTKL:SPIS-AA¹⁷-LFI:YKQYE:EGMSVAE, VPTKL:SPIS-AA¹⁷-LFI:YKQYE:GMAVS, TPTKM:SPIS-AA¹⁷-LFI:YKQYE:GMVVD, VPARL:SPIS-AA¹⁷-LFI:YKQYE:DMVVE, APVKT:SPIS-AA¹⁷-LFI:YKQYE:MIVEE, VPQAL:SPIS-AA¹⁷-LFI:YKQYE:MIVRS, VSQDL:SPIS-AA¹⁷-LFI:YKQYE:MIVKS, VPQDL:SPIS-AA¹⁷-LFI:YKQYE:MVVKS, VPTEE:SPIS-AA¹⁷-LFI:YKQYE:FLQHN, VPTGQ:SPIS-AA¹⁷-LFI:YKQYE:LEEHS, SRVHH:SPIS-AA¹⁷-LFI:YKQYE:RLEEH, TQVQL:SPIS-AA¹⁷-LFI:YKQYE:TLEDH, APVEL:KPLS-AA¹⁷-LYV:DHHKD:DMVEE, APVKM:KPLS-AA¹⁷-LYV:DHHKD:NMVEE, APVEL:KPLS-AA¹⁷-LYV:DHHKD:EMVEE, APVKL:KPLS-AA¹⁷-LYV:DHHKD:NMVEE, APVQL:KPLS-AA¹⁷-LYV:DHHKD:NMVEE, APVKL:KPLS-AA¹⁷-LYV:DHHKD:EGMSVEE, APVKL:KPLS-AA¹⁷-LYV:DHHKD:GMVEE, APVKM:KPLS-AA¹⁷-LYV:DHHKD:GMVEE, APVRL:KPLS-AA¹⁷-LYV:DHHKD:DMVEE, APVAL:KPLS-AA¹⁷-LYV:DHHKD:MIVEE, APVDL:KPLS-AA¹⁷-LYV:DHHKD:MIVEE, APVDL:KPLS-AA¹⁷-LYV:DHHKD:MVVEE, APVEE:KPLS-AA¹⁷-LYV:DHHKD:FLVEE, APVGQ:KPLS-AA¹⁷-LYV:DHHKD:LEVEE, APVHH:KPLS-AA¹⁷-LYV:DHHKD:RLVEE, APVQL:KPLS-AA¹⁷-LYV:DHHKD:TLVEE, VPTEL:KPLS-AA¹⁷-LYV:DHHKD:DMVVE, VPEKM:KPLS-AA¹⁷-LYV:DHHKD:NMTVE, VPTEL:KPLS-AA¹⁷-LYV:DHHKD:EMVVE, APTKL:KPLS-AA¹⁷-LYV:DHHKD:NMVVR, APTQL:KPLS-AA¹⁷-LYV:DHHKD:NMVVR, APTKL:KPLS-AA¹⁷-LYV:DHHKD:NMVVK, VPTKL:KPLS-AA¹⁷-LYV:DHHKD:EGMSVAE, VPTKL:KPLS-AA¹⁷-LYV:DHHKD:GMAVS, TPTKM:KPLS-AA¹⁷-LYV:DHHKD:GMVVD, VPARL:KPLS-AA¹⁷-LYV:DHHKD:DMVVE, VPTRL:KPLS-AA¹⁷-LYV:DHHKD:DMVVE, VPQAL:KPLS-AA¹⁷-LYV:DHHKD:MIVRS, VSQDL:KPLS-AA¹⁷-LYV:DHHKD:MIVKS, VPQDL:KPLS-AA¹⁷-LYV:DHHKD:MVVKS, VPTEE:KPLS-AA¹⁷-LYV:DHHKD:FLQHN, VPTGQ:KPLS-AA¹⁷-LYV:DHHKD:LEEHS, SRVHH:KPLS-AA¹⁷-LYV:DHHKD:RLEEH, TQVQL:KPLS-AA¹⁷-LYV:DHHKD:TLEDH, VPQEL:EPLP-AA¹⁷-VYY:EQLSN:DMVRS, VPQKM:EPLP-AA¹⁷-VYY:EQLSN:NMVRS, VPQEL:EPLP-AA¹⁷-VYY:EQLSN:EMVRS, VPQKL:EPLP-AA¹⁷-VYY:EQLSN:NMVRS, VPQQL:EPLP-AA¹⁷-VYY:EQLSN:NMVRS, VPQKL:EPLP-AA¹⁷-VYY:EQLSN:EGMSVRS, VPQKL:EPLP-AA¹⁷-VYY:EQLSN:GMVRS, VPQKM:EPLP-AA¹⁷-VYY:EQLSN:GMVRS, VPQRL:EPLP-AA¹⁷-VYY:EQLSN:DMVRS, VPQKT:EPLP-AA¹⁷-VYY:EQLSN:MIVRS, VPQDL:EPLP-AA¹⁷-VYY:EQLSN:MIVRS, VPQDL:EPLP-AA¹⁷-VYY:EQLSN:MVVRS, VPQEE:EPLP-AA¹⁷-VYY:EQLSN:FLVRS, VPQGQ:EPLP-AA¹⁷-VYY:EQLSN:LEVRS, VPQHH:EPLP-AA¹⁷-VYY:EQLSN:RLVRS, VPQQL:EPLP-AA¹⁷-VYY:EQLSN:TLVRS, VPTEL:EPLP-AA¹⁷-VYY:EQLSN:DMVVE, VPEKM:EPLP-AA¹⁷-VYY:EQLSN:NMTVE, VPTEL:EPLP-AA¹⁷-VYY:EQLSN:EMVVE, APTKL:EPLP-AA¹⁷-VYY:EQLSN:NMVVR, APTQL:EPLP-AA¹⁷-VYY:EQLSN:NMVVR, APTKL:EPLP-AA¹⁷-VYY:EQLSN:NMVVK, VPTKL:EPLP-AA¹⁷-VYY:EQLSN:EGMSVAE, VPTKL:EPLP-AA¹⁷-VYY:EQLSN:GMAVS, TPTKM:EPLP-AA¹⁷-VYY:EQLSN:GMVVD, VPARL:EPLP-AA¹⁷-VYY:EQLSN:DMVVE, VPTRL:EPLP-AA¹⁷-VYY:EQLSN:DMVVE, APVKT:EPLP-AA¹⁷-VYY:EQLSN:MIVEE, VSQDL:EPLP-AA¹⁷-VYY:EQLSN:MIVKS, VPQDL:EPLP-AA¹⁷-VYY:EQLSN:MVVKS, VPTEE:EPLP-AA¹⁷-VYY:EQLSN:FLQHN, VPTGQ:EPLP-AA¹⁷-VYY:EQLSN:LEEHS, SRVHH:EPLP-AA¹⁷-VYY:EQLSN:RLEEH, TQVQL:EPLP-AA¹⁷-VYY:EQLSN:TLEDH, VSQEL:EPLT-AA¹⁷-LYY:EQLSN:DMVKS, VSQKM:EPLT-AA¹⁷-LYY:EQLSN:NMVKS, VSQEL:EPLT-AA¹⁷-LYY:EQLSN:EMVKS, VSQKL:EPLT-AA¹⁷-LYY:EQLSN:NMVKS, VSQQL:EPLT-AA¹⁷-LYY:EQLSN:NMVKS, VSQKL:EPLT-AA¹⁷-LYY:EQLSN:EGMSVKS, VSQKL:EPLT-AA¹⁷-LYY:EQLSN:GMVKS, VSQKM:EPLT-AA¹⁷-LYY:EQLSN:GMVKS, VSQRL:EPLT-AA¹⁷-LYY:EQLSN:DMVKS, VSQKT:EPLT-AA¹⁷-LYY:EQLSN:MIVKS, VSQAL:EPLT-AA¹⁷-LYY:EQLSN:MIVKS, VSQDL:EPLT-AA¹⁷-LYY:EQLSN:MVVKS, VSQEE:EPLT-AA¹⁷-LYY:EQLSN:FLVKS, VSQGQ:EPLT-AA¹⁷-LYY:EQLSN:LEVKS, VSQHH:EPLT-AA¹⁷-LYY:EQLSN:RLVKS, VSQQL:EPLT-AA¹⁷-LYY:EQLSN:TLVKS, VPTEL:EPLT-AA¹⁷-LYY:EQLSN:DMVVE, VPEKM:EPLT-AA¹⁷-LYY:EQLSN:NMTVE, VPTEL:EPLT-AA¹⁷-LYY:EQLSN:EMVVE, APTKL:EPLT-AA¹⁷-LYY:EQLSN:NMVVR, APTQL:EPLT-AA¹⁷-LYY:EQLSN:NMVVR, APTKL:EPLT-AA¹⁷-LYY:EQLSN:NMVVK, VPTKL:EPLT-AA¹⁷-LYY:EQLSN:EGMSVAE, VPTKL:EPLT-AA¹⁷-LYY:EQLSN:GMAVS, TPTKM:EPLT-AA¹⁷-LYY:EQLSN:GMVVD, VPARL:EPLT-AA¹⁷-LYY:EQLSN:DMVVE, VPTRL:EPLT-AA¹⁷-LYY:EQLSN:DMVVE, APVKT:EPLT-AA¹⁷-LYY:EQLSN:MIVEE, VPQAL:EPLT-AA¹⁷-LYY:EQLSN:MIVRS, VPQDL:EPLT-AA¹⁷-LYY:EQLSN:MVVKS, VPTEE:EPLT-AA¹⁷-LYY:EQLSN:FLQHN, VPTGQ:EPLT-AA¹⁷-LYY:EQLSN:LEEHS, SRVHH:EPLT-AA¹⁷-LYY:EQLSN:RLEEH, TQVQL:EPLT-AA¹⁷-LYY:EQLSN:TLEDH, VPQEL:EPLT-AA¹⁷-LYY:EQLSN:DMVKS, VPQKM:EPLT-AA¹⁷-LYY:EQLSN:NMVKS, VPQEL:EPLT-AA¹⁷-LYY:EQLSN:EMVKS, VPQKL:EPLT-AA¹⁷-LYY:EQLSN:NMVKS, VPQQL:EPLT-AA¹⁷-LYY:EQLSN:NMVKS, VPQKL:EPLT-AA¹⁷-LYY:EQLSN:EGMSVKS, VPQKL:EPLT-AA¹⁷-LYY:EQLSN:GMVKS, VPQKM:EPLT-AA¹⁷-LYY:EQLSN:GMVKS, VPQRL:EPLT-AA¹⁷-LYY:EQLSN:DMVKS, VPQKT:EPLT-AA¹⁷-LYY:EQLSN:MIVKS, VPQAL:EPLT-AA¹⁷-LYY:EQLSN:MIVKS, VPQDL:EPLT-AA¹⁷-LYY:EQLSN:MIVKS, VPQEE:EPLT-AA¹⁷-LYY:EQLSN:FLVKS, VPQGQ:EPLT-AA¹⁷-LYY:EQLSN:LEVKS, VPQHH:EPLT-AA¹⁷-LYY:EQLSN:RLVKS, VPQQL:EPLT-AA¹⁷-LYY:EQLSN:TLVKS, VSQDL:EPLT-AA¹⁷-LYY:EQLSN:MIVKS, VPTEL:SNIT-AA¹⁷-QIM:IGEMS:DMQHN, VPTKM:SNIT-AA¹⁷-QIM:IGEMS:NMQHN, VPTEL:SNIT-AA¹⁷-QIM:IGEMS:EMQHN, VPTKL:SNIT-AA¹⁷-QIM:IGEMS:NMQHN, VPTQL:SNIT-AA¹⁷-QIM:IGEMS:NMQHN, VPTKL:SNIT-AA¹⁷-QIM:IGEMS:EGMSQHN, VPTKL:SNIT-AA¹⁷-QIM:IGEMS:GMQHN, VPTKM:SNIT-AA¹⁷-QIM:IGEMS:GMQHN, VPTRL:SNIT-AA¹⁷-QIM:IGEMS:DMQHN, VPTKT:SNIT-AA¹⁷-QIM:IGEMS:MIQHN, VPTAL:SNIT-AA¹⁷-QIM:IGEMS:MIQHN, VPTDL:SNIT-AA¹⁷-QIM:IGEMS:MIQHN, VPTDL:SNIT-AA¹⁷-QIM:IGEMS:MVQHN, VPTGQ:SNIT-AA¹⁷-QIM:IGEMS:LEQHN, VPTEE:SNIT-AA¹⁷-QIM:IGEMS:FLQHN, VPTHH:SNIT-AA¹⁷-QIM:IGEMS:RLQHN, VPTQL:SNIT-AA¹⁷-QIM:IGEMS:TLQHN, VPTEL:SNIT-AA¹⁷-QIM:IGEMS:DMVVE, VPEKM:SNIT-AA¹⁷-QIM:IGEMS:NMTVE, VPTEL:SNIT-AA¹⁷-QIM:IGEMS:EMVVE, APTKL:SNIT-AA¹⁷-QIM:IGEMS:NMVVR, APTQL:SNIT-AA¹⁷-QIM:IGEMS:NMVVR, APTKL:SNIT-AA¹⁷-QIM:IGEMS:NMVVK, VPTKL:SNIT-AA¹⁷-QIM:IGEMS:EGMSVAE, VPTKL:SNIT-AA¹⁷-QIM:IGEMS:GMAVS, TPTKM:SNIT-AA¹⁷-QIM:IGEMS:GMVVD, VPARL:SNIT-AA¹⁷-QIM:IGEMS:DMVVE, VPTRL:SNIT-AA¹⁷-QIM:IGEMS:DMVVE, APVKT:SNIT-AA¹⁷-QIM:IGEMS:MIVEE, VPQAL:SNIT-AA¹⁷-QIM:IGEMS:MIVRS, VSQDL:SNIT-AA¹⁷-QIM:IGEMS:MIVKS, VPQDL:SNIT-AA¹⁷-QIM:IGEMS:MVVKS, VPTGQ:SNIT-AA¹⁷-QIM:IGEMS:LEEHS, SRVHH:SNIT-AA¹⁷-QIM:IGEMS:RLEEH, TQVQL:SNIT-AA¹⁷-QIM:IGEMS:TLEDH, VPTEL:SNIT-AA¹⁷-QIM:LGEMS:DMEHS, VPTKM:SNIT-AA¹⁷-QIM:LGEMS:NMEHS, VPTEL:SNIT-AA¹⁷-QIM:LGEMS:EMEHS, VPTKL:SNIT-AA¹⁷-QIM:LGEMS:NMEHS, VPTQL:SNIT-AA¹⁷-QIM:LGEMS:NMEHS, VPTKL:SNIT-AA¹⁷-QIM:LGEMS:EGMSEHS, VPTKL:SNIT-AA¹⁷-QIM:LGEMS:GMEHS, VPTKM:SNIT-AA¹⁷-QIM:LGEMS:GMEHS, VPTRL:SNIT-AA¹⁷-QIM:LGEMS:DMEHS, VPTKT:SNIT-AA¹⁷-QIM:LGEMS:MIEHS, VPTAL:SNIT-AA¹⁷-QIM:LGEMS:MIEHS, VPTDL:SNIT-AA¹⁷-QIM:LGEMS:MIEHS, VPTDL:SNIT-AA¹⁷-QIM:LGEMS:MVEHS, VPTEE:SNIT-AA¹⁷-QIM:LGEMS:FLEHS, VPTHH:SNIT-AA¹⁷-QIM:LGEMS:RLEHS, VPTQL:SNIT-AA¹⁷-QIM:LGEMS:TLEHS, VPTEL:SNIT-AA¹⁷-QIM:LGEMS:DMVVE, VPEKM:SNIT-AA¹⁷-QIM:LGEMS:NMTVE, VPTEL:SNIT-AA¹⁷-QIM:LGEMS:EMVVE, APTKL:SNIT-AA¹⁷-QIM:LGEMS:NMVVR, APTQL:SNIT-AA¹⁷-QIM:LGEMS:NMVVR, APTKL:SNIT-AA¹⁷-QIM:LGEMS:NMVVK, VPTKL:SNIT-AA¹⁷-QIM:LGEMS:EGMSVAE, VPTKL:SNIT-AA¹⁷-QIM:LGEMS:GMAVS, TPTKM:SNIT-AA¹⁷-QIM:LGEMS:GMVVD, VPARL:SNIT-AA¹⁷-QIM:LGEMS:DMVVE, VPTRL:SNIT-AA¹⁷-QIM:LGEMS:DMVVE, APVKT:SNIT-AA¹⁷-QIM:LGEMS:MIVEE, VPQAL:SNIT-AA¹⁷-QIM:LGEMS:MIVRS, VSQDL:SNIT-AA¹⁷-QIM:LGEMS:MIVKS, VPQDL:SNIT-AA¹⁷-QIM:LGEMS:MVVKS, VPTEE:SNIT-AA¹⁷-QIM:LGEMS:FLQHN, SRVHH:SNIT-AA¹⁷-QIM:LGEMS:RLEEH, TQVQL:SNIT-AA¹⁷-QIM:LGEMS:TLEDH, SRVEL:RSVK-AA¹⁷-AKV:KEVQV:DMEEH, SRVKM:RSVK-AA¹⁷-AKV:KEVQV:NMEEH, SRVEL:RSVK-AA¹⁷-AKV:KEVQV:EMEEH, SRVKL:RSVK-AA¹⁷-AKV:KEVQV:NMEEH, SRVEL:RSVK-AA¹⁷-AKV:KEVQV:NMEEH, SRVKL:RSVK-AA¹⁷-AKV:KEVQV:EGMSEEH, SRVKL:RSVK-AA¹⁷-AKV:KEVQV:GMEEH, SRVKM:RSVK-AA¹⁷-AKV:KEVQV:GMEEH, SRVRL:RSVK-AA¹⁷-AKV:KEVQV:DMEEH, SRVKT:RSVK-AA¹⁷-AKV:KEVQV:MIEEH, SRVAL:RSVK-AA¹⁷-AKV:KEVQV:MIEEH, SRVDL:RSVK-AA¹⁷-AKV:KEVQV:MIEEH, SRVDL:RSVK-AA¹⁷-AKV:KEVQV:MVEEH, SRVEE:RSVK-AA¹⁷-AKV:KEVQV:FLEEH, SRVGQ:RSVK-AA¹⁷-AKV:KEVQV:LEEEH, SRVQL:RSVK-AA¹⁷-AKV:KEVQV:TLEEH, VPTEL:RSVK-AA¹⁷-AKV:KEVQV:DMVVE, VPEKM:RSVK-AA¹⁷-AKV:KEVQV:NMTVE, VPTEL:RSVK-AA¹⁷-AKV:KEVQV:EMVVE, APTKL:RSVK-AA¹⁷-AKV:KEVQV:NMVVR, APTQL:RSVK-AA¹⁷-AKV:KEVQV:NMVVR, APTKL:RSVK-AA¹⁷-AKV:KEVQV:NMVVK, VPTKL:RSVK-AA¹⁷-AKV:KEVQV:EGMSVAE, VPTKL:RSVK-AA¹⁷-AKV:KEVQV:GMAVS, TPTKM:RSVK-AA¹⁷-AKV:KEVQV:GMVVD, VPARL:RSVK-AA¹⁷-AKV:KEVQV:DMVVE, VPTRL:RSVK-AA¹⁷-AKV:KEVQV:DMVVE, APVKT:RSVK-AA¹⁷-AKV:KEVQV:MIVEE, VPQAL:RSVK-AA¹⁷-AKV:KEVQV:MIVRS, VSQDL:RSVK-AA¹⁷-AKV:KEVQV:MIVKS, VPQDL:RSVK-AA¹⁷-AKV:KEVQV:MVVKS, VPTEE:RSVK-AA¹⁷-AKV:KEVQV:FLQHN, VPTGQ:RSVK-AA¹⁷-AKV:KEVQV:LEEHS, TQVQL:RSVK-AA¹⁷-AKV:KEVQV:TLEDH, TQVEL:RPVQ-AA¹⁷-RKI:KKATV:DMEDH, TQVKM:RPVQ-AA¹⁷-RKI:KKATV:NMEDH, TQVEL:RPVQ-AA¹⁷-RKI:KKATV:EMEDH, TQVKL:RPVQ-AA¹⁷-RKI:KKATV:NMEDH, TQVQL:RPVQ-AA¹⁷-RKI:KKATV:NMEDH, TQVKL:RPVQ-AA¹⁷-RKI:KKATV:EGMSEDH, TQVKL:RPVQ-AA¹⁷-RKI:KKATV:GMEDH, TQVKM:RPVQ-AA¹⁷-RKI:KKATV:GMEDH, TQVRL:RPVQ-AA¹⁷-RKI:KKATV:DMEDH, TQVKT:RPVQ-AA¹⁷-RKI:KKATV:MIEDH, TQVAL:RPVQ-AA¹⁷-RKI:KKATV:MIEDH, TQVDL:RPVQ-AA¹⁷-RKI:KKATV:MIEDH, TQVDL:RPVQ-AA¹⁷-RKI:KKATV:MVEDH, TQVEE:RPVQ-AA¹⁷-RKI:KKATV:FLEDH, TQVGQ:RPVQ-AA¹⁷-RKI:KKATV:LEEDH, TQVHH:RPVQ-AA¹⁷-RKI:KKATV:RLEDH, VPTEL:RPVQ-AA¹⁷-RKI:KKATV:DMVVE, VPEKM:RPVQ-AA¹⁷-RKI:KKATV:NMTVE, VPTEL:RPVQ-AA¹⁷-RKI:KKATV:EMVVE, APTKL:RPVQ-AA¹⁷-RKI:KKATV:NMVVR, APTQL:RPVQ-AA¹⁷-RKI:KKATV:NMVVR, APTKL:RPVQ-AA¹⁷-RKI:KKATV:NMVVK, VPTKL:RPVQ-AA¹⁷-RKI:KKATV:EGMSVAE, VPTKL:RPVQ-AA¹⁷-RKI:KKATV:GMAVS, TPTKM:RPVQ-AA¹⁷-RKI:KKATV:GMVVD, VPARL:RPVQ-AA¹⁷-RKI:KKATV:DMVVE, VPTRL:RPVQ-AA¹⁷-RKI:KKATV:DMVVE, APVKT:RPVQ-AA¹⁷-RKI:KKATV:MIVEE, VPQAL:RPVQ-AA¹⁷-RKI:KKATV:MIVRS, VSQDL:RPVQ-AA¹⁷-RKI:KKATV:MIVKS, VPQDL:RPVQ-AA¹⁷-RKI:KKATV:MVVKS, VPTEE:RPVQ-AA¹⁷-RKI:KKATV:FLQHN, VPTGQ:RPVQ-AA¹⁷-RKI:KKATV:LEEHS and SRVHH:RPVQ-AA¹⁷-RKI:KKATV:RLEEH; and wherein AA¹⁷ is selected from the group consisting of G, A, V, L, I, P, F, M, W, T and S (in particular is selected from the group consisting of M, I, L, V and T). More particularly, the quadruplet PEP5:PEP12:PEP2:PEP6 is selected from the group consisting of VPTKM:SAIS-AA¹⁷-LYL:LKNYQ:NMVVE, VPTKL:SAIS-AA¹⁷-LYL:LKNYQ:NMVVE, VPTQL:SAIS-AA¹⁷-LYL:LKNYQ:NMVVE, VPTKL:SAIS-AA¹⁷-LYL:LKNYQ:EGMSVVE, VPTKL:SAIS-AA¹⁷-LYL:LKNYQ:GMVVE, VPTKM:SAIS-AA¹⁷-LYL:LKNYQ:GMVVE, VPTRL:SAIS-AA¹⁷-LYL:LKNYQ:DMVVE, VPTKT:SAIS-AA¹⁷-LYL:LKNYQ:MIVVE, VPTAL:SAIS-AA¹⁷-LYL:LKNYQ:MIVVE, VPTDL:SAIS-AA¹⁷-LYL:LKNYQ:MIVVE, VPTDL:SAIS-AA¹⁷-LYL:LKNYQ:MVVVE, VPEKM:SAIS-AA¹⁷-LYL:LKNYQ:NMTVE, APTKL:SAIS-AA¹⁷-LYL:LKNYQ:NMVVR, APTQL:SAIS-AA¹⁷-LYL:LKNYQ:NMVVR, APTKL:SAIS-AA¹⁷-LYL:LKNYQ:NMVVK, VPTKL:SAIS-AA¹⁷-LYL:LKNYQ:EGMSVAE, VPTKL:SAIS-AA¹⁷-LYL:LKNYQ:GMAVS, TPTKM:SAIS-AA¹⁷-LYL:LKNYQ:GMVVD, VPARL:SAIS-AA¹⁷-LYL:LKNYQ:DMVVE, APVKT:SAIS-AA¹⁷-LYL:LKNYQ:MIVEE, VPQAL:SAIS-AA¹⁷-LYL:LKNYQ:MIVRS, VSQDL:SAIS-AA¹⁷-LYL:LKNYQ:MIVKS, VPQDL:SAIS-AA¹⁷-LYL:LKNYQ:MVVKS, VPTEE:SAIS-AA¹⁷-LYL:LKNYQ:FLQHN, VPTGQ:SAIS-AA¹⁷-LYL:LKNYQ:LEEHS, SRVHH:SAIS-AA¹⁷-LYL:LKNYQ:RLEEH, TQVQL:SAIS-AA¹⁷-LYL:LKNYQ:TLEDH, VPEEL:SSLS-AA¹⁷-LFF:LKVYP:DMTVE, VPEEL:SSLS-AA¹⁷-LFF:LKVYP:EMTVE, VPEKL:SSLS-AA¹⁷-LFF:LKVYP:NMTVE, VPEQL:SSLS-AA¹⁷-LFF:LKVYP:NMTVE, VPEKL:SSLS-AA¹⁷-LFF:LKVYP:EGMSTVE, VPEKL:SSLS-AA¹⁷-LFF:LKVYP:GMTVE, VPEKM:SSLS-AA¹⁷-LFF:LKVYP:GMTVE, VPERL:SSLS-AA¹⁷-LFF:LKVYP:DMTVE, VPEKT:SSLS-AA¹⁷-LFF:LKVYP:MITVE, VPEAL:SSLS-AA¹⁷-LFF:LKVYP:MITVE, VPEDL:SSLS-AA¹⁷-LFF:LKVYP:MITVE, VPEDL:SSLS-AA¹⁷-LFF:LKVYP:MVTVE, VPTEL:SSLS-AA¹⁷-LFF:LKVYP:DMVVE, VPTEL:SSLS-AA¹⁷-LFF:LKVYP:EMVVE, APTKL:SSLS-AA¹⁷-LFF:LKVYP:NMVVR, APTQL:SSLS-AA¹⁷-LFF:LKVYP:NMVVR, APTKL:SSLS-AA¹⁷-LFF:LKVYP:NMVVK, VPTKL:SSLS-AA¹⁷-LFF:LKVYP:EGMSVAE, VPTKL:SSLS-AA¹⁷-LFF:LKVYP:GMAVS, TPTKM:SSLS-AA¹⁷-LFF:LKVYP:GMVVD, VPARL:SSLS-AA¹⁷-LFF:LKVYP:DMVVE, VPTRL:SSLS-AA¹⁷-LFF:LKVYP:DMVVE, APVKT:SSLS-AA¹⁷-LFF:LKVYP:MIVEE, VPQAL:SSLS-AA¹⁷-LFF:LKVYP:MIVRS, VSQDL:SSLS-AA¹⁷-LFF:LKVYP:MIVKS, VPDL:SSLS-AA¹⁷-LFF:LKVYP:MVVKS, VPTEE:SSLS-AA¹⁷-LFF:LKVYP:FLQHN, VPTGQ:SSLS-AA¹⁷-LFF:LKVYP:LEEHS, SRVHH:SSLS-AA¹⁷-LFF:LKVYP:RLEEH, TQVQL:SSLS-AA¹⁷-LFF:LKVYP:TLEDH, APTEL:NAIS-AA¹⁷-LYF:LKKYR:DMVVR, APTKM:NAIS-AA¹⁷-LYF:LKKYR:NMVVR, APTEL:NAIS-AA¹⁷-LYF:LKKYR:EMVVR, APTKL:NAIS-AA¹⁷-LYF:LKKYR:NMVVR, APTKL:NAIS-AA¹⁷-LYF:LKKYR:EGMSVVR, APTKL:NAIS-AA¹⁷-LYF:LKKYR:GMVVR, APTKM:NAIS-AA¹⁷-LYF:LKKYR:GMVVR, APTRL:NAIS-AA¹⁷-LYF:LKKYR:DMVVR, APTKT:NAIS-AA¹⁷-LYF:LKKYR:MIVVR, APTAL:NAIS-AA¹⁷-LYF:LKKYR:MIVVR, APTDL:NAIS-AA¹⁷-LYF:LKKYR:MIVVR, APTDL:NAIS-AA¹⁷-LYF:LKKYR:MVVVR, VPTEL:NAIS-AA¹⁷-LYF:LKKYR:DMVVE, VPEKM:NAIS-AA¹⁷-LYF:LKKYR:NMTVE, VPTEL:NAIS-AA¹⁷-LYF:LKKYR:EMVVE, APTKL:NAIS-AA¹⁷-LYF:LKKYR:NMVVK, VPTKL:NAIS-AA¹⁷-LYF:LKKYR:EGMSVAE, VPTKL:NAIS-AA¹⁷-LYF:LKKYR:GMAVS, TPTKM:NAIS-AA¹⁷-LYF:LKKYR:GMVVD, VPARL:NAIS-AA¹⁷-LYF:LKKYR:DMVVE, VPTRL:NAIS-AA¹⁷-LYF:LKKYR:DMVVE, APVKT:NAIS-AA¹⁷-LYF:LKKYR:MIVEE, VPQAL:NAIS-AA¹⁷-LYF:LKKYR:MIVRS, VSQDL:NAIS-AA¹⁷-LYF:LKKYR:MIVKS, VPQDL:NAIS-AA¹⁷-LYF:LKKYR:MVVKS, VPTEE:NAIS-AA¹⁷-LYF:LKKYR:FLQHN, VPTGQ:NAIS-AA¹⁷-LYF:LKKYR:LEEHS, SRVHH:NAIS-AA¹⁷-LYF:LKKYR:RLEEH, TQVQL:NAIS-AA¹⁷-LYF:LKKYR:TLEDH, APTEL:SATS-AA¹⁷-LYY:LRKHR:DMVVK, APTKM:SATS-AA¹⁷-LYY:LRKHR:NMVVK, APTEL:SATS-AA¹⁷-LYY:LRKHR:EMVVK, APTKL:SATS-AA¹⁷-LYY:LRKHR:NMVVK, APTQL:SATS-AA¹⁷-LYY:LRKHR:NMVVK, APTKL:SATS-AA¹⁷-LYY:LRKHR:EGMSVVK, APTKL:SATS-AA¹⁷-LYY:LRKHR:GMVVK, APTKM:SATS-AA¹⁷-LYY:LRKHR:GMVVK, APTRL:SATS-AA¹⁷-LYY:LRKHR:DMVVK, APTKT:SATS-AA¹⁷-LYY:LRKHR:MIVVK, APTAL:SATS-AA¹⁷-LYY:LRKHR:MIVVK, APTDL:SATS-AA¹⁷-LYY:LRKHR:MIVVK, APTDL:SATS-AA¹⁷-LYY:LRKHR:MVVVK, VPTEL:SATS-AA¹⁷-LYY:LRKHR:DMVVE, VPEKM:SATS-AA¹⁷-LYY:LRKHR:NMTVE, VPTEL:SATS-AA¹⁷-LYY:LRKHR:EMVVE, APTKL:SATS-AA¹⁷-LYY:LRKHR:NMVVR, APTEL:SATS-AA¹⁷-LYY:LRKHR:NMVVR, VPTKL:SATS-AA¹⁷-LYY:LRKHR:EGMSVAE, VPTKL:SATS-AA¹⁷-LYY:LRKHR:GMAVS, TPTKM:SATS-AA¹⁷-LYY:LRKHR:GMVVD, VPARL:SATS-AA¹⁷-LYY:LRKHR:DMVVE, VPTRL:SATS-AA¹⁷-LYY:LRKHR:DMVVE, APVKT:SATS-AA¹⁷-LYY:LRKHR:MIVEE, VPQAL:SATS-AA¹⁷-LYY:LRKHR:MIVRS, VSQDL:SATS-AA¹⁷-LYY:LRKHR:MIVKS, VPQDL:SATS-AA¹⁷-LYY:LRKHR:MVVKS, VPTEE:SATS-AA¹⁷-LYY:LRKHR:FLQHN, VPTGQ:SATS-AA¹⁷-LYY:LRKHR:LEEHS, SRVHH:SATS-AA¹⁷-LYY:LRKHR:RLEEH, TQVQL:SATS-AA¹⁷-LYY:LRKHR:TLEDH, VPTEL:SPIS-AA¹⁷-LYK:LKYHY:DMVAE, VPTKM:SPIS-AA¹⁷-LYK:LKYHY:NMVAE, VPTEL:SPIS-AA¹⁷-LYK:LKYHY:EMVAE, VPTKL:SPIS-AA¹⁷-LYK:LKYHY:NMVAE, VPTQL:SPIS-AA¹⁷-LYK:LKYHY:NMVAE, VPTKL:SPIS-AA¹⁷-LYK:LKYHY:GMVAE, VPTKM:SPIS-AA¹⁷-LYK:LKYHY:GMVAE, VPTRL:SPIS-AA¹⁷-LYK:LKYHY:DMVAE, VPTKT:SPIS-AA¹⁷-LYK:LKYHY:MIVAE, VPTAL:SPIS-AA¹⁷-LYK:LKYHY:MIVAE, VPTDL:SPIS-AA¹⁷-LYK:LKYHY:MIVAE, VPTDL:SPIS-AA¹⁷-LYK:LKYHY:MVVAE, VPTEL:SPIS-AA¹⁷-LYK:LKYHY:DMVVE, VPEKM:SPIS-AA¹⁷-LYK:LKYHY:NMTVE, VPTEL:SPIS-AA¹⁷-LYK:LKYHY:EMVVE, APTKL:SPIS-AA¹⁷-LYK:LKYHY:NMVVR, APTQL:SPIS-AA¹⁷-LYK:LKYHY:NMVVR, APTKL:SPIS-AA¹⁷-LYK:LKYHY:NMVVK, VPTKL:SPIS-AA¹⁷-LYK:LKYHY:GMAVS, TPTKM:SPIS-AA¹⁷-LYK:LKYHY:GMVVD, VPARL:SPIS-AA¹⁷-LYK:LKYHY:DMVVE, VPTRL:SPIS-AA¹⁷-LYK:LKYHY:DMVVE, APVKT:SPIS-AA¹⁷-LYK:LKYHY:MIVEE, VPQAL:SPIS-AA¹⁷-LYK:LKYHY:MIVRS, VSQDL:SPIS-AA¹⁷-LYK:LKYHY:MIVKS, VPQDL:SPIS-AA¹⁷-LYK:LKYHY:MVVKS, VPTEE:SPIS-AA¹⁷-LYK:LKYHY:FLQHN, VPTGQ:SPIS-AA¹⁷-LYK:LKYHY:LEEHS, SRVHH:SPIS-AA¹⁷-LYK:LKYHY:RLEEH, TQVQL:SPIS-AA¹⁷-LYK:LKYHY:TLEDH, VPTEL:EPIS-AA¹⁷-LYL:KFKYE:DMAVS, VPTKM:EPIS-AA¹⁷-LYL:KFKYE:NMAVS, VPTEL:EPIS-AA¹⁷-LYL:KFKYE:EMAVS, VPTKL:EPIS-AA¹⁷-LYL:KFKYE:NMAVS, VPTQL:EPIS-AA¹⁷-LYL:KFKYE:NMAVS, VPTKL:EPIS-AA¹⁷-LYL:KFKYE:EGMSAVS, VPTKM:EPIS-AA¹⁷-LYL:KFKYE:GMAVS, VPTRL:EPIS-AA¹⁷-LYL:KFKYE:DMAVS, VPTKT:EPIS-AA¹⁷-LYL:KFKYE:MIAVS, VPTAL:EPIS-AA¹⁷-LYL:KFKYE:MIAVS, VPTDL:EPIS-AA¹⁷-LYL:KFKYE:MIAVS, VPTDL:EPIS-AA¹⁷-LYL:KFKYE:MVAVS, VPTEL:EPIS-AA¹⁷-LYL:KFKYE:DMVVE, VPEKM:EPIS-AA¹⁷-LYL:KFKYE:NMTVE, VPTEL:EPIS-AA¹⁷-LYL:KFKYE:EMVVE, APTKL:EPIS-AA¹⁷-LYL:KFKYE:NMVVR, APTQL:EPIS-AA¹⁷-LYL:KFKYE:NMVVR, APTKL:EPIS-AA¹⁷-LYL:KFKYE:NMVVK, VPTKL:EPIS-AA¹⁷-LYL:KFKYE:EGMSVAE, TPTKM:EPIS-AA¹⁷-LYL:KFKYE:GMVVD, VPARL:EPIS-AA¹⁷-LYL:KFKYE:DMVVE, VPTRL:EPIS-AA¹⁷-LYL:KFKYE:DMVVE, APVKT:EPIS-AA¹⁷-LYL:KFKYE:MIVEE, VPQAL:EPIS-AA¹⁷-LYL:KFKYE:MIVRS, VSQDL:EPIS-AA¹⁷-LYL:KFKYE:MIVKS, VPQDL:EPIS-AA¹⁷-LYL:KFKYE:MVVKS, VPTEE:EPIS-AA¹⁷-LYL:KFKYE:FLQHN, VPTGQ:EPIS-AA¹⁷-LYL:KFKYE:LEEHS, SRVHH:EPIS-AA¹⁷-LYL:KFKYE:RLEEH, TQVQL:EPIS-AA¹⁷-LYL:KFKYE:TLEDH, TPTEL:SPIN-AA¹⁷-LYF:YGKIP:DMVVD, TPTKM:SPIN-AA¹⁷-LYF:YGKIP:NMVVD, TPTEL:SPIN-AA¹⁷-LYF:YGKIP:EMVVD, TPTKL:SPIN-AA¹⁷-LYF:YGKIP:NMVVD, TPTEL:SPIN-AA¹⁷-LYF:YGKIP:NMVVD, TPTKL:SPIN-AA¹⁷-LYF:YGKIP:EGMSVVD, TPTKL:SPIN-AA¹⁷-LYF:YGKIP:GMVVD, TPTRL:SPIN-AA¹⁷-LYF:YGKIP:DMVVD, TPTKT:SPIN-AA¹⁷-LYF:YGKIP:MIVVD, TPTAL:SPIN-AA¹⁷-LYF:YGKIP:MIVVD, TPTDL:SPIN-AA¹⁷-LYF:YGKIP:MIVVD, TPTDL:SPIN-AA¹⁷-LYF:YGKIP:MVVVD, VPTEL:SPIN-AA¹⁷-LYF:YGKIP:DMVVE, VPEKM:SPIN-AA¹⁷-LYF:YGKIP:NMTVE, VPTEL:SPIN-AA¹⁷-LYF:YGKIP:EMVVE, APTKL:SPIN-AA¹⁷-LYF:YGKIP:NMVVR, APTQL:SPIN-AA¹⁷-LYF:YGKIP:NMVVR, APTKL:SPIN-AA¹⁷-LYF:YGKIP:NMVVK, VPTKL:SPIN-AA¹⁷-LYF:YGKIP:EGMSVAE, VPTKL:SPIN-AA¹⁷-LYF:YGKIP:GMAVS, VPARL:SPIN-AA¹⁷-LYF:YGKIP:DMVVE, VPTRL:SPIN-AA¹⁷-LYF:YGKIP:DMVVE, APVKT:SPIN-AA¹⁷-LYF:YGKIP:MIVEE, VPQAL:SPIN-AA¹⁷-LYF:YGKIP:MIVRS, VSQDL:SPIN-AA¹⁷-LYF:YGKIP:MIVKS, VPQDL:SPIN-AA¹⁷-LYF:YGKIP:MVVKS, VPTEE:SPIN-AA¹⁷-LYF:YGKIP:FLQHN, VPTGQ:SPIN-AA¹⁷-LYF:YGKIP:LEEHS, SRVHH:SPIN-AA¹⁷-LYF:YGKIP:RLEEH, TQVQL:SPIN-AA¹⁷-LYF:YGKIP:TLEDH, VPAEL:SPIS-AA¹⁷-LYI:YKQYE:DMVVE, VPAKM:SPIS-AA¹⁷-LYI:YKQYE:NMVVE, VPAEL:SPIS-AA¹⁷-LYI:YKQYE:EMVVE, VPAKL:SPIS-AA¹⁷-LYI:YKQYE:NMVVE, VPAQL:SPIS-AA¹⁷-LYI:YKQYE:NMVVE, VPAKL:SPIS-AA¹⁷-LYI:YKQYE:EGMSVVE, VPAKL:SPIS-AA¹⁷-LYI:YKQYE:GMVVE, VPAKM:SPIS-AA¹⁷-LYI:YKQYE:GMVVE, VPARL:SPIS-AA¹⁷-LYI:YKQYE:DMVVE, VPAKT:SPIS-AA¹⁷-LYI:YKQYE:MIVVE, VPAAL:SPIS-AA¹⁷-LYI:YKQYE:MIVVE, VPADL:SPIS-AA¹⁷-LYI:YKQYE:MIVVE, VPADL:SPIS-AA¹⁷-LYI:YKQYE:MVVVE, VPTEL:SPIS-AA¹⁷-LYI:YKQYE:DMVVE, VPEKM:SPIS-AA¹⁷-LYI:YKQYE:NMTVE, VPTEL:SPIS-AA¹⁷-LYI:YKQYE:EMVVE, APTKL:SPIS-AA¹⁷-LYI:YKQYE:NMVVR, APTQL:SPIS-AA¹⁷-LYI:YKQYE:NMVVR, APTKL:SPIS-AA¹⁷-LYI:YKQYE:NMVVK, VPTKL:SPIS-AA¹⁷-LYI:YKQYE:EGMSVAE, VPTKL:SPIS-AA¹⁷-LYI:YKQYE:GMAVS, TPTKM:SPIS-AA¹⁷-LYI:YKQYE:GMVVD, VPTRL:SPIS-AA¹⁷-LYI:YKQYE:DMVVE, APVKT:SPIS-AA¹⁷-LYI:YKQYE:MIVEE, VPQAL:SPIS-AA¹⁷-LYI:YKQYE:MIVRS, VSQDL:SPIS-AA¹⁷-LYI:YKQYE:MIVKS, VPQDL:SPIS-AA¹⁷-LYI:YKQYE:MVVKS, VPTEE:SPIS-AA¹⁷-LYI:YKQYE:FLQHN, VPTGQ:SPIS-AA¹⁷-LYI:YKQYE:LEEHS, SRVHH:SPIS-AA¹⁷-LYI:YKQYE:RLEEH, TQVQL:SPIS-AA¹⁷-LYI:YKQYE:TLEDH, VPTEL:SPIS-AA¹⁷-LFI:YKQYE:DMVVE, VPTKM:SPIS-AA¹⁷-LFI:YKQYE:NMVVE, VPTEL:SPIS-AA¹⁷-LFI:YKQYE:EMVVE, VPTKL:SPIS-AA¹⁷-LFI:YKQYE:NMVVE, VPTQL:SPIS-AA¹⁷-LFI:YKQYE:NMVVE, VPTKL:SPIS-AA¹⁷-LFI:YKQYE:EGMSVVE, VPTKL:SPIS-AA¹⁷-LFI:YKQYE:GMVVE, VPTKM:SPIS-AA¹⁷-LFI:YKQYE:GMVVE, VPTRL:SPIS-AA¹⁷-LFI:YKQYE:DMVVE, VPTKT:SPIS-AA¹⁷-LFI:YKQYE:MIVVE, VPTAL:SPIS-AA¹⁷-LFI:YKQYE:MIVVE, VPTDL:SPIS-AA¹⁷-LFI:YKQYE:MIVVE, VPTDL:SPIS-AA¹⁷-LFI:YKQYE:MVVVE, VPEKM:SPIS-AA¹⁷-LFI:YKQYE:NMTVE, APTKL:SPIS-AA¹⁷-LFI:YKQYE:NMVVR, APTQL:SPIS-AA¹⁷-LFI:YKQYE:NMVVR, APTKL:SPIS-AA¹⁷-LFI:YKQYE:NMVVK, VPTKL:SPIS-AA¹⁷-LFI:YKQYE:EGMSVAE, VPTKL:SPIS-AA¹⁷-LFI:YKQYE:GMAVS, TPTKM:SPIS-AA¹⁷-LFI:YKQYE:GMVVD, VPARL:SPIS-AA¹⁷-LFI:YKQYE:DMVVE, APVKT:SPIS-AA¹⁷-LFI:YKQYE:MIVEE, VPQAL:SPIS-AA¹⁷-LFI:YKQYE:MIVRS, VSQDL:SPIS-AA¹⁷-LFI:YKQYE:MIVKS, VPQDL:SPIS-AA¹⁷-LFI:YKQYE:MVVKS, VPTEE:SPIS-AA¹⁷-LFI:YKQYE:FLQHN, VPTGQ:SPIS-AA¹⁷-LFI:YKQYE:LEEHS, SRVHH:SPIS-AA¹⁷-LFI:YKQYE:RLEEH, TQVQL:SPIS-AA¹⁷-LFI:YKQYE:TLEDH, APVEL:KPLS-AA¹⁷-LYV:DHHKD:DMVEE, APVKM:KPLS-AA¹⁷-LYV:DHHKD:NMVEE, APVEL:KPLS-AA¹⁷-LYV:DHHKD:EMVEE, APVKL:KPLS-AA¹⁷-LYV:DHHKD:NMVEE, APVQL:KPLS-AA¹⁷-LYV:DHHKD:NMVEE, APVKL:KPLS-AA¹⁷-LYV:DHHKD:EGMSVEE, APVKL:KPLS-AA¹⁷-LYV:DHHKD:GMVEE, APVKM:KPLS-AA¹⁷-LYV:DHHKD:GMVEE, APVRL:KPLS-AA¹⁷-LYV:DHHKD:DMVEE, APVAL:KPLS-AA¹⁷-LYV:DHHKD:MIVEE, APVDL:KPLS-AA¹⁷-LYV:DHHKD:MIVEE, APVDL:KPLS-AA¹⁷-LYV:DHHKD:MVVEE, VPTEL:KPLS-AA¹⁷-LYV:DHHKD:DMVVE, VPEKM:KPLS-AA¹⁷-LYV:DHHKD:NMTVE, VPTEL:KPLS-AA¹⁷-LYV:DHHKD:EMVVE, APTKL:KPLS-AA¹⁷-LYV:DHHKD:NMVVR, APTQL:KPLS-AA¹⁷-LYV:DHHKD:NMVVR, APTKL:KPLS-AA¹⁷-LYV:DHHKD:NMVVK, VPTKL:KPLS-AA¹⁷-LYV:DHHKD:EGMSVAE, VPTKL:KPLS-AA¹⁷-LYV:DHHKD:GMAVS, TPTKM:KPLS-AA¹⁷-LYV:DHHKD:GMVVD, VPARL:KPLS-AA¹⁷-LYV:DHHKD:DMVVE, VPTRL:KPLS-AA¹⁷-LYV:DHHKD:DMVVE, VPQAL:KPLS-AA¹⁷-LYV:DHHKD:MIVRS, VSQDL:KPLS-AA¹⁷-LYV:DHHKD:MIVKS, VPQDL:KPLS-AA¹⁷-LYV:DHHKD:MVVKS, VPTEE:KPLS-AA¹⁷-LYV:DHHKD:FLQHN, VPTGQ:KPLS-AA¹⁷-LYV:DHHKD:LEEHS, SRVHH:KPLS-AA¹⁷-LYV:DHHKD:RLEEH, TQVQL:KPLS-AA¹⁷-LYV:DHHKD:TLEDH, VPQEL:EPLP-AA¹⁷-VYY:EQLSN:DMVRS, VPQKM:EPLP-AA¹⁷-VYY:EQLSN:NMVRS, VPQEL:EPLP-AA¹⁷-VYY:EQLSN:EMVRS, VPQKL:EPLP-AA¹⁷-VYY:EQLSN:NMVRS, VPQQL:EPLP-AA¹⁷-VYY:EQLSN:NMVRS, VPQKL:EPLP-AA¹⁷-VYY:EQLSN:EGMSVRS, VPQKL:EPLP-AA¹⁷-VYY:EQLSN:GMVRS, VPQKM:EPLP-AA¹⁷-VYY:EQLSN:GMVRS, VPQRL:EPLP-AA¹⁷-VYY:EQLSN:DMVRS, VPQKT:EPLP-AA¹⁷-VYY:EQLSN:MIVRS, VPQDL:EPLP-AA¹⁷-VYY:EQLSN:MIVRS, VPQDL:EPLP-AA¹⁷-VYY:EQLSN:MVVRS, VPTEL:EPLP-AA¹⁷-VYY:EQLSN:DMVVE, VPEKM:EPLP-AA¹⁷-VYY:EQLSN:NMTVE, VPTEL:EPLP-AA¹⁷-VYY:EQLSN:EMVVE, APTKL:EPLP-AA¹⁷-VYY:EQLSN:NMVVR, APTQL:EPLP-AA¹⁷-VYY:EQLSN:NMVVR, APTKL:EPLP-AA¹⁷-VYY:EQLSN:NMVVK, VPTKL:EPLP-AA¹⁷-VYY:EQLSN:EGMSVAE, VPTKL:EPLP-AA¹⁷-VYY:EQLSN:GMAVS, TPTKM:EPLP-AA¹⁷-VYY:EQLSN:GMVVD, VPARL:EPLP-AA¹⁷-VYY:EQLSN:DMVVE, VPTRL:EPLP-AA¹⁷-VYY:EQLSN:DMVVE, APVKT:EPLP-AA¹⁷-VYY:EQLSN:MIVEE, VSQDL:EPLP-AA-VYY:EQLSN:MIVKS, VPQDL:EPLP-AA-VYY:EQLSN:MVVKS, VPTEE:EPLP-AA¹⁷-VYY:EQLSN:FLQHN, VPTGQ:EPLP-AA¹⁷-VYY:EQLSN:LEEHS, SRVHH:EPLP-AA¹⁷-VYY:EQLSN:RLEEH, TQVQL:EPLP-AA¹⁷-VYY:EQLSN:TLEDH, VSQEL:EPLT-AA¹⁷-LYY:EQLSN:DMVKS, VSQKM:EPLT-AA¹⁷-LYY:EQLSN:NMVKS, VSQEL:EPLT-AA¹⁷-LYY:EQLSN:EMVKS, VSQKL:EPLT-AA¹⁷-LYY:EQLSN:NMVKS, VSQQL:EPLT-AA¹⁷-LYY:EQLSN:NMVKS, VSQKL:EPLT-AA¹⁷-LYY:EQLSN:EGMSVKS, VSQKL:EPLT-AA¹⁷-LYY:EQLSN:GMVKS, VSQKM:EPLT-AA¹⁷-LYY:EQLSN:GMVKS, VSQRL:EPLT-AA¹⁷-LYY:EQLSN:DMVKS, VSQKT:EPLT-AA¹⁷-LYY:EQLSN:MIVKS, VSQAL:EPLT-AA¹⁷-LYY:EQLSN:MIVKS, VSQDL:EPLT-AA¹⁷-LYY:EQLSN:MVVKS, VPTEL:EPLT-AA¹⁷-LYY:EQLSN:DMVVE, VPEKM:EPLT-AA¹⁷-LYY:EQLSN:NMTVE, VPTEL:EPLT-AA¹⁷-LYY:EQLSN:EMVVE, APTKL:EPLT-AA¹⁷-LYY:EQLSN:NMVVR, APTQL:EPLT-AA-LYY:EQLSN:NMVVR, APTKL:EPLT-AA¹⁷-LYY:EQLSN:NMVVK, VPTKL:EPLT-AA¹⁷-LYY:EQLSN:EGMSVAE, VPTKL:EPLT-AA¹⁷-LYY:EQLSN:GMAVS, TPTKM:EPLT-AA¹⁷-LYY:EQLSN:GMVVD, VPARL:EPLT-AA¹⁷-LYY:EQLSN:DMVVE, VPTRL:EPLT-AA¹⁷-LYY:EQLSN:DMVVE, APVKT:EPLT-AA¹⁷-LYY:EQLSN:MIVEE, VPQAL:EPLT-AA¹⁷-LYY:EQLSN:MIVRS, VPTEE:EPLT-AA¹⁷-LYY:EQLSN:FLQHN, VPTGQ:EPLT-AA¹⁷-LYY:EQLSN:LEEHS, SRVHH:EPLT-AA¹⁷-LYY:EQLSN:RLEEH, TQVQL:EPLT-AA¹⁷-LYY:EQLSN:TLEDH, VPQEL:EPLT-AA¹⁷-LYY:EQLSN:DMVKS, VPQKM:EPLT-AA¹⁷-LYY:EQLSN:NMVKS, VPQEL:EPLT-AA¹⁷-LYY:EQLSN:EMVKS, VPQKL:EPLT-AA¹⁷-LYY:EQLSN:NMVKS, VPQQL:EPLT-AA¹⁷-LYY:EQLSN:NMVKS, VPQKL:EPLT-AA¹⁷-LYY:EQLSN:EGMSVKS, VPQKL:EPLT-AA¹⁷-LYY:EQLSN:GMVKS, VPQKM:EPLT-AA¹⁷-LYY:EQLSN:GMVKS, VPQRL:EPLT-AA¹⁷-LYY:EQLSN:DMVKS, VPQKT:EPLT-AA¹⁷-LYY:EQLSN:MIVKS, VPQAL:EPLT-AA-LYY:EQLSN:MIVKS, VPQDL:EPLT-AA¹⁷-LYY:EQLSN:MIVKS, VPTGQ:SNIT-AA¹⁷-QIM:IGEMS:LEQHN, VPTEL:SNIT-AA-QIM:IGEMS:DMVVE, VPEKM:SNIT-AA¹⁷-QIM:IGEMS:NMTVE, VPTEL:SNIT-AA¹⁷-QIM:IGEMS:EMVVE, APTKL:SNIT-AA¹⁷-QIM:IGEMS:NMVVR, APTQL:SNIT-AA¹⁷-QIM:IGEMS:NMVVR, APTKL:SNIT-AA¹⁷-QIM:IGEMS:NMVVK, VPTKL:SNIT-AA¹⁷-QIM:IGEMS:EGMSVAE, VPTKL:SNIT-AA¹⁷-QIM:IGEMS:GMAVS, TPTKM:SNIT-AA¹⁷-QIM:IGEMS:GMVVD, VPARL:SNIT-AA¹⁷-QIM:IGEMS:DMVVE, VPTRL:SNIT-AA¹⁷-QIM:IGEMS:DMVVE, APVKT:SNIT-AA¹⁷-QIM:IGEMS:MIVEE, VPQAL:SNIT-AA¹⁷-QIM:IGEMS:MIVRS, VSQDL:SNIT-AA¹⁷-QIM:IGEMS:MIVKS, VPQDL:SNIT-AA¹⁷-QIM:IGEMS:MVVKS, VPTGQ:SNIT-AA¹⁷-QIM:IGEMS:LEEHS, SRVHH:SNIT-AA¹⁷-QIM:IGEMS:RLEEH, TQVQL:SNIT-AA¹⁷-QIM:IGEMS:TLEDH, VPTEE:SNIT-AA¹⁷-QIM:LGEMS:FLEHS, VPTEL:SNIT-AA¹⁷-QIM:LGEMS:DMVVE, VPEKM:SNIT-AA¹⁷-QIM:LGEMS:NMTVE, VPTEL:SNIT-AA¹⁷-QIM:LGEMS:EMVVE, APTKL:SNIT-AA¹⁷-QIM:LGEMS:NMVVR, APTQL:SNIT-AA¹⁷-QIM:LGEMS:NMVVR, APTKL:SNIT-AA¹⁷-QIM:LGEMS:NMVVK, VPTKL:SNIT-AA¹⁷-QIM:LGEMS:EGMSVAE, VPTKL:SNIT-AA¹⁷-QIM:LGEMS:GMAVS, TPTKM:SNIT-AA¹⁷-QIM:LGEMS:GMVVD, VPARL:SNIT-AA¹⁷-QIM:LGEMS:DMVVE, VPTRL:SNIT-AA¹⁷-QIM:LGEMS:DMVVE, APVKT:SNIT-AA¹⁷-QIM:LGEMS:MIVEE, VPQAL:SNIT-AA¹⁷-QIM:LGEMS:MIVRS, VSQDL:SNIT-AA¹⁷-QIM:LGEMS:MIVKS, VPQDL:SNIT-AA¹⁷-QIM:LGEMS:MVVKS, VPTEE:SNIT-AA¹⁷-QIM:LGEMS:FLQHN, SRVHH:SNIT-AA¹⁷-QIM:LGEMS:RLEEH, TQVQL:SNIT-AA¹⁷-QIM:LGEMS:TLEDH, SRVQL:RSVK-AA¹⁷-AKV:KEVQV:TLEEH, VPTEL:RSVK-AA¹⁷-AKV:KEVQV:DMVVE, VPEKM:RSVK-AA¹⁷-AKV:KEVQV:NMTVE, VPTEL:RSVK-AA¹⁷-AKV:KEVQV:EMVVE, APTKL:RSVK-AA¹⁷-AKV:KEVQV:NMVVR, APTQL:RSVK-AA¹⁷-AKV:KEVQV:NMVVR, APTKL:RSVK-AA¹⁷-AKV:KEVQV:NMVVK, VPTKL:RSVK-AA¹⁷-AKV:KEVQV:EGMSVAE, VPTKL:RSVK-AA¹⁷-AKV:KEVQV:GMAVS, TPTKM:RSVK-AA¹⁷-AKV:KEVQV:GMVVD, VPARL:RSVK-AA¹⁷-AKV:KEVQV:DMVVE, VPTRL:RSVK-AA¹⁷-AKV:KEVQV:DMVVE, APVKT:RSVK-AA¹⁷-AKV:KEVQV:MIVEE, VPQAL:RSVK-AA¹⁷-AKV:KEVQV:MIVRS, VSQDL:RSVK-AA¹⁷-AKV:KEVQV:MIVKS, VPQDL:RSVK-AA¹⁷-AKV:KEVQV:MVVKS, VPTEE:RSVK-AA¹⁷-AKV:KEVQV:FLQHN, VPTGQ:RSVK-AA¹⁷-AKV:KEVQV:LEEHS, TQVQL:RSVK-AA¹⁷-AKV:KEVQV:TLEDH, TQVHH:RPVQ-AA¹⁷-RKI:KKATV:RLEDH, VPTEL:RPVQ-AA¹⁷-RKI:KKATV:DMVVE, VPEKM:RPVQ-AA¹⁷-RKI:KKATV:NMTVE, VPTEL:RPVQ-AA¹⁷-RKI:KKATV:EMVVE, APTKL:RPVQ-AA¹⁷-RKI:KKATV:NMVVR, APTQL:RPVQ-AA¹⁷-RKI:KKATV:NMVVR, APTKL:RPVQ-AA¹⁷-RKI:KKATV:NMVVK, VPTKL:RPVQ-AA¹⁷-RKI:KKATV:EGMSVAE, VPTKL:RPVQ-AA¹⁷-RKI:KKATV:GMAVS, TPTKM:RPVQ-AA¹⁷-RKI:KKATV:GMVVD, VPARL:RPVQ-AA¹⁷-RKI:KKATV:DMVVE, VPTRL:RPVQ-AA¹⁷-RKI:KKATV:DMVVE, APVKT:RPVQ-AA¹⁷-RKI:KKATV:MIVEE, VPQAL:RPVQ-AA¹⁷-RKI:KKATV:MIVRS, VSQDL:RPVQ-AA¹⁷-RKI:KKATV:MIVKS, VPQDL:RPVQ-AA¹⁷-RKI:KKATV:MVVKS, VPTEE:RPVQ-AA¹⁷-RKI:KKATV:FLQHN, VPTGQ:RPVQ-AA¹⁷-RKI:KKATV:LEEHS and SRVHH:RPVQ-AA¹⁷-RKI:KKATV:RLEEH; and wherein AA¹⁷ is selected from the group consisting of G, A, V, L, I, P, F, M, W, T and S (in particular is selected from the group consisting of M, I, L, V and T).

[0365] In particular, in certain embodiments, the quadruplet PEP9:PEP1:PEP2:PEP10 is selected from the group consisting of GIPEPXXVPTKM:SAIS:LKNYQ:NMVVESXAXR, SIPKAXXVPTEL:SAIS:LKNYQ:EMVVEGXGXR, HVTKPTXVPTKL:SAIS:LKNYQ:NMVVESXGXH, YVPKPXXVPTKL:SAIS:LKNYQ:NMVVESXGXH, TVPKPXXVPTQL:SAIS:LKNYQ:NMVVEAXGXH, AVPKAXXVPTKL:SAIS:LKNYQ:NMVVEAXGXH, KVGKAXXVPTKL:SAIS:LKNYQ:EGMSVVEXGXR, KASKAXXVPTKL:SAIS:LKNYQ:GMVVEEXGXR, GSAGPXXVPTKM:SAIS:LKNYQ:GMVVERXGXS, AAPASXXVPTRL:SAIS:LKNYQ:DMVVEAXGXR, STPPTXXVPTRL:SAIS:LKNYQ:DMVVESXGXR, HVPKPXXVPTKL:SAIS:LKNYQ:NMVVESXGXH, RVPSTXXVPTKT:SAIS:LKNYQ:MIVVEXGXL, ASAAPXXVPTAL:SAIS:LKNYQ:MIVVEXKXS, ASASPXXVPTDL:SAIS:LKNYQ:MIVVEXKXS, ASASPXXVPTDL:SAIS:LKNYQ:MVVVEXKXS, NDEGLEXVPTEE:SAIS:LKNYQ:FLVVEKXEXR, NDEGLEXVPTGQ:SAIS:LKNYQ:LEVVEQXEXR, SSVKXQPVPTHH:SAIS:LKNYQ:RLVVELEXAXA, RNVQXRPVPTQL:SAIS:LKNYQ:TLVVELAXKXE, GIPEPXXVPEKM:SAIS:LKNYQ:NMTVESXAXR, HVTKPTXAPTKL:SAIS:LKNYQ:NMVVRSXGXH, YVPKPXXAPTKL:SAIS:LKNYQ:NMVVRSXGXH, TVPKPXXAPTQL:SAIS:LKNYQ:NMVVRAXGXH, AVPKAXXAPTKL:SAIS:LKNYQ:NMVVKAXGXH, KVG KAXXVPTKL:SAIS:LKNYQ:EG MSVAEXGXR, KASKAXXVPTKL:SAIS:LKNYQ:GMAVSEXGXR, GSAGPXXTPTKM:SAIS:LKNYQ:GMVVDRXGXS, AAPASXXVPARL:SAIS:LKNYQ:DMVVEAXGXR, HVPKPXXAPTKL:SAIS:LKNYQ:NMVVRSXGXH, RVPSTXXAPVKT:SAIS:LKNYQ:MIVEEXGXL, ASAAPXXVPQAL:SAIS:LKNYQ:MIVRSXKXS, ASASPXXVSQDL:SAIS:LKNYQ:MIVKSXKXS, ASASPXXVPQDL:SAIS:LKNYQ:MVVKSXKXS, NDEGLEXVPTEE:SAIS:LKNYQ:FLQHNKXEXR, NDEGLEXVPTGQ:SAIS:LKNYQ:LEEHSQXEXR, SSVKXQPSRVHH:SAIS:LKNYQ:RLEEHLEXAXA, RNVQXRPTQVQL:SAIS:LKNYQ:TLEDHLAXKXE, KIPKAXXVPEEL:SSLS:LKVYP:DMTVEGXGXR, SIPKAXXVPEEL:SSLS:LKVYP:EMTVEGXGXR, HVTKPTXVPEKL:SSLS:LKVYP:NMTVESXGXH, YVPKPXXVPEKL:SSLS:LKVYP:NMTVESXGXH, TVPKPXXVPEQL:SSLS:LKVYP:NMTVEAXGXH, AVPKAXXVPEKL:SSLS:LKVYP:NMTVEAXGXH, KVGKAXXVPEKL:SSLS:LKVYP:EGMSTVEXGXR, KASKAXXVPEKL:SSLS:LKVYP:GMTVEEXGXR, GSAGPXXVPEKM:SSLS:LKVYP:GMTVERXGXS, AAPASXXVPERL:SSLS:LKVYP:DMTVEAXGXR, STPPTXXVPERL:SSLS:LKVYP:DMTVESXGXR, HVPKPXXVPEKL:SSLS:LKVYP:NMTVESXGXH, RVPSTXXVPEKT:SSLS:LKVYP:MITVEXGXL, ASAAPXXVPEAL:SSLS:LKVYP:MITVEXKXS, ASASPXXVPEDL:SSLS:LKVYP:MITVEXKXS, ASASPXXVPEDL:SSLS:LKVYP:MVTVEXKXS, NDEGLEXVPEEE:SSLS:LKVYP:FLTVEKXEXR, NDEGLEXVPEGQ:SSLS:LKVYP:LETVEQXEXR, SSVKXQPVPEHH:SSLS:LKVYP:RLTVELEXAXA, RNVQXRPVPEQL:SSLS:LKVYP:TLTVELAXKXE, KIPKAXXVPTEL:SSLS:LKVYP:DMVVEGXGXR, SIPKAXXVPTEL:SSLS:LKVYP:EMVVEGXGXR, HVTKPTXAPTKL:SSLS:LKVYP:NMVVRSXGXH, YVPKPXXAPTKL:SSLS:LKVYP:NMVVRSXGXH, TVPKPXXAPTQL:SSLS:LKVYP:NMVVRAXGXH, AVPKAXXAPTKL:SSLS:LKVYP:NMVVKAXGXH, KVG KAXXVPTKL:SSLS:LKVYP:EGMSVAEXGXR, KASKAXXVPTKL:SSLS:LKVYP:GMAVSEXGXR, GSAGPXXTPTKM:SSLS:LKVYP:GMVVDRXGXS, AAPASXXVPARL:SSLS:LKVYP:DMVVEAXGXR, STPPTXXVPTRL:SSLS:LKVYP:DMVVESXGXR, HVPKPXXAPTKL:SSLS:LKVYP:NMVVRSXGXH, RVPSTXXAPVKT:SSLS:LKVYP:MIVEEXGXL, ASAAPXXVPQAL:SSLS:LKVYP:MIVRSXKXS, ASASPXXVSQDL:SSLS:LKVYP:MIVKSXKXS, ASASPXXVPQDL:SSLS:LKVYP:MVVKSXKXS, NDEGLEXVPTEE:SSLS:LKVYP:FLQHNKXEXR, NDEGLEXVPTGQ:SSLS:LKVYP:LEEHSQXEXR, SSVKXQPSRVHH:SSLS:LKVYP:RLEEHLEXAXA, RNVQXRPTQVQL:SSLS:LKVYP:TLEDHLAXKXE, KIPKAXXVPTEL:SAIS:LKNYQ:DMVVEGXGXR, KIPKAXXAPTEL:NAIS:LKKYR:DMVVRGXGXR, GIPEPXXAPTKM:NAIS:LKKYR:NMVVRSXAXR, SIPKAXXAPTEL:NAIS:LKKYR:EMVVRGXGXR, YVPKPXXAPTKL:NAIS:LKKYR:NMVVRSXGXH, TVPKPXXAPTQL:NAIS:LKKYR:NMVVRAXGXH, AVPKAXXAPTKL:NAIS:LKKYR:NMVVRAXGXH, KVGKAXXAPTKL:NAIS:LKKYR:EGMSVVRXGXR, KASKAXXAPTKL:NAIS:LKKYR:GMVVREXGXR, GSAGPXXAPTKM:NAIS:LKKYR:GMVVRRXGXS, AAPASXXAPTRL:NAIS:LKKYR:DMVVRAXGXR, STPPTXXAPTRL:NAIS:LKKYR:DMVVRSXGXR, HVPKPXXAPTKL:NAIS:LKKYR:NMVVRSXGXH, RVPSTXXAPTKT:NAIS:LKKYR:MIVVRXGXL, ASAAPXXAPTAL:NAIS:LKKYR:MIVVRXKXS, ASASPXXAPTDL:NAIS:LKKYR:MIVVRXKXS, ASASPXXAPTDL:NAIS:LKKYR:MVVVRXKXS, NDEGLESAPTEE:NAIS:LKKYR:FLVVRKXEXR, NDEGLESAPTGQ:NAIS:LKKYR:LEVVRQXEXR, SSVKXQPAPTHH:NAIS:LKKYR:RLVVRLEXAXA, RNVQXRPAPTQL:NAIS:LKKYR:TLVVRLAXKXE, KIPKAXXVPTEL:NAIS:LKKYR:DMVVEGXGXR, GIPEPXXVPEKM:NAIS:LKKYR:NMTVESXAXR, SIPKAXXVPTEL:NAIS:LKKYR:EMVVEGXGXR, AVPKAXXAPTKL:NAIS:LKKYR:NMVVKAXGXH, KVGKAXXVPTKL:NAIS:LKKYR:EGMSVAEXGXR, KASKAXXVPTKL:NAIS:LKKYR:GMAVSEXGXR, GSAGPXXTPTKM:NAIS:LKKYR:GMVVDRXGXS, AAPASXXVPARL:NAIS:LKKYR:DMVVEAXGXR, STPPTXXVPTRL:NAIS:LKKYR:DMVVESXGXR, RVPSTXXAPVKT:NAIS:LKKYR:MIVEEXGXL, ASAAPXXVPQAL:NAIS:LKKYR:MIVRSXKXS, ASASPXXVSQDL:NAIS:LKKYR:MIVKSXKXS, ASASPXXVPQDL:NAIS:LKKYR:MVVKSXKXS, NDEGLEXVPTEE:NAIS:LKKYR:FLQHNKXEXR, NDEGLEXVPTGQ:NAIS:LKKYR:LEEHSQXEXR, SSVKXQPSRVHH:NAIS:LKKYR:RLEEHLEXAXA, RNVQXRPTQVQL:NAIS:LKKYR:TLEDHLAXKXE, HVTKPTXAPTKL:NAIS:LKKYR:NMVVRSXGXH, KIPKAXXAPTEL:SATS:LRKHR:DMVVKGXGXR, GIPEPXXAPTKM:SATS:LRKHR:NMVVKSXAXR, SIPKAXXAPTEL:SATS:LRKHR:EMVVKGXGXR, HVTKPTXAPTKL:SATS:LRKHR:NMVVKSXGXH, YVPKPXXAPTKL:SATS:LRKHR:NMVVKSXGXH, TVPKPXXAPTQL:SATS:LRKHR:NMVVKAXGXH, KVGKAXXAPTKL:SATS:LRKHR:EGMSVVKXGXR, KASKAXXAPTKL:SATS:LRKHR:GMVVKEXGXR, GSAGPXXAPTKM:SATS:LRKHR:GMVVKRXGXS, AAPASXXAPTRL:SATS:LRKHR:DMVVKAXGXR, STPPTXXAPTRL:SATS:LRKHR:DMVVKSXGXR, HVPKPXXAPTKL:SATS:LRKHR:NMVVKSXGXH, RVPSTXXAPTKT:SATS:LRKHR:MIVVKXGXL, ASAAPXXAPTAL:SATS:LRKHR:MIVVKXKXS, ASASPXXAPTDL:SATS:LRKHR:MIVVKXKXS, ASASPXXAPTDL:SATS:LRKHR:MVVVKXKXS, NDEGLESAPTEE:SATS:LRKHR:FLVVKKXEXR, NDEGLESAPTGQ:SATS:LRKHR:LEVVKQXEXR, SSVKXQPAPTHH:SATS:LRKHR:RLVVKLEXAXA, RNVQXRPAPTQL:SATS:LRKHR:TLVVKLAXKXE, KIPKAXXVPTEL:SATS:LRKHR:DMVVEGXGXR, GIPEPXXVPEKM:SATS:LRKHR:NMTVESXAXR, SIPKAXXVPTEL:SATS:LRKHR:EMVVEGXGXR, HVTKPTXAPTKL:SATS:LRKHR:NMVVRSXGXH, YVPKPXXAPTKL:SATS:LRKHR:NMVVRSXGXH, TVPKPXXAPTQL:SATS:LRKHR:NMVVRAXGXH, KVGKAXXVPTKL:SATS:LRKHR:EGMSVAEXGXR, KASKAXXVPTKL:SATS:LRKHR:GMAVSEXGXR, GSAGPXXTPTKM:SATS:LRKHR:GMVVDRXGXS, AAPASXXVPARL:SATS:LRKHR:DMVVEAXGXR, STPPTXXVPTRL:SATS:LRKHR:DMVVESXGXR, HVPKPXXAPTKL:SATS:LRKHR:NMVVRSXGXH, RVPSTXXAPVKT:SATS:LRKHR:MIVEEXGXL, ASAAPXXVPQAL:SATS:LRKHR:MIVRSXKXS, ASASPXXVSQDL:SATS:LRKHR:MIVKSXKXS, ASASPXXVPQDL:SATS:LRKHR:MVVKSXKXS, NDEGLEXVPTEE:SATS:LRKHR:FLQHNKXEXR, NDEGLEXVPTGQ:SATS:LRKHR:LEEHSQXEXR, SSVKXQPSRVHH:SATS:LRKHR:RLEEHLEXAXA, RNVQXRPTQVQL:SATS:LRKHR:TLEDHLAXKXE, KIPKAXXVPTEL:SPIS:LKYHY:DMVAEGXGXR, GIPEPXXVPTKM:SPIS:LKYHY:NMVAESXAXR, SIPKAXXVPTEL:SPIS:LKYHY:EMVAEGXGXR, HVTKPTXVPTKL:SPIS:LKYHY:NMVAESXGXH, YVPKPXXVPTKL:SPIS:LKYHY:NMVAESXGXH, TVPKPXXVPTQL:SPIS:LKYHY:NMVAEAXGXH, AVPKAXXVPTKL:SPIS:LKYHY:NMVAEAXGXH, KASKAXXVPTKL:SPIS:LKYHY:GMVAEEXGXR, GSAGPXXVPTKM:SPIS:LKYHY:GMVAERXGXS, AAPASXXVPTRL:SPIS:LKYHY:DMVAEAXGXR, STPPTXXVPTRL:SPIS:LKYHY:DMVAESXGXR, HVPKPXXVPTKL:SPIS:LKYHY:NMVAESXGXH, RVPSTXXVPTKT:SPIS:LKYHY:MIVAEXGXL, ASAAPXXVPTAL:SPIS:LKYHY:MIVAEXKXS, ASASPXXVPTDL:SPIS:LKYHY:MIVAEXKXS, ASASPXXVPTDL:SPIS:LKYHY:MVVAEXKXS, NDEGLEXVPTEE:SPIS:LKYHY:FLVAEKXEXR, NDEGLEXVPTGQ:SPIS:LKYHY:LEVAEQXEXR, SSVKXQPVPTHH:SPIS:LKYHY:RLVAELEXAXA, RNVQXRPVPTQL:SPIS:LKYHY:TLVAELAXKXE, KIPKAXXVPTEL:SPIS:LKYHY:DMVVEGXGXR, GIPEPXXVPEKM:SPIS:LKYHY:NMTVESXAXR, SIPKAXXVPTEL:SPIS:LKYHY:EMVVEGXGXR, HVTKPTXAPTKL:SPIS:LKYHY:NMVVRSXGXH, YVPKPXXAPTKL:SPIS:LKYHY:NMVVRSXGXH, TVPKPXXAPTQL:SPIS:LKYHY:NMVVRAXGXH, AVPKAXXAPTKL:SPIS:LKYHY:NMVVKAXGXH, KASKAXXVPTKL:SPIS:LKYHY:GMAVSEXGXR, GSAGPXXTPTKM:SPIS:LKYHY:GMVVDRXGXS, AAPASXXVPARL:SPIS:LKYHY:DMVVEAXGXR, STPPTXXVPTRL:SPIS:LKYHY:DMVVESXGXR, HVPKPXXAPTKL:SPIS:LKYHY:NMVVRSXGXH, RVPSTXXAPVKT:SPIS:LKYHY:MIVEEXGXL, ASAAPXXVPQAL:SPIS:LKYHY:MIVRSXKXS, ASASPXXVSQDL:SPIS:LKYHY:MIVKSXKXS, ASASPXXVPQDL:SPIS:LKYHY:MVVKSXKXS, NDEGLEXVPTEE:SPIS:LKYHY:FLQHNKXEXR, NDEGLEXVPTGQ:SPIS:LKYHY:LEEHSQXEXR, SSVKXQPSRVHH:SPIS:LKYHY:RLEEHLEXAXA, RNVQXRPTQVQL:SPIS:LKYHY:TLEDHLAXKXE, KIPKAXXVPTEL:EPIS:KFKYE:DMAVXGXGSR, GIPEPXXVPTKM:EPIS:KFKYE:NMAVSSXAXR, SIPKAXXVPTEL:EPIS:KFKYE:EMAVXGXGSR, HVTKPTXVPTKL:EPIS:KFKYE:NMAVSSXGXH, YVPKPXXVPTKL:EPIS:KFKYE:NMAVSSXGXH, TVPKPXXVPTQL:EPIS:KFKYE:NMAVSAXGXH, AVPKAXXVPTKL:EPIS:KFKYE:NMAVSAXGXH, KVGKAXXVPTKL:EPIS:KFKYE:EGMSAVSXGXR, GSAGPXXVPTKM:EPIS:KFKYE:GMAVSRXGXS, AAPASXXVPTRL:EPIS:KFKYE:DMAVSAXGXR, STPPTXXVPTRL:EPIS:KFKYE:DMAVSSXGXR, HVPKPXXVPTKL:EPIS:KFKYE:NMAVSSXGXH, RVPSTXXVPTKT:EPIS:KFKYE:MIAVSXGXL, ASAAPXXVPTAL:EPIS:KFKYE:MIAVSXKXS, ASASPXXVPTDL:EPIS:KFKYE:MIAVSXKXS, ASASPXXVPTDL:EPIS:KFKYE:MVAVSXKXS, NDEGLEXVPTEE:EPIS:KFKYE:FLAVXKXESR, NDEGLEXVPTGQ:EPIS:KFKYE:LEAVSQXEXR, SSVKXQPVPTHH:EPIS:KFKYE:RLAVSLEXAXA, RNVQXRPVPTQL:EPIS:KFKYE:TLAVSLAXKXE, KIPKAXXVPTEL:EPIS:KFKYE:DMVVEGXGXR, GIPEPXXVPEKM:EPIS:KFKYE:NMTVESXAXR, SIPKAXXVPTEL:EPIS:KFKYE:EMVVEGXGXR, HVTKPTXAPTKL:EPIS:KFKYE:NMVVRSXGXH, YVPKPXXAPTKL:EPIS:KFKYE:NMVVRSXGXH, TVPKPXXAPTQL:EPIS:KFKYE:NMVVRAXGXH, AVPKAXXAPTKL:EPIS:KFKYE:NMVVKAXGXH, KVGKAXXVPTKL:EPIS:KFKYE:EGMSVAEXGXR, GSAGPXXTPTKM:EPIS:KFKYE:GMVVDRXGXS, AAPASXXVPARL:EPIS:KFKYE:DMVVEAXGXR, STPPTXXVPTRL:EPIS:KFKYE:DMVVESXGXR, HVPKPXXAPTKL:EPIS:KFKYE:NMVVRSXGXH, RVPSTXXAPVKT:EPIS:KFKYE:MIVEEXGXL, ASAAPXXVPQAL:EPIS:KFKYE:MIVRSXKXS, ASASPXXVSQDL:EPIS:KFKYE:MIVKSXKXS, ASASPXXVPQDL:EPIS:KFKYE:MVVKSXKXS, NDEGLEXVPTEE:EPIS:KFKYE:FLQHNKXEXR, NDEGLEXVPTGQ:EPIS:KFKYE:LEEHSQXEXR, SSVKXQPSRVHH:EPIS:KFKYE:RLEEHLEXAXA, RNVQXRPTQVQL:EPIS:KFKYE:TLEDHLAXKXE, KIPKAXXTPTEL:SPIN:YGKIP:DMVVDGXGXR, GIPEPXXTPTKM:SPIN:YGKIP:NMVVDSXAXR, SIPKAXXTPTEL:SPIN:YGKIP:EMVVDGXGXR, HVTKPTXTPTKL:SPIN:YGKIP:NMVVDSXGXH, YVPKPXXTPTKL:SPIN:YGKIP:NMVVDSXGXH, TVPKPXXTPTQL:SPIN:YGKIP:NMVVDAXGXH, AVPKAXXTPTKL:SPIN:YGKIP:NMVVDAXGXH, KVGKAXXTPTKL:SPIN:YGKIP:EGMSVVDXGXR, KASKAXXTPTKL:SPIN:YGKIP:GMVVDEXGXR, AAPASXXTPTRL:SPIN:YGKIP:DMVVDAXGXR, STPPTXXTPTRL:SPIN:YGKIP:DMVVDSXGXR, HVPKPXXTPTKL:SPIN:YGKIP:NMVVDSXGXH, RVPSTXXTPTKT:SPIN:YGKIP:MIVVDXGXL, ASAAPXXTPTAL:SPIN:YGKIP:MIVVDXKXS, ASASPXXTPTDL:SPIN:YGKIP:MIVVDXKXS, ASASPXXTPTDL:SPIN:YGKIP:MVVVDXKXS, NDEGLESTPTEE:SPIN:YGKIP:FLVVDKXEXR, NDEGLESTPTGQ:SPIN:YGKIP:LEVVDQXEXR, SSVKXQPTPTHH:SPIN:YGKIP:RLVVDLEXAXA, RNVQXRPTPTQL:SPIN:YGKIP:TLVVDLAXKXE, KIPKAXXVPTEL:SPIN:YGKIP:DMVVEGXGXR, GIPEPXXVPEKM:SPIN:YGKIP:NMTVESXAXR, SIPKAXXVPTEL:SPIN:YGKIP:EMVVEGXGXR, HVTKPTXAPTKL:SPIN:YGKIP:NMVVRSXGXH, YVPKPXXAPTKL:SPIN:YGKIP:NMVVRSXGXH, TVPKPXXAPTQL:SPIN:YGKIP:NMVVRAXGXH, AVPKAXXAPTKL:SPIN:YGKIP:NMVVKAXGXH, KVGKAXXVPTKL:SPIN:YGKIP:EGMSVAEXGXR, KASKAXXVPTKL:SPIN:YGKIP:GMAVSEXGXR, AAPASXXVPARL:SPIN:YGKIP:DMVVEAXGXR, STPPTXXVPTRL:SPIN:YGKIP:DMVVESXGXR, HVPKPXXAPTKL:SPIN:YGKIP:NMVVRSXGXH, RVPSTXXAPVKT:SPIN:YGKIP:MIVEEXGXL, ASAAPXXVPQAL:SPIN:YGKIP:MIVRSXKXS, ASASPXXVSQDL:SPIN:YGKIP:MIVKSXKXS, ASASPXXVPQDL:SPIN:YGKIP:MVVKSXKXS, NDEGLEXVPTEE:SPIN:YGKIP:FLQHNKXEXR, NDEGLEXVPTGQ:SPIN:YGKIP:LEEHSQXEXR, SSVKXQPSRVHH:SPIN:YGKIP:RLEEHLEXAXA, RNVQXRPTQVQL:SPIN:YGKIP:TLEDHLAXKXE, KIPKAXXVPAEL:SPIS:YKQYE:DMVVEGXGXR, GIPEPXXVPAKM:SPIS:YKQYE:NMVVESXAXR, SIPKAXXVPAEL:SPIS:YKQYE:EMVVEGXGXR, HVTKPTXVPAKL:SPIS:YKQYE:NMVVESXGXH, YVPKPXXVPAKL:SPIS:YKQYE:NMVVESXGXH, TVPKPXXVPAQL:SPIS:YKQYE:NMVVEAXGXH, AVPKAXXVPAKL:SPIS:YKQYE:NMVVEAXGXH, KVGKAXXVPAKL:SPIS:YKQYE:EGMSVVEXGXR, KASKAXXVPAKL:SPIS:YKQYE:GMVVEEXGXR, GSAGPXXVPAKM:SPIS:YKQYE:GMVVERXGXS, STPPTXXVPARL:SPIS:YKQYE:DMVVESXGXR, HVPKPXXVPAKL:SPIS:YKQYE:NMVVESXGXH, RVPSTXXVPAKT:SPIS:YKQYE:MIVVEXGXL, ASAAPXXVPAAL:SPIS:YKQYE:MIVVEXKXS, ASASPXXVPADL:SPIS:YKQYE:MIVVEXKXS, ASASPXXVPADL:SPIS:YKQYE:MVVVEXKXS, NDEGLEXVPAEE:SPIS:YKQYE:FLVVEKXEXR, NDEGLEXVPAGQ:SPIS:YKQYE:LEVVEQXEXR, SSVKXQPVPAHH:SPIS:YKQYE:RLVVELEXAXA, RNVQXRPVPAQL:SPIS:YKQYE:TLVVELAXKXE, KIPKAXXVPTEL:SPIS:YKQYE:DMVVEGXGXR, GIPEPXXVPEKM:SPIS:YKQYE:NMTVESXAXR, SIPKAXXVPTEL:SPIS:YKQYE:EMVVEGXGXR, HVTKPTXAPTKL:SPIS:YKQYE:NMVVRSXGXH, YVPKPXXAPTKL:SPIS:YKQYE:NMVVRSXGXH, TVPKPXXAPTQL:SPIS:YKQYE:NMVVRAXGXH, AVPKAXXAPTKL:SPIS:YKQYE:NMVVKAXGXH, KVGKAXXVPTKL:SPIS:YKQYE:EGMSVAEXGXR, KASKAXXVPTKL:SPIS:YKQYE:GMAVSEXGXR, GSAGPXXTPTKM:SPIS:YKQYE:GMVVDRXGXS, STPPTXXVPTRL:SPIS:YKQYE:DMVVESXGXR, HVPKPXXAPTKL:SPIS:YKQYE:NMVVRSXGXH, RVPSTXXAPVKT:SPIS:YKQYE:MIVEEXGXL, ASAAPXXVPQAL:SPIS:YKQYE:MIVRSXKXS, ASASPXXVSQDL:SPIS:YKQYE:MIVKSXKXS, ASASPXXVPQDL:SPIS:YKQYE:MVVKSXKXS, NDEGLEXVPTEE:SPIS:YKQYE:FLQHNKXEXR, NDEGLEXVPTGQ:SPIS:YKQYE:LEEHSQXEXR, SSVKXQPSRVHH:SPIS:YKQYE:RLEEHLEXAXA, RNVQXRPTQVQL:SPIS:YKQYE:TLEDHLAXKXE, GIPEPXXVPTKM:SPIS:YKQYE:NMVVESXAXR, HVTKPTXVPTKL:SPIS:YKQYE:NMVVESXGXH, YVPKPXXVPTKL:SPIS:YKQYE:NMVVESXGXH, TVPKPXXVPTQL:SPIS:YKQYE:NMVVEAXGXH, AVPKAXXVPTKL:SPIS:YKQYE:NMVVEAXGXH, KVGKAXXVPTKL:SPIS:YKQYE:EGMSVVEXGXR, KASKAXXVPTKL:SPIS:YKQYE:GMVVEEXGXR, GSAGPXXVPTKM:SPIS:YKQYE:GMVVERXGXS, AAPASXXVPTRL:SPIS:YKQYE:DMVVEAXGXR, HVPKPXXVPTKL:SPIS:YKQYE:NMVVESXGXH, RVPSTXXVPTKT:SPIS:YKQYE:MIVVEXGXL, ASAAPXXVPTAL:SPIS:YKQYE:MIVVEXKXS, ASASPXXVPTDL:SPIS:YKQYE:MIVVEXKXS, ASASPXXVPTDL:SPIS:YKQYE:MVVVEXKXS, NDEGLEXVPTEE:SPIS:YKQYE:FLVVEKXEXR, NDEGLEXVPTGQ:SPIS:YKQYE:LEVVEQXEXR, SSVKXQPVPTHH:SPIS:YKQYE:RLVVELEXAXA, RNVQXRPVPTQL:SPIS:YKQYE:TLVVELAXKXE, AAPASXXVPARL:SPIS:YKQYE:DMVVEAXGXR, KIPKAXXAPVEL:KPLS:DHHKD:DMVEEGXGXR, GIPEPXXAPVKM:KPLS:DHHKD:NMVEESXAXR, SIPKAXXAPVEL:KPLS:DHHKD:EMVEEGXGXR, HVTKPTXAPVKL:KPLS:DHHKD:NMVEESXGXH, YVPKPXXAPVKL:KPLS:DHHKD:NMVEESXGXH, TVPKPXXAPVQL:KPLS:DHHKD:NMVEEAXGXH, AVPKAXXAPVKL:KPLS:DHHKD:NMVEEAXGXH, KVGKAXXAPVKL:KPLS:DHHKD:EGMSVEEXGXR, KASKAXXAPVKL:KPLS:DHHKD:GMVEEEXGXR, GSAGPXXAPVKM:KPLS:DHHKD:GMVEERXGXS, AAPASXXAPVRL:KPLS:DHHKD:DMVEEAXGXR, STPPTXXAPVRL:KPLS:DHHKD:DMVEESXGXR, HVPKPXXAPVKL:KPLS:DHHKD:NMVEESXGXH, ASAAPXXAPVAL:KPLS:DHHKD:MIVEEXKXS, ASASPXXAPVDL:KPLS:DHHKD:MIVEEXKXS, ASASPXXAPVDL:KPLS:DHHKD:MVVEEXKXS, NDEGLESAPVEE:KPLS:DHHKD:FLVEEKXEXR, NDEGLESAPVGQ:KPLS:DHHKD:LEVEEQXEXR, SSVKXQPAPVHH:KPLS:DHHKD:RLVEELEXAXA, RNVQXRPAPVQL:KPLS:DHHKD:TLVEELAXKXE, KIPKAXXVPTEL:KPLS:DHHKD:DMVVEGXGXR, GIPEPXXVPEKM:KPLS:DHHKD:NMTVESXAXR, SIPKAXXVPTEL:KPLS:DHHKD:EMVVEGXGXR, HVTKPTXAPTKL:KPLS:DHHKD:NMVVRSXGXH, YVPKPXXAPTKL:KPLS:DHHKD:NMVVRSXGXH, TVPKPXXAPTQL:KPLS:DHHKD:NMVVRAXGXH, AVPKAXXAPTKL:KPLS:DHHKD:NMVVKAXGXH, KVGKAXXVPTKL:KPLS:DHHKD:EGMSVAEXGXR, KASKAXXVPTKL:KPLS:DHHKD:GMAVSEXGXR, GSAGPXXTPTKM:KPLS:DHHKD:GMVVDRXGXS, AAPASXXVPARL:KPLS:DHHKD:DMVVEAXGXR, STPPTXXVPTRL:KPLS:DHHKD:DMVVESXGXR, HVPKPXXAPTKL:KPLS:DHHKD:NMVVRSXGXH, ASAAPXXVPQAL:KPLS:DHHKD:MIVRSXKXS, ASASPXXVSQDL:KPLS:DHHKD:MIVKSXKXS, ASASPXXVPQDL:KPLS:DHHKD:MVVKSXKXS, NDEGLEXVPTEE:KPLS:DHHKD:FLQHNKXEXR, NDEGLEXVPTGQ:KPLS:DHHKD:LEEHSQXEXR, SSVKXQPSRVHH:KPLS:DHHKD:RLEEHLEXAXA, RNVQXRPTQVQL:KPLS:DHHKD:TLEDHLAXKXE, KIPKAXXVPQEL:EPLP:EQLSN:DMVRXGXGSR, GIPEPXXVPQKM:EPLP:EQLSN:NMVRSSXAXR, SIPKAXXVPQEL:EPLP:EQLSN:EMVRXGXGSR, HVTKPTXVPQKL:EPLP:EQLSN:NMVRSSXGXH, YVPKPXXVPQKL:EPLP:EQLSN:NMVRSSXGXH, TVPKPXXVPQQL:EPLP:EQLSN:NMVRSAXGXH, AVPKAXXVPQKL:EPLP:EQLSN:NMVRSAXGXH, KVGKAXXVPQKL:EPLP:EQLSN:EGMSVRSXGXR, KASKAXXVPQKL:EPLP:EQLSN:GMVRSEXGXR, GSAGPXXVPQKM:EPLP:EQLSN:GMVRSRXGXS, AAPASXXVPQRL:EPLP:EQLSN:DMVRSAXGXR, STPPTXXVPQRL:EPLP:EQLSN:DMVRSSXGXR, HVPKPXXVPQKL:EPLP:EQLSN:NMVRSSXGXH, RVPSTXXVPQKT:EPLP:EQLSN:MIVRSXGXL, ASASPXXVPQDL:EPLP:EQLSN:MIVRSXKXS, ASASPXXVPQDL:EPLP:EQLSN:MVVRSXKXS, NDEGLEXVPQEE:EPLP:EQLSN:FLVRXKXESR, NDEGLEXVPQGQ:EPLP:EQLSN:LEVRSQXEXR, SSVKXQPVPQHH:EPLP:EQLSN:RLVRSLEXAXA, RNVQXRPVPQQL:EPLP:EQLSN:TLVRSLAXKXE, KIPKAXXVPTEL:EPLP:EQLSN:DMVVEGXGXR, GIPEPXXVPEKM:EPLP:EQLSN:NMTVESXAXR, SIPKAXXVPTEL:EPLP:EQLSN:EMVVEGXGXR, HVTKPTXAPTKL:EPLP:EQLSN:NMVVRSXGXH, YVPKPXXAPTKL:EPLP:EQLSN:NMVVRSXGXH, TVPKPXXAPTQL:EPLP:EQLSN:NMVVRAXGXH, AVPKAXXAPTKL:EPLP:EQLSN:NMVVKAXGXH, KVGKAXXVPTKL:EPLP:EQLSN:EGMSVAEXGXR, KASKAXXVPTKL:EPLP:EQLSN:GMAVSEXGXR, GSAGPXXTPTKM:EPLP:EQLSN:GMVVDRXGXS, AAPASXXVPARL:EPLP:EQLSN:DMVVEAXGXR, STPPTXXVPTRL:EPLP:EQLSN:DMVVESXGXR, HVPKPXXAPTKL:EPLP:EQLSN:NMVVRSXGXH, RVPSTXXAPVKT:EPLP:EQLSN:MIVEEXGXL, ASASPXXVSQDL:EPLP:EQLSN:MIVKSXKXS, ASASPXXVPQDL:EPLP:EQLSN:MVVKSXKXS, NDEGLEXVPTEE:EPLP:EQLSN:FLQHNKXEXR, NDEGLEXVPTGQ:EPLP:EQLSN:LEEHSQXEXR, SSVKXQPSRVHH:EPLP:EQLSN:RLEEHLEXAXA, RNVQXRPTQVQL:EPLP:EQLSN:TLEDHLAXKXE, KIPKAXXVSQEL:EPLT:EQLSN:DMVKXGXGSR, GIPEPXXVSQKM:EPLT:EQLSN:NMVKSSXAXR, SIPKAXXVSQEL:EPLT:EQLSN:EMVKXGXGSR, HVTKPTXVSQKL:EPLT:EQLSN:NMVKSSXGXH, YVPKPXXVSQKL:EPLT:EQLSN:NMVKSSXGXH, TVPKPXXVSQQL:EPLT:EQLSN:NMVKSAXGXH, AVPKAXXVSQKL:EPLT:EQLSN:NMVKSAXGXH, KVGKAXXVSQKL:EPLT:EQLSN:EGMSVKSXGXR, KASKAXXVSQKL:EPLT:EQLSN:GMVKSEXGXR, GSAGPXXVSQKM:EPLT:EQLSN:GMVKSRXGXS, AAPASXXVSQRL:EPLT:EQLSN:DMVKSAXGXR, STPPTXXVSQRL:EPLT:EQLSN:DMVKSSXGXR, HVPKPXXVSQKL:EPLT:EQLSN:NMVKSSXGXH, RVPSTXXVSQKT:EPLT:EQLSN:MIVKSXGXL, ASAAPXXVSQAL:EPLT:EQLSN:MIVKSXKXS, ASASPXXVSQDL:EPLT:EQLSN:MVVKSXKXS, NDEGLEXVSQEE:EPLT:EQLSN:FLVKXKXESR, NDEGLEXVSQGQ:EPLT:EQLSN:LEVKSQXEXR, SSVKXQPVSQHH:EPLT:EQLSN:RLVKSLEXAXA, RNVQXRPVSQQL:EPLT:EQLSN:TLVKSLAXKXE, KIPKAXXVPTEL:EPLT:EQLSN:DMVVEGXGXR, GIPEPXXVPEKM:EPLT:EQLSN:NMTVESXAXR, SIPKAXXVPTEL:EPLT:EQLSN:EMVVEGXGXR, HVTKPTXAPTKL:EPLT:EQLSN:NMVVRSXGXH, YVPKPXXAPTKL:EPLT:EQLSN:NMVVRSXGXH, TVPKPXXAPTQL:EPLT:EQLSN:NMVVRAXGXH, AVPKAXXAPTKL:EPLT:EQLSN:NMVVKAXGXH, KVGKAXXVPTKL:EPLT:EQLSN:EGMSVAEXGXR, KASKAXXVPTKL:EPLT:EQLSN:GMAVSEXGXR, GSAGPXXTPTKM:EPLT:EQLSN:GMVVDRXGXS, AAPASXXVPARL:EPLT:EQLSN:DMVVEAXGXR, STPPTXXVPTRL:EPLT:EQLSN:DMVVESXGXR, HVPKPXXAPTKL:EPLT:EQLSN:NMVVRSXGXH, RVPSTXXAPVKT:EPLT:EQLSN:MIVEEXGXL, ASAAPXXVPQAL:EPLT:EQLSN:MIVRSXKXS, ASASPXXVPQDL:EPLT:EQLSN:MVVKSXKXS, NDEGLEXVPTEE:EPLT:EQLSN:FLQHNKXEXR, NDEGLEXVPTGQ:EPLT:EQLSN:LEEHSQXEXR, SSVKXQPSRVHH:EPLT:EQLSN:RLEEHLEXAXA, RNVQXRPTQVQL:EPLT:EQLSN:TLEDHLAXKXE, KIPKAXXVPQEL:EPLT:EQLSN:DMVKXGXGSR, GIPEPXXVPQKM:EPLT:EQLSN:NMVKSSXAXR, SIPKAXXVPQEL:EPLT:EQLSN:EMVKXGXGSR, HVTKPTXVPQKL:EPLT:EQLSN:NMVKSSXGXH, YVPKPXXVPQKL:EPLT:EQLSN:NMVKSSXGXH, TVPKPXXVPQQL:EPLT:EQLSN:NMVKSAXGXH, AVPKAXXVPQKL:EPLT:EQLSN:NMVKSAXGXH, KVGKAXXVPQKL:EPLT:EQLSN:EGMSVKSXGXR, KASKAXXVPQKL:EPLT:EQLSN:GMVKSEXGXR, GSAGPXXVPQKM:EPLT:EQLSN:GMVKSRXGXS, AAPASXXVPQRL:EPLT:EQLSN:DMVKSAXGXR, STPPTXXVPQRL:EPLT:EQLSN:DMVKSSXGXR, HVPKPXXVPQKL:EPLT:EQLSN:NMVKSSXGXH, RVPSTXXVPQKT:EPLT:EQLSN:MIVKSXGXL, ASAAPXXVPQAL:EPLT:EQLSN:MIVKSXKXS, ASASPXXVPQDL:EPLT:EQLSN:MIVKSXKXS, NDEGLEXVPQEE:EPLT:EQLSN:FLVKXKXESR, NDEGLEXVPQGQ:EPLT:EQLSN:LEVKSQXEXR, SSVKXQPVPQHH:EPLT:EQLSN:RLVKSLEXAXA, RNVQXRPVPQQL:EPLT:EQLSN:TLVKSLAXKXE, ASASPXXVSQDL:EPLT:EQLSN:MIVKSXKXS, KIPKAXXVPTEL:SNIT:IGEMS:DMQHNGXGXR, GIPEPXXVPTKM:SNIT:IGEMS:NMQHNSXAXR, SIPKAXXVPTEL:SNIT:IGEMS:EMQHNGXGXR, HVTKPTXVPTKL:SNIT:IGEMS:NMQHNSXGXH, YVPKPXXVPTKL:SNIT:IGEMS:NMQHNSXGXH, TVPKPXXVPTQL:SNIT:IGEMS:NMQHNAXGXH, AVPKAXXVPTKL:SNIT:IGEMS:NMQHNAXGXH, KVGKAXXVPTKL:SNIT:IGEMS:EGMSQHNXGXR, KASKAXXVPTKL:SNIT:IGEMS:GMQHNEXGXR, GSAGPXXVPTKM:SNIT:IGEMS:GMQHNRXGXS, AAPASXXVPTRL:SNIT:IGEMS:DMQHNAXGXR, STPPTXXVPTRL:SNIT:IGEMS:DMQHNSXGXR, HVPKPXXVPTKL:SNIT:IGEMS:NMQHNSXGXH, RVPSTXXVPTKT:SNIT:IGEMS:MIQHNXGXL, ASAAPXXVPTAL:SNIT:IGEMS:MIQHNXKXS, ASASPXXVPTDL:SNIT:IGEMS:MIQHNXKXS, ASASPXXVPTDL:SNIT:IGEMS:MVQHNXKXS, NDEGLEXVPTGQ:SNIT:IGEMS:LEQHNQXEXR, NDEGLEXVPTEE:SNIT:IGEMS:FLQHNKXEXR, SSVKXQPVPTHH:SNIT:IGEMS:RLQHNLEXAXA, RNVQXRPVPTQL:SNIT:IGEMS:TLQHNLAXKXE, KIPKAXXVPTEL:SNIT:IGEMS:DMVVEGXGXR, GIPEPXXVPEKM:SNIT:IGEMS:NMTVESXAXR, SIPKAXXVPTEL:SNIT:IGEMS:EMVVEGXGXR, HVTKPTXAPTKL:SNIT:IGEMS:NMVVRSXGXH, YVPKPXXAPTKL:SNIT:IGEMS:NMVVRSXGXH, TVPKPXXAPTQL:SNIT:IGEMS:NMVVRAXGXH, AVPKAXXAPTKL:SNIT:IGEMS:NMVVKAXGXH, KVGKAXXVPTKL:SNIT:IGEMS:EGMSVAEXGXR, KASKAXXVPTKL:SNIT:IGEMS:GMAVSEXGXR, GSAGPXXTPTKM:SNIT:IGEMS:GMVVDRXGXS, AAPASXXVPARL:SNIT:IGEMS:DMVVEAXGXR, STPPTXXVPTRL:SNIT:IGEMS:DMVVESXGXR, HVPKPXXAPTKL:SNIT:IGEMS:NMVVRSXGXH, RVPSTXXAPVKT:SNIT:IGEMS:MIVEEXGXL, ASAAPXXVPQAL:SNIT:IGEMS:MIVRSXKXS, ASASPXXVSQDL:SNIT:IGEMS:MIVKSXKXS, ASASPXXVPQDL:SNIT:IGEMS:MVVKSXKXS, NDEGLEXVPTGQ:SNIT:IGEMS:LEEHSQXEXR, SSVKXQPSRVHH:SNIT:IGEMS:RLEEHLEXAXA, RNVQXRPTQVQL:SNIT:IGEMS:TLEDHLAXKXE, KIPKAXXVPTEL:SNIT:LGEMS:DMEHXGXGSR, GIPEPXXVPTKM:SNIT:LGEMS:NMEHSSXAXR, SIPKAXXVPTEL:SNIT:LGEMS:EMEHXGXGSR, HVTKPTXVPTKL:SNIT:LGEMS:NMEHSSXGXH, YVPKPXXVPTKL:SNIT:LGEMS:NMEHSSXGXH, TVPKPXXVPTQL:SNIT:LGEMS:NMEHSAXGXH, AVPKAXXVPTKL:SNIT:LGEMS:NMEHSAXGXH, KVGKAXXVPTKL:SNIT:LGEMS:EGMSEHSXGXR, KASKAXXVPTKL:SNIT:LGEMS:GMEHSEXGXR, GSAGPXXVPTKM:SNIT:LGEMS:GMEHSRXGXS, AAPASXXVPTRL:SNIT:LGEMS:DMEHSAXGXR, STPPTXXVPTRL:SNIT:LGEMS:DMEHSSXGXR, HVPKPXXVPTKL:SNIT:LGEMS:NMEHSSXGXH, RVPSTXXVPTKT:SNIT:LGEMS:MIEHSXGXL, ASAAPXXVPTAL:SNIT:LGEMS:MIEHSXKXS, ASASPXXVPTDL:SNIT:LGEMS:MIEHSXKXS, ASASPXXVPTDL:SNIT:LGEMS:MVEHSXKXS, NDEGLEXVPTEE:SNIT:LGEMS:FLEHXKXESR, SSVKXQPVPTHH:SNIT:LGEMS:RLEHSLEXAXA, RNVQXRPVPTQL:SNIT:LGEMS:TLEHSLAXKXE, KIPKAXXVPTEL:SNIT:LGEMS:DMVVEGXGXR, GIPEPXXVPEKM:SNIT:LGEMS:NMTVESXAXR, SIPKAXXVPTEL:SNIT:LGEMS:EMVVEGXGXR, HVTKPTXAPTKL:SNIT:LGEMS:NMVVRSXGXH, YVPKPXXAPTKL:SNIT:LGEMS:NMVVRSXGXH, TVPKPXXAPTQL:SNIT:LGEMS:NMVVRAXGXH, AVPKAXXAPTKL:SNIT:LGEMS:NMVVKAXGXH, KVGKAXXVPTKL:SNIT:LGEMS:EGMSVAEXGXR, KASKAXXVPTKL:SNIT:LGEMS:GMAVSEXGXR, GSAGPXXTPTKM:SNIT:LGEMS:GMVVDRXGXS, AAPASXXVPARL:SNIT:LGEMS:DMVVEAXGXR, STPPTXXVPTRL:SNIT:LGEMS:DMVVESXGXR, HVPKPXXAPTKL:SNIT:LGEMS:NMVVRSXGXH, RVPSTXXAPVKT:SNIT:LGEMS:MIVEEXGXL, ASAAPXXVPQAL:SNIT:LGEMS:MIVRSXKXS, ASASPXXVSQDL:SNIT:LGEMS:MIVKSXKXS, ASASPXXVPQDL:SNIT:LGEMS:MVVKSXKXS, NDEGLEXVPTEE:SNIT:LGEMS:FLQHNKXEXR, SSVKXQPSRVHH:SNIT:LGEMS:RLEEHLEXAXA, RNVQXRPTQVQL:SNIT:LGEMS:TLEDHLAXKXE, KIPKASSSRVEL:RSVK:KEVQV:DMEEHGXGXR, GIPEPSSSRVKM:RSVK:KEVQV:NMEEHSXAXR, SIPKASSSRVEL:RSVK:KEVQV:EMEEHGXGXR, HVTKPTXSRVKL:RSVK:KEVQV:NMEEHSXGXH, YVPKPSSSRVKL:RSVK:KEVQV:NMEEHSXGXH, TVPKPSSSRVQL:RSVK:KEVQV:NMEEHAXGXH, AVPKASSSRVKL:RSVK:KEVQV:NMEEHAXGXH, KVGKASSSRVKL:RSVK:KEVQV:EGMSEEHXGXR, KASKASSSRVKL:RSVK:KEVQV:GMEEHEXGXR, GSAGPSSSRVKM:RSVK:KEVQV:GMEEHRXGXS, AAPASSSSRVRL:RSVK:KEVQV:DMEEHAXGXR, STPPTSSSRVRL:RSVK:KEVQV:DMEEHSXGXR, HVPKPSSSRVKL:RSVK:KEVQV:NMEEHSXGXH, RVPSTSSSRVKT:RSVK:KEVQV:MIEEHXGXL, ASAAPSSSRVAL:RSVK:KEVQV:MIEEHXKXS, ASASPSSSRVDL:RSVK:KEVQV:MIEEHXKXS, ASASPSSSRVDL:RSVK:KEVQV:MVEEHXKXS, NDEGLESSRVEE:RSVK:KEVQV:FLEEHKXEXR, NDEGLESSRVGQ:RSVK:KEVQV:LEEEHQXEXR, RNVQXRPSRVQL:RSVK:KEVQV:TLEEHLAXKXE, KIPKAXXVPTEL:RSVK:KEVQV:DMVVEGXGXR, GIPEPXXVPEKM:RSVK:KEVQV:NMTVESXAXR, SIPKAXXVPTEL:RSVK:KEVQV:EMVVEGXGXR, HVTKPTXAPTKL:RSVK:KEVQV:NMVVRSXGXH, YVPKPXXAPTKL:RSVK:KEVQV:NMVVRSXGXH, TVPKPXXAPTQL:RSVK:KEVQV:NMVVRAXGXH, AVPKAXXAPTKL:RSVK:KEVQV:NMVVKAXGXH, KVGKAXXVPTKL:RSVK:KEVQV:EGMSVAEXGXR, KASKAXXVPTKL:RSVK:KEVQV:GMAVSEXGXR, GSAGPXXTPTKM:RSVK:KEVQV:GMVVDRXGXS, AAPASXXVPARL:RSVK:KEVQV:DMVVEAXGXR, STPPTXXVPTRL:RSVK:KEVQV:DMVVESXGXR, HVPKPXXAPTKL:RSVK:KEVQV:NMVVRSXGXH, RVPSTXXAPVKT:RSVK:KEVQV:MIVE EXGXL, ASAAPXXVPQAL:RSVK:KEVQV:MIVRSXKXS, ASASPXXVSQDL:RSVK:KEVQV:MIVKSXKXS, ASASPXXVPQDL:RSVK:KEVQV:MVVKSXKXS, NDEGLEXVPTEE:RSVK:KEVQV:FLQHNKXEXR, NDEGLEXVPTGQ:RSVK:KEVQV:LEEHSQXEXR, RNVQXRPTQVQL:RSVK:KEVQV:TLEDHLAXKXE, KIPKASSTQVEL:RPVQ:KKATV:DMEDHGXGXR, GIPEPSSTQVKM:RPVQ:KKATV:NMEDHSXAXR, SIPKASSTQVEL:RPVQ:KKATV:EMEDHGXGXR, HVTKPTXTQVKL:RPVQ:KKATV:NMEDHSXGXH, YVPKPSSTQVKL:RPVQ:KKATV:NMEDHSXGXH, TVPKPSSTQVQL:RPVQ:KKATV:NMEDHAXGXH, AVPKASSTQVKL:RPVQ:KKATV:NMEDHAXGXH, KVGKASSTQVKL:RPVQ:KKATV:EGMSEDHXGXR, KASKASSTQVKL:RPVQ:KKATV:GMEDHEXGXR, GSAGPSSTQVKM:RPVQ:KKATV:GMEDHRXGXS, AAPASSSTQVRL:RPVQ:KKATV:DMEDHAXGXR, STPPTSSTQVRL:RPVQ:KKATV:DMEDHSXGXR, HVPKPSSTQVKL:RPVQ:KKATV:NMEDHSXGXH, RVPSTSSTQVKT:RPVQ:KKATV:MIEDHXGXL, ASAAPSSTQVAL:RPVQ:KKATV:MIEDHXKXS, ASASPSSTQVDL:RPVQ:KKATV:MIEDHXKXS, ASASPSSTQVDL:RPVQ:KKATV:MVEDHXKXS, NDEGLESTQVEE:RPVQ:KKATV:FLEDHKXEXR, NDEGLESTQVGQ:RPVQ:KKATV:LEEDHQXEXR, SSVKXQPTQVHH:RPVQ:KKATV:RLEDHLEXAXA, KIPKAXXVPTEL:RPVQ:KKATV:DMVVEGXGXR, GIPEPXXVPEKM:RPVQ:KKATV:NMTVESXAXR, SIPKAXXVPTEL:RPVQ:KKATV:EMVVEGXGXR, HVTKPTXAPTKL:RPVQ:KKATV:NMVVRSXGXH, YVPKPXXAPTKL:RPVQ:KKATV:NMVVRSXGXH, TVPKPXXAPTQL:RPVQ:KKATV:NMVVRAXGXH, AVPKAXXAPTKL:RPVQ:KKATV:NMVVKAXGXH, KVGKAXXVPTKL:RPVQ:KKATV:EGMSVAEXGXR, KASKAXXVPTKL:RPVQ:KKATV:GMAVSEXGXR, GSAGPXXTPTKM:RPVQ:KKATV:GMVVDRXGXS, AAPASXXVPARL:RPVQ:KKATV:DMVVEAXGXR, STPPTXXVPTRL:RPVQ:KKATV:DMVVESXGXR, HVPKPXXAPTKL:RPVQ:KKATV:NMVVRSXGXH, RVPSTXXAPVKT:RPVQ:KKATV:MIVEEXGXL, ASAAPXXVPQAL:RPVQ:KKATV:MIVRSXKXS, ASASPXXVSQDL:RPVQ:KKATV:MIVKSXKXS, ASASPXXVPQDL:RPVQ:KKATV:MVVKSXKXS, NDEGLEXVPTEE:RPVQ:KKATV:FLQHNKXEXR, NDEGLEXVPTGQ:RPVQ:KKATV:LEEHSQXEXR and SSVKXQPSRVHH:RPVQ:KKATV:RLEEHLEXAXA. More particularly, the quadruplet PEP9:PEP1:PEP2:PEP10 is selected from the group consisting of GIPEPXXVPTKM:SAIS:LKNYQ:NMVVESXAXR, HVTKPTXVPTKL:SAIS:LKNYQ:NMVVESXGXH, YVPKPXXVPTKL:SAIS:LKNYQ:NMVVESXGXH, TVPKPXXVPTQL:SAIS:LKNYQ:NMVVEAXGXH, AVPKAXXVPTKL:SAIS:LKNYQ:NMVVEAXGXH, KVGKAXXVPTKL:SAIS:LKNYQ:EGMSVVEXGXR, KASKAXXVPTKL:SAIS:LKNYQ:GMVVEEXGXR, GSAGPXXVPTKM:SAIS:LKNYQ:GMVVERXGXS, AAPASXXVPTRL:SAIS:LKNYQ:DMVVEAXGXR, STPPTXXVPTRL:SAIS:LKNYQ:DMVVESXGXR, HVPKPXXVPTKL:SAIS:LKNYQ:NMVVESXGXH, RVPSTXXVPTKT:SAIS:LKNYQ:MIVVEXGXL, ASAAPXXVPTAL:SAIS:LKNYQ:MIVVEXKXS, ASASPXXVPTDL:SAIS:LKNYQ:MIVVEXKXS, ASASPXXVPTDL:SAIS:LKNYQ:MVVVEXKXS, GIPEPXXVPEKM:SAIS:LKNYQ:NMTVESXAXR, HVTKPTXAPTKL:SAIS:LKNYQ:NMVVRSXGXH, YVPKPXXAPTKL:SAIS:LKNYQ:NMVVRSXGXH, TVPKPXXAPTQL:SAIS:LKNYQ:NMVVRAXGXH, AVPKAXXAPTKL:SAIS:LKNYQ:NMVVKAXGXH, KVG KAXXVPTKL:SAIS:LKNYQ:EG MSVAEXGXR, KASKAXXVPTKL:SAIS:LKNYQ:GMAVSEXGXR, GSAGPXXTPTKM:SAIS:LKNYQ:GMVVDRXGXS, AAPASXXVPARL:SAIS:LKNYQ:DMVVEAXGXR, HVPKPXXAPTKL:SAIS:LKNYQ:NMVVRSXGXH, RVPSTXXAPVKT:SAIS:LKNYQ:MIVEEXGXL, ASAAPXXVPQAL:SAIS:LKNYQ:MIVRSXKXS, ASASPSSVSQDL:SAIS:LKNYQ:MIVKSXKXS, ASASPXXVPQDL:SAIS:LKNYQ:MVVKSXKXS, NDEGLEXVPTEE:SAIS:LKNYQ:FLQHNKXEXR, NDEGLEXVPTGQ:SAIS:LKNYQ:LEEHSQXEXR, SSVKXQPSRVHH:SAIS:LKNYQ:RLEEHLEXAXA, RNVQXRPTQVQL:SAIS:LKNYQ:TLEDHLAXKXE, KIPKAXXVPEEL:SSLS:LKVYP:DMTVEGXGXR, SIPKAXXVPEEL:SSLS:LKVYP:EMTVEGXGXR, HVTKPTXVPEKL:SSLS:LKVYP:NMTVESXGXH, YVPKPXXVPEKL:SSLS:LKVYP:NMTVESXGXH, TVPKPXXVPEQL:SSLS:LKVYP:NMTVEAXGXH, AVPKAXXVPEKL:SSLS:LKVYP:NMTVEAXGXH, KVGKAXXVPEKL:SSLS:LKVYP:EGMSTVEXGXR, KASKAXXVPEKL:SSLS:LKVYP:GMTVEEXGXR, GSAGPXXVPEKM:SSLS:LKVYP:GMTVERXGXS, AAPASXXVPERL:SSLS:LKVYP:DMTVEAXGXR, STPPTXXVPERL:SSLS:LKVYP:DMTVESXGXR, HVPKPXXVPEKL:SSLS:LKVYP:NMTVESXGXH, RVPSTXXVPEKT:SSLS:LKVYP:MITVEXGXL, ASAAPXXVPEAL:SSLS:LKVYP:MITVEXKXS, ASASPXXVPEDL:SSLS:LKVYP:MITVEXKXS, ASASPXXVPEDL:SSLS:LKVYP:MVTVEXKXS, KIPKAXXVPTEL:SSLS:LKVYP:DMVVEGXGXR, SIPKAXXVPTEL:SSLS:LKVYP:EMVVEGXGXR, HVTKPTXAPTKL:SSLS:LKVYP:NMVVRSXGXH, YVPKPXXAPTKL:SSLS:LKVYP:NMVVRSXGXH, TVPKPXXAPTQL:SSLS:LKVYP:NMVVRAXGXH, AVPKAXXAPTKL:SSLS:LKVYP:NMVVKAXGXH, KVG KAXXVPTKL:SSLS:LKVYP:EGMSVAEXGXR, KASKAXXVPTKL:SSLS:LKVYP:GMAVSEXGXR, GSAGPXXTPTKM:SSLS:LKVYP:GMVVDRXGXS, AAPASXXVPARL:SSLS:LKVYP:DMVVEAXGXR, STPPTXXVPTRL:SSLS:LKVYP:DMVVESXGXR, HVPKPXXAPTKL:SSLS:LKVYP:NMVVRSXGXH, RVPSTXXAPVKT:SSLS:LKVYP:MIVEEXGXL, ASAAPXXVPQAL:SSLS:LKVYP:MIVRSXKXS, ASASPSSVSQDL:SSLS:LKVYP:MIVKSXKXS, ASASPXXVPQDL:SSLS:LKVYP:MVVKSXKXS, NDEGLEXVPTEE:SSLS:LKVYP:FLQHNKXEXR, NDEGLEXVPTGQ:SSLS:LKVYP:LEEHSQXEXR, SSVKXQPSRVHH:SSLS:LKVYP:RLEEHLEXAXA, RNVQXRPTQVQL:SSLS:LKVYP:TLEDHLAXKXE, KIPKAXXAPTEL:NAIS:LKKYR:DMVVRGXGXR, GIPEPXXAPTKM:NAIS:LKKYR:NMVVRSXAXR, SIPKAXXAPTEL:NAIS:LKKYR:EMVVRGXGXR, AVPKAXXAPTKL:NAIS:LKKYR:NMVVRAXGXH, KVGKAXXAPTKL:NAIS:LKKYR:EGMSVVRXGXR, KASKAXXAPTKL:NAIS:LKKYR:GMVVREXGXR, GSAGPXXAPTKM:NAIS:LKKYR:GMVVRRXGXS, AAPASXXAPTRL:NAIS:LKKYR:DMVVRAXGXR, STPPTXXAPTRL:NAIS:LKKYR:DMVVRSXGXR, RVPSTXXAPTKT:NAIS:LKKYR:MIVVRXGXL, ASAAPXXAPTAL:NAIS:LKKYR:MIVVRXKXS, ASASPXXAPTDL:NAIS:LKKYR:MIVVRXKXS, ASASPXXAPTDL:NAIS:LKKYR:MVVVRXKXS, KIPKAXXVPTEL:NAIS:LKKYR:DMVVEGXGXR, GIPEPXXVPEKM:NAIS:LKKYR:NMTVESXAXR, SIPKAXXVPTEL:NAIS:LKKYR:EMVVEGXGXR, AVPKAXXAPTKL:NAIS:LKKYR:NMVVKAXGXH, KVGKAXXVPTKL:NAIS:LKKYR:EGMSVAEXGXR, KASKAXXVPTKL:NAIS:LKKYR:GMAVSEXGXR, GSAGPXXTPTKM:NAIS:LKKYR:GMVVDRXGXS, AAPASXXVPARL:NAIS:LKKYR:DMVVEAXGXR, STPPTXXVPTRL:NAIS:LKKYR:DMVVESXGXR, RVPSTXXAPVKT:NAIS:LKKYR:MIVEEXGXL, ASAAPXXVPQAL:NAIS:LKKYR:MIVRSXKXS, ASASPSSVSQDL:NAIS:LKKYR:MIVKSXKXS, ASASPXXVPQDL:NAIS:LKKYR:MVVKSXKXS, NDEGLEXVPTEE:NAIS:LKKYR:FLQHNKXEXR, NDEGLEXVPTGQ:NAIS:LKKYR:LEEHSQXEXR, SSVKXQPSRVHH:NAIS:LKKYR:RLEEHLEXAXA, RNVQXRPTQVQL:NAIS:LKKYR:TLEDHLAXKXE, KIPKAXXAPTEL:SATS:LRKHR:DMVVKGXGXR, GIPEPXXAPTKM:SATS:LRKHR:NMVVKSXAXR, SIPKAXXAPTEL:SATS:LRKHR:EMVVKGXGXR, HVTKPTXAPTKL:SATS:LRKHR:NMVVKSXGXH, YVPKPXXAPTKL:SATS:LRKHR:NMVVKSXGXH, TVPKPXXAPTQL:SATS:LRKHR:NMVVKAXGXH, KVGKAXXAPTKL:SATS:LRKHR:EGMSVVKXGXR, KASKAXXAPTKL:SATS:LRKHR:GMVVKEXGXR, GSAGPXXAPTKM:SATS:LRKHR:GMVVKRXGXS, AAPASXXAPTRL:SATS:LRKHR:DMVVKAXGXR, STPPTXXAPTRL:SATS:LRKHR:DMVVKSXGXR, HVPKPXXAPTKL:SATS:LRKHR:NMVVKSXGXH, RVPSTXXAPTKT:SATS:LRKHR:MIVVKXGXL, ASAAPXXAPTAL:SATS:LRKHR:MIVVKXKXS, ASASPXXAPTDL:SATS:LRKHR:MIVVKXKXS, ASASPXXAPTDL:SATS:LRKHR:MVVVKXKXS, KIPKAXXVPTEL:SATS:LRKHR:DMVVEGXGXR, GIPEPXXVPEKM:SATS:LRKHR:NMTVESXAXR, SIPKAXXVPTEL:SATS:LRKHR:EMVVEGXGXR, HVTKPTXAPTKL:SATS:LRKHR:NMVVRSXGXH, YVPKPXXAPTKL:SATS:LRKHR:NMVVRSXGXH, TVPKPXXAPTQL:SATS:LRKHR:NMVVRAXGXH, KVGKAXXVPTKL:SATS:LRKHR:EGMSVAEXGXR, KASKAXXVPTKL:SATS:LRKHR:GMAVSEXGXR, GSAGPXXTPTKM:SATS:LRKHR:GMVVDRXGXS, AAPASXXVPARL:SATS:LRKHR:DMVVEAXGXR, STPPTXXVPTRL:SATS:LRKHR:DMVVESXGXR, HVPKPXXAPTKL:SATS:LRKHR:NMVVRSXGXH, RVPSTXXAPVKT:SATS:LRKHR:MIVEEXGXL, ASAAPXXVPQAL:SATS:LRKHR:MIVRSXKXS, ASASPSSVSQDL:SATS:LRKHR:MIVKSXKXS, ASASPXXVPQDL:SATS:LRKHR:MVVKSXKXS, NDEGLEXVPTEE:SATS:LRKHR:FLQHNKXEXR, NDEGLEXVPTGQ:SATS:LRKHR:LEEHSQXEXR, SSVKXQPSRVHH:SATS:LRKHR:RLEEHLEXAXA, RNVQXRPTQVQL:SATS:LRKHR:TLEDHLAXKXE, KIPKAXXVPTEL:SPIS:LKYHY:DMVAEGXGXR, GIPEPXXVPTKM:SPIS:LKYHY:NMVAESXAXR, SIPKAXXVPTEL:SPIS:LKYHY:EMVAEGXGXR, HVTKPTXVPTKL:SPIS:LKYHY:NMVAESXGXH, YVPKPXXVPTKL:SPIS:LKYHY:NMVAESXGXH, TVPKPXXVPTQL:SPIS:LKYHY:NMVAEAXGXH, AVPKAXXVPTKL:SPIS:LKYHY:NMVAEAXGXH, KASKAXXVPTKL:SPIS:LKYHY:GMVAEEXGXR, GSAGPXXVPTKM:SPIS:LKYHY:GMVAERXGXS, AAPASXXVPTRL:SPIS:LKYHY:DMVAEAXGXR, STPPTXXVPTRL:SPIS:LKYHY:DMVAESXGXR, HVPKPXXVPTKL:SPIS:LKYHY:NMVAESXGXH, RVPSTXXVPTKT:SPIS:LKYHY:MIVAEXGXL, ASAAPXXVPTAL:SPIS:LKYHY:MIVAEXKXS, ASASPXXVPTDL:SPIS:LKYHY:MIVAEXKXS, ASASPXXVPTDL:SPIS:LKYHY:MVVAEXKXS, KIPKAXXVPTEL:SPIS:LKYHY:DMVVEGXGXR, GIPEPXXVPEKM:SPIS:LKYHY:NMTVESXAXR, SIPKAXXVPTEL:SPIS:LKYHY:EMVVEGXGXR, HVTKPTXAPTKL:SPIS:LKYHY:NMVVRSXGXH, YVPKPXXAPTKL:SPIS:LKYHY:NMVVRSXGXH, TVPKPXXAPTQL:SPIS:LKYHY:NMVVRAXGXH, AVPKAXXAPTKL:SPIS:LKYHY:NMVVKAXGXH, KASKAXXVPTKL:SPIS:LKYHY:GMAVSEXGXR, GSAGPXXTPTKM:SPIS:LKYHY:GMVVDRXGXS, AAPASXXVPARL:SPIS:LKYHY:DMVVEAXGXR, STPPTXXVPTRL:SPIS:LKYHY:DMVVESXGXR, HVPKPXXAPTKL:SPIS:LKYHY:NMVVRSXGXH, RVPSTXXAPVKT:SPIS:LKYHY:MIVEEXGXL, ASAAPXXVPQAL:SPIS:LKYHY:MIVRSXKXS, ASASPSSVSQDL:SPIS:LKYHY:MIVKSXKXS, ASASPXXVPQDL:SPIS:LKYHY:MVVKSXKXS, NDEGLEXVPTEE:SPIS:LKYHY:FLQHNKXEXR, NDEGLEXVPTGQ:SPIS:LKYHY:LEEHSQXEXR, SSVKXQPSRVHH:SPIS:LKYHY:RLEEHLEXAXA, RNVQXRPTQVQL:SPIS:LKYHY:TLEDHLAXKXE, KIPKAXXVPTEL:EPIS:KFKYE:DMAVXGXGSR, GIPEPXXVPTKM:EPIS:KFKYE:NMAVSSXAXR, SIPKAXXVPTEL:EPIS:KFKYE:EMAVXGXGSR, HVTKPTXVPTKL:EPIS:KFKYE:NMAVSSXGXH, YVPKPXXVPTKL:EPIS:KFKYE:NMAVSSXGXH, TVPKPXXVPTQL:EPIS:KFKYE:NMAVSAXGXH, AVPKAXXVPTKL:EPIS:KFKYE:NMAVSAXGXH, KVGKAXXVPTKL:EPIS:KFKYE:EGMSAVSXGXR, GSAGPXXVPTKM:EPIS:KFKYE:GMAVSRXGXS, AAPASXXVPTRL:EPIS:KFKYE:DMAVSAXGXR, STPPTXXVPTRL:EPIS:KFKYE:DMAVSSXGXR, HVPKPXXVPTKL:EPIS:KFKYE:NMAVSSXGXH, RVPSTXXVPTKT:EPIS:KFKYE:MIAVSXGXL, ASAAPXXVPTAL:EPIS:KFKYE:MIAVSXKXS, ASASPXXVPTDL:EPIS:KFKYE:MIAVSXKXS, ASASPXXVPTDL:EPIS:KFKYE:MVAVSXKXS, KIPKAXXVPTEL:EPIS:KFKYE:DMVVEGXGXR, GIPEPXXVPEKM:EPIS:KFKYE:NMTVESXAXR, SIPKAXXVPTEL:EPIS:KFKYE:EMVVEGXGXR, HVTKPTXAPTKL:EPIS:KFKYE:NMVVRSXGXH, YVPKPXXAPTKL:EPIS:KFKYE:NMVVRSXGXH, TVPKPXXAPTQL:EPIS:KFKYE:NMVVRAXGXH, AVPKAXXAPTKL:EPIS:KFKYE:NMVVKAXGXH, KVGKAXXVPTKL:EPIS:KFKYE:EGMSVAEXGXR, GSAGPXXTPTKM:E PIS:KFKYE:GMVVDRXGXS, AAPASXXVPARL:EPIS:KFKYE:DMVVEAXGXR, STPPTXXVPTRL:EPIS:KFKYE:DMVVESXGXR, HVPKPXXAPTKL:EPIS:KFKYE:NMVVRSXGXH, RVPSTXXAPVKT:EPIS:KFKYE:MIVEEXGXL, ASAAPXXVPQAL:EPIS:KFKYE:MIVRSXKXS, ASASPSSVSQDL:EPIS:KFKYE:MIVKSXKXS, ASASPXXVPQDL:EPIS:KFKYE:MVVKSXKXS, NDEGLEXVPTEE:EPIS:KFKYE:FLQHNKXEXR, NDEGLEXVPTGQ:EPIS:KFKYE:LEEHSQXEXR, SSVKXQPSRVHH:EPIS:KFKYE:RLEEHLEXAXA, RNVQXRPTQVQL:EPIS:KFKYE:TLEDHLAXKXE, KIPKAXXTPTEL:SPIN:YGKIP:DMVVDGXGXR, GIPEPXXTPTKM:SPIN:YGKIP:NMVVDSXAXR, SIPKAXXTPTEL:SPIN:YGKIP:EMVVDGXGXR, HVTKPTXTPTKL:SPIN:YGKIP:NMVVDSXGXH, YVPKPXXTPTKL:SPIN:YGKIP:NMVVDSXGXH, TVPKPXXTPTQL:SPIN:YGKIP:NMVVDAXGXH, AVPKAXXTPTKL:SPIN:YGKIP:NMVVDAXGXH, KVGKAXXTPTKL:SPIN:YGKIP:EGMSVVDXGXR, KASKAXXTPTKL:SPIN:YGKIP:GMVVDEXGXR, AAPASXXTPTRL:SPIN:YGKIP:DMVVDAXGXR, STPPTXXTPTRL:SPIN:YGKIP:DMVVDSXGXR, HVPKPXXTPTKL:SPIN:YGKIP:NMVVDSXGXH, RVPSTXXTPTKT:SPIN:YGKIP:MIVVDXGXL, ASAAPXXTPTAL:SPIN:YGKIP:MIVVDXKXS, ASASPXXTPTDL:SPIN:YGKIP:MIVVDXKXS, ASASPXXTPTDL:SPIN:YGKIP:MVVVDXKXS, KIPKAXXVPTEL:SPIN:YGKIP:DMVVEGXGXR, GIPEPXXVPEKM:SPIN:YGKIP:NMTVESXAXR, SIPKAXXVPTEL:SPIN:YGKIP:EMVVEGXGXR, HVTKPTXAPTKL:SPIN:YGKIP:NMVVRSXGXH, YVPKPXXAPTKL:SPIN:YGKIP:NMVVRSXGXH, TVPKPXXAPTQL:SPIN:YGKIP:NMVVRAXGXH, AVPKAXXAPTKL:SPIN:YGKIP:NMVVKAXGXH, KVGKAXXVPTKL:SPIN:YGKIP:EGMSVAEXGXR, KASKAXXVPTKL:SPIN:YGKIP:GMAVSEXGXR, AAPASXXVPARL:SPIN:YGKIP:DMVVEAXGXR, STPPTXXVPTRL:SPIN:YGKIP:DMVVESXGXR, HVPKPXXAPTKL:SPIN:YGKIP:NMVVRSXGXH, RVPSTXXAPVKT:SPIN:YGKIP:MIVEEXGXL, ASAAPXXVPQAL:SPIN:YGKIP:MIVRSXKXS, ASASPSSVSQDL:SPIN:YGKIP:MIVKSXKXS, ASASPXXVPQDL:SPIN:YGKIP:MVVKSXKXS, NDEGLEXVPTEE:SPIN:YGKIP:FLQHNKXEXR, NDEGLEXVPTGQ:SPIN:YGKIP:LEEHSQXEXR, SSVKXQPSRVHH:SPIN:YGKIP:RLEEHLEXAXA, RNVQXRPTQVQL:SPIN:YGKIP:TLEDHLAXKXE, KIPKAXXVPAEL:SPIS:YKQYE:DMVVEGXGXR, GIPEPXXVPAKM:SPIS:YKQYE:NMVVESXAXR, SIPKAXXVPAEL:SPIS:YKQYE:EMVVEGXGXR, HVTKPTXVPAKL:SPIS:YKQYE:NMVVESXGXH, YVPKPXXVPAKL:SPIS:YKQYE:NMVVESXGXH, TVPKPXXVPAQL:SPIS:YKQYE:NMVVEAXGXH, AVPKAXXVPAKL:SPIS:YKQYE:NMVVEAXGXH, KVGKAXXVPAKL:SPIS:YKQYE:EGMSVVEXGXR, KASKAXXVPAKL:SPIS:YKQYE:GMVVEEXGXR, GSAGPXXVPAKM:SPIS:YKQYE:GMVVERXGXS, STPPTXXVPARL:SPIS:YKQYE:DMVVESXGXR, HVPKPXXVPAKL:SPIS:YKQYE:NMVVESXGXH, RVPSTXXVPAKT:SPIS:YKQYE:MIVVEXGXL, ASAAPXXVPAAL:SPIS:YKQYE:MIVVEXKXS, ASASPXXVPADL:SPIS:YKQYE:MIVVEXKXS, ASASPXXVPADL:SPIS:YKQYE:MVVVEXKXS, KIPKAXXVPTEL:SPIS:YKQYE:DMVVEGXGXR, GIPEPXXVPEKM:SPIS:YKQYE:NMTVESXAXR, SIPKAXXVPTEL:SPIS:YKQYE:EMVVEGXGXR, HVTKPTXAPTKL:SPIS:YKQYE:NMVVRSXGXH, YVPKPXXAPTKL:SPIS:YKQYE:NMVVRSXGXH, TVPKPXXAPTQL:SPIS:YKQYE:NMVVRAXGXH, AVPKAXXAPTKL:SPIS:YKQYE:NMVVKAXGXH, KVGKAXXVPTKL:SPIS:YKQYE:EGMSVAEXGXR, KASKAXXVPTKL:SPIS:YKQYE:GMAVSEXGXR, GSAGPXXTPTKM:SPIS:YKQYE:GMVVDRXGXS, STPPTXXVPTRL:SPIS:YKQYE:DMVVESXGXR, HVPKPXXAPTKL:SPIS:YKQYE:NMVVRSXGXH, RVPSTXXAPVKT:SPIS:YKQYE:MIVEEXGXL, ASAAPXXVPQAL:SPIS:YKQYE:MIVRSXKXS, ASASPSSVSQDL:SPIS:YKQYE:MIVKSXKXS, ASASPXXVPQDL:SPIS:YKQYE:MVVKSXKXS, NDEGLEXVPTEE:SPIS:YKQYE:FLQHNKXEXR, NDEGLEXVPTGQ:SPIS:YKQYE:LEEHSQXEXR, SSVKXQPSRVHH:SPIS:YKQYE:RLEEHLEXAXA, RNVQXRPTQVQL:SPIS:YKQYE:TLEDHLAXKXE, GIPEPXXVPTKM:SPIS:YKQYE:NMVVESXAXR, HVTKPTXVPTKL:SPIS:YKQYE:NMVVESXGXH, YVPKPXXVPTKL:SPIS:YKQYE:NMVVESXGXH, TVPKPXXVPTQL:SPIS:YKQYE:NMVVEAXGXH, AVPKAXXVPTKL:SPIS:YKQYE:NMVVEAXGXH, KVGKAXXVPTKL:SPIS:YKQYE:EGMSVVEXGXR, KASKAXXVPTKL:SPIS:YKQYE:GMVVEEXGXR, GSAGPXXVPTKM:SPIS:YKQYE:GMVVERXGXS, AAPASXXVPTRL:SPIS:YKQYE:DMVVEAXGXR, HVPKPXXVPTKL:SPIS:YKQYE:NMVVESXGXH, RVPSTXXVPTKT:SPIS:YKQYE:MIVVEXGXL, ASAAPXXVPTAL:SPIS:YKQYE:MIVVEXKXS, ASASPXXVPTDL:SPIS:YKQYE:MIVVEXKXS, ASASPXXVPTDL:SPIS:YKQYE:MVVVEXKXS, AAPASXXVPARL:SPIS:YKQYE:DMVVEAXGXR, KIPKAXXAPVEL:KPLS:DHHKD:DMVEEGXGXR, GIPEPXXAPVKM:KPLS:DHHKD:NMVEESXAXR, SIPKAXXAPVEL:KPLS:DHHKD:EMVEEGXGXR, HVTKPTXAPVKL:KPLS:DHHKD:NMVEESXGXH, YVPKPXXAPVKL:KPLS:DHHKD:NMVEESXGXH, TVPKPXXAPVQL:KPLS:DHHKD:NMVEEAXGXH, AVPKAXXAPVKL:KPLS:DHHKD:NMVEEAXGXH, KVGKAXXAPVKL:KPLS:DHHKD:EGMSVEEXGXR, KASKAXXAPVKL:KPLS:DHHKD:GMVEEEXGXR, GSAGPXXAPVKM:KPLS:DHHKD:GMVEERXGXS, AAPASXXAPVRL:KPLS:DHHKD:DMVEEAXGXR, STPPTXXAPVRL:KPLS:DHHKD:DMVEESXGXR, HVPKPXXAPVKL:KPLS:DHHKD:NMVEESXGXH, ASAAPXXAPVAL:KPLS:DHHKD:MIVEEXKXS, ASASPXXAPVDL:KPLS:DHHKD:MIVEEXKXS, ASASPXXAPVDL:KPLS:DHHKD:MVVEEXKXS, KIPKAXXVPTEL:KPLS:DHHKD:DMVVEGXGXR, GIPEPXXVPEKM:KPLS:DHHKD:NMTVESXAXR, SIPKAXXVPTEL:KPLS:DHHKD:EMVVEGXGXR, HVTKPTXAPTKL:KPLS:DHHKD:NMVVRSXGXH, YVPKPXXAPTKL:KPLS:DHHKD:NMVVRSXGXH, TVPKPXXAPTQL:KPLS:DHHKD:NMVVRAXGXH, AVPKAXXAPTKL:KPLS:DHHKD:NMVVKAXGXH, KVGKAXXVPTKL:KPLS:DHHKD:EGMSVAEXGXR, KASKAXXVPTKL:KPLS:DHHKD:GMAVSEXGXR, GSAGPXXTPTKM:KPLS:DHHKD:GMVVDRXGXS, AAPASXXVPARL:KPLS:DHHKD:DMVVEAXGXR, STPPTXXVPTRL:KPLS:DHHKD:DMVVESXGXR, HVPKPXXAPTKL:KPLS:DHHKD:NMVVRSXGXH, ASAAPXXVPQAL:KPLS:DHHKD:MIVRSXKXS, ASASPSSVSQDL:KPLS:DHHKD:MIVKSXKXS, ASASPXXVPQDL:KPLS:DHHKD:MVVKSXKXS, NDEGLEXVPTEE:KPLS:DHHKD:FLQHNKXEXR, NDEGLEXVPTGQ:KPLS:DHHKD:LEEHSQXEXR, SSVKXQPSRVHH:KPLS:DHHKD:RLEEHLEXAXA, RNVQXRPTQVQL:KPLS:DHHKD:TLEDHLAXKXE, KIPKAXXVPQEL:EPLP:EQLSN:DMVRXGXGSR, GIPEPXXVPQKM:EPLP:EQLSN:NMVRSSXAXR, SIPKAXXVPQEL:EPLP:EQLSN:EMVRXGXGSR, HVTKPTXVPQKL:EPLP:EQLSN:NMVRSSXGXH, YVPKPXXVPQKL:EPLP:EQLSN:NMVRSSXGXH, TVPKPXXVPQQL:EPLP:EQLSN:NMVRSAXGXH, AVPKAXXVPQKL:EPLP:EQLSN:NMVRSAXGXH, KVGKAXXVPQKL:EPLP:EQLSN:EGMSVRSXGXR, KASKAXXVPQKL:EPLP:EQLSN:GMVRSEXGXR, GSAGPXXVPQKM:EPLP:EQLSN:GMVRSRXGXS, AAPASXXVPQRL:EPLP:EQLSN:DMVRSAXGXR, STPPTXXVPQRL:EPLP:EQLSN:DMVRSSXGXR, HVPKPXXVPQKL:EPLP:EQLSN:NMVRSSXGXH, RVPSTXXVPQKT:EPLP:EQLSN:MIVRSXGXL, ASASPXXVPQDL:EPLP:EQLSN:MIVRSXKXS, ASASPXXVPQDL:EPLP:EQLSN:MVVRSXKXS, KIPKAXXVPTEL:EPLP:EQLSN:DMVVEGXGXR, GIPEPXXVPEKM:EPLP:EQLSN:NMTVESXAXR, SIPKAXXVPTEL:EPLP:EQLSN:EMVVEGXGXR, HVTKPTXAPTKL:EPLP:EQLSN:NMVVRSXGXH, YVPKPXXAPTKL:EPLP:EQLSN:NMVVRSXGXH, TVPKPXXAPTQL:EPLP:EQLSN:NMVVRAXGXH, AVPKAXXAPTKL:EPLP:EQLSN:NMVVKAXGXH, KVGKAXXVPTKL:EPLP:EQLSN:EGMSVAEXGXR, KASKAXXVPTKL:EPLP:EQLSN:GMAVSEXGXR, GSAGPXXTPTKM:EPLP:EQLSN:GMVVDRXGXS, AAPASXXVPARL:EPLP:EQLSN:DMVVEAXGXR, STPPTXXVPTRL:EPLP:EQLSN:DMVVESXGXR, HVPKPXXAPTKL:EPLP:EQLSN:NMVVRSXGXH, RVPSTXXAPVKT:EPLP:EQLSN:MIVEEXGXL, ASASPSSVSQDL:EPLP:EQLSN:MIVKSXKXS, ASASPXXVPQDL:EPLP:EQLSN:MVVKSXKXS, NDEGLEXVPTEE:EPLP:EQLSN:FLQHNKXEXR, NDEGLEXVPTGQ:EPLP:EQLSN:LEEHSQXEXR, SSVKXQPSRVHH:EPLP:EQLSN:RLEEHLEXAXA, RNVQXRPTQVQL:EPLP:EQLSN:TLEDHLAXKXE, KIPKASSVSQEL:EPLT:EQLSN:DMVKXGXGSR, GIPEPSSVSQKM:EPLT:EQLSN:NMVKSSXAXR, SIPKASSVSQEL:EPLT:EQLSN:EMVKXGXGSR, HVTKPTXVSQKL:EPLT:EQLSN:NMVKSSXGXH, YVPKPSSVSQKL:EPLT:EQLSN:NMVKSSXGXH, TVPKPSSVSQQL:EPLT:EQLSN:NMVKSAXGXH, AVPKASSVSQKL:EPLT:EQLSN:NMVKSAXGXH, KVGKASSVSQKL:EPLT:EQLSN:EGMSVKSXGXR, KASKASSVSQKL:EPLT:EQLSN:GMVKSEXGXR, GSAGPSSVSQKM:EPLT:EQLSN:GMVKSRXGXS, AAPASSSVSQRL:EPLT:EQLSN:DMVKSAXGXR, STPPTSSVSQRL:EPLT:EQLSN:DMVKSSXGXR, HVPKPSSVSQKL:EPLT:EQLSN:NMVKSSXGXH, RVPSTSSVSQKT:EPLT:EQLSN:MIVKSXGXL, ASAAPSSVSQAL:EPLT:EQLSN:MIVKSXKXS, ASASPSSVSQDL:EPLT:EQLSN:MVVKSXKXS, KIPKAXXVPTEL:EPLT:EQLSN:DMVVEGXGXR, GIPEPXXVPEKM:EPLT:EQLSN:NMTVESXAXR, SIPKAXXVPTEL:EPLT:EQLSN:EMVVEGXGXR, HVTKPTXAPTKL:EPLT:EQLSN:NMVVRSXGXH, YVPKPXXAPTKL:EPLT:EQLSN:NMVVRSXGXH, TVPKPXXAPTQL:EPLT:EQLSN:NMVVRAXGXH, AVPKAXXAPTKL:EPLT:EQLSN:NMVVKAXGXH, KVGKAXXVPTKL:EPLT:EQLSN:EGMSVAEXGXR, KASKAXXVPTKL:EPLT:EQLSN:GMAVSEXGXR, GSAGPXXTPTKM:EPLT:EQLSN:GMVVDRXGXS, AAPASXXVPARL:EPLT:EQLSN:DMVVEAXGXR, STPPTXXVPTRL:EPLT:EQLSN:DMVVESXGXR, HVPKPXXAPTKL:EPLT:EQLSN:NMVVRSXGXH, RVPSTXXAPVKT:EPLT:EQLSN:MIVEEXGXL, ASAAPXXVPQAL:EPLT:EQLSN:MIVRSXKXS, NDEGLEXVPTEE:EPLT:EQLSN:FLQHNKXEXR, NDEGLEXVPTGQ:EPLT:EQLSN:LEEHSQXEXR, SSVKXQPSRVHH:EPLT:EQLSN:RLEEHLEXAXA, RNVQXRPTQVQL:EPLT:EQLSN:TLEDHLAXKXE, KIPKAXXVPQEL:EPLT:EQLSN:DMVKXGXGSR, GIPEPXXVPQKM:EPLT:EQLSN:NMVKSSXAXR, SIPKAXXVPQEL:EPLT:EQLSN:EMVKXGXGSR, HVTKPTXVPQKL:EPLT:EQLSN:NMVKSSXGXH, YVPKPXXVPQKL:EPLT:EQLSN:NMVKSSXGXH, TVPKPXXVPQQL:EPLT:EQLSN:NMVKSAXGXH, AVPKAXXVPQKL:EPLT:EQLSN:NMVKSAXGXH, KVGKAXXVPQKL:EPLT:EQLSN:EGMSVKSXGXR, KASKAXXVPQKL:EPLT:EQLSN:GMVKSEXGXR, GSAGPXXVPQKM:EPLT:EQLSN:GMVKSRXGXS, AAPASXXVPQRL:EPLT:EQLSN:DMVKSAXGXR, STPPTXXVPQRL:EPLT:EQLSN:DMVKSSXGXR, HVPKPXXVPQKL:EPLT:EQLSN:NMVKSSXGXH, RVPSTXXVPQKT:EPLT:EQLSN:MIVKSXGXL, ASAAPXXVPQAL:EPLT:EQLSN:MIVKSXKXS, ASASPXXVPQDL:EPLT:EQLSN:MIVKSXKXS, NDEGLEXVPTGQ:SNIT:IGEMS:LEQHNQXEXR, KIPKAXXVPTEL:SNIT:IGEMS:DMVVEGXGXR, GIPEPXXVPEKM:SNIT:IGEMS:NMTVESXAXR, SIPKAXXVPTEL:SNIT:IGEMS:EMVVEGXGXR, HVTKPTXAPTKL:SNIT:IGEMS:NMVVRSXGXH, YVPKPXXAPTKL:SNIT:IGEMS:NMVVRSXGXH, TVPKPXXAPTQL:SNIT:IGEMS:NMVVRAXGXH, AVPKAXXAPTKL:SNIT:IGEMS:NMVVKAXGXH, KVGKAXXVPTKL:SNIT:IGEMS:EGMSVAEXGXR, KASKAXXVPTKL:SNIT:IGEMS:GMAVSEXGXR, GSAGPXXTPTKM:SNIT:IGEMS:GMVVDRXGXS, AAPASXXVPARL:SNIT:IGEMS:DMVVEAXGXR, STPPTXXVPTRL:SNIT:IGEMS:DMVVESXGXR, HVPKPXXAPTKL:SNIT:IGEMS:NMVVRSXGXH, RVPSTXXAPVKT:SNIT:IGEMS:MIVEEXGXL, ASAAPXXVPQAL:SNIT:IGEMS:MIVRSXKXS, ASASPSSVSQDL:SNIT:IGEMS:MIVKSXKXS, ASASPXXVPQDL:SNIT:IGEMS:MVVKSXKXS, NDEGLEXVPTGQ:SNIT:IGEMS:LEEHSQXEXR, SSVKXQPSRVHH:SNIT:IGEMS:RLEEHLEXAXA, RNVQXRPTQVQL:SNIT:IGEMS:TLEDHLAXKXE, NDEGLEXVPTEE:SNIT:LGEMS:FLEHXKXESR, KIPKAXXVPTEL:SNIT:LGEMS:DMVVEGXGXR, GIPEPXXVPEKM:SNIT:LGEMS:NMTVESXAXR, SIPKAXXVPTEL:SNIT:LGEMS:EMVVEGXGXR, HVTKPTXAPTKL:SNIT:LGEMS:NMVVRSXGXH, YVPKPXXAPTKL:SNIT:LGEMS:NMVVRSXGXH, TVPKPXXAPTQL:SNIT:LGEMS:NMVVRAXGXH, AVPKAXXAPTKL:SNIT:LGEMS:NMVVKAXGXH, KVGKAXXVPTKL:SNIT:LGEMS:EGMSVAEXGXR, KASKAXXVPTKL:SNIT:LGEMS:GMAVSEXGXR, GSAGPXXTPTKM:SNIT:LGEMS:GMVVDRXGXS, AAPASXXVPARL:SNIT:LGEMS:DMVVEAXGXR, STPPTXXVPTRL:SNIT:LGEMS:DMVVESXGXR, HVPKPXXAPTKL:SNIT:LGEMS:NMVVRSXGXH, RVPSTXXAPVKT:SNIT:LGEMS:MIVEEXGXL, ASAAPXXVPQAL:SNIT:LGEMS:MIVRSXKXS, ASASPSSVSQDL:SNIT:LGEMS:MIVKSXKXS, ASASPXXVPQDL:SNIT:LGEMS:MVVKSXKXS, NDEGLEXVPTEE:SNIT:LGEMS:FLQHNKXEXR, SSVKXQPSRVHH:SNIT:LGEMS:RLEEHLEXAXA, RNVQXRPTQVQL:SNIT:LGEMS:TLEDHLAXKXE, RNVQXRPSRVQL:RSVK:KEVQV:TLEEHLAXKXE, KIPKAXXVPTEL:RSVK:KEVQV:DMVVEGXGXR, GIPEPXXVPEKM:RSVK:KEVQV:NMTVESXAXR, SIPKAXXVPTEL:RSVK:KEVQV:EMVVEGXGXR, HVTKPTXAPTKL:RSVK:KEVQV:NMVVRSXGXH, YVPKPXXAPTKL:RSVK:KEVQV:NMVVRSXGXH, TVPKPXXAPTQL:RSVK:KEVQV:NMVVRAXGXH, AVPKAXXAPTKL:RSVK:KEVQV:NMVVKAXGXH, KVGKAXXVPTKL:RSVK:KEVQV:EGMSVAEXGXR, KASKAXXVPTKL:RSVK:KEVQV:GMAVSEXGXR, GSAGPXXTPTKM:RSVK:KEVQV:GMVVDRXGXS, AAPASXXVPARL:RSVK:KEVQV:DMVVEAXGXR, STPPTXXVPTRL:RSVK:KEVQV:DMVVESXGXR, HVPKPXXAPTKL:RSVK:KEVQV:NMVVRSXGXH, RVPSTXXAPVKT:RSVK:KEVQV:MIVEEXGXL, ASAAPXXVPQAL:RSVK:KEVQV:MIVRSXKXS, ASASPSSVSQDL:RSVK:KEVQV:MIVKSXKXS, ASASPXXVPQDL:RSVK:KEVQV:MVVKSXKXS, NDEGLEXVPTEE:RSVK:KEVQV:FLQHNKXEXR, NDEGLEXVPTGQ:RSVK:KEVQV:LEEHSQXEXR, RNVQXRPTQVQL:RSVK:KEVQV:TLEDHLAXKXE, SSVKXQPTQVHH:RPVQ:KKATV:RLEDHLEXAXA, KIPKAXXVPTEL:RPVQ:KKATV:DMVVEGXGXR, GIPEPXXVPEKM:RPVQ:KKATV:NMTVESXAXR, SIPKAXXVPTEL:RPVQ:KKATV:EMVVEGXGXR, HVTKPTXAPTKL:RPVQ:KKATV:NMVVRSXGXH, YVPKPXXAPTKL:RPVQ:KKATV:NMVVRSXGXH, TVPKPXXAPTQL:RPVQ:KKATV:NMVVRAXGXH, AVPKAXXAPTKL:RPVQ:KKATV:NMVVKAXGXH, KVGKAXXVPTKL:RPVQ:KKATV:EGMSVAEXGXR, KASKAXXVPTKL:RPVQ:KKATV:GMAVSEXGXR, GSAGPXXTPTKM:RPVQ:KKATV:GMVVDRXGXS, AAPASXXVPARL:RPVQ:KKATV:DMVVEAXGXR, STPPTXXVPTRL:RPVQ:KKATV:DMVVESXGXR, HVPKPXXAPTKL:RPVQ:KKATV:NMVVRSXGXH, RVPSTXXAPVKT:RPVQ:KKATV:MIVEEXGXL, ASAAPXXVPQAL:RPVQ:KKATV:MIVRSXKXS, ASASPSSVSQDL:RPVQ:KKATV:MIVKSXKXS, ASASPXXVPQDL:RPVQ:KKATV:MVVKSXKXS, NDEGLEXVPTEE:RPVQ:KKATV:FLQHNKXEXR, NDEGLEXVPTGQ:RPVQ:KKATV:LEEHSQXEXR and SSVKXQPSRVHH:RPVQ:KKATV:RLEEHLEXAXA.

[0366] In particular, in certain embodiments, the quadruplet PEP9:PEP12:PEP2:PEP10 is selected from the group consisting of GIPEPXXVPTKM:SAIS-AA¹⁷-LYL:LKNYQ:NMVVESXAXR, SIPKAXXVPTEL:SAIS-AA¹⁷-LYL:LKNYQ:EMVVEGXGXR, HVTKPTXVPTKL:SAIS-AA¹⁷-LYL:LKNYQ:NMVVESXGXH, YVPKPXXVPTKL:SAIS-AA¹⁷-LYL:LKNYQ:NMVVESXGXH, TVPKPXXVPTQL:SAIS-AA¹⁷-LYL:LKNYQ:NMVVEAXGXH, AVPKAXXVPTKL:SAIS-AA¹⁷-LYL:LKNYQ:NMVVEAXGXH, KVGKAXXVPTKL:SAIS-AA¹⁷-LYL:LKNYQ:EGMSVVEXGXR, KASKAXXVPTKL:SAIS-AA¹⁷-LYL:LKNYQ:GMVVEEXGXR, GSAGPXXVPTKM:SAIS-AA¹⁷-LYL:LKNYQ:GMVVERXGXS, AAPASXXVPTRL:SAIS-AA¹⁷-LYL:LKNYQ:DMVVEAXGXR, STPPTXXVPTRL:SAIS-AA¹⁷-LYL:LKNYQ:DMVVESXGXR, HVPKPXXVPTKL:SAIS-AA¹⁷-LYL:LKNYQ:NMVVESXGXH, RVPSTXXVPTKT:SAIS-AA¹⁷-LYL:LKNYQ:MIVVEXGXL, ASAAPXXVPTAL:SAIS-AA¹⁷-LYL:LKNYQ:MIVVEXKXS, ASASPXXVPTDL:SAIS-AA¹⁷-LYL:LKNYQ:MIVVEXKXS, ASASPXXVPTDL:SAIS-AA¹⁷-LYL:LKNYQ:MVVVEXKXS, NDEGLEXVPTEE:SAIS-AA¹⁷-LYL:LKNYQ:FLVVEKXEXR, NDEGLEXVPTGQ:SAIS-AA¹⁷-LYL:LKNYQ:LEVVEQXEXR, SSVKXQPVPTHH:SAIS-AA¹⁷-LYL:LKNYQ:RLVVELEXAXA, RNVQXRPVPTQL:SAIS-AA¹⁷-LYL:LKNYQ:TLVVELAXKXE, GIPEPXXVPEKM:SAIS-AA¹⁷-LYL:LKNYQ:NMTVESXAXR, HVTKPTXAPTKL:SAIS-AA¹⁷-LYL:LKNYQ:NMVVRSXGXH, YVPKPXXAPTKL:SAIS-AA¹⁷-LYL:LKNYQ:NMVVRSXGXH, TVPKPXXAPTQL:SAIS-AA¹⁷-LYL:LKNYQ:NMVVRAXGXH, AVPKAXXAPTKL:SAIS-AA¹⁷-LYL:LKNYQ:NMVVKAXGXH, KVGKAXXVPTKL:SAIS-AA¹⁷-LYL:LKNYQ:EGMSVAEXGXR, KASKAXXVPTKL:SAIS-AA¹⁷-LYL:LKNYQ:GMAVSEXGXR, GSAGPXXTPTKM:SAIS-AA¹⁷-LYL:LKNYQ:GMVVDRXGXS, AAPASXXVPARL:SAIS-AA¹⁷-LYL:LKNYQ:DMVVEAXGXR, HVPKPXXAPTKL:SAIS-AA¹⁷-LYL:LKNYQ:NMVVRSXGXH, RVPSTXXAPVKT:SAIS-AA¹⁷-LYL:LKNYQ:MIVEEXGXL, ASAAPXXVPQAL:SAIS-AA¹⁷-LYL:LKNYQ:MIVRSXKXS, ASASPXXVSQDL:SAIS-AA¹⁷-LYL:LKNYQ:MIVKSXKXS, ASASPXXVPQDL:SAIS-AA¹⁷-LYL:LKNYQ:MVVKSXKXS, NDEGLEXVPTEE:SAIS-AA¹⁷-LYL:LKNYQ:FLQHNKXEXR, NDEGLEXVPTGQ:SAIS-AA¹⁷-LYL:LKNYQ:LEEHSQXEXR, SSVKXQPSRVHH:SAIS-AA¹⁷-LYL:LKNYQ:RLEEHLEXAXA, RNVQXRPTQVQL:SAIS-AA¹⁷-LYL:LKNYQ:TLEDHLAXKXE, KIPKAXXVPEEL:SSLS-AA¹⁷-LFF:LKVYP:DMTVEGXGXR, SIPKAXXVPEEL:SSLS-AA¹⁷-LFF:LKVYP:EMTVEGXGXR, HVTKPTXVPEKL:SSLS-AA¹⁷-LFF:LKVYP:NMTVESXGXH, YVPKPXXVPEKL:SSLS-AA¹⁷-LFF:LKVYP:NMTVESXGXH, TVPKPXXVPEQL:SSLS-AA¹⁷-LFF:LKVYP:NMTVEAXGXH, AVPKAXXVPEKL:SSLS-AA¹⁷-LFF:LKVYP:NMTVEAXGXH, KVGKAXXVPEKL:SSLS-AA¹⁷-LFF:LKVYP:EGMSTVEXGXR, KASKAXXVPEKL:SSLS-AA¹⁷-LFF:LKVYP:GMTVE EXGXR, GSAGPXXVPEKM:SSLS-AA¹⁷-LFF:LKVYP:GMTVERXGXS, AAPASXXVPERL:SSLS-AA¹⁷-LFF:LKVYP:DMTVEAXGXR, STPPTXXVPERL:SSLS-AA¹⁷-LFF:LKVYP:DMTVESXGXR, HVPKPXXVPEKL:SSLS-AA¹⁷-LFF:LKVYP:NMTVESXGXH, RVPSTXXVPEKT:SSLS-AA¹⁷-LFF:LKVYP:MITVEXGXL, ASAAPXXVPEAL:SSLS-AA¹⁷-LFF:LKVYP:MITVEXKXS, ASASPXXVPEDL:SSLS-AA¹⁷-LFF:LKVYP:MITVEXKXS, ASASPXXVPEDL:SSLS-AA¹⁷-LFF:LKVYP:MVTVEXKXS, NDEGLEXVPEEE:SSLS-AA¹⁷-LFF:LKVYP:FLTVEKXEXR, NDEGLEXVPEGQ:SSLS-AA¹⁷-LFF:LKVYP:LETVEQXEXR, SSVKXQPVPEHH:SSLS-AA¹⁷-LFF:LKVYP:RLTVELEXAXA, RNVQXRPVPEQL:SSLS-AA¹⁷-LFF:LKVYP:TLTVELAXKXE, KIPKAXXVPTEL:SSLS-AA¹⁷-LFF:LKVYP:DMVVEGXGXR, SIPKAXXVPTEL:SSLS-AA¹⁷-LFF:LKVYP:EMVVEGXGXR, HVTKPTXAPTKL:SSLS-AA¹⁷-LFF:LKVYP:NMVVRSXGXH, YVPKPXXAPTKL:SSLS-AA¹⁷-LFF:LKVYP:NMVVRSXGXH, TVPKPXXAPTQL:SSLS-AA¹⁷-LFF:LKVYP:NMVVRAXGXH, AVPKAXXAPTKL:SSLS-AA¹⁷-LFF:LKVYP:NMVVKAXGXH, KVGKAXXVPTKL:SSLS-AA¹⁷-LFF:LKVYP:EGMSVAEXGXR, KASKAXXVPTKL:SSLS-AA¹⁷-LFF:LKVYP:GMAVSEXGXR, GSAGPXXTPTKM:SSLS-AA¹⁷-LFF:LKVYP:GMVVDRXGXS, AAPASXXVPARL:SSLS-AA¹⁷-LFF:LKVYP:DMVVEAXGXR, STPPTXXVPTRL:SSLS-AA¹⁷-LFF:LKVYP:DMVVESXGXR, HVPKPXXAPTKL:SSLS-AA¹⁷-LFF:LKVYP:NMVVRSXGXH, RVPSTXXAPVKT:SSLS-AA¹⁷-LFF:LKVYP:MIVEEXGXL, ASAAPXXVPQAL:SSLS-AA¹⁷-LFF:LKVYP:MIVRSXKXS, ASASPXXVSQDL:SSLS-AA¹⁷-LFF:LKVYP:MIVKSXKXS, ASASPXXVPQDL:SSLS-AA¹⁷-LFF:LKVYP:MVVKSXKXS, NDEGLEXVPTEE:SSLS-AA¹⁷-LFF:LKVYP:FLQHNKXEXR, NDEGLEXVPTGQ:SSLS-AA¹⁷-LFF:LKVYP:LEEHSQXEXR, SSVKXQPSRVHH:SSLS-AA¹⁷-LFF:LKVYP:RLEEHLEXAXA, RNVQXRPTQVQL:SSLS-AA¹⁷-LFF:LKVYP:TLEDHLAXKXE, KIPKAXXVPTEL:SAIS-AA¹⁷-LYL:LKNYQ:DMVVEGXGXR, KIPKAXXAPTEL:NAIS-AA¹⁷-LYF:LKKYR:DMVVRGXGXR, GIPEPXXAPTKM:NAIS-AA¹⁷-LY^{F}:LKKYR:NMVVRSXAXR, SIPKAXXAPTEL:NAIS-AA¹⁷-LYF:LKKYR:EMVVRGXGXR, YVPKPXXAPTKL:NAIS-AA¹⁷-LYF:LKKYR:NMVVRSXGXH, TVPKPXXAPTQL:NAIS-AA¹⁷-LYF:LKKYR:NMVVRAXGXH, AVPKAXXAPTKL:NAIS-AA¹⁷-LYF:LKKYR:NMVVRAXGXH, KVGKAXXAPTKL:NAIS-AA¹⁷-LYF:LKKYR:EGMSVVRXGXR, KASKAXXAPTKL:NAIS-AA¹⁷-LYF:LKKYR:G MVVR EXGXR, GSAGPXXAPTKM:NAIS-AA¹⁷-LYF:LKKYR:GMVVRRXGXS, AAPASXXAPTRL:NAIS-AA¹⁷-LYF:LKKYR:DMVVRAXGXR, STPPTXXAPTRL:NAIS-AA¹⁷-LYF:LKKYR:DMVVRSXGXR, HVPKPXXAPTKL:NAIS-AA¹⁷-LYF:LKKYR:NMVVRSXGXH, RVPSTXXAPTKT:NAIS-AA¹⁷-LYF:LKKYR:MIVVRXGXL, ASAAPXXAPTAL:NAIS-AA¹⁷-LYF:LKKYR:MIVVRXKXS, ASASPXXAPTDL:NAIS-AA¹⁷-LYF:LKKYR:MIVVRXKXS, ASASPXXAPTDL:NAIS-AA¹⁷-LYF:LKKYR:MVVVRXKXS, NDEGLESAPTEE:NAIS-AA¹⁷-LYF:LKKYR:FLVVRKXEXR, NDEGLESAPTGQ:NAIS-AA¹⁷-LYF:LKKYR:LEVVRQXEXR, SSVKXQPAPTHH:NAIS-AA¹⁷-LYF:LKKYR:RLVVRLEXAXA, RNVQXRPAPTQL:NAIS-AA¹⁷-LYF:LKKYR:TLVVRLAXKXE, KIPKAXXVPTEL:NAIS-AA¹⁷-LYF:LKKYR:DMVVEGXGXR, GIPEPXXVPEKM:NAIS-AA¹⁷-LYF:LKKYR:NMTVESXAXR, SIPKAXXVPTEL:NAIS-AA¹⁷-LYF:LKKYR:EMVVEGXGXR, AVPKAXXAPTKL:NAIS-AA¹⁷-LYF:LKKYR:NMVVKAXGXH, KVGKAXXVPTKL:NAIS-AA¹⁷-LYF:LKKYR:EGMSVAEXGXR, KASKAXXVPTKL:NAIS-AA¹⁷-LYF:LKKYR:GMAVSEXGXR, GSAGPXXTPTKM:NAIS-AA¹⁷-LYF:LKKYR:GMVVDRXGXS, AAPASXXVPARL:NAIS-AA¹⁷-LYF:LKKYR:DMVVEAXGXR, STPPTXXVPTRL:NAIS-AA¹⁷-LYF:LKKYR:DMVVESXGXR, RVPSTXXAPVKT:NAIS-AA¹⁷-LYF:LKKYR:MIVE EXGXL, ASAAPXXVPQAL:NAIS-AA¹⁷-LYF:LKKYR:MIVRSXKXS, ASASPXXVSQDL:NAIS-AA¹⁷-LYF:LKKYR:MIVKSXKXS, ASASPXXVPQDL:NAIS-AA¹⁷-LYF:LKKYR:MVVKSXKXS, NDEGLEXVPTEE:NAIS-AA¹⁷-LYF:LKKYR:FLQHNKXEXR, NDEGLEXVPTGQ:NAIS-AA¹⁷-LYF:LKKYR:LEEHSQXEXR, SSVKXQPSRVHH:NAIS-AA¹⁷-LYF:LKKYR:RLEEHLEXAXA, RNVQXRPTQVQL:NAIS-AA¹⁷-LYF:LKKYR:TLEDHLAXKXE, HVTKPTXAPTKL:NAIS-AA¹⁷-LYF:LKKYR:NMVVRSXGXH, KIPKAXXAPTEL:SATS-AA¹⁷-LYY:LRKHR:DMVVKGXGXR, GIPEPXXAPTKM:SATS-AA¹⁷-LYY:LRKHR:NMVVKSXAXR, SIPKAXXAPTEL:SATS-AA¹⁷-LYY:LRKHR:EMVVKGXGXR, HVTKPTXAPTKL:SATS-AA¹⁷-LYY:LRKHR:NMVVKSXGXH, YVPKPXXAPTKL:SATS-AA¹⁷-LYY:LRKHR:NMVVKSXGXH, TVPKPXXAPTQL:SATS-AA¹⁷-LYY:LRKHR:NMVVKAXGXH, KVGKAXXAPTKL:SATS-AA¹⁷-LYY:LRKHR:EGMSVVKXGXR, KASKAXXAPTKL:SATS-AA¹⁷-LYY:LRKHR:GMVVKEXGXR, GSAGPXXAPTKM:SATS-AA¹⁷-LYY:LRKHR:GMVVKRXGXS, AAPASXXAPTRL:SATS-AA¹⁷-LYY:LRKHR:DMVVKAXGXR, STPPTXXAPTRL:SATS-AA¹⁷-LYY:LRKHR:DMVVKSXGXR, HVPKPXXAPTKL:SATS-AA¹⁷-LYY:LRKHR:NMVVKSXGXH, RVPSTXXAPTKT:SATS-AA¹⁷-LYY:LRKHR:MIVVKXGXL, ASAAPXXAPTAL:SATS-AA¹⁷-LYY:LRKHR:MIVVKXKXS, ASASPXXAPTDL:SATS-AA¹⁷-LYY:LRKHR:MIVVKXKXS, ASASPXXAPTDL:SATS-AA¹⁷-LYY:LRKHR:MVVVKXKXS, NDEGLESAPTEE:SATS-AA¹⁷-LYY:LRKHR:FLVVKKXEXR, NDEGLESAPTGQ:SATS-AA¹⁷-LYY:LRKHR:LEVVKQXEXR, SSVKXQPAPTHH:SATS-AA¹⁷-LYY:LRKHR:RLVVKLEXAXA, RNVQXRPAPTQL:SATS-AA¹⁷-LYY:LRKHR:TLVVKLAXKXE, KIPKAXXVPTEL:SATS-AA¹⁷-LYY:LRKHR:DMVVEGXGXR, GIPEPXXVPEKM:SATS-AA¹⁷-LYY:LRKHR:NMTVESXAXR, SIPKAXXVPTEL:SATS-AA¹⁷-LYY:LRKHR:EMVVEGXGXR, HVTKPTXAPTKL:SATS-AA¹⁷-LYY:LRKHR:NMVVRSXGXH, YVPKPXXAPTKL:SATS-AA¹⁷-LYY:LRKHR:NMVVRSXGXH, TVPKPXXAPTQL:SATS-AA¹⁷-LYY:LRKHR:NMVVRAXGXH, KVGKAXXVPTKL:SATS-AA¹⁷-LYY:LRKHR:EGMSVAEXGXR, KASKAXXVPTKL:SATS-AA¹⁷-LYY:LRKHR:GMAVSEXGXR, GSAGPXXTPTKM:SATS-AA¹⁷-LYY:LRKHR:GMVVDRXGXS, AAPASXXVPARL:SATS-AA¹⁷-LYY:LRKHR:DMVVEAXGXR, STPPTXXVPTRL:SATS-AA¹⁷-LYY:LRKHR:DMVVESXGXR, HVPKPXXAPTKL:SATS-AA¹⁷-LYY:LRKHR:NMVVRSXGXH, RVPSTXXAPVKT:SATS-AA¹⁷-LYY:LRKHR:MIVEEXGXL, ASAAPXXVPQAL:SATS-AA¹⁷-LYY:LRKHR:MIVRSXKXS, ASASPXXVSQDL:SATS-AA¹⁷-LYY:LRKHR:MIVKSXKXS, ASASPXXVPQDL:SATS-AA¹⁷-LYY:LRKHR:MVVKSXKXS, NDEGLEXVPTEE:SATS-AA¹⁷-LYY:LRKHR:FLQHNKXEXR, NDEGLEXVPTGQ:SATS-AA¹⁷-LYY:LRKHR:LEEHSQXEXR, SSVKXQPSRVHH:SATS-AA¹⁷-LYY:LRKHR:RLEEHLEXAXA, RNVQXRPTQVQL:SATS-AA¹⁷-LYY:LRKHR:TLEDHLAXKXE, KIPKAXXVPTEL:SPIS-AA¹⁷-LYK:LKYHY:DMVAEGXGXR, GIPEPXXVPTKM:SPIS-AA¹⁷-LYK:LKYHY:NMVAESXAXR, SIPKAXXVPTEL:SPIS-AA¹⁷-LYK:LKYHY:EMVAEGXGXR, HVTKPTXVPTKL:SPIS-AA¹⁷-LYK:LKYHY:NMVAESXGXH, YVPKPXXVPTKL:SPIS-AA¹⁷-LYK:LKYHY:NMVAESXGXH, TVPKPXXVPTQL:SPIS-AA¹⁷-LYK:LKYHY:NMVAEAXGXH, AVPKAXXVPTKL:SPIS-AA¹⁷-LYK:LKYHY:NMVAEAXGXH, KASKAXXVPTKL:SPIS-AA¹⁷-LYK:LKYHY:GMVAEEXGXR, GSAGPXXVPTKM:SPIS-AA¹⁷-LYK:LKYHY:GMVAERXGXS, AAPASXXVPTRL:SPIS-AA¹⁷-LYK:LKYHY:DMVAEAXGXR, STPPTXXVPTRL:SPIS-AA¹⁷-LYK:LKYHY:DMVAESXGXR, HVPKPXXVPTKL:SPIS-AA¹⁷-LYK:LKYHY:NMVAESXGXH, RVPSTXXVPTKT:SPIS-AA¹⁷-LYK:LKYHY:MIVAEXGXL, ASAAPXXVPTAL:SPIS-AA¹⁷-LYK:LKYHY:MIVAEXKXS, ASASPXXVPTDL:SPIS-AA¹⁷-LYK:LKYHY:MIVAEXKXS, ASASPXXVPTDL:SPIS-AA¹⁷-LYK:LKYHY:MVVAEXKXS, NDEGLEXVPTEE:SPIS-AA¹⁷-LYK:LKYHY:FLVAEKXEXR, NDEGLEXVPTGQ:SPIS-AA¹⁷-LYK:LKYHY:LEVAEQXEXR, SSVKXQPVPTHH:SPIS-AA¹⁷-LYK:LKYHY:RLVAELEXAXA, RNVQXRPVPTQL:SPIS-AA¹⁷-LYK:LKYHY:TLVAELAXKXE, KIPKAXXVPTEL:SPIS-AA¹⁷-LYK:LKYHY:DMVVEGXGXR, GIPEPXXVPEKM:SPIS-AA¹⁷-LYK:LKYHY:NMTVESXAXR, SIPKAXXVPTEL:SPIS-AA¹⁷-LYK:LKYHY:EMVVEGXGXR, HVTKPTXAPTKL:SPIS-AA¹⁷-LYK:LKYHY:NMVVRSXGXH, YVPKPXXAPTKL:SPIS-AA¹⁷-LYK:LKYHY:NMVVRSXGXH, TVPKPXXAPTQL:SPIS-AA¹⁷-LYK:LKYHY:NMVVRAXGXH, AVPKAXXAPTKL:SPIS-AA¹⁷-LYK:LKYHY:NMVVKAXGXH, KASKAXXVPTKL:SPIS-AA¹⁷-LYK:LKYHY:GMAVSEXGXR, GSAGPXXTPTKM:SPIS-AA¹⁷-LYK:LKYHY:GMVVDRXGXS, AAPASXXVPARL:SPIS-AA¹⁷-LYK:LKYHY:DMVVEAXGXR, STPPTXXVPTRL:SPIS-AA¹⁷-LYK:LKYHY:DMVVESXGXR, HVPKPXXAPTKL:SPIS-AA¹⁷-LYK:LKYHY:NMVVRSXGXH, RVPSTXXAPVKT:SPIS-AA¹⁷-LYK:LKYHY:MIVEEXGXL, ASAAPXXVPQAL:SPIS-AA¹⁷-LYK:LKYHY:MIVRSXKXS, ASASPXXVSQDL:SPIS-AA¹⁷-LYK:LKYHY:MIVKSXKXS, ASASPXXVPQDL:SPIS-AA¹⁷-LYK:LKYHY:MVVKSXKXS, NDEGLEXVPTEE:SPIS-AA¹⁷-LYK:LKYHY:FLQHNKXEXR, NDEGLEXVPTGQ:SPIS-AA¹⁷-LYK:LKYHY:LEEHSQXEXR, SSVKXQPSRVHH:SPIS-AA¹⁷-LYK:LKYHY:RLEEHLEXAXA, RNVQXRPTQVQL:SPIS-AA¹⁷-LYK:LKYHY:TLEDHLAXKXE, KIPKAXXVPTEL:EPIS-AA¹⁷-LYL:KFKYE:DMAVXGXGSR, GIPEPXXVPTKM:EPIS-AA¹⁷-LYL:KFKYE:NMAVSSXAXR, SIPKAXXVPTEL:EPIS-AA¹⁷-LYL:KFKYE:EMAVXGXGSR, HVTKPTXVPTKL:EPIS-AA¹⁷-LYL:KFKYE:NMAVSSXGXH, YVPKPXXVPTKL:EPIS-AA¹⁷-LYL:KFKYE:NMAVSSXGXH, TVPKPXXVPTQL:EPIS-AA¹⁷-LYL:KFKYE:NMAVSAXGXH, AVPKAXXVPTKL:EPIS-AA¹⁷-LYL:KFKYE:NMAVSAXGXH, KVGKAXXVPTKL:EPIS-AA¹⁷-LYL:KFKYE:EGMSAVSXGXR, GSAGPXXVPTKM:EPIS-AA¹⁷-LYL:KFKYE:GMAVSRXGXS, AAPASXXVPTRL:EPIS-AA¹⁷-LYL:KFKYE:DMAVSAXGXR, STPPTXXVPTRL:EPIS-AA¹⁷-LYL:KFKYE:DMAVSSXGXR, HVPKPXXVPTKL:EPIS-AA¹⁷-LYL:KFKYE:NMAVSSXGXH, RVPSTXXVPTKT:EPIS-AA¹⁷-LYL:KFKYE:MIAVSXGXL, ASAAPXXVPTAL:EPIS-AA¹⁷-LYL:KFKYE:MIAVSXKXS, ASASPXXVPTDL:EPIS-AA¹⁷-LYL:KFKYE:MIAVSXKXS, ASASPXXVPTDL:EPIS-AA¹⁷-LYL:KFKYE:MVAVSXKXS, NDEGLEXVPTEE:EPIS-AA¹⁷-LYL:KFKYE:FLAVXKXESR, NDEGLEXVPTGQ:EPIS-AA¹⁷-LYL:KFKYE:LEAVSQXEXR, SSVKXQPVPTHH:EPIS-AA¹⁷-LYL:KFKYE:RLAVSLEXAXA, RNVQXRPVPTQL:EPIS-AA¹⁷-LYL:KFKYE:TLAVSLAXKXE, KIPKAXXVPTEL:EPIS-AA¹⁷-LYL:KFKYE:DMVVEGXGXR, GIPEPXXVPEKM:EPIS-AA¹⁷-LYL:KFKYE:NMTVESXAXR, SIPKAXXVPTEL:EPIS-AA¹⁷-LYL:KFKYE:EMVVEGXGXR, HVTKPTXAPTKL:EPIS-AA¹⁷-LYL:KFKYE:NMVVRSXGXH, YVPKPXXAPTKL:EPIS-AA¹⁷-LYL:KFKYE:NMVVRSXGXH, TVPKPXXAPTQL:EPIS-AA¹⁷-LYL:KFKYE:NMVVRAXGXH, AVPKAXXAPTKL:EPIS-AA¹⁷-LYL:KFKYE:NMVVKAXGXH, KVGKAXXVPTKL:EPIS-AA¹⁷-LYL:KFKYE:EGMSVAEXGXR, GSAGPXXTPTKM:EPIS-AA¹⁷-LYL:KFKYE:GMVVDRXGXS, AAPASXXVPARL:EPIS-AA¹⁷-LYL:KFKYE:DMVVEAXGXR, STPPTXXVPTRL:EPIS-AA¹⁷-LYL:KFKYE:DMVVESXGXR, HVPKPXXAPTKL:EPIS-AA¹⁷-LYL:KFKYE:NMVVRSXGXH, RVPSTXXAPVKT:EPIS-AA¹⁷-LYL:KFKYE:MIVEEXGXL, ASAAPXXVPQAL:EPIS-AA¹⁷-LYL:KFKYE:MIVRSXKXS, ASASPXXVSQDL:EPIS-AA¹⁷-LYL:KFKYE:MIVKSXKXS, ASASPXXVPQDL:EPIS-AA¹⁷-LYL:KFKYE:MVVKSXKXS, NDEGLEXVPTEE:EPIS-AA¹⁷-LYL:KFKYE:FLQHNKXEXR, NDEGLEXVPTGQ:EPIS-AA¹⁷-LYL:KFKYE:LEEHSQXEXR, SSVKXQPSRVHH:EPIS-AA¹⁷-LYL:KFKYE:RLEEHLEXAXA, RNVQXRPTQVQL:EPIS-AA¹⁷-LYL:KFKYE:TLEDHLAXKXE, KIPKASSTPTEL:SPIN-AA¹⁷-LYF:YGKIP:DMVVDGXGXR, GIPEPXXTPTKM:SPIN-AA¹⁷-LYF:YGKIP:NMVVDSXAXR, SIPKASSTPTEL:SPIN-AA¹⁷-LYF:YGKIP:EMVVDGXGXR, HVTKPTSTPTKL:SPIN-AA¹⁷-LYF:YGKIP:NMVVDSXGXH, YVPKPXXTPTKL:SPIN-AA¹⁷-LYF:YGKIP:NMVVDSXGXH, TVPKPXXTPTQL:SPIN-AA¹⁷-LYF:YGKIP:NMVVDAXGXH, AVPKASSTPTKL:SPIN-AA¹⁷-LYF:YGKIP:NMVVDAXGXH, KVGKASSTPTKL:SPIN-AA¹⁷-LYF:YGKIP:EGMSVVDXGXR, KASKASSTPTKL:SPIN-AA¹⁷-LYF:YGKIP:GMVVDEXGXR, AAPASSSTPTRL:SPIN-AA¹⁷-LYF:YGKIP:DMVVDAXGXR, STPPTSSTPTRL:SPIN-AA¹⁷-LYF:YGKIP:DMVVDSXGXR, HVPKPXXTPTKL:SPIN-AA¹⁷-LYF:YGKIP:NMVVDSXGXH, RVPSTSSTPTKT:SPIN-AA¹⁷-LYF:YGKIP:MIVVDXGXL, ASAAPXXTPTAL:SPIN-AA¹⁷-LYF:YGKIP:MIVVDXKXS, ASASPXXTPTDL:SPIN-AA¹⁷-LYF:YGKIP:MIVVDXKXS, ASASPXXTPTDL:SPIN-AA¹⁷-LYF:YGKIP:MVVVDXKXS, NDEGLESTPTEE:SPIN-AA¹⁷-LYF:YGKIP:FLVVDKXEXR, NDEGLESTPTGQ:SPIN-AA¹⁷-LYF:YGKIP:LEVVDQXEXR, SSVKXQPTPTHH:SPIN-AA¹⁷-LYF:YGKIP:RLVVDLEXAXA, RNVQXRPTPTQL:SPIN-AA¹⁷-LYF:YGKIP:TLVVDLAXKXE, KIPKAXXVPTEL:SPIN-AA¹⁷-LYF:YGKIP:DMVVEGXGXR, GIPEPXXVPEKM:SPIN-AA¹⁷-LYF:YGKIP:NMTVESXAXR, SIPKAXXVPTEL:SPIN-AA¹⁷-LYF:YGKIP:EMVVEGXGXR, HVTKPTXAPTKL:SPIN-AA¹⁷-LYF:YGKIP:NMVVRSXGXH, YVPKPXXAPTKL:SPIN-AA¹⁷-LYF:YGKIP:NMVVRSXGXH, TVPKPXXAPTQL:SPIN-AA¹⁷-LYF:YGKIP:NMVVRAXGXH, AVPKAXXAPTKL:SPIN-AA¹⁷-LYF:YGKIP:NMVVKAXGXH, KVGKAXXVPTKL:SPIN-AA¹⁷-LYF:YGKIP:EGMSVAEXGXR, KASKAXXVPTKL:SPIN-AA¹⁷-LYF:YGKIP:GMAVSEXGXR, AAPASXXVPARL:SPIN-AA¹⁷-LYF:YGKIP:DMVVEAXGXR, STPPTXXVPTRL:SPIN-AA¹⁷-LYF:YGKIP:DMVVESXGXR, HVPKPXXAPTKL:SPIN-AA¹⁷-LYF:YGKIP:NMVVRSXGXH, RVPSTXXAPVKT:SPIN-AA¹⁷-LYF:YGKIP:MIVEEXGXL, ASAAPXXVPQAL:SPIN-AA¹⁷-LYF:YGKIP:MIVRSXKXS, ASASPXXVSQDL:SPIN-AA¹⁷-LYF:YGKIP:MIVKSXKXS, ASASPXXVPQDL:SPIN-AA¹⁷-LYF:YGKIP:MVVKSXKXS, NDEGLEXVPTEE:SPIN-AA¹⁷-LYF:YGKIP:FLQHNKXEXR, NDEGLEXVPTGQ:SPIN-AA¹⁷-LYF:YGKIP:LEEHSQXEXR, SSVKXQPSRVHH:SPIN-AA¹⁷-LYF:YGKIP:RLEEHLEXAXA, RNVQXRPTQVQL:SPIN-AA¹⁷-LYF:YGKIP:TLEDHLAXKXE, KIPKAXXVPAEL:SPIS-AA¹⁷-LYI:YKQYE:DMVVEGXGXR, G IPEPXXVPAKM:SPIS-AA¹⁷-LYI:YKQYE:NMVVESXAXR, SIPKAXXVPAEL:SPIS-AA¹⁷-LYI:YKQYE:EMVVEGXGXR, HVTKPTXVPAKL:SPIS-AA¹⁷-LYI:YKQYE:NMVVESXGXH, YVPKPXXVPAKL:SPIS-AA¹⁷-LYI:YKQYE:NMVVESXGXH, TVPKPXXVPAQL:SPIS-AA¹⁷-LYI:YKQYE:NMVVEAXGXH, AVPKAXXVPAKL:SPIS-AA¹⁷-LYI:YKQYE:NMVVEAXGXH, KVGKAXXVPAKL:SPIS-AA¹⁷-LYI:YKQYE:EGMSVVEXGXR, KASKAXXVPAKL:SPIS-AA¹⁷-LYI:YKQYE:GMVVEEXGXR, GSAGPXXVPAKM:SPIS-AA¹⁷-LYI:YKQYE:GMVVERXGXS, STPPTXXVPARL:SPIS-AA¹⁷-LYI:YKQYE:DMVVESXGXR, HVPKPXXVPAKL:SPIS-AA¹⁷-LYI:YKQYE:NMVVESXGXH, RVPSTXXVPAKT:SPIS-AA¹⁷-LYI:YKQYE:MIVVEXGXL, ASAAPXXVPAAL:SPIS-AA¹⁷-LYI:YKQYE:MIVVEXKXS, ASASPXXVPADL:SPIS-AA¹⁷-LYI:YKQYE:MIVVEXKXS, ASASPXXVPADL:SPIS-AA¹⁷-LYI:YKQYE:MVVVEXKXS, NDEGLEXVPAEE:SPIS-AA¹⁷-LYI:YKQYE:FLVVEKXEXR, NDEGLEXVPAGQ:SPIS-AA¹⁷-LYI:YKQYE:LEVVEQXEXR, SSVKXQPVPAHH:SPIS-AA¹⁷-LYI:YKQYE:RLVVELEXAXA, RNVQXRPVPAQL:SPIS-AA¹⁷-LYI:YKQYE:TLVVELAXKXE, KIPKAXXVPTEL:SPIS-AA¹⁷-LYI:YKQYE:DMVVEGXGXR, GIPEPXXVPEKM:SPIS-AA¹⁷-LYI:YKQYE:NMTVESXAXR, SIPKAXXVPTEL:SPIS-AA¹⁷-LYI:YKQYE:EMVVEGXGXR, HVTKPTXAPTKL:SPIS-AA¹⁷-LYI:YKQYE:NMVVRSXGXH, YVPKPXXAPTKL:SPIS-AA¹⁷-LYI:YKQYE:NMVVRSXGXH, TVPKPXXAPTQL:SPIS-AA¹⁷-LYI:YKQYE:NMVVRAXGXH, AVPKAXXAPTKL:SPIS-AA¹⁷-LYI:YKQYE:NMVVKAXGXH, KVGKAXXVPTKL:SPIS-AA¹⁷-LYI:YKQYE:EGMSVAEXGXR, KASKAXXVPTKL:SPIS-AA¹⁷-LYI:YKQYE:GMAVSEXGXR, GSAGPXXTPTKM:SPIS-AA¹⁷-LYI:YKQYE:GMVVDRXGXS, STPPTXXVPTRL:SPIS-AA¹⁷-LYI:YKQYE:DMVVESXGXR, HVPKPXXAPTKL:SPIS-AA¹⁷-LYI:YKQYE:NMVVRSXGXH, RVPSTXXAPVKT:SPIS-AA¹⁷-LYI:YKQYE:MIVEEXGXL, ASAAPXXVPQAL:SPIS-AA¹⁷-LYI:YKQYE:MIVRSXKXS, ASASPXXVSQDL:SPIS-AA¹⁷-LYI:YKQYE:MIVKSXKXS, ASASPXXVPQDL:SPIS-AA¹⁷-LYI:YKQYE:MVVKSXKXS, NDEGLEXVPTEE:SPIS-AA¹⁷-LYI:YKQYE:FLQHNKXEXR, NDEGLEXVPTGQ:SPIS-AA¹⁷-LYI:YKQYE:LEEHSQXEXR, SSVKXQPSRVHH:SPIS-AA¹⁷-LYI:YKQYE:RLEEHLEXAXA, RNVQXRPTQVQL:SPIS-AA¹⁷-LYI:YKQYE:TLEDHLAXKXE, KIPKAXXVPTEL:SPIS-AA¹⁷-LFI:YKQYE:DMVVEGXGXR, GIPEPXXVPTKM:SPIS-AA¹⁷-LFI:YKQYE:NMVVESXAXR, SIPKAXXVPTEL:SPIS-AA¹⁷-LFI:YKQYE:EMVVEGXGXR, HVTKPTXVPTKL:SPIS-AA¹⁷-LFI:YKQYE:NMVVESXGXH, YVPKPXXVPTKL:SPIS-AA¹⁷-LFI:YKQYE:NMVVESXGXH, TVPKPXXVPTQL:SPIS-AA¹⁷-LFI:YKQYE:NMVVEAXGXH, AVPKAXXVPTKL:SPIS-AA¹⁷-LFI:YKQYE:NMVVEAXGXH, KVGKAXXVPTKL:SPIS-AA¹⁷-LFI:YKQYE:EGMSVVEXGXR, KASKAXXVPTKL:SPIS-AA¹⁷-LFI:YKQYE:GMVVEEXGXR, GSAGPXXVPTKM:SPIS-AA¹⁷-LFI:YKQYE:GMVVERXGXS, AAPASXXVPTRL:SPIS-AA¹⁷-LFI:YKQYE:DMVVEAXGXR, HVPKPXXVPTKL:SPIS-AA¹⁷-LFI:YKQYE:NMVVESXGXH, RVPSTXXVPTKT:SPIS-AA¹⁷-LFI:YKQYE:MIVVEXGXL, ASAAPXXVPTAL:SPIS-AA¹⁷-LFI:YKQYE:MIVVEXKXS, ASASPXXVPTDL:SPIS-AA¹⁷-LFI:YKQYE:MIVVEXKXS, ASASPXXVPTDL:SPIS-AA¹⁷-LFI:YKQYE:MVVVEXKXS, NDEGLEXVPTEE:SPIS-AA¹⁷-LFI:YKQYE:FLVVEKXEXR, NDEGLEXVPTGQ:SPIS-AA¹⁷-LFI:YKQYE:LEVVEQXEXR, SSVKXQPVPTHH:SPIS-AA¹⁷-LFI:YKQYE:RLVVELEXAXA, RNVQXRPVPTQL:SPIS-AA¹⁷-LFI:YKQYE:TLVVELAXKXE, GIPEPXXVPEKM:SPIS-AA¹⁷-LFI:YKQYE:NMTVESXAXR, HVTKPTXAPTKL:SPIS-AA¹⁷-LFI:YKQYE:NMVVRSXGXH, YVPKPXXAPTKL:SPIS-AA¹⁷-LFI:YKQYE:NMVVRSXGXH, TVPKPXXAPTQL:SPIS-AA¹⁷-LFI:YKQYE:NMVVRAXGXH, AVPKAXXAPTKL:SPIS-AA¹⁷-LFI:YKQYE:NMVVKAXGXH, KVGKAXXVPTKL:SPIS-AA¹⁷-LFI:YKQYE:EGMSVAEXGXR, KASKAXXVPTKL:SPIS-AA¹⁷-LFI:YKQYE:GMAVSEXGXR, GSAGPXXTPTKM:SPIS-AA¹⁷-LFI:YKQYE:GMVVDRXGXS, AAPASXXVPARL:SPIS-AA¹⁷-LFI:YKQYE:DMVVEAXGXR, HVPKPXXAPTKL:SPIS-AA¹⁷-LFI:YKQYE:NMVVRSXGXH, RVPSTXXAPVKT:SPIS-AA¹⁷-LFI:YKQYE:MIVEEXGXL, ASAAPXXVPQAL:SPIS-AA¹⁷-LFI:YKQYE:MIVRSXKXS, ASASPXXVSQDL:SPIS-AA¹⁷-LFI:YKQYE:MIVKSXKXS, ASASPXXVPQDL:SPIS-AA¹⁷-LFI:YKQYE:MVVKSXKXS, NDEGLEXVPTEE:SPIS-AA¹⁷-LFI:YKQYE:FLQHNKXEXR, NDEGLEXVPTGQ:SPIS-AA¹⁷-LFI:YKQYE:LEEHSQXEXR, SSVKXQPSRVHH:SPIS-AA¹⁷-LFI:YKQYE:RLEEHLEXAXA, RNVQXRPTQVQL:SPIS-AA¹⁷-LFI:YKQYE:TLEDHLAXKXE, KIPKAXXAPVEL:KPLS-AA¹⁷-LYV:DHHKD:DMVEEGXGXR, GIPEPXXAPVKM:KPLS-AA¹⁷-LYV:DHHKD:NMVEESXAXR, SIPKAXXAPVEL:KPLS-AA¹⁷-LYV:DHHKD:EMVEEGXGXR, HVTKPTXAPVKL:KPLS-AA¹⁷-LYV:DHHKD:NMVEESXGXH, YVPKPXXAPVKL:KPLS-AA¹⁷-LYV:DHHKD:NMVEESXGXH, TVPKPXXAPVQL:KPLS-AA¹⁷-LYV:DHHKD:NMVEEAXGXH, AVPKAXXAPVKL:KPLS-AA¹⁷-LYV:DHHKD:NMVEEAXGXH, KVGKAXXAPVKL:KPLS-AA¹⁷-LYV:DHHKD:EGMSVEEXGXR, KASKAXXAPVKL:KPLS-AA¹⁷-LYV:DHHKD:GMVEEEXGXR, GSAGPXXAPVKM:KPLS-AA¹⁷-LYV:DHHKD:GMVEERXGXS, AAPASXXAPVRL:KPLS-AA¹⁷-LYV:DHHKD:DMVEEAXGXR, STPPTXXAPVRL:KPLS-AA¹⁷-LYV:DHHKD:DMVEESXGXR, HVPKPXXAPVKL:KPLS-AA¹⁷-LYV:DHHKD:NMVEESXGXH, ASAAPXXAPVAL:KPLS-AA¹⁷-LYV:DHHKD:MIVEEXKXS, ASASPXXAPVDL:KPLS-AA¹⁷-LYV:DHHKD:MIVEEXKXS, ASASPXXAPVDL:KPLS-AA¹⁷-LYV:DHHKD:MVVEEXKXS, NDEGLESAPVEE:KPLS-AA¹⁷-LYV:DHHKD:FLVEEKXEXR, NDEGLESAPVGQ:KPLS-AA¹⁷-LYV:DHHKD:LEVEEQXEXR, SSVKXQPAPVHH:KPLS-AA¹⁷-LYV:DHHKD:RLVEELEXAXA, RNVQXRPAPVQL:KPLS-AA¹⁷-LYV:DHHKD:TLVEELAXKXE, KIPKAXXVPTEL:KPLS-AA¹⁷-LYV:DHHKD:DMVVEGXGXR, GIPEPXXVPEKM:KPLS-AA¹⁷-LYV:DHHKD:NMTVESXAXR, SIPKAXXVPTEL:KPLS-AA¹⁷-LYV:DHHKD:EMVVEGXGXR, HVTKPTXAPTKL:KPLS-AA¹⁷-LYV:DHHKD:NMVVRSXGXH, YVPKPXXAPTKL:KPLS-AA¹⁷-LYV:DHHKD:NMVVRSXGXH, TVPKPXXAPTQL:KPLS-AA¹⁷-LYV:DHHKD:NMVVRAXGXH, AVPKAXXAPTKL:KPLS-AA¹⁷-LYV:DHHKD:NMVVKAXGXH, KVGKAXXVPTKL:KPLS-AA¹⁷-LYV:DHHKD:EGMSVAEXGXR, KASKAXXVPTKL:KPLS-AA¹⁷-LYV:DHHKD:GMAVSEXGXR, GSAGPXXTPTKM:KPLS-AA¹⁷-LYV:DHHKD:GMVVDRXGXS, AAPASXXVPARL:KPLS-AA¹⁷-LYV:DHHKD:DMVVEAXGXR, STPPTXXVPTRL:KPLS-AA¹⁷-LYV:DHHKD:DMVVESXGXR, HVPKPXXAPTKL:KPLS-AA¹⁷-LYV:DHHKD:NMVVRSXGXH, ASAAPXXVPQAL:KPLS-AA¹⁷-LYV:DHHKD:MIVRSXKXS, ASASPXXVSQDL:KPLS-AA¹⁷-LYV:DHHKD:MIVKSXKXS, ASASPXXVPQDL:KPLS-AA¹⁷-LYV:DHHKD:MVVKSXKXS, NDEGLEXVPTEE:KPLS-AA¹⁷-LYV:DHHKD:FLQHNKXEXR, NDEGLEXVPTGQ:KPLS-AA¹⁷-LYV:DHHKD:LEEHSQXEXR, SSVKXQPSRVHH:KPLS-AA¹⁷-LYV:DHHKD:RLEEHLEXAXA, RNVQXRPTQVQL:KPLS-AA¹⁷-LYV:DHHKD:TLEDHLAXKXE, KIPKAXXVPQEL:EPLP-AA¹⁷-VYY:EQLSN:DMVRXGXGSR, GIPEPXXVPQKM:EPLP-AA¹⁷-VYY:EQLSN:NMVRSSXAXR, SIPKAXXVPQEL:EPLP-AA¹⁷-VYY:EQLSN:EMVRXGXGSR, HVTKPTXVPQKL:EPLP-AA¹⁷-VYY:EQLSN:NMVRSSXGXH, YVPKPXXVPQKL:EPLP-AA¹⁷-VYY:EQLSN:NMVRSSXGXH, TVPKPXXVPQQL:EPLP-AA¹⁷-VYY:EQLSN:NMVRSAXGXH, AVPKAXXVPQKL:EPLP-AA¹⁷-VYY:EQLSN:NMVRSAXGXH, KVGKAXXVPQKL:EPLP-AA¹⁷-VYY:EQLSN:EGMSVRSXGXR, KASKAXXVPQKL:EPLP-AA¹⁷-VYY:EQLSN:GMVRSEXGXR, GSAGPXXVPQKM:EPLP-AA¹⁷-VYY:EQLSN:GMVRSRXGXS, AAPASXXVPQRL:EPLP-AA¹⁷-VYY:EQLSN:DMVRSAXGXR, STPPTXXVPQRL:EPLP-AA¹⁷-VYY:EQLSN:DMVRSSXGXR, HVPKPXXVPQKL:EPLP-AA¹⁷-VYY:EQLSN:NMVRSSXGXH, RVPSTXXVPQKT:EPLP-AA¹⁷-VYY:EQLSN:MIVRSXGXL, ASASPXXVPQDL:EPLP-AA¹⁷-VYY:EQLSN:MIVRSXKXS, ASASPXXVPQDL:EPLP-AA¹⁷-VYY:EQLSN:MVVRSXKXS, NDEGLEXVPQEE:EPLP-AA¹⁷-VYY:EQLSN:FLVRXKXESR, NDEGLEXVPQGQ:EPLP-AA¹⁷-VYY:EQLSN:LEVRSQXEXR, SSVKXQPVPQHH:EPLP-AA¹⁷-VYY:EQLSN:RLVRSLEXAXA, RNVQXRPVPQQL:EPLP-AA¹⁷-VYY:EQLSN:TLVRSLAXKXE, KIPKAXXVPTEL:EPLP-AA¹⁷-VYY:EQLSN:DMVVEGXGXR, GIPEPXXVPEKM:EPLP-AA¹⁷-VYY:EQLSN:NMTVESXAXR, SIPKAXXVPTEL:EPLP-AA¹⁷-VYY:EQLSN:EMVVEGXGXR, HVTKPTXAPTKL:EPLP-AA¹⁷-VYY:EQLSN:NMVVRSXGXH, YVPKPXXAPTKL:EPLP-AA¹⁷-VYY:EQLSN:NMVVRSXGXH, TVPKPXXAPTQL:EPLP-AA¹⁷-VYY:EQLSN:NMVVRAXGXH, AVPKAXXAPTKL:EPLP-AA¹⁷-VYY:EQLSN:NMVVKAXGXH, KVGKAXXVPTKL:EPLP-AA¹⁷-VYY:EQLSN:EGMSVAEXGXR, KASKAXXVPTKL:EPLP-AA¹⁷-VYY:EQLSN:GMAVSEXGXR, GSAGPXXTPTKM:EPLP-AA¹⁷-VYY:EQLSN:GMVVDRXGXS, AAPASXXVPARL:EPLP-AA¹⁷-VYY:EQLSN:DMVVEAXGXR, STPPTXXVPTRL:EPLP-AA¹⁷-VYY:EQLSN:DMVVESXGXR, HVPKPXXAPTKL:EPLP-AA¹⁷-VYY:EQLSN:NMVVRSXGXH, RVPSTXXAPVKT:EPLP-AA¹⁷-VYY:EQLSN:MIVEEXGXL, ASASPXXVSQDL:EPLP-AA¹⁷-VYY:EQLSN:MIVKSXKXS, ASASPXXVPQDL:EPLP-AA¹⁷-VYY:EQLSN:MVVKSXKXS, NDEGLEXVPTEE:EPLP-AA¹⁷-VYY:EQLSN:FLQHNKXEXR, NDEGLEXVPTGQ:EPLP-AA¹⁷-VYY:EQLSN:LEEHSQXEXR, SSVKXQPSRVHH:EPLP-AA¹⁷-VYY:EQLSN:RLEEHLEXAXA, RNVQXRPTQVQL:EPLP-AA¹⁷-VYY:EQLSN:TLEDHLAXKXE, KIPKASSVSQEL:EPLT-AA¹⁷-LYY:EQLSN:DMVKXGXGSR, GIPEPXXVSQKM:EPLT-AA¹⁷-LYY:EQLSN:NMVKSSXAXR, SIPKASSVSQEL:EPLT-AA¹⁷-LYY:EQLSN:EMVKXGXGSR, HVTKPTXVSQKL:EPLT-AA¹⁷-LYY:EQLSN:NMVKSSXGXH, YVPKPXXVSQKL:EPLT-AA¹⁷-LYY:EQLSN:NMVKSSXGXH, TVPKPXXVSQQL:EPLT-AA¹⁷-LYY:EQLSN:NMVKSAXGXH, AVPKASSVSQKL:EPLT-AA¹⁷-LYY:EQLSN:NMVKSAXGXH, KVGKASSVSQKL:EPLT-AA¹⁷-LYY:EQLSN:EGMSVKSXGXR, KASKASSVSQKL:EPLT-AA¹⁷-LYY:EQLSN:GMVKSEXGXR, GSAGPXXVSQKM:EPLT-AA¹⁷-LYY:EQLSN:GMVKSRXGXS, AAPASSSVSQRL:EPLT-AA¹⁷-LYY:EQLSN:DMVKSAXGXR, STPPTSSVSQRL:EPLT-AA¹⁷-LYY:EQLSN:DMVKSSXGXR, HVPKPXXVSQKL:EPLT-AA¹⁷-LYY:EQLSN:NMVKSSXGXH, RVPSTSSVSQKT:EPLT-AA¹⁷-LYY:EQLSN:MIVKSXGXL, ASAAPXXVSQAL:EPLT-AA¹⁷-LYY:EQLSN:MIVKSXKXS, ASASPXXVSQDL:EPLT-AA¹⁷-LYY:EQLSN:MVVKSXKXS, NDEGLEXVSQEE:EPLT-AA¹⁷-LYY:EQLSN:FLVKXKXESR, NDEGLEXVSQGQ:EPLT-AA¹⁷-LYY:EQLSN:LEVKSQXEXR, SSVKXQPVSQHH:EPLT-AA¹⁷-LYY:EQLSN:RLVKSLEXAXA, RNVQXRPVSQQL:EPLT-AA¹⁷-LYY:EQLSN:TLVKSLAXKXE, KIPKAXXVPTEL:EPLT-AA¹⁷-LYY:EQLSN:DMVVEGXGXR, GIPEPXXVPEKM:EPLT-AA¹⁷-LYY:EQLSN:NMTVESXAXR, SIPKAXXVPTEL:EPLT-AA¹⁷-LYY:EQLSN:EMVVEGXGXR, HVTKPTXAPTKL:EPLT-AA¹⁷-LYY:EQLSN:NMVVRSXGXH, YVPKPXXAPTKL:EPLT-AA¹⁷-LYY:EQLSN:NMVVRSXGXH, TVPKPXXAPTQL:EPLT-AA¹⁷-LYY:EQLSN:NMVVRAXGXH, AVPKAXXAPTKL:EPLT-AA¹⁷-LYY:EQLSN:NMVVKAXGXH, KVGKAXXVPTKL:EPLT-AA¹⁷-LYY:EQLSN:EGMSVAEXGXR, KASKAXXVPTKL:EPLT-AA¹⁷-LYY:EQLSN:GMAVSEXGXR, GSAGPXXTPTKM:EPLT-AA¹⁷-LYY:EQLSN:GMVVDRXGXS, AAPASXXVPARL:EPLT-AA¹⁷-LYY:EQLSN:DMVVEAXGXR, STPPTXXVPTRL:EPLT-AA¹⁷-LYY:EQLSN:DMVVESXGXR, HVPKPXXAPTKL:EPLT-AA¹⁷-LYY:EQLSN:NMVVRSXGXH, RVPSTXXAPVKT:EPLT-AA¹⁷-LYY:EQLSN:MIVEEXGXL, ASAAPXXVPQAL:EPLT-AA¹⁷-LYY:EQLSN:MIVRSXKXS, ASASPXXVPQDL:EPLT-AA¹⁷-LYY:EQLSN:MVVKSXKXS, NDEGLEXVPTEE:EPLT-AA¹⁷-LYY:EQLSN:FLQHNKXEXR, NDEGLEXVPTGQ:EPLT-AA¹⁷-LYY:EQLSN:LEEHSQXEXR, SSVKXQPSRVHH:EPLT-AA¹⁷-LYY:EQLSN:RLEEHLEXAXA, RNVQXRPTQVQL:EPLT-AA¹⁷-LYY:EQLSN:TLEDHLAXKXE, KIPKAXXVPQEL:EPLT-AA¹⁷-LYY:EQLSN:DMVKXGXGSR, GIPEPXXVPQKM:EPLT-AA¹⁷-LYY:EQLSN:NMVKSSXAXR, SIPKAXXVPQEL:EPLT-AA¹⁷-LYY:EQLSN:EMVKXGXGSR, HVTKPTXVPQKL:EPLT-AA¹⁷-LYY:EQLSN:NMVKSSXGXH, YVPKPXXVPQKL:EPLT-AA¹⁷-LYY:EQLSN:NMVKSSXGXH, TVPKPXXVPQQL:EPLT-AA¹⁷-LYY:EQLSN:NMVKSAXGXH, AVPKAXXVPQKL:EPLT-AA¹⁷-LYY:EQLSN:NMVKSAXGXH, KVGKAXXVPQKL:EPLT-AA¹⁷-LYY:EQLSN:EGMSVKSXGXR, KASKAXXVPQKL:EPLT-AA¹⁷-LYY:EQLSN:GMVKSEXGXR, GSAGPXXVPQKM:EPLT-AA¹⁷-LYY:EQLSN:GMVKSRXGXS, AAPASXXVPQRL:EPLT-AA¹⁷-LYY:EQLSN:DMVKSAXGXR, STPPTXXVPQRL:EPLT-AA¹⁷-LYY:EQLSN:DMVKSSXGXR, HVPKPXXVPQKL:EPLT-AA¹⁷-LYY:EQLSN:NMVKSSXGXH, RVPSTXXVPQKT:EPLT-AA¹⁷-LYY:EQLSN:MIVKSXGXL, ASAAPXXVPQAL:EPLT-AA¹⁷-LYY:EQLSN:MIVKSXKXS, ASASPXXVPQDL:EPLT-AA¹⁷-LYY:EQLSN:MIVKSXKXS, NDEGLEXVPQEE:EPLT-AA¹⁷-LYY:EQLSN:FLVKXKXESR, NDEGLEXVPQGQ:EPLT-AA¹⁷-LYY:EQLSN:LEVKSQXEXR, SSVKXQPVPQHH:EPLT-AA¹⁷-LYY:EQLSN:RLVKSLEXAXA, RNVQXRPVPQQL:EPLT-AA¹⁷-LYY:EQLSN:TLVKSLAXKXE, ASASPXXVSQDL:EPLT-AA¹⁷-LYY:EQLSN:MIVKSXKXS, KIPKAXXVPTEL:SNIT-AA¹⁷-QIM:IGEMS:DMQHNGXGXR, GIPEPXXVPTKM:SNIT-AA¹⁷-QIM:IGEMS:NMQHNSXAXR, SIPKAXXVPTEL:SNIT-AA¹⁷-QIM:IGEMS:EMQHNGXGXR, HVTKPTXVPTKL:SNIT-AA¹⁷-QIM:IGEMS:NMQHNSXGXH, YVPKPXXVPTKL:SNIT-AA¹⁷-QIM:IGEMS:NMQHNSXGXH, TVPKPXXVPTQL:SNIT-AA¹⁷-QIM:IGEMS:NMQHNAXGXH, AVPKAXXVPTKL:SNIT-AA¹⁷-QIM:IGEMS:NMQHNAXGXH, KVGKAXXVPTKL:SNIT-AA¹⁷-QIM:IGEMS:EGMSQHNXGXR, KASKAXXVPTKL:SNIT-AA¹⁷-QIM:IGEMS:GMQHNEXGXR, GSAGPXXVPTKM:SNIT-AA¹⁷-QIM:IGEMS:GMQHNRXGXS, AAPASXXVPTRL:SNIT-AA¹⁷-QIM:IGEMS:DMQHNAXGXR, STPPTXXVPTRL:SNIT-AA¹⁷-QIM:IGEMS:DMQHNSXGXR, HVPKPXXVPTKL:SNIT-AA¹⁷-QIM:IGEMS:NMQHNSXGXH, RVPSTXXVPTKT:SNIT-AA¹⁷-QIM:IGEMS:MIQHNXGXL, ASAAPXXVPTAL:SNIT-AA¹⁷-QIM:IGEMS:MIQHNXKXS, ASASPXXVPTDL:SNIT-AA¹⁷-QIM:IGEMS:MIQHNXKXS, ASASPXXVPTDL:SNIT-AA¹⁷-QIM:IGEMS:MVQHNXKXS, NDEGLEXVPTGQ:SNIT-AA¹⁷-QIM:IGEMS:LEQHNQXEXR, NDEGLEXVPTEE:SNIT-AA¹⁷-QIM:IGEMS:FLQHNKXEXR, SSVKXQPVPTHH:SNIT-AA¹⁷-QIM:IGEMS:RLQHNLEXAXA, RNVQXRPVPTQL:SNIT-AA¹⁷-QIM:IGEMS:TLQHNLAXKXE, KIPKAXXVPTEL:SNIT-AA¹⁷-QIM:IGEMS:DMVVEGXGXR, GIPEPXXVPEKM:SNIT-AA¹⁷-QIM:IGEMS:NMTVESXAXR, SIPKAXXVPTEL:SNIT-AA¹⁷-QIM:IGEMS:EMVVEGXGXR, HVTKPTXAPTKL:SNIT-AA¹⁷-QIM:IGEMS:NMVVRSXGXH, YVPKPXXAPTKL:SNIT-AA¹⁷-QIM:IGEMS:NMVVRSXGXH, TVPKPXXAPTQL:SNIT-AA¹⁷-QIM:IGEMS:NMVVRAXGXH, AVPKAXXAPTKL:SNIT-AA¹⁷-QIM:IGEMS:NMVVKAXGXH, KVGKAXXVPTKL:SNIT-AA¹⁷-QIM:IGEMS:EGMSVAEXGXR, KASKAXXVPTKL:SNIT-AA¹⁷-QIM:IGEMS:GMAVSEXGXR, GSAGPXXTPTKM:SNIT-AA¹⁷-QIM:IGEMS:GMVVDRXGXS, AAPASXXVPARL:SNIT-AA¹⁷-QIM:IGEMS:DMVVEAXGXR, STPPTXXVPTRL:SNIT-AA¹⁷-QIM:IGEMS:DMVVESXGXR, HVPKPXXAPTKL:SNIT-AA¹⁷-QIM:IGEMS:NMVVRSXGXH, RVPSTXXAPVKT:SNIT-AA¹⁷-QIM:IGEMS:MIVEEXGXL, ASAAPXXVPQAL:SNIT-AA¹⁷-QIM:IGEMS:MIVRSXKXS, ASASPXXVSQDL:SNIT-AA¹⁷-QIM:IGEMS:MIVKSXKXS, ASASPXXVPQDL:SNIT-AA¹⁷-QIM:IGEMS:MVVKSXKXS, NDEGLEXVPTGQ:SNIT-AA¹⁷-QIM:IGEMS:LEEHSQXEXR, SSVKXQPSRVHH:SNIT-AA¹⁷-QIM:IGEMS:RLEEHLEXAXA, RNVQXRPTQVQL:SNIT-AA¹⁷-QIM:IGEMS:TLEDHLAXKXE, KIPKAXXVPTEL:SNIT-AA¹⁷-QIM:LGEMS:DMEHXGXGSR, GIPEPXXVPTKM:SNIT-AA¹⁷-QIM:LGEMS:NMEHSSXAXR, SIPKAXXVPTEL:SNIT-AA¹⁷-QIM:LGEMS:EMEHXGXGSR, HVTKPTXVPTKL:SNIT-AA¹⁷-QIM:LGEMS:NMEHSSXGXH, YVPKPXXVPTKL:SNIT-AA¹⁷-QIM:LGEMS:NMEHSSXGXH, TVPKPXXVPTQL:SNIT-AA¹⁷-QIM:LGEMS:NMEHSAXGXH, AVPKAXXVPTKL:SNIT-AA¹⁷-QIM:LGEMS:NMEHSAXGXH, KVGKAXXVPTKL:SNIT-AA¹⁷-QIM:LGEMS:EGMSEHSXGXR, KASKAXXVPTKL:SNIT-AA¹⁷-QIM:LGEMS:GMEHSEXGXR, GSAGPXXVPTKM:SNIT-AA¹⁷-QIM:LGEMS:GMEHSRXGXS, AAPASXXVPTRL:SNIT-AA¹⁷-QIM:LGEMS:DMEHSAXGXR, STPPTXXVPTRL:SNIT-AA¹⁷-QIM:LGEMS:DMEHSSXGXR, HVPKPXXVPTKL:SNIT-AA¹⁷-QIM:LGEMS:NMEHSSXGXH, RVPSTXXVPTKT:SNIT-AA¹⁷-QIM:LGEMS:MIEHSXGXL, ASAAPXXVPTAL:SNIT-AA¹⁷-QIM:LGEMS:MIEHSXKXS, ASASPXXVPTDL:SNIT-AA¹⁷-QIM:LGEMS:MIEHSXKXS, ASASPXXVPTDL:SNIT-AA¹⁷-QIM:LGEMS:MVEHSXKXS, NDEGLEXVPTEE:SNIT-AA¹⁷-QIM:LGEMS:FLEHXKXESR, SSVKXQPVPTHH:SNIT-AA¹⁷-QIM:LGEMS:RLEHSLEXAXA, RNVQXRPVPTQL:SNIT-AA¹⁷-QIM:LGEMS:TLEHSLAXKXE, KIPKAXXVPTEL:SNIT-AA¹⁷-QIM:LGEMS:DMVVEGXGXR, GIPEPXXVPEKM:SNIT-AA¹⁷-QIM:LGEMS:NMTVESXAXR, SIPKAXXVPTEL:SNIT-AA¹⁷-QIM:LGEMS:EMVVEGXGXR, HVTKPTXAPTKL:SNIT-AA¹⁷-QIM:LGEMS:NMVVRSXGXH, YVPKPXXAPTKL:SNIT-AA¹⁷-QIM:LGEMS:NMVVRSXGXH, TVPKPXXAPTQL:SNIT-AA¹⁷-QIM:LGEMS:NMVVRAXGXH, AVPKAXXAPTKL:SNIT-AA¹⁷-QIM:LGEMS:NMVVKAXGXH, KVGKAXXVPTKL:SNIT-AA¹⁷-QIM:LGEMS:EGMSVAEXGXR, KASKAXXVPTKL:SNIT-AA¹⁷-QIM:LGEMS:GMAVSEXGXR, GSAGPXXTPTKM:SNIT-AA¹⁷-QIM:LGEMS:GMVVDRXGXS, AAPASXXVPARL:SNIT-AA¹⁷-QIM:LGEMS:DMVVEAXGXR, STPPTXXVPTRL:SNIT-AA¹⁷-QIM:LGEMS:DMVVESXGXR, HVPKPXXAPTKL:SNIT-AA¹⁷-QIM:LGEMS:NMVVRSXGXH, RVPSTXXAPVKT:SNIT-AA¹⁷-QIM:LGEMS:MIVEEXGXL, ASAAPXXVPQAL:SNIT-AA¹⁷-QIM:LGEMS:MIVRSXKXS, ASASPXXVSQDL:SNIT-AA¹⁷-QIM:LGEMS:MIVKSXKXS, ASASPXXVPQDL:SNIT-AA¹⁷-QIM:LGEMS:MVVKSXKXS, NDEGLEXVPTEE:SNIT-AA¹⁷-QIM:LGEMS:FLQHNKXEXR, SSVKXQPSRVHH:SNIT-AA¹⁷-QIM:LGEMS:RLEEHLEXAXA, RNVQXRPTQVQL:SNIT-AA¹⁷-QIM:LGEMS:TLEDHLAXKXE, KIPKASSSRVEL:RSVK-AA¹⁷-AKV:KEVQV:DMEEHGXGXR, GIPEPXXSRVKM:RSVK-AA¹⁷-AKV:KEVQV:NMEEHSXAXR, SIPKASSSRVEL:RSVK-AA¹⁷-AKV:KEVQV:EMEEHGXGXR, HVTKPTSSRVKL:RSVK-AA¹⁷-AKV:KEVQV:NMEEHSXGXH, YVPKPXXSRVKL:RSVK-AA¹⁷-AKV:KEVQV:NMEEHSXGXH, TVPKPXXSRVQL:RSVK-AA¹⁷-AKV:KEVQV:NMEEHAXGXH, AVPKASSSRVKL:RSVK-AA¹⁷-AKV:KEVQV:NMEEHAXGXH, KVGKASSSRVKL:RSVK-AA¹⁷-AKV:KEVQV:EGMSEEHXGXR, KASKASSSRVKL:RSVK-AA¹⁷-AKV:KEVQV:GMEEH EXGXR, GSAGPXXSRVKM:RSVK-AA¹⁷-AKV:KEVQV:GMEEHRXGXS, AAPASSSSRVRL:RSVK-AA¹⁷-AKV:KEVQV:DMEEHAXGXR, STPPTSSSRVRL:RSVK-AA¹⁷-AKV:KEVQV:DMEEHSXGXR, HVPKPXXSRVKL:RSVK-AA¹⁷-AKV:KEVQV:NMEEHSXGXH, RVPSTSSSRVKT:RSVK-AA¹⁷-AKV:KEVQV:MIEEHXGXL, ASAAPXXSRVAL:RSVK-AA¹⁷-AKV:KEVQV:MIEEHXKXS, ASASPXXSRVDL:RSVK-AA¹⁷-AKV:KEVQV:MIEEHXKXS, ASASPXXSRVDL:RSVK-AA¹⁷-AKV:KEVQV:MVEEHXKXS, NDEGLESSRVEE:RSVK-AA¹⁷-AKV:KEVQV:FLEEHKXEXR, NDEGLESSRVGQ:RSVK-AA¹⁷-AKV:KEVQV:LEEEHQXEXR, RNVQXRPSRVQL:RSVK-AA¹⁷-AKV:KEVQV:TLEEHLAXKXE, KIPKAXXVPTEL:RSVK-AA¹⁷-AKV:KEVQV:DMVVEGXGXR, GIPEPXXVPEKM:RSVK-AA¹⁷-AKV:KEVQV:NMTVESXAXR, SIPKAXXVPTEL:RSVK-AA¹⁷-AKV:KEVQV:EMVVEGXGXR, HVTKPTXAPTKL:RSVK-AA¹⁷-AKV:KEVQV:NMVVRSXGXH, YVPKPXXAPTKL:RSVK-AA¹⁷-AKV:KEVQV:NMVVRSXGXH, TVPKPXXAPTQL:RSVK-AA¹⁷-AKV:KEVQV:NMVVRAXGXH, AVPKAXXAPTKL:RSVK-AA¹⁷-AKV:KEVQV:NMVVKAXGXH, KVGKAXXVPTKL:RSVK-AA¹⁷-AKV:KEVQV:EGMSVAEXGXR, KASKAXXVPTKL:RSVK-AA¹⁷-AKV:KEVQV:GMAVSEXGXR, GSAGPXXTPTKM:RSVK-AA¹⁷-AKV:KEVQV:GMVVDRXGXS, AAPASXXVPARL:RSVK-AA¹⁷-AKV:KEVQV:DMVVEAXGXR, STPPTXXVPTRL:RSVK-AA¹⁷-AKV:KEVQV:DMVVESXGXR, HVPKPXXAPTKL:RSVK-AA¹⁷-AKV:KEVQV:NMVVRSXGXH, RVPSTXXAPVKT:RSVK-AA¹⁷-AKV:KEVQV:MIVEEXGXL, ASAAPXXVPQAL:RSVK-AA¹⁷-AKV:KEVQV:MIVRSXKXS, ASASPXXVSQDL:RSVK-AA¹⁷-AKV:KEVQV:MIVKSXKXS, ASASPXXVPQDL:RSVK-AA¹⁷-AKV:KEVQV:MVVKSXKXS, NDEGLEXVPTEE:RSVK-AA¹⁷-AKV:KEVQV:FLQHNKXEXR, NDEGLEXVPTGQ:RSVK-AA¹⁷-AKV:KEVQV:LEEHSQXEXR, RNVQXRPTQVQL:RSVK-AA¹⁷-AKV:KEVQV:TLEDHLAXKXE, KIPKASSTQVEL:RPVQ-AA¹⁷-RKI:KKATV:DMEDHGXGXR, GIPEPXXTQVKM:RPVQ-AA¹⁷-RKI:KKATV:NMEDHSXAXR, SIPKASSTQVEL:RPVQ-AA¹⁷-RKI:KKATV:EMEDHGXGXR, HVTKPTSTQVKL:RPVQ-AA¹⁷-RKI:KKATV:NMEDHSXGXH, YVPKPXXTQVKL:RPVQ-AA¹⁷-RKI:KKATV:NMEDHSXGXH, TVPKPXXTQVQL:RPVQ-AA¹⁷-RKI:KKATV:NMEDHAXGXH, AVPKASSTQVKL:RPVQ-AA¹⁷-RKI:KKATV:NMEDHAXGXH, KVGKASSTQVKL:RPVQ-AA¹⁷-RKI:KKATV:EGMSEDHXGXR, KASKASSTQVKL:RPVQ-AA¹⁷-RKI:KKATV:GMEDHEXGXR, GSAGPXXTQVKM:RPVQ-AA¹⁷-RKI:KKATV:GMEDHRXGXS, AAPASSSTQVRL:RPVQ-AA¹⁷-RKI:KKATV:DMEDHAXGXR, STPPTSSTQVRL:RPVQ-AA¹⁷-RKI:KKATV:DMEDHSXGXR, HVPKPXXTQVKL:RPVQ-AA¹⁷-RKI:KKATV:NMEDHSXGXH, RVPSTSSTQVKT:RPVQ-AA¹⁷-RKI:KKATV:MIEDHXGXL, ASAAPXXTQVAL:RPVQ-AA¹⁷-RKI:KKATV:MIEDHXKXS, ASASPXXTQVDL:RPVQ-AA¹⁷-RKI:KKATV:MIEDHXKXS, ASASPXXTQVDL:RPVQ-AA¹⁷-RKI:KKATV:MVEDHXKXS, NDEGLESTQVEE:RPVQ-AA¹⁷-RKI:KKATV:FLEDHKXEXR, NDEGLESTQVGQ:RPVQ-AA¹⁷-RKI:KKATV:LEEDHQXEXR, SSVKXQPTQVHH:RPVQ-AA¹⁷-RKI:KKATV:RLEDHLEXAXA, KIPKAXXVPTEL:RPVQ-AA¹⁷-RKI:KKATV:DMVVEGXGXR, GIPEPXXVPEKM:RPVQ-AA¹⁷-RKI:KKATV:NMTVESXAXR, SIPKAXXVPTEL:RPVQ-AA¹⁷-RKI:KKATV:EMVVEGXGXR, HVTKPTXAPTKL:RPVQ-AA¹⁷-RKI:KKATV:NMVVRSXGXH, YVPKPXXAPTKL:RPVQ-AA¹⁷-RKI:KKATV:NMVVRSXGXH, TVPKPXXAPTQL:RPVQ-AA¹⁷-RKI:KKATV:NMVVRAXGXH, AVPKAXXAPTKL:RPVQ-AA¹⁷-RKI:KKATV:NMVVKAXGXH, KVGKAXXVPTKL:RPVQ-AA¹⁷-RKI:KKATV:EGMSVAEXGXR, KASKAXXVPTKL:RPVQ-AA¹⁷-RKI:KKATV:GMAVSEXGXR, GSAGPXXTPTKM:RPVQ-AA¹⁷-RKI:KKATV:GMVVDRXGXS, AAPASXXVPARL:RPVQ-AA¹⁷-RKI:KKATV:DMVVEAXGXR, STPPTXXVPTRL:RPVQ-AA¹⁷-RKI:KKATV:DMVVESXGXR, HVPKPXXAPTKL:RPVQ-AA¹⁷-RKI:KKATV:NMVVRSXGXH, RVPSTXXAPVKT:RPVQ-AA¹⁷-RKI:KKATV:MIVE EXGXL, ASAAPXXVPQAL:RPVQ-AA¹⁷-RKI:KKATV:MIVRSXKXS, ASASPXXVSQDL:RPVQ-AA¹⁷-RKI:KKATV:MIVKSXKXS, ASASPXXVPQDL:RPVQ-AA¹⁷-RKI:KKATV:MVVKSXKXS, NDEGLEXVPTEE:RPVQ-AA¹⁷-RKI:KKATV:FLQHNKXEXR, NDEGLEXVPTGQ:RPVQ-AA¹⁷-RKI:KKATV:LEEHSQXEXR and SSVKXQPSRVHH:RPVQ-AA¹⁷-RKI:KKATV:RLEEHLEXAXA; and wherein AA¹⁷ is selected from the group consisting of G, A, V, L, I, P, F, M, W, T and S (in particular is selected from the group consisting of M, I, L, V and T). More particularly, the quadruplet PEP9:PEP12:PEP2:PEP10 is selected from the group consisting of GIPEPXXVPTKM:SAIS-AA¹⁷-LYL:LKNYQ:NMVVESXAXR, HVTKPTXVPTKL:SAIS-AA¹⁷-LYL:LKNYQ:NMVVESXGXH, YVPKPXXVPTKL:SAIS-AA¹⁷-LYL:LKNYQ:NMVVESXGXH, TVPKPXXVPTQL:SAIS-AA¹⁷-LYL:LKNYQ:NMVVEAXGXH, AVPKAXXVPTKL:SAIS-AA¹⁷-LYL:LKNYQ:NMVVEAXGXH, KVGKAXXVPTKL:SAIS-AA¹⁷-LYL:LKNYQ:EGMSVVEXGXR, KASKAXXVPTKL:SAIS-AA¹⁷-LYL:LKNYQ:GMVVEEXGXR, GSAGPXXVPTKM:SAIS-AA¹⁷-LYL:LKNYQ:GMVVERXGXS, AAPASXXVPTRL:SAIS-AA¹⁷-LYL:LKNYQ:DMVVEAXGXR, STPPTXXVPTRL:SAIS-AA¹⁷-LYL:LKNYQ:DMVVESXGXR, HVPKPXXVPTKL:SAIS-AA¹⁷-LYL:LKNYQ:NMVVESXGXH, RVPSTXXVPTKT:SAIS-AA¹⁷-LYL:LKNYQ:MIVVEXGXL, ASAAPXXVPTAL:SAIS-AA¹⁷-LYL:LKNYQ:MIVVEXKXS, ASASPXXVPTDL:SAIS-AA¹⁷-LYL:LKNYQ:MIVVEXKXS, ASASPXXVPTDL:SAIS-AA¹⁷-LYL:LKNYQ:MVVVEXKXS, GIPEPXXVPEKM:SAIS-AA¹⁷-LYL:LKNYQ:NMTVESXAXR, HVTKPTXAPTKL:SAIS-AA¹⁷-LYL:LKNYQ:NMVVRSXGXH, YVPKPXXAPTKL:SAIS-AA¹⁷-LYL:LKNYQ:NMVVRSXGXH, TVPKPXXAPTQL:SAIS-AA¹⁷-LYL:LKNYQ:NMVVRAXGXH, AVPKAXXAPTKL:SAIS-AA¹⁷-LYL:LKNYQ:NMVVKAXGXH, KVGKAXXVPTKL:SAIS-AA¹⁷-LYL:LKNYQ:EGMSVAEXGXR, KASKAXXVPTKL:SAIS-AA¹⁷-LYL:LKNYQ:GMAVSEXGXR, GSAGPXXTPTKM:SAIS-AA¹⁷-LYL:LKNYQ:GMVVDRXGXS, AAPASXXVPARL:SAIS-AA¹⁷-LYL:LKNYQ:DMVVEAXGXR, HVPKPXXAPTKL:SAIS-AA¹⁷-LYL:LKNYQ:NMVVRSXGXH, RVPSTXXAPVKT:SAIS-AA¹⁷-LYL:LKNYQ:MIVEEXGXL, ASAAPXXVPQAL:SAIS-AA¹⁷-LYL:LKNYQ:MIVRSXKXS, ASASPXXVSQDL:SAIS-AA¹⁷-LYL:LKNYQ:MIVKSXKXS, ASASPXXVPQDL:SAIS-AA¹⁷-LYL:LKNYQ:MVVKSXKXS, NDEGLEXVPTEE:SAIS-AA¹⁷-LYL:LKNYQ:FLQHNKXEXR, NDEGLEXVPTGQ:SAIS-AA¹⁷-LYL:LKNYQ:LEEHSQXEXR, SSVKXQPSRVHH:SAIS-AA¹⁷-LYL:LKNYQ:RLEEHLEXAXA, RNVQXRPTQVQL:SAIS-AA¹⁷-LYL:LKNYQ:TLEDHLAXKXE, KIPKAXXVPEEL:SSLS-AA¹⁷-LFF:LKVYP:DMTVEGXGXR, SIPKAXXVPEEL:SSLS-AA¹⁷-LFF:LKVYP:EMTVEGXGXR, HVTKPTXVPEKL:SSLS-AA¹⁷-LFF:LKVYP:NMTVESXGXH, YVPKPXXVPEKL:SSLS-AA¹⁷-LFF:LKVYP:NMTVESXGXH, TVPKPXXVPEQL:SSLS-AA¹⁷-LFF:LKVYP:NMTVEAXGXH, AVPKAXXVPEKL:SSLS-AA¹⁷-LFF:LKVYP:NMTVEAXGXH, KVGKAXXVPEKL:SSLS-AA¹⁷-LFF:LKVYP:EGMSTVEXGXR, KASKAXXVPEKL:SSLS-AA¹⁷-LFF:LKVYP:GMTVEEXGXR, GSAGPXXVPEKM:SSLS-AA¹⁷-LFF:LKVYP:GMTVE RXGXS, AAPASXXVPERL:SSLS-AA¹⁷-LFF:LKVYP:DMTVEAXGXR, STPPTXXVPERL:SSLS-AA¹⁷-LFF:LKVYP:DMTVESXGXR, HVPKPXXVPEKL:SSLS-AA¹⁷-LFF:LKVYP:NMTVESXGXH, RVPSTXXVPEKT:SSLS-AA¹⁷-LFF:LKVYP:MITVEXGXL, ASAAPXXVPEAL:SSLS-AA¹⁷-LFF:LKVYP:MITVEXKXS, ASASPXXVPEDL:SSLS-AA¹⁷-LFF:LKVYP:MITVEXKXS, ASASPXXVPEDL:SSLS-AA¹⁷-LFF:LKVYP:MVTVEXKXS, KIPKAXXVPTEL:SSLS-AA¹⁷-LFF:LKVYP:DMVVEGXGXR, SIPKAXXVPTEL:SSLS-AA¹⁷-LFF:LKVYP:EMVVEGXGXR, HVTKPTXAPTKL:SSLS-AA¹⁷-LFF:LKVYP:NMVVRSXGXH, YVPKPXXAPTKL:SSLS-AA¹⁷-LFF:LKVYP:NMVVRSXGXH, TVPKPXXAPTQL:SSLS-AA¹⁷-LFF:LKVYP:NMVVRAXGXH, AVPKAXXAPTKL:SSLS-AA¹⁷-LFF:LKVYP:NMVVKAXGXH, KVGKAXXVPTKL:SSLS-AA¹⁷-LFF:LKVYP:EGMSVAEXGXR, KASKAXXVPTKL:SSLS-AA¹⁷-LFF:LKVYP:GMAVSEXGXR, GSAGPXXTPTKM:SSLS-AA¹⁷-LFF:LKVYP:GMVVDRXGXS, AAPASXXVPARL:SSLS-AA¹⁷-LFF:LKVYP:DMVVEAXGXR, STPPTXXVPTRL:SSLS-AA¹⁷-LFF:LKVYP:DMVVESXGXR, HVPKPXXAPTKL:SSLS-AA¹⁷-LFF:LKVYP:NMVVRSXGXH, RVPSTXXAPVKT:SSLS-AA¹⁷-LFF:LKVYP:MIVEEXGXL, ASAAPXXVPQAL:SSLS-AA¹⁷-LFF:LKVYP:MIVRSXKXS, ASASPXXVSQDL:SSLS-AA¹⁷-LFF:LKVYP:MIVKSXKXS, ASASPXXVPQDL:SSLS-AA¹⁷-LFF:LKVYP:MVVKSXKXS, NDEGLEXVPTEE:SSLS-AA¹⁷-LFF:LKVYP:FLQHNKXEXR, NDEGLEXVPTGQ:SSLS-AA¹⁷-LFF:LKVYP:LEEHSQXEXR, SSVKXQPSRVHH:SSLS-AA¹⁷-LFF:LKVYP:RLEEHLEXAXA, RNVQXRPTQVQL:SSLS-AA¹⁷-LFF:LKVYP:TLEDHLAXKXE, KIPKAXXAPTEL:NAIS-AA¹⁷-LYF:LKKYR:DMVVRGXGXR, GIPEPXXAPTKM:NAIS-AA¹⁷-LYF:LKKYR:NMVVRSXAXR, SIPKAXXAPTEL:NAIS-AA¹⁷-LYF:LKKYR:EMVVRGXGXR, AVPKAXXAPTKL:NAIS-AA¹⁷-LYF:LKKYR:NMVVRAXGXH, KVGKAXXAPTKL:NAIS-AA¹⁷-LYF:LKKYR:EGMSVVRXGXR, KASKAXXAPTKL:NAIS-AA¹⁷-LYF:LKKYR:GMVVREXGXR, GSAGPXXAPTKM:NAIS-AA¹⁷-LYF:LKKYR:GMVVRRXGXS, AAPASXXAPTRL:NAIS-AA¹⁷-LYF:LKKYR:DMVVRAXGXR, STPPTXXAPTRL:NAIS-AA¹⁷-LYF:LKKYR:DMVVRSXGXR, RVPSTXXAPTKT:NAIS-AA¹⁷-LYF:LKKYR:MIVVRXGXL, ASAAPXXAPTAL:NAIS-AA¹⁷-LYF:LKKYR:MIVVRXKXS, ASASPXXAPTDL:NAIS-AA¹⁷-LYF:LKKYR:MIVVRXKXS, ASASPXXAPTDL:NAIS-AA¹⁷-LYF:LKKYR:MVVVRXKXS, KIPKAXXVPTEL:NAIS-AA¹⁷-LYF:LKKYR:DMVVEGXGXR, GIPEPXXVPEKM:NAIS-AA¹⁷-LYF:LKKYR:NMTVESXAXR, SIPKAXXVPTEL:NAIS-AA¹⁷-LYF:LKKYR:EMVVEGXGXR, AVPKAXXAPTKL:NAIS-AA¹⁷-LYF:LKKYR:NMVVKAXGXH, KVGKAXXVPTKL:NAIS-AA¹⁷-LYF:LKKYR:EGMSVAEXGXR, KASKAXXVPTKL:NAIS-AA¹⁷-LYF:LKKYR:GMAVSEXGXR, GSAGPXXTPTKM:NAIS-AA¹⁷-LYF:LKKYR:GMVVDRXGXS, AAPASXXVPARL:NAIS-AA¹⁷-LYF:LKKYR:DMVVEAXGXR, STPPTXXVPTRL:NAIS-AA¹⁷-LYF:LKKYR:DMVVESXGXR, RVPSTXXAPVKT:NAIS-AA¹⁷-LY^{F}:LKKYR:MIVEEXGXL, ASAAPXXVPQAL:NAIS-AA¹⁷-LYF:LKKYR:MIVRSXKXS, ASASPXXVSQDL:NAIS-AA¹⁷-LYF:LKKYR:MIVKSXKXS, ASASPXXVPQDL:NAIS-AA¹⁷-LYF:LKKYR:MVVKSXKXS, NDEGLEXVPTEE:NAIS-AA¹⁷-LYF:LKKYR:FLQHNKXEXR, NDEGLEXVPTGQ:NAIS-AA¹⁷-LYF:LKKYR:LEEHSQXEXR, SSVKXQPSRVHH:NAIS-AA¹⁷-LYF:LKKYR:RLEEHLEXAXA, RNVQXRPTQVQL:NAIS-AA¹⁷-LYF:LKKYR:TLEDHLAXKXE, KIPKAXXAPTEL:SATS-AA¹⁷-LYY:LRKHR:DMVVKGXGXR, GIPEPXXAPTKM:SATS-AA¹⁷-LYY:LRKHR:NMVVKSXAXR, SIPKAXXAPTEL:SATS-AA¹⁷-LYY:LRKHR:EMVVKGXGXR, HVTKPTXAPTKL:SATS-AA¹⁷-LYY:LRKHR:NMVVKSXGXH, YVPKPXXAPTKL:SATS-AA¹⁷-LYY:LRKHR:NMVVKSXGXH, TVPKPXXAPTQL:SATS-AA¹⁷-LYY:LRKHR:NMVVKAXGXH, KVGKAXXAPTKL:SATS-AA¹⁷-LYY:LRKHR:EGMSVVKXGXR, KASKAXXAPTKL:SATS-AA¹⁷-LYY:LRKHR:GMVVKEXGXR, GSAGPXXAPTKM:SATS-AA¹⁷-LYY:LRKHR:GMVVKRXGXS, AAPASXXAPTRL:SATS-AA¹⁷-LYY:LRKHR:DMVVKAXGXR, STPPTXXAPTRL:SATS-AA¹⁷-LYY:LRKHR:DMVVKSXGXR, HVPKPXXAPTKL:SATS-AA¹⁷-LYY:LRKHR:NMVVKSXGXH, RVPSTXXAPTKT:SATS-AA¹⁷-LYY:LRKHR:MIVVKXGXL, ASAAPXXAPTAL:SATS-AA¹⁷-LYY:LRKHR:MIVVKXKXS, ASASPXXAPTDL:SATS-AA¹⁷-LYY:LRKHR:MIVVKXKXS, ASASPXXAPTDL:SATS-AA¹⁷-LYY:LRKHR:MVVVKXKXS, KIPKAXXVPTEL:SATS-AA¹⁷-LYY:LRKHR:DMVVEGXGXR, GIPEPXXVPEKM:SATS-AA¹⁷-LYY:LRKHR:NMTVESXAXR, SIPKAXXVPTEL:SATS-AA¹⁷-LYY:LRKHR:EMVVEGXGXR, HVTKPTXAPTKL:SATS-AA¹⁷-LYY:LRKHR:NMVVRSXGXH, YVPKPXXAPTKL:SATS-AA¹⁷-LYY:LRKHR:NMVVRSXGXH, TVPKPXXAPTQL:SATS-AA¹⁷-LYY:LRKHR:NMVVRAXGXH, KVGKAXXVPTKL:SATS-AA¹⁷-LYY:LRKHR:EGMSVAEXGXR, KASKAXXVPTKL:SATS-AA¹⁷-LYY:LRKHR:GMAVSEXGXR, GSAGPXXTPTKM:SATS-AA¹⁷-LYY:LRKHR:GMVVDRXGXS, AAPASXXVPARL:SATS-AA¹⁷-LYY:LRKHR:DMVVEAXGXR, STPPTXXVPTRL:SATS-AA¹⁷-LYY:LRKHR:DMVVESXGXR, HVPKPXXAPTKL:SATS-AA¹⁷-LYY:LRKHR:NMVVRSXGXH, RVPSTXXAPVKT:SATS-AA¹⁷-LYY:LRKHR:MIVEEXGXL, ASAAPXXVPQAL:SATS-AA¹⁷-LYY:LRKHR:MIVRSXKXS, ASASPXXVSQDL:SATS-AA¹⁷-LYY:LRKHR:MIVKSXKXS, ASASPXXVPQDL:SATS-AA¹⁷-LYY:LRKHR:MVVKSXKXS, NDEGLEXVPTEE:SATS-AA¹⁷-LYY:LRKHR:FLQHNKXEXR, NDEGLEXVPTGQ:SATS-AA¹⁷-LYY:LRKHR:LEEHSQXEXR, SSVKXQPSRVHH:SATS-AA¹⁷-LYY:LRKHR:RLEEHLEXAXA, RNVQXRPTQVQL:SATS-AA¹⁷-LYY:LRKHR:TLEDHLAXKXE, KIPKAXXVPTEL:SPIS-AA¹⁷-LYK:LKYHY:DMVAEGXGXR, GIPEPXXVPTKM:SPIS-AA¹⁷-LYK:LKYHY:NMVAESXAXR, SIPKAXXVPTEL:SPIS-AA¹⁷-LYK:LKYHY:EMVAEGXGXR, HVTKPTXVPTKL:SPIS-AA¹⁷-LYK:LKYHY:NMVAESXGXH, YVPKPXXVPTKL:SPIS-AA¹⁷-LYK:LKYHY:NMVAESXGXH, TVPKPXXVPTQL:SPIS-AA¹⁷-LYK:LKYHY:NMVAEAXGXH, AVPKAXXVPTKL:SPIS-AA¹⁷-LYK:LKYHY:NMVAEAXGXH, KASKAXXVPTKL:SPIS-AA¹⁷-LYK:LKYHY:GMVAEEXGXR, GSAGPXXVPTKM:SPIS-AA¹⁷-LYK:LKYHY:GMVAERXGXS, AAPASXXVPTRL:SPIS-AA¹⁷-LYK:LKYHY:DMVAEAXGXR, STPPTXXVPTRL:SPIS-AA¹⁷-LYK:LKYHY:DMVAESXGXR, HVPKPXXVPTKL:SPIS-AA¹⁷-LYK:LKYHY:NMVAESXGXH, RVPSTXXVPTKT:SPIS-AA¹⁷-LYK:LKYHY:MIVAEXGXL, ASAAPXXVPTAL:SPIS-AA¹⁷-LYK:LKYHY:MIVAEXKXS, ASASPXXVPTDL:SPIS-AA¹⁷-LYK:LKYHY:MIVAEXKXS, ASASPXXVPTDL:SPIS-AA¹⁷-LYK:LKYHY:MVVAEXKXS, KIPKAXXVPTEL:SPIS-AA¹⁷-LYK:LKYHY:DMVVEGXGXR, GIPEPXXVPEKM:SPIS-AA¹⁷-LYK:LKYHY:NMTVESXAXR, SIPKAXXVPTEL:SPIS-AA¹⁷-LYK:LKYHY:EMVVEGXGXR, HVTKPTXAPTKL:SPIS-AA¹⁷-LYK:LKYHY:NMVVRSXGXH, YVPKPXXAPTKL:SPIS-AA¹⁷-LYK:LKYHY:NMVVRSXGXH, TVPKPXXAPTQL:SPIS-AA¹⁷-LYK:LKYHY:NMVVRAXGXH, AVPKAXXAPTKL:SPIS-AA¹⁷-LYK:LKYHY:NMVVKAXGXH, KASKAXXVPTKL:SPIS-AA¹⁷-LYK:LKYHY:GMAVSEXGXR, GSAGPXXTPTKM:SPIS-AA¹⁷-LYK:LKYHY:GMVVDRXGXS, AAPASXXVPARL:SPIS-AA¹⁷-LYK:LKYHY:DMVVEAXGXR, STPPTXXVPTRL:SPIS-AA¹⁷-LYK:LKYHY:DMVVESXGXR, HVPKPXXAPTKL:SPIS-AA¹⁷-LYK:LKYHY:NMVVRSXGXH, RVPSTXXAPVKT:SPIS-AA¹⁷-LYK:LKYHY:MIVEEXGXL, ASAAPXXVPQAL:SPIS-AA¹⁷-LYK:LKYHY:MIVRSXKXS, ASASPXXVSQDL:SPIS-AA¹⁷-LYK:LKYHY:MIVKSXKXS, ASASPXXVPQDL:SPIS-AA¹⁷-LYK:LKYHY:MVVKSXKXS, NDEGLEXVPTEE:SPIS-AA¹⁷-LYK:LKYHY:FLQHNKXEXR, NDEGLEXVPTGQ:SPIS-AA¹⁷-LYK:LKYHY:LEEHSQXEXR, SSVKXQPSRVHH:SPIS-AA¹⁷-LYK:LKYHY:RLEEHLEXAXA, RNVQXRPTQVQL:SPIS-AA¹⁷-LYK:LKYHY:TLEDHLAXKXE, KIPKAXXVPTEL:EPIS-AA¹⁷-LYL:KFKYE:DMAVXGXGSR, GIPEPXXVPTKM:EPIS-AA¹⁷-LYL:KFKYE:NMAVSSXAXR, SIPKAXXVPTEL:EPIS-AA¹⁷-LYL:KFKYE:EMAVXGXGSR, HVTKPTXVPTKL:EPIS-AA¹⁷-LYL:KFKYE:NMAVSSXGXH, YVPKPXXVPTKL:EPIS-AA¹⁷-LYL:KFKYE:NMAVSSXGXH, TVPKPXXVPTQL:EPIS-AA¹⁷-LYL:KFKYE:NMAVSAXGXH, AVPKAXXVPTKL:EPIS-AA¹⁷-LYL:KFKYE:NMAVSAXGXH, KVGKAXXVPTKL:EPIS-AA¹⁷-LYL:KFKYE:EGMSAVSXGXR, GSAGPXXVPTKM:EPIS-AA¹⁷-LYL:KFKYE:GMAVSRXGXS, AAPASXXVPTRL:EPIS-AA¹⁷-LYL:KFKYE:DMAVSAXGXR, STPPTXXVPTRL:EPIS-AA¹⁷-LYL:KFKYE:DMAVSSXGXR, HVPKPXXVPTKL:EPIS-AA¹⁷-LYL:KFKYE:NMAVSSXGXH, RVPSTXXVPTKT:EPIS-AA¹⁷-LYL:KFKYE:MIAVSXGXL, ASAAPXXVPTAL:EPIS-AA¹⁷-LYL:KFKYE:MIAVSXKXS, ASASPXXVPTDL:EPIS-AA¹⁷-LYL:KFKYE:MIAVSXKXS, ASASPXXVPTDL:EPIS-AA¹⁷-LYL:KFKYE:MVAVSXKXS, KIPKAXXVPTEL:EPIS-AA¹⁷-LYL:KFKYE:DMVVEGXGXR, GIPEPXXVPEKM:EPIS-AA¹⁷-LYL:KFKYE:NMTVESXAXR, SIPKAXXVPTEL:EPIS-AA¹⁷-LYL:KFKYE:EMVVEGXGXR, HVTKPTXAPTKL:EPIS-AA¹⁷-LYL:KFKYE:NMVVRSXGXH, YVPKPXXAPTKL:EPIS-AA¹⁷-LYL:KFKYE:NMVVRSXGXH, TVPKPXXAPTQL:EPIS-AA¹⁷-LYL:KFKYE:NMVVRAXGXH, AVPKAXXAPTKL:EPIS-AA¹⁷-LYL:KFKYE:NMVVKAXGXH, KVGKAXXVPTKL:EPIS-AA¹⁷-LYL:KFKYE:EGMSVAEXGXR, GSAGPXXTPTKM:EPIS-AA¹⁷-LYL:KFKYE:GMVVDRXGXS, AAPASXXVPARL:EPIS-AA¹⁷-LYL:KFKYE:DMVVEAXGXR, STPPTXXVPTRL:EPIS-AA¹⁷-LYL:KFKYE:DMVVESXGXR, HVPKPXXAPTKL:EPIS-AA¹⁷-LYL:KFKYE:NMVVRSXGXH, RVPSTXXAPVKT:EPIS-AA¹⁷-LYL:KFKYE:MIVEEXGXL, ASAAPXXVPQAL:EPIS-AA¹⁷-LYL:KFKYE:MIVRSXKXS, ASASPXXVSQDL:EPIS-AA¹⁷-LYL:KFKYE:MIVKSXKXS, ASASPXXVPQDL:EPIS-AA¹⁷-LYL:KFKYE:MVVKSXKXS, NDEGLEXVPTEE:EPIS-AA¹⁷-LYL:KFKYE:FLQHNKXEXR, NDEGLEXVPTGQ:EPIS-AA¹⁷-LYL:KFKYE:LEEHSQXEXR, SSVKXQPSRVHH:EPIS-AA¹⁷-LYL:KFKYE:RLEEHLEXAXA, RNVQXRPTQVQL:EPIS-AA¹⁷-LYL:KFKYE:TLEDHLAXKXE, KIPKAXXTPTEL:SPIN-AA¹⁷-LYF:YGKIP:DMVVDGXGXR, GIPEPXXTPTKM:SPIN-AA¹⁷-LYF:YGKIP:NMVVDSXAXR, SIPKAXXTPTEL:SPIN-AA¹⁷-LYF:YGKIP:EMVVDGXGXR, HVTKPTSTPTKL:SPIN-AA¹⁷-LYF:YGKIP:NMVVDSXGXH, YVPKPXXTPTKL:SPIN-AA¹⁷-LYF:YGKIP:NMVVDSXGXH, TVPKPXXTPTQL:SPIN-AA¹⁷-LYF:YGKIP:NMVVDAXGXH, AVPKAXXTPTKL:SPIN-AA¹⁷-LYF:YGKIP:NMVVDAXGXH, KVGKAXXTPTKL:SPIN-AA¹⁷-LYF:YGKIP:EGMSVVDXGXR, KASKAXXTPTKL:SPIN-AA¹⁷-LYF:YGKIP:GMVVDEXGXR, AAPASXXTPTRL:SPIN-AA¹⁷-LYF:YGKIP:DMVVDAXGXR, STPPTXXTPTRL:SPIN-AA¹⁷-LYF:YGKIP:DMVVDSXGXR, HVPKPXXTPTKL:SPIN-AA¹⁷-LYF:YGKIP:NMVVDSXGXH, RVPSTXXTPTKT:SPIN-AA¹⁷-LYF:YGKIP:MIVVDXGXL, ASAAPXXTPTAL:SPIN-AA¹⁷-LYF:YGKIP:MIVVDXKXS, ASASPXXTPTDL:SPIN-AA¹⁷-LYF:YGKIP:MIVVDXKXS, ASASPXXTPTDL:SPIN-AA¹⁷-LYF:YGKIP:MVVVDXKXS, KIPKAXXVPTEL:SPIN-AA¹⁷-LYF:YGKIP:DMVVEGXGXR, GIPEPXXVPEKM:SPIN-AA¹⁷-LYF:YGKIP:NMTVESXAXR, SIPKAXXVPTEL:SPIN-AA¹⁷-LYF:YGKIP:EMVVEGXGXR, HVTKPTXAPTKL:SPIN-AA¹⁷-LYF:YGKIP:NMVVRSXGXH, YVPKPXXAPTKL:SPIN-AA¹⁷-LYF:YGKIP:NMVVRSXGXH, TVPKPXXAPTQL:SPIN-AA¹⁷-LYF:YGKIP:NMVVRAXGXH, AVPKAXXAPTKL:SPIN-AA¹⁷-LYF:YGKIP:NMVVKAXGXH, KVGKAXXVPTKL:SPIN-AA¹⁷-LYF:YGKIP:EGMSVAEXGXR, KASKAXXVPTKL:SPIN-AA¹⁷-LYF:YGKIP:GMAVSEXGXR, AAPASXXVPARL:SPIN-AA¹⁷-LYF:YGKIP:DMVVEAXGXR, STPPTXXVPTRL:SPIN-AA¹⁷-LYF:YGKIP:DMVVESXGXR, HVPKPXXAPTKL:SPIN-AA¹⁷-LYF:YGKIP:NMVVRSXGXH, RVPSTXXAPVKT:SPIN-AA¹⁷-LYF:YGKIP:MIVEEXGXL, ASAAPXXVPQAL:SPIN-AA¹⁷-LYF:YGKIP:MIVRSXKXS, ASASPXXVSQDL:SPIN-AA¹⁷-LYF:YGKIP:MIVKSXKXS, ASASPXXVPQDL:SPIN-AA¹⁷-LYF:YGKIP:MVVKSXKXS, NDEGLEXVPTEE:SPIN-AA¹⁷-LYF:YGKIP:FLQHNKXEXR, NDEGLEXVPTGQ:SPIN-AA¹⁷-LYF:YGKIP:LEEHSQXEXR, SSVKXQPSRVHH:SPIN-AA¹⁷-LYF:YGKIP:RLEEHLEXAXA, RNVQXRPTQVQL:SPIN-AA¹⁷-LYF:YGKIP:TLEDHLAXKXE, KIPKAXXVPAEL:SPIS-AA¹⁷-LYI:YKQYE:DMVVEGXGXR, G IPEPXXVPAKM:SPIS-AA¹⁷-LYI:YKQYE:NMVVESXAXR, SIPKAXXVPAEL:SPIS-AA¹⁷-LYI:YKQYE:EMVVEGXGXR, HVTKPTXVPAKL:SPIS-AA¹⁷-LYI:YKQYE:NMVVESXGXH, YVPKPXXVPAKL:SPIS-AA¹⁷-LYI:YKQYE:NMVVESXGXH, TVPKPXXVPAQL:SPIS-AA¹⁷-LYI:YKQYE:NMVVEAXGXH, AVPKAXXVPAKL:SPIS-AA¹⁷-LYI:YKQYE:NMVVEAXGXH, KVGKAXXVPAKL:SPIS-AA¹⁷-LYI:YKQYE:EGMSVVEXGXR, KASKAXXVPAKL:SPIS-AA¹⁷-LYI:YKQYE:GMVVEEXGXR, GSAGPXXVPAKM:SPIS-AA¹⁷-LYI:YKQYE:GMVVERXGXS, STPPTXXVPARL:SPIS-AA¹⁷-LYI:YKQYE:DMVVESXGXR, HVPKPXXVPAKL:SPIS-AA¹⁷-LYI:YKQYE:NMVVESXGXH, RVPSTXXVPAKT:SPIS-AA¹⁷-LYI:YKQYE:MIVVEXGXL, ASAAPXXVPAAL:SPIS-AA¹⁷-LYI:YKQYE:MIVVEXKXS, ASASPXXVPADL:SPIS-AA¹⁷-LYI:YKQYE:MIVVEXKXS, ASASPXXVPADL:SPIS-AA¹⁷-LYI:YKQYE:MVVVEXKXS, KIPKAXXVPTEL:SPIS-AA¹⁷-LYI:YKQYE:DMVVEGXGXR, GIPEPXXVPEKM:SPIS-AA¹⁷-LYI:YKQYE:NMTVESXAXR, SIPKAXXVPTEL:SPIS-AA¹⁷-LYI:YKQYE:EMVVEGXGXR, HVTKPTXAPTKL:SPIS-AA¹⁷-LYI:YKQYE:NMVVRSXGXH, YVPKPXXAPTKL:SPIS-AA¹⁷-LYI:YKQYE:NMVVRSXGXH, TVPKPXXAPTQL:SPIS-AA¹⁷-LYI:YKQYE:NMVVRAXGXH, AVPKAXXAPTKL:SPIS-AA¹⁷-LYI:YKQYE:NMVVKAXGXH, KVGKAXXVPTKL:SPIS-AA¹⁷-LYI:YKQYE:EGMSVAEXGXR, KASKAXXVPTKL:SPIS-AA¹⁷-LYI:YKQYE:GMAVSEXGXR, GSAGPXXTPTKM:SPIS-AA¹⁷-LYI:YKQYE:GMVVDRXGXS, STPPTXXVPTRL:SPIS-AA¹⁷-LYI:YKQYE:DMVVESXGXR, HVPKPXXAPTKL:SPIS-AA¹⁷-LYI:YKQYE:NMVVRSXGXH, RVPSTXXAPVKT:SPIS-AA¹⁷-LYI:YKQYE:MIVEEXGXL, ASAAPXXVPQAL:SPIS-AA¹⁷-LYI:YKQYE:MIVRSXKXS, ASASPXXVSQDL:SPIS-AA¹⁷-LYI:YKQYE:MIVKSXKXS, ASASPXXVPQDL:SPIS-AA¹⁷-LYI:YKQYE:MVVKSXKXS, NDEGLEXVPTEE:SPIS-AA¹⁷-LYI:YKQYE:FLQHNKXEXR, NDEGLEXVPTGQ:SPIS-AA¹⁷-LYI:YKQYE:LEEHSQXEXR, SSVKXQPSRVHH:SPIS-AA¹⁷-LYI:YKQYE:RLEEHLEXAXA, RNVQXRPTQVQL:SPIS-AA¹⁷-LYI:YKQYE:TLEDHLAXKXE, KIPKAXXVPTEL:SPIS-AA¹⁷-LFI:YKQYE:DMVVEGXGXR, GIPEPXXVPTKM:SPIS-AA¹⁷-LFI:YKQYE:NMVVESXAXR, SIPKAXXVPTEL:SPIS-AA¹⁷-LFI:YKQYE:EMVVEGXGXR, HVTKPTXVPTKL:SPIS-AA¹⁷-LFI:YKQYE:NMVVESXGXH, YVPKPXXVPTKL:SPIS-AA¹⁷-LFI:YKQYE:NMVVESXGXH, TVPKPXXVPTQL:SPIS-AA¹⁷-LFI:YKQYE:NMVVEAXGXH, AVPKAXXVPTKL:SPIS-AA¹⁷-LFI:YKQYE:NMVVEAXGXH, KVGKAXXVPTKL:SPIS-AA¹⁷-LFI:YKQYE:EGMSVVEXGXR, KASKAXXVPTKL:SPIS-AA¹⁷-LFI:YKQYE:GMVVEEXGXR, GSAGPXXVPTKM:SPIS-AA¹⁷-LFI:YKQYE:GMVVERXGXS, AAPASXXVPTRL:SPIS-AA¹⁷-LFI:YKQYE:DMVVEAXGXR, HVPKPXXVPTKL:SPIS-AA¹⁷-LFI:YKQYE:NMVVESXGXH, RVPSTXXVPTKT:SPIS-AA¹⁷-LFI:YKQYE:MIVVEXGXL, ASAAPXXVPTAL:SPIS-AA¹⁷-LFI:YKQYE:MIVVEXKXS, ASASPXXVPTDL:SPIS-AA¹⁷-LFI:YKQYE:MIVVEXKXS, ASASPXXVPTDL:SPIS-AA¹⁷-LFI:YKQYE:MVVVEXKXS, GIPEPXXVPEKM:SPIS-AA¹⁷-LFI:YKQYE:NMTVESXAXR, HVTKPTXAPTKL:SPIS-AA¹⁷-LFI:YKQYE:NMVVRSXGXH, YVPKPXXAPTKL:SPIS-AA¹⁷-LFI:YKQYE:NMVVRSXGXH, TVPKPXXAPTQL:SPIS-AA¹⁷-LFI:YKQYE:NMVVRAXGXH, AVPKAXXAPTKL:SPIS-AA¹⁷-LFI:YKQYE:NMVVKAXGXH, KVGKAXXVPTKL:SPIS-AA¹⁷-LFI:YKQYE:EGMSVAEXGXR, KASKAXXVPTKL:SPIS-AA¹⁷-LFI:YKQYE:GMAVSEXGXR, GSAGPXXTPTKM:SPIS-AA¹⁷-LFI:YKQYE:GMVVDRXGXS, AAPASXXVPARL:SPIS-AA¹⁷-LFI:YKQYE:DMVVEAXGXR, HVPKPXXAPTKL:SPIS-AA¹⁷-LFI:YKQYE:NMVVRSXGXH, RVPSTXXAPVKT:SPIS-AA¹⁷-LFI:YKQYE:MIVEEXGXL, ASAAPXXVPQAL:SPIS-AA¹⁷-LFI:YKQYE:MIVRSXKXS, ASASPXXVSQDL:SPIS-AA¹⁷-LFI:YKQYE:MIVKSXKXS, ASASPXXVPQDL:SPIS-AA¹⁷-LFI:YKQYE:MVVKSXKXS, NDEGLEXVPTEE:SPIS-AA¹⁷-LFI:YKQYE:FLQHNKXEXR, NDEGLEXVPTGQ:SPIS-AA¹⁷-LFI:YKQYE:LEEHSQXEXR, SSVKXQPSRVHH:SPIS-AA¹⁷-LFI:YKQYE:RLEEHLEXAXA, RNVQXRPTQVQL:SPIS-AA¹⁷-LFI:YKQYE:TLEDHLAXKXE, KIPKAXXAPVEL:KPLS-AA¹⁷-LYV:DHHKD:DMVEEGXGXR, GIPEPXXAPVKM:KPLS-AA¹⁷-LYV:DHHKD:NMVEESXAXR, SIPKAXXAPVEL:KPLS-AA¹⁷-LYV:DHHKD:EMVEEGXGXR, HVTKPTXAPVKL:KPLS-AA¹⁷-LYV:DHHKD:NMVEESXGXH, YVPKPXXAPVKL:KPLS-AA¹⁷-LYV:DHHKD:NMVEESXGXH, TVPKPXXAPVQL:KPLS-AA¹⁷-LYV:DHHKD:NMVEEAXGXH, AVPKAXXAPVKL:KPLS-AA¹⁷-LYV:DHHKD:NMVEEAXGXH, KVGKAXXAPVKL:KPLS-AA¹⁷-LYV:DHHKD:EGMSVEEXGXR, KASKAXXAPVKL:KPLS-AA¹⁷-LYV:DHHKD:GMVEEEXGXR, GSAGPXXAPVKM:KPLS-AA¹⁷-LYV:DHHKD:GMVEERXGXS, AAPASXXAPVRL:KPLS-AA¹⁷-LYV:DHHKD:DMVEEAXGXR, STPPTXXAPVRL:KPLS-AA¹⁷-LYV:DHHKD:DMVEESXGXR, HVPKPXXAPVKL:KPLS-AA¹⁷-LYV:DHHKD:NMVEESXGXH, ASAAPXXAPVAL:KPLS-AA¹⁷-LYV:DHHKD:MIVEEXKXS, ASASPXXAPVDL:KPLS-AA¹⁷-LYV:DHHKD:MIVEEXKXS, ASASPXXAPVDL:KPLS-AA¹⁷-LYV:DHHKD:MVVEEXKXS, KIPKAXXVPTEL:KPLS-AA¹⁷-LYV:DHHKD:DMVVEGXGXR, GIPEPXXVPEKM:KPLS-AA¹⁷-LYV:DHHKD:NMTVESXAXR, SIPKAXXVPTEL:KPLS-AA¹⁷-LYV:DHHKD:EMVVEGXGXR, HVTKPTXAPTKL:KPLS-AA¹⁷-LYV:DHHKD:NMVVRSXGXH, YVPKPXXAPTKL:KPLS-AA¹⁷-LYV:DHHKD:NMVVRSXGXH, TVPKPXXAPTQL:KPLS-AA¹⁷-LYV:DHHKD:NMVVRAXGXH, AVPKAXXAPTKL:KPLS-AA¹⁷-LYV:DHHKD:NMVVKAXGXH, KVGKAXXVPTKL:KPLS-AA¹⁷-LYV:DHHKD:EGMSVAEXGXR, KASKAXXVPTKL:KPLS-AA¹⁷-LYV:DHHKD:GMAVSEXGXR, GSAGPXXTPTKM:KPLS-AA¹⁷-LYV:DHHKD:GMVVDRXGXS, AAPASXXVPARL:KPLS-AA¹⁷-LYV:DHHKD:DMVVEAXGXR, STPPTXXVPTRL:KPLS-AA¹⁷-LYV:DHHKD:DMVVESXGXR, HVPKPXXAPTKL:KPLS-AA¹⁷-LYV:DHHKD:NMVVRSXGXH, ASAAPXXVPQAL:KPLS-AA¹⁷-LYV:DHHKD:MIVRSXKXS, ASASPXXVSQDL:KPLS-AA¹⁷-LYV:DHHKD:MIVKSXKXS, ASASPXXVPQDL:KPLS-AA¹⁷-LYV:DHHKD:MVVKSXKXS, NDEGLEXVPTEE:KPLS-AA¹⁷-LYV:DHHKD:FLQHNKXEXR, NDEGLEXVPTGQ:KPLS-AA¹⁷-LYV:DHHKD:LEEHSQXEXR, SSVKXQPSRVHH:KPLS-AA¹⁷-LYV:DHHKD:RLEEHLEXAXA, RNVQXRPTQVQL:KPLS-AA¹⁷-LYV:DHHKD:TLEDHLAXKXE, KIPKAXXVPQEL:EPLP-AA¹⁷-VYY:EQLSN:DMVRXGXGSR, GIPEPXXVPQKM:EPLP-AA¹⁷-VYY:EQLSN:NMVRSSXAXR, SIPKAXXVPQEL:EPLP-AA¹⁷-VYY:EQLSN:EMVRXGXGSR, HVTKPTXVPQKL:EPLP-AA¹⁷-VYY:EQLSN:NMVRSSXGXH, YVPKPXXVPQKL:EPLP-AA¹⁷-VYY:EQLSN:NMVRSSXGXH, TVPKPXXVPQQL:EPLP-AA¹⁷-VYY:EQLSN:NMVRSAXGXH, AVPKAXXVPQKL:EPLP-AA¹⁷-VYY:EQLSN:NMVRSAXGXH, KVGKAXXVPQKL:EPLP-AA¹⁷-VYY:EQLSN:EGMSVRSXGXR, KASKAXXVPQKL:EPLP-AA¹⁷-VYY:EQLSN:GMVRSEXGXR, GSAGPXXVPQKM:EPLP-AA¹⁷-VYY:EQLSN:GMVRSRXGXS, AAPASXXVPQRL:EPLP-AA¹⁷-VYY:EQLSN:DMVRSAXGXR, STPPTXXVPQRL:EPLP-AA¹⁷-VYY:EQLSN:DMVRSSXGXR, HVPKPXXVPQKL:EPLP-AA¹⁷-VYY:EQLSN:NMVRSSXGXH, RVPSTXXVPQKT:EPLP-AA¹⁷-VYY:EQLSN:MIVRSXGXL, ASASPXXVPQDL:EPLP-AA¹⁷-VYY:EQLSN:MIVRSXKXS, ASASPXXVPQDL:EPLP-AA¹⁷-VYY:EQLSN:MVVRSXKXS, KIPKAXXVPTEL:EPLP-AA¹⁷-VYY:EQLSN:DMVVEGXGXR, GIPEPXXVPEKM:EPLP-AA¹⁷-VYY:EQLSN:NMTVESXAXR, SIPKAXXVPTEL:EPLP-AA¹⁷-VYY:EQLSN:EMVVEGXGXR, HVTKPTXAPTKL:EPLP-AA¹⁷-VYY:EQLSN:NMVVRSXGXH, YVPKPXXAPTKL:EPLP-AA¹⁷-VYY:EQLSN:NMVVRSXGXH, TVPKPXXAPTQL:EPLP-AA¹⁷-VYY:EQLSN:NMVVRAXGXH, AVPKAXXAPTKL:EPLP-AA¹⁷-VYY:EQLSN:NMVVKAXGXH, KVGKAXXVPTKL:EPLP-AA¹⁷-VYY:EQLSN:EGMSVAEXGXR, KASKAXXVPTKL:EPLP-AA¹⁷-VYY:EQLSN:GMAVSEXGXR, GSAGPXXTPTKM:EPLP-AA¹⁷-VYY:EQLSN:GMVVDRXGXS, AAPASXXVPARL:EPLP-AA¹⁷-VYY:EQLSN:DMVVEAXGXR, STPPTXXVPTRL:EPLP-AA¹⁷-VYY:EQLSN:DMVVESXGXR, HVPKPXXAPTKL:EPLP-AA¹⁷-VYY:EQLSN:NMVVRSXGXH, RVPSTXXAPVKT:EPLP-AA¹⁷-VYY:EQLSN:MIVEEXGXL, ASASPXXVSQDL:EPLP-AA¹⁷-VYY:EQLSN:MIVKSXKXS, ASASPXXVPQDL:EPLP-AA¹⁷-VYY:EQLSN:MVVKSXKXS, NDEGLEXVPTEE:EPLP-AA¹⁷-VYY:EQLSN:FLQHNKXEXR, NDEGLEXVPTGQ:EPLP-AA¹⁷-VYY:EQLSN:LEEHSQXEXR, SSVKXQPSRVHH:EPLP-AA¹⁷-VYY:EQLSN:RLEEHLEXAXA, RNVQXRPTQVQL:EPLP-AA¹⁷-VYY:EQLSN:TLEDHLAXKXE, KIPKAXXVSQEL:EPLT-AA¹⁷-LYY:EQLSN:DMVKXGXGSR, GIPEPXXVSQKM:EPLT-AA¹⁷-LYY:EQLSN:NMVKSSXAXR, SIPKAXXVSQEL:EPLT-AA¹⁷-LYY:EQLSN:EMVKXGXGSR, HVTKPTXVSQKL:EPLT-AA¹⁷-LYY:EQLSN:NMVKSSXGXH, YVPKPXXVSQKL:EPLT-AA¹⁷-LYY:EQLSN:NMVKSSXGXH, TVPKPXXVSQQL:EPLT-AA¹⁷-LYY:EQLSN:NMVKSAXGXH, AVPKAXXVSQKL:EPLT-AA¹⁷-LYY:EQLSN:NMVKSAXGXH, KVGKAXXVSQKL:EPLT-AA¹⁷-LYY:EQLSN:EGMSVKSXGXR, KASKAXXVSQKL:EPLT-AA¹⁷-LYY:EQLSN:GMVKSEXGXR, GSAGPXXVSQKM:EPLT-AA¹⁷-LYY:EQLSN:GMVKSRXGXS, AAPASXXVSQRL:EPLT-AA¹⁷-LYY:EQLSN:DMVKSAXGXR, STPPTXXVSQRL:EPLT-AA¹⁷-LYY:EQLSN:DMVKSSXGXR, HVPKPXXVSQKL:EPLT-AA¹⁷-LYY:EQLSN:NMVKSSXGXH, RVPSTXXVSQKT:EPLT-AA¹⁷-LYY:EQLSN:MIVKSXGXL, ASAAPXXVSQAL:EPLT-AA¹⁷-LYY:EQLSN:MIVKSXKXS, ASASPXXVSQDL:EPLT-AA¹⁷-LYY:EQLSN:MVVKSXKXS, KIPKAXXVPTEL:EPLT-AA¹⁷-LYY:EQLSN:DMVVEGXGXR, GIPEPXXVPEKM:EPLT-AA¹⁷-LYY:EQLSN:NMTVESXAXR, SIPKAXXVPTEL:EPLT-AA¹⁷-LYY:EQLSN:EMVVEGXGXR, HVTKPTXAPTKL:EPLT-AA¹⁷-LYY:EQLSN:NMVVRSXGXH, YVPKPXXAPTKL:EPLT-AA¹⁷-LYY:EQLSN:NMVVRSXGXH, TVPKPXXAPTQL:EPLT-AA¹⁷-LYY:EQLSN:NMVVRAXGXH, AVPKAXXAPTKL:EPLT-AA¹⁷-LYY:EQLSN:NMVVKAXGXH, KVGKAXXVPTKL:EPLT-AA¹⁷-LYY:EQLSN:EGMSVAEXGXR, KASKAXXVPTKL:EPLT-AA¹⁷-LYY:EQLSN:GMAVSEXGXR, GSAGPXXTPTKM:EPLT-AA¹⁷-LYY:EQLSN:GMVVDRXGXS, AAPASXXVPARL:EPLT-AA¹⁷-LYY:EQLSN:DMVVEAXGXR, STPPTXXVPTRL:EPLT-AA¹⁷-LYY:EQLSN:DMVVESXGXR, HVPKPXXAPTKL:EPLT-AA¹⁷-LYY:EQLSN:NMVVRSXGXH, RVPSTXXAPVKT:EPLT-AA¹⁷-LYY:EQLSN:MIVEEXGXL, ASAAPXXVPQAL:EPLT-AA¹⁷-LYY:EQLSN:MIVRSXKXS, NDEGLEXVPTEE:EPLT-AA¹⁷-LYY:EQLSN:FLQHNKXEXR, NDEGLEXVPTGQ:EPLT-AA¹⁷-LYY:EQLSN:LEEHSQXEXR, SSVKXQPSRVHH:EPLT-AA¹⁷-LYY:EQLSN:RLEEHLEXAXA, RNVQXRPTQVQL:EPLT-AA¹⁷-LYY:EQLSN:TLEDHLAXKXE, KIPKAXXVPQEL:EPLT-AA¹⁷-LYY:EQLSN:DMVKXGXGSR, GIPEPXXVPQKM:EPLT-AA¹⁷-LYY:EQLSN:NMVKSSXAXR, SIPKAXXVPQEL:EPLT-AA¹⁷-LYY:EQLSN:EMVKXGXGSR, HVTKPTXVPQKL:EPLT-AA¹⁷-LYY:EQLSN:NMVKSSXGXH, YVPKPXXVPQKL:EPLT-AA¹⁷-LYY:EQLSN:NMVKSSXGXH, TVPKPXXVPQQL:EPLT-AA¹⁷-LYY:EQLSN:NMVKSAXGXH, AVPKAXXVPQKL:EPLT-AA¹⁷-LYY:EQLSN:NMVKSAXGXH, KVGKAXXVPQKL:EPLT-AA¹⁷-LYY:EQLSN:EGMSVKSXGXR, KASKAXXVPQKL:EPLT-AA¹⁷-LYY:EQLSN:GMVKSEXGXR, GSAGPXXVPQKM:EPLT-AA¹⁷-LYY:EQLSN:GMVKSRXGXS, AAPASXXVPQRL:EPLT-AA¹⁷-LYY:EQLSN:DMVKSAXGXR, STPPTXXVPQRL:EPLT-AA¹⁷-LYY:EQLSN:DMVKSSXGXR, HVPKPXXVPQKL:EPLT-AA¹⁷-LYY:EQLSN:NMVKSSXGXH, RVPSTXXVPQKT:EPLT-AA¹⁷-LYY:EQLSN:MIVKSXGXL, ASAAPXXVPQAL:EPLT-AA¹⁷-LYY:EQLSN:MIVKSXKXS, ASASPXXVPQDL:EPLT-AA¹⁷-LYY:EQLSN:MIVKSXKXS, NDEGLEXVPTGQ:SNIT-AA¹⁷-QIM:IGEMS:LEQHNQXEXR, KIPKAXXVPTEL:SNIT-AA¹⁷-QIM:IGEMS:DMVVEGXGXR, GIPEPXXVPEKM:SNIT-AA¹⁷-QIM:IGEMS:NMTVESXAXR, SIPKAXXVPTEL:SNIT-AA¹⁷-QIM:IGEMS:EMVVEGXGXR, HVTKPTXAPTKL:SNIT-AA¹⁷-QIM:IGEMS:NMVVRSXGXH, YVPKPXXAPTKL:SNIT-AA¹⁷-QIM:IGEMS:NMVVRSXGXH, TVPKPXXAPTQL:SNIT-AA¹⁷-QIM:IGEMS:NMVVRAXGXH, AVPKAXXAPTKL:SNIT-AA¹⁷-QIM:IGEMS:NMVVKAXGXH, KVGKAXXVPTKL:SNIT-AA¹⁷-QIM:IGEMS:EGMSVAEXGXR, KASKAXXVPTKL:SNIT-AA¹⁷-QIM:IGEMS:GMAVSEXGXR, GSAGPXXTPTKM:SNIT-AA¹⁷-QIM:IGEMS:GMVVDRXGXS, AAPASXXVPARL:SNIT-AA¹⁷-QIM:IGEMS:DMVVEAXGXR, STPPTXXVPTRL:SNIT-AA¹⁷-QIM:IGEMS:DMVVESXGXR, HVPKPXXAPTKL:SNIT-AA¹⁷-QIM:IGEMS:NMVVRSXGXH, RVPSTXXAPVKT:SNIT-AA¹⁷-QIM:IGEMS:MIVEEXGXL, ASAAPXXVPQAL:SNIT-AA¹⁷-QIM:IGEMS:MIVRSXKXS, ASASPXXVSQDL:SNIT-AA¹⁷-QIM:IGEMS:MIVKSXKXS, ASASPXXVPQDL:SNIT-AA¹⁷-QIM:IGEMS:MVVKSXKXS, NDEGLEXVPTGQ:SNIT-AA¹⁷-QIM:IGEMS:LEEHSQXEXR, SSVKXQPSRVHH:SNIT-AA¹⁷-QIM:IGEMS:RLEEHLEXAXA, RNVQXRPTQVQL:SNIT-AA¹⁷-QIM:IGEMS:TLEDHLAXKXE, NDEGLEXVPTEE:SNIT-AA¹⁷-QIM:LGEMS:FLEHXKXESR, KIPKAXXVPTEL:SNIT-AA¹⁷-QIM:LGEMS:DMVVEGXGXR, GIPEPXXVPEKM:SNIT-AA¹⁷-QIM:LGEMS:NMTVESXAXR, SIPKAXXVPTEL:SNIT-AA¹⁷-QIM:LGEMS:EMVVEGXGXR, HVTKPTXAPTKL:SNIT-AA¹⁷-QIM:LGEMS:NMVVRSXGXH, YVPKPXXAPTKL:SNIT-AA¹⁷-QIM:LGEMS:NMVVRSXGXH, TVPKPXXAPTQL:SNIT-AA¹⁷-QIM:LGEMS:NMVVRAXGXH, AVPKAXXAPTKL:SNIT-AA¹⁷-QIM:LGEMS:NMVVKAXGXH, KVGKAXXVPTKL:SNIT-AA¹⁷-QIM:LGEMS:EGMSVAEXGXR, KASKAXXVPTKL:SNIT-AA¹⁷-QIM:LGEMS:GMAVSEXGXR, GSAGPXXTPTKM:SNIT-AA¹⁷-QIM:LGEMS:GMVVDRXGXS, AAPASXXVPARL:SNIT-AA¹⁷-QIM:LGEMS:DMVVEAXGXR, STPPTXXVPTRL:SNIT-AA¹⁷-QIM:LGEMS:DMVVESXGXR, HVPKPXXAPTKL:SNIT-AA¹⁷-QIM:LGEMS:NMVVRSXGXH, RVPSTXXAPVKT:SNIT-AA¹⁷-QIM:LGEMS:MIVEEXGXL, ASAAPXXVPQAL:SNIT-AA¹⁷-QIM:LGEMS:MIVRSXKXS, ASASPXXVSQDL:SNIT-AA¹⁷-QIM:LGEMS:MIVKSXKXS, ASASPXXVPQDL:SNIT-AA¹⁷-QIM:LGEMS:MVVKSXKXS, NDEGLEXVPTEE:SNIT-AA¹⁷-QIM:LGEMS:FLQHNKXEXR, SSVKXQPSRVHH:SNIT-AA¹⁷-QIM:LGEMS:RLEEHLEXAXA, RNVQXRPTQVQL:SNIT-AA¹⁷-QIM:LGEMS:TLEDHLAXKXE, RNVQXRPSRVQL:RSVK-AA¹⁷-AKV:KEVQV:TLEEHLAXKXE, KIPKAXXVPTEL:RSVK-AA¹⁷-AKV:KEVQV:DMVVEGXGXR, GIPEPXXVPEKM:RSVK-AA¹⁷-AKV:KEVQV:NMTVESXAXR, SIPKAXXVPTEL:RSVK-AA¹⁷-AKV:KEVQV:EMVVEGXGXR, HVTKPTXAPTKL:RSVK-AA¹⁷-AKV:KEVQV:NMVVRSXGXH, YVPKPXXAPTKL:RSVK-AA¹⁷-AKV:KEVQV:NMVVRSXGXH, TVPKPXXAPTQL:RSVK-AA¹⁷-AKV:KEVQV:NMVVRAXGXH, AVPKAXXAPTKL:RSVK-AA¹⁷-AKV:KEVQV:NMVVKAXGXH, KVGKAXXVPTKL:RSVK-AA¹⁷-AKV:KEVQV:EGMSVAEXGXR, KASKAXXVPTKL:RSVK-AA¹⁷-AKV:KEVQV:GMAVSEXGXR, GSAGPXXTPTKM:RSVK-AA¹⁷-AKV:KEVQV:GMVVDRXGXS, AAPASXXVPARL:RSVK-AA¹⁷-AKV:KEVQV:DMVVEAXGXR, STPPTXXVPTRL:RSVK-AA¹⁷-AKV:KEVQV:DMVVESXGXR, HVPKPXXAPTKL:RSVK-AA¹⁷-AKV:KEVQV:NMVVRSXGXH, RVPSTXXAPVKT:RSVK-AA¹⁷-AKV:KEVQV:MIVEEXGXL, ASAAPXXVPQAL:RSVK-AA¹⁷-AKV:KEVQV:MIVRSXKXS, ASASPXXVSQDL:RSVK-AA¹⁷-AKV:KEVQV:MIVKSXKXS, ASASPXXVPQDL:RSVK-AA¹⁷-AKV:KEVQV:MVVKSXKXS, NDEGLEXVPTEE:RSVK-AA¹⁷-AKV:KEVQV:FLQHNKXEXR, NDEGLEXVPTGQ:RSVK-AA¹⁷-AKV:KEVQV:LEEHSQXEXR, RNVQXRPTQVQL:RSVK-AA¹⁷-AKV:KEVQV:TLEDHLAXKXE, SSVKXQPTQVHH:RPVQ-AA¹⁷-RKI:KKATV:RLEDHLEXAXA, KIPKAXXVPTEL:RPVQ-AA¹⁷-RKI:KKATV:DMVVEGXGXR, GIPEPXXVPEKM:RPVQ-AA¹⁷-RKI:KKATV:NMTVESXAXR, SIPKAXXVPTEL:RPVQ-AA¹⁷-RKI:KKATV:EMVVEGXGXR, HVTKPTXAPTKL:RPVQ-AA¹⁷-RKI:KKATV:NMVVRSXGXH, YVPKPXXAPTKL:RPVQ-AA¹⁷-RKI:KKATV:NMVVRSXGXH, TVPKPXXAPTQL:RPVQ-AA¹⁷-RKI:KKATV:NMVVRAXGXH, AVPKAXXAPTKL:RPVQ-AA¹⁷-RKI:KKATV:NMVVKAXGXH, KVGKAXXVPTKL:RPVQ-AA¹⁷-RKI:KKATV:EGMSVAEXGXR, KASKAXXVPTKL:RPVQ-AA¹⁷-RKI:KKATV:GMAVSEXGXR, GSAGPXXTPTKM:RPVQ-AA¹⁷-RKI:KKATV:GMVVDRXGXS, AAPASXXVPARL:RPVQ-AA¹⁷-RKI:KKATV:DMVVEAXGXR, STPPTXXVPTRL:RPVQ-AA¹⁷-RKI:KKATV:DMVVESXGXR, HVPKPXXAPTKL:RPVQ-AA¹⁷-RKI:KKATV:NMVVRSXGXH, RVPSTXXAPVKT:RPVQ-AA¹⁷-RKI:KKATV:MIVEEXGXL, ASAAPXXVPQAL:RPVQ-AA¹⁷-RKI:KKATV:MIVRSXKXS, ASASPXXVSQDL:RPVQ-AA¹⁷-RKI:KKATV:MIVKSXKXS, ASASPXXVPQDL:RPVQ-AA¹⁷-RKI:KKATV:MVVKSXKXS, NDEGLEXVPTEE:RPVQ-AA¹⁷-RKI:KKATV:FLQHNKXEXR, NDEGLEXVPTGQ:RPVQ-AA¹⁷-RKI:KKATV:LEEHSQXEXR and SSVKXQPSRVHH:RPVQ-AA¹⁷-RKI:KKATV:RLEEHLEXAXA; and wherein AA¹⁷ is selected from the group consisting of G, A, V, L, I, P, F, M, W, T and S (in particular is selected from the group consisting of M, I, L, V and T).

[0367] In particular, in certain embodiments, the hexaplet PEP7:PEP3:PEP1:PEP2:PEP4:PEP8 is selected from the group consisting of GIPEPXX:VPT:SAIS:LKNYQ:VVE:SXAXR, SIPKAXX:VPT:SAIS:LKNYQ:VVE:GXGXR, HVTKPTX:VPT:SAIS:LKNYQ:VVE:SXGXH, YVPKPXX:VPT:SAIS:LKNYQ:VVE:SXGXH, TVPKPXX:VPT:SAIS:LKNYQ:VVE:AXGXH, AVPKAXX:VPT:SAIS:LKNYQ:VVE:AXGXH, KVGKAXX:VPT:SAIS:LKNYQ:VVE:XGXR, KASKAXX:VPT:SAIS:LKNYQ:VVE:EXGXR, GSAGPXX:VPT:SAIS:LKNYQ:VVE:RXGXS, AAPASXX:VPT:SAIS:LKNYQ:VVE:AXGXR, STPPTXX:VPT:SAIS:LKNYQ:VVE:SXGXR, HVPKPXX:VPT:SAIS:LKNYQ:VVE:SXGXH, RVPSTXX:VPT:SAIS:LKNYQ:VVE:XGXL, ASAAPXX:VPT:SAIS:LKNYQ:VVE:XKXS, ASASPXX:VPT:SAIS:LKNYQ:VVE:XKXS, NDEGLEX:VPT:SAIS:LKNYQ:VVE:KXEXR, NDEGLEX:VPT:SAIS:LKNYQ:VVE:QXEXR, SSVKXQP:VPT:SAIS:LKNYQ:VVE:LEXAXA, RNVQXRP:VPT:SAIS:LKNYQ:VVE:LAXKXE, GIPEPXX:VPE:SAIS:LKNYQ:TVE:SXAXR, HVTKPTX:APT:SAIS:LKNYQ:VVR:SXGXH, YVPKPXX:APT:SAIS:LKNYQ:VVR:SXGXH, TVPKPXX:APT:SAIS:LKNYQ:VVR:AXGXH, AVPKAXX:APT:SAIS:LKNYQ:VVK:AXGXH, KVGKAXX:VPT:SAIS:LKNYQ:VAE:XGXR, KASKAXX:VPT:SAIS:LKNYQ:AVS:EXGXR, GSAGPXX:TPT:SAIS:LKNYQ:VVD:RXGXS, AAPASXX:VPA:SAIS:LKNYQ:VVE:AXGXR, HVPKPXX:APT:SAIS:LKNYQ:VVR:SXGXH, RVPSTXX:APV:SAIS:LKNYQ:VEE:XGXL, ASAAPXX:VPQ:SAIS:LKNYQ:VRS:XKXS, ASASPXX:VSQ:SAIS:LKNYQ:VKS:XKXS, ASASPXX:VPQ:SAIS:LKNYQ:VKS:XKXS, NDEGLEX:VPT:SAIS:LKNYQ:QHN:KXEXR, NDEGLEX:VPT:SAIS:LKNYQ:EHS:QXEXR, SSVKXQP:SRV:SAIS:LKNYQ:EEH:LEXAXA, RNVQXRP:TQV:SAIS:LKNYQ:EDH:LAXKXE, KIPKAXX:VPE:SSLS:LKVYP:TVE:GXGXR, SIPKAXX:VPE:SSLS:LKVYP:TVE:GXGXR, HVTKPTX:VPE:SSLS:LKVYP:TVE:SXGXH, YVPKPXX:VPE:SSLS:LKVYP:TVE:SXGXH, TVPKPXX:VPE:SSLS:LKVYP:TVE:AXGXH, AVPKAXX:VPE:SSLS:LKVYP:TVE:AXGXH, KVGKAXX:VPE:SSLS:LKVYP:TVE:XGXR, KASKAXX:VPE:SSLS:LKVYP:TVE:EXGXR, GSAGPXX:VPE:SSLS:LKVYP:TVE:RXGXS, AAPASXX:VPE:SSLS:LKVYP:TVE:AXGXR, STPPTXX:VPE:SSLS:LKVYP:TVE:SXGXR, HVPKPXX:VPE:SSLS:LKVYP:TVE:SXGXH, RVPSTXX:VPE:SSLS:LKVYP:TVE:XGXL, ASAAPXX:VPE:SSLS:LKVYP:TVE:XKXS, ASASPXX:VPE:SSLS:LKVYP:TVE:XKXS, NDEGLEX:VPE:SSLS:LKVYP:TVE:KXEXR, NDEGLEX:VPE:SSLS:LKVYP:TVE:QXEXR, SSVKXQP:VPE:SSLS:LKVYP:TVE:LEXAXA, RNVQXRP:VPE:SSLS:LKVYP:TVE:LAXKXE, KIPKAXX:VPT:SSLS:LKVYP:VVE:GXGXR, SIPKAXX:VPT:SSLS:LKVYP:VVE:GXGXR, HVTKPTX:APT:SSLS:LKVYP:VVR:SXGXH, YVPKPXX:APT:SSLS:LKVYP:VVR:SXGXH, TVPKPXX:APT:SSLS:LKVYP:VVR:AXGXH, AVPKAXX:APT:SSLS:LKVYP:VVK:AXGXH, KVGKAXX:VPT:SSLS:LKVYP:VAE:XGXR, KASKAXX:VPT:SSLS:LKVYP:AVS:EXGXR, GSAGPXX:TPT:SSLS:LKVYP:VVD:RXGXS, AAPASXX:VPA:SSLS:LKVYP:VVE:AXGXR, STPPTXX:VPT:SSLS:LKVYP:VVE:SXGXR, HVPKPXX:APT:SSLS:LKVYP:VVR:SXGXH, RVPSTXX:APV:SSLS:LKVYP:VEE:XGXL, ASAAPXX:VPQ:SSLS:LKVYP:VRS:XKXS, ASASPXX:VSQ:SSLS:LKVYP:VKS:XKXS, ASASPXX:VPQ:SSLS:LKVYP:VKS:XKXS, NDEGLEX:VPT:SSLS:LKVYP:QHN:KXEXR, NDEGLEX:VPT:SSLS:LKVYP:EHS:QXEXR, SSVKXQP:SRV:SSLS:LKVYP:EEH:LEXAXA, RNVQXRP:TQV:SSLS:LKVYP:EDH:LAXKXE, KIPKAXX:VPT:SAIS:LKNYQ:VVE:GXGXR, KIPKAXX:APT:NAIS:LKKYR:VVR:GXGXR, GIPEPXX:APT:NAIS:LKKYR:VVR:SXAXR, SIPKAXX:APT:NAIS:LKKYR:VVR:GXGXR, YVPKPXX:APT:NAIS:LKKYR:VVR:SXGXH, TVPKPXX:APT:NAIS:LKKYR:VVR:AXGXH, AVPKAXX:APT:NAIS:LKKYR:VVR:AXGXH, KVGKAXX:APT:NAIS:LKKYR:VVR:XGXR, KASKAXX:APT:NAIS:LKKYR:VVR:EXGXR, GSAGPXX:APT:NAIS:LKKYR:VVR:RXGXS, AAPASXX:APT:NAIS:LKKYR:VVR:AXGXR, STPPTXX:APT:NAIS:LKKYR:VVR:SXGXR, HVPKPXX:APT:NAIS:LKKYR:VVR:SXGXH, RVPSTXX:APT:NAIS:LKKYR:VVR:XGXL, ASAAPXX:APT:NAIS:LKKYR:VVR:XKXS, ASASPXX:APT:NAIS:LKKYR:VVR:XKXS, NDEGLEX:APT:NAIS:LKKYR:VVR:KXEXR, NDEGLEX:APT:NAIS:LKKYR:VVR:QXEXR, SSVKXQP:APT:NAIS:LKKYR:VVR:LEXAXA, RNVQXRP:APT:NAIS:LKKYR:VVR:LAXKXE, KIPKAXX:VPT:NAIS:LKKYR:VVE:GXGXR, GIPEPXX:VPE:NAIS:LKKYR:TVE:SXAXR, SIPKAXX:VPT:NAIS:LKKYR:VVE:GXGXR, AVPKAXX:APT:NAIS:LKKYR:VVK:AXGXH, KVGKAXX:VPT:NAIS:LKKYR:VAE:XGXR, KASKAXX:VPT:NAIS:LKKYR:AVS:EXGXR, GSAGPXX:TPT:NAIS:LKKYR:VVD:RXGXS, AAPASXX:VPA:NAIS:LKKYR:VVE:AXGXR, STPPTXX:VPT:NAIS:LKKYR:VVE:SXGXR, RVPSTXX:APV:NAIS:LKKYR:VEE:XGXL, ASAAPXX:VPQ:NAIS:LKKYR:VRS:XKXS, ASASPXX:VSQ:NAIS:LKKYR:VKS:XKXS, ASASPXX:VPQ:NAIS:LKKYR:VKS:XKXS, NDEGLEX:VPT:NAIS:LKKYR:QHN:KXEXR, NDEGLEX:VPT:NAIS:LKKYR:EHS:QXEXR, SSVKXQP:SRV:NAIS:LKKYR:EEH:LEXAXA, RNVQXRP:TQV:NAIS:LKKYR:EDH:LAXKXE, HVTKPTX:APT:NAIS:LKKYR:VVR:SXGXH, KIPKAXX:APT:SATS:LRKHR:VVK:GXGXR, GIPEPXX:APT:SATS:LRKHR:VVK:SXAXR, SIPKAXX:APT:SATS:LRKHR:VVK:GXGXR, HVTKPTX:APT:SATS:LRKHR:VVK:SXGXH, YVPKPXX:APT:SATS:LRKHR:VVK:SXGXH, TVPKPXX:APT:SATS:LRKHR:VVK:AXGXH, KVGKAXX:APT:SATS:LRKHR:VVK:XGXR, KASKAXX:APT:SATS:LRKHR:VVK:EXGXR, GSAGPXX:APT:SATS:LRKHR:VVK:RXGXS, AAPASXX:APT:SATS:LRKHR:VVK:AXGXR, STPPTXX:APT:SATS:LRKHR:VVK:SXGXR, HVPKPXX:APT:SATS:LRKHR:VVK:SXGXH, RVPSTXX:APT:SATS:LRKHR:VVK:XGXL, ASAAPXX:APT:SATS:LRKHR:VVK:XKXS, ASASPXX:APT:SATS:LRKHR:VVK:XKXS, NDEGLEX:APT:SATS:LRKHR:VVK:KXEXR, NDEGLEX:APT:SATS:LRKHR:VVK:QXEXR, SSVKXQP:APT:SATS:LRKHR:VVK:LEXAXA, RNVQXRP:APT:SATS:LRKHR:VVK:LAXKXE, KIPKAXX:VPT:SATS:LRKHR:VVE:GXGXR, GIPEPXX:VPE:SATS:LRKHR:TVE:SXAXR, SIPKAXX:VPT:SATS:LRKHR:VVE:GXGXR, HVTKPTX:APT:SATS:LRKHR:VVR:SXGXH, YVPKPXX:APT:SATS:LRKHR:VVR:SXGXH, TVPKPXX:APT:SATS:LRKHR:VVR:AXGXH, KVGKAXX:VPT:SATS:LRKHR:VAE:XGXR, KASKAXX:VPT:SATS:LRKHR:AVS:EXGXR, GSAGPXX:TPT:SATS:LRKHR:VVD:RXGXS, AAPASXX:VPA:SATS:LRKHR:VVE:AXGXR, STPPTXX:VPT:SATS:LRKHR:VVE:SXGXR, HVPKPXX:APT:SATS:LRKH R:VVR:SXGXH, RVPSTXX:APV:SATS:LRKHR:VEE:XGXL, ASAAPXX:VPQ:SATS:LRKHR:VRS:XKXS, ASASPXX:VSQ:SATS:LRKHR:VKS:XKXS, ASASPXX:VPQ:SATS:LRKHR:VKS:XKXS, NDEGLEX:VPT:SATS:LRKHR:QHN:KXEXR, NDEGLEX:VPT:SATS:LRKHR:EHS:QXEXR, SSVKXQP:SRV:SATS:LRKHR:EEH:LEXAXA, RNVQXRP:TQV:SATS:LRKHR:EDH:LAXKXE, KIPKAXX:VPT:SPIS:LKYHY:VAE:GXGXR, GIPEPXX:VPT:SPIS:LKYHY:VAE:SXAXR, SIPKAXX:VPT:SPIS:LKYHY:VAE:GXGXR, HVTKPTX:VPT:SPIS:LKYHY:VAE:SXGXH, YVPKPXX:VPT:SPIS:LKYHY:VAE:SXGXH, TVPKPXX:VPT:SPIS:LKYHY:VAE:AXGXH, AVPKAXX:VPT:SPIS:LKYHY:VAE:AXGXH, KASKAXX:VPT:SPIS:LKYHY:VAE:EXGXR, GSAGPXX:VPT:SPIS:LKYHY:VAE:RXGXS, AAPASXX:VPT:SPIS:LKYHY:VAE:AXGXR, STPPTXX:VPT:SPIS:LKYHY:VAE:SXGXR, HVPKPXX:VPT:SPIS:LKYHY:VAE:SXGXH, RVPSTXX:VPT:SPIS:LKYHY:VAE:XGXL, ASAAPXX:VPT:SPIS:LKYHY:VAE:XKXS, ASASPXX:VPT:SPIS:LKYHY:VAE:XKXS, NDEGLEX:VPT:SPIS:LKYHY:VAE:KXEXR, NDEGLEX:VPT:SPIS:LKYHY:VAE:QXEXR, SSVKXQP:VPT:SPIS:LKYHY:VAE:LEXAXA, RNVQXRP:VPT:SPIS:LKYHY:VAE:LAXKXE, KIPKAXX:VPT:SPIS:LKYHY:VVE:GXGXR, GIPEPXX:VPE:SPIS:LKYHY:TVE:SXAXR, SIPKAXX:VPT:SPIS:LKYHY:VVE:GXGXR, HVTKPTX:APT:SPIS:LKYHY:VVR:SXGXH, YVPKPXX:APT:SPIS:LKYHY:VVR:SXGXH, TVPKPXX:APT:SPIS:LKYHY:VVR:AXGXH, AVPKAXX:APT:SPIS:LKYHY:VVK:AXGXH, KASKAXX:VPT:SPIS:LKYHY:AVS:EXGXR, GSAGPXX:TPT:SPIS:LKYHY:VVD:RXGXS, AAPASXX:VPA:SPIS:LKYHY:VVE:AXGXR, STPPTXX:VPT:SPIS:LKYHY:VVE:SXGXR, HVPKPXX:APT:SPIS:LKYHY:VVR:SXGXH, RVPSTXX:APV:SPIS:LKYHY:VEE:XGXL, ASAAPXX:VPQ:SPIS:LKYHY:VRS:XKXS, ASASPXX:VSQ:SPIS:LKYHY:VKS:XKXS, ASASPXX:VPQ:SPIS:LKYHY:VKS:XKXS, NDEGLEX:VPT:SPIS:LKYHY:QHN:KXEXR, NDEGLEX:VPT:SPIS:LKYHY:EHS:QXEXR, SSVKXQP:SRV:SPIS:LKYHY:EEH:LEXAXA, RNVQXRP:TQV:SPIS:LKYHY:EDH:LAXKXE, KIPKAXX:VPT:EPIS:KFKYE:AVS:GXGXR, GIPEPXX:VPT:EPIS:KFKYE:AVS:SXAXR, SIPKAXX:VPT:EPIS:KFKYE:AVS:GXGXR, HVTKPTX:VPT:EPIS:KFKYE:AVS:SXGXH, YVPKPXX:VPT:EPIS:KFKYE:AVS:SXGXH, TVPKPXX:VPT:EPIS:KFKYE:AVS:AXGXH, AVPKAXX:VPT:EPIS:KFKYE:AVS:AXGXH, KVGKAXX:VPT:EPIS:KFKYE:AVS:XGXR, GSAGPXX:VPT:EPIS:KFKYE:AVS:RXGXS, AAPASXX:VPT:EPIS:KFKYE:AVS:AXGXR, STPPTXX:VPT:EPIS:KFKYE:AVS:SXGXR, HVPKPXX:VPT:EPIS:KFKYE:AVS:SXGXH, RVPSTXX:VPT:EPIS:KFKYE:AVS:XGXL, ASAAPXX:VPT:EPIS:KFKYE:AVS:XKXS, ASASPXX:VPT:EPIS:KFKYE:AVS:XKXS, NDEGLEX:VPT:EPIS:KFKYE:AVS:KXEXR, NDEGLEX:VPT:EPIS:KFKYE:AVS:QXEXR, SSVKXQP:VPT:EPIS:KFKYE:AVS:LEXAXA, RNVQXRP:VPT:EPIS:KFKYE:AVS:LAXKXE, KIPKAXX:VPT:EPIS:KFKYE:VVE:GXGXR, GIPEPXX:VPE:EPIS:KFKYE:TVE:SXAXR, SIPKAXX:VPT:EPIS:KFKYE:VVE:GXGXR, HVTKPTX:APT:EPIS:KFKYE:VVR:SXGXH, YVPKPXX:APT:EPIS:KFKYE:VVR:SXGXH, TVPKPXX:APT:EPIS:KFKYE:VVR:AXGXH, AVPKAXX:APT:EPIS:KFKYE:VVK:AXGXH, KVGKAXX:VPT:EPIS:KFKYE:VAE:XGXR, GSAGPXX:TPT:EPIS:KFKYE:VVD:RXGXS, AAPASXX:VPA:EPIS:KFKYE:VVE:AXGXR, STPPTXX:VPT:EPIS:KFKYE:VVE:SXGXR, HVPKPXX:APT:EPIS:KFKYE:VVR:SXGXH, RVPSTXX:APV:EPIS:KFKYE:VEE:XGXL, ASAAPXX:VPQ:EPIS:KFKYE:VRS:XKXS, ASASPXX:VSQ:EPIS:KFKYE:VKS:XKXS, ASASPXX:VPQ:EPIS:KFKYE:VKS:XKXS, NDEGLEX:VPT:EPIS:KFKYE:QHN:KXEXR, NDEGLEX:VPT:EPIS:KFKYE:EHS:QXEXR, SSVKXQP:SRV:EPIS:KFKYE:EEH:LEXAXA, RNVQXRP:TQV:EPIS:KFKYE:EDH:LAXKXE, KIPKAXX:TPT:SPIN:YGKIP:VVD:GXGXR, GIPEPXX:TPT:SPIN:YGKIP:VVD:SXAXR, SIPKAXX:TPT:SPIN:YGKIP:VVD:GXGXR, HVTKPTX:TPT:SPIN:YGKIP:VVD:SXGXH, YVPKPXX:TPT:SPIN:YGKIP:VVD:SXGXH, TVPKPXX:TPT:SPIN:YGKIP:VVD:AXGXH, AVPKAXX:TPT:SPIN:YGKIP:VVD:AXGXH, KVGKAXX:TPT:SPIN:YGKIP:VVD:XGXR, KASKAXX:TPT:SPIN:YGKIP:VVD:EXGXR, AAPASXX:TPT:SPIN:YGKIP:VVD:AXGXR, STPPTXX:TPT:SPIN:YGKIP:VVD:SXGXR, HVPKPXX:TPT:SPIN:YGKIP:VVD:SXGXH, RVPSTXX:TPT:SPIN:YGKIP:VVD:XGXL, ASAAPXX:TPT:SPIN:YGKIP:VVD:XKXS, ASASPXX:TPT:SPIN:YGKIP:VVD:XKXS, NDEGLEX:TPT:SPIN:YGKIP:VVD:KXEXR, NDEGLEX:TPT:SPIN:YGKIP:VVD:QXEXR, SSVKXQP:TPT:SPIN:YGKIP:VVD:LEXAXA, RNVQXRP:TPT:SPIN:YGKIP:VVD:LAXKXE, KIPKAXX:VPT:SPIN:YGKIP:VVE:GXGXR, GIPEPXX:VPE:SPIN:YGKIP:TVE:SXAXR, SIPKAXX:VPT:SPIN:YGKIP:VVE:GXGXR, HVTKPTX:APT:SPIN:YGKIP:VVR:SXGXH, YVPKPXX:APT:SPIN:YGKIP:VVR:SXGXH, TVPKPXX:APT:SPIN:YGKIP:VVR:AXGXH, AVPKAXX:APT:SPIN:YGKIP:VVK:AXGXH, KVGKAXX:VPT:SPIN:YGKIP:VAE:XGXR, KASKAXX:VPT:SPIN:YGKIP:AVS:EXGXR, AAPASXX:VPA:SPIN:YGKIP:VVE:AXGXR, STPPTXX:VPT:SPIN:YGKIP:VVE:SXGXR, HVPKPXX:APT:SPIN:YGKIP:VVR:SXGXH, RVPSTXX:APV:SPIN:YGKIP:VEE:XGXL, ASAAPXX:VPQ:SPIN:YGKIP:VRS:XKXS, ASASPXX:VSQ:SPIN:YGKIP:VKS:XKXS, ASASPXX:VPQ:SPIN:YGKIP:VKS:XKXS, NDEGLEX:VPT:SPIN:YGKIP:QHN:KXEXR, NDEGLEX:VPT:SPIN:YGKIP:EHS:QXEXR, SSVKXQP:SRV:SPIN:YGKIP:EEH:LEXAXA, RNVQXRP:TQV:SPIN:YGKIP:EDH:LAXKXE, KIPKAXX:VPA:SPIS:YKQYE:VVE:GXGXR, GIPEPXX:VPA:SPIS:YKQYE:VVE:SXAXR, SIPKAXX:VPA:SPIS:YKQYE:VVE:GXGXR, HVTKPTX:VPA:SPIS:YKQYE:VVE:SXGXH, YVPKPXX:VPA:SPIS:YKQYE:VVE:SXGXH, TVPKPXX:VPA:SPIS:YKQYE:VVE:AXGXH, AVPKAXX:VPA:SPIS:YKQYE:VVE:AXGXH, KVGKAXX:VPA:SPIS:YKQYE:VVE:XGXR, KASKAXX:VPA:SPIS:YKQYE:VVE:EXGXR, GSAGPXX:VPA:SPIS:YKQYE:VVE:RXGXS, STPPTXX:VPA:SPIS:YKQYE:VVE:SXGXR, HVPKPXX:VPA:SPIS:YKQYE:VVE:SXGXH, RVPSTXX:VPA:SPIS:YKQYE:VVE:XGXL, ASAAPXX:VPA:SPIS:YKQYE:VVE:XKXS, ASASPXX:VPA:SPIS:YKQYE:VVE:XKXS, NDEGLEX:VPA:SPIS:YKQYE:VVE:KXEXR, NDEGLEX:VPA:SPIS:YKQYE:VVE:QXEXR, SSVKXQP:VPA:SPIS:YKQYE:VVE:LEXAXA, RNVQXRP:VPA:SPIS:YKQYE:VVE:LAXKXE, KIPKAXX:VPT:SPIS:YKQYE:VVE:GXGXR, GIPEPXX:VPE:SPIS:YKQYE:TVE:SXAXR, SIPKAXX:VPT:SPIS:YKQYE:VVE:GXGXR, HVTKPTX:APT:SPIS:YKQYE:VVR:SXGXH, YVPKPXX:APT:SPIS:YKQYE:VVR:SXGXH, TVPKPXX:APT:SPIS:YKQYE:VVR:AXGXH, AVPKAXX:APT:SPIS:YKQYE:VVK:AXGXH, KVGKAXX:VPT:SPIS:YKQYE:VAE:XGXR, KASKAXX:VPT:SPIS:YKQYE:AVS:EXGXR, GSAGPXX:TPT:SPIS:YKQYE:VVD:RXGXS, STPPTXX:VPT:SPIS:YKQYE:VVE:SXGXR, HVPKPXX:APT:SPIS:YKQYE:VVR:SXGXH, RVPSTXX:APV:SPIS:YKQYE:VEE:XGXL, ASAAPXX:VPQ:SPIS:YKQYE:VRS:XKXS, ASASPXX:VSQ:SPIS:YKQYE:VKS:XKXS, ASASPXX:VPQ:SPIS:YKQYE:VKS:XKXS, NDEGLEX:VPT:SPIS:YKQYE:QHN:KXEXR, NDEGLEX:VPT:SPIS:YKQYE:EHS:QXEXR, SSVKXQP:SRV:SPIS:YKQYE:EEH:LEXAXA, RNVQXRP:TQV:SPIS:YKQYE:EDH:LAXKXE, GIPEPXX:VPT:SPIS:YKQYE:VVE:SXAXR, HVTKPTX:VPT:SPIS:YKQYE:VVE:SXGXH, YVPKPXX:VPT:SPIS:YKQYE:VVE:SXGXH, TVPKPXX:VPT:SPIS:YKQYE:VVE:AXGXH, AVPKAXX:VPT:SPIS:YKQYE:VVE:AXGXH, KVGKAXX:VPT:SPIS:YKQYE:VVE:XGXR, KASKAXX:VPT:SPIS:YKQYE:VVE:EXGXR, GSAGPXX:VPT:SPIS:YKQYE:VVE:RXGXS, AAPASXX:VPT:SPIS:YKQYE:VVE:AXGXR, HVPKPXX:VPT:SPIS:YKQYE:VVE:SXGXH, RVPSTXX:VPT:SPIS:YKQYE:VVE:XGXL, ASAAPXX:VPT:SPIS:YKQYE:VVE:XKXS, ASASPXX:VPT:SPIS:YKQYE:VVE:XKXS, NDEGLEX:VPT:SPIS:YKQYE:VVE:KXEXR, NDEGLEX:VPT:SPIS:YKQYE:VVE:QXEXR, SSVKXQP:VPT:SPIS:YKQYE:VVE:LEXAXA, RNVQXRP:VPT:SPIS:YKQYE:VVE:LAXKXE, AAPASXX:VPA:SPIS:YKQYE:VVE:AXGXR, KIPKAXX:APV:KPLS:DHHKD:VEE:GXGXR, GIPEPXX:APV:KPLS:DHHKD:VEE:SXAXR, SIPKAXX:APV:KPLS:DHHKD:VEE:GXGXR, HVTKPTX:APV:KPLS:DHHKD:VEE:SXGXH, YVPKPXX:APV:KPLS:DHHKD:VEE:SXGXH, TVPKPXX:APV:KPLS:DHHKD:VEE:AXGXH, AVPKAXX:APV:KPLS:DHHKD:VEE:AXGXH, KVGKAXX:APV:KPLS:DHHKD:VEE:XGXR, KASKAXX:APV:KPLS:DHHKD:VEE:EXGXR, GSAGPXX:APV:KPLS:DHHKD:VEE:RXGXS, AAPASXX:APV:KPLS:DHHKD:VEE:AXGXR, STPPTXX:APV:KPLS:DHHKD:VEE:SXGXR, HVPKPXX:APV:KPLS:DHHKD:VEE:SXGXH, ASAAPXX:APV:KPLS:DHHKD:VEE:XKXS, ASASPXX:APV:KPLS:DHHKD:VEE:XKXS, NDEGLEX:APV:KPLS:DHHKD:VEE:KXEXR, NDEGLEX:APV:KPLS:DHHKD:VEE:QXEXR, SSVKXQP:APV:KPLS:DHHKD:VEE:LEXAXA, RNVQXRP:APV:KPLS:DHHKD:VEE:LAXKXE, KIPKAXX:VPT:KPLS:DHHKD:VVE:GXGXR, GIPEPXX:VPE:KPLS:DHHKD:TVE:SXAXR, SIPKAXX:VPT:KPLS:DHHKD:VVE:GXGXR, HVTKPTX:APT:KPLS:DHHKD:VVR:SXGXH, YVPKPXX:APT:KPLS:DHHKD:VVR:SXGXH, TVPKPXX:APT:KPLS:DHHKD:VVR:AXGXH, AVPKAXX:APT:KPLS:DHHKD:VVK:AXGXH, KVGKAXX:VPT:KPLS:DHHKD:VAE:XGXR, KASKAXX:VPT:KPLS:DHHKD:AVS:EXGXR, GSAGPXX:TPT:KPLS:DHHKD:VVD:RXGXS, AAPASXX:VPA:KPLS:DHHKD:VVE:AXGXR, STPPTXX:VPT:KPLS:DHHKD:VVE:SXGXR, HVPKPXX:APT:KPLS:DHHKD:VVR:SXGXH, ASAAPXX:VPQ:KPLS:DHHKD:VRS:XKXS, ASASPXX:VSQ:KPLS:DHHKD:VKS:XKXS, ASASPXX:VPQ:KPLS:DHHKD:VKS:XKXS, NDEGLEX:VPT:KPLS:DHHKD:QHN:KXEXR, NDEGLEX:VPT:KPLS:DHHKD:EHS:QXEXR, SSVKXQP:SRV:KPLS:DHHKD:EEH:LEXAXA, RNVQXRP:TQV:KPLS:DHHKD:EDH:LAXKXE, KIPKAXX:VPQ:EPLP:EQLSN:VRS:GXGXR, GIPEPXX:VPQ:EPLP:EQLSN:VRS:SXAXR, SIPKAXX:VPQ:EPLP:EQLSN:VRS:GXGXR, HVTKPTX:VPQ:EPLP:EQLSN:VRS:SXGXH, YVPKPXX:VPQ:EPLP:EQLSN:VRS:SXGXH, TVPKPXX:VPQ:EPLP:EQLSN:VRS:AXGXH, AVPKAXX:VPQ:EPLP:EQLSN:VRS:AXGXH, KVGKAXX:VPQ:EPLP:EQLSN:VRS:XGXR, KASKAXX:VPQ:EPLP:EQLSN:VRS:EXGXR, GSAGPXX:VPQ:EPLP:EQLSN:VRS:RXGXS, AAPASXX:VPQ:EPLP:EQLSN:VRS:AXGXR, STPPTXX:VPQ:EPLP:EQLSN:VRS:SXGXR, HVPKPXX:VPQ:EPLP:EQLSN:VRS:SXGXH, RVPSTXX:VPQ:EPLP:EQLSN:VRS:XGXL, ASASPXX:VPQ:EPLP:EQLSN:VRS:XKXS, NDEGLEX:VPQ:EPLP:EQLSN:VRS:KXEXR, NDEGLEX:VPQ:EPLP:EQLSN:VRS:QXEXR, SSVKXQP:VPQ:EPLP:EQLSN:VRS:LEXAXA, RNVQXRP:VPQ:EPLP:EQLSN:VRS:LAXKXE, KIPKAXX:VPT:EPLP:EQLSN:VVE:GXGXR, GIPEPXX:VPE:EPLP:EQLSN:TVE:SXAXR, SIPKAXX:VPT:EPLP:EQLSN:VVE:GXGXR, HVTKPTX:APT:EPLP:EQLSN:VVR:SXGXH, YVPKPXX:APT:EPLP:EQLSN:VVR:SXGXH, TVPKPXX:APT:EPLP:EQLSN:VVR:AXGXH, AVPKAXX:APT:EPLP:EQLSN:VVK:AXGXH, KVGKAXX:VPT:EPLP:EQLSN:VAE:XGXR, KASKAXX:VPT:EPLP:EQLSN:AVS:EXGXR, GSAGPXX:TPT:EPLP:EQLSN:VVD:RXGXS, AAPASXX:VPA:EPLP:EQLSN:VVE:AXGXR, STPPTXX:VPT:EPLP:EQLSN:VVE:SXGXR, HVPKPXX:APT:EPLP:EQLSN:VVR:SXGXH, RVPSTXX:APV:EPLP:EQLSN:VEE:XGXL, ASASPXX:VSQ:EPLP:EQLSN:VKS:XKXS, ASASPXX:VPQ:EPLP:EQLSN:VKS:XKXS, NDEGLEX:VPT:EPLP:EQLSN:QHN:KXEXR, NDEGLEX:VPT:EPLP:EQLSN:EHS:QXEXR, SSVKXQP:SRV:EPLP:EQLSN:EEH:LEXAXA, RNVQXRP:TQV:EPLP:EQLSN:EDH:LAXKXE, KIPKAXX:VSQ:EPLT:EQLSN:VKS:GXGXR, GIPEPXX:VSQ:EPLT:EQLSN:VKS:SXAXR, SIPKAXX:VSQ:EPLT:EQLSN:VKS:GXGXR, HVTKPTX:VSQ:EPLT:EQLSN:VKS:SXGXH, YVPKPXX:VSQ:EPLT:EQLSN:VKS:SXGXH, TVPKPXX:VSQ:EPLT:EQLSN:VKS:AXGXH, AVPKAXX:VSQ:EPLT:EQLSN:VKS:AXGXH, KVGKAXX:VSQ:EPLT:EQLSN:VKS:XGXR, KASKAXX:VSQ:EPLT:EQLSN:VKS:EXGXR, GSAGPXX:VSQ:EPLT:EQLSN:VKS:RXGXS, AAPASXX:VSQ:EPLT:EQLSN:VKS:AXGXR, STPPTXX:VSQ:EPLT:EQLSN:VKS:SXGXR, HVPKPXX:VSQ:EPLT:EQLSN:VKS:SXGXH, RVPSTXX:VSQ:EPLT:EQLSN:VKS:XGXL, ASAAPXX:VSQ:EPLT:EQLSN:VKS:XKXS, ASASPXX:VSQ:EPLT:EQLSN:VKS:XKXS, NDEGLEX:VSQ:EPLT:EQLSN:VKS:KXEXR, NDEGLEX:VSQ:EPLT:EQLSN:VKS:QXEXR, SSVKXQP:VSQ:EPLT:EQLSN:VKS:LEXAXA, RNVQXRP:VSQ:EPLT:EQLSN:VKS:LAXKXE, KIPKAXX:VPT:EPLT:EQLSN:VVE:GXGXR, GIPEPXX:VPE:EPLT:EQLSN:TVE:SXAXR, SIPKAXX:VPT:EPLT:EQLSN:VVE:GXGXR, HVTKPTX:APT:EPLT:EQLSN:VVR:SXGXH, YVPKPXX:APT:EPLT:EQLSN:VVR:SXGXH, TVPKPXX:APT:EPLT:EQLSN:VVR:AXGXH, AVPKAXX:APT:EPLT:EQLSN:VVK:AXGXH, KVGKAXX:VPT:EPLT:EQLSN:VAE:XGXR, KASKAXX:VPT:EPLT:EQLSN:AVS:EXGXR, GSAGPXX:TPT:EPLT:EQLSN:VVD:RXGXS, AAPASXX:VPA:EPLT:EQLSN:VVE:AXGXR, STPPTXX:VPT:EPLT:EQLSN:VVE:SXGXR, HVPKPXX:APT:EPLT:EQLSN:VVR:SXGXH, RVPSTXX:APV:EPLT:EQLSN:VEE:XGXL, ASAAPXX:VPQ:EPLT:EQLSN:VRS:XKXS, ASASPXX:VPQ:EPLT:EQLSN:VKS:XKXS, NDEGLEX:VPT:EPLT:EQLSN:QHN:KXEXR, NDEGLEX:VPT:EPLT:EQLSN:EHS:QXEXR, SSVKXQP:SRV:EPLT:EQLSN:EEH:LEXAXA, RNVQXRP:TQV:EPLT:EQLSN:EDH:LAXKXE, KIPKAXX:VPQ:EPLT:EQLSN:VKS:GXGXR, GIPEPXX:VPQ:EPLT:EQLSN:VKS:SXAXR, SIPKAXX:VPQ:EPLT:EQLSN:VKS:GXGXR, HVTKPTX:VPQ:EPLT:EQLSN:VKS:SXGXH, YVPKPXX:VPQ:EPLT:EQLSN:VKS:SXGXH, TVPKPXX:VPQ:EPLT:EQLSN:VKS:AXGXH, AVPKAXX:VPQ:EPLT:EQLSN:VKS:AXGXH, KVGKAXX:VPQ:EPLT:EQLSN:VKS:XGXR, KASKAXX:VPQ:EPLT:EQLSN:VKS:EXGXR, GSAGPXX:VPQ:EPLT:EQLSN:VKS:RXGXS, AAPASXX:VPQ:EPLT:EQLSN:VKS:AXGXR, STPPTXX:VPQ:EPLT:EQLSN:VKS:SXGXR, HVPKPXX:VPQ:EPLT:EQLSN:VKS:SXGXH, RVPSTXX:VPQ:EPLT:EQLSN:VKS:XGXL, ASAAPXX:VPQ:EPLT:EQLSN:VKS:XKXS, NDEGLEX:VPQ:EPLT:EQLSN:VKS:KXEXR, NDEGLEX:VPQ:EPLT:EQLSN:VKS:QXEXR, SSVKXQP:VPQ:EPLT:EQLSN:VKS:LEXAXA, RNVQXRP:VPQ:EPLT:EQLSN:VKS:LAXKXE, KIPKAXX:VPT:SNIT:IGEMS:QHN:GXGXR, GIPEPXX:VPT:SNIT:IGEMS:QHN:SXAXR, SIPKAXX:VPT:SNIT:IGEMS:QHN:GXGXR, HVTKPTX:VPT:SNIT:IGEMS:QHN:SXGXH, YVPKPXX:VPT:SNIT:IGEMS:QHN:SXGXH, TVPKPXX:VPT:SNIT:IGEMS:QHN:AXGXH, AVPKAXX:VPT:SNIT:IGEMS:QHN:AXGXH, KVGKAXX:VPT:SNIT:IGEMS:QHN:XGXR, KASKAXX:VPT:SNIT:IGEMS:QHN:EXGXR, GSAGPXX:VPT:SNIT:IGEMS:QHN:RXGXS, AAPASXX:VPT:SNIT:IGEMS:QHN:AXGXR, STPPTXX:VPT:SNIT:IGEMS:QHN:SXGXR, HVPKPXX:VPT:SNIT:IGEMS:QHN:SXGXH, RVPSTXX:VPT:SNIT:IGEMS:QHN:XGXL, ASAAPXX:VPT:SNIT:IGEMS:QHN:XKXS, ASASPXX:VPT:SNIT:IGEMS:QHN:XKXS, NDEGLEX:VPT:SNIT:IGEMS:QHN:QXEXR, NDEGLEX:VPT:SNIT:IGEMS:QHN:KXEXR, SSVKXQP:VPT:SNIT:IGEMS:QHN:LEXAXA, RNVQXRP:VPT:SNIT:IGEMS:QHN:LAXKXE, KIPKAXX:VPT:SNIT:IGEMS:VVE:GXGXR, GIPEPXX:VPE:SNIT:IGEMS:TVE:SXAXR, SIPKAXX:VPT:SNIT:IGEMS:VVE:GXGXR, HVTKPTX:APT:SNIT:IGEMS:VVR:SXGXH, YVPKPXX:APT:SNIT:IGEMS:VVR:SXGXH, TVPKPXX:APT:SNIT:IGEMS:VVR:AXGXH, AVPKAXX:APT:SNIT:IGEMS:VVK:AXGXH, KVGKAXX:VPT:SNIT:IGEMS:VAE:XGXR, KASKAXX:VPT:SNIT:IGEMS:AVS:EXGXR, GSAGPXX:TPT:SNIT:IGEMS:VVD:RXGXS, AAPASXX:VPA:SNIT:IGEMS:VVE:AXGXR, STPPTXX:VPT:SNIT:IGEMS:VVE:SXGXR, HVPKPXX:APT:SNIT:IGEMS:VVR:SXGXH, RVPSTXX:APV:SNIT:IGEMS:VEE:XGXL, ASAAPXX:VPQ:SNIT:IGEMS:VRS:XKXS, ASASPXX:VSQ:SNIT:IGEMS:VKS:XKXS, ASASPXX:VPQ:SNIT:IGEMS:VKS:XKXS, NDEGLEX:VPT:SNIT:IGEMS:EHS:QXEXR, SSVKXQP:SRV:SNIT:IGEMS:EEH:LEXAXA, RNVQXRP:TQV:SNIT:IGEMS:EDH:LAXKXE, KIPKAXX:VPT:SNIT:LGEMS:EHS:GXGXR, GIPEPXX:VPT:SNIT:LGEMS:EHS:SXAXR, SIPKAXX:VPT:SNIT:LGEMS:EHS:GXGXR, HVTKPTX:VPT:SNIT:LGEMS:EHS:SXGXH, YVPKPXX:VPT:SNIT:LGEMS:EHS:SXGXH, TVPKPXX:VPT:SNIT:LGEMS:EHS:AXGXH, AVPKAXX:VPT:SNIT:LGEMS:EHS:AXGXH, KVGKAXX:VPT:SNIT:LGEMS:EHS:XGXR, KASKAXX:VPT:SNIT:LGEMS:EHS:EXGXR, GSAGPXX:VPT:SNIT:LGEMS:EHS:RXGXS, AAPASXX:VPT:SNIT:LGEMS:EHS:AXGXR, STPPTXX:VPT:SNIT:LGEMS:EHS:SXGXR, HVPKPXX:VPT:SNIT:LGEMS:EHS:SXGXH, RVPSTXX:VPT:SNIT:LGEMS:EHS:XGXL, ASAAPXX:VPT:SNIT:LGEMS:EHS:XKXS, ASASPXX:VPT:SNIT:LGEMS:EHS:XKXS, NDEGLEX:VPT:SNIT:LGEMS:EHS:KXEXR, SSVKXQP:VPT:SNIT:LGEMS:EHS:LEXAXA, RNVQXRP:VPT:SNIT:LGEMS:EHS:LAXKXE, KIPKAXX:VPT:SNIT:LGEMS:VVE:GXGXR, GIPEPXX:VPE:SNIT:LGEMS:TVE:SXAXR, SIPKAXX:VPT:SNIT:LGEMS:VVE:GXGXR, HVTKPTX:APT:SNIT:LGEMS:VVR:SXGXH, YVPKPXX:APT:SNIT:LGEMS:VVR:SXGXH, TVPKPXX:APT:SNIT:LGEMS:VVR:AXGXH, AVPKAXX:APT:SNIT:LGEMS:VVK:AXGXH, KVGKAXX:VPT:SNIT:LGEMS:VAE:XGXR, KASKAXX:VPT:SNIT:LGEMS:AVS:EXGXR, GSAGPXX:TPT:SNIT:LGEMS:VVD:RXGXS, AAPASXX:VPA:SNIT:LGEMS:VVE:AXGXR, STPPTXX:VPT:SNIT:LGEMS:VVE:SXGXR, HVPKPXX:APT:SNIT:LGEMS:VVR:SXGXH, RVPSTXX:APV:SNIT:LGEMS:VEE:XGXL, ASAAPXX:VPQ:SNIT:LGEMS:VRS:XKXS, ASASPXX:VSQ:SNIT:LGEMS:VKS:XKXS, ASASPXX:VPQ:SNIT:LGEMS:VKS:XKXS, NDEGLEX:VPT:SNIT:LGEMS:QHN:KXEXR, SSVKXQP:SRV:SNIT:LGEMS:EEH:LEXAXA, RNVQXRP:TQV:SNIT:LGEMS:EDH:LAXKXE, KIPKAXX:SRV:RSVK:KEVQV:EEH:GXGXR, GIPEPXX:SRV:RSVK:KEVQV:EEH:SXAXR, SIPKAXX:SRV:RSVK:KEVQV:EEH:GXGXR, HVTKPTX:SRV:RSVK:KEVQV:EEH:SXGXH, YVPKPXX:SRV:RSVK:KEVQV:EEH:SXGXH, TVPKPXX:SRV:RSVK:KEVQV:EEH:AXGXH, AVPKAXX:SRV:RSVK:KEVQV:EEH:AXGXH, KVGKAXX:SRV:RSVK:KEVQV:EEH:XGXR, KASKAXX:SRV:RSVK:KEVQV:EEH:EXGXR, GSAGPXX:SRV:RSVK:KEVQV:EEH:RXGXS, AAPASXX:SRV:RSVK:KEVQV:EEH:AXGXR, STPPTXX:SRV:RSVK:KEVQV:EEH:SXGXR, HVPKPXX:SRV:RSVK:KEVQV:EEH:SXGXH, RVPSTXX:SRV:RSVK:KEVQV:EEH:XGXL, ASAAPXX:SRV:RSVK:KEVQV:EEH:XKXS, ASASPXX:SRV:RSVK:KEVQV:EEH:XKXS, NDEGLEX:SRV:RSVK:KEVQV:EEH:KXEXR, NDEGLEX:SRV:RSVK:KEVQV:EEH:QXEXR, RNVQXRP:SRV:RSVK:KEVQV:EEH:LAXKXE, KIPKAXX:VPT:RSVK:KEVQV:VVE:GXGXR, GIPEPXX:VPE:RSVK:KEVQV:TVE:SXAXR, SIPKAXX:VPT:RSVK:KEVQV:VVE:GXGXR, HVTKPTX:APT:RSVK:KEVQV:VVR:SXGXH, YVPKPXX:APT:RSVK:KEVQV:VVR:SXGXH, TVPKPXX:APT:RSVK:KEVQV:VVR:AXGXH, AVPKAXX:APT:RSVK:KEVQV:VVK:AXGXH, KVGKAXX:VPT:RSVK:KEVQV:VAE:XGXR, KASKAXX:VPT:RSVK:KEVQV:AVS:EXGXR, GSAGPXX:TPT:RSVK:KEVQV:VVD:RXGXS, AAPASXX:VPA:RSVK:KEVQV:VVE:AXGXR, STPPTXX:VPT:RSVK:KEVQV:VVE:SXGXR, HVPKPXX:APT:RSVK:KEVQV:VVR:SXGXH, RVPSTXX:APV:RSVK:KEVQV:VEE:XGXL, ASAAPXX:VPQ:RSVK:KEVQV:VRS:XKXS, ASASPXX:VSQ:RSVK:KEVQV:VKS:XKXS, ASASPXX:VPQ:RSVK:KEVQV:VKS:XKXS, NDEGLEX:VPT:RSVK:KEVQV:QHN:KXEXR, NDEGLEX:VPT:RSVK:KEVQV:EHS:QXEXR, RNVQXRP:TQV:RSVK:KEVQV:EDH:LAXKXE, KIPKAXX:TQV:RPVQ:KKATV:EDH:GXGXR, GIPEPXX:TQV:RPVQ:KKATV:EDH:SXAXR, SIPKAXX:TQV:RPVQ:KKATV:EDH:GXGXR, HVTKPTX:TQV:RPVQ:KKATV:EDH:SXGXH, YVPKPXX:TQV:RPVQ:KKATV:EDH:SXGXH, TVPKPXX:TQV:RPVQ:KKATV:EDH:AXGXH, AVPKAXX:TQV:RPVQ:KKATV:EDH:AXGXH, KVGKAXX:TQV:RPVQ:KKATV:EDH:XGXR, KASKAXX:TQV:RPVQ:KKATV:EDH:EXGXR, GSAGPXX:TQV:RPVQ:KKATV:EDH:RXGXS, AAPASXX:TQV:RPVQ:KKATV:EDH:AXGXR, STPPTXX:TQV:RPVQ:KKATV:EDH:SXGXR, HVPKPXX:TQV:RPVQ:KKATV:EDH:SXGXH, RVPSTXX:TQV:RPVQ:KKATV:EDH:XGXL, ASAAPXX:TQV:RPVQ:KKATV:EDH:XKXS, ASASPXX:TQV:RPVQ:KKATV:EDH:XKXS, NDEGLEX:TQV:RPVQ:KKATV:EDH:KXEXR, NDEGLEX:TQV:RPVQ:KKATV:EDH:QXEXR, SSVKXQP:TQV:RPVQ:KKATV:EDH:LEXAXA, KIPKAXX:VPT:RPVQ:KKATV:VVE:GXGXR, GIPEPXX:VPE:RPVQ:KKATV:TVE:SXAXR, SIPKAXX:VPT:RPVQ:KKATV:VVE:GXGXR, HVTKPTX:APT:RPVQ:KKATV:VVR:SXGXH, YVPKPXX:APT:RPVQ:KKATV:VVR:SXGXH, TVPKPXX:APT:RPVQ:KKATV:VVR:AXGXH, AVPKAXX:APT:RPVQ:KKATV:VVK:AXGXH, KVGKAXX:VPT:RPVQ:KKATV:VAE:XGXR, KASKAXX:VPT:RPVQ:KKATV:AVS:EXGXR, GSAGPXX:TPT:RPVQ:KKATV:VVD:RXGXS, AAPASXX:VPA:RPVQ:KKATV:VVE:AXGXR, STPPTXX:VPT:RPVQ:KKATV:VVE:SXGXR, HVPKPXX:APT:RPVQ:KKATV:VVR:SXGXH, RVPSTXX:APV:RPVQ:KKATV:VEE:XGXL, ASAAPXX:VPQ:RPVQ:KKATV:VRS:XKXS, ASASPXX:VSQ:RPVQ:KKATV:VKS:XKXS, ASASPXX:VPQ:RPVQ:KKATV:VKS:XKXS, NDEGLEX:VPT:RPVQ:KKATV:QHN:KXEXR, NDEGLEX:VPT:RPVQ:KKATV:EHS:QXEXR and SSVKXQP:SRV:RPVQ:KKATV:EEH:LEXAXA. More particularly, the hexaplet PEP7:PEP3:PEP1:PEP2:PEP4:PEP8 is selected from the group consisting of GIPEPXX:VPT:SAIS:LKNYQ:VVE:SXAXR, HVTKPTX:VPT:SAIS:LKNYQ:VVE:SXGXH, YVPKPXX:VPT:SAIS:LKNYQ:VVE:SXGXH, TVPKPXX:VPT:SAIS:LKNYQ:VVE:AXGXH, AVPKAXX:VPT:SAIS:LKNYQ:VVE:AXGXH, KVGKAXX:VPT:SAIS:LKNYQ:VVE:XGXR, KASKAXX:VPT:SAIS:LKNYQ:VVE:EXGXR, GSAGPXX:VPT:SAIS:LKNYQ:VVE:RXGXS, AAPASXX:VPT:SAIS:LKNYQ:VVE:AXGXR, STPPTXX:VPT:SAIS:LKNYQ:VVE:SXGXR, HVPKPXX:VPT:SAIS:LKNYQ:VVE:SXGXH, RVPSTXX:VPT:SAIS:LKNYQ:VVE:XGXL, ASAAPXX:VPT:SAIS:LKNYQ:VVE:XKXS, ASASPXX:VPT:SAIS:LKNYQ:VVE:XKXS, GIPEPXX:VPE:SAIS:LKNYQ:TVE:SXAXR, HVTKPTX:APT:SAIS:LKNYQ:VVR:SXGXH, YVPKPXX:APT:SAIS:LKNYQ:VVR:SXGXH, TVPKPXX:APT:SAIS:LKNYQ:VVR:AXGXH, AVPKAXX:APT:SAIS:LKNYQ:VVK:AXGXH, KVGKAXX:VPT:SAIS:LKNYQ:VAE:XGXR, KASKAXX:VPT:SAIS:LKNYQ:AVS:EXGXR, GSAGPXX:TPT:SAIS:LKNYQ:VVD:RXGXS, AAPASXX:VPA:SAIS:LKNYQ:VVE:AXGXR, HVPKPXX:APT:SAIS:LKNYQ:VVR:SXGXH, RVPSTXX:APV:SAIS:LKNYQ:VEE:XGXL, ASAAPXX:VPQ:SAIS:LKNYQ:VRS:XKXS, ASASPXX:VSQ:SAIS:LKNYQ:VKS:XKXS, ASASPXX:VPQ:SAIS:LKNYQ:VKS:XKXS, NDEGLEX:VPT:SAIS:LKNYQ:QHN:KXEXR, NDEGLEX:VPT:SAIS:LKNYQ:EHS:QXEXR, SSVKXQP:SRV:SAIS:LKNYQ:EEH:LEXAXA, RNVQXRP:TQV:SAIS:LKNYQ:EDH:LAXKXE, KIPKAXX:VPE:SSLS:LKVYP:TVE:GXGXR, SIPKAXX:VPE:SSLS:LKVYP:TVE:GXGXR, HVTKPTX:VPE:SSLS:LKVYP:TVE:SXGXH, YVPKPXX:VPE:SSLS:LKVYP:TVE:SXGXH, TVPKPXX:VPE:SSLS:LKVYP:TVE:AXGXH, AVPKAXX:VPE:SSLS:LKVYP:TVE:AXGXH, KVGKAXX:VPE:SSLS:LKVYP:TVE:XGXR, KASKAXX:VPE:SSLS:LKVYP:TVE:EXGXR, GSAGPXX:VPE:SSLS:LKVYP:TVE:RXGXS, AAPASXX:VPE:SSLS:LKVYP:TVE:AXGXR, STPPTXX:VPE:SSLS:LKVYP:TVE:SXGXR, HVPKPXX:VPE:SSLS:LKVYP:TVE:SXGXH, RVPSTXX:VPE:SSLS:LKVYP:TVE:XGXL, ASAAPXX:VPE:SSLS:LKVYP:TVE:XKXS, ASASPXX:VPE:SSLS:LKVYP:TVE:XKXS, KIPKAXX:VPT:SSLS:LKVYP:VVE:GXGXR, SIPKAXX:VPT:SSLS:LKVYP:VVE:GXGXR, HVTKPTX:APT:SSLS:LKVYP:VVR:SXGXH, YVPKPXX:APT:SSLS:LKVYP:VVR:SXGXH, TVPKPXX:APT:SSLS:LKVYP:VVR:AXGXH, AVPKAXX:APT:SSLS:LKVYP:VVK:AXGXH, KVGKAXX:VPT:SSLS:LKVYP:VAE:XGXR, KASKAXX:VPT:SSLS:LKVYP:AVS:EXGXR, GSAGPXX:TPT:SSLS:LKVYP:VVD:RXGXS, AAPASXX:VPA:SSLS:LKVYP:VVE:AXGXR, STPPTXX:VPT:SSLS:LKVYP:VVE:SXGXR, HVPKPXX:APT:SSLS:LKVYP:VVR:SXGXH, RVPSTXX:APV:SSLS:LKVYP:VEE:XGXL, ASAAPXX:VPQ:SSLS:LKVYP:VRS:XKXS, ASASPXX:VSQ:SSLS:LKVYP:VKS:XKXS, ASASPXX:VPQ:SSLS:LKVYP:VKS:XKXS, NDEGLEX:VPT:SSLS:LKVYP:QHN:KXEXR, NDEGLEX:VPT:SSLS:LKVYP:EHS:QXEXR, SSVKXQP:SRV:SSLS:LKVYP:EEH:LEXAXA, RNVQXRP:TQV:SSLS:LKVYP:EDH:LAXKXE, KIPKAXX:APT:NAIS:LKKYR:VVR:GXGXR, GIPEPXX:APT:NAIS:LKKYR:VVR:SXAXR, SIPKAXX:APT:NAIS:LKKYR:VVR:GXGXR, AVPKAXX:APT:NAIS:LKKYR:VVR:AXGXH, KVGKAXX:APT:NAIS:LKKYR:VVR:XGXR, KASKAXX:APT:NAIS:LKKYR:VVR:EXGXR, GSAGPXX:APT:NAIS:LKKYR:VVR:RXGXS, AAPASXX:APT:NAIS:LKKYR:VVR:AXGXR, STPPTXX:APT:NAIS:LKKYR:VVR:SXGXR, RVPSTXX:APT:NAIS:LKKYR:VVR:XGXL, ASAAPXX:APT:NAIS:LKKYR:VVR:XKXS, ASASPXX:APT:NAIS:LKKYR:VVR:XKXS, KIPKAXX:VPT:NAIS:LKKYR:VVE:GXGXR, GIPEPXX:VPE:NAIS:LKKYR:TVE:SXAXR, SIPKAXX:VPT:NAIS:LKKYR:VVE:GXGXR, AVPKAXX:APT:NAIS:LKKYR:VVK:AXGXH, KVGKAXX:VPT:NAIS:LKKYR:VAE:XGXR, KASKAXX:VPT:NAIS:LKKYR:AVS:EXGXR, GSAGPXX:TPT:NAIS:LKKYR:VVD:RXGXS, AAPASXX:VPA:NAIS:LKKYR:VVE:AXGXR, STPPTXX:VPT:NAIS:LKKYR:VVE:SXGXR, RVPSTXX:APV:NAIS:LKKYR:VEE:XGXL, ASAAPXX:VPQ:NAIS:LKKYR:VRS:XKXS, ASASPXX:VSQ:NAIS:LKKYR:VKS:XKXS, ASASPXX:VPQ:NAIS:LKKYR:VKS:XKXS, NDEGLEX:VPT:NAIS:LKKYR:QHN:KXEXR, NDEGLEX:VPT:NAIS:LKKYR:EHS:QXEXR, SSVKXQP:SRV:NAIS:LKKYR:EEH:LEXAXA, RNVQXRP:TQV:NAIS:LKKYR:EDH:LAXKXE, KIPKAXX:APT:SATS:LRKHR:VVK:GXGXR, GIPEPXX:APT:SATS:LRKHR:VVK:SXAXR, SIPKAXX:APT:SATS:LRKHR:VVK:GXGXR, HVTKPTX:APT:SATS:LRKHR:VVK:SXGXH, YVPKPXX:APT:SATS:LRKHR:VVK:SXGXH, TVPKPXX:APT:SATS:LRKHR:VVK:AXGXH, KVGKAXX:APT:SATS:LRKHR:VVK:XGXR, KASKAXX:APT:SATS:LRKHR:VVK:EXGXR, GSAGPXX:APT:SATS:LRKHR:VVK:RXGXS, AAPASXX:APT:SATS:LRKHR:VVK:AXGXR, STPPTXX:APT:SATS:LRKHR:VVK:SXGXR, HVPKPXX:APT:SATS:LRKHR:VVK:SXGXH, RVPSTXX:APT:SATS:LRKHR:VVK:XGXL, ASAAPXX:APT:SATS:LRKHR:VVK:XKXS, ASASPXX:APT:SATS:LRKHR:VVK:XKXS, KIPKAXX:VPT:SATS:LRKHR:VVE:GXGXR, GIPEPXX:VPE:SATS:LRKHR:TVE:SXAXR, SIPKAXX:VPT:SATS:LRKHR:VVE:GXGXR, HVTKPTX:APT:SATS:LRKHR:VVR:SXGXH, YVPKPXX:APT:SATS:LRKHR:VVR:SXGXH, TVPKPXX:APT:SATS:LRKHR:VVR:AXGXH, KVGKAXX:VPT:SATS:LRKHR:VAE:XGXR, KASKAXX:VPT:SATS:LRKHR:AVS:EXGXR, GSAGPXX:TPT:SATS:LRKHR:VVD:RXGXS, AAPASXX:VPA:SATS:LRKHR:VVE:AXGXR, STPPTXX:VPT:SATS:LRKHR:VVE:SXGXR, HVPKPXX:APT:SATS:LRKHR:VVR:SXGXH, RVPSTXX:APV:SATS:LRKHR:VEE:XGXL, ASAAPXX:VPQ:SATS:LRKHR:VRS:XKXS, ASASPXX:VSQ:SATS:LRKHR:VKS:XKXS, ASASPXX:VPQ:SATS:LRKHR:VKS:XKXS, NDEGLEX:VPT:SATS:LRKHR:QHN:KXEXR, NDEGLEX:VPT:SATS:LRKHR:EHS:QXEXR, SSVKXQP:SRV:SATS:LRKHR:EEH:LEXAXA, RNVQXRP:TQV:SATS:LRKHR:EDH:LAXKXE, KIPKAXX:VPT:SPIS:LKYHY:VAE:GXGXR, GIPEPXX:VPT:SPIS:LKYHY:VAE:SXAXR, SIPKAXX:VPT:SPIS:LKYHY:VAE:GXGXR, HVTKPTX:VPT:SPIS:LKYHY:VAE:SXGXH, YVPKPXX:VPT:SPIS:LKYHY:VAE:SXGXH, TVPKPXX:VPT:SPIS:LKYHY:VAE:AXGXH, AVPKAXX:VPT:SPIS:LKYHY:VAE:AXGXH, KASKAXX:VPT:SPIS:LKYHY:VAE:EXGXR, GSAGPXX:VPT:SPIS:LKYHY:VAE:RXGXS, AAPASXX:VPT:SPIS:LKYHY:VAE:AXGXR, STPPTXX:VPT:SPIS:LKYHY:VAE:SXGXR, HVPKPXX:VPT:SPIS:LKYHY:VAE:SXGXH, RVPSTXX:VPT:SPIS:LKYHY:VAE:XGXL, ASAAPXX:VPT:SPIS:LKYHY:VAE:XKXS, ASASPXX:VPT:SPIS:LKYHY:VAE:XKXS, KIPKAXX:VPT:SPIS:LKYHY:VVE:GXGXR, GIPEPXX:VPE:SPIS:LKYHY:TVE:SXAXR, SIPKAXX:VPT:SPIS:LKYHY:VVE:GXGXR, HVTKPTX:APT:SPIS:LKYHY:VVR:SXGXH, YVPKPXX:APT:SPIS:LKYHY:VVR:SXGXH, TVPKPXX:APT:SPIS:LKYHY:VVR:AXGXH, AVPKAXX:APT:SPIS:LKYHY:VVK:AXGXH, KASKAXX:VPT:SPIS:LKYHY:AVS:EXGXR, GSAGPXX:TPT:SPIS:LKYHY:VVD:RXGXS, AAPASXX:VPA:SPIS:LKYHY:VVE:AXGXR, STPPTXX:VPT:SPIS:LKYHY:VVE:SXGXR, HVPKPXX:APT:SPIS:LKYHY:VVR:SXGXH, RVPSTXX:APV:SPIS:LKYHY:VEE:XGXL, ASAAPXX:VPQ:SPIS:LKYHY:VRS:XKXS, ASASPXX:VSQ:SPIS:LKYHY:VKS:XKXS, ASASPXX:VPQ:SPIS:LKYHY:VKS:XKXS, NDEGLEX:VPT:SPIS:LKYHY:QHN:KXEXR, NDEGLEX:VPT:SPIS:LKYHY:EHS:QXEXR, SSVKXQP:SRV:SPIS:LKYHY:EEH:LEXAXA, RNVQXRP:TQV:SPIS:LKYHY:EDH:LAXKXE, KIPKAXX:VPT:EPIS:KFKYE:AVS:GXGXR, GIPEPXX:VPT:EPIS:KFKYE:AVS:SXAXR, SIPKAXX:VPT:EPIS:KFKYE:AVS:GXGXR, HVTKPTX:VPT:EPIS:KFKYE:AVS:SXGXH, YVPKPXX:VPT:EPIS:KFKYE:AVS:SXGXH, TVPKPXX:VPT:EPIS:KFKYE:AVS:AXGXH, AVPKAXX:VPT:EPIS:KFKYE:AVS:AXGXH, KVGKAXX:VPT:EPIS:KFKYE:AVS:XGXR, GSAGPXX:VPT:EPIS:KFKYE:AVS:RXGXS, AAPASXX:VPT:EPIS:KFKYE:AVS:AXGXR, STPPTXX:VPT:EPIS:KFKYE:AVS:SXGXR, HVPKPXX:VPT:EPIS:KFKYE:AVS:SXGXH, RVPSTXX:VPT:EPIS:KFKYE:AVS:XGXL, ASAAPXX:VPT:EPIS:KFKYE:AVS:XKXS, ASASPXX:VPT:EPIS:KFKYE:AVS:XKXS, KIPKAXX:VPT:EPIS:KFKYE:VVE:GXGXR, GIPEPXX:VPE:EPIS:KFKYE:TVE:SXAXR, SIPKAXX:VPT:EPIS:KFKYE:VVE:GXGXR, HVTKPTX:APT:EPIS:KFKYE:VVR:SXGXH, YVPKPXX:APT:EPIS:KFKYE:VVR:SXGXH, TVPKPXX:APT:EPIS:KFKYE:VVR:AXGXH, AVPKAXX:APT:EPIS:KFKYE:VVK:AXGXH, KVGKAXX:VPT:EPIS:KFKYE:VAE:XGXR, GSAGPXX:TPT:EPIS:KFKYE:VVD:RXGXS, AAPASXX:VPA:EPIS:KFKYE:VVE:AXGXR, STPPTXX:VPT:EPIS:KFKYE:VVE:SXGXR, HVPKPXX:APT:EPIS:KFKYE:VVR:SXGXH, RVPSTXX:APV:EPIS:KFKYE:VEE:XGXL, ASAAPXX:VPQ:EPIS:KFKYE:VRS:XKXS, ASASPXX:VSQ:EPIS:KFKYE:VKS:XKXS, ASASPXX:VPQ:EPIS:KFKYE:VKS:XKXS, NDEGLEX:VPT:EPIS:KFKYE:QHN:KXEXR, NDEGLEX:VPT:EPIS:KFKYE:EHS:QXEXR, SSVKXQP:SRV:EPIS:KFKYE:EEH:LEXAXA, RNVQXRP:TQV:EPIS:KFKYE:EDH:LAXKXE, KIPKAXX:TPT:SPIN:YGKIP:VVD:GXGXR, GIPEPXX:TPT:SPIN:YGKIP:VVD:SXAXR, SIPKAXX:TPT:SPIN:YGKIP:VVD:GXGXR, HVTKPTX:TPT:SPIN:YGKIP:VVD:SXGXH, YVPKPXX:TPT:SPIN:YGKIP:VVD:SXGXH, TVPKPXX:TPT:SPIN:YGKIP:VVD:AXGXH, AVPKAXX:TPT:SPIN:YGKIP:VVD:AXGXH, KVGKAXX:TPT:SPIN:YGKIP:VVD:XGXR, KASKAXX:TPT:SPIN:YGKIP:VVD:EXGXR, AAPASXX:TPT:SPIN:YGKIP:VVD:AXGXR, STPPTXX:TPT:SPIN:YGKIP:VVD:SXGXR, HVPKPXX:TPT:SPIN:YGKIP:VVD:SXGXH, RVPSTXX:TPT:SPIN:YGKIP:VVD:XGXL, ASAAPXX:TPT:SPIN:YGKIP:VVD:XKXS, ASASPXX:TPT:SPIN:YGKIP:VVD:XKXS, KIPKAXX:VPT:SPIN:YGKIP:VVE:GXGXR, GIPEPXX:VPE:SPIN:YGKIP:TVE:SXAXR, SIPKAXX:VPT:SPIN:YGKIP:VVE:GXGXR, HVTKPTX:APT:SPIN:YGKIP:VVR:SXGXH, YVPKPXX:APT:SPIN:YGKIP:VVR:SXGXH, TVPKPXX:APT:SPIN:YGKIP:VVR:AXGXH, AVPKAXX:APT:SPIN:YGKIP:VVK:AXGXH, KVGKAXX:VPT:SPIN:YGKIP:VAE:XGXR, KASKAXX:VPT:SPIN:YGKIP:AVS:EXGXR, AAPASXX:VPA:SPIN:YGKIP:VVE:AXGXR, STPPTXX:VPT:SPIN:YGKIP:VVE:SXGXR, HVPKPXX:APT:SPIN:YGKIP:VVR:SXGXH, RVPSTXX:APV:SPIN:YGKIP:VEE:XGXL, ASAAPXX:VPQ:SPIN:YGKIP:VRS:XKXS, ASASPXX:VSQ:SPIN:YGKIP:VKS:XKXS, ASASPXX:VPQ:SPIN:YGKIP:VKS:XKXS, NDEGLEX:VPT:SPIN:YGKIP:QHN:KXEXR, NDEGLEX:VPT:SPIN:YGKIP:EHS:QXEXR, SSVKXQP:SRV:SPIN:YGKIP:EEH:LEXAXA, RNVQXRP:TQV:SPIN:YGKIP:EDH:LAXKXE, KIPKAXX:VPA:SPIS:YKQYE:VVE:GXGXR, GIPEPXX:VPA:SPIS:YKQYE:VVE:SXAXR, SIPKAXX:VPA:SPIS:YKQYE:VVE:GXGXR, HVTKPTX:VPA:SPIS:YKQYE:VVE:SXGXH, YVPKPXX:VPA:SPIS:YKQYE:VVE:SXGXH, TVPKPXX:VPA:SPIS:YKQYE:VVE:AXGXH, AVPKAXX:VPA:SPIS:YKQYE:VVE:AXGXH, KVGKAXX:VPA:SPIS:YKQYE:VVE:XGXR, KASKAXX:VPA:SPIS:YKQYE:VVE:EXGXR, GSAGPXX:VPA:SPIS:YKQYE:VVE:RXGXS, STPPTXX:VPA:SPIS:YKQYE:VVE:SXGXR, HVPKPXX:VPA:SPIS:YKQYE:VVE:SXGXH, RVPSTXX:VPA:SPIS:YKQYE:VVE:XGXL, ASAAPXX:VPA:SPIS:YKQYE:VVE:XKXS, ASASPXX:VPA:SPIS:YKQYE:VVE:XKXS, KIPKAXX:VPT:SPIS:YKQYE:VVE:GXGXR, GIPEPXX:VPE:SPIS:YKQYE:TVE:SXAXR, SIPKAXX:VPT:SPIS:YKQYE:VVE:GXGXR, HVTKPTX:APT:SPIS:YKQYE:VVR:SXGXH, YVPKPXX:APT:SPIS:YKQYE:VVR:SXGXH, TVPKPXX:APT:SPIS:YKQYE:VVR:AXGXH, AVPKAXX:APT:SPIS:YKQYE:VVK:AXGXH, KVGKAXX:VPT:SPIS:YKQYE:VAE:XGXR, KASKAXX:VPT:SPIS:YKQYE:AVS:EXGXR, GSAGPXX:TPT:SPIS:YKQYE:VVD:RXGXS, STPPTXX:VPT:SPIS:YKQYE:VVE:SXGXR, HVPKPXX:APT:SPIS:YKQYE:VVR:SXGXH, RVPSTXX:APV:SPIS:YKQYE:VEE:XGXL, ASAAPXX:VPQ:SPIS:YKQYE:VRS:XKXS, ASASPXX:VSQ:SPIS:YKQYE:VKS:XKXS, ASASPXX:VPQ:SPIS:YKQYE:VKS:XKXS, NDEGLEX:VPT:SPIS:YKQYE:QHN:KXEXR, NDEGLEX:VPT:SPIS:YKQYE:EHS:QXEXR, SSVKXQP:SRV:SPIS:YKQYE:EEH:LEXAXA, RNVQXRP:TQV:SPIS:YKQYE:EDH:LAXKXE, GIPEPXX:VPT:SPIS:YKQYE:VVE:SXAXR, HVTKPTX:VPT:SPIS:YKQYE:VVE:SXGXH, YVPKPXX:VPT:SPIS:YKQYE:VVE:SXGXH, TVPKPXX:VPT:SPIS:YKQYE:VVE:AXGXH, AVPKAXX:VPT:SPIS:YKQYE:VVE:AXGXH, KVGKAXX:VPT:SPIS:YKQYE:VVE:XGXR, KASKAXX:VPT:SPIS:YKQYE:VVE:EXGXR, GSAGPXX:VPT:SPIS:YKQYE:VVE:RXGXS, AAPASXX:VPT:SPIS:YKQYE:VVE:AXGXR, HVPKPXX:VPT:SPIS:YKQYE:VVE:SXGXH, RVPSTXX:VPT:SPIS:YKQYE:VVE:XGXL, ASAAPXX:VPT:SPIS:YKQYE:VVE:XKXS, ASASPXX:VPT:SPIS:YKQYE:VVE:XKXS, AAPASXX:VPA:SPIS:YKQYE:VVE:AXGXR, KIPKAXX:APV:KPLS:DHHKD:VEE:GXGXR, GIPEPXX:APV:KPLS:DHHKD:VEE:SXAXR, SIPKAXX:APV:KPLS:DHHKD:VEE:GXGXR, HVTKPTX:APV:KPLS:DHHKD:VEE:SXGXH, YVPKPXX:APV:KPLS:DHHKD:VEE:SXGXH, TVPKPXX:APV:KPLS:DHHKD:VEE:AXGXH, AVPKAXX:APV:KPLS:DHHKD:VEE:AXGXH, KVGKAXX:APV:KPLS:DHHKD:VEE:XGXR, KASKAXX:APV:KPLS:DHHKD:VEE:EXGXR, GSAGPXX:APV:KPLS:DHHKD:VEE:RXGXS, AAPASXX:APV:KPLS:DHHKD:VEE:AXGXR, STPPTXX:APV:KPLS:DHHKD:VEE:SXGXR, HVPKPXX:APV:KPLS:DHHKD:VEE:SXGXH, ASAAPXX:APV:KPLS:DHHKD:VEE:XKXS, ASASPXX:APV:KPLS:DHHKD:VEE:XKXS, KIPKAXX:VPT:KPLS:DHHKD:VVE:GXGXR, GIPEPXX:VPE:KPLS:DHHKD:TVE:SXAXR, SIPKAXX:VPT:KPLS:DHHKD:VVE:GXGXR, HVTKPTX:APT:KPLS:DHHKD:VVR:SXGXH, YVPKPXX:APT:KPLS:DHHKD:VVR:SXGXH, TVPKPXX:APT:KPLS:DHHKD:VVR:AXGXH, AVPKAXX:APT:KPLS:DHHKD:VVK:AXGXH, KVGKAXX:VPT:KPLS:DHHKD:VAE:XGXR, KASKAXX:VPT:KPLS:DHHKD:AVS:EXGXR, GSAGPXX:TPT:KPLS:DHHKD:VVD:RXGXS, AAPASXX:VPA:KPLS:DHHKD:VVE:AXGXR, STPPTXX:VPT:KPLS:DHHKD:VVE:SXGXR, HVPKPXX:APT:KPLS:DHHKD:VVR:SXGXH, ASAAPXX:VPQ:KPLS:DHHKD:VRS:XKXS, ASASPXX:VSQ:KPLS:DHHKD:VKS:XKXS, ASASPXX:VPQ:KPLS:DHHKD:VKS:XKXS, NDEGLEX:VPT:KPLS:DHHKD:QHN:KXEXR, NDEGLEX:VPT:KPLS:DHHKD:EHS:QXEXR, SSVKXQP:SRV:KPLS:DHHKD:EEH:LEXAXA, RNVQXRP:TQV:KPLS:DHHKD:EDH:LAXKXE, KIPKAXX:VPQ:EPLP:EQLSN:VRS:GXGXR, GIPEPXX:VPQ:EPLP:EQLSN:VRS:SXAXR, SIPKAXX:VPQ:EPLP:EQLSN:VRS:GXGXR, HVTKPTX:VPQ:EPLP:EQLSN:VRS:SXGXH, YVPKPXX:VPQ:EPLP:EQLSN:VRS:SXGXH, TVPKPXX:VPQ:EPLP:EQLSN:VRS:AXGXH, AVPKAXX:VPQ:EPLP:EQLSN:VRS:AXGXH, KVGKAXX:VPQ:EPLP:EQLSN:VRS:XGXR, KASKAXX:VPQ:EPLP:EQLSN:VRS:EXGXR, GSAGPXX:VPQ:EPLP:EQLSN:VRS:RXGXS, AAPASXX:VPQ:EPLP:EQLSN:VRS:AXGXR, STPPTXX:VPQ:EPLP:EQLSN:VRS:SXGXR, HVPKPXX:VPQ:EPLP:EQLSN:VRS:SXGXH, RVPSTXX:VPQ:EPLP:EQLSN:VRS:XGXL, ASASPXX:VPQ:EPLP:EQLSN:VRS:XKXS, KIPKAXX:VPT:EPLP:EQLSN:VVE:GXGXR, GIPEPXX:VPE:EPLP:EQLSN:TVE:SXAXR, SIPKAXX:VPT:EPLP:EQLSN:VVE:GXGXR, HVTKPTX:APT:EPLP:EQLSN:VVR:SXGXH, YVPKPXX:APT:EPLP:EQLSN:VVR:SXGXH, TVPKPXX:APT:EPLP:EQLSN:VVR:AXGXH, AVPKAXX:APT:EPLP:EQLSN:VVK:AXGXH, KVGKAXX:VPT:EPLP:EQLSN:VAE:XGXR, KASKAXX:VPT:EPLP:EQLSN:AVS:EXGXR, GSAGPXX:TPT:EPLP:EQLSN:VVD:RXGXS, AAPASXX:VPA:EPLP:EQLSN:VVE:AXGXR, STPPTXX:VPT:EPLP:EQLSN:VVE:SXGXR, HVPKPXX:APT:EPLP:EQLSN:VVR:SXGXH, RVPSTXX:APV:EPLP:EQLSN:VEE:XGXL, ASASPXX:VSQ:EPLP:EQLSN:VKS:XKXS, ASASPXX:VPQ:EPLP:EQLSN:VKS:XKXS, NDEGLEX:VPT:EPLP:EQLSN:QHN:KXEXR, NDEGLEX:VPT:EPLP:EQLSN:EHS:QXEXR, SSVKXQP:SRV:EPLP:EQLSN:EEH:LEXAXA, RNVQXRP:TQV:EPLP:EQLSN:EDH:LAXKXE, KIPKAXX:VSQ:EPLT:EQLSN:VKS:GXGXR, GIPEPXX:VSQ:EPLT:EQLSN:VKS:SXAXR, SIPKAXX:VSQ:EPLT:EQLSN:VKS:GXGXR, HVTKPTX:VSQ:EPLT:EQLSN:VKS:SXGXH, YVPKPXX:VSQ:EPLT:EQLSN:VKS:SXGXH, TVPKPXX:VSQ:EPLT:EQLSN:VKS:AXGXH, AVPKAXX:VSQ:EPLT:EQLSN:VKS:AXGXH, KVGKAXX:VSQ:EPLT:EQLSN:VKS:XGXR, KASKAXX:VSQ:EPLT:EQLSN:VKS:EXGXR, GSAGPXX:VSQ:EPLT:EQLSN:VKS:RXGXS, AAPASXX:VSQ:EPLT:EQLSN:VKS:AXGXR, STPPTXX:VSQ:EPLT:EQLSN:VKS:SXGXR, HVPKPXX:VSQ:EPLT:EQLSN:VKS:SXGXH, RVPSTXX:VSQ:EPLT:EQLSN:VKS:XGXL, ASAAPXX:VSQ:EPLT:EQLSN:VKS:XKXS, ASASPXX:VSQ:EPLT:EQLSN:VKS:XKXS, KIPKAXX:VPT:EPLT:EQLSN:VVE:GXGXR, GIPEPXX:VPE:EPLT:EQLSN:TVE:SXAXR, SIPKAXX:VPT:EPLT:EQLSN:VVE:GXGXR, HVTKPTX:APT:EPLT:EQLSN:VVR:SXGXH, YVPKPXX:APT:EPLT:EQLSN:VVR:SXGXH, TVPKPXX:APT:EPLT:EQLSN:VVR:AXGXH, AVPKAXX:APT:EPLT:EQLSN:VVK:AXGXH, KVGKAXX:VPT:EPLT:EQLSN:VAE:XGXR, KASKAXX:VPT:EPLT:EQLSN:AVS:EXGXR, GSAGPXX:TPT:EPLT:EQLSN:VVD:RXGXS, AAPASXX:VPA:EPLT:EQLSN:VVE:AXGXR, STPPTXX:VPT:EPLT:EQLSN:VVE:SXGXR, HVPKPXX:APT:EPLT:EQLSN:VVR:SXGXH, RVPSTXX:APV:EPLT:EQLSN:VEE:XGXL, ASAAPXX:VPQ:EPLT:EQLSN:VRS:XKXS, NDEGLEX:VPT:EPLT:EQLSN:QHN:KXEXR, NDEGLEX:VPT:EPLT:EQLSN:EHS:QXEXR, SSVKXQP:SRV:EPLT:EQLSN:EEH:LEXAXA, RNVQXRP:TQV:EPLT:EQLSN:EDH:LAXKXE, KIPKAXX:VPQ:EPLT:EQLSN:VKS:GXGXR, GIPEPXX:VPQ:EPLT:EQLSN:VKS:SXAXR, SIPKAXX:VPQ:EPLT:EQLSN:VKS:GXGXR, HVTKPTX:VPQ:EPLT:EQLSN:VKS:SXGXH, YVPKPXX:VPQ:EPLT:EQLSN:VKS:SXGXH, TVPKPXX:VPQ:EPLT:EQLSN:VKS:AXGXH, AVPKAXX:VPQ:EPLT:EQLSN:VKS:AXGXH, KVGKAXX:VPQ:EPLT:EQLSN:VKS:XGXR, KASKAXX:VPQ:EPLT:EQLSN:VKS:EXGXR, GSAGPXX:VPQ:EPLT:EQLSN:VKS:RXGXS, AAPASXX:VPQ:EPLT:EQLSN:VKS:AXGXR, STPPTXX:VPQ:EPLT:EQLSN:VKS:SXGXR, HVPKPXX:VPQ:EPLT:EQLSN:VKS:SXGXH, RVPSTXX:VPQ:EPLT:EQLSN:VKS:XGXL, ASAAPXX:VPQ:EPLT:EQLSN:VKS:XKXS, ASASPXX:VPQ:EPLT:EQLSN:VKS:XKXS, NDEGLEX:VPT:SNIT:IGEMS:QHN:QXEXR, KIPKAXX:VPT:SNIT:IGEMS:VVE:GXGXR, GIPEPXX:VPE:SNIT:IGEMS:TVE:SXAXR, SIPKAXX:VPT:SNIT:IGEMS:VVE:GXGXR, HVTKPTX:APT:SNIT:IGEMS:VVR:SXGXH, YVPKPXX:APT:SNIT:IGEMS:VVR:SXGXH, TVPKPXX:APT:SNIT:IGEMS:VVR:AXGXH, AVPKAXX:APT:SNIT:IGEMS:VVK:AXGXH, KVGKAXX:VPT:SNIT:IGEMS:VAE:XGXR, KASKAXX:VPT:SNIT:IGEMS:AVS:EXGXR, GSAGPXX:TPT:SNIT:IGEMS:VVD:RXGXS, AAPASXX:VPA:SNIT:IGEMS:VVE:AXGXR, STPPTXX:VPT:SNIT:IGEMS:VVE:SXGXR, HVPKPXX:APT:SNIT:IGEMS:VVR:SXGXH, RVPSTXX:APV:SNIT:IGEMS:VEE:XGXL, ASAAPXX:VPQ:SNIT:IGEMS:VRS:XKXS, ASASPXX:VSQ:SNIT:IGEMS:VKS:XKXS, ASASPXX:VPQ:SNIT:IGEMS:VKS:XKXS, NDEGLEX:VPT:SNIT:IGEMS:EHS:QXEXR, SSVKXQP:SRV:SNIT:IGEMS:EEH:LEXAXA, RNVQXRP:TQV:SNIT:IGEMS:EDH:LAXKXE, NDEGLEX:VPT:SNIT:LGEMS:EHS:KXEXR, KIPKAXX:VPT:SNIT:LGEMS:VVE:GXGXR, GIPEPXX:VPE:SNIT:LGEMS:TVE:SXAXR, SIPKAXX:VPT:SNIT:LGEMS:VVE:GXGXR, HVTKPTX:APT:SNIT:LGEMS:VVR:SXGXH, YVPKPXX:APT:SNIT:LGEMS:VVR:SXGXH, TVPKPXX:APT:SNIT:LGEMS:VVR:AXGXH, AVPKAXX:APT:SNIT:LGEMS:VVK:AXGXH, KVGKAXX:VPT:SNIT:LGEMS:VAE:XGXR, KASKAXX:VPT:SNIT:LGEMS:AVS:EXGXR, GSAGPXX:TPT:SNIT:LGEMS:VVD:RXGXS, AAPASXX:VPA:SNIT:LGEMS:VVE:AXGXR, STPPTXX:VPT:SNIT:LGEMS:VVE:SXGXR, HVPKPXX:APT:SNIT:LGEMS:VVR:SXGXH, RVPSTXX:APV:SNIT:LGEMS:VEE:XGXL, ASAAPXX:VPQ:SNIT:LGEMS:VRS:XKXS, ASASPXX:VSQ:SNIT:LGEMS:VKS:XKXS, ASASPXX:VPQ:SNIT:LGEMS:VKS:XKXS, NDEGLEX:VPT:SNIT:LGEMS:QHN:KXEXR, SSVKXQP:SRV:SNIT:LGEMS:EEH:LEXAXA, RNVQXRP:TQV:SNIT:LGEMS:EDH:LAXKXE, RNVQXRP:SRV:RSVK:KEVQV:EEH:LAXKXE, KIPKAXX:VPT:RSVK:KEVQV:VVE:GXGXR, GIPEPXX:VPE:RSVK:KEVQV:TVE:SXAXR, SIPKAXX:VPT:RSVK:KEVQV:VVE:GXGXR, HVTKPTX:APT:RSVK:KEVQV:VVR:SXGXH, YVPKPXX:APT:RSVK:KEVQV:VVR:SXGXH, TVPKPXX:APT:RSVK:KEVQV:VVR:AXGXH, AVPKAXX:APT:RSVK:KEVQV:VVK:AXGXH, KVGKAXX:VPT:RSVK:KEVQV:VAE:XGXR, KASKAXX:VPT:RSVK:KEVQV:AVS:EXGXR, GSAGPXX:TPT:RSVK:KEVQV:VVD:RXGXS, AAPASXX:VPA:RSVK:KEVQV:VVE:AXGXR, STPPTXX:VPT:RSVK:KEVQV:VVE:SXGXR, HVPKPXX:APT:RSVK:KEVQV:VVR:SXGXH, RVPSTXX:APV:RSVK:KEVQV:VEE:XGXL, ASAAPXX:VPQ:RSVK:KEVQV:VRS:XKXS, ASASPXX:VSQ:RSVK:KEVQV:VKS:XKXS, ASASPXX:VPQ:RSVK:KEVQV:VKS:XKXS, NDEGLEX:VPT:RSVK:KEVQV:QHN:KXEXR, NDEGLEX:VPT:RSVK:KEVQV:EHS:QXEXR, RNVQXRP:TQV:RSVK:KEVQV:EDH:LAXKXE, SSVKXQP:TQV:RPVQ:KKATV:EDH:LEXAXA, KIPKAXX:VPT:RPVQ:KKATV:VVE:GXGXR, GIPEPXX:VPE:RPVQ:KKATV:TVE:SXAXR, SIPKAXX:VPT:RPVQ:KKATV:VVE:GXGXR, HVTKPTX:APT:RPVQ:KKATV:VVR:SXGXH, YVPKPXX:APT:RPVQ:KKATV:VVR:SXGXH, TVPKPXX:APT:RPVQ:KKATV:VVR:AXGXH, AVPKAXX:APT:RPVQ:KKATV:VVK:AXGXH, KVGKAXX:VPT:RPVQ:KKATV:VAE:XGXR, KASKAXX:VPT:RPVQ:KKATV:AVS:EXGXR, GSAGPXX:TPT:RPVQ:KKATV:VVD:RXGXS, AAPASXX:VPA:RPVQ:KKATV:VVE:AXGXR, STPPTXX:VPT:RPVQ:KKATV:VVE:SXGXR, HVPKPXX:APT:RPVQ:KKATV:VVR:SXGXH, RVPSTXX:APV:RPVQ:KKATV:VEE:XGXL, ASAAPXX:VPQ:RPVQ:KKATV:VRS:XKXS, ASASPXX:VSQ:RPVQ:KKATV:VKS:XKXS, ASASPXX:VPQ:RPVQ:KKATV:VKS:XKXS, NDEGLEX:VPT:RPVQ:KKATV:QHN:KXEXR, NDEGLEX:VPT:RPVQ:KKATV:EHS:QXEXR and SSVKXQP:SRV:RPVQ:KKATV:EEH:LEXAXA.

[0368] In particular, in certain embodiments, the hexaplet PEP7:PEP3:PEP12:PEP2:PEP4:PEP8 is selected from the group consisting of GIPEPXX:VPT:SAIS-AA¹⁷-LYL:LKNYQ:VVE:SXAXR, SIPKAXX:VPT:SAIS-AA¹⁷-LYL:LKNYQ:VVE:GXGXR, HVTKPTX:VPT:SAIS-AA¹⁷-LYL:LKNYQ:VVE:SXGXH, YVPKPXX:VPT:SAIS-AA¹⁷-LYL:LKNYQ:VVE:SXGXH, TVPKPXX:VPT:SAIS-AA¹⁷-LYL:LKNYQ:VVE:AXGXH, AVPKAXX:VPT:SAIS-AA¹⁷-LYL:LKNYQ:VVE:AXGXH, KVGKAXX:VPT:SAIS-AA¹⁷-LYL:LKNYQ:VVE:XGXR, KASKAXX:VPT:SAIS-AA¹⁷-LYL:LKNYQ:VVE:EXGXR, GSAGPXX:VPT:SAIS-AA¹⁷-LYL:LKNYQ:VVE:RXGXS, AAPASXX:VPT:SAIS-AA¹⁷-LYL:LKNYQ:VVE:AXGXR, STPPTXX:VPT:SAIS-AA¹⁷-LYL:LKNYQ:VVE:SXGXR, HVPKPXX:VPT:SAIS-AA¹⁷-LYL:LKNYQ:VVE:SXGXH, RVPSTXX:VPT:SAIS-AA¹⁷-LYL:LKNYQ:VVE:XGXL, ASAAPXX:VPT:SAIS-AA¹⁷-LYL:LKNYQ:VVE:XKXS, ASASPXX:VPT:SAIS-AA¹⁷-LYL:LKNYQ:VVE:XKXS, NDEGLEX:VPT:SAIS-AA¹⁷-LYL:LKNYQ:VVE:KXEXR, NDEGLEX:VPT:SAIS-AA¹⁷-LYL:LKNYQ:VVE:QXEXR, SSVKXQP:VPT:SAIS-AA¹⁷-LYL:LKNYQ:VVE:LEXAXA, RNVQXRP:VPT:SAIS-AA¹⁷-LYL:LKNYQ:VVE:LAXKXE, GIPEPXX:VPE:SAIS-AA¹⁷-LYL:LKNYQ:TVE:SXAXR, HVTKPTX:APT:SAIS-AA¹⁷-LYL:LKNYQ:VVR:SXGXH, YVPKPXX:APT:SAIS-AA¹⁷-LYL:LKNYQ:VVR:SXGXH, TVPKPXX:APT:SAIS-AA¹⁷-LYL:LKNYQ:VVR:AXGXH, AVPKAXX:APT:SAIS-AA¹⁷-LYL:LKNYQ:VVK:AXGXH, KVGKAXX:VPT:SAIS-AA¹⁷-LYL:LKNYQ:VAE:XGXR, KASKAXX:VPT:SAIS-AA¹⁷-LYL:LKNYQ:AVS:EXGXR, GSAGPXX:TPT:SAIS-AA¹⁷-LYL:LKNYQ:VVD:RXGXS, AAPASXX:VPA:SAIS-AA¹⁷-LYL:LKNYQ:VVE:AXGXR, HVPKPXX:APT:SAIS-AA¹⁷-LYL:LKNYQ:VVR:SXGXH, RVPSTXX:APV:SAIS-AA¹⁷-LYL:LKNYQ:VEE:XGXL, ASAAPXX:VPQ:SAIS-AA¹⁷-LYL:LKNYQ:VRS:XKXS, ASASPXX:VSQ:SAIS-AA¹⁷-LYL:LKNYQ:VKS:XKXS, ASASPXX:VPQ:SAIS-AA¹⁷-LYL:LKNYQ:VKS:XKXS, NDEGLEX:VPT:SAIS-AA¹⁷-LYL:LKNYQ:QHN:KXEXR, NDEGLEX:VPT:SAIS-AA¹⁷-LYL:LKNYQ:EHS:QXEXR, SSVKXQP:SRV:SAIS-AA¹⁷-LYL:LKNYQ:EEH:LEXAXA, RNVQXRP:TQV:SAIS-AA¹⁷-LYL:LKNYQ:EDH:LAXKXE, KIPKAXX:VPE:SSLS-AA¹⁷-LFF:LKVYP:TVE:GXGXR, SIPKAXX:VPE:SSLS-AA¹⁷-LFF:LKVYP:TVE:GXGXR, HVTKPTX:VPE:SSLS-AA¹⁷-LFF:LKVYP:TVE:SXGXH, YVPKPXX:VPE:SSLS-AA¹⁷-LFF:LKVYP:TVE:SXGXH, TVPKPXX:VPE:SSLS-AA¹⁷-LFF:LKVYP:TVE:AXGXH, AVPKAXX:VPE:SSLS-AA¹⁷-LFF:LKVYP:TVE:AXGXH, KVGKAXX:VPE:SSLS-AA¹⁷-LFF:LKVYP:TVE:XGXR, KASKAXX:VPE:SSLS-AA¹⁷-LFF:LKVYP:TVE:EXGXR, GSAGPXX:VPE:SSLS-AA¹⁷-LFF:LKVYP:TVE:RXGXS, AAPASXX:VPE:SSLS-AA¹⁷-LFF:LKVYP:TVE:AXGXR, STPPTXX:VPE:SSLS-AA¹⁷-LFF:LKVYP:TVE:SXGXR, HVPKPXX:VPE:SSLS-AA¹⁷-LFF:LKVYP:TVE:SXGXH, RVPSTXX:VPE:SSLS-AA¹⁷-LFF:LKVYP:TVE:XGXL, ASAAPXX:VPE:SSLS-AA¹⁷-LFF:LKVYP:TVE:XKXS, ASASPXX:VPE:SSLS-AA¹⁷-LFF:LKVYP:TVE:XKXS, NDEGLEX:VPE:SSLS-AA¹⁷-LFF:LKVYP:TVE:KXEXR, NDEGLEX:VPE:SSLS-AA¹⁷-LFF:LKVYP:TVE:QXEXR, SSVKXQP:VPE:SSLS-AA¹⁷-LFF:LKVYP:TVE:LEXAXA, RNVQXRP:VPE:SSLS-AA¹⁷-LFF:LKVYP:TVE:LAXKXE, KIPKAXX:VPT:SSLS-AA¹⁷-LFF:LKVYP:VVE:GXGXR, SIPKAXX:VPT:SSLS-AA¹⁷-LFF:LKVYP:VVE:GXGXR, HVTKPTX:APT:SSLS-AA¹⁷-LFF:LKVYP:VVR:SXGXH, YVPKPXX:APT:SSLS-AA¹⁷-LFF:LKVYP:VVR:SXGXH, TVPKPXX:APT:SSLS-AA¹⁷-LFF:LKVYP:VVR:AXGXH, AVPKAXX:APT:SSLS-AA¹⁷-LFF:LKVYP:VVK:AXGXH, KVGKAXX:VPT:SSLS-AA¹⁷-LFF:LKVYP:VAE:XGXR, KASKAXX:VPT:SSLS-AA¹⁷-LFF:LKVYP:AVS:EXGXR, GSAGPXX:TPT:SSLS-AA¹⁷-LFF:LKVYP:VVD:RXGXS, AAPASXX:VPA:SSLS-AA¹⁷-LFF:LKVYP:VVE:AXGXR, STPPTXX:VPT:SSLS-AA¹⁷-LFF:LKVYP:VVE:SXGXR, HVPKPXX:APT:SSLS-AA¹⁷-LFF:LKVYP:VVR:SXGXH, RVPSTXX:APV:SSLS-AA¹⁷-LFF:LKVYP:VEE:XGXL, ASAAPXX:VPQ:SSLS-AA¹⁷-LFF:LKVYP:VRS:XKXS, ASASPXX:VSQ:SSLS-AA¹⁷-LFF:LKVYP:VKS:XKXS, ASASPXX:VPQ:SSLS-AA¹⁷-LFF:LKVYP:VKS:XKXS, NDEGLEX:VPT:SSLS-AA¹⁷-LFF:LKVYP:QHN:KXEXR, NDEGLEX:VPT:SSLS-AA¹⁷-LFF:LKVYP:EHS:QXEXR, SSVKXQP:SRV:SSLS-AA¹⁷-LFF:LKVYP:EEH:LEXAXA, RNVQXRP:TQV:SSLS-AA¹⁷-LFF:LKVYP:EDH:LAXKXE, KIPKAXX:VPT:SAIS-AA¹⁷-LYL:LKNYQ:VVE:GXGXR, KIPKAXX:APT:NAIS-AA¹⁷-LYF:LKKYR:VVR:GXGXR, GIPEPXX:APT:NAIS-AA¹⁷-LYF:LKKYR:VVR:SXAXR, SIPKAXX:APT:NAIS-AA¹⁷-LYF:LKKYR:VVR:GXGXR, YVPKPXX:APT:NAIS-AA¹⁷-LYF:LKKYR:VVR:SXGXH, TVPKPXX:APT:NAIS-AA¹⁷-LYF:LKKYR:VVR:AXGXH, AVPKAXX:APT:NAIS-AA¹⁷-LYF:LKKYR:VVR:AXGXH, KVGKAXX:APT:NAIS-AA¹⁷-LYF:LKKYR:VVR:XGXR, KASKAXX:APT:NAIS-AA¹⁷-LYF:LKKYR:VVR:EXGXR, GSAGPXX:APT:NAIS-AA¹⁷-LYF:LKKYR:VVR:RXGXS, AAPASXX:APT:NAIS-AA¹⁷-LYF:LKKYR:VVR:AXGXR, STPPTXX:APT:NAIS-AA¹⁷-LYF:LKKYR:VVR:SXGXR, HVPKPXX:APT:NAIS-AA¹⁷-LYF:LKKYR:VVR:SXGXH, RVPSTXX:APT:NAIS-AA¹⁷-LYF:LKKYR:VVR:XGXL, ASAAPXX:APT:NAIS-AA¹⁷-LYF:LKKYR:VVR:XKXS, ASASPXX:APT:NAIS-AA¹⁷-LYF:LKKYR:VVR:XKXS, NDEGLEX:APT:NAIS-AA¹⁷-LYF:LKKYR:VVR:KXEXR, NDEGLEX:APT:NAIS-AA¹⁷-LYF:LKKYR:VVR:QXEXR, SSVKXQP:APT:NAIS-AA¹⁷-LYF:LKKYR:VVR:LEXAXA, RNVQXRP:APT:NAIS-AA¹⁷-LYF:LKKYR:VVR:LAXKXE, KIPKAXX:VPT:NAIS-AA¹⁷-LYF:LKKYR:VVE:GXGXR, GIPEPXX:VPE:NAIS-AA¹⁷-LYF:LKKYR:TVE:SXAXR, SIPKAXX:VPT:NAIS-AA¹⁷-LYF:LKKYR:VVE:GXGXR, AVPKAXX:APT:NAIS-AA¹⁷-LYF:LKKYR:VVK:AXGXH, KVGKAXX:VPT:NAIS-AA¹⁷-LYF:LKKYR:VAE:XGXR, KASKAXX:VPT:NAIS-AA¹⁷-LYF:LKKYR:AVS:EXGXR, GSAGPXX:TPT:NAIS-AA¹⁷-LYF:LKKYR:VVD:RXGXS, AAPASXX:VPA:NAIS-AA¹⁷-LYF:LKKYR:VVE:AXGXR, STPPTXX:VPT:NAIS-AA¹⁷-LYF:LKKYR:VVE:SXGXR, RVPSTXX:APV:NAIS-AA¹⁷-LYF:LKKYR:VEE:XGXL, ASAAPXX:VPQ:NAIS-AA¹⁷-LYF:LKKYR:VRS:XKXS, ASASPXX:VSQ:NAIS-AA¹⁷-LYF:LKKYR:VKS:XKXS, ASASPXX:VPQ:NAIS-AA¹⁷-LYF:LKKYR:VKS:XKXS, NDEGLEX:VPT:NAIS-AA¹⁷-LYF:LKKYR:QHN:KXEXR, NDEGLEX:VPT:NAIS-AA¹⁷-LYF:LKKYR:EHS:QXEXR, SSVKXQP:SRV:NAIS-AA¹⁷-LYF:LKKYR:EEH:LEXAXA, RNVQXRP:TQV:NAIS-AA¹⁷-LYF:LKKYR:EDH:LAXKXE, HVTKPTX:APT:NAIS-AA¹⁷-LYF:LKKYR:VVR:SXGXH, KIPKAXX:APT:SATS-AA¹⁷-LYY:LRKHR:VVK:GXGXR, GIPEPXX:APT:SATS-AA¹⁷-LYY:LRKHR:VVK:SXAXR, SIPKAXX:APT:SATS-AA¹⁷-LYY:LRKHR:VVK:GXGXR, HVTKPTX:APT:SATS-AA¹⁷-LYY:LRKHR:VVK:SXGXH, YVPKPXX:APT:SATS-AA¹⁷-LYY:LRKHR:VVK:SXGXH, TVPKPXX:APT:SATS-AA¹⁷-LYY:LRKHR:VVK:AXGXH, KVGKAXX:APT:SATS-AA¹⁷-LYY:LRKHR:VVK:XGXR, KASKAXX:APT:SATS-AA¹⁷-LYY:LRKHR:VVK:EXGXR, GSAGPXX:APT:SATS-AA¹⁷-LYY:LRKHR:VVK:RXGXS, AAPASXX:APT:SATS-AA¹⁷-LYY:LRKHR:VVK:AXGXR, STPPTXX:APT:SATS-AA¹⁷-LYY:LRKHR:VVK:SXGXR, HVPKPXX:APT:SATS-AA¹⁷-LYY:LRKHR:VVK:SXGXH, RVPSTXX:APT:SATS-AA¹⁷-LYY:LRKHR:VVK:XGXL, ASAAPXX:APT:SATS-AA¹⁷-LYY:LRKHR:VVK:XKXS, ASASPXX:APT:SATS-AA¹⁷-LYY:LRKHR:VVK:XKXS, NDEGLEX:APT:SATS-AA¹⁷-LYY:LRKHR:VVK:KXEXR, NDEGLEX:APT:SATS-AA¹⁷-LYY:LRKHR:VVK:QXEXR, SSVKXQP:APT:SATS-AA¹⁷-LYY:LRKHR:VVK:LEXAXA, RNVQXRP:APT:SATS-AA¹⁷-LYY:LRKHR:VVK:LAXKXE, KIPKAXX:VPT:SATS-AA¹⁷-LYY:LRKHR:VVE:GXGXR, GIPEPXX:VPE:SATS-AA¹⁷-LYY:LRKHR:TVE:SXAXR, SIPKAXX:VPT:SATS-AA¹⁷-LYY:LRKHR:VVE:GXGXR, HVTKPTX:APT:SATS-AA¹⁷-LYY:LRKHR:VVR:SXGXH, YVPKPXX:APT:SATS-AA¹⁷-LYY:LRKHR:VVR:SXGXH, TVPKPXX:APT:SATS-AA¹⁷-LYY:LRKHR:VVR:AXGXH, KVGKAXX:VPT:SATS-AA¹⁷-LYY:LRKHR:VAE:XGXR, KASKAXX:VPT:SATS-AA¹⁷-LYY:LRKHR:AVS:EXGXR, GSAGPXX:TPT:SATS-AA¹⁷-LYY:LRKHR:VVD:RXGXS, AAPASXX:VPA:SATS-AA¹⁷-LYY:LRKHR:VVE:AXGXR, STPPTXX:VPT:SATS-AA¹⁷-LYY:LRKHR:VVE:SXGXR, HVPKPXX:APT:SATS-AA¹⁷-LYY:LRKHR:VVR:SXGXH, RVPSTXX:APV:SATS-AA¹⁷-LYY:LRKHR:VEE:XGXL, ASAAPXX:VPQ:SATS-AA¹⁷-LYY:LRKHR:VRS:XKXS, ASASPXX:VSQ:SATS-AA¹⁷-LYY:LRKHR:VKS:XKXS, ASASPXX:VPQ:SATS-AA¹⁷-LYY:LRKHR:VKS:XKXS, NDEGLEX:VPT:SATS-AA¹⁷-LYY:LRKHR:QHN:KXEXR, NDEGLEX:VPT:SATS-AA¹⁷-LYY:LRKHR:EHS:QXEXR, SSVKXQP:SRV:SATS-AA¹⁷-LYY:LRKHR:EEH:LEXAXA, RNVQXRP:TQV:SATS-AA¹⁷-LYY:LRKHR:EDH:LAXKXE, KIPKAXX:VPT:SPIS-AA¹⁷-LYK:LKYHY:VAE:GXGXR, GIPEPXX:VPT:SPIS-AA¹⁷-LYK:LKYHY:VAE:SXAXR, SIPKAXX:VPT:SPIS-AA¹⁷-LYK:LKYHY:VAE:GXGXR, HVTKPTX:VPT:SPIS-AA¹⁷-LYK:LKYHY:VAE:SXGXH, YVPKPXX:VPT:SPIS-AA¹⁷-LYK:LKYHY:VAE:SXGXH, TVPKPXX:VPT:SPIS-AA¹⁷-LYK:LKYHY:VAE:AXGXH, AVPKAXX:VPT:SPIS-AA¹⁷-LYK:LKYHY:VAE:AXGXH, KASKAXX:VPT:SPIS-AA¹⁷-LYK:LKYHY:VAE:EXGXR, GSAGPXX:VPT:SPIS-AA¹⁷-LYK:LKYHY:VAE:RXGXS, AAPASXX:VPT:SPIS-AA¹⁷-LYK:LKYHY:VAE:AXGXR, STPPTXX:VPT:SPIS-AA¹⁷-LYK:LKYHY:VAE:SXGXR, HVPKPXX:VPT:SPIS-AA¹⁷-LYK:LKYHY:VAE:SXGXH, RVPSTXX:VPT:SPIS-AA¹⁷-LYK:LKYHY:VAE:XGXL, ASAAPXX:VPT:SPIS-AA¹⁷-LYK:LKYHY:VAE:XKXS, ASASPXX:VPT:SPIS-AA¹⁷-LYK:LKYHY:VAE:XKXS, NDEGLEX:VPT:SPIS-AA¹⁷-LYK:LKYHY:VAE:KXEXR, NDEGLEX:VPT:SPIS-AA¹⁷-LYK:LKYHY:VAE:QXEXR, SSVKXQP:VPT:SPIS-AA¹⁷-LYK:LKYHY:VAE:LEXAXA, RNVQXRP:VPT:SPIS-AA¹⁷-LYK:LKYHY:VAE:LAXKXE, KIPKAXX:VPT:SPIS-AA¹⁷-LYK:LKYHY:VVE:GXGXR, GIPEPXX:VPE:SPIS-AA¹⁷-LYK:LKYHY:TVE:SXAXR, SIPKAXX:VPT:SPIS-AA¹⁷-LYK:LKYHY:VVE:GXGXR, HVTKPTX:APT:SPIS-AA¹⁷-LYK:LKYHY:VVR:SXGXH, YVPKPXX:APT:SPIS-AA¹⁷-LYK:LKYHY:VVR:SXGXH, TVPKPXX:APT:SPIS-AA¹⁷-LYK:LKYHY:VVR:AXGXH, AVPKAXX:APT:SPIS-AA¹⁷-LYK:LKYHY:VVK:AXGXH, KASKAXX:VPT:SPIS-AA¹⁷-LYK:LKYHY:AVS:EXGXR, GSAGPXX:TPT:SPIS-AA¹⁷-LYK:LKYHY:VVD:RXGXS, AAPASXX:VPA:SPIS-AA¹⁷-LYK:LKYHY:VVE:AXGXR, STPPTXX:VPT:SPIS-AA¹⁷-LYK:LKYHY:VVE:SXGXR, HVPKPXX:APT:SPIS-AA¹⁷-LYK:LKYHY:VVR:SXGXH, RVPSTXX:APV:SPIS-AA¹⁷-LYK:LKYHY:VEE:XGXL, ASAAPXX:VPQ:SPIS-AA¹⁷-LYK:LKYHY:VRS:XKXS, ASASPXX:VSQ:SPIS-AA¹⁷-LYK:LKYHY:VKS:XKXS, ASASPXX:VPQ:SPIS-AA¹⁷-LYK:LKYHY:VKS:XKXS, NDEGLEX:VPT:SPIS-AA¹⁷-LYK:LKYHY:QHN:KXEXR, NDEGLEX:VPT:SPIS-AA¹⁷-LYK:LKYHY:EHS:QXEXR, SSVKXQP:SRV:SPIS-AA¹⁷-LYK:LKYHY:EEH:LEXAXA, RNVQXRP:TQV:SPIS-AA¹⁷-LYK:LKYHY:EDH:LAXKXE, KIPKAXX:VPT:EPIS-AA¹⁷-LYL:KFKYE:AVS:GXGXR, GIPEPXX:VPT:EPIS-AA¹⁷-LYL:KFKYE:AVS:SXAXR, SIPKAXX:VPT:EPIS-AA¹⁷-LYL:KFKYE:AVS:GXGXR, HVTKPTX:VPT:EPIS-AA¹⁷-LYL:KFKYE:AVS:SXGXH, YVPKPXX:VPT:EPIS-AA¹⁷-LYL:KFKYE:AVS:SXGXH, TVPKPXX:VPT:EPIS-AA¹⁷-LYL:KFKYE:AVS:AXGXH, AVPKAXX:VPT:EPIS-AA¹⁷-LYL:KFKYE:AVS:AXGXH, KVGKAXX:VPT:EPIS-AA¹⁷-LYL:KFKYE:AVS:XGXR, GSAGPXX:VPT:EPIS-AA¹⁷-LYL:KFKYE:AVS:RXGXS, AAPASXX:VPT:EPIS-AA¹⁷-LYL:KFKYE:AVS:AXGXR, STPPTXX:VPT:EPIS-AA¹⁷-LYL:KFKYE:AVS:SXGXR, HVPKPXX:VPT:EPIS-AA¹⁷-LYL:KFKYE:AVS:SXGXH, RVPSTXX:VPT:EPIS-AA¹⁷-LYL:KFKYE:AVS:XGXL, ASAAPXX:VPT:EPIS-AA¹⁷-LYL:KFKYE:AVS:XKXS, ASASPXX:VPT:EPIS-AA¹⁷-LYL:KFKYE:AVS:XKXS, NDEGLEX:VPT:EPIS-AA¹⁷-LYL:KFKYE:AVS:KXEXR, NDEGLEX:VPT:EPIS-AA¹⁷-LYL:KFKYE:AVS:QXEXR, SSVKXQP:VPT:EPIS-AA¹⁷-LYL:KFKYE:AVS:LEXAXA, RNVQXRP:VPT:EPIS-AA¹⁷-LYL:KFKYE:AVS:LAXKXE, KIPKAXX:VPT:EPIS-AA¹⁷-LYL:KFKYE:VVE:GXGXR, GIPEPXX:VPE:EPIS-AA¹⁷-LYL:KFKYE:TVE:SXAXR, SIPKAXX:VPT:EPIS-AA¹⁷-LYL:KFKYE:VVE:GXGXR, HVTKPTX:APT:EPIS-AA¹⁷-LYL:KFKYE:VVR:SXGXH, YVPKPXX:APT:EPIS-AA¹⁷-LYL:KFKYE:VVR:SXGXH, TVPKPXX:APT:EPIS-AA¹⁷-LYL:KFKYE:VVR:AXGXH, AVPKAXX:APT:EPIS-AA¹⁷-LYL:KFKYE:VVK:AXGXH, KVGKAXX:VPT:EPIS-AA¹⁷-LYL:KFKYE:VAE:XGXR, GSAGPXX:TPT:EPIS-AA¹⁷-LYL:KFKYE:VVD:RXGXS, AAPASXX:VPA:EPIS-AA¹⁷-LYL:KFKYE:VVE:AXGXR, STPPTXX:VPT:EPIS-AA¹⁷-LYL:KFKYE:VVE:SXGXR, HVPKPXX:APT:EPIS-AA¹⁷-LYL:KFKYE:VVR:SXGXH, RVPSTXX:APV:EPIS-AA¹⁷-LYL:KFKYE:VEE:XGXL, ASAAPXX:VPQ:EPIS-AA¹⁷-LYL:KFKYE:VRS:XKXS, ASASPXX:VSQ:EPIS-AA¹⁷-LYL:KFKYE:VKS:XKXS, ASASPXX:VPQ:EPIS-AA¹⁷-LYL:KFKYE:VKS:XKXS, NDEGLEX:VPT:EPIS-AA¹⁷-LYL:KFKYE:QHN:KXEXR, NDEGLEX:VPT:EPIS-AA¹⁷-LYL:KFKYE:EHS:QXEXR, SSVKXQP:SRV:EPIS-AA¹⁷-LYL:KFKYE:EEH:LEXAXA, RNVQXRP:TQV:EPIS-AA¹⁷-LYL:KFKYE:EDH:LAXKXE, KIPKAXX:TPT:SPIN-AA¹⁷-LYF:YGKIP:VVD:GXGXR, GIPEPXX:TPT:SPIN-AA¹⁷-LYF:YGKIP:VVD:SXAXR, SIPKAXX:TPT:SPIN-AA¹⁷-LYF:YGKIP:VVD:GXGXR, HVTKPTX:TPT:SPIN-AA¹⁷-LYF:YGKIP:VVD:SXGXH, YVPKPXX:TPT:SPIN-AA¹⁷-LYF:YGKIP:VVD:SXGXH, TVPKPXX:TPT:SPIN-AA¹⁷-LYF:YGKIP:VVD:AXGXH, AVPKAXX:TPT:SPIN-AA¹⁷-LYF:YGKIP:VVD:AXGXH, KVGKAXX:TPT:SPIN-AA¹⁷-LYF:YGKIP:VVD:XGXR, KASKAXX:TPT:SPIN-AA¹⁷-LYF:YGKIP:VVD:EXGXR, AAPASXX:TPT:SPIN-AA¹⁷-LYF:YGKIP:VVD:AXGXR, STPPTXX:TPT:SPIN-AA¹⁷-LYF:YGKIP:VVD:SXGXR, HVPKPXX:TPT:SPIN-AA¹⁷-LYF:YGKIP:VVD:SXGXH, RVPSTXX:TPT:SPIN-AA¹⁷-LYF:YGKIP:VVD:XGXL, ASAAPXX:TPT:SPIN-AA¹⁷-LYF:YGKIP:VVD:XKXS, ASASPXX:TPT:SPIN-AA¹⁷-LYF:YGKIP:VVD:XKXS, NDEGLEX:TPT:SPIN-AA¹⁷-LYF:YGKIP:VVD:KXEXR, NDEGLEX:TPT:SPIN-AA¹⁷-LYF:YGKIP:VVD:QXEXR, SSVKXQP:TPT:SPIN-AA¹⁷-LYF:YGKIP:VVD:LEXAXA, RNVQXRP:TPT:SPIN-AA¹⁷-LYF:YGKIP:VVD:LAXKXE, KIPKAXX:VPT:SPIN-AA¹⁷-LYF:YGKIP:VVE:GXGXR, GIPEPXX:VPE:SPIN-AA¹⁷-LYF:YGKIP:TVE:SXAXR, SIPKAXX:VPT:SPIN-AA¹⁷-LYF:YGKIP:VVE:GXGXR, HVTKPTX:APT:SPIN-AA¹⁷-LYF:YGKIP:VVR:SXGXH, YVPKPXX:APT:SPIN-AA¹⁷-LYF:YGKIP:VVR:SXGXH, TVPKPXX:APT:SPIN-AA¹⁷-LYF:YGKIP:VVR:AXGXH, AVPKAXX:APT:SPIN-AA¹⁷-LYF:YGKIP:VVK:AXGXH, KVGKAXX:VPT:SPIN-AA¹⁷-LYF:YGKIP:VAE:XGXR, KASKAXX:VPT:SPIN-AA¹⁷-LYF:YGKIP:AVS:EXGXR, AAPASXX:VPA:SPIN-AA¹⁷-LYF:YGKIP:VVE:AXGXR, STPPTXX:VPT:SPIN-AA¹⁷-LYF:YGKIP:VVE:SXGXR, HVPKPXX:APT:SPIN-AA¹⁷-LYF:YGKIP:VVR:SXGXH, RVPSTXX:APV:SPIN-AA¹⁷-LYF:YGKIP:VEE:XGXL, ASAAPXX:VPQ:SPIN-AA¹⁷-LYF:YGKIP:VRS:XKXS, ASASPXX:VSQ:SPIN-AA¹⁷-LYF:YGKIP:VKS:XKXS, ASASPXX:VPQ:SPIN-AA¹⁷-LYF:YGKIP:VKS:XKXS, NDEGLEX:VPT:SPIN-AA¹⁷-LYF:YGKIP:QHN:KXEXR, NDEGLEX:VPT:SPIN-AA¹⁷-LYF:YGKIP:EHS:QXEXR, SSVKXQP:SRV:SPIN-AA¹⁷-LYF:YGKIP:EEH:LEXAXA, RNVQXRP:TQV:SPIN-AA¹⁷-LYF:YGKIP:EDH:LAXKXE, KIPKAXX:VPA:SPIS-AA¹⁷-LYI:YKQYE:VVE:GXGXR, GIPEPXX:VPA:SPIS-AA¹⁷-LYI:YKQYE:VVE:SXAXR, SIPKAXX:VPA:SPIS-AA¹⁷-LYI:YKQYE:VVE:GXGXR, HVTKPTX:VPA:SPIS-AA¹⁷-LYI:YKQYE:VVE:SXGXH, YVPKPXX:VPA:SPIS-AA¹⁷-LYI:YKQYE:VVE:SXGXH, TVPKPXX:VPA:SPIS-AA¹⁷-LYI:YKQYE:VVE:AXGXH, AVPKAXX:VPA:SPIS-AA¹⁷-LYI:YKQYE:VVE:AXGXH, KVGKAXX:VPA:SPIS-AA¹⁷-LYI:YKQYE:VVE:XGXR, KASKAXX:VPA:SPIS-AA¹⁷-LYI:YKQYE:VVE:EXGXR, GSAGPXX:VPA:SPIS-AA¹⁷-LYI:YKQYE:VVE:RXGXS, STPPTXX:VPA:SPIS-AA¹⁷-LYI:YKQYE:VVE:SXGXR, HVPKPXX:VPA:SPIS-AA¹⁷-LYI:YKQYE:VVE:SXGXH, RVPSTXX:VPA:SPIS-AA¹⁷-LYI:YKQYE:VVE:XGXL, ASAAPXX:VPA:SPIS-AA¹⁷-LYI:YKQYE:VVE:XKXS, ASASPXX:VPA:SPIS-AA¹⁷-LYI:YKQYE:VVE:XKXS, NDEGLEX:VPA:SPIS-AA¹⁷-LYI:YKQYE:VVE:KXEXR, NDEGLEX:VPA:SPIS-AA¹⁷-LYI:YKQYE:VVE:QXEXR, SSVKXQP:VPA:SPIS-AA¹⁷-LYI:YKQYE:VVE:LEXAXA, RNVQXRP:VPA:SPIS-AA¹⁷-LYI:YKQYE:VVE:LAXKXE, KIPKAXX:VPT:SPIS-AA¹⁷-LYI:YKQYE:VVE:GXGXR, GIPEPXX:VPE:SPIS-AA¹⁷-LYI:YKQYE:TVE:SXAXR, SIPKAXX:VPT:SPIS-AA¹⁷-LYI:YKQYE:VVE:GXGXR, HVTKPTX:APT:SPIS-AA¹⁷-LYI:YKQYE:VVR:SXGXH, YVPKPXX:APT:SPIS-AA¹⁷-LYI:YKQYE:VVR:SXGXH, TVPKPXX:APT:SPIS-AA¹⁷-LYI:YKQYE:VVR:AXGXH, AVPKAXX:APT:SPIS-AA¹⁷-LYI:YKQYE:VVK:AXGXH, KVGKAXX:VPT:SPIS-AA¹⁷-LYI:YKQYE:VAE:XGXR, KASKAXX:VPT:SPIS-AA¹⁷-LYI:YKQYE:AVS:EXGXR, GSAGPXX:TPT:SPIS-AA¹⁷-LYI:YKQYE:VVD:RXGXS, STPPTXX:VPT:SPIS-AA¹⁷-LYI:YKQYE:VVE:SXGXR, HVPKPXX:APT:SPIS-AA¹⁷-LYI:YKQYE:VVR:SXGXH, RVPSTXX:APV:SPIS-AA¹⁷-LYI:YKQYE:VEE:XGXL, ASAAPXX:VPQ:SPIS-AA¹⁷-LYI:YKQYE:VRS:XKXS, ASASPXX:VSQ:SPIS-AA¹⁷-LYI:YKQYE:VKS:XKXS, ASASPXX:VPQ:SPIS-AA¹⁷-LYI:YKQYE:VKS:XKXS, NDEGLEX:VPT:SPIS-AA¹⁷-LYI:YKQYE:QHN:KXEXR, NDEGLEX:VPT:SPIS-AA¹⁷-LYI:YKQYE:EHS:QXEXR, SSVKXQP:SRV:SPIS-AA¹⁷-LYI:YKQYE:EEH:LEXAXA, RNVQXRP:TQV:SPIS-AA¹⁷-LYI:YKQYE:EDH:LAXKXE, KIPKAXX:VPT:SPIS-AA¹⁷-LFI:YKQYE:VVE:GXGXR, GIPEPXX:VPT:SPIS-AA¹⁷-LFI:YKQYE:VVE:SXAXR, SIPKAXX:VPT:SPIS-AA¹⁷-LFI:YKQYE:VVE:GXGXR, HVTKPTX:VPT:SPIS-AA¹⁷-LFI:YKQYE:VVE:SXGXH, YVPKPXX:VPT:SPIS-AA¹⁷-LFI:YKQYE:VVE:SXGXH, TVPKPXX:VPT:SPIS-AA¹⁷-LFI:YKQYE:VVE:AXGXH, AVPKAXX:VPT:SPIS-AA¹⁷-LFI:YKQYE:VVE:AXGXH, KVGKAXX:VPT:SPIS-AA¹⁷-LFI:YKQYE:VVE:XGXR, KASKAXX:VPT:SPIS-AA¹⁷-LFI:YKQYE:VVE:EXGXR, GSAGPXX:VPT:SPIS-AA¹⁷-LFI:YKQYE:VVE:RXGXS, AAPASXX:VPT:SPIS-AA¹⁷-LFI:YKQYE:VVE:AXGXR, HVPKPXX:VPT:SPIS-AA¹⁷-LFI:YKQYE:VVE:SXGXH, RVPSTXX:VPT:SPIS-AA¹⁷-LFI:YKQYE:VVE:XGXL, ASAAPXX:VPT:SPIS-AA¹⁷-LFI:YKQYE:VVE:XKXS, ASASPXX:VPT:SPIS-AA¹⁷-LFI:YKQYE:VVE:XKXS, NDEGLEX:VPT:SPIS-AA¹⁷-LFI:YKQYE:VVE:KXEXR, NDEGLEX:VPT:SPIS-AA¹⁷-LFI:YKQYE:VVE:QXEXR, SSVKXQP:VPT:SPIS-AA¹⁷-LFI:YKQYE:VVE:LEXAXA, RNVQXRP:VPT:SPIS-AA¹⁷-LFI:YKQYE:VVE:LAXKXE, GIPEPXX:VPE:SPIS-AA¹⁷-LFI:YKQYE:TVE:SXAXR, HVTKPTX:APT:SPIS-AA¹⁷-LFI:YKQYE:VVR:SXGXH, YVPKPXX:APT:SPIS-AA¹⁷-LFI:YKQYE:VVR:SXGXH, TVPKPXX:APT:SPIS-AA¹⁷-LFI:YKQYE:VVR:AXGXH, AVPKAXX:APT:SPIS-AA¹⁷-LFI:YKQYE:VVK:AXGXH, KVGKAXX:VPT:SPIS-AA¹⁷-LFI:YKQYE:VAE:XGXR, KASKAXX:VPT:SPIS-AA¹⁷-LFI:YKQYE:AVS:EXGXR, GSAGPXX:TPT:SPIS-AA¹⁷-LFI:YKQYE:VVD:RXGXS, AAPASXX:VPA:SPIS-AA¹⁷-LFI:YKQYE:VVE:AXGXR, HVPKPXX:APT:SPIS-AA¹⁷-LFI:YKQYE:VVR:SXGXH, RVPSTXX:APV:SPIS-AA¹⁷-LFI:YKQYE:VEE:XGXL, ASAAPXX:VPQ:SPIS-AA¹⁷-LFI:YKQYE:VRS:XKXS, ASASPXX:VSQ:SPIS-AA¹⁷-LFI:YKQYE:VKS:XKXS, ASASPXX:VPQ:SPIS-AA¹⁷-LFI:YKQYE:VKS:XKXS, NDEGLEX:VPT:SPIS-AA¹⁷-LFI:YKQYE:QHN:KXEXR, NDEGLEX:VPT:SPIS-AA¹⁷-LFI:YKQYE:EHS:QXEXR, SSVKXQP:SRV:SPIS-AA¹⁷-LFI:YKQYE:EEH:LEXAXA, RNVQXRP:TQV:SPIS-AA¹⁷-LFI:YKQYE:EDH:LAXKXE, KIPKAXX:APV:KPLS-AA¹⁷-LYV:DHHKD:VEE:GXGXR, GIPEPXX:APV:KPLS-AA¹⁷-LYV:DHHKD:VEE:SXAXR, SIPKAXX:APV:KPLS-AA¹⁷-LYV:DHHKD:VEE:GXGXR, HVTKPTX:APV:KPLS-AA¹⁷-LYV:DHHKD:VEE:SXGXH, YVPKPXX:APV:KPLS-AA¹⁷-LYV:DHHKD:VEE:SXGXH, TVPKPXX:APV:KPLS-AA¹⁷-LYV:DHHKD:VEE:AXGXH, AVPKAXX:APV:KPLS-AA¹⁷-LYV:DHHKD:VEE:AXGXH, KVGKAXX:APV:KPLS-AA¹⁷-LYV:DHHKD:VEE:XGXR, KASKAXX:APV:KPLS-AA¹⁷-LYV:DHHKD:VEE:EXGXR, GSAGPXX:APV:KPLS-AA¹⁷-LYV:DHHKD:VEE:RXGXS, AAPASXX:APV:KPLS-AA¹⁷-LYV:DHHKD:VEE:AXGXR, STPPTXX:APV:KPLS-AA¹⁷-LYV:DHHKD:VEE:SXGXR, HVPKPXX:APV:KPLS-AA¹⁷-LYV:DHHKD:VEE:SXGXH, ASAAPXX:APV:KPLS-AA¹⁷-LYV:DHHKD:V^{EE}:XKXS, ASASPXX:APV:KPLS-AA¹⁷-LYV:DHHKD:VEE:XKXS, NDEGLEX:APV:KPLS-AA¹⁷-LYV:DHHKD:VEE:KXEXR, NDEGLEX:APV:KPLS-AA¹⁷-LYV:DHHKD:VEE:QXEXR, SSVKXQP:APV:KPLS-AA¹⁷-LYV:DHHKD:VEE:LEXAXA, RNVQXRP:APV:KPLS-AA¹⁷-LYV:DHHKD:VEE:LAXKXE, KIPKAXX:VPT:KPLS-AA¹⁷-LYV:DHHKD:VVE:GXGXR, GIPEPXX:VPE:KPLS-AA¹⁷-LYV:DHHKD:TVE:SXAXR, SIPKAXX:VPT:KPLS-AA¹⁷-LYV:DHHKD:VVE:GXGXR, HVTKPTX:APT:KPLS-AA¹⁷-LYV:DHHKD:VVR:SXGXH, YVPKPXX:APT:KPLS-AA¹⁷-LYV:DHHKD:VVR:SXGXH, TVPKPXX:APT:KPLS-AA¹⁷-LYV:DHHKD:VVR:AXGXH, AVPKAXX:APT:KPLS-AA¹⁷-LYV:DHHKD:VVK:AXGXH, KVGKAXX:VPT:KPLS-AA¹⁷-LYV:DHHKD:VAE:XGXR, KASKAXX:VPT:KPLS-AA¹⁷-LYV:DHHKD:AVS:EXGXR, GSAGPXX:TPT:KPLS-AA¹⁷-LYV:DHHKD:VVD:RXGXS, AAPASXX:VPA:KPLS-AA¹⁷-LYV:DHHKD:VVE:AXGXR, STPPTXX:VPT:KPLS-AA¹⁷-LYV:DHHKD:VVE:SXGXR, HVPKPXX:APT:KPLS-AA¹⁷-LYV:DHHKD:VVR:SXGXH, ASAAPXX:VPQ:KPLS-AA¹⁷-LYV:DHHKD:VRS:XKXS, ASASPXX:VSQ:KPLS-AA¹⁷-LYV:DHHKD:VKS:XKXS, ASASPXX:VPQ:KPLS-AA¹⁷-LYV:DHHKD:VKS:XKXS, NDEGLEX:VPT:KPLS-AA¹⁷-LYV:DHHKD:QHN:KXEXR, NDEGLEX:VPT:KPLS-AA¹⁷-LYV:DHHKD:EHS:QXEXR, SSVKXQP:SRV:KPLS-AA¹⁷-LYV:DHHKD:EEH:LEXAXA, RNVQXRP:TQV:KPLS-AA¹⁷-LYV:DHHKD:EDH:LAXKXE, KIPKAXX:VPQ:EPLP-AA¹⁷-VYY:EQLSN:VRS:GXGXR, GIPEPXX:VPQ:EPLP-AA¹⁷-VYY:EQLSN:VRS:SXAXR, SIPKAXX:VPQ:EPLP-AA¹⁷-VYY:EQLSN:VRS:GXGXR, HVTKPTX:VPQ:EPLP-AA¹⁷-VYY:EQLSN:VRS:SXGXH, YVPKPXX:VPQ:EPLP-AA¹⁷-VYY:EQLSN:VRS:SXGXH, TVPKPXX:VPQ:EPLP-AA¹⁷-VYY:EQLSN:VRS:AXGXH, AVPKAXX:VPQ:EPLP-AA¹⁷-VYY:EQLSN:VRS:AXGXH, KVGKAXX:VPQ:EPLP-AA¹⁷-VYY:EQLSN:VRS:XGXR, KASKAXX:VPQ:EPLP-AA¹⁷-VYY:EQLSN:VRS:EXGXR, GSAGPXX:VPQ:EPLP-AA¹⁷-VYY:EQLSN:VRS:RXGXS, AAPASXX:VPQ:EPLP-AA¹⁷-VYY:EQLSN:VRS:AXGXR, STPPTXX:VPQ:EPLP-AA¹⁷-VYY:EQLSN:VRS:SXGXR, HVPKPXX:VPQ:EPLP-AA¹⁷-VYY:EQLSN:VRS:SXGXH, RVPSTXX:VPQ:EPLP-AA¹⁷-VYY:EQLSN:VRS:XGXL, ASASPXX:VPQ:EPLP-AA¹⁷-VYY:EQLSN:VRS:XKXS, NDEGLEX:VPQ:EPLP-AA¹⁷-VYY:EQLSN:VRS:KXEXR, NDEGLEX:VPQ:EPLP-AA¹⁷-VYY:EQLSN:VRS:QXEXR, SSVKXQP:VPQ:EPLP-AA¹⁷-VYY:EQLSN:VRS:LEXAXA, RNVQXRP:VPQ:EPLP-AA¹⁷-VYY:EQLSN:VRS:LAXKXE, KIPKAXX:VPT:EPLP-AA¹⁷-VYY:EQLSN:VVE:GXGXR, GIPEPXX:VPE:EPLP-AA¹⁷-VYY:EQLSN:TVE:SXAXR, SIPKAXX:VPT:EPLP-AA¹⁷-VYY:EQLSN:VVE:GXGXR, HVTKPTX:APT:EPLP-AA¹⁷-VYY:EQLSN:VVR:SXGXH, YVPKPXX:APT:EPLP-AA¹⁷-VYY:EQLSN:VVR:SXGXH, TVPKPXX:APT:EPLP-AA¹⁷-VYY:EQLSN:VVR:AXGXH, AVPKAXX:APT:EPLP-AA¹⁷-VYY:EQLSN:VVK:AXGXH, KVGKAXX:VPT:EPLP-AA¹⁷-VYY:EQLSN:VAE:XGXR, KASKAXX:VPT:EPLP-AA¹⁷-VYY:EQLSN:AVS:EXGXR, GSAGPXX:TPT:EPLP-AA¹⁷-VYY:EQLSN:VVD:RXGXS, AAPASXX:VPA:EPLP-AA¹⁷-VYY:EQLSN:VVE:AXGXR, STPPTXX:VPT:EPLP-AA¹⁷-VYY:EQLSN:VVE:SXGXR, HVPKPXX:APT:EPLP-AA¹⁷-VYY:EQLSN:VVR:SXGXH, RVPSTXX:APV:EPLP-AA¹⁷-VYY:EQLSN:VEE:XGXL, ASASPXX:VSQ:EPLP-AA¹⁷-VYY:EQLSN:VKS:XKXS, ASASPXX:VPQ:EPLP-AA¹⁷-VYY:EQLSN:VKS:XKXS, NDEGLEX:VPT:EPLP-AA¹⁷-VYY:EQLSN:QHN:KXEXR, NDEGLEX:VPT:EPLP-AA¹⁷-VYY:EQLSN:EHS:QXEXR, SSVKXQP:SRV:EPLP-AA¹⁷-VYY:EQLSN:EEH:LEXAXA, RNVQXRP:TQV:EPLP-AA¹⁷-VYY:EQLSN:EDH:LAXKXE, KIPKAXX:VSQ:EPLT-AA¹⁷-LYY:EQLSN:VKS:GXGXR, GIPEPXX:VSQ:EPLT-AA¹⁷-LYY:EQLSN:VKS:SXAXR, SIPKAXX:VSQ:EPLT-AA¹⁷-LYY:EQLSN:VKS:GXGXR, HVTKPTX:VSQ:EPLT-AA¹⁷-LYY:EQLSN:VKS:SXGXH, YVPKPXX:VSQ:EPLT-AA¹⁷-LYY:EQLSN:VKS:SXGXH, TVPKPXX:VSQ:EPLT-AA¹⁷-LYY:EQLSN:VKS:AXGXH, AVPKAXX:VSQ:EPLT-AA¹⁷-LYY:EQLSN:VKS:AXGXH, KVGKAXX:VSQ:EPLT-AA¹⁷-LYY:EQLSN:VKS:XGXR, KASKAXX:VSQ:EPLT-AA¹⁷-LYY:EQLSN:VKS:EXGXR, GSAGPXX:VSQ:EPLT-AA¹⁷-LYY:EQLSN:VKS:RXGXS, AAPASXX:VSQ:EPLT-AA¹⁷-LYY:EQLSN:VKS:AXGXR, STPPTXX:VSQ:EPLT-AA¹⁷-LYY:EQLSN:VKS:SXGXR, HVPKPXX:VSQ:EPLT-AA¹⁷-LYY:EQLSN:VKS:SXGXH, RVPSTXX:VSQ:EPLT-AA¹⁷-LYY:EQLSN:VKS:XGXL, ASAAPXX:VSQ:EPLT-AA¹⁷-LYY:EQLSN:VKS:XKXS, ASASPXX:VSQ:EPLT-AA¹⁷-LYY:EQLSN:VKS:XKXS, NDEGLEX:VSQ:EPLT-AA¹⁷-LYY:EQLSN:VKS:KXEXR, NDEGLEX:VSQ:EPLT-AA¹⁷-LYY:EQLSN:VKS:QXEXR, SSVKXQP:VSQ:EPLT-AA¹⁷-LYY:EQLSN:VKS:LEXAXA, RNVQXRP:VSQ:EPLT-AA¹⁷-LYY:EQLSN:VKS:LAXKXE, KIPKAXX:VPT:EPLT-AA¹⁷-LYY:EQLSN:VVE:GXGXR, GIPEPXX:VPE:EPLT-AA¹⁷-LYY:EQLSN:TVE:SXAXR, SIPKAXX:VPT:EPLT-AA¹⁷-LYY:EQLSN:VVE:GXGXR, HVTKPTX:APT:EPLT-AA¹⁷-LYY:EQLSN:VVR:SXGXH, YVPKPXX:APT:EPLT-AA¹⁷-LYY:EQLSN:VVR:SXGXH, TVPKPXX:APT:EPLT-AA¹⁷-LYY:EQLSN:VVR:AXGXH, AVPKAXX:APT:EPLT-AA¹⁷-LYY:EQLSN:VVK:AXGXH, KVGKAXX:VPT:EPLT-AA¹⁷-LYY:EQLSN:VAE:XGXR, KASKAXX:VPT:EPLT-AA¹⁷-LYY:EQLSN:AVS:EXGXR, GSAGPXX:TPT:EPLT-AA¹⁷-LYY:EQLSN:VVD:RXGXS, AAPASXX:VPA:EPLT-AA¹⁷-LYY:EQLSN:VVE:AXGXR, STPPTXX:VPT:EPLT-AA¹⁷-LYY:EQLSN:VVE:SXGXR, HVPKPXX:APT:EPLT-AA¹⁷-LYY:EQLSN:VVR:SXGXH, RVPSTXX:APV:EPLT-AA¹⁷-LYY:EQLSN:VEE:XGXL, ASAAPXX:VPQ:EPLT-AA¹⁷-LYY:EQLSN:VRS:XKXS, ASASPXX:VPQ:EPLT-AA¹⁷-LYY:EQLSN:VKS:XKXS, NDEGLEX:VPT:EPLT-AA¹⁷-LYY:EQLSN:QHN:KXEXR, NDEGLEX:VPT:EPLT-AA¹⁷-LYY:EQLSN:EHS:QXEXR, SSVKXQP:SRV:EPLT-AA¹⁷-LYY:EQLSN:EEH:LEXAXA, RNVQXRP:TQV:EPLT-AA¹⁷-LYY:EQLSN:EDH:LAXKXE, KIPKAXX:VPQ:EPLT-AA¹⁷-LYY:EQLSN:VKS:GXGXR, GIPEPXX:VPQ:EPLT-AA¹⁷-LYY:EQLSN:VKS:SXAXR, SIPKAXX:VPQ:EPLT-AA¹⁷-LYY:EQLSN:VKS:GXGXR, HVTKPTX:VPQ:EPLT-AA¹⁷-LYY:EQLSN:VKS:SXGXH, YVPKPXX:VPQ:EPLT-AA¹⁷-LYY:EQLSN:VKS:SXGXH, TVPKPXX:VPQ:EPLT-AA¹⁷-LYY:EQLSN:VKS:AXGXH, AVPKAXX:VPQ:EPLT-AA¹⁷-LYY:EQLSN:VKS:AXGXH, KVGKAXX:VPQ:EPLT-AA¹⁷-LYY:EQLSN:VKS:XGXR, KASKAXX:VPQ:EPLT-AA¹⁷-LYY:EQLSN:VKS:EXGXR, GSAGPXX:VPQ:EPLT-AA¹⁷-LYY:EQLSN:VKS:RXGXS, AAPASXX:VPQ:EPLT-AA¹⁷-LYY:EQLSN:VKS:AXGXR, STPPTXX:VPQ:EPLT-AA¹⁷-LYY:EQLSN:VKS:SXGXR, HVPKPXX:VPQ:EPLT-AA¹⁷-LYY:EQLSN:VKS:SXGXH, RVPSTXX:VPQ:EPLT-AA¹⁷-LYY:EQLSN:VKS:XGXL, ASAAPXX:VPQ:EPLT-AA¹⁷-LYY:EQLSN:VKS:XKXS, NDEGLEX:VPQ:EPLT-AA¹⁷-LYY:EQLSN:VKS:KXEXR, NDEGLEX:VPQ:EPLT-AA¹⁷-LYY:EQLSN:VKS:QXEXR, SSVKXQP:VPQ:EPLT-AA¹⁷-LYY:EQLSN:VKS:LEXAXA, RNVQXRP:VPQ:EPLT-AA¹⁷-LYY:EQLSN:VKS:LAXKXE, KIPKAXX:VPT:SNIT-AA¹⁷-QIM:IGEMS:QHN:GXGXR, GIPEPXX:VPT:SNIT-AA¹⁷-QIM:IGEMS:QHN:SXAXR, SIPKAXX:VPT:SNIT-AA¹⁷-QIM:IGEMS:QHN:GXGXR, HVTKPTX:VPT:SNIT-AA¹⁷-QIM:IGEMS:QHN:SXGXH, YVPKPXX:VPT:SNIT-AA¹⁷-QIM:IGEMS:QHN:SXGXH, TVPKPXX:VPT:SNIT-AA¹⁷-QIM:IGEMS:QHN:AXGXH, AVPKAXX:VPT:SNIT-AA¹⁷-QIM:IGEMS:QHN:AXGXH, KVGKAXX:VPT:SNIT-AA¹⁷-QIM:IGEMS:QHN:XGXR, KASKAXX:VPT:SNIT-AA¹⁷-QIM:IGEMS:QHN:EXGXR, GSAGPXX:VPT:SNIT-AA¹⁷-QIM:IGEMS:QHN:RXGXS, AAPASXX:VPT:SNIT-AA¹⁷-QIM:IGEMS:QHN:AXGXR, STPPTXX:VPT:SNIT-AA¹⁷-QIM:IGEMS:QHN:SXGXR, HVPKPXX:VPT:SNIT-AA¹⁷-QIM:IGEMS:QHN:SXGXH, RVPSTXX:VPT:SNIT-AA¹⁷-QIM:IGEMS:QHN:XGXL, ASAAPXX:VPT:SNIT-AA¹⁷-QIM:IGEMS:QHN:XKXS, ASASPXX:VPT:SNIT-AA¹⁷-QIM:IGEMS:QHN:XKXS, NDEGLEX:VPT:SNIT-AA¹⁷-QIM:IGEMS:QHN:QXEXR, NDEGLEX:VPT:SNIT-AA¹⁷-QIM:IGEMS:QHN:KXEXR, SSVKXQP:VPT:SNIT-AA¹⁷-QIM:IGEMS:QHN:LEXAXA, RNVQXRP:VPT:SNIT-AA¹⁷-QIM:IGEMS:QHN:LAXKXE, KIPKAXX:VPT:SNIT-AA¹⁷-QIM:IGEMS:VVE:GXGXR, GIPEPXX:VPE:SNIT-AA¹⁷-QIM:IGEMS:TVE:SXAXR, SIPKAXX:VPT:SNIT-AA¹⁷-QIM:IGEMS:VVE:GXGXR, HVTKPTX:APT:SNIT-AA¹⁷-QIM:IGEMS:VVR:SXGXH, YVPKPXX:APT:SNIT-AA¹⁷-QIM:IGEMS:VVR:SXGXH, TVPKPXX:APT:SNIT-AA¹⁷-QIM:IGEMS:VVR:AXGXH, AVPKAXX:APT:SNIT-AA¹⁷-QIM:IGEMS:VVK:AXGXH, KVGKAXX:VPT:SNIT-AA¹⁷-QIM:IGEMS:VAE:XGXR, KASKAXX:VPT:SNIT-AA¹⁷-QIM:IGEMS:AVS:EXGXR, GSAGPXX:TPT:SNIT-AA¹⁷-QIM:IGEMS:VVD:RXGXS, AAPASXX:VPA:SNIT-AA¹⁷-QIM:IGEMS:VVE:AXGXR, STPPTXX:VPT:SNIT-AA¹⁷-QIM:IGEMS:VVE:SXGXR, HVPKPXX:APT:SNIT-AA¹⁷-QIM:IGEMS:VVR:SXGXH, RVPSTXX:APV:SNIT-AA¹⁷-QIM:IGEMS:VEE:XGXL, ASAAPXX:VPQ:SNIT-AA¹⁷-QIM:IGEMS:VRS:XKXS, ASASPXX:VSQ:SNIT-AA¹⁷-QIM:IGEMS:VKS:XKXS, ASASPXX:VPQ:SNIT-AA¹⁷-QIM:IGEMS:VKS:XKXS, NDEGLEX:VPT:SNIT-AA¹⁷-QIM:IGEMS:EHS:QXEXR, SSVKXQP:SRV:SNIT-AA¹⁷-QIM:IGEMS:EEH:LEXAXA, RNVQXRP:TQV:SNIT-AA¹⁷-QIM:IGEMS:EDH:LAXKXE, KIPKAXX:VPT:SNIT-AA¹⁷-QIM:LGEMS:EHS:GXGXR, GIPEPXX:VPT:SNIT-AA¹⁷-QIM:LGEMS:EHS:SXAXR, SIPKAXX:VPT:SNIT-AA¹⁷-QIM:LGEMS:EHS:GXGXR, HVTKPTX:VPT:SNIT-AA¹⁷-QIM:LGEMS:EHS:SXGXH, YVPKPXX:VPT:SNIT-AA¹⁷-QIM:LGEMS:EHS:SXGXH, TVPKPXX:VPT:SNIT-AA¹⁷-QIM:LGEMS:EHS:AXGXH, AVPKAXX:VPT:SNIT-AA¹⁷-QIM:LGEMS:EHS:AXGXH, KVGKAXX:VPT:SNIT-AA¹⁷-QIM:LGEMS:EHS:XGXR, KASKAXX:VPT:SNIT-AA¹⁷-QIM:LGEMS:EHS:EXGXR, GSAGPXX:VPT:SNIT-AA¹⁷-QIM:LGEMS:EHS:RXGXS, AAPASXX:VPT:SNIT-AA¹⁷-QIM:LGEMS:EHS:AXGXR, STPPTXX:VPT:SNIT-AA¹⁷-QIM:LGEMS:EHS:SXGXR, HVPKPXX:VPT:SNIT-AA¹⁷-QIM:LGEMS:EHS:SXGXH, RVPSTXX:VPT:SNIT-AA¹⁷-QIM:LGEMS:EHS:XGXL, ASAAPXX:VPT:SNIT-AA¹⁷-QIM:LGEMS:EHS:XKXS, ASASPXX:VPT:SNIT-AA¹⁷-QIM:LGEMS:EHS:XKXS, NDEGLEX:VPT:SNIT-AA¹⁷-QIM:LGEMS:EHS:KXEXR, SSVKXQP:VPT:SNIT-AA¹⁷-QIM:LGEMS:EHS:LEXAXA, RNVQXRP:VPT:SNIT-AA¹⁷-QIM:LGEMS:EHS:LAXKXE, KIPKAXX:VPT:SNIT-AA¹⁷-QIM:LGEMS:VVE:GXGXR, GIPEPXX:VPE:SNIT-AA¹⁷-QIM:LGEMS:TVE:SXAXR, SIPKAXX:VPT:SNIT-AA¹⁷-QIM:LGEMS:VVE:GXGXR, HVTKPTX:APT:SNIT-AA¹⁷-QIM:LGEMS:VVR:SXGXH, YVPKPXX:APT:SNIT-AA¹⁷-QIM:LGEMS:VVR:SXGXH, TVPKPXX:APT:SNIT-AA¹⁷-QIM:LGEMS:VVR:AXGXH, AVPKAXX:APT:SNIT-AA¹⁷-QIM:LGEMS:VVK:AXGXH, KVGKAXX:VPT:SNIT-AA¹⁷-QIM:LGEMS:VAE:XGXR, KASKAXX:VPT:SNIT-AA¹⁷-QIM:LGEMS:AVS:EXGXR, GSAGPXX:TPT:SNIT-AA¹⁷-QIM:LGEMS:VVD:RXGXS, AAPASXX:VPA:SNIT-AA¹⁷-QIM:LGEMS:VVE:AXGXR, STPPTXX:VPT:SNIT-AA¹⁷-QIM:LGEMS:VVE:SXGXR, HVPKPXX:APT:SNIT-AA¹⁷-QIM:LGEMS:VVR:SXGXH, RVPSTXX:APV:SNIT-AA¹⁷-QIM:LGEMS:VEE:XGXL, ASAAPXX:VPQ:SNIT-AA¹⁷-QIM:LGEMS:VRS:XKXS, ASASPXX:VSQ:SNIT-AA¹⁷-QIM:LGEMS:VKS:XKXS, ASASPXX:VPQ:SNIT-AA¹⁷-QIM:LGEMS:VKS:XKXS, NDEGLEX:VPT:SNIT-AA¹⁷-QIM:LGEMS:QHN:KXEXR, SSVKXQP:SRV:SNIT-AA¹⁷-QIM:LGEMS:EEH:LEXAXA, RNVQXRP:TQV:SNIT-AA¹⁷-QIM:LGEMS:EDH:LAXKXE, KIPKAXX:SRV:RSVK-AA¹⁷-AKV:KEVQV:EEH:GXGXR, GIPEPXX:SRV:RSVK-AA¹⁷-AKV:KEVQV:EEH:SXAXR, SIPKAXX:SRV:RSVK-AA¹⁷-AKV:KEVQV:EEH:GXGXR, HVTKPTX:SRV:RSVK-AA¹⁷-AKV:KEVQV:EEH:SXGXH, YVPKPXX:SRV:RSVK-AA¹⁷-AKV:KEVQV:EEH:SXGXH, TVPKPXX:SRV:RSVK-AA¹⁷-AKV:KEVQV:EEH:AXGXH, AVPKAXX:SRV:RSVK-AA¹⁷-AKV:KEVQV:EEH:AXGXH, KVGKAXX:SRV:RSVK-AA¹⁷-AKV:KEVQV:EEH:XGXR, KASKAXX:SRV:RSVK-AA¹⁷-AKV:KEVQV:EEH:EXGXR, GSAGPXX:SRV:RSVK-AA¹⁷-AKV:KEVQV:EEH:RXGXS, AAPASXX:SRV:RSVK-AA¹⁷-AKV:KEVQV:EEH:AXGXR, STPPTXX:SRV:RSVK-AA¹⁷-AKV:KEVQV:EEH:SXGXR, HVPKPXX:SRV:RSVK-AA¹⁷-AKV:KEVQV:EEH:SXGXH, RVPSTXX:SRV:RSVK-AA¹⁷-AKV:KEVQV:EEH:XGXL, ASAAPXX:SRV:RSVK-AA¹⁷-AKV:KEVQV:EEH:XKXS, ASASPXX:SRV:RSVK-AA¹⁷-AKV:KEVQV:EEH:XKXS, NDEGLEX:SRV:RSVK-AA¹⁷-AKV:KEVQV:EEH:KXEXR, NDEGLEX:SRV:RSVK-AA¹⁷-AKV:KEVQV:EEH:QXEXR, RNVQXRP:SRV:RSVK-AA¹⁷-AKV:KEVQV:EEH:LAXKXE, KIPKAXX:VPT:RSVK-AA¹⁷-AKV:KEVQV:VVE:GXGXR, GIPEPXX:VPE:RSVK-AA¹⁷-AKV:KEVQV:TVE:SXAXR, SIPKAXX:VPT:RSVK-AA¹⁷-AKV:KEVQV:VVE:GXGXR, HVTKPTX:APT:RSVK-AA¹⁷-AKV:KEVQV:VVR:SXGXH, YVPKPXX:APT:RSVK-AA¹⁷-AKV:KEVQV:VVR:SXGXH, TVPKPXX:APT:RSVK-AA¹⁷-AKV:KEVQV:VVR:AXGXH, AVPKAXX:APT:RSVK-AA¹⁷-AKV:KEVQV:VVK:AXGXH, KVGKAXX:VPT:RSVK-AA¹⁷-AKV:KEVQV:VAE:XGXR, KASKAXX:VPT:RSVK-AA¹⁷-AKV:KEVQV:AVS:EXGXR, GSAGPXX:TPT:RSVK-AA¹⁷-AKV:KEVQV:VVD:RXGXS, AAPASXX:VPA:RSVK-AA¹⁷-AKV:KEVQV:VVE:AXGXR, STPPTXX:VPT:RSVK-AA¹⁷-AKV:KEVQV:VVE:SXGXR, HVPKPXX:APT:RSVK-AA¹⁷-AKV:KEVQV:VVR:SXGXH, RVPSTXX:APV:RSVK-AA¹⁷-AKV:KEVQV:VE^{E}:XGXL, ASAAPXX:VPQ:RSVK-AA¹⁷-AKV:KEVQV:VRS:XKXS, ASASPXX:VSQ:RSVK-AA¹⁷-AKV:KEVQV:VKS:XKXS, ASASPXX:VPQ:RSVK-AA¹⁷-AKV:KEVQV:VKS:XKXS, NDEGLEX:VPT:RSVK-AA¹⁷-AKV:KEVQV:QHN:KXEXR, NDEGLEX:VPT:RSVK-AA¹⁷-AKV:KEVQV:EHS:QXEXR, RNVQXRP:TQV:RSVK-AA¹⁷-AKV:KEVQV:EDH:LAXKXE, KIPKAXX:TQV:RPVQ-AA¹⁷-RKI:KKATV:EDH:GXGXR, GIPEPXX:TQV:RPVQ-AA¹⁷-RKI:KKATV:EDH:SXAXR, SIPKAXX:TQV:RPVQ-AA¹⁷-RKI:KKATV:EDH:GXGXR, HVTKPTX:TQV:RPVQ-AA¹⁷-RKI:KKATV:EDH:SXGXH, YVPKPXX:TQV:RPVQ-AA¹⁷-RKI:KKATV:EDH:SXGXH, TVPKPXX:TQV:RPVQ-AA¹⁷-RKI:KKATV:EDH:AXGXH, AVPKAXX:TQV:RPVQ-AA¹⁷-RKI:KKATV:EDH:AXGXH, KVGKAXX:TQV:RPVQ-AA¹⁷-RKI:KKATV:EDH:XGXR, KASKAXX:TQV:RPVQ-AA¹⁷-RKI:KKATV:EDH:EXGXR, GSAGPXX:TQV:RPVQ-AA¹⁷-RKI:KKATV:EDH:RXGXS, AAPASXX:TQV:RPVQ-AA¹⁷-RKI:KKATV:EDH:AXGXR, STPPTXX:TQV:RPVQ-AA¹⁷-RKI:KKATV:EDH:SXGXR, HVPKPXX:TQV:RPVQ-AA¹⁷-RKI:KKATV:EDH:SXGXH, RVPSTXX:TQV:RPVQ-AA¹⁷-RKI:KKATV:EDH:XGXL, ASAAPXX:TQV:RPVQ-AA¹⁷-RKI:KKATV:EDH:XKXS, ASASPXX:TQV:RPVQ-AA¹⁷-RKI:KKATV:EDH:XKXS, NDEGLEX:TQV:RPVQ-AA¹⁷-RKI:KKATV:EDH:KXEXR, NDEGLEX:TQV:RPVQ-AA¹⁷-RKI:KKATV:EDH:QXEXR, SSVKXQP:TQV:RPVQ-AA¹⁷-RKI:KKATV:EDH:LEXAXA, KIPKAXX:VPT:RPVQ-AA¹⁷-RKI:KKATV:VVE:GXGXR, GIPEPXX:VPE:RPVQ-AA¹⁷-RKI:KKATV:TVE:SXAXR, SIPKAXX:VPT:RPVQ-AA¹⁷-RKI:KKATV:VVE:GXGXR, HVTKPTX:APT:RPVQ-AA¹⁷-RKI:KKATV:VVR:SXGXH, YVPKPXX:APT:RPVQ-AA¹⁷-RKI:KKATV:VVR:SXGXH, TVPKPXX:APT:RPVQ-AA¹⁷-RKI:KKATV:VVR:AXGXH, AVPKAXX:APT:RPVQ-AA¹⁷-RKI:KKATV:VVK:AXGXH, KVGKAXX:VPT:RPVQ-AA¹⁷-RKI:KKATV:VAE:XGXR, KASKAXX:VPT:RPVQ-AA¹⁷-RKI:KKATV:AVS:EXGXR, GSAGPXX:TPT:RPVQ-AA¹⁷-RKI:KKATV:VVD:RXGXS, AAPASXX:VPA:RPVQ-AA¹⁷-RKI:KKATV:VVE:AXGXR, STPPTXX:VPT:RPVQ-AA¹⁷-RKI:KKATV:VVE:SXGXR, HVPKPXX:APT:RPVQ-AA¹⁷-RKI:KKATV:VVR:SXGXH, RVPSTXX:APV:RPVQ-AA¹⁷-RKI:KKATV:VEE:XGXL, ASAAPXX:VPQ:RPVQ-AA¹⁷-RKI:KKATV:VRS:XKXS, ASASPXX:VSQ:RPVQ-AA¹⁷-RKI:KKATV:VKS:XKXS, ASASPXX:VPQ:RPVQ-AA¹⁷-RKI:KKATV:VKS:XKXS, NDEGLEX:VPT:RPVQ-AA¹⁷-RKI:KKATV:QHN:KXEXR, NDEGLEX:VPT:RPVQ-AA¹⁷-RKI:KKATV:EHS:QXEXR and SSVKXQP:SRV:RPVQ-AA¹⁷-RKI:KKATV:EEH:LEXAXA; and wherein AA¹⁷ is selected from the group consisting of G, A, V, L, I, P, F, M, W, T and S (in particular is selected from the group consisting of M, I, L, V and T). More particularly, the hexaplet PEP7:PEP3:PEP12:PEP2:PEP4:PEP8 is selected from the group consisting of GIPEPXX:VPT:SAIS-AA¹⁷-LYL:LKNYQ:VVE:SXAXR, HVTKPTX:VPT:SAIS-AA¹⁷-LYL:LKNYQ:VVE:SXGXH, YVPKPXX:VPT:SAIS-AA¹⁷-LYL:LKNYQ:VVE:SXGXH, TVPKPXX:VPT:SAIS-AA¹⁷-LYL:LKNYQ:VVE:AXGXH, AVPKAXX:VPT:SAIS-AA¹⁷-LYL:LKNYQ:VVE:AXGXH, KVGKAXX:VPT:SAIS-AA¹⁷-LYL:LKNYQ:VVE:XGXR, KASKAXX:VPT:SAIS-AA¹⁷-LYL:LKNYQ:VVE:EXGXR, GSAGPXX:VPT:SAIS-AA¹⁷-LYL:LKNYQ:VVE:RXGXS, AAPASXX:VPT:SAIS-AA¹⁷-LYL:LKNYQ:VVE:AXGXR, STPPTXX:VPT:SAIS-AA¹⁷-LYL:LKNYQ:VVE:SXGXR, HVPKPXX:VPT:SAIS-AA¹⁷-LYL:LKNYQ:VVE:SXGXH, RVPSTXX:VPT:SAIS-AA¹⁷-LYL:LKNYQ:VVE:XGXL, ASAAPXX:VPT:SAIS-AA¹⁷-LYL:LKNYQ:VVE:XKXS, ASASPXX:VPT:SAIS-AA¹⁷-LYL:LKNYQ:VVE:XKXS, GIPEPXX:VPE:SAIS-AA¹⁷-LYL:LKNYQ:TVE:SXAXR, HVTKPTX:APT:SAIS-AA¹⁷-LYL:LKNYQ:VVR:SXGXH, YVPKPXX:APT:SAIS-AA¹⁷-LYL:LKNYQ:VVR:SXGXH, TVPKPXX:APT:SAIS-AA¹⁷-LYL:LKNYQ:VVR:AXGXH, AVPKAXX:APT:SAIS-AA¹⁷-LYL:LKNYQ:VVK:AXGXH, KVGKAXX:VPT:SAIS-AA¹⁷-LYL:LKNYQ:VAE:XGXR, KASKAXX:VPT:SAIS-AA¹⁷-LYL:LKNYQ:AVS:EXGXR, GSAGPXX:TPT:SAIS-AA¹⁷-LYL:LKNYQ:VVD:RXGXS, AAPASXX:VPA:SAIS-AA¹⁷-LYL:LKNYQ:VVE:AXGXR, HVPKPXX:APT:SAIS-AA¹⁷-LYL:LKNYQ:VVR:SXGXH, RVPSTXX:APV:SAIS-AA¹⁷-LYL:LKNYQ:VEE:XGXL, ASAAPXX:VPQ:SAIS-AA¹⁷-LYL:LKNYQ:VRS:XKXS, ASASPXX:VSQ:SAIS-AA¹⁷-LYL:LKNYQ:VKS:XKXS, ASASPXX:VPQ:SAIS-AA¹⁷-LYL:LKNYQ:VKS:XKXS, NDEGLEX:VPT:SAIS-AA¹⁷-LYL:LKNYQ:QHN:KXEXR, NDEGLEX:VPT:SAIS-AA¹⁷-LYL:LKNYQ:EHS:QXEXR, SSVKXQP:SRV:SAIS-AA¹⁷-LYL:LKNYQ:EEH:LEXAXA, RNVQXRP:TQV:SAIS-AA¹⁷-LYL:LKNYQ:EDH:LAXKXE, KIPKAXX:VPE:SSLS-AA¹⁷-LFF:LKVYP:TVE:GXGXR, SIPKAXX:VPE:SSLS-AA¹⁷-LFF:LKVYP:TVE:GXGXR, HVTKPTX:VPE:SSLS-AA¹⁷-LFF:LKVYP:TVE:SXGXH, YVPKPXX:VPE:SSLS-AA¹⁷-LFF:LKVYP:TVE:SXGXH, TVPKPXX:VPE:SSLS-AA¹⁷-LFF:LKVYP:TVE:AXGXH, AVPKAXX:VPE:SSLS-AA¹⁷-LFF:LKVYP:TVE:AXGXH, KVGKAXX:VPE:SSLS-AA¹⁷-LFF:LKVYP:TVE:XGXR, KASKAXX:VPE:SSLS-AA¹⁷-LFF:LKVYP:TVE:EXGXR, GSAGPXX:VPE:SSLS-AA¹⁷-LFF:LKVYP:TVE:RXGXS, AAPASXX:VPE:SSLS-AA¹⁷-LFF:LKVYP:TVE:AXGXR, STPPTXX:VPE:SSLS-AA¹⁷-LFF:LKVYP:TVE:SXGXR, HVPKPXX:VPE:SSLS-AA¹⁷-LFF:LKVYP:TVE:SXGXH, RVPSTXX:VPE:SSLS-AA¹⁷-LFF:LKVYP:TVE:XGXL, ASAAPXX:VPE:SSLS-AA¹⁷-LFF:LKVYP:TVE:XKXS, ASASPXX:VPE:SSLS-AA¹⁷-LFF:LKVYP:TVE:XKXS, KIPKAXX:VPT:SSLS-AA¹⁷-LFF:LKVYP:VVE:GXGXR, SIPKAXX:VPT:SSLS-AA¹⁷-LFF:LKVYP:VVE:GXGXR, HVTKPTX:APT:SSLS-AA¹⁷-LFF:LKVYP:VVR:SXGXH, YVPKPXX:APT:SSLS-AA¹⁷-LFF:LKVYP:VVR:SXGXH, TVPKPXX:APT:SSLS-AA¹⁷-LFF:LKVYP:VVR:AXGXH, AVPKAXX:APT:SSLS-AA¹⁷-LFF:LKVYP:VVK:AXGXH, KVGKAXX:VPT:SSLS-AA¹⁷-LFF:LKVYP:VAE:XGXR, KASKAXX:VPT:SSLS-AA¹⁷-LFF:LKVYP:AVS:EXGXR, GSAGPXX:TPT:SSLS-AA¹⁷-LFF:LKVYP:VVD:RXGXS, AAPASXX:VPA:SSLS-AA¹⁷-LFF:LKVYP:VVE:AXGXR, STPPTXX:VPT:SSLS-AA¹⁷-LFF:LKVYP:VVE:SXGXR, HVPKPXX:APT:SSLS-AA¹⁷-LFF:LKVYP:VVR:SXGXH, RVPSTXX:APV:SSLS-AA¹⁷-LFF:LKVYP:VEE:XGXL, ASAAPXX:VPQ:SSLS-AA¹⁷-LFF:LKVYP:VRS:XKXS, ASASPXX:VSQ:SSLS-AA¹⁷-LFF:LKVYP:VKS:XKXS, ASASPXX:VPQ:SSLS-AA¹⁷-LFF:LKVYP:VKS:XKXS, NDEGLEX:VPT:SSLS-AA¹⁷-LFF:LKVYP:QHN:KXEXR, NDEGLEX:VPT:SSLS-AA¹⁷-LFF:LKVYP:EHS:QXEXR, SSVKXQP:SRV:SSLS-AA¹⁷-LFF:LKVYP:EEH:LEXAXA, RNVQXRP:TQV:SSLS-AA¹⁷-LFF:LKVYP:EDH:LAXKXE, KIPKAXX:APT:NAIS-AA¹⁷-LYF:LKKYR:VVR:GXGXR, GIPEPXX:APT:NAIS-AA¹⁷-LYF:LKKYR:VVR:SXAXR, SIPKAXX:APT:NAIS-AA¹⁷-LYF:LKKYR:VVR:GXGXR, AVPKAXX:APT:NAIS-AA¹⁷-LYF:LKKYR:VVR:AXGXH, KVGKAXX:APT:NAIS-AA¹⁷-LYF:LKKYR:VVR:XGXR, KASKAXX:APT:NAIS-AA¹⁷-LYF:LKKYR:VVR:EXGXR, GSAGPXX:APT:NAIS-AA¹⁷-LYF:LKKYR:VVR:RXGXS, AAPASXX:APT:NAIS-AA¹⁷-LYF:LKKYR:VVR:AXGXR, STPPTXX:APT:NAIS-AA¹⁷-LYF:LKKYR:VVR:SXGXR, RVPSTXX:APT:NAIS-AA¹⁷-LYF:LKKYR:VVR:XGXL, ASAAPXX:APT:NAIS-AA¹⁷-LYF:LKKYR:VVR:XKXS, ASASPXX:APT:NAIS-AA¹⁷-LYF:LKKYR:VVR:XKXS, KIPKAXX:VPT:NAIS-AA¹⁷-LYF:LKKYR:VVE:GXGXR, GIPEPXX:VPE:NAIS-AA¹⁷-LYF:LKKYR:TVE:SXAXR, SIPKAXX:VPT:NAIS-AA¹⁷-LYF:LKKYR:VVE:GXGXR, AVPKAXX:APT:NAIS-AA¹⁷-LYF:LKKYR:VVK:AXGXH, KVGKAXX:VPT:NAIS-AA¹⁷-LYF:LKKYR:VAE:XGXR, KASKAXX:VPT:NAIS-AA¹⁷-LYF:LKKYR:AVS:EXGXR, GSAGPXX:TPT:NAIS-AA¹⁷-LYF:LKKYR:VVD:RXGXS, AAPASXX:VPA:NAIS-AA¹⁷-LYF:LKKYR:VVE:AXGXR, STPPTXX:VPT:NAIS-AA¹⁷-LYF:LKKYR:VVE:SXGXR, RVPSTXX:APV:NAIS-AA¹⁷-LYF:LKKYR:VEE:XGXL, ASAAPXX:VPQ:NAIS-AA¹⁷-LYF:LKKYR:VRS:XKXS, ASASPXX:VSQ:NAIS-AA¹⁷-LYF:LKKYR:VKS:XKXS, ASASPXX:VPQ:NAIS-AA¹⁷-LYF:LKKYR:VKS:XKXS, NDEGLEX:VPT:NAIS-AA¹⁷-LYF:LKKYR:QHN:KXEXR, NDEGLEX:VPT:NAIS-AA¹⁷-LYF:LKKYR:EHS:QXEXR, SSVKXQP:SRV:NAIS-AA¹⁷-LYF:LKKYR:EEH:LEXAXA, RNVQXRP:TQV:NAIS-AA¹⁷-LYF:LKKYR:EDH:LAXKXE, KIPKAXX:APT:SATS-AA¹⁷-LYY:LRKHR:VVK:GXGXR, GIPEPXX:APT:SATS-AA¹⁷-LYY:LRKHR:VVK:SXAXR, SIPKAXX:APT:SATS-AA¹⁷-LYY:LRKHR:VVK:GXGXR, HVTKPTX:APT:SATS-AA¹⁷-LYY:LRKHR:VVK:SXGXH, YVPKPXX:APT:SATS-AA¹⁷-LYY:LRKHR:VVK:SXGXH, TVPKPXX:APT:SATS-AA¹⁷-LYY:LRKHR:VVK:AXGXH, KVGKAXX:APT:SATS-AA¹⁷-LYY:LRKHR:VVK:XGXR, KASKAXX:APT:SATS-AA¹⁷-LYY:LRKHR:VVK:EXGXR, GSAGPXX:APT:SATS-AA¹⁷-LYY:LRKHR:VVK:RXGXS, AAPASXX:APT:SATS-AA¹⁷-LYY:LRKHR:VVK:AXGXR, STPPTXX:APT:SATS-AA¹⁷-LYY:LRKHR:VVK:SXGXR, HVPKPXX:APT:SATS-AA¹⁷-LYY:LRKHR:VVK:SXGXH, RVPSTXX:APT:SATS-AA¹⁷-LYY:LRKHR:VVK:XGXL, ASAAPXX:APT:SATS-AA¹⁷-LYY:LRKHR:VVK:XKXS, ASASPXX:APT:SATS-AA¹⁷-LYY:LRKHR:VVK:XKXS, KIPKAXX:VPT:SATS-AA¹⁷-LYY:LRKHR:VVE:GXGXR, GIPEPXX:VPE:SATS-AA¹⁷-LYY:LRKHR:TVE:SXAXR, SIPKAXX:VPT:SATS-AA¹⁷-LYY:LRKHR:VVE:GXGXR, HVTKPTX:APT:SATS-AA¹⁷-LYY:LRKHR:VVR:SXGXH, YVPKPXX:APT:SATS-AA¹⁷-LYY:LRKHR:VVR:SXGXH, TVPKPXX:APT:SATS-AA¹⁷-LYY:LRKHR:VVR:AXGXH, KVGKAXX:VPT:SATS-AA¹⁷-LYY:LRKHR:VAE:XGXR, KASKAXX:VPT:SATS-AA¹⁷-LYY:LRKHR:AVS:EXGXR, GSAGPXX:TPT:SATS-AA¹⁷-LYY:LRKHR:VVD:RXGXS, AAPASXX:VPA:SATS-AA¹⁷-LYY:LRKHR:VVE:AXGXR, STPPTXX:VPT:SATS-AA¹⁷-LYY:LRKHR:VVE:SXGXR, HVPKPXX:APT:SATS-AA¹⁷-LYY:LRKHR:VVR:SXGXH, RVPSTXX:APV:SATS-AA¹⁷-LYY:LRKHR:VEE:XGXL, ASAAPXX:VPQ:SATS-AA¹⁷-LYY:LRKHR:VRS:XKXS, ASASPXX:VSQ:SATS-AA¹⁷-LYY:LRKHR:VKS:XKXS, ASASPXX:VPQ:SATS-AA¹⁷-LYY:LRKHR:VKS:XKXS, NDEGLEX:VPT:SATS-AA¹⁷-LYY:LRKHR:QHN:KXEXR, NDEGLEX:VPT:SATS-AA¹⁷-LYY:LRKHR:EHS:QXEXR, SSVKXQP:SRV:SATS-AA¹⁷-LYY:LRKHR:EEH:LEXAXA, RNVQXRP:TQV:SATS-AA¹⁷-LYY:LRKHR:EDH:LAXKXE, KIPKAXX:VPT:SPIS-AA¹⁷-LYK:LKYHY:VAE:GXGXR, GIPEPXX:VPT:SPIS-AA¹⁷-LYK:LKYHY:VAE:SXAXR, SIPKAXX:VPT:SPIS-AA¹⁷-LYK:LKYHY:VAE:GXGXR, HVTKPTX:VPT:SPIS-AA¹⁷-LYK:LKYHY:VAE:SXGXH, YVPKPXX:VPT:SPIS-AA¹⁷-LYK:LKYHY:VAE:SXGXH, TVPKPXX:VPT:SPIS-AA¹⁷-LYK:LKYHY:VAE:AXGXH, AVPKAXX:VPT:SPIS-AA¹⁷-LYK:LKYHY:VAE:AXGXH, KASKAXX:VPT:SPIS-AA¹⁷-LYK:LKYHY:VAE:EXGXR, GSAGPXX:VPT:SPIS-AA¹⁷-LYK:LKYHY:VAE:RXGXS, AAPASXX:VPT:SPIS-AA¹⁷-LYK:LKYHY:VAE:AXGXR, STPPTXX:VPT:SPIS-AA¹⁷-LYK:LKYHY:VAE:SXGXR, HVPKPXX:VPT:SPIS-AA¹⁷-LYK:LKYHY:VAE:SXGXH, RVPSTXX:VPT:SPIS-AA¹⁷-LYK:LKYHY:VAE:XGXL, ASAAPXX:VPT:SPIS-AA¹⁷-LYK:LKYHY:VAE:XKXS, ASASPXX:VPT:SPIS-AA¹⁷-LYK:LKYHY:VAE:XKXS, KIPKAXX:VPT:SPIS-AA¹⁷-LYK:LKYHY:VVE:GXGXR, GIPEPXX:VPE:SPIS-AA¹⁷-LYK:LKYHY:TVE:SXAXR, SIPKAXX:VPT:SPIS-AA¹⁷-LYK:LKYHY:VVE:GXGXR, HVTKPTX:APT:SPIS-AA¹⁷-LYK:LKYHY:VVR:SXGXH, YVPKPXX:APT:SPIS-AA¹⁷-LYK:LKYHY:VVR:SXGXH, TVPKPXX:APT:SPIS-AA¹⁷-LYK:LKYHY:VVR:AXGXH, AVPKAXX:APT:SPIS-AA¹⁷-LYK:LKYHY:VVK:AXGXH, KASKAXX:VPT:SPIS-AA¹⁷-LYK:LKYHY:AVS:EXGXR, GSAGPXX:TPT:SPIS-AA¹⁷-LYK:LKYHY:VVD:RXGXS, AAPASXX:VPA:SPIS-AA¹⁷-LYK:LKYHY:VVE:AXGXR, STPPTXX:VPT:SPIS-AA¹⁷-LYK:LKYHY:VVE:SXGXR, HVPKPXX:APT:SPIS-AA¹⁷-LYK:LKYHY:VVR:SXGXH, RVPSTXX:APV:SPIS-AA¹⁷-LYK:LKYHY:VEE:XGXL, ASAAPXX:VPQ:SPIS-AA¹⁷-LYK:LKYHY:VRS:XKXS, ASASPXX:VSQ:SPIS-AA¹⁷-LYK:LKYHY:VKS:XKXS, ASASPXX:VPQ:SPIS-AA¹⁷-LYK:LKYHY:VKS:XKXS, NDEGLEX:VPT:SPIS-AA¹⁷-LYK:LKYHY:QHN:KXEXR, NDEGLEX:VPT:SPIS-AA¹⁷-LYK:LKYHY:EHS:QXEXR, SSVKXQP:SRV:SPIS-AA¹⁷-LYK:LKYHY:EEH:LEXAXA, RNVQXRP:TQV:SPIS-AA¹⁷-LYK:LKYHY:EDH:LAXKXE, KIPKAXX:VPT:EPIS-AA¹⁷-LYL:KFKYE:AVS:GXGXR, GIPEPXX:VPT:EPIS-AA¹⁷-LYL:KFKYE:AVS:SXAXR, SIPKAXX:VPT:EPIS-AA¹⁷-LYL:KFKYE:AVS:GXGXR, HVTKPTX:VPT:EPIS-AA¹⁷-LYL:KFKYE:AVS:SXGXH, YVPKPXX:VPT:EPIS-AA¹⁷-LYL:KFKYE:AVS:SXGXH, TVPKPXX:VPT:EPIS-AA¹⁷-LYL:KFKYE:AVS:AXGXH, AVPKAXX:VPT:EPIS-AA¹⁷-LYL:KFKYE:AVS:AXGXH, KVGKAXX:VPT:EPIS-AA¹⁷-LYL:KFKYE:AVS:XGXR, GSAGPXX:VPT:EPIS-AA¹⁷-LYL:KFKYE:AVS:RXGXS, AAPASXX:VPT:EPIS-AA¹⁷-LYL:KFKYE:AVS:AXGXR, STPPTXX:VPT:EPIS-AA¹⁷-LYL:KFKYE:AVS:SXGXR, HVPKPXX:VPT:EPIS-AA¹⁷-LYL:KFKYE:AVS:SXGXH, RVPSTXX:VPT:EPIS-AA¹⁷-LYL:KFKYE:AVS:XGXL, ASAAPXX:VPT:EPIS-AA¹⁷-LYL:KFKYE:AVS:XKXS, ASASPXX:VPT:EPIS-AA¹⁷-LYL:KFKYE:AVS:XKXS, KIPKAXX:VPT:EPIS-AA¹⁷-LYL:KFKYE:VVE:GXGXR, GIPEPXX:VPE:EPIS-AA¹⁷-LYL:KFKYE:TVE:SXAXR, SIPKAXX:VPT:EPIS-AA¹⁷-LYL:KFKYE:VVE:GXGXR, HVTKPTX:APT:EPIS-AA¹⁷-LYL:KFKYE:VVR:SXGXH, YVPKPXX:APT:EPIS-AA¹⁷-LYL:KFKYE:VVR:SXGXH, TVPKPXX:APT:EPIS-AA¹⁷-LYL:KFKYE:VVR:AXGXH, AVPKAXX:APT:EPIS-AA¹⁷-LYL:KFKYE:VVK:AXGXH, KVGKAXX:VPT:EPIS-AA¹⁷-LYL:KFKYE:VAE:XGXR, GSAGPXX:TPT:EPIS-AA¹⁷-LYL:KFKYE:VVD:RXGXS, AAPASXX:VPA:EPIS-AA¹⁷-LYL:KFKYE:VVE:AXGXR, STPPTXX:VPT:EPIS-AA¹⁷-LYL:KFKYE:VVE:SXGXR, HVPKPXX:APT:EPIS-AA¹⁷-LYL:KFKYE:VVR:SXGXH, RVPSTXX:APV:EPIS-AA¹⁷-LYL:KFKYE:VEE:XGXL, ASAAPXX:VPQ:EPIS-AA¹⁷-LYL:KFKYE:VRS:XKXS, ASASPXX:VSQ:EPIS-AA¹⁷-LYL:KFKYE:VKS:XKXS, ASASPXX:VPQ:EPIS-AA¹⁷-LYL:KFKYE:VKS:XKXS, NDEGLEX:VPT:EPIS-AA¹⁷-LYL:KFKYE:QHN:KXEXR, NDEGLEX:VPT:EPIS-AA¹⁷-LYL:KFKYE:EHS:QXEXR, SSVKXQP:SRV:EPIS-AA¹⁷-LYL:KFKYE:EEH:LEXAXA, RNVQXRP:TQV:EPIS-AA¹⁷-LYL:KFKYE:EDH:LAXKXE, KIPKAXX:TPT:SPIN-AA¹⁷-LYF:YGKIP:VVD:GXGXR, GIPEPXX:TPT:SPIN-AA¹⁷-LYF:YGKIP:VVD:SXAXR, SIPKAXX:TPT:SPIN-AA¹⁷-LYF:YGKIP:VVD:GXGXR, HVTKPTX:TPT:SPIN-AA¹⁷-LYF:YGKIP:VVD:SXGXH, YVPKPXX:TPT:SPIN-AA¹⁷-LYF:YGKIP:VVD:SXGXH, TVPKPXX:TPT:SPIN-AA¹⁷-LYF:YGKIP:VVD:AXGXH, AVPKAXX:TPT:SPIN-AA¹⁷-LYF:YGKIP:VVD:AXGXH, KVGKAXX:TPT:SPIN-AA¹⁷-LYF:YGKIP:VVD:XGXR, KASKAXX:TPT:SPIN-AA¹⁷-LYF:YGKIP:VVD:EXGXR, AAPASXX:TPT:SPIN-AA¹⁷-LYF:YGKIP:VVD:AXGXR, STPPTXX:TPT:SPIN-AA¹⁷-LYF:YGKIP:VVD:SXGXR, HVPKPXX:TPT:SPIN-AA¹⁷-LYF:YGKIP:VVD:SXGXH, RVPSTXX:TPT:SPIN-AA¹⁷-LYF:YGKIP:VVD:XGXL, ASAAPXX:TPT:SPIN-AA¹⁷-LYF:YGKIP:VVD:XKXS, ASASPXX:TPT:SPIN-AA¹⁷-LYF:YGKIP:VVD:XKXS, KIPKAXX:VPT:SPIN-AA¹⁷-LYF:YGKIP:VVE:GXGXR, GIPEPXX:VPE:SPIN-AA¹⁷-LYF:YGKIP:TVE:SXAXR, SIPKAXX:VPT:SPIN-AA¹⁷-LYF:YGKIP:VVE:GXGXR, HVTKPTX:APT:SPIN-AA¹⁷-LYF:YGKIP:VVR:SXGXH, YVPKPXX:APT:SPIN-AA¹⁷-LYF:YGKIP:VVR:SXGXH, TVPKPXX:APT:SPIN-AA¹⁷-LYF:YGKIP:VVR:AXGXH, AVPKAXX:APT:SPIN-AA¹⁷-LYF:YGKIP:VVK:AXGXH, KVGKAXX:VPT:SPIN-AA¹⁷-LYF:YGKIP:VAE:XGXR, KASKAXX:VPT:SPIN-AA¹⁷-LYF:YGKIP:AVS:EXGXR, AAPASXX:VPA:SPIN-AA¹⁷-LYF:YGKIP:VVE:AXGXR, STPPTXX:VPT:SPIN-AA¹⁷-LYF:YGKIP:VVE:SXGXR, HVPKPXX:APT:SPIN-AA¹⁷-LYF:YGKIP:VVR:SXGXH, RVPSTXX:APV:SPIN-AA¹⁷-LYF:YGKIP:VEE:XGXL, ASAAPXX:VPQ:SPIN-AA¹⁷-LYF:YGKIP:VRS:XKXS, ASASPXX:VSQ:SPIN-AA¹⁷-LYF:YGKIP:VKS:XKXS, ASASPXX:VPQ:SPIN-AA¹⁷-LYF:YGKIP:VKS:XKXS, NDEGLEX:VPT:SPIN-AA¹⁷-LYF:YGKIP:QHN:KXEXR, NDEGLEX:VPT:SPIN-AA¹⁷-LYF:YGKIP:EHS:QXEXR, SSVKXQP:SRV:SPIN-AA¹⁷-LYF:YGKIP:EEH:LEXAXA, RNVQXRP:TQV:SPIN-AA¹⁷-LYF:YGKIP:EDH:LAXKXE, KIPKAXX:VPA:SPIS-AA¹⁷-LYI:YKQYE:VVE:GXGXR, GIPEPXX:VPA:SPIS-AA¹⁷-LYI:YKQYE:VVE:SXAXR, SIPKAXX:VPA:SPIS-AA¹⁷-LYI:YKQYE:VVE:GXGXR, HVTKPTX:VPA:SPIS-AA¹⁷-LYI:YKQYE:VVE:SXGXH, YVPKPXX:VPA:SPIS-AA¹⁷-LYI:YKQYE:VVE:SXGXH, TVPKPXX:VPA:SPIS-AA¹⁷-LYI:YKQYE:VVE:AXGXH, AVPKAXX:VPA:SPIS-AA¹⁷-LYI:YKQYE:VVE:AXGXH, KVGKAXX:VPA:SPIS-AA¹⁷-LYI:YKQYE:VVE:XGXR, KASKAXX:VPA:SPIS-AA¹⁷-LYI:YKQYE:VVE:EXGXR, GSAGPXX:VPA:SPIS-AA¹⁷-LYI:YKQYE:VVE:RXGXS, STPPTXX:VPA:SPIS-AA¹⁷-LYI:YKQYE:VVE:SXGXR, HVPKPXX:VPA:SPIS-AA¹⁷-LYI:YKQYE:VVE:SXGXH, RVPSTXX:VPA:SPIS-AA¹⁷-LYI:YKQYE:VVE:XGXL, ASAAPXX:VPA:SPIS-AA¹⁷-LYI:YKQYE:VVE:XKXS, ASASPXX:VPA:SPIS-AA¹⁷-LYI:YKQYE:VVE:XKXS, KIPKAXX:VPT:SPIS-AA¹⁷-LYI:YKQYE:VVE:GXGXR, GIPEPXX:VPE:SPIS-AA¹⁷-LYI:YKQYE:TVE:SXAXR, SIPKAXX:VPT:SPIS-AA¹⁷-LYI:YKQYE:VVE:GXGXR, HVTKPTX:APT:SPIS-AA¹⁷-LYI:YKQYE:VVR:SXGXH, YVPKPXX:APT:SPIS-AA¹⁷-LYI:YKQYE:VVR:SXGXH, TVPKPXX:APT:SPIS-AA¹⁷-LYI:YKQYE:VVR:AXGXH, AVPKAXX:APT:SPIS-AA¹⁷-LYI:YKQYE:VVK:AXGXH, KVGKAXX:VPT:SPIS-AA¹⁷-LYI:YKQYE:VAE:XGXR, KASKAXX:VPT:SPIS-AA¹⁷-LYI:YKQYE:AVS:EXGXR, GSAGPXX:TPT:SPIS-AA¹⁷-LYI:YKQYE:VVD:RXGXS, STPPTXX:VPT:SPIS-AA¹⁷-LYI:YKQYE:VVE:SXGXR, HVPKPXX:APT:SPIS-AA¹⁷-LYI:YKQYE:VVR:SXGXH, RVPSTXX:APV:SPIS-AA¹⁷-LYI:YKQYE:VEE:XGXL, ASAAPXX:VPQ:SPIS-AA¹⁷-LYI:YKQYE:VRS:XKXS, ASASPXX:VSQ:SPIS-AA¹⁷-LYI:YKQYE:VKS:XKXS, ASASPXX:VPQ:SPIS-AA¹⁷-LYI:YKQYE:VKS:XKXS, NDEGLEX:VPT:SPIS-AA¹⁷-LYI:YKQYE:QHN:KXEXR, NDEGLEX:VPT:SPIS-AA¹⁷-LYI:YKQYE:EHS:QXEXR, SSVKXQP:SRV:SPIS-AA¹⁷-LYI:YKQYE:EEH:LEXAXA, RNVQXRP:TQV:SPIS-AA¹⁷-LYI:YKQYE:EDH:LAXKXE, KIPKAXX:VPT:SPIS-AA¹⁷-LFI:YKQYE:VVE:GXGXR, GIPEPXX:VPT:SPIS-AA¹⁷-LFI:YKQYE:VVE:SXAXR, SIPKAXX:VPT:SPIS-AA¹⁷-LFI:YKQYE:VVE:GXGXR, HVTKPTX:VPT:SPIS-AA¹⁷-LFI:YKQYE:VVE:SXGXH, YVPKPXX:VPT:SPIS-AA¹⁷-LFI:YKQYE:VVE:SXGXH, TVPKPXX:VPT:SPIS-AA¹⁷-LFI:YKQYE:VVE:AXGXH, AVPKAXX:VPT:SPIS-AA¹⁷-LFI:YKQYE:VVE:AXGXH, KVGKAXX:VPT:SPIS-AA¹⁷-LFI:YKQYE:VVE:XGXR, KASKAXX:VPT:SPIS-AA¹⁷-LFI:YKQYE:VVE:EXGXR, GSAGPXX:VPT:SPIS-AA¹⁷-LFI:YKQYE:VVE:RXGXS, AAPASXX:VPT:SPIS-AA¹⁷-LFI:YKQYE:VVE:AXGXR, HVPKPXX:VPT:SPIS-AA¹⁷-LFI:YKQYE:VVE:SXGXH, RVPSTXX:VPT:SPIS-AA¹⁷-LFI:YKQYE:VVE:XGXL, ASAAPXX:VPT:SPIS-AA¹⁷-LFI:YKQYE:VVE:XKXS, ASASPXX:VPT:SPIS-AA¹⁷-LFI:YKQYE:VVE:XKXS, GIPEPXX:VPE:SPIS-AA¹⁷-LFI:YKQYE:TVE:SXAXR, HVTKPTX:APT:SPIS-AA¹⁷-LFI:YKQYE:VVR:SXGXH, YVPKPXX:APT:SPIS-AA¹⁷-LFI:YKQYE:VVR:SXGXH, TVPKPXX:APT:SPIS-AA¹⁷-LFI:YKQYE:VVR:AXGXH, AVPKAXX:APT:SPIS-AA¹⁷-LFI:YKQYE:VVK:AXGXH, KVGKAXX:VPT:SPIS-AA¹⁷-LFI:YKQYE:VAE:XGXR, KASKAXX:VPT:SPIS-AA¹⁷-LFI:YKQYE:AVS:EXGXR, GSAGPXX:TPT:SPIS-AA¹⁷-LFI:YKQYE:VVD:RXGXS, AAPASXX:VPA:SPIS-AA¹⁷-LFI:YKQYE:VVE:AXGXR, HVPKPXX:APT:SPIS-AA¹⁷-LFI:YKQYE:VVR:SXGXH, RVPSTXX:APV:SPIS-AA¹⁷-LFI:YKQYE:VEE:XGXL, ASAAPXX:VPQ:SPIS-AA¹⁷-LFI:YKQYE:VRS:XKXS, ASASPXX:VSQ:SPIS-AA¹⁷-LFI:YKQYE:VKS:XKXS, ASASPXX:VPQ:SPIS-AA¹⁷-LFI:YKQYE:VKS:XKXS, NDEGLEX:VPT:SPIS-AA¹⁷-LFI:YKQYE:QHN:KXEXR, NDEGLEX:VPT:SPIS-AA¹⁷-LFI:YKQYE:EHS:QXEXR, SSVKXQP:SRV:SPIS-AA¹⁷-LFI:YKQYE:EEH:LEXAXA, RNVQXRP:TQV:SPIS-AA¹⁷-LFI:YKQYE:EDH:LAXKXE, KIPKAXX:APV:KPLS-AA¹⁷-LYV:DHHKD:VEE:GXGXR, GIPEPXX:APV:KPLS-AA¹⁷-LYV:DHHKD:VEE:SXAXR, SIPKAXX:APV:KPLS-AA¹⁷-LYV:DHHKD:VEE:GXGXR, HVTKPTX:APV:KPLS-AA¹⁷-LYV:DHHKD:VEE:SXGXH, YVPKPXX:APV:KPLS-AA¹⁷-LYV:DHHKD:VEE:SXGXH, TVPKPXX:APV:KPLS-AA¹⁷-LYV:DHHKD:VEE:AXGXH, AVPKAXX:APV:KPLS-AA¹⁷-LYV:DHHKD:VEE:AXGXH, KVGKAXX:APV:KPLS-AA¹⁷-LYV:DHHKD:VEE:XGXR, KASKAXX:APV:KPLS-AA¹⁷-LYV:DHHKD:VEE:EXGXR, GSAGPXX:APV:KPLS-AA¹⁷-LYV:DHHKD:VEE:RXGXS, AAPASXX:APV:KPLS-AA¹⁷-LYV:DHHKD:VEE:AXGXR, STPPTXX:APV:KPLS-AA¹⁷-LYV:DHHKD:VEE:SXGXR, HVPKPXX:APV:KPLS-AA¹⁷-LYV:DHHKD:VEE:SXGXH, ASAAPXX:APV:KPLS-AA¹⁷-LYV:DHHKD:VEE:XKXS, ASASPXX:APV:KPLS-AA¹⁷-LYV:DHHKD:VEE:XKXS, KIPKAXX:VPT:KPLS-AA¹⁷-LYV:DHHKD:VVE:GXGXR, GIPEPXX:VPE:KPLS-AA¹⁷-LYV:DHHKD:TVE:SXAXR, SIPKAXX:VPT:KPLS-AA¹⁷-LYV:DHHKD:VVE:GXGXR, HVTKPTX:APT:KPLS-AA¹⁷-LYV:DHHKD:VVR:SXGXH, YVPKPXX:APT:KPLS-AA¹⁷-LYV:DHHKD:VVR:SXGXH, TVPKPXX:APT:KPLS-AA¹⁷-LYV:DHHKD:VVR:AXGXH, AVPKAXX:APT:KPLS-AA¹⁷-LYV:DHHKD:VVK:AXGXH, KVGKAXX:VPT:KPLS-AA¹⁷-LYV:DHHKD:VAE:XGXR, KASKAXX:VPT:KPLS-AA¹⁷-LYV:DHHKD:AVS:EXGXR, GSAGPXX:TPT:KPLS-AA¹⁷-LYV:DHHKD:VVD:RXGXS, AAPASXX:VPA:KPLS-AA¹⁷-LYV:DHHKD:VVE:AXGXR, STPPTXX:VPT:KPLS-AA¹⁷-LYV:DHHKD:VVE:SXGXR, HVPKPXX:APT:KPLS-AA¹⁷-LYV:DHHKD:VVR:SXGXH, ASAAPXX:VPQ:KPLS-AA¹⁷-LYV:DHHKD:VRS:XKXS, ASASPXX:VSQ:KPLS-AA¹⁷-LYV:DHHKD:VKS:XKXS, ASASPXX:VPQ:KPLS-AA¹⁷-LYV:DHHKD:VKS:XKXS, NDEGLEX:VPT:KPLS-AA¹⁷-LYV:DHHKD:QHN:KXEXR, NDEGLEX:VPT:KPLS-AA¹⁷-LYV:DHHKD:EHS:QXEXR, SSVKXQP:SRV:KPLS-AA¹⁷-LYV:DHHKD:EEH:LEXAXA, RNVQXRP:TQV:KPLS-AA¹⁷-LYV:DHHKD:EDH:LAXKXE, KIPKAXX:VPQ:EPLP-AA¹⁷-VYY:EQLSN:VRS:GXGXR, GIPEPXX:VPQ:EPLP-AA¹⁷-VYY:EQLSN:VRS:SXAXR, SIPKAXX:VPQ:EPLP-AA¹⁷-VYY:EQLSN:VRS:GXGXR, HVTKPTX:VPQ:EPLP-AA¹⁷-VYY:EQLSN:VRS:SXGXH, YVPKPXX:VPQ:EPLP-AA¹⁷-VYY:EQLSN:VRS:SXGXH, TVPKPXX:VPQ:EPLP-AA¹⁷-VYY:EQLSN:VRS:AXGXH, AVPKAXX:VPQ:EPLP-AA¹⁷-VYY:EQLSN:VRS:AXGXH, KVGKAXX:VPQ:EPLP-AA¹⁷-VYY:EQLSN:VRS:XGXR, KASKAXX:VPQ:EPLP-AA¹⁷-VYY:EQLSN:VRS:EXGXR, GSAGPXX:VPQ:EPLP-AA¹⁷-VYY:EQLSN:VRS:RXGXS, AAPASXX:VPQ:EPLP-AA¹⁷-VYY:EQLSN:VRS:AXGXR, STPPTXX:VPQ:EPLP-AA¹⁷-VYY:EQLSN:VRS:SXGXR, HVPKPXX:VPQ:EPLP-AA¹⁷-VYY:EQLSN:VRS:SXGXH, RVPSTXX:VPQ:EPLP-AA¹⁷-VYY:EQLSN:VRS:XGXL, ASASPXX:VPQ:EPLP-AA¹⁷-VYY:EQLSN:VRS:XKXS, KIPKAXX:VPT:EPLP-AA¹⁷-VYY:EQLSN:VVE:GXGXR, GIPEPXX:VPE:EPLP-AA¹⁷-VYY:EQLSN:TVE:SXAXR, SIPKAXX:VPT:EPLP-AA¹⁷-VYY:EQLSN:VVE:GXGXR, HVTKPTX:APT:EPLP-AA¹⁷-VYY:EQLSN:VVR:SXGXH, YVPKPXX:APT:EPLP-AA¹⁷-VYY:EQLSN:VVR:SXGXH, TVPKPXX:APT:EPLP-AA¹⁷-VYY:EQLSN:VVR:AXGXH, AVPKAXX:APT:EPLP-AA¹⁷-VYY:EQLSN:VVK:AXGXH, KVGKAXX:VPT:EPLP-AA¹⁷-VYY:EQLSN:VAE:XGXR, KASKAXX:VPT:EPLP-AA¹⁷-VYY:EQLSN:AVS:EXGXR, GSAGPXX:TPT:EPLP-AA¹⁷-VYY:EQLSN:VVD:RXGXS, AAPASXX:VPA:EPLP-AA¹⁷-VYY:EQLSN:VVE:AXGXR, STPPTXX:VPT:EPLP-AA¹⁷-VYY:EQLSN:VVE:SXGXR, HVPKPXX:APT:EPLP-AA¹⁷-VYY:EQLSN:VVR:SXGXH, RVPSTXX:APV:EPLP-AA¹⁷-VYY:EQLSN:VEE:XGXL, ASASPXX:VSQ:EPLP-AA¹⁷-VYY:EQLSN:VKS:XKXS, ASASPXX:VPQ:EPLP-AA¹⁷-VYY:EQLSN:VKS:XKXS, NDEGLEX:VPT:EPLP-AA¹⁷-VYY:EQLSN:QHN:KXEXR, NDEGLEX:VPT:EPLP-AA¹⁷-VYY:EQLSN:EHS:QXEXR, SSVKXQP:SRV:EPLP-AA¹⁷-VYY:EQLSN:EEH:LEXAXA, RNVQXRP:TQV:EPLP-AA¹⁷-VYY:EQLSN:EDH:LAXKXE, KIPKAXX:VSQ:EPLT-AA¹⁷-LYY:EQLSN:VKS:GXGXR, GIPEPXX:VSQ:EPLT-AA¹⁷-LYY:EQLSN:VKS:SXAXR, SIPKAXX:VSQ:EPLT-AA¹⁷-LYY:EQLSN:VKS:GXGXR, HVTKPTX:VSQ:EPLT-AA¹⁷-LYY:EQLSN:VKS:SXGXH, YVPKPXX:VSQ:EPLT-AA¹⁷-LYY:EQLSN:VKS:SXGXH, TVPKPXX:VSQ:EPLT-AA¹⁷-LYY:EQLSN:VKS:AXGXH, AVPKAXX:VSQ:EPLT-AA¹⁷-LYY:EQLSN:VKS:AXGXH, KVGKAXX:VSQ:EPLT-AA¹⁷-LYY:EQLSN:VKS:XGXR, KASKAXX:VSQ:EPLT-AA¹⁷-LYY:EQLSN:VKS:EXGXR, GSAGPXX:VSQ:EPLT-AA¹⁷-LYY:EQLSN:VKS:RXGXS, AAPASXX:VSQ:EPLT-AA¹⁷-LYY:EQLSN:VKS:AXGXR, STPPTXX:VSQ:EPLT-AA¹⁷-LYY:EQLSN:VKS:SXGXR, HVPKPXX:VSQ:EPLT-AA¹⁷-LYY:EQLSN:VKS:SXGXH, RVPSTXX:VSQ:EPLT-AA¹⁷-LYY:EQLSN:VKS:XGXL, ASAAPXX:VSQ:EPLT-AA¹⁷-LYY:EQLSN:VKS:XKXS, ASASPXX:VSQ:EPLT-AA¹⁷-LYY:EQLSN:VKS:XKXS, KIPKAXX:VPT:EPLT-AA¹⁷-LYY:EQLSN:VVE:GXGXR, GIPEPXX:VPE:EPLT-AA¹⁷-LYY:EQLSN:TVE:SXAXR, SIPKAXX:VPT:EPLT-AA¹⁷-LYY:EQLSN:VVE:GXGXR, HVTKPTX:APT:EPLT-AA¹⁷-LYY:EQLSN:VVR:SXGXH, YVPKPXX:APT:EPLT-AA¹⁷-LYY:EQLSN:VVR:SXGXH, TVPKPXX:APT:EPLT-AA¹⁷-LYY:EQLSN:VVR:AXGXH, AVPKAXX:APT:EPLT-AA¹⁷-LYY:EQLSN:VVK:AXGXH, KVGKAXX:VPT:EPLT-AA¹⁷-LYY:EQLSN:VAE:XGXR, KASKAXX:VPT:EPLT-AA¹⁷-LYY:EQLSN:AVS:EXGXR, GSAGPXX:TPT:EPLT-AA¹⁷-LYY:EQLSN:VVD:RXGXS, AAPASXX:VPA:EPLT-AA¹⁷-LYY:EQLSN:VVE:AXGXR, STPPTXX:VPT:EPLT-AA¹⁷-LYY:EQLSN:VVE:SXGXR, HVPKPXX:APT:EPLT-AA¹⁷-LYY:EQLSN:VVR:SXGXH, RVPSTXX:APV:EPLT-AA¹⁷-LYY:EQLSN:VEE:XGXL, ASAAPXX:VPQ:EPLT-AA¹⁷-LYY:EQLSN:VRS:XKXS, NDEGLEX:VPT:EPLT-AA¹⁷-LYY:EQLSN:QHN:KXEXR, NDEGLEX:VPT:EPLT-AA¹⁷-LYY:EQLSN:EHS:QXEXR, SSVKXQP:SRV:EPLT-AA¹⁷-LYY:EQLSN:EEH:LEXAXA, RNVQXRP:TQV:EPLT-AA¹⁷-LYY:EQLSN:EDH:LAXKXE, KIPKAXX:VPQ:EPLT-AA¹⁷-LYY:EQLSN:VKS:GXGXR, GIPEPXX:VPQ:EPLT-AA¹⁷-LYY:EQLSN:VKS:SXAXR, SIPKAXX:VPQ:EPLT-AA¹⁷-LYY:EQLSN:VKS:GXGXR, HVTKPTX:VPQ:EPLT-AA¹⁷-LYY:EQLSN:VKS:SXGXH, YVPKPXX:VPQ:EPLT-AA¹⁷-LYY:EQLSN:VKS:SXGXH, TVPKPXX:VPQ:EPLT-AA¹⁷-LYY:EQLSN:VKS:AXGXH, AVPKAXX:VPQ:EPLT-AA¹⁷-LYY:EQLSN:VKS:AXGXH, KVGKAXX:VPQ:EPLT-AA¹⁷-LYY:EQLSN:VKS:XGXR, KASKAXX:VPQ:EPLT-AA¹⁷-LYY:EQLSN:VKS:EXGXR, GSAGPXX:VPQ:EPLT-AA¹⁷-LYY:EQLSN:VKS:RXGXS, AAPASXX:VPQ:EPLT-AA¹⁷-LYY:EQLSN:VKS:AXGXR, STPPTXX:VPQ:EPLT-AA¹⁷-LYY:EQLSN:VKS:SXGXR, HVPKPXX:VPQ:EPLT-AA¹⁷-LYY:EQLSN:VKS:SXGXH, RVPSTXX:VPQ:EPLT-AA¹⁷-LYY:EQLSN:VKS:XGXL, ASAAPXX:VPQ:EPLT-AA¹⁷-LYY:EQLSN:VKS:XKXS, ASASPXX:VPQ:EPLT-AA¹⁷-LYY:EQLSN:VKS:XKXS, NDEGLEX:VPT:SNIT-AA¹⁷-QIM:IGEMS:QHN:QXEXR, KIPKAXX:VPT:SNIT-AA¹⁷-QIM:IGEMS:VVE:GXGXR, GIPEPXX:VPE:SNIT-AA¹⁷-QIM:IGEMS:TVE:SXAXR, SIPKAXX:VPT:SNIT-AA¹⁷-QIM:IGEMS:VVE:GXGXR, HVTKPTX:APT:SNIT-AA¹⁷-QIM:IGEMS:VVR:SXGXH, YVPKPXX:APT:SNIT-AA¹⁷-QIM:IGEMS:VVR:SXGXH, TVPKPXX:APT:SNIT-AA¹⁷-QIM:IGEMS:VVR:AXGXH, AVPKAXX:APT:SNIT-AA¹⁷-QIM:IGEMS:VVK:AXGXH, KVGKAXX:VPT:SNIT-AA¹⁷-QIM:IGEMS:VAE:XGXR, KASKAXX:VPT:SNIT-AA¹⁷-QIM:IGEMS:AVS:EXGXR, GSAGPXX:TPT:SNIT-AA¹⁷-QIM:IGEMS:VVD:RXGXS, AAPASXX:VPA:SNIT-AA¹⁷-QIM:IGEMS:VVE:AXGXR, STPPTXX:VPT:SNIT-AA¹⁷-QIM:IGEMS:VVE:SXGXR, HVPKPXX:APT:SNIT-AA¹⁷-QIM:IGEMS:VVR:SXGXH, RVPSTXX:APV:SNIT-AA¹⁷-QIM:IGEMS:VEE:XGXL, ASAAPXX:VPQ:SNIT-AA¹⁷-QIM:IGEMS:VRS:XKXS, ASASPXX:VSQ:SNIT-AA¹⁷-QIM:IGEMS:VKS:XKXS, ASASPXX:VPQ:SNIT-AA¹⁷-QIM:IGEMS:VKS:XKXS, NDEGLEX:VPT:SNIT-AA¹⁷-QIM:IGEMS:EHS:QXEXR, SSVKXQP:SRV:SNIT-AA¹⁷-QIM:IGEMS:EEH:LEXAXA, RNVQXRP:TQV:SNIT-AA¹⁷-QIM:IGEMS:EDH:LAXKXE, NDEGLEX:VPT:SNIT-AA¹⁷-QIM:LGEMS:EHS:KXEXR, KIPKAXX:VPT:SNIT-AA¹⁷-QIM:LGEMS:VVE:GXGXR, GIPEPXX:VPE:SNIT-AA¹⁷-QIM:LGEMS:TVE:SXAXR, SIPKAXX:VPT:SNIT-AA¹⁷-QIM:LGEMS:VVE:GXGXR, HVTKPTX:APT:SNIT-AA¹⁷-QIM:LGEMS:VVR:SXGXH, YVPKPXX:APT:SNIT-AA¹⁷-QIM:LGEMS:VVR:SXGXH, TVPKPXX:APT:SNIT-AA¹⁷-QIM:LGEMS:VVR:AXGXH, AVPKAXX:APT:SNIT-AA¹⁷-QIM:LGEMS:VVK:AXGXH, KVGKAXX:VPT:SNIT-AA¹⁷-QIM:LGEMS:VAE:XGXR, KASKAXX:VPT:SNIT-AA¹⁷-QIM:LGEMS:AVS:EXGXR, GSAGPXX:TPT:SNIT-AA¹⁷-QIM:LGEMS:VVD:RXGXS, AAPASXX:VPA:SNIT-AA¹⁷-QIM:LGEMS:VVE:AXGXR, STPPTXX:VPT:SNIT-AA¹⁷-QIM:LGEMS:VVE:SXGXR, HVPKPXX:APT:SNIT-AA¹⁷-QIM:LGEMS:VVR:SXGXH, RVPSTXX:APV:SNIT-AA¹⁷-QIM:LGEMS:VEE:XGXL, ASAAPXX:VPQ:SNIT-AA¹⁷-QIM:LGEMS:VRS:XKXS, ASASPXX:VSQ:SNIT-AA¹⁷-QIM:LGEMS:VKS:XKXS, ASASPXX:VPQ:SNIT-AA¹⁷-QIM:LGEMS:VKS:XKXS, NDEGLEX:VPT:SNIT-AA¹⁷-QIM:LGEMS:QHN:KXEXR, SSVKXQP:SRV:SNIT-AA¹⁷-QIM:LGEMS:EEH:LEXAXA, RNVQXRP:TQV:SNIT-AA¹⁷-QIM:LGEMS:EDH:LAXKXE, RNVQXRP:SRV:RSVK-AA¹⁷-AKV:KEVQV:EEH:LAXKXE, KIPKAXX:VPT:RSVK-AA¹⁷-AKV:KEVQV:VVE:GXGXR, GIPEPXX:VPE:RSVK-AA¹⁷-AKV:KEVQV:TVE:SXAXR, SIPKAXX:VPT:RSVK-AA¹⁷-AKV:KEVQV:VVE:GXGXR, HVTKPTX:APT:RSVK-AA¹⁷-AKV:KEVQV:VVR:SXGXH, YVPKPXX:APT:RSVK-AA¹⁷-AKV:KEVQV:VVR:SXGXH, TVPKPXX:APT:RSVK-AA¹⁷-AKV:KEVQV:VVR:AXGXH, AVPKAXX:APT:RSVK-AA¹⁷-AKV:KEVQV:VVK:AXGXH, KVGKAXX:VPT:RSVK-AA¹⁷-AKV:KEVQV:VAE:XGXR, KASKAXX:VPT:RSVK-AA¹⁷-AKV:KEVQV:AVS:EXGXR, GSAGPXX:TPT:RSVK-AA¹⁷-AKV:KEVQV:VVD:RXGXS, AAPASXX:VPA:RSVK-AA¹⁷-AKV:KEVQV:VVE:AXGXR, STPPTXX:VPT:RSVK-AA¹⁷-AKV:KEVQV:VVE:SXGXR, HVPKPXX:APT:RSVK-AA¹⁷-AKV:KEVQV:VVR:SXGXH, RVPSTXX:APV:RSVK-AA¹⁷-AKV:KEVQV:VEE:XGXL, ASAAPXX:VPQ:RSVK-AA¹⁷-AKV:KEVQV:VRS:XKXS, ASASPXX:VSQ:RSVK-AA¹⁷-AKV:KEVQV:VKS:XKXS, ASASPXX:VPQ:RSVK-AA¹⁷-AKV:KEVQV:VKS:XKXS, NDEGLEX:VPT:RSVK-AA¹⁷-AKV:KEVQV:QHN:KXEXR, NDEGLEX:VPT:RSVK-AA¹⁷-AKV:KEVQV:EHS:QXEXR, RNVQXRP:TQV:RSVK-AA¹⁷-AKV:KEVQV:EDH:LAXKXE, SSVKXQP:TQV:RPVQ-AA¹⁷-RKI:KKATV:EDH:LEXAXA, KIPKAXX:VPT:RPVQ-AA¹⁷-RKI:KKATV:VVE:GXGXR, GIPEPXX:VPE:RPVQ-AA¹⁷-RKI:KKATV:TVE:SXAXR, SIPKAXX:VPT:RPVQ-AA¹⁷-RKI:KKATV:VVE:GXGXR, HVTKPTX:APT:RPVQ-AA¹⁷-RKI:KKATV:VVR:SXGXH, YVPKPXX:APT:RPVQ-AA¹⁷-RKI:KKATV:VVR:SXGXH, TVPKPXX:APT:RPVQ-AA¹⁷-RKI:KKATV:VVR:AXGXH, AVPKAXX:APT:RPVQ-AA¹⁷-RKI:KKATV:VVK:AXGXH, KVGKAXX:VPT:RPVQ-AA¹⁷-RKI:KKATV:VAE:XGXR, KASKAXX:VPT:RPVQ-AA¹⁷-RKI:KKATV:AVS:EXGXR, GSAGPXX:TPT:RPVQ-AA¹⁷-RKI:KKATV:VVD:RXGXS, AAPASXX:VPA:RPVQ-AA¹⁷-RKI:KKATV:VVE:AXGXR, STPPTXX:VPT:RPVQ-AA¹⁷-RKI:KKATV:VVE:SXGXR, HVPKPXX:APT:RPVQ-AA¹⁷-RKI:KKATV:VVR:SXGXH, RVPSTXX:APV:RPVQ-AA¹⁷-RKI:KKATV:VEE:XGXL, ASAAPXX:VPQ:RPVQ-AA¹⁷-RKI:KKATV:VRS:XKXS, ASASPXX:VSQ:RPVQ-AA¹⁷-RKI:KKATV:VKS:XKXS, ASASPXX:VPQ:RPVQ-AA¹⁷-RKI:KKATV:VKS:XKXS, NDEGLEX:VPT:RPVQ-AA¹⁷-RKI:KKATV:QHN:KXEXR, NDEGLEX:VPT:RPVQ-AA¹⁷-RKI:KKATV:EHS:QXEXR and SSVKXQP:SRV:RPVQ-AA¹⁷-RKI:KKATV:EEH:LEXAXA; and wherein AA¹⁷ is selected from the group consisting of G, A, V, L, I, P, F, M, W, T and S (in particular is selected from the group consisting of M, I, L, V and T).

[0369] In particular, in certain embodiments, the hexaplet PEP7:PEP5:PEP1:PEP2:PEP6:PEP8 is selected from the group consisting of GIPEPXX:VPTKM:SAIS:LKNYQ:NMVVE:SXAXR, SIPKAXX:VPTEL:SAIS:LKNYQ:EMVVE:GXGXR, HVTKPTX:VPTKL:SAIS:LKNYQ:NMVVE:SXGXH, YVPKPXX:VPTKL:SAIS:LKNYQ:NMVVE:SXGXH, TVPKPXX:VPTQL:SAIS:LKNYQ:NMVVE:AXGXH, AVPKAXX:VPTKL:SAIS:LKNYQ:NMVVE:AXGXH, KVGKAXX:VPTKL:SAIS:LKNYQ:EGMSVVE:XGXR, KASKAXX:VPTKL:SAIS:LKNYQ:GMVVE:EXGXR, GSAGPXX:VPTKM:SAIS:LKNYQ:GMVVE:RXGXS, AAPASXX:VPTRL:SAIS:LKNYQ:DMVVE:AXGXR, STPPTXX:VPTRL:SAIS:LKNYQ:DMVVE:SXGXR, HVPKPXX:VPTKL:SAIS:LKNYQ:NMVVE:SXGXH, RVPSTXX:VPTKT:SAIS:LKNYQ:MIVVE:XGXL, ASAAPXX:VPTAL:SAIS:LKNYQ:MIVVE:XKXS, ASASPXX:VPTDL:SAIS:LKNYQ:MIVVE:XKXS, ASASPXX:VPTDL:SAIS:LKNYQ:MVVVE:XKXS, NDEGLEX:VPTEE:SAIS:LKNYQ:FLVVE:KXEXR, NDEGLEX:VPTGQ:SAIS:LKNYQ:LEVVE:QXEXR, SSVKXQP:VPTHH:SAIS:LKNYQ:RLVVE:LEXAXA, RNVQXRP:VPTQL:SAIS:LKNYQ:TLVVE:LAXKXE, GIPEPXX:VPEKM:SAIS:LKNYQ:NMTVE:SXAXR, HVTKPTX:APTKL:SAIS:LKNYQ:NMVVR:SXGXH, YVPKPXX:APTKL:SAIS:LKNYQ:NMVVR:SXGXH, TVPKPXX:APTQL:SAIS:LKNYQ:NMVVR:AXGXH, AVPKAXX:APTKL:SAIS:LKNYQ:NMVVK:AXGXH, KVGKAXX:VPTKL:SAIS:LKNYQ:EGMSVAE:XGXR, KASKAXX:VPTKL:SAIS:LKNYQ:GMAVS:EXGXR, GSAGPXX:TPTKM:SAIS:LKNYQ:GMVVD:RXGXS, AAPASXX:VPARL:SAIS:LKNYQ:DMVVE:AXGXR, HVPKPXX:APTKL:SAIS:LKNYQ:NMVVR:SXGXH, RVPSTXX:APVKT:SAIS:LKNYQ:MIVEE:XGXL, ASAAPXX:VPQAL:SAIS:LKNYQ:MIVRS:XKXS, ASASPXX:VSQDL:SAIS:LKNYQ:MIVKS:XKXS, ASASPXX:VPQDL:SAIS:LKNYQ:MVVKS:XKXS, NDEGLEX:VPTEE:SAIS:LKNYQ:FLQHN:KXEXR, NDEGLEX:VPTGQ:SAIS:LKNYQ:LEEHS:QXEXR, SSVKXQP:SRVHH:SAIS:LKNYQ:RLEEH:LEXAXA, RNVQXRP:TQVQL:SAIS:LKNYQ:TLEDH:LAXKXE, KIPKAXX:VPEEL:SSLS:LKVYP:DMTVE:GXGXR, SIPKAXX:VPEEL:SSLS:LKVYP:EMTVE:GXGXR, HVTKPTX:VPEKL:SSLS:LKVYP:NMTVE:SXGXH, YVPKPXX:VPEKL:SSLS:LKVYP:NMTVE:SXGXH, TVPKPXX:VPEQL:SSLS:LKVYP:NMTVE:AXGXH, AVPKAXX:VPEKL:SSLS:LKVYP:NMTVE:AXGXH, KVGKAXX:VPEKL:SSLS:LKVYP:EGMSTVE:XGXR, KASKAXX:VPEKL:SSLS:LKVYP:GMTVE:EXGXR, GSAGPXX:VPEKM:SSLS:LKVYP:GMTVE:RXGXS, AAPASXX:VPERL:SSLS:LKVYP:DMTVE:AXGXR, STPPTXX:VPERL:SSLS:LKVYP:DMTVE:SXGXR, HVPKPXX:VPEKL:SSLS:LKVYP:NMTVE:SXGXH, RVPSTXX:VPEKT:SSLS:LKVYP:MITVE:XGXL, ASAAPXX:VPEAL:SSLS:LKVYP:MITVE:XKXS, ASASPXX:VPEDL:SSLS:LKVYP:MITVE:XKXS, ASASPXX:VPEDL:SSLS:LKVYP:MVTVE:XKXS, NDEGLEX:VPEEE:SSLS:LKVYP:FLTVE:KXEXR, NDEGLEX:VPEGQ:SSLS:LKVYP:LETVE:QXEXR, SSVKXQP:VPEHH:SSLS:LKVYP:RLTVE:LEXAXA, RNVQXRP:VPEQL:SSLS:LKVYP:TLTVE:LAXKXE, KIPKAXX:VPTEL:SSLS:LKVYP:DMVVE:GXGXR, SIPKAXX:VPTEL:SSLS:LKVYP:EMVVE:GXGXR, HVTKPTX:APTKL:SSLS:LKVYP:NMVVR:SXGXH, YVPKPXX:APTKL:SSLS:LKVYP:NMVVR:SXGXH, TVPKPXX:APTQL:SSLS:LKVYP:NMVVR:AXGXH, AVPKAXX:APTKL:SSLS:LKVYP:NMVVK:AXGXH, KVGKAXX:VPTKL:SSLS:LKVYP:EGMSVAE:XGXR, KASKAXX:VPTKL:SSLS:LKVYP:GMAVS:EXGXR, GSAGPXX:TPTKM:SSLS:LKVYP:GMVVD:RXGXS, AAPASXX:VPARL:SSLS:LKVYP:DMVVE:AXGXR, STPPTXX:VPTRL:SSLS:LKVYP:DMVVE:SXGXR, HVPKPXX:APTKL:SSLS:LKVYP:NMVVR:SXGXH, RVPSTXX:APVKT:SSLS:LKVYP:MIVEE:XGXL, ASAAPXX:VPQAL:SSLS:LKVYP:MIVRS:XKXS, ASASPXX:VSQDL:SSLS:LKVYP:MIVKS:XKXS, ASASPXX:VPQDL:SSLS:LKVYP:MVVKS:XKXS, NDEGLEX:VPTEE:SSLS:LKVYP:FLQHN:KXEXR, NDEGLEX:VPTGQ:SSLS:LKVYP:LEEHS:QXEXR, SSVKXQP:SRVHH:SSLS:LKVYP:RLEEH:LEXAXA, RNVQXRP:TQVQL:SSLS:LKVYP:TLEDH:LAXKXE, KIPKAXX:VPTEL:SAIS:LKNYQ:DMVVE:GXGXR, KIPKAXX:APTEL:NAIS:LKKYR:DMVVR:GXGXR, GIPEPXX:APTKM:NAIS:LKKYR:NMVVR:SXAXR, SIPKAXX:APTEL:NAIS:LKKYR:EMVVR:GXGXR, YVPKPXX:APTKL:NAIS:LKKYR:NMVVR:SXGXH, TVPKPXX:APTQL:NAIS:LKKYR:NMVVR:AXGXH, AVPKAXX:APTKL:NAIS:LKKYR:NMVVR:AXGXH, KVGKAXX:APTKL:NAIS:LKKYR:EGMSVVR:XGXR, KASKAXX:APTKL:NAIS:LKKYR:GMVVR:EXGXR, GSAGPXX:APTKM:NAIS:LKKYR:GMVVR:RXGXS, AAPASXX:APTRL:NAIS:LKKYR:DMVVR:AXGXR, STPPTXX:APTRL:NAIS:LKKYR:DMVVR:SXGXR, HVPKPXX:APTKL:NAIS:LKKYR:NMVVR:SXGXH, RVPSTXX:APTKT:NAIS:LKKYR:MIVVR:XGXL, ASAAPXX:APTAL:NAIS:LKKYR:MIVVR:XKXS, ASASPXX:APTDL:NAIS:LKKYR:MIVVR:XKXS, ASASPXX:APTDL:NAIS:LKKYR:MVVVR:XKXS, NDEGLEX:APTEE:NAIS:LKKYR:FLVVR:KXEXR, NDEGLEX:APTGQ:NAIS:LKKYR:LEVVR:QXEXR, SSVKXQP:APTHH:NAIS:LKKYR:RLVVR:LEXAXA, RNVQXRP:APTQL:NAIS:LKKYR:TLVVR:LAXKXE, KIPKAXX:VPTEL:NAIS:LKKYR:DMVVE:GXGXR, GIPEPXX:VPEKM:NAIS:LKKYR:NMTVE:SXAXR, SIPKAXX:VPTEL:NAIS:LKKYR:EMVVE:GXGXR, AVPKAXX:APTKL:NAIS:LKKYR:NMVVK:AXGXH, KVGKAXX:VPTKL:NAIS:LKKYR:EGMSVAE:XGXR, KASKAXX:VPTKL:NAIS:LKKYR:GMAVS:EXGXR, GSAGPXX:TPTKM:NAIS:LKKYR:GMVVD:RXGXS, AAPASXX:VPARL:NAIS:LKKYR:DMVVE:AXGXR, STPPTXX:VPTRL:NAIS:LKKYR:DMVVE:SXGXR, RVPSTXX:APVKT:NAIS:LKKYR:MIVEE:XGXL, ASAAPXX:VPQAL:NAIS:LKKYR:MIVRS:XKXS, ASASPXX:VSQDL:NAIS:LKKYR:MIVKS:XKXS, ASASPXX:VPQDL:NAIS:LKKYR:MVVKS:XKXS, NDEGLEX:VPTEE:NAIS:LKKYR:FLQHN:KXEXR, NDEGLEX:VPTGQ:NAIS:LKKYR:LEEHS:QXEXR, SSVKXQP:SRVHH:NAIS:LKKYR:RLEEH:LEXAXA, RNVQXRP:TQVQL:NAIS:LKKYR:TLEDH:LAXKXE, HVTKPTX:APTKL:NAIS:LKKYR:NMVVR:SXGXH, KIPKAXX:APTEL:SATS:LRKHR:DMVVK:GXGXR, GIPEPXX:APTKM:SATS:LRKHR:NMVVK:SXAXR, SIPKAXX:APTEL:SATS:LRKHR:EMVVK:GXGXR, HVTKPTX:APTKL:SATS:LRKHR:NMVVK:SXGXH, YVPKPXX:APTKL:SATS:LRKHR:NMVVK:SXGXH, TVPKPXX:APTQL:SATS:LRKHR:NMVVK:AXGXH, KVGKAXX:APTKL:SATS:LRKHR:EGMSVVK:XGXR, KASKAXX:APTKL:SATS:LRKHR:GMVVK:EXGXR, GSAGPXX:APTKM:SATS:LRKHR:GMVVK:RXGXS, AAPASXX:APTRL:SATS:LRKHR:DMVVK:AXGXR, STPPTXX:APTRL:SATS:LRKHR:DMVVK:SXGXR, HVPKPXX:APTKL:SATS:LRKHR:NMVVK:SXGXH, RVPSTXX:APTKT:SATS:LRKHR:MIVVK:XGXL, ASAAPXX:APTAL:SATS:LRKHR:MIVVK:XKXS, ASASPXX:APTDL:SATS:LRKHR:MIVVK:XKXS, ASASPXX:APTDL:SATS:LRKHR:MVVVK:XKXS, NDEGLEX:APTEE:SATS:LRKHR:FLVVK:KXEXR, NDEGLEX:APTGQ:SATS:LRKHR:LEVVK:QXEXR, SSVKXQP:APTHH:SATS:LRKHR:RLVVK:LEXAXA, RNVQXRP:APTQL:SATS:LRKHR:TLVVK:LAXKXE, KIPKAXX:VPTEL:SATS:LRKHR:DMVVE:GXGXR, GIPEPXX:VPEKM:SATS:LRKHR:NMTVE:SXAXR, SIPKAXX:VPTEL:SATS:LRKHR:EMVVE:GXGXR, HVTKPTX:APTKL:SATS:LRKHR:NMVVR:SXGXH, YVPKPXX:APTKL:SATS:LRKHR:NMVVR:SXGXH, TVPKPXX:APTQL:SATS:LRKHR:NMVVR:AXGXH, KVGKAXX:VPTKL:SATS:LRKHR:EGMSVAE:XGXR, KASKAXX:VPTKL:SATS:LRKHR:GMAVS:EXGXR, GSAGPXX:TPTKM:SATS:LRKHR:GMVVD:RXGXS, AAPASXX:VPARL:SATS:LRKHR:DMVVE:AXGXR, STPPTXX:VPTRL:SATS:LRKHR:DMVVE:SXGXR, HVPKPXX:APTKL:SATS:LRKHR:NMVVR:SXGXH, RVPSTXX:APVKT:SATS:LRKHR:MIVEE:XGXL, ASAAPXX:VPQAL:SATS:LRKHR:MIVRS:XKXS, ASASPXX:VSQDL:SATS:LRKHR:MIVKS:XKXS, ASASPXX:VPQDL:SATS:LRKHR:MVVKS:XKXS, NDEGLEX:VPTEE:SATS:LRKHR:FLQHN:KXEXR, NDEGLEX:VPTGQ:SATS:LRKHR:LEEHS:QXEXR, SSVKXQP:SRVHH:SATS:LRKHR:RLEEH:LEXAXA, RNVQXRP:TQVQL:SATS:LRKHR:TLEDH:LAXKXE, KIPKAXX:VPTEL:SPIS:LKYHY:DMVAE:GXGXR, GIPEPXX:VPTKM:SPIS:LKYHY:NMVAE:SXAXR, SIPKAXX:VPTEL:SPIS:LKYHY:EMVAE:GXGXR, HVTKPTX:VPTKL:SPIS:LKYHY:NMVAE:SXGXH, YVPKPXX:VPTKL:SPIS:LKYHY:NMVAE:SXGXH, TVPKPXX:VPTQL:SPIS:LKYHY:NMVAE:AXGXH, AVPKAXX:VPTKL:SPIS:LKYHY:NMVAE:AXGXH, KASKAXX:VPTKL:SPIS:LKYHY:GMVAE:EXGXR, GSAGPXX:VPTKM:SPIS:LKYHY:GMVAE:RXGXS, AAPASXX:VPTRL:SPIS:LKYHY:DMVAE:AXGXR, STPPTXX:VPTRL:SPIS:LKYHY:DMVAE:SXGXR, HVPKPXX:VPTKL:SPIS:LKYHY:NMVAE:SXGXH, RVPSTXX:VPTKT:SPIS:LKYHY:MIVAE:XGXL, ASAAPXX:VPTAL:SPIS:LKYHY:MIVAE:XKXS, ASASPXX:VPTDL:SPIS:LKYHY:MIVAE:XKXS, ASASPXX:VPTDL:SPIS:LKYHY:MVVAE:XKXS, NDEGLEX:VPTEE:SPIS:LKYHY:FLVAE:KXEXR, NDEGLEX:VPTGQ:SPIS:LKYHY:LEVAE:QXEXR, SSVKXQP:VPTHH:SPIS:LKYHY:RLVAE:LEXAXA, RNVQXRP:VPTQL:SPIS:LKYHY:TLVAE:LAXKXE, KIPKAXX:VPTEL:SPIS:LKYHY:DMVVE:GXGXR, GIPEPXX:VPEKM:SPIS:LKYHY:NMTVE:SXAXR, SIPKAXX:VPTEL:SPIS:LKYHY:EMVVE:GXGXR, HVTKPTX:APTKL:SPIS:LKYHY:NMVVR:SXGXH, YVPKPXX:APTKL:SPIS:LKYHY:NMVVR:SXGXH, TVPKPXX:APTQL:SPIS:LKYHY:NMVVR:AXGXH, AVPKAXX:APTKL:SPIS:LKYHY:NMVVK:AXGXH, KASKAXX:VPTKL:SPIS:LKYHY:GMAVS:EXGXR, GSAGPXX:TPTKM:SPIS:LKYHY:GMVVD:RXGXS, AAPASXX:VPARL:SPIS:LKYHY:DMVVE:AXGXR, STPPTXX:VPTRL:SPIS:LKYHY:DMVVE:SXGXR, HVPKPXX:APTKL:SPIS:LKYHY:NMVVR:SXGXH, RVPSTXX:APVKT:SPIS:LKYHY:MIVEE:XGXL, ASAAPXX:VPQAL:SPIS:LKYHY:MIVRS:XKXS, ASASPXX:VSQDL:SPIS:LKYHY:MIVKS:XKXS, ASASPXX:VPQDL:SPIS:LKYHY:MVVKS:XKXS, NDEGLEX:VPTEE:SPIS:LKYHY:FLQHN:KXEXR, NDEGLEX:VPTGQ:SPIS:LKYHY:LEEHS:QXEXR, SSVKXQP:SRVHH:SPIS:LKYHY:RLEEH:LEXAXA, RNVQXRP:TQVQL:SPIS:LKYHY:TLEDH:LAXKXE, KIPKAXX:VPTEL:EPIS:KFKYE:DMAVS:GXGXR, GIPEPXX:VPTKM:EPIS:KFKYE:NMAVS:SXAXR, SIPKAXX:VPTEL:EPIS:KFKYE:EMAVS:GXGXR, HVTKPTX:VPTKL:EPIS:KFKYE:NMAVS:SXGXH, YVPKPXX:VPTKL:EPIS:KFKYE:NMAVS:SXGXH, TVPKPXX:VPTQL:EPIS:KFKYE:NMAVS:AXGXH, AVPKAXX:VPTKL:EPIS:KFKYE:NMAVS:AXGXH, KVGKAXX:VPTKL:EPIS:KFKYE:EGMSAVS:XGXR, GSAGPXX:VPTKM:EPIS:KFKYE:GMAVS:RXGXS, AAPASXX:VPTRL:EPIS:KFKYE:DMAVS:AXGXR, STPPTXX:VPTRL:EPIS:KFKYE:DMAVS:SXGXR, HVPKPXX:VPTKL:EPIS:KFKYE:NMAVS:SXGXH, RVPSTXX:VPTKT:EPIS:KFKYE:MIAVS:XGXL, ASAAPXX:VPTAL:EPIS:KFKYE:MIAVS:XKXS, ASASPXX:VPTDL:EPIS:KFKYE:MIAVS:XKXS, ASASPXX:VPTDL:EPIS:KFKYE:MVAVS:XKXS, NDEGLEX:VPTEE:EPIS:KFKYE:FLAVS:KXEXR, NDEGLEX:VPTGQ:EPIS:KFKYE:LEAVS:QXEXR, SSVKXQP:VPTHH:EPIS:KFKYE:RLAVS:LEXAXA, RNVQXRP:VPTQL:EPIS:KFKYE:TLAVS:LAXKXE, KIPKAXX:VPTEL:EPIS:KFKYE:DMVVE:GXGXR, GIPEPXX:VPEKM:EPIS:KFKYE:NMTVE:SXAXR, SIPKAXX:VPTEL:EPIS:KFKYE:EMVVE:GXGXR, HVTKPTX:APTKL:EPIS:KFKYE:NMVVR:SXGXH, YVPKPXX:APTKL:EPIS:KFKYE:NMVVR:SXGXH, TVPKPXX:APTQL:EPIS:KFKYE:NMVVR:AXGXH, AVPKAXX:APTKL:EPIS:KFKYE:NMVVK:AXGXH, KVGKAXX:VPTKL:EPIS:KFKYE:EGMSVAE:XGXR, GSAGPXX:TPTKM:EPIS:KFKYE:GMVVD:RXGXS, AAPASXX:VPARL:EPIS:KFKYE:DMVVE:AXGXR, STPPTXX:VPTRL:EPIS:KFKYE:DMVVE:SXGXR, HVPKPXX:APTKL:EPIS:KFKYE:NMVVR:SXGXH, RVPSTXX:APVKT:EPIS:KFKYE:MIVEE:XGXL, ASAAPXX:VPQAL:EPIS:KFKYE:MIVRS:XKXS, ASASPXX:VSQDL:EPIS:KFKYE:MIVKS:XKXS, ASASPXX:VPQDL:EPIS:KFKYE:MVVKS:XKXS, NDEGLEX:VPTEE:EPIS:KFKYE:FLQHN:KXEXR, NDEGLEX:VPTGQ:EPIS:KFKYE:LEEHS:QXEXR, SSVKXQP:SRVHH:EPIS:KFKYE:RLEEH:LEXAXA, RNVQXRP:TQVQL:EPIS:KFKYE:TLEDH:LAXKXE, KIPKAXX:TPTEL:SPIN:YGKIP:DMVVD:GXGXR, GIPEPXX:TPTKM:SPIN:YGKIP:NMVVD:SXAXR, SIPKAXX:TPTEL:SPIN:YGKIP:EMVVD:GXGXR, HVTKPTX:TPTKL:SPIN:YGKIP:NMVVD:SXGXH, YVPKPXX:TPTKL:SPIN:YGKIP:NMVVD:SXGXH, TVPKPXX:TPTQL:SPIN:YGKIP:NMVVD:AXGXH, AVPKAXX:TPTKL:SPIN:YGKIP:NMVVD:AXGXH, KVGKAXX:TPTKL:SPIN:YGKIP:EGMSVVD:XGXR, KASKAXX:TPTKL:SPIN:YGKIP:GMVVD:EXGXR, AAPASXX:TPTRL:SPIN:YGKIP:DMVVD:AXGXR, STPPTXX:TPTRL:SPIN:YGKIP:DMVVD:SXGXR, HVPKPXX:TPTKL:SPIN:YGKIP:NMVVD:SXGXH, RVPSTXX:TPTKT:SPIN:YGKIP:MIVVD:XGXL, ASAAPXX:TPTAL:SPIN:YGKIP:MIVVD:XKXS, ASASPXX:TPTDL:SPIN:YGKIP:MIVVD:XKXS, ASASPXX:TPTDL:SPIN:YGKIP:MVVVD:XKXS, NDEGLEX:TPTEE:SPIN:YGKIP:FLVVD:KXEXR, NDEGLEX:TPTGQ:SPIN:YGKIP:LEVVD:QXEXR, SSVKXQP:TPTHH:SPIN:YGKIP:RLVVD:LEXAXA, RNVQXRP:TPTQL:SPIN:YGKIP:TLVVD:LAXKXE, KIPKAXX:VPTEL:SPIN:YGKIP:DMVVE:GXGXR, GIPEPXX:VPEKM:SPIN:YGKIP:NMTVE:SXAXR, SIPKAXX:VPTEL:SPIN:YGKIP:EMVVE:GXGXR, HVTKPTX:APTKL:SPIN:YGKIP:NMVVR:SXGXH, YVPKPXX:APTKL:SPIN:YGKIP:NMVVR:SXGXH, TVPKPXX:APTQL:SPIN:YGKIP:NMVVR:AXGXH, AVPKAXX:APTKL:SPIN:YGKIP:NMVVK:AXGXH, KVGKAXX:VPTKL:SPIN:YGKIP:EGMSVAE:XGXR, KASKAXX:VPTKL:SPIN:YGKIP:GMAVS:EXGXR, AAPASXX:VPARL:SPIN:YGKIP:DMVVE:AXGXR, STPPTXX:VPTRL:SPIN:YGKIP:DMVVE:SXGXR, HVPKPXX:APTKL:SPIN:YGKIP:NMVVR:SXGXH, RVPSTXX:APVKT:SPIN:YGKIP:MIVEE:XGXL, ASAAPXX:VPQAL:SPIN:YGKIP:MIVRS:XKXS, ASASPXX:VSQDL:SPIN:YGKIP:MIVKS:XKXS, ASASPXX:VPQDL:SPIN:YGKIP:MVVKS:XKXS, NDEGLEX:VPTEE:SPIN:YGKIP:FLQHN:KXEXR, NDEGLEX:VPTGQ:SPIN:YGKIP:LEEHS:QXEXR, SSVKXQP:SRVHH:SPIN:YGKIP:RLEEH:LEXAXA, RNVQXRP:TQVQL:SPIN:YGKIP:TLEDH:LAXKXE, KIPKAXX:VPAEL:SPIS:YKQYE:DMVVE:GXGXR, GIPEPXX:VPAKM:SPIS:YKQYE:NMVVE:SXAXR, SIPKAXX:VPAEL:SPIS:YKQYE:EMVVE:GXGXR, HVTKPTX:VPAKL:SPIS:YKQYE:NMVVE:SXGXH, YVPKPXX:VPAKL:SPIS:YKQYE:NMVVE:SXGXH, TVPKPXX:VPAQL:SPIS:YKQYE:NMVVE:AXGXH, AVPKAXX:VPAKL:SPIS:YKQYE:NMVVE:AXGXH, KVGKAXX:VPAKL:SPIS:YKQYE:EGMSVVE:XGXR, KASKAXX:VPAKL:SPIS:YKQYE:GMVVE:EXGXR, GSAGPXX:VPAKM:SPIS:YKQYE:GMVVE:RXGXS, STPPTXX:VPARL:SPIS:YKQYE:DMVVE:SXGXR, HVPKPXX:VPAKL:SPIS:YKQYE:NMVVE:SXGXH, RVPSTXX:VPAKT:SPIS:YKQYE:MIVVE:XGXL, ASAAPXX:VPAAL:SPIS:YKQYE:MIVVE:XKXS, ASASPXX:VPADL:SPIS:YKQYE:MIVVE:XKXS, ASASPXX:VPADL:SPIS:YKQYE:MVVVE:XKXS, NDEGLEX:VPAEE:SPIS:YKQYE:FLVVE:KXEXR, NDEGLEX:VPAGQ:SPIS:YKQYE:LEVVE:QXEXR, SSVKXQP:VPAHH:SPIS:YKQYE:RLVVE:LEXAXA, RNVQXRP:VPAQL:SPIS:YKQYE:TLVVE:LAXKXE, KIPKAXX:VPTEL:SPIS:YKQYE:DMVVE:GXGXR, GIPEPXX:VPEKM:SPIS:YKQYE:NMTVE:SXAXR, SIPKAXX:VPTEL:SPIS:YKQYE:EMVVE:GXGXR, HVTKPTX:APTKL:SPIS:YKQYE:NMVVR:SXGXH, YVPKPXX:APTKL:SPIS:YKQYE:NMVVR:SXGXH, TVPKPXX:APTQL:SPIS:YKQYE:NMVVR:AXGXH, AVPKAXX:APTKL:SPIS:YKQYE:NMVVK:AXGXH, KVGKAXX:VPTKL:SPIS:YKQYE:EGMSVAE:XGXR, KASKAXX:VPTKL:SPIS:YKQYE:GMAVS:EXGXR, GSAGPXX:TPTKM:SPIS:YKQYE:GMVVD:RXGXS, STPPTXX:VPTRL:SPIS:YKQYE:DMVVE:SXGXR, HVPKPXX:APTKL:SPIS:YKQYE:NMVVR:SXGXH, RVPSTXX:APVKT:SPIS:YKQYE:MIVEE:XGXL, ASAAPXX:VPQAL:SPIS:YKQYE:MIVRS:XKXS, ASASPXX:VSQDL:SPIS:YKQYE:MIVKS:XKXS, ASASPXX:VPQDL:SPIS:YKQYE:MVVKS:XKXS, NDEGLEX:VPTEE:SPIS:YKQYE:FLQHN:KXEXR, NDEGLEX:VPTGQ:SPIS:YKQYE:LEEHS:QXEXR, SSVKXQP:SRVHH:SPIS:YKQYE:RLEEH:LEXAXA, RNVQXRP:TQVQL:SPIS:YKQYE:TLEDH:LAXKXE, GIPEPXX:VPTKM:SPIS:YKQYE:NMVVE:SXAXR, HVTKPTX:VPTKL:SPIS:YKQYE:NMVVE:SXGXH, YVPKPXX:VPTKL:SPIS:YKQYE:NMVVE:SXGXH, TVPKPXX:VPTQL:SPIS:YKQYE:NMVVE:AXGXH, AVPKAXX:VPTKL:SPIS:YKQYE:NMVVE:AXGXH, KVGKAXX:VPTKL:SPIS:YKQYE:EGMSVVE:XGXR, KASKAXX:VPTKL:SPIS:YKQYE:GMVVE:EXGXR, GSAGPXX:VPTKM:SPIS:YKQYE:GMVVE:RXGXS, AAPASXX:VPTRL:SPIS:YKQYE:DMVVE:AXGXR, HVPKPXX:VPTKL:SPIS:YKQYE:NMVVE:SXGXH, RVPSTXX:VPTKT:SPIS:YKQYE:MIVVE:XGXL, ASAAPXX:VPTAL:SPIS:YKQYE:MIVVE:XKXS, ASASPXX:VPTDL:SPIS:YKQYE:MIVVE:XKXS, ASASPXX:VPTDL:SPIS:YKQYE:MVVVE:XKXS, NDEGLEX:VPTEE:SPIS:YKQYE:FLVVE:KXEXR, NDEGLEX:VPTGQ:SPIS:YKQYE:LEVVE:QXEXR, SSVKXQP:VPTHH:SPIS:YKQYE:RLVVE:LEXAXA, RNVQXRP:VPTQL:SPIS:YKQYE:TLVVE:LAXKXE, AAPASXX:VPARL:SPIS:YKQYE:DMVVE:AXGXR, KIPKAXX:APVEL:KPLS:DHHKD:DMVEE:GXGXR, GIPEPXX:APVKM:KPLS:DHHKD:NMVEE:SXAXR, SIPKAXX:APVEL:KPLS:DHHKD:EMVEE:GXGXR, HVTKPTX:APVKL:KPLS:DHHKD:NMVEE:SXGXH, YVPKPXX:APVKL:KPLS:DHHKD:NMVEE:SXGXH, TVPKPXX:APVQL:KPLS:DHHKD:NMVEE:AXGXH, AVPKAXX:APVKL:KPLS:DHHKD:NMVEE:AXGXH, KVGKAXX:APVKL:KPLS:DHHKD:EGMSVEE:XGXR, KASKAXX:APVKL:KPLS:DHHKD:GMVEE:EXGXR, GSAGPXX:APVKM:KPLS:DHHKD:GMVEE:RXGXS, AAPASXX:APVRL:KPLS:DHHKD:DMVEE:AXGXR, STPPTXX:APVRL:KPLS:DHHKD:DMVEE:SXGXR, HVPKPXX:APVKL:KPLS:DHHKD:NMVEE:SXGXH, ASAAPXX:APVAL:KPLS:DHHKD:MIVEE:XKXS, ASASPXX:APVDL:KPLS:DHHKD:MIVEE:XKXS, ASASPXX:APVDL:KPLS:DHHKD:MVVEE:XKXS, NDEGLEX:APVEE:KPLS:DHHKD:FLVEE:KXEXR, NDEGLEX:APVGQ:KPLS:DHHKD:LEVEE:QXEXR, SSVKXQP:APVHH:KPLS:DHHKD:RLVEE:LEXAXA, RNVQXRP:APVQL:KPLS:DHHKD:TLVEE:LAXKXE, KIPKAXX:VPTEL:KPLS:DHHKD:DMVVE:GXGXR, GIPEPXX:VPEKM:KPLS:DHHKD:NMTVE:SXAXR, SIPKAXX:VPTEL:KPLS:DHHKD:EMVVE:GXGXR, HVTKPTX:APTKL:KPLS:DHHKD:NMVVR:SXGXH, YVPKPXX:APTKL:KPLS:DHHKD:NMVVR:SXGXH, TVPKPXX:APTQL:KPLS:DHHKD:NMVVR:AXGXH, AVPKAXX:APTKL:KPLS:DHHKD:NMVVK:AXGXH, KVGKAXX:VPTKL:KPLS:DHHKD:EGMSVAE:XGXR, KASKAXX:VPTKL:KPLS:DHHKD:GMAVS:EXGXR, GSAGPXX:TPTKM:KPLS:DHHKD:GMVVD:RXGXS, AAPASXX:VPARL:KPLS:DHHKD:DMVVE:AXGXR, STPPTXX:VPTRL:KPLS:DHHKD:DMVVE:SXGXR, HVPKPXX:APTKL:KPLS:DHHKD:NMVVR:SXGXH, ASAAPXX:VPQAL:KPLS:DHHKD:MIVRS:XKXS, ASASPXX:VSQDL:KPLS:DHHKD:MIVKS:XKXS, ASASPXX:VPQDL:KPLS:DHHKD:MVVKS:XKXS, NDEGLEX:VPTEE:KPLS:DHHKD:FLQHN:KXEXR, NDEGLEX:VPTGQ:KPLS:DHHKD:LEEHS:QXEXR, SSVKXQP:SRVHH:KPLS:DHHKD:RLEEH:LEXAXA, RNVQXRP:TQVQL:KPLS:DHHKD:TLEDH:LAXKXE, KIPKAXX:VPQEL:EPLP:EQLSN:DMVRS:GXGXR, GIPEPXX:VPQKM:EPLP:EQLSN:NMVRS:SXAXR, SIPKAXX:VPQEL:EPLP:EQLSN:EMVRS:GXGXR, HVTKPTX:VPQKL:EPLP:EQLSN:NMVRS:SXGXH, YVPKPXX:VPQKL:EPLP:EQLSN:NMVRS:SXGXH, TVPKPXX:VPQQL:EPLP:EQLSN:NMVRS:AXGXH, AVPKAXX:VPQKL:EPLP:EQLSN:NMVRS:AXGXH, KVGKAXX:VPQKL:EPLP:EQLSN:EGMSVRS:XGXR, KASKAXX:VPQKL:EPLP:EQLSN:GMVRS:EXGXR, GSAGPXX:VPQKM:EPLP:EQLSN:GMVRS:RXGXS, AAPASXX:VPQRL:EPLP:EQLSN:DMVRS:AXGXR, STPPTXX:VPQRL:EPLP:EQLSN:DMVRS:SXGXR, HVPKPXX:VPQKL:EPLP:EQLSN:NMVRS:SXGXH, RVPSTXX:VPQKT:EPLP:EQLSN:MIVRS:XGXL, ASASPXX:VPQDL:EPLP:EQLSN:MIVRS:XKXS, ASASPXX:VPQDL:EPLP:EQLSN:MVVRS:XKXS, NDEGLEX:VPQEE:EPLP:EQLSN:FLVRS:KXEXR, NDEGLEX:VPQGQ:EPLP:EQLSN:LEVRS:QXEXR, SSVKXQP:VPQHH:EPLP:EQLSN:RLVRS:LEXAXA, RNVQXRP:VPQQL:EPLP:EQLSN:TLVRS:LAXKXE, KIPKAXX:VPTEL:EPLP:EQLSN:DMVVE:GXGXR, GIPEPXX:VPEKM:EPLP:EQLSN:NMTVE:SXAXR, SIPKAXX:VPTEL:EPLP:EQLSN:EMVVE:GXGXR, HVTKPTX:APTKL:EPLP:EQLSN:NMVVR:SXGXH, YVPKPXX:APTKL:EPLP:EQLSN:NMVVR:SXGXH, TVPKPXX:APTQL:EPLP:EQLSN:NMVVR:AXGXH, AVPKAXX:APTKL:EPLP:EQLSN:NMVVK:AXGXH, KVGKAXX:VPTKL:EPLP:EQLSN:EGMSVAE:XGXR, KASKAXX:VPTKL:EPLP:EQLSN:GMAVS:EXGXR, GSAGPXX:TPTKM:EPLP:EQLSN:GMVVD:RXGXS, AAPASXX:VPARL:EPLP:EQLSN:DMVVE:AXGXR, STPPTXX:VPTRL:EPLP:EQLSN:DMVVE:SXGXR, HVPKPXX:APTKL:EPLP:EQLSN:NMVVR:SXGXH, RVPSTXX:APVKT:EPLP:EQLSN:MIVEE:XGXL, ASASPXX:VSQDL:EPLP:EQLSN:MIVKS:XKXS, ASASPXX:VPQDL:EPLP:EQLSN:MVVKS:XKXS, NDEGLEX:VPTEE:EPLP:EQLSN:FLQHN:KXEXR, NDEGLEX:VPTGQ:EPLP:EQLSN:LEEHS:QXEXR, SSVKXQP:SRVHH:EPLP:EQLSN:RLEEH:LEXAXA, RNVQXRP:TQVQL:EPLP:EQLSN:TLEDH:LAXKXE, KIPKAXX:VSQEL:EPLT:EQLSN:DMVKS:GXGXR, GIPEPXX:VSQKM:EPLT:EQLSN:NMVKS:SXAXR, SIPKAXX:VSQEL:EPLT:EQLSN:EMVKS:GXGXR, HVTKPTX:VSQKL:EPLT:EQLSN:NMVKS:SXGXH, YVPKPXX:VSQKL:EPLT:EQLSN:NMVKS:SXGXH, TVPKPXX:VSQQL:EPLT:EQLSN:NMVKS:AXGXH, AVPKAXX:VSQKL:EPLT:EQLSN:NMVKS:AXGXH, KVGKAXX:VSQKL:EPLT:EQLSN:EGMSVKS:XGXR, KASKAXX:VSQKL:EPLT:EQLSN:GMVKS:EXGXR, GSAGPXX:VSQKM:EPLT:EQLSN:GMVKS:RXGXS, AAPASXX:VSQRL:EPLT:EQLSN:DMVKS:AXGXR, STPPTXX:VSQRL:EPLT:EQLSN:DMVKS:SXGXR, HVPKPXX:VSQKL:EPLT:EQLSN:NMVKS:SXGXH, RVPSTXX:VSQKT:EPLT:EQLSN:MIVKS:XGXL, ASAAPXX:VSQAL:EPLT:EQLSN:MIVKS:XKXS, ASASPXX:VSQDL:EPLT:EQLSN:MVVKS:XKXS, NDEGLEX:VSQEE:EPLT:EQLSN:FLVKS:KXEXR, NDEGLEX:VSQGQ:EPLT:EQLSN:LEVKS:QXEXR, SSVKXQP:VSQHH:EPLT:EQLSN:RLVKS:LEXAXA, RNVQXRP:VSQQL:EPLT:EQLSN:TLVKS:LAXKXE, KIPKAXX:VPTEL:EPLT:EQLSN:DMVVE:GXGXR, GIPEPXX:VPEKM:EPLT:EQLSN:NMTVE:SXAXR, SIPKAXX:VPTEL:EPLT:EQLSN:EMVVE:GXGXR, HVTKPTX:APTKL:EPLT:EQLSN:NMVVR:SXGXH, YVPKPXX:APTKL:EPLT:EQLSN:NMVVR:SXGXH, TVPKPXX:APTQL:EPLT:EQLSN:NMVVR:AXGXH, AVPKAXX:APTKL:EPLT:EQLSN:NMVVK:AXGXH, KVGKAXX:VPTKL:EPLT:EQLSN:EGMSVAE:XGXR, KASKAXX:VPTKL:EPLT:EQLSN:GMAVS:EXGXR, GSAGPXX:TPTKM:EPLT:EQLSN:GMVVD:RXGXS, AAPASXX:VPARL:EPLT:EQLSN:DMVVE:AXGXR, STPPTXX:VPTRL:EPLT:EQLSN:DMVVE:SXGXR, HVPKPXX:APTKL:EPLT:EQLSN:NMVVR:SXGXH, RVPSTXX:APVKT:EPLT:EQLSN:MIVEE:XGXL, ASAAPXX:VPQAL:EPLT:EQLSN:MIVRS:XKXS, ASASPXX:VPQDL:EPLT:EQLSN:MVVKS:XKXS, NDEGLEX:VPTEE:EPLT:EQLSN:FLQHN:KXEXR, NDEGLEX:VPTGQ:EPLT:EQLSN:LEEHS:QXEXR, SSVKXQP:SRVHH:EPLT:EQLSN:RLEEH:LEXAXA, RNVQXRP:TQVQL:EPLT:EQLSN:TLEDH:LAXKXE, KIPKAXX:VPQEL:EPLT:EQLSN:DMVKS:GXGXR, GIPEPXX:VPQKM:EPLT:EQLSN:NMVKS:SXAXR, SIPKAXX:VPQEL:EPLT:EQLSN:EMVKS:GXGXR, HVTKPTX:VPQKL:EPLT:EQLSN:NMVKS:SXGXH, YVPKPXX:VPQKL:EPLT:EQLSN:NMVKS:SXGXH, TVPKPXX:VPQQL:EPLT:EQLSN:NMVKS:AXGXH, AVPKAXX:VPQKL:EPLT:EQLSN:NMVKS:AXGXH, KVGKAXX:VPQKL:EPLT:EQLSN:EGMSVKS:XGXR, KASKAXX:VPQKL:EPLT:EQLSN:GMVKS:EXGXR, GSAGPXX:VPQKM:EPLT:EQLSN:GMVKS:RXGXS, AAPASXX:VPQRL:EPLT:EQLSN:DMVKS:AXGXR, STPPTXX:VPQRL:EPLT:EQLSN:DMVKS:SXGXR, HVPKPXX:VPQKL:EPLT:EQLSN:NMVKS:SXGXH, RVPSTXX:VPQKT:EPLT:EQLSN:MIVKS:XGXL, ASAAPXX:VPQAL:EPLT:EQLSN:MIVKS:XKXS, ASASPXX:VPQDL:EPLT:EQLSN:MIVKS:XKXS, NDEGLEX:VPQEE:EPLT:EQLSN:FLVKS:KXEXR, NDEGLEX:VPQGQ:EPLT:EQLSN:LEVKS:QXEXR, SSVKXQP:VPQHH:EPLT:EQLSN:RLVKS:LEXAXA, RNVQXRP:VPQQL:EPLT:EQLSN:TLVKS:LAXKXE, ASASPXX:VSQDL:EPLT:EQLSN:MIVKS:XKXS, KIPKAXX:VPTEL:SNIT:IGEMS:DMQHN:GXGXR, GIPEPXX:VPTKM:SNIT:IGEMS:NMQHN:SXAXR, SIPKAXX:VPTEL:SNIT:IGEMS:EMQHN:GXGXR, HVTKPTX:VPTKL:SNIT:IGEMS:NMQHN:SXGXH, YVPKPXX:VPTKL:SNIT:IGEMS:NMQHN:SXGXH, TVPKPXX:VPTQL:SNIT:IGEMS:NMQHN:AXGXH, AVPKAXX:VPTKL:SNIT:IGEMS:NMQHN:AXGXH, KVGKAXX:VPTKL:SNIT:IGEMS:EGMSQHN:XGXR, KASKAXX:VPTKL:SNIT:IGEMS:GMQHN:EXGXR, GSAGPXX:VPTKM:SNIT:IGEMS:GMQHN:RXGXS, AAPASXX:VPTRL:SNIT:IGEMS:DMQHN:AXGXR, STPPTXX:VPTRL:SNIT:IGEMS:DMQHN:SXGXR, HVPKPXX:VPTKL:SNIT:IGEMS:NMQHN:SXGXH, RVPSTXX:VPTKT:SNIT:IGEMS:MIQHN:XGXL, ASAAPXX:VPTAL:SNIT:IGEMS:MIQHN:XKXS, ASASPXX:VPTDL:SNIT:IGEMS:MIQHN:XKXS, ASASPXX:VPTDL:SNIT:IGEMS:MVQHN:XKXS, NDEGLEX:VPTGQ:SNIT:IGEMS:LEQHN:QXEXR, NDEGLEX:VPTEE:SNIT:IGEMS:FLQHN:KXEXR, SSVKXQP:VPTHH:SNIT:IGEMS:RLQHN:LEXAXA, RNVQXRP:VPTQL:SNIT:IGEMS:TLQHN:LAXKXE, KIPKAXX:VPTEL:SNIT:IGEMS:DMVVE:GXGXR, GIPEPXX:VPEKM:SNIT:IGEMS:NMTVE:SXAXR, SIPKAXX:VPTEL:SNIT:IGEMS:EMVVE:GXGXR, HVTKPTX:APTKL:SNIT:IGEMS:NMVVR:SXGXH, YVPKPXX:APTKL:SNIT:IGEMS:NMVVR:SXGXH, TVPKPXX:APTQL:SNIT:IGEMS:NMVVR:AXGXH, AVPKAXX:APTKL:SNIT:IGEMS:NMVVK:AXGXH, KVGKAXX:VPTKL:SNIT:IGEMS:EGMSVAE:XGXR, KASKAXX:VPTKL:SNIT:IGEMS:GMAVS:EXGXR, GSAGPXX:TPTKM:SNIT:IGEMS:GMVVD:RXGXS, AAPASXX:VPARL:SNIT:IGEMS:DMVVE:AXGXR, STPPTXX:VPTRL:SNIT:IGEMS:DMVVE:SXGXR, HVPKPXX:APTKL:SNIT:IGEMS:NMVVR:SXGXH, RVPSTXX:APVKT:SNIT:IGEMS:MIVEE:XGXL, ASAAPXX:VPQAL:SNIT:IGEMS:MIVRS:XKXS, ASASPXX:VSQDL:SNIT:IGEMS:MIVKS:XKXS, ASASPXX:VPQDL:SNIT:IGEMS:MVVKS:XKXS, NDEGLEX:VPTGQ:SNIT:IGEMS:LEEHS:QXEXR, SSVKXQP:SRVHH:SNIT:IGEMS:RLEEH:LEXAXA, RNVQXRP:TQVQL:SNIT:IGEMS:TLEDH:LAXKXE, KIPKAXX:VPTEL:SNIT:LGEMS:DMEHS:GXGXR, GIPEPXX:VPTKM:SNIT:LGEMS:NMEHS:SXAXR, SIPKAXX:VPTEL:SNIT:LGEMS:EMEHS:GXGXR, HVTKPTX:VPTKL:SNIT:LGEMS:NMEHS:SXGXH, YVPKPXX:VPTKL:SNIT:LGEMS:NMEHS:SXGXH, TVPKPXX:VPTQL:SNIT:LGEMS:NMEHS:AXGXH, AVPKAXX:VPTKL:SNIT:LGEMS:NMEHS:AXGXH, KVGKAXX:VPTKL:SNIT:LGEMS:EGMSEHS:XGXR, KASKAXX:VPTKL:SNIT:LGEMS:GMEHS:EXGXR, GSAGPXX:VPTKM:SNIT:LGEMS:GMEHS:RXGXS, AAPASXX:VPTRL:SNIT:LGEMS:DMEHS:AXGXR, STPPTXX:VPTRL:SNIT:LGEMS:DMEHS:SXGXR, HVPKPXX:VPTKL:SNIT:LGEMS:NMEHS:SXGXH, RVPSTXX:VPTKT:SNIT:LGEMS:MIEHS:XGXL, ASAAPXX:VPTAL:SNIT:LGEMS:MIEHS:XKXS, ASASPXX:VPTDL:SNIT:LGEMS:MIEHS:XKXS, ASASPXX:VPTDL:SNIT:LGEMS:MVEHS:XKXS, NDEGLEX:VPTEE:SNIT:LGEMS:FLEHS:KXEXR, SSVKXQP:VPTHH:SNIT:LGEMS:RLEHS:LEXAXA, RNVQXRP:VPTQL:SNIT:LGEMS:TLEHS:LAXKXE, KIPKAXX:VPTEL:SNIT:LGEMS:DMVVE:GXGXR, GIPEPXX:VPEKM:SNIT:LGEMS:NMTVE:SXAXR, SIPKAXX:VPTEL:SNIT:LGEMS:EMVVE:GXGXR, HVTKPTX:APTKL:SNIT:LGEMS:NMVVR:SXGXH, YVPKPXX:APTKL:SNIT:LGEMS:NMVVR:SXGXH, TVPKPXX:APTQL:SNIT:LGEMS:NMVVR:AXGXH, AVPKAXX:APTKL:SNIT:LGEMS:NMVVK:AXGXH, KVGKAXX:VPTKL:SNIT:LGEMS:EGMSVAE:XGXR, KASKAXX:VPTKL:SNIT:LGEMS:GMAVS:EXGXR, GSAGPXX:TPTKM:SNIT:LGEMS:GMVVD:RXGXS, AAPASXX:VPARL:SNIT:LGEMS:DMVVE:AXGXR, STPPTXX:VPTRL:SNIT:LGEMS:DMVVE:SXGXR, HVPKPXX:APTKL:SNIT:LGEMS:NMVVR:SXGXH, RVPSTXX:APVKT:SNIT:LGEMS:MIVEE:XGXL, ASAAPXX:VPQAL:SNIT:LGEMS:MIVRS:XKXS, ASASPXX:VSQDL:SNIT:LGEMS:MIVKS:XKXS, ASASPXX:VPQDL:SNIT:LGEMS:MVVKS:XKXS, NDEGLEX:VPTEE:SNIT:LGEMS:FLQHN:KXEXR, SSVKXQP:SRVHH:SNIT:LGEMS:RLEEH:LEXAXA, RNVQXRP:TQVQL:SNIT:LGEMS:TLEDH:LAXKXE, KIPKAXX:SRVEL:RSVK:KEVQV:DMEEH:GXGXR, GIPEPXX:SRVKM:RSVK:KEVQV:NMEEH:SXAXR, SIPKAXX:SRVEL:RSVK:KEVQV:EMEEH:GXGXR, HVTKPTX:SRVKL:RSVK:KEVQV:NMEEH:SXGXH, YVPKPXX:SRVKL:RSVK:KEVQV:NMEEH:SXGXH, TVPKPXX:SRVQL:RSVK:KEVQV:NMEEH:AXGXH, AVPKAXX:SRVKL:RSVK:KEVQV:NMEEH:AXGXH, KVGKAXX:SRVKL:RSVK:KEVQV:EGMSEEH:XGXR, KASKAXX:SRVKL:RSVK:KEVQV:GMEEH:EXGXR, GSAGPXX:SRVKM:RSVK:KEVQV:GMEEH:RXGXS, AAPASXX:SRVRL:RSVK:KEVQV:DMEEH:AXGXR, STPPTXX:SRVRL:RSVK:KEVQV:DMEEH:SXGXR, HVPKPXX:SRVKL:RSVK:KEVQV:NMEEH:SXGXH, RVPSTXX:SRVKT:RSVK:KEVQV:MIEEH:XGXL, ASAAPXX:SRVAL:RSVK:KEVQV:MIEEH:XKXS, ASASPXX:SRVDL:RSVK:KEVQV:MIEEH:XKXS, ASASPXX:SRVDL:RSVK:KEVQV:MVEEH:XKXS, NDEGLEX:SRVEE:RSVK:KEVQV:FLEEH:KXEXR, NDEGLEX:SRVGQ:RSVK:KEVQV:LEEEH:QXEXR, RNVQXRP:SRVQL:RSVK:KEVQV:TLEEH:LAXKXE, KIPKAXX:VPTEL:RSVK:KEVQV:DMVVE:GXGXR, GIPEPXX:VPEKM:RSVK:KEVQV:NMTVE:SXAXR, SIPKAXX:VPTEL:RSVK:KEVQV:EMVVE:GXGXR, HVTKPTX:APTKL:RSVK:KEVQV:NMVVR:SXGXH, YVPKPXX:APTKL:RSVK:KEVQV:NMVVR:SXGXH, TVPKPXX:APTQL:RSVK:KEVQV:NMVVR:AXGXH, AVPKAXX:APTKL:RSVK:KEVQV:NMVVK:AXGXH, KVGKAXX:VPTKL:RSVK:KEVQV:EGMSVAE:XGXR, KASKAXX:VPTKL:RSVK:KEVQV:GMAVS:EXGXR, GSAGPXX:TPTKM:RSVK:KEVQV:GMVVD:RXGXS, AAPASXX:VPARL:RSVK:KEVQV:DMVVE:AXGXR, STPPTXX:VPTRL:RSVK:KEVQV:DMVVE:SXGXR, HVPKPXX:APTKL:RSVK:KEVQV:NMVVR:SXGXH, RVPSTXX:APVKT:RSVK:KEVQV:MIVEE:XGXL, ASAAPXX:VPQAL:RSVK:KEVQV:MIVRS:XKXS, ASASPXX:VSQDL:RSVK:KEVQV:MIVKS:XKXS, ASASPXX:VPQDL:RSVK:KEVQV:MVVKS:XKXS, NDEGLEX:VPTEE:RSVK:KEVQV:FLQHN:KXEXR, NDEGLEX:VPTGQ:RSVK:KEVQV:LEEHS:QXEXR, RNVQXRP:TQVQL:RSVK:KEVQV:TLEDH:LAXKXE, KIPKAXX:TQVEL:RPVQ:KKATV:DMEDH:GXGXR, GIPEPXX:TQVKM:RPVQ:KKATV:NMEDH:SXAXR, SIPKAXX:TQVEL:RPVQ:KKATV:EMEDH:GXGXR, HVTKPTX:TQVKL:RPVQ:KKATV:NMEDH:SXGXH, YVPKPXX:TQVKL:RPVQ:KKATV:NMEDH:SXGXH, TVPKPXX:TQVQL:RPVQ:KKATV:NMEDH:AXGXH, AVPKAXX:TQVKL:RPVQ:KKATV:NMEDH:AXGXH, KVGKAXX:TQVKL:RPVQ:KKATV:EGMSEDH:XGXR, KASKAXX:TQVKL:RPVQ:KKATV:GMEDH:EXGXR, GSAGPXX:TQVKM:RPVQ:KKATV:GMEDH:RXGXS, AAPASXX:TQVRL:RPVQ:KKATV:DMEDH:AXGXR, STPPTXX:TQVRL:RPVQ:KKATV:DMEDH:SXGXR, HVPKPXX:TQVKL:RPVQ:KKATV:NMEDH:SXGXH, RVPSTXX:TQVKT:RPVQ:KKATV:MIEDH:XGXL, ASAAPXX:TQVAL:RPVQ:KKATV:MIEDH:XKXS, ASASPXX:TQVDL:RPVQ:KKATV:MIEDH:XKXS, ASASPXX:TQVDL:RPVQ:KKATV:MVEDH:XKXS, NDEGLEX:TQVEE:RPVQ:KKATV:FLEDH:KXEXR, NDEGLEX:TQVGQ:RPVQ:KKATV:LEEDH:QXEXR, SSVKXQP:TQVHH:RPVQ:KKATV:RLEDH:LEXAXA, KIPKAXX:VPTEL:RPVQ:KKATV:DMVVE:GXGXR, GIPEPXX:VPEKM:RPVQ:KKATV:NMTVE:SXAXR, SIPKAXX:VPTEL:RPVQ:KKATV:EMVVE:GXGXR, HVTKPTX:APTKL:RPVQ:KKATV:NMVVR:SXGXH, YVPKPXX:APTKL:RPVQ:KKATV:NMVVR:SXGXH, TVPKPXX:APTQL:RPVQ:KKATV:NMVVR:AXGXH, AVPKAXX:APTKL:RPVQ:KKATV:NMVVK:AXGXH, KVGKAXX:VPTKL:RPVQ:KKATV:EGMSVAE:XGXR, KASKAXX:VPTKL:RPVQ:KKATV:GMAVS:EXGXR, GSAGPXX:TPTKM:RPVQ:KKATV:GMVVD:RXGXS, AAPASXX:VPARL:RPVQ:KKATV:DMVVE:AXGXR, STPPTXX:VPTRL:RPVQ:KKATV:DMVVE:SXGXR, HVPKPXX:APTKL:RPVQ:KKATV:NMVVR:SXGXH, RVPSTXX:APVKT:RPVQ:KKATV:MIVEE:XGXL, ASAAPXX:VPQAL:RPVQ:KKATV:MIVRS:XKXS, ASASPXX:VSQDL:RPVQ:KKATV:MIVKS:XKXS, ASASPXX:VPQDL:RPVQ:KKATV:MVVKS:XKXS, NDEGLEX:VPTEE:RPVQ:KKATV:FLQHN:KXEXR, NDEGLEX:VPTGQ:RPVQ:KKATV:LEEHS:QXEXR and SSVKXQP:SRVHH:RPVQ:KKATV:RLEEH:LEXAXA. More particularly, the hexaplet PEP7:PEP5:PEP1:PEP2:PEP6:PEP8 is selected from the group consisting of GIPEPXX:VPTKM:SAIS:LKNYQ:NMVVE:SXAXR, HVTKPTX:VPTKL:SAIS:LKNYQ:NMVVE:SXGXH, YVPKPXX:VPTKL:SAIS:LKNYQ:NMVVE:SXGXH, TVPKPXX:VPTQL:SAIS:LKNYQ:NMVVE:AXGXH, AVPKAXX:VPTKL:SAIS:LKNYQ:NMVVE:AXGXH, KVGKAXX:VPTKL:SAIS:LKNYQ:EGMSVVE:XGXR, KASKAXX:VPTKL:SAIS:LKNYQ:GMVVE:EXGXR, GSAGPXX:VPTKM:SAIS:LKNYQ:GMVVE:RXGXS, AAPASXX:VPTRL:SAIS:LKNYQ:DMVVE:AXGXR, STPPTXX:VPTRL:SAIS:LKNYQ:DMVVE:SXGXR, HVPKPXX:VPTKL:SAIS:LKNYQ:NMVVE:SXGXH, RVPSTXX:VPTKT:SAIS:LKNYQ:MIVVE:XGXL, ASAAPXX:VPTAL:SAIS:LKNYQ:MIVVE:XKXS, ASASPXX:VPTDL:SAIS:LKNYQ:MIVVE:XKXS, ASASPXX:VPTDL:SAIS:LKNYQ:MVVVE:XKXS, GIPEPXX:VPEKM:SAIS:LKNYQ:NMTVE:SXAXR, HVTKPTX:APTKL:SAIS:LKNYQ:NMVVR:SXGXH, YVPKPXX:APTKL:SAIS:LKNYQ:NMVVR:SXGXH, TVPKPXX:APTQL:SAIS:LKNYQ:NMVVR:AXGXH, AVPKAXX:APTKL:SAIS:LKNYQ:NMVVK:AXGXH, KVGKAXX:VPTKL:SAIS:LKNYQ:EGMSVAE:XGXR, KASKAXX:VPTKL:SAIS:LKNYQ:GMAVS:EXGXR, GSAGPXX:TPTKM:SAIS:LKNYQ:GMVVD:RXGXS, AAPASXX:VPARL:SAIS:LKNYQ:DMVVE:AXGXR, HVPKPXX:APTKL:SAIS:LKNYQ:NMVVR:SXGXH, RVPSTXX:APVKT:SAIS:LKNYQ:MIVEE:XGXL, ASAAPXX:VPQAL:SAIS:LKNYQ:MIVRS:XKXS, ASASPXX:VSQDL:SAIS:LKNYQ:MIVKS:XKXS, ASASPXX:VPQDL:SAIS:LKNYQ:MVVKS:XKXS, NDEGLEX:VPTEE:SAIS:LKNYQ:FLQHN:KXEXR, NDEGLEX:VPTGQ:SAIS:LKNYQ:LEEHS:QXEXR, SSVKXQP:SRVHH:SAIS:LKNYQ:RLEEH:LEXAXA, RNVQXRP:TQVQL:SAIS:LKNYQ:TLEDH:LAXKXE, KIPKAXX:VPEEL:SSLS:LKVYP:DMTVE:GXGXR, SIPKAXX:VPEEL:SSLS:LKVYP:EMTVE:GXGXR, HVTKPTX:VPEKL:SSLS:LKVYP:NMTVE:SXGXH, YVPKPXX:VPEKL:SSLS:LKVYP:NMTVE:SXGXH, TVPKPXX:VPEQL:SSLS:LKVYP:NMTVE:AXGXH, AVPKAXX:VPEKL:SSLS:LKVYP:NMTVE:AXGXH, KVGKAXX:VPEKL:SSLS:LKVYP:EGMSTVE:XGXR, KASKAXX:VPEKL:SSLS:LKVYP:GMTVE:EXGXR, GSAGPXX:VPEKM:SSLS:LKVYP:GMTVE:RXGXS, AAPASXX:VPERL:SSLS:LKVYP:DMTVE:AXGXR, STPPTXX:VPERL:SSLS:LKVYP:DMTVE:SXGXR, HVPKPXX:VPEKL:SSLS:LKVYP:NMTVE:SXGXH, RVPSTXX:VPEKT:SSLS:LKVYP:MITVE:XGXL, ASAAPXX:VPEAL:SSLS:LKVYP:MITVE:XKXS, ASASPXX:VPEDL:SSLS:LKVYP:MITVE:XKXS, ASASPXX:VPEDL:SSLS:LKVYP:MVTVE:XKXS, KIPKAXX:VPTEL:SSLS:LKVYP:DMVVE:GXGXR, SIPKAXX:VPTEL:SSLS:LKVYP:EMVVE:GXGXR, HVTKPTX:APTKL:SSLS:LKVYP:NMVVR:SXGXH, YVPKPXX:APTKL:SSLS:LKVYP:NMVVR:SXGXH, TVPKPXX:APTQL:SSLS:LKVYP:NMVVR:AXGXH, AVPKAXX:APTKL:SSLS:LKVYP:NMVVK:AXGXH, KVGKAXX:VPTKL:SSLS:LKVYP:EGMSVAE:XGXR, KASKAXX:VPTKL:SSLS:LKVYP:GMAVS:EXGXR, GSAGPXX:TPTKM:SSLS:LKVYP:GMVVD:RXGXS, AAPASXX:VPARL:SSLS:LKVYP:DMVVE:AXGXR, STPPTXX:VPTRL:SSLS:LKVYP:DMVVE:SXGXR, HVPKPXX:APTKL:SSLS:LKVYP:NMVVR:SXGXH, RVPSTXX:APVKT:SSLS:LKVYP:MIVEE:XGXL, ASAAPXX:VPQAL:SSLS:LKVYP:MIVRS:XKXS, ASASPXX:VSQDL:SSLS:LKVYP:MIVKS:XKXS, ASASPXX:VPQDL:SSLS:LKVYP:MVVKS:XKXS, NDEGLEX:VPTEE:SSLS:LKVYP:FLQHN:KXEXR, NDEGLEX:VPTGQ:SSLS:LKVYP:LEEHS:QXEXR, SSVKXQP:SRVHH:SSLS:LKVYP:RLEEH:LEXAXA, RNVQXRP:TQVQL:SSLS:LKVYP:TLEDH:LAXKXE, KIPKAXX:APTEL:NAIS:LKKYR:DMVVR:GXGXR, GIPEPXX:APTKM:NAIS:LKKYR:NMVVR:SXAXR, SIPKAXX:APTEL:NAIS:LKKYR:EMVVR:GXGXR, AVPKAXX:APTKL:NAIS:LKKYR:NMVVR:AXGXH, KVGKAXX:APTKL:NAIS:LKKYR:EGMSVVR:XGXR, KASKAXX:APTKL:NAIS:LKKYR:GMVVR:EXGXR, GSAGPXX:APTKM:NAIS:LKKYR:GMVVR:RXGXS, AAPASXX:APTRL:NAIS:LKKYR:DMVVR:AXGXR, STPPTXX:APTRL:NAIS:LKKYR:DMVVR:SXGXR, RVPSTXX:APTKT:NAIS:LKKYR:MIVVR:XGXL, ASAAPXX:APTAL:NAIS:LKKYR:MIVVR:XKXS, ASASPXX:APTDL:NAIS:LKKYR:MIVVR:XKXS, ASASPXX:APTDL:NAIS:LKKYR:MVVVR:XKXS, KIPKAXX:VPTEL:NAIS:LKKYR:DMVVE:GXGXR, GIPEPXX:VPEKM:NAIS:LKKYR:NMTVE:SXAXR, SIPKAXX:VPTEL:NAIS:LKKYR:EMVVE:GXGXR, AVPKAXX:APTKL:NAIS:LKKYR:NMVVK:AXGXH, KVGKAXX:VPTKL:NAIS:LKKYR:EGMSVAE:XGXR, KASKAXX:VPTKL:NAIS:LKKYR:GMAVS:EXGXR, GSAGPXX:TPTKM:NAIS:LKKYR:GMVVD:RXGXS, AAPASXX:VPARL:NAIS:LKKYR:DMVVE:AXGXR, STPPTXX:VPTRL:NAIS:LKKYR:DMVVE:SXGXR, RVPSTXX:APVKT:NAIS:LKKYR:MIVEE:XGXL, ASAAPXX:VPQAL:NAIS:LKKYR:MIVRS:XKXS, ASASPXX:VSQDL:NAIS:LKKYR:MIVKS:XKXS, ASASPXX:VPQDL:NAIS:LKKYR:MVVKS:XKXS, NDEGLEX:VPTEE:NAIS:LKKYR:FLQHN:KXEXR, NDEGLEX:VPTGQ:NAIS:LKKYR:LEEHS:QXEXR, SSVKXQP:SRVHH:NAIS:LKKYR:RLEEH:LEXAXA, RNVQXRP:TQVQL:NAIS:LKKYR:TLEDH:LAXKXE, KIPKAXX:APTEL:SATS:LRKHR:DMVVK:GXGXR, GIPEPXX:APTKM:SATS:LRKHR:NMVVK:SXAXR, SIPKAXX:APTEL:SATS:LRKHR:EMVVK:GXGXR, HVTKPTX:APTKL:SATS:LRKHR:NMVVK:SXGXH, YVPKPXX:APTKL:SATS:LRKHR:NMVVK:SXGXH, TVPKPXX:APTQL:SATS:LRKHR:NMVVK:AXGXH, KVGKAXX:APTKL:SATS:LRKHR:EGMSVVK:XGXR, KASKAXX:APTKL:SATS:LRKHR:GMVVK:EXGXR, GSAGPXX:APTKM:SATS:LRKHR:GMVVK:RXGXS, AAPASXX:APTRL:SATS:LRKHR:DMVVK:AXGXR, STPPTXX:APTRL:SATS:LRKHR:DMVVK:SXGXR, HVPKPXX:APTKL:SATS:LRKHR:NMVVK:SXGXH, RVPSTXX:APTKT:SATS:LRKHR:MIVVK:XGXL, ASAAPXX:APTAL:SATS:LRKHR:MIVVK:XKXS, ASASPXX:APTDL:SATS:LRKHR:MIVVK:XKXS, ASASPXX:APTDL:SATS:LRKHR:MVVVK:XKXS, KIPKAXX:VPTEL:SATS:LRKHR:DMVVE:GXGXR, GIPEPXX:VPEKM:SATS:LRKHR:NMTVE:SXAXR, SIPKAXX:VPTEL:SATS:LRKHR:EMVVE:GXGXR, HVTKPTX:APTKL:SATS:LRKHR:NMVVR:SXGXH, YVPKPXX:APTKL:SATS:LRKHR:NMVVR:SXGXH, TVPKPXX:APTQL:SATS:LRKHR:NMVVR:AXGXH, KVGKAXX:VPTKL:SATS:LRKHR:EGMSVAE:XGXR, KASKAXX:VPTKL:SATS:LRKHR:GMAVS:EXGXR, GSAGPXX:TPTKM:SATS:LRKHR:GMVVD:RXGXS, AAPASXX:VPARL:SATS:LRKHR:DMVVE:AXGXR, STPPTXX:VPTRL:SATS:LRKHR:DMVVE:SXGXR, HVPKPXX:APTKL:SATS:LRKHR:NMVVR:SXGXH, RVPSTXX:APVKT:SATS:LRKHR:MIVEE:XGXL, ASAAPXX:VPQAL:SATS:LRKHR:MIVRS:XKXS, ASASPXX:VSQDL:SATS:LRKHR:MIVKS:XKXS, ASASPXX:VPQDL:SATS:LRKHR:MVVKS:XKXS, NDEGLEX:VPTEE:SATS:LRKHR:FLQHN:KXEXR, NDEGLEX:VPTGQ:SATS:LRKHR:LEEHS:QXEXR, SSVKXQP:SRVHH:SATS:LRKHR:RLEEH:LEXAXA, RNVQXRP:TQVQL:SATS:LRKHR:TLEDH:LAXKXE, KIPKAXX:VPTEL:SPIS:LKYHY:DMVAE:GXGXR, GIPEPXX:VPTKM:SPIS:LKYHY:NMVAE:SXAXR, SIPKAXX:VPTEL:SPIS:LKYHY:EMVAE:GXGXR, HVTKPTX:VPTKL:SPIS:LKYHY:NMVAE:SXGXH, YVPKPXX:VPTKL:SPIS:LKYHY:NMVAE:SXGXH, TVPKPXX:VPTQL:SPIS:LKYHY:NMVAE:AXGXH, AVPKAXX:VPTKL:SPIS:LKYHY:NMVAE:AXGXH, KASKAXX:VPTKL:SPIS:LKYHY:GMVAE:EXGXR, GSAGPXX:VPTKM:SPIS:LKYHY:GMVAE:RXGXS, AAPASXX:VPTRL:SPIS:LKYHY:DMVAE:AXGXR, STPPTXX:VPTRL:SPIS:LKYHY:DMVAE:SXGXR, HVPKPXX:VPTKL:SPIS:LKYHY:NMVAE:SXGXH, RVPSTXX:VPTKT:SPIS:LKYHY:MIVAE:XGXL, ASAAPXX:VPTAL:SPIS:LKYHY:MIVAE:XKXS, ASASPXX:VPTDL:SPIS:LKYHY:MIVAE:XKXS, ASASPXX:VPTDL:SPIS:LKYHY:MVVAE:XKXS, KIPKAXX:VPTEL:SPIS:LKYHY:DMVVE:GXGXR, GIPEPXX:VPEKM:SPIS:LKYHY:NMTVE:SXAXR, SIPKAXX:VPTEL:SPIS:LKYHY:EMVVE:GXGXR, HVTKPTX:APTKL:SPIS:LKYHY:NMVVR:SXGXH, YVPKPXX:APTKL:SPIS:LKYHY:NMVVR:SXGXH, TVPKPXX:APTQL:SPIS:LKYHY:NMVVR:AXGXH, AVPKAXX:APTKL:SPIS:LKYHY:NMVVK:AXGXH, KASKAXX:VPTKL:SPIS:LKYHY:GMAVS:EXGXR, GSAGPXX:TPTKM:SPIS:LKYHY:GMVVD:RXGXS, AAPASXX:VPARL:SPIS:LKYHY:DMVVE:AXGXR, STPPTXX:VPTRL:SPIS:LKYHY:DMVVE:SXGXR, HVPKPXX:APTKL:SPIS:LKYHY:NMVVR:SXGXH, RVPSTXX:APVKT:SPIS:LKYHY:MIVEE:XGXL, ASAAPXX:VPQAL:SPIS:LKYHY:MIVRS:XKXS, ASASPXX:VSQDL:SPIS:LKYHY:MIVKS:XKXS, ASASPXX:VPQDL:SPIS:LKYHY:MVVKS:XKXS, NDEGLEX:VPTEE:SPIS:LKYHY:FLQHN:KXEXR, NDEGLEX:VPTGQ:SPIS:LKYHY:LEEHS:QXEXR, SSVKXQP:SRVHH:SPIS:LKYHY:RLEEH:LEXAXA, RNVQXRP:TQVQL:SPIS:LKYHY:TLEDH:LAXKXE, KIPKAXX:VPTEL:EPIS:KFKYE:DMAVS:GXGXR, GIPEPXX:VPTKM:EPIS:KFKYE:NMAVS:SXAXR, SIPKAXX:VPTEL:EPIS:KFKYE:EMAVS:GXGXR, HVTKPTX:VPTKL:EPIS:KFKYE:NMAVS:SXGXH, YVPKPXX:VPTKL:EPIS:KFKYE:NMAVS:SXGXH, TVPKPXX:VPTQL:EPIS:KFKYE:NMAVS:AXGXH, AVPKAXX:VPTKL:EPIS:KFKYE:NMAVS:AXGXH, KVGKAXX:VPTKL:EPIS:KFKYE:EGMSAVS:XGXR, GSAGPXX:VPTKM:EPIS:KFKYE:GMAVS:RXGXS, AAPASXX:VPTRL:EPIS:KFKYE:DMAVS:AXGXR, STPPTXX:VPTRL:EPIS:KFKYE:DMAVS:SXGXR, HVPKPXX:VPTKL:EPIS:KFKYE:NMAVS:SXGXH, RVPSTXX:VPTKT:EPIS:KFKYE:MIAVS:XGXL, ASAAPXX:VPTAL:EPIS:KFKYE:MIAVS:XKXS, ASASPXX:VPTDL:EPIS:KFKYE:MIAVS:XKXS, ASASPXX:VPTDL:EPIS:KFKYE:MVAVS:XKXS, KIPKAXX:VPTEL:EPIS:KFKYE:DMVVE:GXGXR, GIPEPXX:VPEKM:EPIS:KFKYE:NMTVE:SXAXR, SIPKAXX:VPTEL:EPIS:KFKYE:EMVVE:GXGXR, HVTKPTX:APTKL:EPIS:KFKYE:NMVVR:SXGXH, YVPKPXX:APTKL:EPIS:KFKYE:NMVVR:SXGXH, TVPKPXX:APTQL:EPIS:KFKYE:NMVVR:AXGXH, AVPKAXX:APTKL:EPIS:KFKYE:NMVVK:AXGXH, KVGKAXX:VPTKL:EPIS:KFKYE:EGMSVAE:XGXR, GSAGPXX:TPTKM:EPIS:KFKYE:GMVVD:RXGXS, AAPASXX:VPARL:EPIS:KFKYE:DMVVE:AXGXR, STPPTXX:VPTRL:EPIS:KFKYE:DMVVE:SXGXR, HVPKPXX:APTKL:EPIS:KFKYE:NMVVR:SXGXH, RVPSTXX:APVKT:EPIS:KFKYE:MIVEE:XGXL, ASAAPXX:VPQAL:EPIS:KFKYE:MIVRS:XKXS, ASASPXX:VSQDL:EPIS:KFKYE:MIVKS:XKXS, ASASPXX:VPQDL:EPIS:KFKYE:MVVKS:XKXS, NDEGLEX:VPTEE:EPIS:KFKYE:FLQHN:KXEXR, NDEGLEX:VPTGQ:EPIS:KFKYE:LEEHS:QXEXR, SSVKXQP:SRVHH:EPIS:KFKYE:RLEEH:LEXAXA, RNVQXRP:TQVQL:EPIS:KFKYE:TLEDH:LAXKXE, KIPKAXX:TPTEL:SPIN:YGKIP:DMVVD:GXGXR, GIPEPXX:TPTKM:SPIN:YGKIP:NMVVD:SXAXR, SIPKAXX:TPTEL:SPIN:YGKIP:EMVVD:GXGXR, HVTKPTX:TPTKL:SPIN:YGKIP:NMVVD:SXGXH, YVPKPXX:TPTKL:SPIN:YGKIP:NMVVD:SXGXH, TVPKPXX:TPTQL:SPIN:YGKIP:NMVVD:AXGXH, AVPKAXX:TPTKL:SPIN:YGKIP:NMVVD:AXGXH, KVGKAXX:TPTKL:SPIN:YGKIP:EGMSVVD:XGXR, KASKAXX:TPTKL:SPIN:YGKIP:GMVVD:EXGXR, AAPASXX:TPTRL:SPIN:YGKIP:DMVVD:AXGXR, STPPTXX:TPTRL:SPIN:YGKIP:DMVVD:SXGXR, HVPKPXX:TPTKL:SPIN:YGKIP:NMVVD:SXGXH, RVPSTXX:TPTKT:SPIN:YGKIP:MIVVD:XGXL, ASAAPXX:TPTAL:SPIN:YGKIP:MIVVD:XKXS, ASASPXX:TPTDL:SPIN:YGKIP:MIVVD:XKXS, ASASPXX:TPTDL:SPIN:YGKIP:MVVVD:XKXS, KIPKAXX:VPTEL:SPIN:YGKIP:DMVVE:GXGXR, GIPEPXX:VPEKM:SPIN:YGKIP:NMTVE:SXAXR, SIPKAXX:VPTEL:SPIN:YGKIP:EMVVE:GXGXR, HVTKPTX:APTKL:SPIN:YGKIP:NMVVR:SXGXH, YVPKPXX:APTKL:SPIN:YGKIP:NMVVR:SXGXH, TVPKPXX:APTQL:SPIN:YGKIP:NMVVR:AXGXH, AVPKAXX:APTKL:SPIN:YGKIP:NMVVK:AXGXH, KVGKAXX:VPTKL:SPIN:YGKIP:EGMSVAE:XGXR, KASKAXX:VPTKL:SPIN:YGKIP:GMAVS:EXGXR, AAPASXX:VPARL:SPIN:YGKIP:DMVVE:AXGXR, STPPTXX:VPTRL:SPIN:YGKIP:DMVVE:SXGXR, HVPKPXX:APTKL:SPIN:YGKIP:NMVVR:SXGXH, RVPSTXX:APVKT:SPIN:YGKIP:MIVEE:XGXL, ASAAPXX:VPQAL:SPIN:YGKIP:MIVRS:XKXS, ASASPXX:VSQDL:SPIN:YGKIP:MIVKS:XKXS, ASASPXX:VPQDL:SPIN:YGKIP:MVVKS:XKXS, NDEGLEX:VPTEE:SPIN:YGKIP:FLQHN:KXEXR, NDEGLEX:VPTGQ:SPIN:YGKIP:LEEHS:QXEXR, SSVKXQP:SRVHH:SPIN:YGKIP:RLEEH:LEXAXA, RNVQXRP:TQVQL:SPIN:YGKIP:TLEDH:LAXKXE, KIPKAXX:VPAEL:SPIS:YKQYE:DMVVE:GXGXR, GIPEPXX:VPAKM:SPIS:YKQYE:NMVVE:SXAXR, SIPKAXX:VPAEL:SPIS:YKQYE:EMVVE:GXGXR, HVTKPTX:VPAKL:SPIS:YKQYE:NMVVE:SXGXH, YVPKPXX:VPAKL:SPIS:YKQYE:NMVVE:SXGXH, TVPKPXX:VPAQL:SPIS:YKQYE:NMVVE:AXGXH, AVPKAXX:VPAKL:SPIS:YKQYE:NMVVE:AXGXH, KVGKAXX:VPAKL:SPIS:YKQYE:EGMSVVE:XGXR, KASKAXX:VPAKL:SPIS:YKQYE:GMVVE:EXGXR, GSAGPXX:VPAKM:SPIS:YKQYE:GMVVE:RXGXS, STPPTXX:VPARL:SPIS:YKQYE:DMVVE:SXGXR, HVPKPXX:VPAKL:SPIS:YKQYE:NMVVE:SXGXH, RVPSTXX:VPAKT:SPIS:YKQYE:MIVVE:XGXL, ASAAPXX:VPAAL:SPIS:YKQYE:MIVVE:XKXS, ASASPXX:VPADL:SPIS:YKQYE:MIVVE:XKXS, ASASPXX:VPADL:SPIS:YKQYE:MVVVE:XKXS, KIPKAXX:VPTEL:SPIS:YKQYE:DMVVE:GXGXR, GIPEPXX:VPEKM:SPIS:YKQYE:NMTVE:SXAXR, SIPKAXX:VPTEL:SPIS:YKQYE:EMVVE:GXGXR, HVTKPTX:APTKL:SPIS:YKQYE:NMVVR:SXGXH, YVPKPXX:APTKL:SPIS:YKQYE:NMVVR:SXGXH, TVPKPXX:APTQL:SPIS:YKQYE:NMVVR:AXGXH, AVPKAXX:APTKL:SPIS:YKQYE:NMVVK:AXGXH, KVGKAXX:VPTKL:SPIS:YKQYE:EGMSVAE:XGXR, KASKAXX:VPTKL:SPIS:YKQYE:GMAVS:EXGXR, GSAGPXX:TPTKM:SPIS:YKQYE:GMVVD:RXGXS, STPPTXX:VPTRL:SPIS:YKQYE:DMVVE:SXGXR, HVPKPXX:APTKL:SPIS:YKQYE:NMVVR:SXGXH, RVPSTXX:APVKT:SPIS:YKQYE:MIVEE:XGXL, ASAAPXX:VPQAL:SPIS:YKQYE:MIVRS:XKXS, ASASPXX:VSQDL:SPIS:YKQYE:MIVKS:XKXS, ASASPXX:VPQDL:SPIS:YKQYE:MVVKS:XKXS, NDEGLEX:VPTEE:SPIS:YKQYE:FLQHN:KXEXR, NDEGLEX:VPTGQ:SPIS:YKQYE:LEEHS:QXEXR, SSVKXQP:SRVHH:SPIS:YKQYE:RLEEH:LEXAXA, RNVQXRP:TQVQL:SPIS:YKQYE:TLEDH:LAXKXE, GIPEPXX:VPTKM:SPIS:YKQYE:NMVVE:SXAXR, HVTKPTX:VPTKL:SPIS:YKQYE:NMVVE:SXGXH, YVPKPXX:VPTKL:SPIS:YKQYE:NMVVE:SXGXH, TVPKPXX:VPTQL:SPIS:YKQYE:NMVVE:AXGXH, AVPKAXX:VPTKL:SPIS:YKQYE:NMVVE:AXGXH, KVGKAXX:VPTKL:SPIS:YKQYE:EGMSVVE:XGXR, KASKAXX:VPTKL:SPIS:YKQYE:GMVVE:EXGXR, GSAGPXX:VPTKM:SPIS:YKQYE:GMVVE:RXGXS, AAPASXX:VPTRL:SPIS:YKQYE:DMVVE:AXGXR, HVPKPXX:VPTKL:SPIS:YKQYE:NMVVE:SXGXH, RVPSTXX:VPTKT:SPIS:YKQYE:MIVVE:XGXL, ASAAPXX:VPTAL:SPIS:YKQYE:MIVVE:XKXS, ASASPXX:VPTDL:SPIS:YKQYE:MIVVE:XKXS, ASASPXX:VPTDL:SPIS:YKQYE:MVVVE:XKXS, AAPASXX:VPARL:SPIS:YKQYE:DMVVE:AXGXR, KIPKAXX:APVEL:KPLS:DHHKD:DMVEE:GXGXR, GIPEPXX:APVKM:KPLS:DHHKD:NMVEE:SXAXR, SIPKAXX:APVEL:KPLS:DHHKD:EMVEE:GXGXR, HVTKPTX:APVKL:KPLS:DHHKD:NMVEE:SXGXH, YVPKPXX:APVKL:KPLS:DHHKD:NMVEE:SXGXH, TVPKPXX:APVQL:KPLS:DHHKD:NMVEE:AXGXH, AVPKAXX:APVKL:KPLS:DHHKD:NMVEE:AXGXH, KVGKAXX:APVKL:KPLS:DHHKD:EGMSVEE:XGXR, KASKAXX:APVKL:KPLS:DHHKD:GMVEE:EXGXR, GSAGPXX:APVKM:KPLS:DHHKD:GMVEE:RXGXS, AAPASXX:APVRL:KPLS:DHHKD:DMVEE:AXGXR, STPPTXX:APVRL:KPLS:DHHKD:DMVEE:SXGXR, HVPKPXX:APVKL:KPLS:DHHKD:NMVEE:SXGXH, ASAAPXX:APVAL:KPLS:DHHKD:MIVEE:XKXS, ASASPXX:APVDL:KPLS:DHHKD:MIVEE:XKXS, ASASPXX:APVDL:KPLS:DHHKD:MVVEE:XKXS, KIPKAXX:VPTEL:KPLS:DHHKD:DMVVE:GXGXR, GIPEPXX:VPEKM:KPLS:DHHKD:NMTVE:SXAXR, SIPKAXX:VPTEL:KPLS:DHHKD:EMVVE:GXGXR, HVTKPTX:APTKL:KPLS:DHHKD:NMVVR:SXGXH, YVPKPXX:APTKL:KPLS:DHHKD:NMVVR:SXGXH, TVPKPXX:APTQL:KPLS:DHHKD:NMVVR:AXGXH, AVPKAXX:APTKL:KPLS:DHHKD:NMVVK:AXGXH, KVGKAXX:VPTKL:KPLS:DHHKD:EGMSVAE:XGXR, KASKAXX:VPTKL:KPLS:DHHKD:GMAVS:EXGXR, GSAGPXX:TPTKM:KPLS:DHHKD:GMVVD:RXGXS, AAPASXX:VPARL:KPLS:DHHKD:DMVVE:AXGXR, STPPTXX:VPTRL:KPLS:DHHKD:DMVVE:SXGXR, HVPKPXX:APTKL:KPLS:DHHKD:NMVVR:SXGXH, ASAAPXX:VPQAL:KPLS:DHHKD:MIVRS:XKXS, ASASPXX:VSQDL:KPLS:DHHKD:MIVKS:XKXS, ASASPXX:VPQDL:KPLS:DHHKD:MVVKS:XKXS, NDEGLEX:VPTEE:KPLS:DHHKD:FLQHN:KXEXR, NDEGLEX:VPTGQ:KPLS:DHHKD:LEEHS:QXEXR, SSVKXQP:SRVHH:KPLS:DHHKD:RLEEH:LEXAXA, RNVQXRP:TQVQL:KPLS:DHHKD:TLEDH:LAXKXE, KIPKAXX:VPQEL:EPLP:EQLSN:DMVRS:GXGXR, GIPEPXX:VPQKM:EPLP:EQLSN:NMVRS:SXAXR, SIPKAXX:VPQEL:EPLP:EQLSN:EMVRS:GXGXR, HVTKPTX:VPQKL:EPLP:EQLSN:NMVRS:SXGXH, YVPKPXX:VPQKL:EPLP:EQLSN:NMVRS:SXGXH, TVPKPXX:VPQQL:EPLP:EQLSN:NMVRS:AXGXH, AVPKAXX:VPQKL:EPLP:EQLSN:NMVRS:AXGXH, KVGKAXX:VPQKL:EPLP:EQLSN:EGMSVRS:XGXR, KASKAXX:VPQKL:EPLP:EQLSN:GMVRS:EXGXR, GSAGPXX:VPQKM:EPLP:EQLSN:GMVRS:RXGXS, AAPASXX:VPQRL:EPLP:EQLSN:DMVRS:AXGXR, STPPTXX:VPQRL:EPLP:EQLSN:DMVRS:SXGXR, HVPKPXX:VPQKL:EPLP:EQLSN:NMVRS:SXGXH, RVPSTXX:VPQKT:EPLP:EQLSN:MIVRS:XGXL, ASASPXX:VPQDL:EPLP:EQLSN:MIVRS:XKXS, ASASPXX:VPQDL:EPLP:EQLSN:MVVRS:XKXS, KIPKAXX:VPTEL:EPLP:EQLSN:DMVVE:GXGXR, GIPEPXX:VPEKM:EPLP:EQLSN:NMTVE:SXAXR, SIPKAXX:VPTEL:EPLP:EQLSN:EMVVE:GXGXR, HVTKPTX:APTKL:EPLP:EQLSN:NMVVR:SXGXH, YVPKPXX:APTKL:EPLP:EQLSN:NMVVR:SXGXH, TVPKPXX:APTQL:EPLP:EQLSN:NMVVR:AXGXH, AVPKAXX:APTKL:EPLP:EQLSN:NMVVK:AXGXH, KVGKAXX:VPTKL:EPLP:EQLSN:EGMSVAE:XGXR, KASKAXX:VPTKL:EPLP:EQLSN:GMAVS:EXGXR, GSAGPXX:TPTKM:EPLP:EQLSN:GMVVD:RXGXS, AAPASXX:VPARL:EPLP:EQLSN:DMVVE:AXGXR, STPPTXX:VPTRL:EPLP:EQLSN:DMVVE:SXGXR, HVPKPXX:APTKL:EPLP:EQLSN:NMVVR:SXGXH, RVPSTXX:APVKT:EPLP:EQLSN:MIVEE:XGXL, ASASPXX:VSQDL:EPLP:EQLSN:MIVKS:XKXS, ASASPXX:VPQDL:EPLP:EQLSN:MVVKS:XKXS, NDEGLEX:VPTEE:EPLP:EQLSN:FLQHN:KXEXR, NDEGLEX:VPTGQ:EPLP:EQLSN:LEEHS:QXEXR, SSVKXQP:SRVHH:EPLP:EQLSN:RLEEH:LEXAXA, RNVQXRP:TQVQL:EPLP:EQLSN:TLEDH:LAXKXE, KIPKAXX:VSQEL:EPLT:EQLSN:DMVKS:GXGXR, GIPEPXX:VSQKM:EPLT:EQLSN:NMVKS:SXAXR, SIPKAXX:VSQEL:EPLT:EQLSN:EMVKS:GXGXR, HVTKPTX:VSQKL:EPLT:EQLSN:NMVKS:SXGXH, YVPKPXX:VSQKL:EPLT:EQLSN:NMVKS:SXGXH, TVPKPXX:VSQQL:EPLT:EQLSN:NMVKS:AXGXH, AVPKAXX:VSQKL:EPLT:EQLSN:NMVKS:AXGXH, KVGKAXX:VSQKL:EPLT:EQLSN:EGMSVKS:XGXR, KASKAXX:VSQKL:EPLT:EQLSN:GMVKS:EXGXR, GSAGPXX:VSQKM:EPLT:EQLSN:GMVKS:RXGXS, AAPASXX:VSQRL:EPLT:EQLSN:DMVKS:AXGXR, STPPTXX:VSQRL:EPLT:EQLSN:DMVKS:SXGXR, HVPKPXX:VSQKL:EPLT:EQLSN:NMVKS:SXGXH, RVPSTXX:VSQKT:EPLT:EQLSN:MIVKS:XGXL, ASAAPXX:VSQAL:EPLT:EQLSN:MIVKS:XKXS, ASASPXX:VSQDL:EPLT:EQLSN:MVVKS:XKXS, KIPKAXX:VPTEL:EPLT:EQLSN:DMVVE:GXGXR, GIPEPXX:VPEKM:EPLT:EQLSN:NMTVE:SXAXR, SIPKAXX:VPTEL:EPLT:EQLSN:EMVVE:GXGXR, HVTKPTX:APTKL:EPLT:EQLSN:NMVVR:SXGXH, YVPKPXX:APTKL:EPLT:EQLSN:NMVVR:SXGXH, TVPKPXX:APTQL:EPLT:EQLSN:NMVVR:AXGXH, AVPKAXX:APTKL:EPLT:EQLSN:NMVVK:AXGXH, KVGKAXX:VPTKL:EPLT:EQLSN:EGMSVAE:XGXR, KASKAXX:VPTKL:EPLT:EQLSN:GMAVS:EXGXR, GSAGPXX:TPTKM:EPLT:EQLSN:GMVVD:RXGXS, AAPASXX:VPARL:EPLT:EQLSN:DMVVE:AXGXR, STPPTXX:VPTRL:EPLT:EQLSN:DMVVE:SXGXR, HVPKPXX:APTKL:EPLT:EQLSN:NMVVR:SXGXH, RVPSTXX:APVKT:EPLT:EQLSN:MIVEE:XGXL, ASAAPXX:VPQAL:EPLT:EQLSN:MIVRS:XKXS, NDEGLEX:VPTEE:EPLT:EQLSN:FLQHN:KXEXR, NDEGLEX:VPTGQ:EPLT:EQLSN:LEEHS:QXEXR, SSVKXQP:SRVHH:EPLT:EQLSN:RLEEH:LEXAXA, RNVQXRP:TQVQL:EPLT:EQLSN:TLEDH:LAXKXE, KIPKAXX:VPQEL:EPLT:EQLSN:DMVKS:GXGXR, GIPEPXX:VPQKM:EPLT:EQLSN:NMVKS:SXAXR, SIPKAXX:VPQEL:EPLT:EQLSN:EMVKS:GXGXR, HVTKPTX:VPQKL:EPLT:EQLSN:NMVKS:SXGXH, YVPKPXX:VPQKL:EPLT:EQLSN:NMVKS:SXGXH, TVPKPXX:VPQQL:EPLT:EQLSN:NMVKS:AXGXH, AVPKAXX:VPQKL:EPLT:EQLSN:NMVKS:AXGXH, KVGKAXX:VPQKL:EPLT:EQLSN:EGMSVKS:XGXR, KASKAXX:VPQKL:EPLT:EQLSN:GMVKS:EXGXR, GSAGPXX:VPQKM:EPLT:EQLSN:GMVKS:RXGXS, AAPASXX:VPQRL:EPLT:EQLSN:DMVKS:AXGXR, STPPTXX:VPQRL:EPLT:EQLSN:DMVKS:SXGXR, HVPKPXX:VPQKL:EPLT:EQLSN:NMVKS:SXGXH, RVPSTXX:VPQKT:EPLT:EQLSN:MIVKS:XGXL, ASAAPXX:VPQAL:EPLT:EQLSN:MIVKS:XKXS, ASASPXX:VPQDL:EPLT:EQLSN:MIVKS:XKXS, NDEGLEX:VPTGQ:SNIT:IGEMS:LEQHN:QXEXR, KIPKAXX:VPTEL:SNIT:IGEMS:DMVVE:GXGXR, GIPEPXX:VPEKM:SNIT:IGEMS:NMTVE:SXAXR, SIPKAXX:VPTEL:SNIT:IGEMS:EMVVE:GXGXR, HVTKPTX:APTKL:SNIT:IGEMS:NMVVR:SXGXH, YVPKPXX:APTKL:SNIT:IGEMS:NMVVR:SXGXH, TVPKPXX:APTQL:SNIT:IGEMS:NMVVR:AXGXH, AVPKAXX:APTKL:SNIT:IGEMS:NMVVK:AXGXH, KVGKAXX:VPTKL:SNIT:IGEMS:EGMSVAE:XGXR, KASKAXX:VPTKL:SNIT:IGEMS:GMAVS:EXGXR, GSAGPXX:TPTKM:SNIT:IGEMS:GMVVD:RXGXS, AAPASXX:VPARL:SNIT:IGEMS:DMVVE:AXGXR, STPPTXX:VPTRL:SNIT:IGEMS:DMVVE:SXGXR, HVPKPXX:APTKL:SNIT:IGEMS:NMVVR:SXGXH, RVPSTXX:APVKT:SNIT:IGEMS:MIVEE:XGXL, ASAAPXX:VPQAL:SNIT:IGEMS:MIVRS:XKXS, ASASPXX:VSQDL:SNIT:IGEMS:MIVKS:XKXS, ASASPXX:VPQDL:SNIT:IGEMS:MVVKS:XKXS, NDEGLEX:VPTGQ:SNIT:IGEMS:LEEHS:QXEXR, SSVKXQP:SRVHH:SNIT:IGEMS:RLEEH:LEXAXA, RNVQXRP:TQVQL:SNIT:IGEMS:TLEDH:LAXKXE, NDEGLEX:VPTEE:SNIT:LGEMS:FLEHS:KXEXR, KIPKAXX:VPTEL:SNIT:LGEMS:DMVVE:GXGXR, GIPEPXX:VPEKM:SNIT:LGEMS:NMTVE:SXAXR, SIPKAXX:VPTEL:SNIT:LGEMS:EMVVE:GXGXR, HVTKPTX:APTKL:SNIT:LGEMS:NMVVR:SXGXH, YVPKPXX:APTKL:SNIT:LGEMS:NMVVR:SXGXH, TVPKPXX:APTQL:SNIT:LGEMS:NMVVR:AXGXH, AVPKAXX:APTKL:SNIT:LGEMS:NMVVK:AXGXH, KVGKAXX:VPTKL:SNIT:LGEMS:EGMSVAE:XGXR, KASKAXX:VPTKL:SNIT:LGEMS:GMAVS:EXGXR, GSAGPXX:TPTKM:SNIT:LGEMS:GMVVD:RXGXS, AAPASXX:VPARL:SNIT:LGEMS:DMVVE:AXGXR, STPPTXX:VPTRL:SNIT:LGEMS:DMVVE:SXGXR, HVPKPXX:APTKL:SNIT:LGEMS:NMVVR:SXGXH, RVPSTXX:APVKT:SNIT:LGEMS:MIVEE:XGXL, ASAAPXX:VPQAL:SNIT:LGEMS:MIVRS:XKXS, ASASPXX:VSQDL:SNIT:LGEMS:MIVKS:XKXS, ASASPXX:VPQDL:SNIT:LGEMS:MVVKS:XKXS, NDEGLEX:VPTEE:SNIT:LGEMS:FLQHN:KXEXR, SSVKXQP:SRVHH:SNIT:LGEMS:RLEEH:LEXAXA, RNVQXRP:TQVQL:SNIT:LGEMS:TLEDH:LAXKXE, RNVQXRP:SRVQL:RSVK:KEVQV:TLEEH:LAXKXE, KIPKAXX:VPTEL:RSVK:KEVQV:DMVVE:GXGXR, GIPEPXX:VPEKM:RSVK:KEVQV:NMTVE:SXAXR, SIPKAXX:VPTEL:RSVK:KEVQV:EMVVE:GXGXR, HVTKPTX:APTKL:RSVK:KEVQV:NMVVR:SXGXH, YVPKPXX:APTKL:RSVK:KEVQV:NMVVR:SXGXH, TVPKPXX:APTQL:RSVK:KEVQV:NMVVR:AXGXH, AVPKAXX:APTKL:RSVK:KEVQV:NMVVK:AXGXH, KVGKAXX:VPTKL:RSVK:KEVQV:EGMSVAE:XGXR, KASKAXX:VPTKL:RSVK:KEVQV:GMAVS:EXGXR, GSAGPXX:TPTKM:RSVK:KEVQV:GMVVD:RXGXS, AAPASXX:VPARL:RSVK:KEVQV:DMVVE:AXGXR, STPPTXX:VPTRL:RSVK:KEVQV:DMVVE:SXGXR, HVPKPXX:APTKL:RSVK:KEVQV:NMVVR:SXGXH, RVPSTXX:APVKT:RSVK:KEVQV:MIVEE:XGXL, ASAAPXX:VPQAL:RSVK:KEVQV:MIVRS:XKXS, ASASPXX:VSQDL:RSVK:KEVQV:MIVKS:XKXS, ASASPXX:VPQDL:RSVK:KEVQV:MVVKS:XKXS, NDEGLEX:VPTEE:RSVK:KEVQV:FLQHN:KXEXR, NDEGLEX:VPTGQ:RSVK:KEVQV:LEEHS:QXEXR, RNVQXRP:TQVQL:RSVK:KEVQV:TLEDH:LAXKXE, SSVKXQP:TQVHH:RPVQ:KKATV:RLEDH:LEXAXA, KIPKAXX:VPTEL:RPVQ:KKATV:DMVVE:GXGXR, GIPEPXX:VPEKM:RPVQ:KKATV:NMTVE:SXAXR, SIPKAXX:VPTEL:RPVQ:KKATV:EMVVE:GXGXR, HVTKPTX:APTKL:RPVQ:KKATV:NMVVR:SXGXH, YVPKPXX:APTKL:RPVQ:KKATV:NMVVR:SXGXH, TVPKPXX:APTQL:RPVQ:KKATV:NMVVR:AXGXH, AVPKAXX:APTKL:RPVQ:KKATV:NMVVK:AXGXH, KVGKAXX:VPTKL:RPVQ:KKATV:EGMSVAE:XGXR, KASKAXX:VPTKL:RPVQ:KKATV:GMAVS:EXGXR, GSAGPXX:TPTKM:RPVQ:KKATV:GMVVD:RXGXS, AAPASXX:VPARL:RPVQ:KKATV:DMVVE:AXGXR, STPPTXX:VPTRL:RPVQ:KKATV:DMVVE:SXGXR, HVPKPXX:APTKL:RPVQ:KKATV:NMVVR:SXGXH, RVPSTXX:APVKT:RPVQ:KKATV:MIVEE:XGXL, ASAAPXX:VPQAL:RPVQ:KKATV:MIVRS:XKXS, ASASPXX:VSQDL:RPVQ:KKATV:MIVKS:XKXS, ASASPXX:VPQDL:RPVQ:KKATV:MVVKS:XKXS, NDEGLEX:VPTEE:RPVQ:KKATV:FLQHN:KXEXR, NDEGLEX:VPTGQ:RPVQ:KKATV:LEEHS:QXEXR and SSVKXQP:SRVHH:RPVQ:KKATV:RLEEH:LEXAXA.

[0370] In particular, in certain embodiments, the hexaplet PEP7:PEP5:PEP12:PEP2:PEP6:PEP8 is selected from the group consisting of GIPEPXX:VPTKM:SAIS-AA¹⁷-LYL:LKNYQ:NMVVE:SXAXR, SIPKAXX:VPTEL:SAIS-AA¹⁷-LYL:LKNYQ:EMVVE:GXGXR, HVTKPTX:VPTKL:SAIS-AA¹⁷-LYL:LKNYQ:NMVVE:SXGXH, YVPKPXX:VPTKL:SAIS-AA¹⁷-LYL:LKNYQ:NMVVE:SXGXH, TVPKPXX:VPTQL:SAIS-AA¹⁷-LYL:LKNYQ:NMVVE:AXGXH, AVPKAXX:VPTKL:SAIS-AA¹⁷-LYL:LKNYQ:NMVVE:AXGXH, KVGKAXX:VPTKL:SAIS-AA¹⁷-LYL:LKNYQ:EGMSVVE:XGXR, KASKAXX:VPTKL:SAIS-AA¹⁷-LYL:LKNYQ:GMVVE:EXGXR, GSAGPXX:VPTKM:SAIS-AA¹⁷-LYL:LKNYQ:GMVVE:RXGXS, AAPASXX:VPTRL:SAIS-AA¹⁷-LYL:LKNYQ:DMVVE:AXGXR, STPPTXX:VPTRL:SAIS-AA¹⁷-LYL:LKNYQ:DMVVE:SXGXR, HVPKPXX:VPTKL:SAIS-AA¹⁷-LYL:LKNYQ:NMVVE:SXGXH, RVPSTXX:VPTKT:SAIS-AA¹⁷-LYL:LKNYQ:MIVVE:XGXL, ASAAPXX:VPTAL:SAIS-AA¹⁷-LYL:LKNYQ:MIVVE:XKXS, ASASPXX:VPTDL:SAIS-AA¹⁷-LYL:LKNYQ:MIVVE:XKXS, ASASPXX:VPTDL:SAIS-AA¹⁷-LYL:LKNYQ:MVVVE:XKXS, NDEGLEX:VPTEE:SAIS-AA¹⁷-LYL:LKNYQ:FLVVE:KXEXR, NDEGLEX:VPTGQ:SAIS-AA¹⁷-LYL:LKNYQ:LEVVE:QXEXR, SSVKXQP:VPTHH:SAIS-AA¹⁷-LYL:LKNYQ:RLVVE:LEXAXA, RNVQXRP:VPTQL:SAIS-AA¹⁷-LYL:LKNYQ:TLVVE:LAXKXE, GIPEPXX:VPEKM:SAIS-AA¹⁷-LYL:LKNYQ:NMTVE:SXAXR, HVTKPTX:APTKL:SAIS-AA¹⁷-LYL:LKNYQ:NMVVR:SXGXH, YVPKPXX:APTKL:SAIS-AA¹⁷-LYL:LKNYQ:NMVVR:SXGXH, TVPKPXX:APTQL:SAIS-AA¹⁷-LYL:LKNYQ:NMVVR:AXGXH, AVPKAXX:APTKL:SAIS-AA¹⁷-LYL:LKNYQ:NMVVK:AXGXH, KVGKAXX:VPTKL:SAIS-AA¹⁷-LYL:LKNYQ:EG MSVAE:XGXR, KASKAXX:VPTKL:SAIS-AA¹⁷-LYL:LKNYQ:GMAVS:EXGXR, GSAGPXX:TPTKM:SAIS-AA¹⁷-LYL:LKNYQ:GMVVD:RXGXS, AAPASXX:VPARL:SAIS-AA¹⁷-LYL:LKNYQ:DMVVE:AXGXR, HVPKPXX:APTKL:SAIS-AA¹⁷-LYL:LKNYQ:NMVVR:SXGXH, RVPSTXX:APVKT:SAIS-AA¹⁷-LYL:LKNYQ:MIVEE:XGXL, ASAAPXX:VPQAL:SAIS-AA¹⁷-LYL:LKNYQ:MIVRS:XKXS, ASASPXX:VSQDL:SAIS-AA¹⁷-LYL:LKNYQ:MIVKS:XKXS, ASASPXX:VPQDL:SAIS-AA¹⁷-LYL:LKNYQ:MVVKS:XKXS, NDEGLEX:VPTEE:SAIS-AA¹⁷-LYL:LKNYQ:FLQHN:KXEXR, NDEGLEX:VPTGQ:SAIS-AA¹⁷-LYL:LKNYQ:LEEHS:QXEXR, SSVKXQP:SRVHH:SAIS-AA¹⁷-LYL:LKNYQ:RLEEH:LEXAXA, RNVQXRP:TQVQL:SAIS-AA¹⁷-LYL:LKNYQ:TLEDH:LAXKXE, KIPKAXX:VPEEL:SSLS-AA¹⁷-LFF:LKVYP:DMTVE:GXGXR, SIPKAXX:VPEEL:SSLS-AA¹⁷-LFF:LKVYP:EMTVE:GXGXR, HVTKPTX:VPEKL:SSLS-AA¹⁷-LFF:LKVYP:NMTVE:SXGXH, YVPKPXX:VPEKL:SSLS-AA¹⁷-LFF:LKVYP:NMTVE:SXGXH, TVPKPXX:VPEQL:SSLS-AA¹⁷-LFF:LKVYP:NMTVE:AXGXH, AVPKAXX:VPEKL:SSLS-AA¹⁷-LFF:LKVYP:NMTVE:AXGXH, KVGKAXX:VPEKL:SSLS-AA¹⁷-LFF:LKVYP:EGMSTVE:XGXR, KASKAXX:VPEKL:SSLS-AA¹⁷-LFF:LKVYP:GMTVE:EXGXR, GSAGPXX:VPEKM:SSLS-AA¹⁷-LFF:LKVYP:GMTVE:RXGXS, AAPASXX:VPERL:SSLS-AA¹⁷-LFF:LKVYP:DMTVE:AXGXR, STPPTXX:VPERL:SSLS-AA¹⁷-LFF:LKVYP:DMTVE:SXGXR, HVPKPXX:VPEKL:SSLS-AA¹⁷-LFF:LKVYP:NMTVE:SXGXH, RVPSTXX:VPEKT:SSLS-AA¹⁷-LFF:LKVYP:MITVE:XGXL, ASAAPXX:VPEAL:SSLS-AA¹⁷-LFF:LKVYP:MITVE:XKXS, ASASPXX:VPEDL:SSLS-AA¹⁷-LFF:LKVYP:MITVE:XKXS, ASASPXX:VPEDL:SSLS-AA¹⁷-LFF:LKVYP:MVTVE:XKXS, NDEGLEX:VPEEE:SSLS-AA¹⁷-LFF:LKVYP:FLTVE:KXEXR, NDEGLEX:VPEGQ:SSLS-AA¹⁷-LFF:LKVYP:LETVE:QXEXR, SSVKXQP:VPEHH:SSLS-AA¹⁷-LFF:LKVYP:RLTVE:LEXAXA, RNVQXRP:VPEQL:SSLS-AA¹⁷-LFF:LKVYP:TLTVE:LAXKXE, KIPKAXX:VPTEL:SSLS-AA¹⁷-LFF:LKVYP:DMVVE:GXGXR, SIPKAXX:VPTEL:SSLS-AA¹⁷-LFF:LKVYP:EMVVE:GXGXR, HVTKPTX:APTKL:SSLS-AA¹⁷-LFF:LKVYP:NMVVR:SXGXH, YVPKPXX:APTKL:SSLS-AA¹⁷-LFF:LKVYP:NMVVR:SXGXH, TVPKPXX:APTQL:SSLS-AA¹⁷-LFF:LKVYP:NMVVR:AXGXH, AVPKAXX:APTKL:SSLS-AA¹⁷-LFF:LKVYP:NMVVK:AXGXH, KVGKAXX:VPTKL:SSLS-AA¹⁷-LFF:LKVYP:EGMSVAE:XGXR, KASKAXX:VPTKL:SSLS-AA¹⁷-LFF:LKVYP:GMAVS:EXGXR, GSAGPXX:TPTKM:SSLS-AA¹⁷-LFF:LKVYP:GMVVD:RXGXS, AAPASXX:VPARL:SSLS-AA¹⁷-LFF:LKVYP:DMVVE:AXGXR, STPPTXX:VPTRL:SSLS-AA¹⁷-LFF:LKVYP:DMVVE:SXGXR, HVPKPXX:APTKL:SSLS-AA¹⁷-LFF:LKVYP:NMVVR:SXGXH, RVPSTXX:APVKT:SSLS-AA¹⁷-LFF:LKVYP:MIVEE:XGXL, ASAAPXX:VPQAL:SSLS-AA¹⁷-LFF:LKVYP:MIVRS:XKXS, ASASPXX:VSQDL:SSLS-AA¹⁷-LFF:LKVYP:MIVKS:XKXS, ASASPXX:VPQDL:SSLS-AA¹⁷-LFF:LKVYP:MVVKS:XKXS, NDEGLEX:VPTEE:SSLS-AA¹⁷-LFF:LKVYP:FLQHN:KXEXR, NDEGLEX:VPTGQ:SSLS-AA¹⁷-LFF:LKVYP:LEEHS:QXEXR, SSVKXQP:SRVHH:SSLS-AA¹⁷-LFF:LKVYP:RLEEH:LEXAXA, RNVQXRP:TQVQL:SSLS-AA¹⁷-LFF:LKVYP:TLEDH:LAXKXE, KIPKAXX:VPTEL:SAIS-AA¹⁷-LYL:LKNYQ:DMVVE:GXGXR, KIPKAXX:APTEL:NAIS-AA¹⁷-LYF:LKKYR:DMVVR:GXGXR, GIPEPXX:APTKM:NAIS-AA¹⁷-LYF:LKKYR:NMVVR:SXAXR, SIPKAXX:APTEL:NAIS-AA¹⁷-LYF:LKKYR:EMVVR:GXGXR, YVPKPXX:APTKL:NAIS-AA¹⁷-LYF:LKKYR:NMVVR:SXGXH, TVPKPXX:APTQL:NAIS-AA¹⁷-LYF:LKKYR:NMVVR:AXGXH, AVPKAXX:APTKL:NAIS-AA¹⁷-LYF:LKKYR:NMVVR:AXGXH, KVGKAXX:APTKL:NAIS-AA¹⁷-LYF:LKKYR:EGMSVVR:XGXR, KASKAXX:APTKL:NAIS-AA¹⁷-LYF:LKKYR:GMVVR:EXGXR, GSAGPXX:APTKM:NAIS-AA¹⁷-LYF:LKKYR:GMVVR:RXGXS, AAPASXX:APTRL:NAIS-AA¹⁷-LYF:LKKYR:DMVVR:AXGXR, STPPTXX:APTRL:NAIS-AA¹⁷-LYF:LKKYR:DMVVR:SXGXR, HVPKPXX:APTKL:NAIS-AA¹⁷-LYF:LKKYR:NMVVR:SXGXH, RVPSTXX:APTKT:NAIS-AA¹⁷-LYF:LKKYR:MIVVR:XGXL, ASAAPXX:APTAL:NAIS-AA¹⁷-LYF:LKKYR:MIVVR:XKXS, ASASPXX:APTDL:NAIS-AA¹⁷-LYF:LKKYR:MIVVR:XKXS, ASASPXX:APTDL:NAIS-AA¹⁷-LYF:LKKYR:MVVVR:XKXS, NDEGLEX:APTEE:NAIS-AA¹⁷-LYF:LKKYR:FLVVR:KXEXR, NDEGLEX:APTGQ:NAIS-AA¹⁷-LYF:LKKYR:LEVVR:QXEXR, SSVKXQP:APTHH:NAIS-AA¹⁷-LYF:LKKYR:RLVVR:LEXAXA, RNVQXRP:APTQL:NAIS-AA¹⁷-LYF:LKKYR:TLVVR:LAXKXE, KIPKAXX:VPTEL:NAIS-AA¹⁷-LYF:LKKYR:DMVVE:GXGXR, GIPEPXX:VPEKM:NAIS-AA¹⁷-LYF:LKKYR:NMTVE:SXAXR, SIPKAXX:VPTEL:NAIS-AA¹⁷-LYF:LKKYR:EMVVE:GXGXR, AVPKAXX:APTKL:NAIS-AA¹⁷-LYF:LKKYR:NMVVK:AXGXH, KVGKAXX:VPTKL:NAIS-AA¹⁷-LYF:LKKYR:EGMSVAE:XGXR, KASKAXX:VPTKL:NAIS-AA¹⁷-LYF:LKKYR:GMAVS:EXGXR, GSAGPXX:TPTKM:NAIS-AA¹⁷-LYF:LKKYR:GMVVD:RXGXS, AAPASXX:VPARL:NAIS-AA¹⁷-LYF:LKKYR:DMVVE:AXGXR, STPPTXX:VPTRL:NAIS-AA¹⁷-LYF:LKKYR:DMVVE:SXGXR, RVPSTXX:APVKT:NAIS-AA¹⁷-LYF:LKKYR:MIVEE:XGXL, ASAAPXX:VPQAL:NAIS-AA¹⁷-LYF:LKKYR:MIVRS:XKXS, ASASPXX:VSQDL:NAIS-AA¹⁷-LYF:LKKYR:MIVKS:XKXS, ASASPXX:VPQDL:NAIS-AA¹⁷-LYF:LKKYR:MVVKS:XKXS, NDEGLEX:VPTEE:NAIS-AA¹⁷-LYF:LKKYR:FLQHN:KXEXR, NDEGLEX:VPTGQ:NAIS-AA¹⁷-LYF:LKKYR:LEEHS:QXEXR, SSVKXQP:SRVHH:NAIS-AA¹⁷-LYF:LKKYR:RLEEH:LEXAXA, RNVQXRP:TQVQL:NAIS-AA¹⁷-LYF:LKKYR:TLEDH:LAXKXE, HVTKPTX:APTKL:NAIS-AA¹⁷-LYF:LKKYR:NMVVR:SXGXH, KIPKAXX:APTEL:SATS-AA¹⁷-LYY:LRKHR:DMVVK:GXGXR, GIPEPXX:APTKM:SATS-AA¹⁷-LYY:LRKHR:NMVVK:SXAXR, SIPKAXX:APTEL:SATS-AA¹⁷-LYY:LRKHR:EMVVK:GXGXR, HVTKPTX:APTKL:SATS-AA¹⁷-LYY:LRKHR:NMVVK:SXGXH, YVPKPXX:APTKL:SATS-AA¹⁷-LYY:LRKHR:NMVVK:SXGXH, TVPKPXX:APTQL:SATS-AA¹⁷-LYY:LRKHR:NMVVK:AXGXH, KVGKAXX:APTKL:SATS-AA¹⁷-LYY:LRKHR:EGMSVVK:XGXR, KASKAXX:APTKL:SATS-AA¹⁷-LYY:LRKHR:GMVVK:EXGXR, GSAGPXX:APTKM:SATS-AA¹⁷-LYY:LRKHR:GMVVK:RXGXS, AAPASXX:APTRL:SATS-AA¹⁷-LYY:LRKHR:DMVVK:AXGXR, STPPTXX:APTRL:SATS-AA¹⁷-LYY:LRKHR:DMVVK:SXGXR, HVPKPXX:APTKL:SATS-AA¹⁷-LYY:LRKHR:NMVVK:SXGXH, RVPSTXX:APTKT:SATS-AA¹⁷-LYY:LRKHR:MIVVK:XGXL, ASAAPXX:APTAL:SATS-AA¹⁷-LYY:LRKHR:MIVVK:XKXS, ASASPXX:APTDL:SATS-AA¹⁷-LYY:LRKHR:MIVVK:XKXS, ASASPXX:APTDL:SATS-AA¹⁷-LYY:LRKHR:MVVVK:XKXS, NDEGLEX:APTEE:SATS-AA¹⁷-LYY:LRKHR:FLVVK:KXEXR, NDEGLEX:APTGQ:SATS-AA¹⁷-LYY:LRKHR:LEVVK:QXEXR, SSVKXQP:APTHH:SATS-AA¹⁷-LYY:LRKHR:RLVVK:LEXAXA, RNVQXRP:APTQL:SATS-AA¹⁷-LYY:LRKHR:TLVVK:LAXKXE, KIPKAXX:VPTEL:SATS-AA¹⁷-LYY:LRKHR:DMVVE:GXGXR, GIPEPXX:VPEKM:SATS-AA¹⁷-LYY:LRKHR:NMTVE:SXAXR, SIPKAXX:VPTEL:SATS-AA¹⁷-LYY:LRKHR:EMVVE:GXGXR, HVTKPTX:APTKL:SATS-AA¹⁷-LYY:LRKHR:NMVVR:SXGXH, YVPKPXX:APTKL:SATS-AA¹⁷-LYY:LRKHR:NMVVR:SXGXH, TVPKPXX:APTQL:SATS-AA¹⁷-LYY:LRKHR:NMVVR:AXGXH, KVGKAXX:VPTKL:SATS-AA¹⁷-LYY:LRKHR:EGMSVAE:XGXR, KASKAXX:VPTKL:SATS-AA¹⁷-LYY:LRKHR:GMAVS:EXGXR, GSAGPXX:TPTKM:SATS-AA¹⁷-LYY:LRKHR:GMVVD:RXGXS, AAPASXX:VPARL:SATS-AA¹⁷-LYY:LRKHR:DMVVE:AXGXR, STPPTXX:VPTRL:SATS-AA¹⁷-LYY:LRKHR:DMVVE:SXGXR, HVPKPXX:APTKL:SATS-AA¹⁷-LYY:LRKHR:NMVVR:SXGXH, RVPSTXX:APVKT:SATS-AA¹⁷-LYY:LRKHR:MIVEE:XGXL, ASAAPXX:VPQAL:SATS-AA¹⁷-LYY:LRKHR:MIVRS:XKXS, ASASPXX:VSQDL:SATS-AA¹⁷-LYY:LRKHR:MIVKS:XKXS, ASASPXX:VPQDL:SATS-AA¹⁷-LYY:LRKHR:MVVKS:XKXS, NDEGLEX:VPTEE:SATS-AA¹⁷-LYY:LRKHR:FLQHN:KXEXR, NDEGLEX:VPTGQ:SATS-AA¹⁷-LYY:LRKHR:LEEHS:QXEXR, SSVKXQP:SRVHH:SATS-AA¹⁷-LYY:LRKHR:RLEEH:LEXAXA, RNVQXRP:TQVQL:SATS-AA¹⁷-LYY:LRKHR:TLEDH:LAXKXE, KIPKAXX:VPTEL:SPIS-AA¹⁷-LYK:LKYHY:DMVAE:GXGXR, GIPEPXX:VPTKM:SPIS-AA¹⁷-LYK:LKYHY:NMVAE:SXAXR, SIPKAXX:VPTEL:SPIS-AA¹⁷-LYK:LKYHY:EMVAE:GXGXR, HVTKPTX:VPTKL:SPIS-AA¹⁷-LYK:LKYHY:NMVAE:SXGXH, YVPKPXX:VPTKL:SPIS-AA¹⁷-LYK:LKYHY:NMVAE:SXGXH, TVPKPXX:VPTQL:SPIS-AA¹⁷-LYK:LKYHY:NMVAE:AXGXH, AVPKAXX:VPTKL:SPIS-AA¹⁷-LYK:LKYHY:NMVAE:AXGXH, KASKAXX:VPTKL:SPIS-AA¹⁷-LYK:LKYHY:GMVAE:EXGXR, GSAGPXX:VPTKM:SPIS-AA¹⁷-LYK:LKYHY:GMVAE:RXGXS, AAPASXX:VPTRL:SPIS-AA¹⁷-LYK:LKYHY:DMVAE:AXGXR, STPPTXX:VPTRL:SPIS-AA¹⁷-LYK:LKYHY:DMVAE:SXGXR, HVPKPXX:VPTKL:SPIS-AA¹⁷-LYK:LKYHY:NMVAE:SXGXH, RVPSTXX:VPTKT:SPIS-AA¹⁷-LYK:LKYHY:MIVAE:XGXL, ASAAPXX:VPTAL:SPIS-AA¹⁷-LYK:LKYHY:MIVAE:XKXS, ASASPXX:VPTDL:SPIS-AA¹⁷-LYK:LKYHY:MIVAE:XKXS, ASASPXX:VPTDL:SPIS-AA¹⁷-LYK:LKYHY:MVVAE:XKXS, NDEGLEX:VPTEE:SPIS-AA¹⁷-LYK:LKYHY:FLVAE:KXEXR, NDEGLEX:VPTGQ:SPIS-AA¹⁷-LYK:LKYHY:LEVAE:QXEXR, SSVKXQP:VPTHH:SPIS-AA¹⁷-LYK:LKYHY:RLVAE:LEXAXA, RNVQXRP:VPTQL:SPIS-AA¹⁷-LYK:LKYHY:TLVAE:LAXKXE, KIPKAXX:VPTEL:SPIS-AA¹⁷-LYK:LKYHY:DMVVE:GXGXR, GIPEPXX:VPEKM:SPIS-AA¹⁷-LYK:LKYHY:NMTVE:SXAXR, SIPKAXX:VPTEL:SPIS-AA¹⁷-LYK:LKYHY:EMVVE:GXGXR, HVTKPTX:APTKL:SPIS-AA¹⁷-LYK:LKYHY:NMVVR:SXGXH, YVPKPXX:APTKL:SPIS-AA¹⁷-LYK:LKYHY:NMVVR:SXGXH, TVPKPXX:APTQL:SPIS-AA¹⁷-LYK:LKYHY:NMVVR:AXGXH, AVPKAXX:APTKL:SPIS-AA¹⁷-LYK:LKYHY:NMVVK:AXGXH, KASKAXX:VPTKL:SPIS-AA¹⁷-LYK:LKYHY:GMAVS:EXGXR, GSAGPXX:TPTKM:SPIS-AA¹⁷-LYK:LKYHY:GMVVD:RXGXS, AAPASXX:VPARL:SPIS-AA¹⁷-LYK:LKYHY:DMVVE:AXGXR, STPPTXX:VPTRL:SPIS-AA¹⁷-LYK:LKYHY:DMVVE:SXGXR, HVPKPXX:APTKL:SPIS-AA¹⁷-LYK:LKYHY:NMVVR:SXGXH, RVPSTXX:APVKT:SPIS-AA¹⁷-LYK:LKYHY:MIVEE:XGXL, ASAAPXX:VPQAL:SPIS-AA¹⁷-LYK:LKYHY:MIVRS:XKXS, ASASPXX:VSQDL:SPIS-AA¹⁷-LYK:LKYHY:MIVKS:XKXS, ASASPXX:VPQDL:SPIS-AA¹⁷-LYK:LKYHY:MVVKS:XKXS, NDEGLEX:VPTEE:SPIS-AA¹⁷-LYK:LKYHY:FLQHN:KXEXR, NDEGLEX:VPTGQ:SPIS-AA¹⁷-LYK:LKYHY:LEEHS:QXEXR, SSVKXQP:SRVHH:SPIS-AA¹⁷-LYK:LKYHY:RLEEH:LEXAXA, RNVQXRP:TQVQL:SPIS-AA¹⁷-LYK:LKYHY:TLEDH:LAXKXE, KIPKAXX:VPTEL:EPIS-AA¹⁷-LYL:KFKYE:DMAVS:GXGXR, GIPEPXX:VPTKM:EPIS-AA¹⁷-LYL:KFKYE:NMAVS:SXAXR, SIPKAXX:VPTEL:EPIS-AA¹⁷-LYL:KFKYE:EMAVS:GXGXR, HVTKPTX:VPTKL:EPIS-AA¹⁷-LYL:KFKYE:NMAVS:SXGXH, YVPKPXX:VPTKL:EPIS-AA¹⁷-LYL:KFKYE:NMAVS:SXGXH, TVPKPXX:VPTQL:EPIS-AA¹⁷-LYL:KFKYE:NMAVS:AXGXH, AVPKAXX:VPTKL:EPIS-AA¹⁷-LYL:KFKYE:NMAVS:AXGXH, KVGKAXX:VPTKL:EPIS-AA¹⁷-LYL:KFKYE:EGMSAVS:XGXR, GSAGPXX:VPTKM:EPIS-AA¹⁷-LYL:KFKYE:GMAVS:RXGXS, AAPASXX:VPTRL:EPIS-AA¹⁷-LYL:KFKYE:DMAVS:AXGXR, STPPTXX:VPTRL:EPIS-AA¹⁷-LYL:KFKYE:DMAVS:SXGXR, HVPKPXX:VPTKL:EPIS-AA¹⁷-LYL:KFKYE:NMAVS:SXGXH, RVPSTXX:VPTKT:EPIS-AA¹⁷-LYL:KFKYE:MIAVS:XGXL, ASAAPXX:VPTAL:EPIS-AA¹⁷-LYL:KFKYE:MIAVS:XKXS, ASASPXX:VPTDL:EPIS-AA¹⁷-LYL:KFKYE:MIAVS:XKXS, ASASPXX:VPTDL:EPIS-AA¹⁷-LYL:KFKYE:MVAVS:XKXS, NDEGLEX:VPTEE:EPIS-AA¹⁷-LYL:KFKYE:FLAVS:KXEXR, NDEGLEX:VPTGQ:EPIS-AA¹⁷-LYL:KFKYE:LEAVS:QXEXR, SSVKXQP:VPTHH:EPIS-AA¹⁷-LYL:KFKYE:RLAVS:LEXAXA, RNVQXRP:VPTQL:EPIS-AA¹⁷-LYL:KFKYE:TLAVS:LAXKXE, KIPKAXX:VPTEL:EPIS-AA¹⁷-LYL:KFKYE:DMVVE:GXGXR, GIPEPXX:VPEKM:EPIS-AA¹⁷-LYL:KFKYE:NMTVE:SXAXR, SIPKAXX:VPTEL:EPIS-AA¹⁷-LYL:KFKYE:EMVVE:GXGXR, HVTKPTX:APTKL:EPIS-AA¹⁷-LYL:KFKYE:NMVVR:SXGXH, YVPKPXX:APTKL:EPIS-AA¹⁷-LYL:KFKYE:NMVVR:SXGXH, TVPKPXX:APTQL:EPIS-AA¹⁷-LYL:KFKYE:NMVVR:AXGXH, AVPKAXX:APTKL:EPIS-AA¹⁷-LYL:KFKYE:NMVVK:AXGXH, KVGKAXX:VPTKL:EPIS-AA¹⁷-LYL:KFKYE:EGMSVAE:XGXR, GSAGPXX:TPTKM:EPIS-AA¹⁷-LYL:KFKYE:GMVVD:RXGXS, AAPASXX:VPARL:EPIS-AA¹⁷-LYL:KFKYE:DMVVE:AXGXR, STPPTXX:VPTRL:EPIS-AA¹⁷-LYL:KFKYE:DMVVE:SXGXR, HVPKPXX:APTKL:EPIS-AA¹⁷-LYL:KFKYE:NMVVR:SXGXH, RVPSTXX:APVKT:EPIS-AA¹⁷-LYL:KFKYE:MIVEE:XGXL, ASAAPXX:VPQAL:EPIS-AA¹⁷-LYL:KFKYE:MIVRS:XKXS, ASASPXX:VSQDL:EPIS-AA¹⁷-LYL:KFKYE:MIVKS:XKXS, ASASPXX:VPQDL:EPIS-AA¹⁷-LYL:KFKYE:MVVKS:XKXS, NDEGLEX:VPTEE:EPIS-AA¹⁷-LYL:KFKYE:FLQHN:KXEXR, NDEGLEX:VPTGQ:EPIS-AA¹⁷-LYL:KFKYE:LEEHS:QXEXR, SSVKXQP:SRVHH:EPIS-AA¹⁷-LYL:KFKYE:RLEEH:LEXAXA, RNVQXRP:TQVQL:EPIS-AA¹⁷-LYL:KFKYE:TLEDH:LAXKXE, KIPKAXX:TPTEL:SPIN-AA¹⁷-LYF:YGKIP:DMVVD:GXGXR, GIPEPXX:TPTKM:SPIN-AA¹⁷-LYF:YGKIP:NMVVD:SXAXR, SIPKAXX:TPTEL:SPIN-AA¹⁷-LYF:YGKIP:EMVVD:GXGXR, HVTKPTX:TPTKL:SPIN-AA¹⁷-LYF:YGKIP:NMVVD:SXGXH, YVPKPXX:TPTKL:SPIN-AA¹⁷-LYF:YGKIP:NMVVD:SXGXH, TVPKPXX:TPTQL:SPIN-AA¹⁷-LYF:YGKIP:NMVVD:AXGXH, AVPKAXX:TPTKL:SPIN-AA¹⁷-LYF:YGKIP:NMVVD:AXGXH, KVGKAXX:TPTKL:SPIN-AA¹⁷-LYF:YGKIP:EGMSVVD:XGXR, KASKAXX:TPTKL:SPIN-AA¹⁷-LYF:YGKIP:GMVVD:EXGXR, AAPASXX:TPTRL:SPIN-AA¹⁷-LYF:YGKIP:DMVVD:AXGXR, STPPTXX:TPTRL:SPIN-AA¹⁷-LYF:YGKIP:DMVVD:SXGXR, HVPKPXX:TPTKL:SPIN-AA¹⁷-LYF:YGKIP:NMVVD:SXGXH, RVPSTXX:TPTKT:SPIN-AA¹⁷-LYF:YGKIP:MIVVD:XGXL, ASAAPXX:TPTAL:SPIN-AA¹⁷-LYF:YGKIP:MIVVD:XKXS, ASASPXX:TPTDL:SPIN-AA¹⁷-LYF:YGKIP:MIVVD:XKXS, ASASPXX:TPTDL:SPIN-AA¹⁷-LYF:YGKIP:MVVVD:XKXS, NDEGLEX:TPTEE:SPIN-AA¹⁷-LYF:YGKIP:FLVVD:KXEXR, NDEGLEX:TPTGQ:SPIN-AA¹⁷-LYF:YGKIP:LEVVD:QXEXR, SSVKXQP:TPTHH:SPIN-AA¹⁷-LYF:YGKIP:RLVVD:LEXAXA, RNVQXRP:TPTQL:SPIN-AA¹⁷-LYF:YGKIP:TLVVD:LAXKXE, KIPKAXX:VPTEL:SPIN-AA¹⁷-LYF:YGKIP:DMVVE:GXGXR, GIPEPXX:VPEKM:SPIN-AA¹⁷-LYF:YGKIP:NMTVE:SXAXR, SIPKAXX:VPTEL:SPIN-AA¹⁷-LYF:YGKIP:EMVVE:GXGXR, HVTKPTX:APTKL:SPIN-AA¹⁷-LYF:YGKIP:NMVVR:SXGXH, YVPKPXX:APTKL:SPIN-AA¹⁷-LYF:YGKIP:NMVVR:SXGXH, TVPKPXX:APTQL:SPIN-AA¹⁷-LYF:YGKIP:NMVVR:AXGXH, AVPKAXX:APTKL:SPIN-AA¹⁷-LYF:YGKIP:NMVVK:AXGXH, KVGKAXX:VPTKL:SPIN-AA¹⁷-LYF:YGKIP:EGMSVAE:XGXR, KASKAXX:VPTKL:SPIN-AA¹⁷-LYF:YGKIP:GMAVS:EXGXR, AAPASXX:VPARL:SPIN-AA¹⁷-LYF:YGKIP:DMVVE:AXGXR, STPPTXX:VPTRL:SPIN-AA¹⁷-LYF:YGKIP:DMVVE:SXGXR, HVPKPXX:APTKL:SPIN-AA¹⁷-LYF:YGKIP:NMVVR:SXGXH, RVPSTXX:APVKT:SPIN-AA¹⁷-LYF:YGKIP:MIVEE:XGXL, ASAAPXX:VPQAL:SPIN-AA¹⁷-LYF:YGKIP:MIVRS:XKXS, ASASPXX:VSQDL:SPIN-AA¹⁷-LYF:YGKIP:MIVKS:XKXS, ASASPXX:VPQDL:SPIN-AA¹⁷-LYF:YGKIP:MVVKS:XKXS, NDEGLEX:VPTEE:SPIN-AA¹⁷-LYF:YGKIP:FLQHN:KXEXR, NDEGLEX:VPTGQ:SPIN-AA¹⁷-LYF:YGKIP:LEEHS:QXEXR, SSVKXQP:SRVHH:SPIN-AA¹⁷-LYF:YGKIP:RLEEH:LEXAXA, RNVQXRP:TQVQL:SPIN-AA¹⁷-LYF:YGKIP:TLEDH:LAXKXE, KIPKAXX:VPAEL:SPIS-AA¹⁷-LYI:YKQYE:DMVVE:GXGXR, GIPEPXX:VPAKM:SPIS-AA¹⁷-LYI:YKQYE:NMVVE:SXAXR, SIPKAXX:VPAEL:SPIS-AA¹⁷-LYI:YKQYE:EMVVE:GXGXR, HVTKPTX:VPAKL:SPIS-AA¹⁷-LYI:YKQYE:NMVVE:SXGXH, YVPKPXX:VPAKL:SPIS-AA¹⁷-LYI:YKQYE:NMVVE:SXGXH, TVPKPXX:VPAQL:SPIS-AA¹⁷-LYI:YKQYE:NMVVE:AXGXH, AVPKAXX:VPAKL:SPIS-AA¹⁷-LYI:YKQYE:NMVVE:AXGXH, KVGKAXX:VPAKL:SPIS-AA¹⁷-LYI:YKQYE:EGMSVVE:XGXR, KASKAXX:VPAKL:SPIS-AA¹⁷-LYI:YKQYE:GMVVE:EXGXR, GSAGPXX:VPAKM:SPIS-AA¹⁷-LYI:YKQYE:GMVVE:RXGXS, STPPTXX:VPARL:SPIS-AA¹⁷-LYI:YKQYE:DMVVE:SXGXR, HVPKPXX:VPAKL:SPIS-AA¹⁷-LYI:YKQYE:NMVVE:SXGXH, RVPSTXX:VPAKT:SPIS-AA¹⁷-LYI:YKQYE:MIVVE:XGXL, ASAAPXX:VPAAL:SPIS-AA¹⁷-LYI:YKQYE:MIVVE:XKXS, ASASPXX:VPADL:SPIS-AA¹⁷-LYI:YKQYE:MIVVE:XKXS, ASASPXX:VPADL:SPIS-AA¹⁷-LYI:YKQYE:MVVVE:XKXS, NDEGLEX:VPAEE:SPIS-AA¹⁷-LYI:YKQYE:FLVVE:KXEXR, NDEGLEX:VPAGQ:SPIS-AA¹⁷-LYI:YKQYE:LEVVE:QXEXR, SSVKXQP:VPAHH:SPIS-AA¹⁷-LYI:YKQYE:RLVVE:LEXAXA, RNVQXRP:VPAQL:SPIS-AA¹⁷-LYI:YKQYE:TLVVE:LAXKXE, KIPKAXX:VPTEL:SPIS-AA¹⁷-LYI:YKQYE:DMVVE:GXGXR, GIPEPXX:VPEKM:SPIS-AA¹⁷-LYI:YKQYE:NMTVE:SXAXR, SIPKAXX:VPTEL:SPIS-AA¹⁷-LYI:YKQYE:EMVVE:GXGXR, HVTKPTX:APTKL:SPIS-AA¹⁷-LYI:YKQYE:NMVVR:SXGXH, YVPKPXX:APTKL:SPIS-AA¹⁷-LYI:YKQYE:NMVVR:SXGXH, TVPKPXX:APTQL:SPIS-AA¹⁷-LYI:YKQYE:NMVVR:AXGXH, AVPKAXX:APTKL:SPIS-AA¹⁷-LYI:YKQYE:NMVVK:AXGXH, KVGKAXX:VPTKL:SPIS-AA¹⁷-LYI:YKQYE:EGMSVAE:XGXR, KASKAXX:VPTKL:SPIS-AA¹⁷-LYI:YKQYE:GMAVS:EXGXR, GSAGPXX:TPTKM:SPIS-AA¹⁷-LYI:YKQYE:GMVVD:RXGXS, STPPTXX:VPTRL:SPIS-AA¹⁷-LYI:YKQYE:DMVVE:SXGXR, HVPKPXX:APTKL:SPIS-AA¹⁷-LYI:YKQYE:NMVVR:SXGXH, RVPSTXX:APVKT:SPIS-AA¹⁷-LYI:YKQYE:MIVEE:XGXL, ASAAPXX:VPQAL:SPIS-AA¹⁷-LYI:YKQYE:MIVRS:XKXS, ASASPXX:VSQDL:SPIS-AA¹⁷-LYI:YKQYE:MIVKS:XKXS, ASASPXX:VPQDL:SPIS-AA¹⁷-LYI:YKQYE:MVVKS:XKXS, NDEGLEX:VPTEE:SPIS-AA¹⁷-LYI:YKQYE:FLQHN:KXEXR, NDEGLEX:VPTGQ:SPIS-AA¹⁷-LYI:YKQYE:LEEHS:QXEXR, SSVKXQP:SRVHH:SPIS-AA¹⁷-LYI:YKQYE:RLEEH:LEXAXA, RNVQXRP:TQVQL:SPIS-AA¹⁷-LYI:YKQYE:TLEDH:LAXKXE, KIPKAXX:VPTEL:SPIS-AA¹⁷-LFI:YKQYE:DMVVE:GXGXR, GIPEPXX:VPTKM:SPIS-AA¹⁷-LFI:YKQYE:NMVVE:SXAXR, SIPKAXX:VPTEL:SPIS-AA¹⁷-LFI:YKQYE:EMVVE:GXGXR, HVTKPTX:VPTKL:SPIS-AA¹⁷-LFI:YKQYE:NMVVE:SXGXH, YVPKPXX:VPTKL:SPIS-AA¹⁷-LFI:YKQYE:NMVVE:SXGXH, TVPKPXX:VPTQL:SPIS-AA¹⁷-LFI:YKQYE:NMVVE:AXGXH, AVPKAXX:VPTKL:SPIS-AA¹⁷-LFI:YKQYE:NMVVE:AXGXH, KVGKAXX:VPTKL:SPIS-AA¹⁷-LFI:YKQYE:EGMSVVE:XGXR, KASKAXX:VPTKL:SPIS-AA¹⁷-LFI:YKQYE:GMVVE:EXGXR, GSAGPXX:VPTKM:SPIS-AA¹⁷-LFI:YKQYE:GMVVE:RXGXS, AAPASXX:VPTRL:SPIS-AA¹⁷-LFI:YKQYE:DMVVE:AXGXR, HVPKPXX:VPTKL:SPIS-AA¹⁷-LFI:YKQYE:NMVVE:SXGXH, RVPSTXX:VPTKT:SPIS-AA¹⁷-LFI:YKQYE:MIVVE:XGXL, ASAAPXX:VPTAL:SPIS-AA¹⁷-LFI:YKQYE:MIVVE:XKXS, ASASPXX:VPTDL:SPIS-AA¹⁷-LFI:YKQYE:MIVVE:XKXS, ASASPXX:VPTDL:SPIS-AA¹⁷-LFI:YKQYE:MVVVE:XKXS, NDEGLEX:VPTEE:SPIS-AA¹⁷-LFI:YKQYE:FLVVE:KXEXR, NDEGLEX:VPTGQ:SPIS-AA¹⁷-LFI:YKQYE:LEVVE:QXEXR, SSVKXQP:VPTHH:SPIS-AA¹⁷-LFI:YKQYE:RLVVE:LEXAXA, RNVQXRP:VPTQL:SPIS-AA¹⁷-LFI:YKQYE:TLVVE:LAXKXE, GIPEPXX:VPEKM:SPIS-AA¹⁷-LFI:YKQYE:NMTVE:SXAXR, HVTKPTX:APTKL:SPIS-AA¹⁷-LFI:YKQYE:NMVVR:SXGXH, YVPKPXX:APTKL:SPIS-AA¹⁷-LFI:YKQYE:NMVVR:SXGXH, TVPKPXX:APTQL:SPIS-AA¹⁷-LFI:YKQYE:NMVVR:AXGXH, AVPKAXX:APTKL:SPIS-AA¹⁷-LFI:YKQYE:NMVVK:AXGXH, KVGKAXX:VPTKL:SPIS-AA¹⁷-LFI:YKQYE:EGMSVAE:XGXR, KASKAXX:VPTKL:SPIS-AA¹⁷-LFI:YKQYE:GMAVS:EXGXR, GSAGPXX:TPTKM:SPIS-AA¹⁷-LFI:YKQYE:GMVVD:RXGXS, AAPASXX:VPARL:SPIS-AA¹⁷-LFI:YKQYE:DMVVE:AXGXR, HVPKPXX:APTKL:SPIS-AA¹⁷-LFI:YKQYE:NMVVR:SXGXH, RVPSTXX:APVKT:SPIS-AA¹⁷-LFI:YKQYE:MIVEE:XGXL, ASAAPXX:VPQAL:SPIS-AA¹⁷-LFI:YKQYE:MIVRS:XKXS, ASASPXX:VSQDL:SPIS-AA¹⁷-LFI:YKQYE:MIVKS:XKXS, ASASPXX:VPQDL:SPIS-AA¹⁷-LFI:YKQYE:MVVKS:XKXS, NDEGLEX:VPTEE:SPIS-AA¹⁷-LFI:YKQYE:FLQHN:KXEXR, NDEGLEX:VPTGQ:SPIS-AA¹⁷-LFI:YKQYE:LEEHS:QXEXR, SSVKXQP:SRVHH:SPIS-AA¹⁷-LFI:YKQYE:RLEEH:LEXAXA, RNVQXRP:TQVQL:SPIS-AA¹⁷-LFI:YKQYE:TLEDH:LAXKXE, KIPKAXX:APVEL:KPLS-AA¹⁷-LYV:DHHKD:DMVEE:GXGXR, GIPEPXX:APVKM:KPLS-AA¹⁷-LYV:DHHKD:NMVEE:SXAXR, SIPKAXX:APVEL:KPLS-AA¹⁷-LYV:DHHKD:EMVEE:GXGXR, HVTKPTX:APVKL:KPLS-AA¹⁷-LYV:DHHKD:NMVEE:SXGXH, YVPKPXX:APVKL:KPLS-AA¹⁷-LYV:DHHKD:NMVEE:SXGXH, TVPKPXX:APVQL:KPLS-AA¹⁷-LYV:DHHKD:NMVEE:AXGXH, AVPKAXX:APVKL:KPLS-AA¹⁷-LYV:DHHKD:NMVEE:AXGXH, KVGKAXX:APVKL:KPLS-AA¹⁷-LYV:DHHKD:EGMSVEE:XGXR, KASKAXX:APVKL:KPLS-AA¹⁷-LYV:DHHKD:GMVEE:EXGXR, GSAGPXX:APVKM:KPLS-AA¹⁷-LYV:DHHKD:GMVEE:RXGXS, AAPASXX:APVRL:KPLS-AA¹⁷-LYV:DHHKD:DMVEE:AXGXR, STPPTXX:APVRL:KPLS-AA¹⁷-LYV:DHHKD:DMVEE:SXGXR, HVPKPXX:APVKL:KPLS-AA¹⁷-LYV:DHHKD:NMVEE:SXGXH, ASAAPXX:APVAL:KPLS-AA¹⁷-LYV:DHHKD:MIVEE:XKXS, ASASPXX:APVDL:KPLS-AA¹⁷-LYV:DHHKD:MIVEE:XKXS, ASASPXX:APVDL:KPLS-AA¹⁷-LYV:DHHKD:MVVEE:XKXS, NDEGLEX:APVEE:KPLS-AA¹⁷-LYV:DHHKD:FLVEE:KXEXR, NDEGLEX:APVGQ:KPLS-AA¹⁷-LYV:DHHKD:LEVEE:QXEXR, SSVKXQP:APVHH:KPLS-AA¹⁷-LYV:DHHKD:RLVEE:LEXAXA, RNVQXRP:APVQL:KPLS-AA¹⁷-LYV:DHHKD:TLVEE:LAXKXE, KIPKAXX:VPTEL:KPLS-AA¹⁷-LYV:DHHKD:DMVVE:GXGXR, GIPEPXX:VPEKM:KPLS-AA¹⁷-LYV:DHHKD:NMTVE:SXAXR, SIPKAXX:VPTEL:KPLS-AA¹⁷-LYV:DHHKD:EMVVE:GXGXR, HVTKPTX:APTKL:KPLS-AA¹⁷-LYV:DHHKD:NMVVR:SXGXH, YVPKPXX:APTKL:KPLS-AA¹⁷-LYV:DHHKD:NMVVR:SXGXH, TVPKPXX:APTQL:KPLS-AA¹⁷-LYV:DHHKD:NMVVR:AXGXH, AVPKAXX:APTKL:KPLS-AA¹⁷-LYV:DHHKD:NMVVK:AXGXH, KVGKAXX:VPTKL:KPLS-AA¹⁷-LYV:DHHKD:EGMSVAE:XGXR, KASKAXX:VPTKL:KPLS-AA¹⁷-LYV:DHHKD:GMAVS:EXGXR, GSAGPXX:TPTKM:KPLS-AA¹⁷-LYV:DHHKD:GMVVD:RXGXS, AAPASXX:VPARL:KPLS-AA¹⁷-LYV:DHHKD:DMVVE:AXGXR, STPPTXX:VPTRL:KPLS-AA¹⁷-LYV:DHHKD:DMVVE:SXGXR, HVPKPXX:APTKL:KPLS-AA¹⁷-LYV:DHHKD:NMVVR:SXGXH, ASAAPXX:VPQAL:KPLS-AA¹⁷-LYV:DHHKD:MIVRS:XKXS, ASASPXX:VSQDL:KPLS-AA¹⁷-LYV:DHHKD:MIVKS:XKXS, ASASPXX:VPQDL:KPLS-AA¹⁷-LYV:DHHKD:MVVKS:XKXS, NDEGLEX:VPTEE:KPLS-AA¹⁷-LYV:DHHKD:FLQHN:KXEXR, NDEGLEX:VPTGQ:KPLS-AA¹⁷-LYV:DHHKD:LEEHS:QXEXR, SSVKXQP:SRVHH:KPLS-AA¹⁷-LYV:DHHKD:RLEEH:LEXAXA, RNVQXRP:TQVQL:KPLS-AA¹⁷-LYV:DHHKD:TLEDH:LAXKXE, KIPKAXX:VPQEL:EPLP-AA¹⁷-VYY:EQLSN:DMVRS:GXGXR, GIPEPXX:VPQKM:EPLP-AA¹⁷-VYY:EQLSN:NMVRS:SXAXR, SIPKAXX:VPQEL:EPLP-AA¹⁷-VYY:EQLSN:EMVRS:GXGXR, HVTKPTX:VPQKL:EPLP-AA¹⁷-VYY:EQLSN:NMVRS:SXGXH, YVPKPXX:VPQKL:EPLP-AA¹⁷-VYY:EQLSN:NMVRS:SXGXH, TVPKPXX:VPQQL:EPLP-AA¹⁷-VYY:EQLSN:NMVRS:AXGXH, AVPKAXX:VPQKL:EPLP-AA¹⁷-VYY:EQLSN:NMVRS:AXGXH, KVGKAXX:VPQKL:EPLP-AA¹⁷-VYY:EQLSN:EGMSVRS:XGXR, KASKAXX:VPQKL:EPLP-AA¹⁷-VYY:EQLSN:GMVRS:EXGXR, GSAGPXX:VPQKM:EPLP-AA¹⁷-VYY:EQLSN:GMVRS:RXGXS, AAPASXX:VPQRL:EPLP-AA¹⁷-VYY:EQLSN:DMVRS:AXGXR, STPPTXX:VPQRL:EPLP-AA¹⁷-VYY:EQLSN:DMVRS:SXGXR, HVPKPXX:VPQKL:EPLP-AA¹⁷-VYY:EQLSN:NMVRS:SXGXH, RVPSTXX:VPQKT:EPLP-AA¹⁷-VYY:EQLSN:MIVRS:XGXL, ASASPXX:VPQDL:EPLP-AA¹⁷-VYY:EQLSN:MIVRS:XKXS, ASASPXX:VPQDL:EPLP-AA¹⁷-VYY:EQLSN:MVVRS:XKXS, NDEGLEX:VPQEE:EPLP-AA¹⁷-VYY:EQLSN:FLVRS:KXEXR, NDEGLEX:VPQGQ:EPLP-AA¹⁷-VYY:EQLSN:LEVRS:QXEXR, SSVKXQP:VPQHH:EPLP-AA¹⁷-VYY:EQLSN:RLVRS:LEXAXA, RNVQXRP:VPQQL:EPLP-AA¹⁷-VYY:EQLSN:TLVRS:LAXKXE, KIPKAXX:VPTEL:EPLP-AA¹⁷-VYY:EQLSN:DMVVE:GXGXR, GIPEPXX:VPEKM:EPLP-AA¹⁷-VYY:EQLSN:NMTVE:SXAXR, SIPKAXX:VPTEL:EPLP-AA¹⁷-VYY:EQLSN:EMVVE:GXGXR, HVTKPTX:APTKL:EPLP-AA¹⁷-VYY:EQLSN:NMVVR:SXGXH, YVPKPXX:APTKL:EPLP-AA¹⁷-VYY:EQLSN:NMVVR:SXGXH, TVPKPXX:APTQL:EPLP-AA¹⁷-VYY:EQLSN:NMVVR:AXGXH, AVPKAXX:APTKL:EPLP-AA¹⁷-VYY:EQLSN:NMVVK:AXGXH, KVGKAXX:VPTKL:EPLP-AA¹⁷-VYY:EQLSN:EGMSVAE:XGXR, KASKAXX:VPTKL:EPLP-AA¹⁷-VYY:EQLSN:GMAVS:EXGXR, GSAGPXX:TPTKM:EPLP-AA¹⁷-VYY:EQLSN:GMVVD:RXGXS, AAPASXX:VPARL:EPLP-AA¹⁷-VYY:EQLSN:DMVVE:AXGXR, STPPTXX:VPTRL:EPLP-AA¹⁷-VYY:EQLSN:DMVVE:SXGXR, HVPKPXX:APTKL:EPLP-AA¹⁷-VYY:EQLSN:NMVVR:SXGXH, RVPSTXX:APVKT:EPLP-AA¹⁷-VYY:EQLSN:MIVEE:XGXL, ASASPXX:VSQDL:EPLP-AA¹⁷-VYY:EQLSN:MIVKS:XKXS, ASASPXX:VPQDL:EPLP-AA¹⁷-VYY:EQLSN:MVVKS:XKXS, NDEGLEX:VPTEE:EPLP-AA¹⁷-VYY:EQLSN:FLQHN:KXEXR, NDEGLEX:VPTGQ:EPLP-AA¹⁷-VYY:EQLSN:LEEHS:QXEXR, SSVKXQP:SRVHH:EPLP-AA¹⁷-VYY:EQLSN:RLEEH:LEXAXA, RNVQXRP:TQVQL:EPLP-AA¹⁷-VYY:EQLSN:TLEDH:LAXKXE, KIPKAXX:VSQEL:EPLT-AA¹⁷-LYY:EQLSN:DMVKS:GXGXR, GIPEPXX:VSQKM:EPLT-AA¹⁷-LYY:EQLSN:NMVKS:SXAXR, SIPKAXX:VSQEL:EPLT-AA¹⁷-LYY:EQLSN:EMVKS:GXGXR, HVTKPTX:VSQKL:EPLT-AA¹⁷-LYY:EQLSN:NMVKS:SXGXH, YVPKPXX:VSQKL:EPLT-AA¹⁷-LYY:EQLSN:NMVKS:SXGXH, TVPKPXX:VSQQL:EPLT-AA¹⁷-LYY:EQLSN:NMVKS:AXGXH, AVPKAXX:VSQKL:EPLT-AA¹⁷-LYY:EQLSN:NMVKS:AXGXH, KVGKAXX:VSQKL:EPLT-AA¹⁷-LYY:EQLSN:EGMSVKS:XGXR, KASKAXX:VSQKL:EPLT-AA¹⁷-LYY:EQLSN:GMVKS:EXGXR, GSAGPXX:VSQKM:EPLT-AA¹⁷-LYY:EQLSN:GMVKS:RXGXS, AAPASXX:VSQRL:EPLT-AA¹⁷-LYY:EQLSN:DMVKS:AXGXR, STPPTXX:VSQRL:EPLT-AA¹⁷-LYY:EQLSN:DMVKS:SXGXR, HVPKPXX:VSQKL:EPLT-AA¹⁷-LYY:EQLSN:NMVKS:SXGXH, RVPSTXX:VSQKT:EPLT-AA¹⁷-LYY:EQLSN:MIVKS:XGXL, ASAAPXX:VSQAL:EPLT-AA¹⁷-LYY:EQLSN:MIVKS:XKXS, ASASPXX:VSQDL:EPLT-AA¹⁷-LYY:EQLSN:MVVKS:XKXS, NDEGLEX:VSQEE:EPLT-AA¹⁷-LYY:EQLSN:FLVKS:KXEXR, NDEGLEX:VSQGQ:EPLT-AA¹⁷-LYY:EQLSN:LEVKS:QXEXR, SSVKXQP:VSQHH:EPLT-AA¹⁷-LYY:EQLSN:RLVKS:LEXAXA, RNVQXRP:VSQQL:EPLT-AA¹⁷-LYY:EQLSN:TLVKS:LAXKXE, KIPKAXX:VPTEL:EPLT-AA¹⁷-LYY:EQLSN:DMVVE:GXGXR, GIPEPXX:VPEKM:EPLT-AA¹⁷-LYY:EQLSN:NMTVE:SXAXR, SIPKAXX:VPTEL:EPLT-AA¹⁷-LYY:EQLSN:EMVVE:GXGXR, HVTKPTX:APTKL:EPLT-AA¹⁷-LYY:EQLSN:NMVVR:SXGXH, YVPKPXX:APTKL:EPLT-AA¹⁷-LYY:EQLSN:NMVVR:SXGXH, TVPKPXX:APTQL:EPLT-AA¹⁷-LYY:EQLSN:NMVVR:AXGXH, AVPKAXX:APTKL:EPLT-AA¹⁷-LYY:EQLSN:NMVVK:AXGXH, KVGKAXX:VPTKL:EPLT-AA¹⁷-LYY:EQLSN:EGMSVAE:XGXR, KASKAXX:VPTKL:EPLT-AA¹⁷-LYY:EQLSN:GMAVS:EXGXR, GSAGPXX:TPTKM:EPLT-AA¹⁷-LYY:EQLSN:GMVVD:RXGXS, AAPASXX:VPARL:EPLT-AA¹⁷-LYY:EQLSN:DMVVE:AXGXR, STPPTXX:VPTRL:EPLT-AA¹⁷-LYY:EQLSN:DMVVE:SXGXR, HVPKPXX:APTKL:EPLT-AA¹⁷-LYY:EQLSN:NMVVR:SXGXH, RVPSTXX:APVKT:EPLT-AA¹⁷-LYY:EQLSN:MIVEE:XGXL, ASAAPXX:VPQAL:EPLT-AA¹⁷-LYY:EQLSN:MIVRS:XKXS, ASASPXX:VPQDL:EPLT-AA¹⁷-LYY:EQLSN:MVVKS:XKXS, NDEGLEX:VPTEE:EPLT-AA¹⁷-LYY:EQLSN:FLQHN:KXEXR, NDEGLEX:VPTGQ:EPLT-AA¹⁷-LYY:EQLSN:LEEHS:QXEXR, SSVKXQP:SRVHH:EPLT-AA¹⁷-LYY:EQLSN:RLEEH:LEXAXA, RNVQXRP:TQVQL:EPLT-AA¹⁷-LYY:EQLSN:TLEDH:LAXKXE, KIPKAXX:VPQEL:EPLT-AA¹⁷-LYY:EQLSN:DMVKS:GXGXR, GIPEPXX:VPQKM:EPLT-AA¹⁷-LYY:EQLSN:NMVKS:SXAXR, SIPKAXX:VPQEL:EPLT-AA¹⁷-LYY:EQLSN:EMVKS:GXGXR, HVTKPTX:VPQKL:EPLT-AA¹⁷-LYY:EQLSN:NMVKS:SXGXH, YVPKPXX:VPQKL:EPLT-AA¹⁷-LYY:EQLSN:NMVKS:SXGXH, TVPKPXX:VPQQL:EPLT-AA¹⁷-LYY:EQLSN:NMVKS:AXGXH, AVPKAXX:VPQKL:EPLT-AA¹⁷-LYY:EQLSN:NMVKS:AXGXH, KVGKAXX:VPQKL:EPLT-AA¹⁷-LYY:EQLSN:EGMSVKS:XGXR, KASKAXX:VPQKL:EPLT-AA¹⁷-LYY:EQLSN:GMVKS:EXGXR, GSAGPXX:VPQKM:EPLT-AA¹⁷-LYY:EQLSN:GMVKS:RXGXS, AAPASXX:VPQRL:EPLT-AA¹⁷-LYY:EQLSN:DMVKS:AXGXR, STPPTXX:VPQRL:EPLT-AA¹⁷-LYY:EQLSN:DMVKS:SXGXR, HVPKPXX:VPQKL:EPLT-AA¹⁷-LYY:EQLSN:NMVKS:SXGXH, RVPSTXX:VPQKT:EPLT-AA¹⁷-LYY:EQLSN:MIVKS:XGXL, ASAAPXX:VPQAL:EPLT-AA¹⁷-LYY:EQLSN:MIVKS:XKXS, ASASPXX:VPQDL:EPLT-AA¹⁷-LYY:EQLSN:MIVKS:XKXS, NDEGLEX:VPQEE:EPLT-AA¹⁷-LYY:EQLSN:FLVKS:KXEXR, NDEGLEX:VPQGQ:EPLT-AA¹⁷-LYY:EQLSN:LEVKS:QXEXR, SSVKXQP:VPQHH:EPLT-AA¹⁷-LYY:EQLSN:RLVKS:LEXAXA, RNVQXRP:VPQQL:EPLT-AA¹⁷-LYY:EQLSN:TLVKS:LAXKXE, ASASPXX:VSQDL:EPLT-AA¹⁷-LYY:EQLSN:MIVKS:XKXS, KIPKAXX:VPTEL:SNIT-AA¹⁷-QIM:IGEMS:DMQHN:GXGXR, GIPEPXX:VPTKM:SNIT-AA¹⁷-QIM:IGEMS:NMQHN:SXAXR, SIPKAXX:VPTEL:SNIT-AA¹⁷-QIM:IGEMS:EMQHN:GXGXR, HVTKPTX:VPTKL:SNIT-AA¹⁷-QIM:IGEMS:NMQHN:SXGXH, YVPKPXX:VPTKL:SNIT-AA¹⁷-QIM:IGEMS:NMQHN:SXGXH, TVPKPXX:VPTQL:SNIT-AA¹⁷-QIM:IGEMS:NMQHN:AXGXH, AVPKAXX:VPTKL:SNIT-AA¹⁷-QIM:IGEMS:NMQHN:AXGXH, KVGKAXX:VPTKL:SNIT-AA¹⁷-QIM:IGEMS: EGMSQHN:XGXR, KASKAXX:VPTKL:SNIT-AA¹⁷-QIM:IGEMS:GMQHN:EXGXR, GSAGPXX:VPTKM:SNIT-AA¹⁷-QIM:IGEMS:GMQHN:RXGXS, AAPASXX:VPTRL:SNIT-AA¹⁷-QIM:IGEMS: DMQHN:AXGXR, STPPTXX:VPTRL:SNIT-AA¹⁷-QIM:IGEMS:DMQHN:SXGXR, HVPKPXX:VPTKL:SNIT-AA¹⁷-QIM:IGEMS:NMQHN:SXGXH, RVPSTXX:VPTKT:SNIT-AA¹⁷-QIM:IGEMS:MIQHN:XGXL, ASAAPXX:VPTAL:SNIT-AA¹⁷-QIM:IGEMS:MIQHN:XKXS, ASASPXX:VPTDL:SNIT-AA¹⁷-QIM:IGEMS:MIQHN:XKXS, ASASPXX:VPTDL:SNIT-AA¹⁷-QIM:IGEMS:MVQHN:XKXS, NDEGLEX:VPTGQ:SNIT-AA¹⁷-QIM:IGEMS:LEQHN:QXEXR, NDEGLEX:VPTEE:SNIT-AA¹⁷-QIM:IGEMS:FLQHN:KXEXR, SSVKXQP:VPTHH:SNIT-AA¹⁷-QIM:IGEMS: RLQHN:LEXAXA, RNVQXRP:VPTQL:SNIT-AA¹⁷-QIM:IGEMS:TLQHN:LAXKXE, KIPKAXX:VPTEL:SNIT-AA¹⁷-QIM:IGEMS:DMVVE:GXGXR, GIPEPXX:VPEKM:SNIT-AA¹⁷-QIM:IGEMS:NMTVE:SXAXR, SIPKAXX:VPTEL:SNIT-AA¹⁷-QIM:IGEMS:EMVVE:GXGXR, HVTKPTX:APTKL:SNIT-AA¹⁷-QIM:IGEMS:NMVVR:SXGXH, YVPKPXX:APTKL:SNIT-AA¹⁷-QIM:IGEMS:NMVVR:SXGXH, TVPKPXX:APTQL:SNIT-AA¹⁷-QIM:IGEMS:NMVVR:AXGXH, AVPKAXX:APTKL:SNIT-AA¹⁷-QIM:IGEMS:NMVVK:AXGXH, KVGKAXX:VPTKL:SNIT-AA¹⁷-QIM:IGEMS: EGMSVAE:XGXR, KASKAXX:VPTKL:SNIT-AA¹⁷-QIM:IGEMS:GMAVS:EXGXR, GSAGPXX:TPTKM:SNIT-AA¹⁷-QIM:IGEMS:GMVVD:RXGXS, AAPASXX:VPARL:SNIT-AA¹⁷-QIM:IGEMS: DMVVE:AXGXR, STPPTXX:VPTRL:SNIT-AA¹⁷-QIM:IGEMS:DMVVE:SXGXR, HVPKPXX:APTKL:SNIT-AA¹⁷-QIM:IGEMS:NMVVR:SXGXH, RVPSTXX:APVKT:SNIT-AA¹⁷-QIM:IGEMS:MIVEE:XGXL, ASAAPXX:VPQAL:SNIT-AA¹⁷-QIM:IGEMS:MIVRS:XKXS, ASASPXX:VSQDL:SNIT-AA¹⁷-QIM:IGEMS:MIVKS:XKXS, ASASPXX:VPQDL:SNIT-AA¹⁷-QIM:IGEMS:MVVKS:XKXS, NDEGLEX:VPTGQ:SNIT-AA¹⁷-QIM:IGEMS:LEEHS:QXEXR, SSVKXQP:SRVHH:SNIT-AA¹⁷-QIM:IGEMS: RLEEH:LEXAXA, RNVQXRP:TQVQL:SNIT-AA¹⁷-QIM:IGEMS:TLEDH:LAXKXE, KIPKAXX:VPTEL:SNIT-AA¹⁷-QIM:LGEMS:DMEHS:GXGXR, GIPEPXX:VPTKM:SNIT-AA¹⁷-QIM:LGEMS:NMEHS:SXAXR, SIPKAXX:VPTEL:SNIT-AA¹⁷-QIM:LGEMS: EMEHS:GXGXR, HVTKPTX:VPTKL:SNIT-AA¹⁷-QIM:LGEMS:NMEHS:SXGXH, YVPKPXX:VPTKL:SNIT-AA¹⁷-QIM:LGEMS:NMEHS:SXGXH, TVPKPXX:VPTQL:SNIT-AA¹⁷-QIM:LGEMS:NMEHS:AXGXH, AVPKAXX:VPTKL:SNIT-AA¹⁷-QIM:LGEMS:NMEHS:AXGXH, KVGKAXX:VPTKL:SNIT-AA¹⁷-QIM:LGEMS:EGMSEHS:XGXR, KASKAXX:VPTKL:SNIT-AA¹⁷-QIM:LGEMS:GMEHS:EXGXR, GSAGPXX:VPTKM:SNIT-AA¹⁷-QIM:LGEMS:GMEHS:RXGXS, AAPASXX:VPTRL:SNIT-AA¹⁷-QIM:LGEMS:DMEHS:AXGXR, STPPTXX:VPTRL:SNIT-AA¹⁷-QIM:LGEMS: DMEHS:SXGXR, HVPKPXX:VPTKL:SNIT-AA¹⁷-QIM:LGEMS:NMEHS:SXGXH, RVPSTXX:VPTKT:SNIT-AA¹⁷-QIM:LGEMS:MIEHS:XGXL, ASAAPXX:VPTAL:SNIT-AA¹⁷-QIM:LGEMS:MIEHS:XKXS, ASASPXX:VPTDL:SNIT-AA¹⁷-QIM:LGEMS:MIEHS:XKXS, ASASPXX:VPTDL:SNIT-AA¹⁷-QIM:LGEMS:MVEHS:XKXS, NDEGLEX:VPTEE:SNIT-AA¹⁷-QIM:LGEMS:FLEHS:KXEXR, SSVKXQP:VPTHH:SNIT-AA¹⁷-QIM:LGEMS:RLEHS:LEXAXA, RNVQXRP:VPTQL:SNIT-AA¹⁷-QIM:LGEMS:TLEHS:LAXKXE, KIPKAXX:VPTEL:SNIT-AA¹⁷-QIM:LGEMS:DMVVE:GXGXR, GIPEPXX:VPEKM:SNIT-AA¹⁷-QIM:LGEMS:NMTVE:SXAXR, SIPKAXX:VPTEL:SNIT-AA¹⁷-QIM:LGEMS:EMVVE:GXGXR, HVTKPTX:APTKL:SNIT-AA¹⁷-QIM:LGEMS:NMVVR:SXGXH, YVPKPXX:APTKL:SNIT-AA¹⁷-QIM:LGEMS:NMVVR:SXGXH, TVPKPXX:APTQL:SNIT-AA¹⁷-QIM:LGEMS:NMVVR:AXGXH, AVPKAXX:APTKL:SNIT-AA¹⁷-QIM:LGEMS:NMVVK:AXGXH, KVGKAXX:VPTKL:SNIT-AA¹⁷-QIM:LGEMS:EGMSVAE:XGXR, KASKAXX:VPTKL:SNIT-AA¹⁷-QIM:LGEMS:GMAVS:EXGXR, GSAGPXX:TPTKM:SNIT-AA¹⁷-QIM:LGEMS:GMVVD:RXGXS, AAPASXX:VPARL:SNIT-AA¹⁷-QIM:LGEMS:DMVVE:AXGXR, STPPTXX:VPTRL:SNIT-AA¹⁷-QIM:LGEMS:DMVVE:SXGXR, HVPKPXX:APTKL:SNIT-AA¹⁷-QIM:LGEMS:NMVVR:SXGXH, RVPSTXX:APVKT:SNIT-AA¹⁷-QIM:LGEMS:MIVEE:XGXL, ASAAPXX:VPQAL:SNIT-AA¹⁷-QIM:LGEMS:MIVRS:XKXS, ASASPXX:VSQDL:SNIT-AA¹⁷-QIM:LGEMS:MIVKS:XKXS, ASASPXX:VPQDL:SNIT-AA¹⁷-QIM:LGEMS:MVVKS:XKXS, NDEGLEX:VPTEE:SNIT-AA¹⁷-QIM:LGEMS:FLQHN:KXEXR, SSVKXQP:SRVHH:SNIT-AA¹⁷-QIM:LGEMS:RLEEH:LEXAXA, RNVQXRP:TQVQL:SNIT-AA¹⁷-QIM:LGEMS:TLEDH:LAXKXE, KIPKAXX:SRVEL:RSVK-AA¹⁷-AKV:KEVQV:DMEEH:GXGXR, GIPEPXX:SRVKM:RSVK-AA¹⁷-AKV:KEVQV:NMEEH:SXAXR, SIPKAXX:SRVEL:RSVK-AA¹⁷-AKV:KEVQV:EMEEH:GXGXR, HVTKPTX:SRVKL:RSVK-AA¹⁷-AKV:KEVQV:NMEEH:SXGXH, YVPKPXX:SRVKL:RSVK-AA¹⁷-AKV:KEVQV:NMEEH:SXGXH, TVPKPXX:SRVQL:RSVK-AA¹⁷-AKV:KEVQV:NMEEH:AXGXH, AVPKAXX:SRVKL:RSVK-AA¹⁷-AKV:KEVQV:NMEEH:AXGXH, KVGKAXX:SRVKL:RSVK-AA¹⁷-AKV:KEVQV:EGMSEEH:XGXR, KASKAXX:SRVKL:RSVK-AA¹⁷-AKV:KEVQV:GMEEH:EXGXR, GSAGPXX:SRVKM:RSVK-AA¹⁷-AKV:KEVQV:GMEEH:RXGXS, AAPASXX:SRVRL:RSVK-AA¹⁷-AKV:KEVQV:DMEEH:AXGXR, STPPTXX:SRVRL:RSVK-AA¹⁷-AKV:KEVQV:DMEEH:SXGXR, HVPKPXX:SRVKL:RSVK-AA¹⁷-AKV:KEVQV:NMEEH:SXGXH, RVPSTXX:SRVKT:RSVK-AA¹⁷-AKV:KEVQV:MIEEH:XGXL, ASAAPXX:SRVAL:RSVK-AA¹⁷-AKV:KEVQV:MIEEH:XKXS, ASASPXX:SRVDL:RSVK-AA¹⁷-AKV:KEVQV:MIEEH:XKXS, ASASPXX:SRVDL:RSVK-AA¹⁷-AKV:KEVQV:MVEEH:XKXS, NDEGLEX:SRVEE:RSVK-AA¹⁷-AKV:KEVQV:FLEEH:KXEXR, NDEGLEX:SRVGQ:RSVK-AA¹⁷-AKV:KEVQV:LEEEH:QXEXR, RNVQXRP:SRVQL:RSVK-AA¹⁷-AKV:KEVQV:TLEEH:LAXKXE, KIPKAXX:VPTEL:RSVK-AA¹⁷-AKV:KEVQV:DMVVE:GXGXR, GIPEPXX:VPEKM:RSVK-AA¹⁷-AKV:KEVQV:NMTVE:SXAXR, SIPKAXX:VPTEL:RSVK-AA¹⁷-AKV:KEVQV:EMVVE:GXGXR, HVTKPTX:APTKL:RSVK-AA¹⁷-AKV:KEVQV:NMVVR:SXGXH, YVPKPXX:APTKL:RSVK-AA¹⁷-AKV:KEVQV:NMVVR:SXGXH, TVPKPXX:APTQL:RSVK-AA¹⁷-AKV:KEVQV:NMVVR:AXGXH, AVPKAXX:APTKL:RSVK-AA¹⁷-AKV:KEVQV:NMVVK:AXGXH, KVGKAXX:VPTKL:RSVK-AA¹⁷-AKV:KEVQV:EGMSVAE:XGXR, KASKAXX:VPTKL:RSVK-AA¹⁷-AKV:KEVQV:GMAVS:EXGXR, GSAGPXX:TPTKM:RSVK-AA¹⁷-AKV:KEVQV:GMVVD:RXGXS, AAPASXX:VPARL:RSVK-AA¹⁷-AKV:KEVQV:DMVVE:AXGXR, STPPTXX:VPTRL:RSVK-AA¹⁷-AKV:KEVQV:DMVVE:SXGXR, HVPKPXX:APTKL:RSVK-AA¹⁷-AKV:KEVQV:NMVVR:SXGXH, RVPSTXX:APVKT:RSVK-AA¹⁷-AKV:KEVQV:MIVEE:XGXL, ASAAPXX:VPQAL:RSVK-AA¹⁷-AKV:KEVQV:MIVRS:XKXS, ASASPXX:VSQDL:RSVK-AA¹⁷-AKV:KEVQV:MIVKS:XKXS, ASASPXX:VPQDL:RSVK-AA¹⁷-AKV:KEVQV:MVVKS:XKXS, NDEGLEX:VPTEE:RSVK-AA¹⁷-AKV:KEVQV:FLQHN:KXEXR, NDEGLEX:VPTGQ:RSVK-AA¹⁷-AKV:KEVQV:LEEHS:QXEXR, RNVQXRP:TQVQL:RSVK-AA¹⁷-AKV:KEVQV:TLEDH:LAXKXE, KIPKAXX:TQVEL:RPVQ-AA¹⁷-RKI:KKATV:DMEDH:GXGXR, GIPEPXX:TQVKM:RPVQ-AA¹⁷-RKI:KKATV:NMEDH:SXAXR, SIPKAXX:TQVEL:RPVQ-AA¹⁷-RKI:KKATV:EMEDH:GXGXR, HVTKPTX:TQVKL:RPVQ-AA¹⁷-RKI:KKATV:NMEDH:SXGXH, YVPKPXX:TQVKL:RPVQ-AA¹⁷-RKI:KKATV:NMEDH:SXGXH, TVPKPXX:TQVQL:RPVQ-AA¹⁷-RKI:KKATV:NMEDH:AXGXH, AVPKAXX:TQVKL:RPVQ-AA¹⁷-RKI:KKATV:NMEDH:AXGXH, KVGKAXX:TQVKL:RPVQ-AA¹⁷-RKI:KKATV:EGMSEDH:XGXR, KASKAXX:TQVKL:RPVQ-AA¹⁷-RKI:KKATV:GMEDH:EXGXR, GSAGPXX:TQVKM:RPVQ-AA¹⁷-RKI:KKATV:GMEDH:RXGXS, AAPASXX:TQVRL:RPVQ-AA¹⁷-RKI:KKATV:DMEDH:AXGXR, STPPTXX:TQVRL:RPVQ-AA¹⁷-RKI:KKATV:DMEDH:SXGXR, HVPKPXX:TQVKL:RPVQ-AA¹⁷-RKI:KKATV:NMEDH:SXGXH, RVPSTXX:TQVKT:RPVQ-AA¹⁷-RKI:KKATV:MIEDH:XGXL, ASAAPXX:TQVAL:RPVQ-AA¹⁷-RKI:KKATV:MIEDH:XKXS, ASASPXX:TQVDL:RPVQ-AA¹⁷-RKI:KKATV:MIEDH:XKXS, ASASPXX:TQVDL:RPVQ-AA¹⁷-RKI:KKATV:MVEDH:XKXS, NDEGLEX:TQVEE:RPVQ-AA¹⁷-RKI:KKATV:FLEDH:KXEXR, NDEGLEX:TQVGQ:RPVQ-AA¹⁷-RKI:KKATV:LEEDH:QXEXR, SSVKXQP:TQVHH:RPVQ-AA¹⁷-RKI:KKATV:RLEDH:LEXAXA, KIPKAXX:VPTEL:RPVQ-AA¹⁷-RKI:KKATV:DMVVE:GXGXR, GIPEPXX:VPEKM:RPVQ-AA¹⁷-RKI:KKATV:NMTVE:SXAXR, SIPKAXX:VPTEL:RPVQ-AA¹⁷-RKI:KKATV:EMVVE:GXGXR, HVTKPTX:APTKL:RPVQ-AA¹⁷-RKI:KKATV:NMVVR:SXGXH, YVPKPXX:APTKL:RPVQ-AA¹⁷-RKI:KKATV:NMVVR:SXGXH, TVPKPXX:APTQL:RPVQ-AA¹⁷-RKI:KKATV:NMVVR:AXGXH, AVPKAXX:APTKL:RPVQ-AA¹⁷-RKI:KKATV:NMVVK:AXGXH, KVGKAXX:VPTKL:RPVQ-AA¹⁷-RKI:KKATV:EGMSVAE:XGXR, KASKAXX:VPTKL:RPVQ-AA¹⁷-RKI:KKATV:GMAVS:EXGXR, GSAGPXX:TPTKM:RPVQ-AA¹⁷-RKI:KKATV:GMVVD:RXGXS, AAPASXX:VPARL:RPVQ-AA¹⁷-RKI:KKATV:DMVVE:AXGXR, STPPTXX:VPTRL:RPVQ-AA¹⁷-RKI:KKATV:DMVVE:SXGXR, HVPKPXX:APTKL:RPVQ-AA¹⁷-RKI:KKATV:NMVVR:SXGXH, RVPSTXX:APVKT:RPVQ-AA¹⁷-RKI:KKATV:MIVEE:XGXL, ASAAPXX:VPQAL:RPVQ-AA¹⁷-RKI:KKATV:MIVRS:XKXS, ASASPXX:VSQDL:RPVQ-AA¹⁷-RKI:KKATV:MIVKS:XKXS, ASASPXX:VPQDL:RPVQ-AA¹⁷-RKI:KKATV:MVVKS:XKXS, NDEGLEX:VPTEE:RPVQ-AA¹⁷-RKI:KKATV:FLQHN:KXEXR, NDEGLEX:VPTGQ:RPVQ-AA¹⁷-RKI:KKATV:LEEHS:QXEXR and SSVKXQP:SRVHH:RPVQ-AA¹⁷-RKI:KKATV:RLEEH:LEXAXA; and wherein AA¹⁷ is selected from the group consisting of G, A, V, L, I, P, F, M, W, T and S (in particular is selected from the group consisting of M, I, L, V and T). More particularly, the hexaplet PEP7:PEP5:PEP12:PEP2:PEP6:PEP8 is selected from the group consisting of GIPEPXX:VPTKM:SAIS-AA¹⁷-LYL:LKNYQ:NMVVE:SXAXR, HVTKPTX:VPTKL:SAIS-AA¹⁷-LYL:LKNYQ:NMVVE:SXGXH, YVPKPXX:VPTKL:SAIS-AA¹⁷-LYL:LKNYQ:NMVVE:SXGXH, TVPKPXX:VPTQL:SAIS-AA¹⁷-LYL:LKNYQ:NMVVE:AXGXH, AVPKAXX:VPTKL:SAIS-AA¹⁷-LYL:LKNYQ:NMVVE:AXGXH, KVGKAXX:VPTKL:SAIS-AA¹⁷-LYL:LKNYQ:EGMSVVE:XGXR, KASKAXX:VPTKL:SAIS-AA¹⁷-LYL:LKNYQ:GMVVE:EXGXR, GSAGPXX:VPTKM:SAIS-AA¹⁷-LYL:LKNYQ:GMVVE:RXGXS, AAPASXX:VPTRL:SAIS-AA¹⁷-LYL:LKNYQ:DMVVE:AXGXR, STPPTXX:VPTRL:SAIS-AA¹⁷-LYL:LKNYQ:DMVVE:SXGXR, HVPKPXX:VPTKL:SAIS-AA¹⁷-LYL:LKNYQ:NMVVE:SXGXH, RVPSTXX:VPTKT:SAIS-AA¹⁷-LYL:LKNYQ:MIVVE:XGXL, ASAAPXX:VPTAL:SAIS-AA¹⁷-LYL:LKNYQ:MIVVE:XKXS, ASASPXX:VPTDL:SAIS-AA¹⁷-LYL:LKNYQ:MIVVE:XKXS, ASASPXX:VPTDL:SAIS-AA¹⁷-LYL:LKNYQ:MVVVE:XKXS, GIPEPXX:VPEKM:SAIS-AA¹⁷-LYL:LKNYQ:NMTVE:SXAXR, HVTKPTX:APTKL:SAIS-AA¹⁷-LYL:LKNYQ:NMVVR:SXGXH, YVPKPXX:APTKL:SAIS-AA¹⁷-LYL:LKNYQ:NMVVR:SXGXH, TVPKPXX:APTQL:SAIS-AA¹⁷-LYL:LKNYQ:NMVVR:AXGXH, AVPKAXX:APTKL:SAIS-AA¹⁷-LYL:LKNYQ:NMVVK:AXGXH, KVGKAXX:VPTKL:SAIS-AA¹⁷-LYL:LKNYQ:EG MSVAE:XGXR, KASKAXX:VPTKL:SAIS-AA¹⁷-LYL:LKNYQ:GMAVS: EXGXR, GSAGPXX:TPTKM:SAIS-AA¹⁷-LYL:LKNYQ:GMVVD:RXGXS, AAPASXX:VPARL:SAIS-AA¹⁷-LYL:LKNYQ:DMVVE:AXGXR, HVPKPXX:APTKL:SAIS-AA¹⁷-LYL:LKNYQ:NMVVR:SXGXH, RVPSTXX:APVKT:SAIS-AA¹⁷-LYL:LKNYQ:MIVEE:XGXL, ASAAPXX:VPQAL:SAIS-AA¹⁷-LYL:LKNYQ:MIVRS:XKXS, ASASPXX:VSQDL:SAIS-AA¹⁷-LYL:LKNYQ:MIVKS:XKXS, ASASPXX:VPQDL:SAIS-AA¹⁷-LYL:LKNYQ:MVVKS:XKXS, NDEGLEX:VPTEE:SAIS-AA¹⁷-LYL:LKNYQ:FLQHN:KXEXR, NDEGLEX:VPTGQ:SAIS-AA¹⁷-LYL:LKNYQ:LEEHS:QXEXR, SSVKXQP:SRVHH:SAIS-AA¹⁷-LYL:LKNYQ:RLEEH:LEXAXA, RNVQXRP:TQVQL:SAIS-AA¹⁷-LYL:LKNYQ:TLEDH:LAXKXE, KIPKAXX:VPEEL:SSLS-AA¹⁷-LFF:LKVYP:DMTVE:GXGXR, SIPKAXX:VPEEL:SSLS-AA¹⁷-LFF:LKVYP:EMTVE:GXGXR, HVTKPTX:VPEKL:SSLS-AA¹⁷-LFF:LKVYP:NMTVE:SXGXH, YVPKPXX:VPEKL:SSLS-AA¹⁷-LFF:LKVYP:NMTVE:SXGXH, TVPKPXX:VPEQL:SSLS-AA¹⁷-LFF:LKVYP:NMTVE:AXGXH, AVPKAXX:VPEKL:SSLS-AA¹⁷-LFF:LKVYP:NMTVE:AXGXH, KVGKAXX:VPEKL:SSLS-AA¹⁷-LFF:LKVYP:EGMSTVE:XGXR, KASKAXX:VPEKL:SSLS-AA¹⁷-LFF:LKVYP:GMTVE:EXGXR, GSAGPXX:VPEKM:SSLS-AA¹⁷-LFF:LKVYP:GMTVE:RXGXS, AAPASXX:VPERL:SSLS-AA¹⁷-LFF:LKVYP:DMTVE:AXGXR, STPPTXX:VPERL:SSLS-AA¹⁷-LFF:LKVYP:DMTVE:SXGXR, HVPKPXX:VPEKL:SSLS-AA¹⁷-LFF:LKVYP:NMTVE:SXGXH, RVPSTXX:VPEKT:SSLS-AA¹⁷-LFF:LKVYP:MITVE:XGXL, ASAAPXX:VPEAL:SSLS-AA¹⁷-LFF:LKVYP:MITVE:XKXS, ASASPXX:VPEDL:SSLS-AA¹⁷-LFF:LKVYP:MITVE:XKXS, ASASPXX:VPEDL:SSLS-AA¹⁷-LFF:LKVYP:MVTVE:XKXS, KIPKAXX:VPTEL:SSLS-AA¹⁷-LFF:LKVYP:DMVVE:GXGXR, SIPKAXX:VPTEL:SSLS-AA¹⁷-LFF:LKVYP:EMVVE:GXGXR, HVTKPTX:APTKL:SSLS-AA¹⁷-LFF:LKVYP:NMVVR:SXGXH, YVPKPXX:APTKL:SSLS-AA¹⁷-LFF:LKVYP:NMVVR:SXGXH, TVPKPXX:APTQL:SSLS-AA¹⁷-LFF:LKVYP:NMVVR:AXGXH, AVPKAXX:APTKL:SSLS-AA¹⁷-LFF:LKVYP:NMVVK:AXGXH, KVGKAXX:VPTKL:SSLS-AA¹⁷-LFF:LKVYP:EGMSVAE:XGXR, KASKAXX:VPTKL:SSLS-AA¹⁷-LFF:LKVYP:GMAVS:EXGXR, GSAGPXX:TPTKM:SSLS-AA¹⁷-LFF:LKVYP:GMVVD:RXGXS, AAPASXX:VPARL:SSLS-AA¹⁷-LFF:LKVYP:DMVVE:AXGXR, STPPTXX:VPTRL:SSLS-AA¹⁷-LFF:LKVYP:DMVVE:SXGXR, HVPKPXX:APTKL:SSLS-AA¹⁷-LFF:LKVYP:NMVVR:SXGXH, RVPSTXX:APVKT:SSLS-AA¹⁷-LFF:LKVYP:MIVEE:XGXL, ASAAPXX:VPQAL:SSLS-AA¹⁷-LFF:LKVYP:MIVRS:XKXS, ASASPXX:VSQDL:SSLS-AA¹⁷-LFF:LKVYP:MIVKS:XKXS, ASASPXX:VPQDL:SSLS-AA¹⁷-LFF:LKVYP:MVVKS:XKXS, NDEGLEX:VPTEE:SSLS-AA¹⁷-LFF:LKVYP:FLQHN:KXEXR, NDEGLEX:VPTGQ:SSLS-AA¹⁷-LFF:LKVYP:LEEHS:QXEXR, SSVKXQP:SRVHH:SSLS-AA¹⁷-LFF:LKVYP:RLEEH:LEXAXA, RNVQXRP:TQVQL:SSLS-AA¹⁷-LFF:LKVYP:TLEDH:LAXKXE, KIPKAXX:APTEL:NAIS-AA¹⁷-LYF:LKKYR:DMVVR:GXGXR, GIPEPXX:APTKM:NAIS-AA¹⁷-LYF:LKKYR:NMVVR:SXAXR, SIPKAXX:APTEL:NAIS-AA¹⁷-LYF:LKKYR:EMVVR:GXGXR, AVPKAXX:APTKL:NAIS-AA¹⁷-LYF:LKKYR:NMVVR:AXGXH, KVGKAXX:APTKL:NAIS-AA¹⁷-LYF:LKKYR:EGMSVVR:XGXR, KASKAXX:APTKL:NAIS-AA¹⁷-LYF:LKKYR:GMVVR:EXGXR, GSAGPXX:APTKM:NAIS-AA¹⁷-LYF:LKKYR:GMVVR:RXGXS, AAPASXX:APTRL:NAIS-AA¹⁷-LYF:LKKYR:DMVVR:AXGXR, STPPTXX:APTRL:NAIS-AA¹⁷-LYF:LKKYR:DMVVR:SXGXR, RVPSTXX:APTKT:NAIS-AA¹⁷-LYF:LKKYR:MIVVR:XGXL, ASAAPXX:APTAL:NAIS-AA¹⁷-LYF:LKKYR:MIVVR:XKXS, ASASPXX:APTDL:NAIS-AA¹⁷-LYF:LKKYR:MIVVR:XKXS, ASASPXX:APTDL:NAIS-AA¹⁷-LYF:LKKYR:MVVVR:XKXS, KIPKAXX:VPTEL:NAIS-AA¹⁷-LYF:LKKYR:DMVVE:GXGXR, GIPEPXX:VPEKM:NAIS-AA¹⁷-LYF:LKKYR:NMTVE:SXAXR, SIPKAXX:VPTEL:NAIS-AA¹⁷-LYF:LKKYR:EMVVE:GXGXR, AVPKAXX:APTKL:NAIS-AA¹⁷-LYF:LKKYR:NMVVK:AXGXH, KVGKAXX:VPTKL:NAIS-AA¹⁷-LYF:LKKYR:EGMSVAE:XGXR, KASKAXX:VPTKL:NAIS-AA¹⁷-LYF:LKKYR:GMAVS:EXGXR, GSAGPXX:TPTKM:NAIS-AA¹⁷-LYF:LKKYR:GMVVD:RXGXS, AAPASXX:VPARL:NAIS-AA¹⁷-LYF:LKKYR:DMVVE:AXGXR, STPPTXX:VPTRL:NAIS-AA¹⁷-LYF:LKKYR:DMVVE:SXGXR, RVPSTXX:APVKT:NAIS-AA¹⁷-LYF:LKKYR:MIVEE:XGXL, ASAAPXX:VPQAL:NAIS-AA¹⁷-LYF:LKKYR:MIVRS:XKXS, ASASPXX:VSQDL:NAIS-AA¹⁷-LYF:LKKYR:MIVKS:XKXS, ASASPXX:VPQDL:NAIS-AA¹⁷-LYF:LKKYR:MVVKS:XKXS, NDEGLEX:VPTEE:NAIS-AA¹⁷-LYF:LKKYR:FLQHN:KXEXR, NDEGLEX:VPTGQ:NAIS-AA¹⁷-LYF:LKKYR:LEEHS:QXEXR, SSVKXQP:SRVHH:NAIS-AA¹⁷-LYF:LKKYR:RLEEH:LEXAXA, RNVQXRP:TQVQL:NAIS-AA¹⁷-LYF:LKKYR:TLEDH:LAXKXE, KIPKAXX:APTEL:SATS-AA¹⁷-LYY:LRKHR:DMVVK:GXGXR, GIPEPXX:APTKM:SATS-AA¹⁷-LYY:LRKHR:NMVVK:SXAXR, SIPKAXX:APTEL:SATS-AA¹⁷-LYY:LRKHR:EMVVK:GXGXR, HVTKPTX:APTKL:SATS-AA¹⁷-LYY:LRKHR:NMVVK:SXGXH, YVPKPXX:APTKL:SATS-AA¹⁷-LYY:LRKHR:NMVVK:SXGXH, TVPKPXX:APTQL:SATS-AA¹⁷-LYY:LRKHR:NMVVK:AXGXH, KVGKAXX:APTKL:SATS-AA¹⁷-LYY:LRKHR:EGMSVVK:XGXR, KASKAXX:APTKL:SATS-AA¹⁷-LYY:LRKHR:GMVVK:EXGXR, GSAGPXX:APTKM:SATS-AA¹⁷-LYY:LRKHR:GMVVK:RXGXS, AAPASXX:APTRL:SATS-AA¹⁷-LYY:LRKHR:DMVVK:AXGXR, STPPTXX:APTRL:SATS-AA¹⁷-LYY:LRKHR:DMVVK:SXGXR, HVPKPXX:APTKL:SATS-AA¹⁷-LYY:LRKHR:NMVVK:SXGXH, RVPSTXX:APTKT:SATS-AA¹⁷-LYY:LRKHR:MIVVK:XGXL, ASAAPXX:APTAL:SATS-AA¹⁷-LYY:LRKHR:MIVVK:XKXS, ASASPXX:APTDL:SATS-AA¹⁷-LYY:LRKHR:MIVVK:XKXS, ASASPXX:APTDL:SATS-AA¹⁷-LYY:LRKHR:MVVVK:XKXS, KIPKAXX:VPTEL:SATS-AA¹⁷-LYY:LRKHR:DMVVE:GXGXR, GIPEPXX:VPEKM:SATS-AA¹⁷-LYY:LRKHR:NMTVE:SXAXR, SIPKAXX:VPTEL:SATS-AA¹⁷-LYY:LRKHR:EMVVE:GXGXR, HVTKPTX:APTKL:SATS-AA¹⁷-LYY:LRKHR:NMVVR:SXGXH, YVPKPXX:APTKL:SATS-AA¹⁷-LYY:LRKHR:NMVVR:SXGXH, TVPKPXX:APTQL:SATS-AA¹⁷-LYY:LRKHR:NMVVR:AXGXH, KVGKAXX:VPTKL:SATS-AA¹⁷-LYY:LRKHR:EGMSVAE:XGXR, KASKAXX:VPTKL:SATS-AA¹⁷-LYY:LRKHR:GMAVS:EXGXR, GSAGPXX:TPTKM:SATS-AA¹⁷-LYY:LRKHR:GMVVD:RXGXS, AAPASXX:VPARL:SATS-AA¹⁷-LYY:LRKHR:DMVVE:AXGXR, STPPTXX:VPTRL:SATS-AA¹⁷-LYY:LRKHR:DMVVE:SXGXR, HVPKPXX:APTKL:SATS-AA¹⁷-LYY:LRKHR:NMVVR:SXGXH, RVPSTXX:APVKT:SATS-AA¹⁷-LYY:LRKHR:MIVEE:XGXL, ASAAPXX:VPQAL:SATS-AA¹⁷-LYY:LRKHR:MIVRS:XKXS, ASASPXX:VSQDL:SATS-AA¹⁷-LYY:LRKHR:MIVKS:XKXS, ASASPXX:VPQDL:SATS-AA¹⁷-LYY:LRKHR:MVVKS:XKXS, NDEGLEX:VPTEE:SATS-AA¹⁷-LYY:LRKHR:FLQHN:KXEXR, NDEGLEX:VPTGQ:SATS-AA¹⁷-LYY:LRKHR:LEEHS:QXEXR, SSVKXQP:SRVHH:SATS-AA¹⁷-LYY:LRKHR:RLEEH:LEXAXA, RNVQXRP:TQVQL:SATS-AA¹⁷-LYY:LRKHR:TLEDH:LAXKXE, KIPKAXX:VPTEL:SPIS-AA¹⁷-LYK:LKYHY:DMVAE:GXGXR, GIPEPXX:VPTKM:SPIS-AA¹⁷-LYK:LKYHY:NMVAE:SXAXR, SIPKAXX:VPTEL:SPIS-AA¹⁷-LYK:LKYHY:EMVAE:GXGXR, HVTKPTX:VPTKL:SPIS-AA¹⁷-LYK:LKYHY:NMVAE:SXGXH, YVPKPXX:VPTKL:SPIS-AA¹⁷-LYK:LKYHY:NMVAE:SXGXH, TVPKPXX:VPTQL:SPIS-AA¹⁷-LYK:LKYHY:NMVAE:AXGXH, AVPKAXX:VPTKL:SPIS-AA¹⁷-LYK:LKYHY:NMVAE:AXGXH, KASKAXX:VPTKL:SPIS-AA¹⁷-LYK:LKYHY:GMVAE:EXGXR, GSAGPXX:VPTKM:SPIS-AA¹⁷-LYK:LKYHY:GMVAE:RXGXS, AAPASXX:VPTRL:SPIS-AA¹⁷-LYK:LKYHY:DMVAE:AXGXR, STPPTXX:VPTRL:SPIS-AA¹⁷-LYK:LKYHY:DMVAE:SXGXR, HVPKPXX:VPTKL:SPIS-AA¹⁷-LYK:LKYHY:NMVAE:SXGXH, RVPSTXX:VPTKT:SPIS-AA¹⁷-LYK:LKYHY:MIVAE:XGXL, ASAAPXX:VPTAL:SPIS-AA¹⁷-LYK:LKYHY:MIVAE:XKXS, ASASPXX:VPTDL:SPIS-AA¹⁷-LYK:LKYHY:MIVAE:XKXS, ASASPXX:VPTDL:SPIS-AA¹⁷-LYK:LKYHY:MVVAE:XKXS, KIPKAXX:VPTEL:SPIS-AA¹⁷-LYK:LKYHY:DMVVE:GXGXR, GIPEPXX:VPEKM:SPIS-AA¹⁷-LYK:LKYHY:NMTVE:SXAXR, SIPKAXX:VPTEL:SPIS-AA¹⁷-LYK:LKYHY:EMVVE:GXGXR, HVTKPTX:APTKL:SPIS-AA¹⁷-LYK:LKYHY:NMVVR:SXGXH, YVPKPXX:APTKL:SPIS-AA¹⁷-LYK:LKYHY:NMVVR:SXGXH, TVPKPXX:APTQL:SPIS-AA¹⁷-LYK:LKYHY:NMVVR:AXGXH, AVPKAXX:APTKL:SPIS-AA¹⁷-LYK:LKYHY:NMVVK:AXGXH, KASKAXX:VPTKL:SPIS-AA¹⁷-LYK:LKYHY:GMAVS:EXGXR, GSAGPXX:TPTKM:SPIS-AA¹⁷-LYK:LKYHY:GMVVD:RXGXS, AAPASXX:VPARL:SPIS-AA¹⁷-LYK:LKYHY:DMVVE:AXGXR, STPPTXX:VPTRL:SPIS-AA¹⁷-LYK:LKYHY:DMVVE:SXGXR, HVPKPXX:APTKL:SPIS-AA¹⁷-LYK:LKYHY:NMVVR:SXGXH, RVPSTXX:APVKT:SPIS-AA¹⁷-LYK:LKYHY:MIVEE:XGXL, ASAAPXX:VPQAL:SPIS-AA¹⁷-LYK:LKYHY:MIVRS:XKXS, ASASPXX:VSQDL:SPIS-AA¹⁷-LYK:LKYHY:MIVKS:XKXS, ASASPXX:VPQDL:SPIS-AA¹⁷-LYK:LKYHY:MVVKS:XKXS, NDEGLEX:VPTEE:SPIS-AA¹⁷-LYK:LKYHY:FLQHN:KXEXR, NDEGLEX:VPTGQ:SPIS-AA¹⁷-LYK:LKYHY:LEEHS:QXEXR, SSVKXQP:SRVHH:SPIS-AA¹⁷-LYK:LKYHY:RLEEH:LEXAXA, RNVQXRP:TQVQL:SPIS-AA¹⁷-LYK:LKYHY:TLEDH:LAXKXE, KIPKAXX:VPTEL:EPIS-AA¹⁷-LYL:KFKYE:DMAVS:GXGXR, GIPEPXX:VPTKM:EPIS-AA¹⁷-LYL:KFKYE:NMAVS:SXAXR, SIPKAXX:VPTEL:EPIS-AA¹⁷-LYL:KFKYE:EMAVS:GXGXR, HVTKPTX:VPTKL:EPIS-AA¹⁷-LYL:KFKYE:NMAVS:SXGXH, YVPKPXX:VPTKL:EPIS-AA¹⁷-LYL:KFKYE:NMAVS:SXGXH, TVPKPXX:VPTQL:EPIS-AA¹⁷-LYL:KFKYE:NMAVS:AXGXH, AVPKAXX:VPTKL:EPIS-AA¹⁷-LYL:KFKYE:NMAVS:AXGXH, KVGKAXX:VPTKL:EPIS-AA¹⁷-LYL:KFKYE:EGMSAVS:XGXR, GSAGPXX:VPTKM:EPIS-AA¹⁷-LYL:KFKYE:GMAVS:RXGXS, AAPASXX:VPTRL:EPIS-AA¹⁷-LYL:KFKYE:DMAVS:AXGXR, STPPTXX:VPTRL:EPIS-AA¹⁷-LYL:KFKYE:DMAVS:SXGXR, HVPKPXX:VPTKL:EPIS-AA¹⁷-LYL:KFKYE:NMAVS:SXGXH, RVPSTXX:VPTKT:EPIS-AA¹⁷-LYL:KFKYE:MIAVS:XGXL, ASAAPXX:VPTAL:EPIS-AA¹⁷-LYL:KFKYE:MIAVS:XKXS, ASASPXX:VPTDL:EPIS-AA¹⁷-LYL:KFKYE:MIAVS:XKXS, ASASPXX:VPTDL:EPIS-AA¹⁷-LYL:KFKYE:MVAVS:XKXS, KIPKAXX:VPTEL:EPIS-AA¹⁷-LYL:KFKYE:DMVVE:GXGXR, GIPEPXX:VPEKM:EPIS-AA¹⁷-LYL:KFKYE:NMTVE:SXAXR, SIPKAXX:VPTEL:EPIS-AA¹⁷-LYL:KFKYE:EMVVE:GXGXR, HVTKPTX:APTKL:EPIS-AA¹⁷-LYL:KFKYE:NMVVR:SXGXH, YVPKPXX:APTKL:EPIS-AA¹⁷-LYL:KFKYE:NMVVR:SXGXH, TVPKPXX:APTQL:EPIS-AA¹⁷-LYL:KFKYE:NMVVR:AXGXH, AVPKAXX:APTKL:EPIS-AA¹⁷-LYL:KFKYE:NMVVK:AXGXH, KVGKAXX:VPTKL:EPIS-AA¹⁷-LYL:KFKYE:EGMSVAE:XGXR, GSAGPXX:TPTKM:EPIS-AA¹⁷-LYL:KFKYE:GMVVD:RXGXS, AAPASXX:VPARL:EPIS-AA¹⁷-LYL:KFKYE:DMVVE:AXGXR, STPPTXX:VPTRL:EPIS-AA¹⁷-LYL:KFKYE:DMVVE:SXGXR, HVPKPXX:APTKL:EPIS-AA¹⁷-LYL:KFKYE:NMVVR:SXGXH, RVPSTXX:APVKT:EPIS-AA¹⁷-LYL:KFKYE:MIVEE:XGXL, ASAAPXX:VPQAL:EPIS-AA¹⁷-LYL:KFKYE:MIVRS:XKXS, ASASPXX:VSQDL:EPIS-AA¹⁷-LYL:KFKYE:MIVKS:XKXS, ASASPXX:VPQDL:EPIS-AA¹⁷-LYL:KFKYE:MVVKS:XKXS, NDEGLEX:VPTEE:EPIS-AA¹⁷-LYL:KFKYE:FLQHN:KXEXR, NDEGLEX:VPTGQ:EPIS-AA¹⁷-LYL:KFKYE:LEEHS:QXEXR, SSVKXQP:SRVHH:EPIS-AA¹⁷-LYL:KFKYE:RLEEH:LEXAXA, RNVQXRP:TQVQL:EPIS-AA¹⁷-LYL:KFKYE:TLEDH:LAXKXE, KIPKAXX:TPTEL:SPIN-AA¹⁷-LYF:YGKIP:DMVVD:GXGXR, GIPEPXX:TPTKM:SPIN-AA¹⁷-LYF:YGKIP:NMVVD:SXAXR, SIPKAXX:TPTEL:SPIN-AA¹⁷-LYF:YGKIP:EMVVD:GXGXR, HVTKPTX:TPTKL:SPIN-AA¹⁷-LYF:YGKIP:NMVVD:SXGXH, YVPKPXX:TPTKL:SPIN-AA¹⁷-LYF:YGKIP:NMVVD:SXGXH, TVPKPXX:TPTQL:SPIN-AA¹⁷-LYF:YGKIP:NMVVD:AXGXH, AVPKAXX:TPTKL:SPIN-AA¹⁷-LYF:YGKIP:NMVVD:AXGXH, KVGKAXX:TPTKL:SPIN-AA¹⁷-LYF:YGKIP:EGMSVVD:XGXR, KASKAXX:TPTKL:SPIN-AA¹⁷-LYF:YGKIP:GMVVD:EXGXR, AAPASXX:TPTRL:SPIN-AA¹⁷-LYF:YGKIP:DMVVD:AXGXR, STPPTXX:TPTRL:SPIN-AA¹⁷-LYF:YGKIP:DMVVD:SXGXR, HVPKPXX:TPTKL:SPIN-AA¹⁷-LYF:YGKIP:NMVVD:SXGXH, RVPSTXX:TPTKT:SPIN-AA¹⁷-LYF:YGKIP:MIVVD:XGXL, ASAAPXX:TPTAL:SPIN-AA¹⁷-LYF:YGKIP:MIVVD:XKXS, ASASPXX:TPTDL:SPIN-AA¹⁷-LYF:YGKIP:MIVVD:XKXS, ASASPXX:TPTDL:SPIN-AA¹⁷-LYF:YGKIP:MVVVD:XKXS, KIPKAXX:VPTEL:SPIN-AA¹⁷-LYF:YGKIP:DMVVE:GXGXR, GIPEPXX:VPEKM:SPIN-AA¹⁷-LYF:YGKIP:NMTVE:SXAXR, SIPKAXX:VPTEL:SPIN-AA¹⁷-LYF:YGKIP:EMVVE:GXGXR, HVTKPTX:APTKL:SPIN-AA¹⁷-LYF:YGKIP:NMVVR:SXGXH, YVPKPXX:APTKL:SPIN-AA¹⁷-LYF:YGKIP:NMVVR:SXGXH, TVPKPXX:APTQL:SPIN-AA¹⁷-LYF:YGKIP:NMVVR:AXGXH, AVPKAXX:APTKL:SPIN-AA¹⁷-LYF:YGKIP:NMVVK:AXGXH, KVGKAXX:VPTKL:SPIN-AA¹⁷-LYF:YGKIP:EGMSVAE:XGXR, KASKAXX:VPTKL:SPIN-AA¹⁷-LYF:YGKIP:GMAVS:EXGXR, AAPASXX:VPARL:SPIN-AA¹⁷-LYF:YGKIP:DMVVE:AXGXR, STPPTXX:VPTRL:SPIN-AA¹⁷-LYF:YGKIP:DMVVE:SXGXR, HVPKPXX:APTKL:SPIN-AA¹⁷-LYF:YGKIP:NMVVR:SXGXH, RVPSTXX:APVKT:SPIN-AA¹⁷-LYF:YGKIP:MIVEE:XGXL, ASAAPXX:VPQAL:SPIN-AA¹⁷-LYF:YGKIP:MIVRS:XKXS, ASASPXX:VSQDL:SPIN-AA¹⁷-LYF:YGKIP:MIVKS:XKXS, ASASPXX:VPQDL:SPIN-AA¹⁷-LYF:YGKIP:MVVKS:XKXS, NDEGLEX:VPTEE:SPIN-AA¹⁷-LYF:YGKIP:FLQHN:KXEXR, NDEGLEX:VPTGQ:SPIN-AA¹⁷-LYF:YGKIP:LEEHS:QXEXR, SSVKXQP:SRVHH:SPIN-AA¹⁷-LYF:YGKIP:RLEEH:LEXAXA, RNVQXRP:TQVQL:SPIN-AA¹⁷-LYF:YGKIP:TLEDH:LAXKXE, KIPKAXX:VPAEL:SPIS-AA¹⁷-LYI:YKQYE:DMVVE:GXGXR, GIPEPXX:VPAKM:SPIS-AA¹⁷-LYI:YKQYE:NMVVE:SXAXR, SIPKAXX:VPAEL:SPIS-AA¹⁷-LYI:YKQYE:EMVVE:GXGXR, HVTKPTX:VPAKL:SPIS-AA¹⁷-LYI:YKQYE:NMVVE:SXGXH, YVPKPXX:VPAKL:SPIS-AA¹⁷-LYI:YKQYE:NMVVE:SXGXH, TVPKPXX:VPAQL:SPIS-AA¹⁷-LYI:YKQYE:NMVVE:AXGXH, AVPKAXX:VPAKL:SPIS-AA¹⁷-LYI:YKQYE:NMVVE:AXGXH, KVGKAXX:VPAKL:SPIS-AA¹⁷-LYI:YKQYE:EGMSVVE:XGXR, KASKAXX:VPAKL:SPIS-AA¹⁷-LYI:YKQYE:GMVVE:EXGXR, GSAGPXX:VPAKM:SPIS-AA¹⁷-LYI:YKQYE:GMVVE:RXGXS, STPPTXX:VPARL:SPIS-AA¹⁷-LYI:YKQYE:DMVVE:SXGXR, HVPKPXX:VPAKL:SPIS-AA¹⁷-LYI:YKQYE:NMVVE:SXGXH, RVPSTXX:VPAKT:SPIS-AA¹⁷-LYI:YKQYE:MIVVE:XGXL, ASAAPXX:VPAAL:SPIS-AA¹⁷-LYI:YKQYE:MIVVE:XKXS, ASASPXX:VPADL:SPIS-AA¹⁷-LYI:YKQYE:MIVVE:XKXS, ASASPXX:VPADL:SPIS-AA¹⁷-LYI:YKQYE:MVVVE:XKXS, KIPKAXX:VPTEL:SPIS-AA¹⁷-LYI:YKQYE:DMVVE:GXGXR, GIPEPXX:VPEKM:SPIS-AA¹⁷-LYI:YKQYE:NMTVE:SXAXR, SIPKAXX:VPTEL:SPIS-AA¹⁷-LYI:YKQYE:EMVVE:GXGXR, HVTKPTX:APTKL:SPIS-AA¹⁷-LYI:YKQYE:NMVVR:SXGXH, YVPKPXX:APTKL:SPIS-AA¹⁷-LYI:YKQYE:NMVVR:SXGXH, TVPKPXX:APTQL:SPIS-AA¹⁷-LYI:YKQYE:NMVVR:AXGXH, AVPKAXX:APTKL:SPIS-AA¹⁷-LYI:YKQYE:NMVVK:AXGXH, KVGKAXX:VPTKL:SPIS-AA¹⁷-LYI:YKQYE:EGMSVAE:XGXR, KASKAXX:VPTKL:SPIS-AA¹⁷-LYI:YKQYE:GMAVS:EXGXR, GSAGPXX:TPTKM:SPIS-AA¹⁷-LYI:YKQYE:GMVVD:RXGXS, STPPTXX:VPTRL:SPIS-AA¹⁷-LYI:YKQYE:DMVVE:SXGXR, HVPKPXX:APTKL:SPIS-AA¹⁷-LYI:YKQYE:NMVVR:SXGXH, RVPSTXX:APVKT:SPIS-AA¹⁷-LYI:YKQYE:MIVEE:XGXL, ASAAPXX:VPQAL:SPIS-AA¹⁷-LYI:YKQYE:MIVRS:XKXS, ASASPXX:VSQDL:SPIS-AA¹⁷-LYI:YKQYE:MIVKS:XKXS, ASASPXX:VPQDL:SPIS-AA¹⁷-LYI:YKQYE:MVVKS:XKXS, NDEGLEX:VPTEE:SPIS-AA¹⁷-LYI:YKQYE:FLQHN:KXEXR, NDEGLEX:VPTGQ:SPIS-AA¹⁷-LYI:YKQYE:LEEHS:QXEXR, SSVKXQP:SRVHH:SPIS-AA¹⁷-LYI:YKQYE:RLEEH:LEXAXA, RNVQXRP:TQVQL:SPIS-AA¹⁷-LYI:YKQYE:TLEDH:LAXKXE, KIPKAXX:VPTEL:SPIS-AA¹⁷-LFI:YKQYE:DMVVE:GXGXR, GIPEPXX:VPTKM:SPIS-AA¹⁷-LFI:YKQYE:NMVVE:SXAXR, SIPKAXX:VPTEL:SPIS-AA¹⁷-LFI:YKQYE:EMVVE:GXGXR, HVTKPTX:VPTKL:SPIS-AA¹⁷-LFI:YKQYE:NMVVE:SXGXH, YVPKPXX:VPTKL:SPIS-AA¹⁷-LFI:YKQYE:NMVVE:SXGXH, TVPKPXX:VPTQL:SPIS-AA¹⁷-LFI:YKQYE:NMVVE:AXGXH, AVPKAXX:VPTKL:SPIS-AA¹⁷-LFI:YKQYE:NMVVE:AXGXH, KVGKAXX:VPTKL:SPIS-AA¹⁷-LFI:YKQYE:EGMSVVE:XGXR, KASKAXX:VPTKL:SPIS-AA¹⁷-LFI:YKQYE:GMVVE:EXGXR, GSAGPXX:VPTKM:SPIS-AA¹⁷-LFI:YKQYE:GMVVE:RXGXS, AAPASXX:VPTRL:SPIS-AA¹⁷-LFI:YKQYE:DMVVE:AXGXR, HVPKPXX:VPTKL:SPIS-AA¹⁷-LFI:YKQYE:NMVVE:SXGXH, RVPSTXX:VPTKT:SPIS-AA¹⁷-LFI:YKQYE:MIVVE:XGXL, ASAAPXX:VPTAL:SPIS-AA¹⁷-LFI:YKQYE:MIVVE:XKXS, ASASPXX:VPTDL:SPIS-AA¹⁷-LFI:YKQYE:MIVVE:XKXS, ASASPXX:VPTDL:SPIS-AA¹⁷-LFI:YKQYE:MVVVE:XKXS, GIPEPXX:VPEKM:SPIS-AA¹⁷-LFI:YKQYE:NMTVE:SXAXR, HVTKPTX:APTKL:SPIS-AA¹⁷-LFI:YKQYE:NMVVR:SXGXH, YVPKPXX:APTKL:SPIS-AA¹⁷-LFI:YKQYE:NMVVR:SXGXH, TVPKPXX:APTQL:SPIS-AA¹⁷-LFI:YKQYE:NMVVR:AXGXH, AVPKAXX:APTKL:SPIS-AA¹⁷-LFI:YKQYE:NMVVK:AXGXH, KVGKAXX:VPTKL:SPIS-AA¹⁷-LFI:YKQYE:EGMSVAE:XGXR, KASKAXX:VPTKL:SPIS-AA¹⁷-LFI:YKQYE:GMAVS:EXGXR, GSAGPXX:TPTKM:SPIS-AA¹⁷-LFI:YKQYE:GMVVD:RXGXS, AAPASXX:VPARL:SPIS-AA¹⁷-LFI:YKQYE:DMVVE:AXGXR, HVPKPXX:APTKL:SPIS-AA¹⁷-LFI:YKQYE:NMVVR:SXGXH, RVPSTXX:APVKT:SPIS-AA¹⁷-LFI:YKQYE:MIVEE:XGXL, ASAAPXX:VPQAL:SPIS-AA¹⁷-LFI:YKQYE:MIVRS:XKXS, ASASPXX:VSQDL:SPIS-AA¹⁷-LFI:YKQYE:MIVKS:XKXS, ASASPXX:VPQDL:SPIS-AA¹⁷-LFI:YKQYE:MVVKS:XKXS, NDEGLEX:VPTEE:SPIS-AA¹⁷-LFI:YKQYE:FLQHN:KXEXR, NDEGLEX:VPTGQ:SPIS-AA¹⁷-LFI:YKQYE:LEEHS:QXEXR, SSVKXQP:SRVHH:SPIS-AA¹⁷-LFI:YKQYE:RLEEH:LEXAXA, RNVQXRP:TQVQL:SPIS-AA¹⁷-LFI:YKQYE:TLEDH:LAXKXE, KIPKAXX:APVEL:KPLS-AA¹⁷-LYV:DHHKD:DMVEE:GXGXR, GIPEPXX:APVKM:KPLS-AA¹⁷-LYV:DHHKD:NMVEE:SXAXR, SIPKAXX:APVEL:KPLS-AA¹⁷-LYV:DHHKD:EMVEE:GXGXR, HVTKPTX:APVKL:KPLS-AA¹⁷-LYV:DHHKD:NMVEE:SXGXH, YVPKPXX:APVKL:KPLS-AA¹⁷-LYV:DHHKD:NMVEE:SXGXH, TVPKPXX:APVQL:KPLS-AA¹⁷-LYV:DHHKD:NMVEE:AXGXH, AVPKAXX:APVKL:KPLS-AA¹⁷-LYV:DHHKD:NMVEE:AXGXH, KVGKAXX:APVKL:KPLS-AA¹⁷-LYV:DHHKD:EGMSVEE:XGXR, KASKAXX:APVKL:KPLS-AA¹⁷-LYV:DHHKD:GMVEE:EXGXR, GSAGPXX:APVKM:KPLS-AA¹⁷-LYV:DHHKD:GMVEE:RXGXS, AAPASXX:APVRL:KPLS-AA¹⁷-LYV:DHHKD:DMVEE:AXGXR, STPPTXX:APVRL:KPLS-AA¹⁷-LYV:DHHKD:DMVEE:SXGXR, HVPKPXX:APVKL:KPLS-AA¹⁷-LYV:DHHKD:NMVEE:SXGXH, ASAAPXX:APVAL:KPLS-AA¹⁷-LYV:DHHKD:MIVEE:XKXS, ASASPXX:APVDL:KPLS-AA¹⁷-LYV:DHHKD:MIVEE:XKXS, ASASPXX:APVDL:KPLS-AA¹⁷-LYV:DHHKD:MVVEE:XKXS, KIPKAXX:VPTEL:KPLS-AA¹⁷-LYV:DHHKD:DMVVE:GXGXR, GIPEPXX:VPEKM:KPLS-AA¹⁷-LYV:DHHKD:NMTVE:SXAXR, SIPKAXX:VPTEL:KPLS-AA¹⁷-LYV:DHHKD:EMVVE:GXGXR, HVTKPTX:APTKL:KPLS-AA¹⁷-LYV:DHHKD:NMVVR:SXGXH, YVPKPXX:APTKL:KPLS-AA¹⁷-LYV:DHHKD:NMVVR:SXGXH, TVPKPXX:APTQL:KPLS-AA¹⁷-LYV:DHHKD:NMVVR:AXGXH, AVPKAXX:APTKL:KPLS-AA¹⁷-LYV:DHHKD:NMVVK:AXGXH, KVGKAXX:VPTKL:KPLS-AA¹⁷-LYV:DHHKD:EGMSVAE:XGXR, KASKAXX:VPTKL:KPLS-AA¹⁷-LYV:DHHKD:GMAVS:EXGXR, GSAGPXX:TPTKM:KPLS-AA¹⁷-LYV:DHHKD:GMVVD:RXGXS, AAPASXX:VPARL:KPLS-AA¹⁷-LYV:DHHKD:DMVVE:AXGXR, STPPTXX:VPTRL:KPLS-AA¹⁷-LYV:DHHKD:DMVVE:SXGXR, HVPKPXX:APTKL:KPLS-AA¹⁷-LYV:DHHKD:NMVVR:SXGXH, ASAAPXX:VPQAL:KPLS-AA¹⁷-LYV:DHHKD:MIVRS:XKXS, ASASPXX:VSQDL:KPLS-AA¹⁷-LYV:DHHKD:MIVKS:XKXS, ASASPXX:VPQDL:KPLS-AA¹⁷-LYV:DHHKD:MVVKS:XKXS, NDEGLEX:VPTEE:KPLS-AA¹⁷-LYV:DHHKD:FLQHN:KXEXR, NDEGLEX:VPTGQ:KPLS-AA¹⁷-LYV:DHHKD:LEEHS:QXEXR, SSVKXQP:SRVHH:KPLS-AA¹⁷-LYV:DHHKD:RLEEH:LEXAXA, RNVQXRP:TQVQL:KPLS-AA¹⁷-LYV:DHHKD:TLEDH:LAXKXE, KIPKAXX:VPQEL:EPLP-AA¹⁷-VYY:EQLSN:DMVRS:GXGXR, GIPEPXX:VPQKM:EPLP-AA¹⁷-VYY:EQLSN:NMVRS:SXAXR, SIPKAXX:VPQEL:EPLP-AA¹⁷-VYY:EQLSN:EMVRS:GXGXR, HVTKPTX:VPQKL:EPLP-AA¹⁷-VYY:EQLSN:NMVRS:SXGXH, YVPKPXX:VPQKL:EPLP-AA¹⁷-VYY:EQLSN:NMVRS:SXGXH, TVPKPXX:VPQQL:EPLP-AA¹⁷-VYY:EQLSN:NMVRS:AXGXH, AVPKAXX:VPQKL:EPLP-AA¹⁷-VYY:EQLSN:NMVRS:AXGXH, KVGKAXX:VPQKL:EPLP-AA¹⁷-VYY:EQLSN:EGMSVRS:XGXR, KASKAXX:VPQKL:EPLP-AA¹⁷-VYY:EQLSN:GMVRS:EXGXR, GSAGPXX:VPQKM:EPLP-AA¹⁷-VYY:EQLSN:GMVRS:RXGXS, AAPASXX:VPQRL:EPLP-AA¹⁷-VYY:EQLSN:DMVRS:AXGXR, STPPTXX:VPQRL:EPLP-AA¹⁷-VYY:EQLSN:DMVRS:SXGXR, HVPKPXX:VPQKL:EPLP-AA¹⁷-VYY:EQLSN:NMVRS:SXGXH, RVPSTXX:VPQKT:EPLP-AA¹⁷-VYY:EQLSN:MIVRS:XGXL, ASASPXX:VPQDL:EPLP-AA¹⁷-VYY:EQLSN:MIVRS:XKXS, ASASPXX:VPQDL:EPLP-AA¹⁷-VYY:EQLSN:MVVRS:XKXS, KIPKAXX:VPTEL:EPLP-AA¹⁷-VYY:EQLSN:DMVVE:GXGXR, GIPEPXX:VPEKM:EPLP-AA¹⁷-VYY:EQLSN:NMTVE:SXAXR, SIPKAXX:VPTEL:EPLP-AA¹⁷-VYY:EQLSN:EMVVE:GXGXR, HVTKPTX:APTKL:EPLP-AA¹⁷-VYY:EQLSN:NMVVR:SXGXH, YVPKPXX:APTKL:EPLP-AA¹⁷-VYY:EQLSN:NMVVR:SXGXH, TVPKPXX:APTQL:EPLP-AA¹⁷-VYY:EQLSN:NMVVR:AXGXH, AVPKAXX:APTKL:EPLP-AA¹⁷-VYY:EQLSN:NMVVK:AXGXH, KVGKAXX:VPTKL:EPLP-AA¹⁷-VYY:EQLSN:EGMSVAE:XGXR, KASKAXX:VPTKL:EPLP-AA¹⁷-VYY:EQLSN:GMAVS:EXGXR, GSAGPXX:TPTKM:EPLP-AA¹⁷-VYY:EQLSN:GMVVD:RXGXS, AAPASXX:VPARL:EPLP-AA¹⁷-VYY:EQLSN:DMVVE:AXGXR, STPPTXX:VPTRL:EPLP-AA¹⁷-VYY:EQLSN:DMVVE:SXGXR, HVPKPXX:APTKL:EPLP-AA¹⁷-VYY:EQLSN:NMVVR:SXGXH, RVPSTXX:APVKT:EPLP-AA¹⁷-VYY:EQLSN:MIVEE:XGXL, ASASPXX:VSQDL:EPLP-AA¹⁷-VYY:EQLSN:MIVKS:XKXS, ASASPXX:VPQDL:EPLP-AA¹⁷-VYY:EQLSN:MVVKS:XKXS, NDEGLEX:VPTEE:EPLP-AA¹⁷-VYY:EQLSN:FLQHN:KXEXR, NDEGLEX:VPTGQ:EPLP-AA¹⁷-VYY:EQLSN:LEEHS:QXEXR, SSVKXQP:SRVHH:EPLP-AA¹⁷-VYY:EQLSN:RLEEH:LEXAXA, RNVQXRP:TQVQL:EPLP-AA¹⁷-VYY:EQLSN:TLEDH:LAXKXE, KIPKAXX:VSQEL:EPLT-AA¹⁷-LYY:EQLSN:DMVKS:GXGXR, GIPEPXX:VSQKM:EPLT-AA¹⁷-LYY:EQLSN:NMVKS:SXAXR, SIPKAXX:VSQEL:EPLT-AA¹⁷-LYY:EQLSN:EMVKS:GXGXR, HVTKPTX:VSQKL:EPLT-AA¹⁷-LYY:EQLSN:NMVKS:SXGXH, YVPKPXX:VSQKL:EPLT-AA¹⁷-LYY:EQLSN:NMVKS:SXGXH, TVPKPXX:VSQQL:EPLT-AA¹⁷-LYY:EQLSN:NMVKS:AXGXH, AVPKAXX:VSQKL:EPLT-AA¹⁷-LYY:EQLSN:NMVKS:AXGXH, KVGKAXX:VSQKL:EPLT-AA¹⁷-LYY:EQLSN:EGMSVKS:XGXR, KASKAXX:VSQKL:EPLT-AA¹⁷-LYY:EQLSN:GMVKS:EXGXR, GSAGPXX:VSQKM:EPLT-AA¹⁷-LYY:EQLSN:GMVKS:RXGXS, AAPASXX:VSQRL:EPLT-AA¹⁷-LYY:EQLSN:DMVKS:AXGXR, STPPTXX:VSQRL:EPLT-AA¹⁷-LYY:EQLSN:DMVKS:SXGXR, HVPKPXX:VSQKL:EPLT-AA¹⁷-LYY:EQLSN:NMVKS:SXGXH, RVPSTXX:VSQKT:EPLT-AA¹⁷-LYY:EQLSN:MIVKS:XGXL, ASAAPXX:VSQAL:EPLT-AA¹⁷-LYY:EQLSN:MIVKS:XKXS, ASASPXX:VSQDL:EPLT-AA¹⁷-LYY:EQLSN:MVVKS:XKXS, KIPKAXX:VPTEL:EPLT-AA¹⁷-LYY:EQLSN:DMVVE:GXGXR, GIPEPXX:VPEKM:EPLT-AA¹⁷-LYY:EQLSN:NMTVE:SXAXR, SIPKAXX:VPTEL:EPLT-AA¹⁷-LYY:EQLSN:EMVVE:GXGXR, HVTKPTX:APTKL:EPLT-AA¹⁷-LYY:EQLSN:NMVVR:SXGXH, YVPKPXX:APTKL:EPLT-AA¹⁷-LYY:EQLSN:NMVVR:SXGXH, TVPKPXX:APTQL:EPLT-AA¹⁷-LYY:EQLSN:NMVVR:AXGXH, AVPKAXX:APTKL:EPLT-AA¹⁷-LYY:EQLSN:NMVVK:AXGXH, KVGKAXX:VPTKL:EPLT-AA¹⁷-LYY:EQLSN:EGMSVAE:XGXR, KASKAXX:VPTKL:EPLT-AA¹⁷-LYY:EQLSN:GMAVS:EXGXR, GSAGPXX:TPTKM:EPLT-AA¹⁷-LYY:EQLSN:GMVVD:RXGXS, AAPASXX:VPARL:EPLT-AA¹⁷-LYY:EQLSN:DMVVE:AXGXR, STPPTXX:VPTRL:EPLT-AA¹⁷-LYY:EQLSN:DMVVE:SXGXR, HVPKPXX:APTKL:EPLT-AA¹⁷-LYY:EQLSN:NMVVR:SXGXH, RVPSTXX:APVKT:EPLT-AA¹⁷-LYY:EQLSN:MIVEE:XGXL, ASAAPXX:VPQAL:EPLT-AA¹⁷-LYY:EQLSN:MIVRS:XKXS, NDEGLEX:VPTEE:EPLT-AA¹⁷-LYY:EQLSN:FLQHN:KXEXR, NDEGLEX:VPTGQ:EPLT-AA¹⁷-LYY:EQLSN:LEEHS:QXEXR, SSVKXQP:SRVHH:EPLT-AA¹⁷-LYY:EQLSN:RLEEH:LEXAXA, RNVQXRP:TQVQL:EPLT-AA¹⁷-LYY:EQLSN:TLEDH:LAXKXE, KIPKAXX:VPQEL:EPLT-AA¹⁷-LYY:EQLSN:DMVKS:GXGXR, GIPEPXX:VPQKM:EPLT-AA¹⁷-LYY:EQLSN:NMVKS:SXAXR, SIPKAXX:VPQEL:EPLT-AA¹⁷-LYY:EQLSN:EMVKS:GXGXR, HVTKPTX:VPQKL:EPLT-AA¹⁷-LYY:EQLSN:NMVKS:SXGXH, YVPKPXX:VPQKL:EPLT-AA¹⁷-LYY:EQLSN:NMVKS:SXGXH, TVPKPXX:VPQQL:EPLT-AA¹⁷-LYY:EQLSN:NMVKS:AXGXH, AVPKAXX:VPQKL:EPLT-AA¹⁷-LYY:EQLSN:NMVKS:AXGXH, KVGKAXX:VPQKL:EPLT-AA¹⁷-LYY:EQLSN:EGMSVKS:XGXR, KASKAXX:VPQKL:EPLT-AA¹⁷-LYY:EQLSN:GMVKS:EXGXR, GSAGPXX:VPQKM:EPLT-AA¹⁷-LYY:EQLSN:GMVKS:RXGXS, AAPASXX:VPQRL:EPLT-AA¹⁷-LYY:EQLSN:DMVKS:AXGXR, STPPTXX:VPQRL:EPLT-AA¹⁷-LYY:EQLSN:DMVKS:SXGXR, HVPKPXX:VPQKL:EPLT-AA¹⁷-LYY:EQLSN:NMVKS:SXGXH, RVPSTXX:VPQKT:EPLT-AA¹⁷-LYY:EQLSN:MIVKS:XGXL, ASAAPXX:VPQAL:EPLT-AA¹⁷-LYY:EQLSN:MIVKS:XKXS, ASASPXX:VPQDL:EPLT-AA¹⁷-LYY:EQLSN:MIVKS:XKXS, NDEGLEX:VPTGQ:SNIT-AA¹⁷-QIM:IGEMS:LEQHN:QXEXR, KIPKAXX:VPTEL:SNIT-AA¹⁷-QIM:IGEMS:DMVVE:GXGXR, GIPEPXX:VPEKM:SNIT-AA¹⁷-QIM:IGEMS:NMTVE:SXAXR, SIPKAXX:VPTEL:SNIT-AA¹⁷-QIM:IGEMS:EMVVE:GXGXR, HVTKPTX:APTKL:SNIT-AA¹⁷-QIM:IGEMS:NMVVR:SXGXH, YVPKPXX:APTKL:SNIT-AA¹⁷-QIM:IGEMS:NMVVR:SXGXH, TVPKPXX:APTQL:SNIT-AA¹⁷-QIM:IGEMS:NMVVR:AXGXH, AVPKAXX:APTKL:SNIT-AA¹⁷-QIM:IGEMS:NMVVK:AXGXH, KVGKAXX:VPTKL:SNIT-AA¹⁷-QIM:IGEMS:EGMSVAE:XGXR, KASKAXX:VPTKL:SNIT-AA¹⁷-QIM:IGEMS:GMAVS:EXGXR, GSAGPXX:TPTKM:SNIT-AA¹⁷-QIM:IGEMS:GMVVD:RXGXS, AAPASXX:VPARL:SNIT-AA¹⁷-QIM:IGEMS:DMVVE:AXGXR, STPPTXX:VPTRL:SNIT-AA¹⁷-QIM:IGEMS:DMVVE:SXGXR, HVPKPXX:APTKL:SNIT-AA¹⁷-QIM:IGEMS:NMVVR:SXGXH, RVPSTXX:APVKT:SNIT-AA¹⁷-QIM:IGEMS:MIVEE:XGXL, ASAAPXX:VPQAL:SNIT-AA¹⁷-QIM:IGEMS:MIVRS:XKXS, ASASPXX:VSQDL:SNIT-AA¹⁷-QIM:IGEMS:MIVKS:XKXS, ASASPXX:VPQDL:SNIT-AA¹⁷-QIM:IGEMS:MVVKS:XKXS, NDEGLEX:VPTGQ:SNIT-AA¹⁷-QIM:IGEMS:LEEHS:QXEXR, SSVKXQP:SRVHH:SNIT-AA¹⁷-QIM:IGEMS:RLEEH:LEXAXA, RNVQXRP:TQVQL:SNIT-AA¹⁷-QIM:IGEMS:TLEDH:LAXKXE, NDEGLEX:VPTEE:SNIT-AA¹⁷-QIM:LGEMS:FLEHS:KXEXR, KIPKAXX:VPTEL:SNIT-AA¹⁷-QIM:LGEMS:DMVVE:GXGXR, GIPEPXX:VPEKM:SNIT-AA¹⁷-QIM:LGEMS:NMTVE:SXAXR, SIPKAXX:VPTEL:SNIT-AA¹⁷-QIM:LGEMS:EMVVE:GXGXR, HVTKPTX:APTKL:SNIT-AA¹⁷-QIM:LGEMS:NMVVR:SXGXH, YVPKPXX:APTKL:SNIT-AA¹⁷-QIM:LGEMS:NMVVR:SXGXH, TVPKPXX:APTQL:SNIT-AA¹⁷-QIM:LGEMS:NMVVR:AXGXH, AVPKAXX:APTKL:SNIT-AA¹⁷-QIM:LGEMS:NMVVK:AXGXH, KVGKAXX:VPTKL:SNIT-AA¹⁷-QIM:LGEMS:EGMSVAE:XGXR, KASKAXX:VPTKL:SNIT-AA¹⁷-QIM:LGEMS:GMAVS:EXGXR, GSAGPXX:TPTKM:SNIT-AA¹⁷-QIM:LGEMS:GMVVD:RXGXS, AAPASXX:VPARL:SNIT-AA¹⁷-QIM:LGEMS:DMVVE:AXGXR, STPPTXX:VPTRL:SNIT-AA¹⁷-QIM:LGEMS:DMVVE:SXGXR, HVPKPXX:APTKL:SNIT-AA¹⁷-QIM:LGEMS:NMVVR:SXGXH, RVPSTXX:APVKT:SNIT-AA¹⁷-QIM:LGEMS:MIVEE:XGXL, ASAAPXX:VPQAL:SNIT-AA¹⁷-QIM:LGEMS:MIVRS:XKXS, ASASPXX:VSQDL:SNIT-AA¹⁷-QIM:LGEMS:MIVKS:XKXS, ASASPXX:VPQDL:SNIT-AA¹⁷-QIM:LGEMS:MVVKS:XKXS, NDEGLEX:VPTEE:SNIT-AA¹⁷-QIM:LGEMS:FLQHN:KXEXR, SSVKXQP:SRVHH:SNIT-AA¹⁷-QIM:LGEMS:RLEEH:LEXAXA, RNVQXRP:TQVQL:SNIT-AA¹⁷-QIM:LGEMS:TLEDH:LAXKXE, RNVQXRP:SRVQL:RSVK-AA¹⁷-AKV:KEVQV:TLEEH:LAXKXE, KIPKAXX:VPTEL:RSVK-AA¹⁷-AKV:KEVQV:DMVVE:GXGXR, GIPEPXX:VPEKM:RSVK-AA¹⁷-AKV:KEVQV:NMTVE:SXAXR, SIPKAXX:VPTEL:RSVK-AA¹⁷-AKV:KEVQV:EMVVE:GXGXR, HVTKPTX:APTKL:RSVK-AA¹⁷-AKV:KEVQV:NMVVR:SXGXH, YVPKPXX:APTKL:RSVK-AA¹⁷-AKV:KEVQV:NMVVR:SXGXH, TVPKPXX:APTQL:RSVK-AA¹⁷-AKV:KEVQV:NMVVR:AXGXH, AVPKAXX:APTKL:RSVK-AA¹⁷-AKV:KEVQV:NMVVK:AXGXH, KVGKAXX:VPTKL:RSVK-AA¹⁷-AKV:KEVQV:EGMSVAE:XGXR, KASKAXX:VPTKL:RSVK-AA¹⁷-AKV:KEVQV:GMAVS:EXGXR, GSAGPXX:TPTKM:RSVK-AA¹⁷-AKV:KEVQV:GMVVD:RXGXS, AAPASXX:VPARL:RSVK-AA¹⁷-AKV:KEVQV:DMVVE:AXGXR, STPPTXX:VPTRL:RSVK-AA¹⁷-AKV:KEVQV:DMVVE:SXGXR, HVPKPXX:APTKL:RSVK-AA¹⁷-AKV:KEVQV:NMVVR:SXGXH, RVPSTXX:APVKT:RSVK-AA¹⁷-AKV:KEVQV:MIVEE:XGXL, ASAAPXX:VPQAL:RSVK-AA¹⁷-AKV:KEVQV:MIVRS:XKXS, ASASPXX:VSQDL:RSVK-AA¹⁷-AKV:KEVQV:MIVKS:XKXS, ASASPXX:VPQDL:RSVK-AA¹⁷-AKV:KEVQV:MVVKS:XKXS, NDEGLEX:VPTEE:RSVK-AA¹⁷-AKV:KEVQV:FLQHN:KXEXR, NDEGLEX:VPTGQ:RSVK-AA¹⁷-AKV:KEVQV:LEEHS:QXEXR, RNVQXRP:TQVQL:RSVK-AA¹⁷-AKV:KEVQV:TLEDH:LAXKXE, SSVKXQP:TQVHH:RPVQ-AA¹⁷-RKI:KKATV:RLEDH:LEXAXA, KIPKAXX:VPTEL:RPVQ-AA¹⁷-RKI:KKATV:DMVVE:GXGXR, GIPEPXX:VPEKM:RPVQ-AA¹⁷-RKI:KKATV:NMTVE:SXAXR, SIPKAXX:VPTEL:RPVQ-AA¹⁷-RKI:KKATV:EMVVE:GXGXR, HVTKPTX:APTKL:RPVQ-AA¹⁷-RKI:KKATV:NMVVR:SXGXH, YVPKPXX:APTKL:RPVQ-AA¹⁷-RKI:KKATV:NMVVR:SXGXH, TVPKPXX:APTQL:RPVQ-AA¹⁷-RKI:KKATV:NMVVR:AXGXH, AVPKAXX:APTKL:RPVQ-AA¹⁷-RKI:KKATV:NMVVK:AXGXH, KVGKAXX:VPTKL:RPVQ-AA¹⁷-RKI:KKATV:EGMSVAE:XGXR, KASKAXX:VPTKL:RPVQ-AA¹⁷-RKI:KKATV:GMAVS:EXGXR, GSAGPXX:TPTKM:RPVQ-AA¹⁷-RKI:KKATV:GMVVD:RXGXS, AAPASXX:VPARL:RPVQ-AA¹⁷-RKI:KKATV:DMVVE:AXGXR, STPPTXX:VPTRL:RPVQ-AA¹⁷-RKI:KKATV:DMVVE:SXGXR, HVPKPXX:APTKL:RPVQ-AA¹⁷-RKI:KKATV:NMVVR:SXGXH, RVPSTXX:APVKT:RPVQ-AA¹⁷-RKI:KKATV:MIVEE:XGXL, ASAAPXX:VPQAL:RPVQ-AA¹⁷-RKI:KKATV:MIVRS:XKXS, ASASPXX:VSQDL:RPVQ-AA¹⁷-RKI:KKATV:MIVKS:XKXS, ASASPXX:VPQDL:RPVQ-AA¹⁷-RKI:KKATV:MVVKS:XKXS, NDEGLEX:VPTEE:RPVQ-AA¹⁷-RKI:KKATV:FLQHN:KXEXR, NDEGLEX:VPTGQ:RPVQ-AA¹⁷-RKI:KKATV:LEEHS:QXEXR and SSVKXQP:SRVHH:RPVQ-AA¹⁷-RKI:KKATV:RLEEH:LEXAXA; and wherein AA¹⁷ is selected from the group consisting of G, A, V, L, I, P, F, M, W, T and S (in particular is selected from the group consisting of M, I, L, V and T).

[0371] In particular, in certain embodiments, the heptuplet PEP7:PEP3:PEP1:LINKER:PEP2:PEP4:PEP8 is selected from the group consisting of GIPEPXX:VPT:SAIS:DENKNVV:LKNYQ:VVE:SXAXR, SIPKAXX:VPT:SAIS:DEYDKVV:LKNYQ:VVE:GXGXR, HVTKPTX:VPT:SAIS:DDSSNVI:LKNYQ:VVE:SXGXH, YVPKPXX:VPT:SAIS:DDSSNVI:LKNYQ:VVE:SXGXH, TVPKPXX:VPT:SAIS:DDSSNVI:LKNYQ:VVE:AXGXH, AVPKAXX:VPT:SAIS:DSSNNVI:LKNYQ:VVE:AXGXH, KVGKAXX:VPT:SAIS:DDMGVPT:LKNYQ:VVE:XGXR, KASKAXX:VPT:SAIS:DKGVVTY:LKNYQ:VVE:EXGXR, GSAGPXX:VPT:SAIS:NDKQQII:LKNYQ:VVE:RXGXS, AAPASXX:VPT:SAIS:DAANNVV:LKNYQ:VVE:AXGXR, STPPTXX:VPT:SAIS:DSANNVV:LKNYQ:VVE:SXGXR, HVPKPXX:VPT:SAIS:DDSSNVI:LKNYQ:VVE:SXGXH, RVPSTXX:VPT:SAIS:DNGRVLL:LKNYQ:VVE:XGXL, ASAAPXX:VPT:SAIS:VGRKPKV:LKNYQ:VVE:XKXS, ASASPXX:VPT:SAIS:IGKTPKI:LKNYQ:VVE:XKXS, ASASPXX:VPT:SAIS:VGRTPKV:LKNYQ:VVE:XKXS, NDEGLEX:VPT:SAIS:RIKPHQGQH:LKNYQ:VVE:KXEXR, NDEGLEX:VPT:SAIS:RIKPHQGQH:LKNYQ:VVE:QXEXR, SSVKXQP:VPT:SAIS:EYVRKKPKL:LKNYQ:VVE:LEXAXA, RNVQXRP:VPT:SAIS:EIVRKKPIF:LKNYQ:VVE:LAXKXE, GIPEPXX:VPE:SAIS:DENKNVV:LKNYQ:TVE:SXAXR, HVTKPTX:APT:SAIS:DDSSNVI:LKNYQ:VVR:SXGXH, YVPKPXX:APT:SAIS:DDSSNVI:LKNYQ:VVR:SXGXH, TVPKPXX:APT:SAIS:DDSSNVI:LKNYQ:VVR:AXGXH, AVPKAXX:APT:SAIS:DSSNNVI:LKNYQ:VVK:AXGXH, KVGKAXX:VPT:SAIS:DDMGVPT:LKNYQ:VAE:XGXR, KASKAXX:VPT:SAIS:DKGVVTY:LKNYQ:AVS:EXGXR, GSAGPXX:TPT:SAIS:NDKQQII:LKNYQ:VVD:RXGXS, AAPASXX:VPA:SAIS:DAANNVV:LKNYQ:VVE:AXGXR, HVPKPXX:APT:SAIS:DDSSNVI:LKNYQ:VVR:SXGXH, RVPSTXX:APV:SAIS:DNGRVLL:LKNYQ:VEE:XGXL, ASAAPXX:VPQ:SAIS:VGRKPKV:LKNYQ:VRS:XKXS, ASASPXX:VSQ:SAIS:IGKTPKI:LKNYQ:VKS:XKXS, ASASPXX:VPQ:SAIS:VGRTPKV:LKNYQ:VKS:XKXS, NDEGLEX:VPT:SAIS:RIKPHQGQH:LKNYQ:QHN:KXEXR, NDEGLEX:VPT:SAIS:RIKPHQGQH:LKNYQ:EHS:QXEXR, SSVKXQP:SRV:SAIS:EYVRKKPKL:LKNYQ:EEH:LEXAXA, RNVQXRP:TQV:SAIS:EIVRKKPIF:LKNYQ:EDH:LAXKXE, KIPKAXX:VPE:SSLS:DENEKVV:LKVYP:TVE:GXGXR, SIPKAXX:VPE:SSLS:DEYDKVV:LKVYP:TVE:GXGXR, HVTKPTX:VPE:SSLS:DDSSNVI:LKVYP:TVE:SXGXH, YVPKPXX:VPE:SSLS:DDSSNVI:LKVYP:TVE:SXGXH, TVPKPXX:VPE:SSLS:DDSSNVI:LKVYP:TVE:AXGXH, AVPKAXX:VPE:SSLS:DSSNNVI:LKVYP:TVE:AXGXH, KVGKAXX:VPE:SSLS:DDMGVPT:LKVYP:TVE:XGXR, KASKAXX:VPE:SSLS:DKGVVTY:LKVYP:TVE:EXGXR, GSAGPXX:VPE:SSLS:NDKQQII:LKVYP:TVE:RXGXS, AAPASXX:VPE:SSLS:DAANNVV:LKVYP:TVE:AXGXR, STPPTXX:VPE:SSLS:DSANNVV:LKVYP:TVE:SXGXR, HVPKPXX:VPE:SSLS:DDSSNVI:LKVYP:TVE:SXGXH, RVPSTXX:VPE:SSLS:DNGRVLL:LKVYP:TVE:XGXL, ASAAPXX:VPE:SSLS:VGRKPKV:LKVYP:TVE:XKXS, ASASPXX:VPE:SSLS:IGKTPKI:LKVYP:TVE:XKXS, ASASPXX:VPE:SSLS:VGRTPKV:LKVYP:TVE:XKXS, NDEGLEX:VPE:SSLS:RIKPHQGQH:LKVYP:TVE:KXEXR, NDEGLEX:VPE:SSLS:RIKPHQGQH:LKVYP:TVE:QXEXR, SSVKXQP:VPE:SSLS:EYVRKKPKL:LKVYP:TVE:LEXAXA, RNVQXRP:VPE:SSLS:EIVRKKPIF:LKVYP:TVE:LAXKXE, KIPKAXX:VPT:SSLS:DENEKVV:LKVYP:VVE:GXGXR, SIPKAXX:VPT:SSLS:DEYDKVV:LKVYP:VVE:GXGXR, HVTKPTX:APT:SSLS:DDSSNVI:LKVYP:VVR:SXGXH, YVPKPXX:APT:SSLS:DDSSNVI:LKVYP:VVR:SXGXH, TVPKPXX:APT:SSLS:DDSSNVI:LKVYP:VVR:AXGXH, AVPKAXX:APT:SSLS:DSSNNVI:LKVYP:VVK:AXGXH, KVGKAXX:VPT:SSLS:DDMGVPT:LKVYP:VAE:XGXR, KASKAXX:VPT:SSLS:DKGVVTY:LKVYP:AVS:EXGXR, GSAGPXX:TPT:SSLS:NDKQQII:LKVYP:VVD:RXGXS, AAPASXX:VPA:SSLS:DAANNVV:LKVYP:VVE:AXGXR, STPPTXX:VPT:SSLS:DSANNVV:LKVYP:VVE:SXGXR, HVPKPXX:APT:SSLS:DDSSNVI:LKVYP:VVR:SXGXH, RVPSTXX:APV:SSLS:DNGRVLL:LKVYP:VEE:XGXL, ASAAPXX:VPQ:SSLS:VGRKPKV:LKVYP:VRS:XKXS, ASASPXX:VSQ:SSLS:IGKTPKI:LKVYP:VKS:XKXS, ASASPXX:VPQ:SSLS:VGRTPKV:LKVYP:VKS:XKXS, NDEGLEX:VPT:SSLS:RIKPHQGQH:LKVYP:QHN:KXEXR, NDEGLEX:VPT:SSLS:RIKPHQGQH:LKVYP:EHS:QXEXR, SSVKXQP:SRV:SSLS:EYVRKKPKL:LKVYP:EEH:LEXAXA, RNVQXRP:TQV:SSLS:EIVRKKPIF:LKVYP:EDH:LAXKXE, KIPKAXX:VPT:SAIS:DENEKVV:LKNYQ:VVE:GXGXR, KIPKAXX:APT:NAIS:DENEKVV:LKKYR:VVR:GXGXR, GIPEPXX:APT:NAIS:DENKNVV:LKKYR:VVR:SXAXR, SIPKAXX:APT:NAIS:DEYDKVV:LKKYR:VVR:GXGXR, YVPKPXX:APT:NAIS:DDSSNVI:LKKYR:VVR:SXGXH, TVPKPXX:APT:NAIS:DDSSNVI:LKKYR:VVR:AXGXH, AVPKAXX:APT:NAIS:DSSNNVI:LKKYR:VVR:AXGXH, KVGKAXX:APT:NAIS:DDMGVPT:LKKYR:VVR:XGXR, KASKAXX:APT:NAIS:DKGVVTY:LKKYR:VVR:EXGXR, GSAGPXX:APT:NAIS:NDKQQII:LKKYR:VVR:RXGXS, AAPASXX:APT:NAIS:DAANNVV:LKKYR:VVR:AXGXR, STPPTXX:APT:NAIS:DSANNVV:LKKYR:VVR:SXGXR, HVPKPXX:APT:NAIS:DDSSNVI:LKKYR:VVR:SXGXH, RVPSTXX:APT:NAIS:DNGRVLL:LKKYR:VVR:XGXL, ASAAPXX:APT:NAIS:VGRKPKV:LKKYR:VVR:XKXS, ASASPXX:APT:NAIS:IGKTPKI:LKKYR:VVR:XKXS, ASASPXX:APT:NAIS:VGRTPKV:LKKYR:VVR:XKXS, NDEGLEX:APT:NAIS:RIKPHQGQH:LKKYR:VVR:KXEXR, NDEGLEX:APT:NAIS:RIKPHQGQH:LKKYR:VVR:QXEXR, SSVKXQP:APT:NAIS:EYVRKKPKL:LKKYR:VVR:LEXAXA, RNVQXRP:APT:NAIS:EIVRKKPIF:LKKYR:VVR:LAXKXE, KIPKAXX:VPT:NAIS:DENEKVV:LKKYR:VVE:GXGXR, GIPEPXX:VPE:NAIS:DENKNVV:LKKYR:TVE:SXAXR, SIPKAXX:VPT:NAIS:DEYDKVV:LKKYR:VVE:GXGXR, AVPKAXX:APT:NAIS:DSSNNVI:LKKYR:VVK:AXGXH, KVGKAXX:VPT:NAIS:DDMGVPT:LKKYR:VAE:XGXR, KASKAXX:VPT:NAIS:DKGVVTY:LKKYR:AVS:EXGXR, GSAGPXX:TPT:NAIS:NDKQQII:LKKYR:VVD:RXGXS, AAPASXX:VPA:NAIS:DAANNVV:LKKYR:VVE:AXGXR, STPPTXX:VPT:NAIS:DSANNVV:LKKYR:VVE:SXGXR, RVPSTXX:APV:NAIS:DNGRVLL:LKKYR:VEE:XGXL, ASAAPXX:VPQ:NAIS:VGRKPKV:LKKYR:VRS:XKXS, ASASPXX:VSQ:NAIS:IGKTPKI:LKKYR:VKS:XKXS, ASASPXX:VPQ:NAIS:VGRTPKV:LKKYR:VKS:XKXS, NDEGLEX:VPT:NAIS:RIKPHQGQH:LKKYR:QHN:KXEXR, NDEGLEX:VPT:NAIS:RIKPHQGQH:LKKYR:EHS:QXEXR, SSVKXQP:SRV:NAIS:EYVRKKPKL:LKKYR:EEH:LEXAXA, RNVQXRP:TQV:NAIS:EIVRKKPIF:LKKYR:EDH:LAXKXE, HVTKPTX:APT:NAIS:DDSSNVI:LKKYR:VVR:SXGXH, KIPKAXX:APT:SATS:DENEKVV:LRKHR:VVK:GXGXR, GIPEPXX:APT:SATS:DENKNVV:LRKHR:VVK:SXAXR, SIPKAXX:APT:SATS:DEYDKVV:LRKHR:VVK:GXGXR, HVTKPTX:APT:SATS:DDSSNVI:LRKHR:VVK:SXGXH, YVPKPXX:APT:SATS:DDSSNVI:LRKHR:VVK:SXGXH, TVPKPXX:APT:SATS:DDSSNVI:LRKHR:VVK:AXGXH, KVGKAXX:APT:SATS:DDMGVPT:LRKHR:VVK:XGXR, KASKAXX:APT:SATS:DKGVVTY:LRKHR:VVK:EXGXR, GSAGPXX:APT:SATS:NDKQQII:LRKHR:VVK:RXGXS, AAPASXX:APT:SATS:DAANNVV:LRKHR:VVK:AXGXR, STPPTXX:APT:SATS:DSANNVV:LRKHR:VVK:SXGXR, HVPKPXX:APT:SATS:DDSSNVI:LRKHR:VVK:SXGXH, RVPSTXX:APT:SATS:DNGRVLL:LRKHR:VVK:XGXL, ASAAPXX:APT:SATS:VGRKPKV:LRKHR:VVK:XKXS, ASASPXX:APT:SATS:IGKTPKI:LRKHR:VVK:XKXS, ASASPXX:APT:SATS:VGRTPKV:LRKHR:VVK:XKXS, NDEGLEX:APT:SATS:RIKPHQGQH:LRKHR:VVK:KXEXR, NDEGLEX:APT:SATS:RIKPHQGQH:LRKHR:VVK:QXEXR, SSVKXQP:APT:SATS:EYVRKKPKL:LRKHR:VVK:LEXAXA, RNVQXRP:APT:SATS:EIVRKKPIF:LRKHR:VVK:LAXKXE, KIPKAXX:VPT:SATS:DENEKVV:LRKHR:VVE:GXGXR, GIPEPXX:VPE:SATS:DENKNVV:LRKHR:TVE:SXAXR, SIPKAXX:VPT:SATS:DEYDKVV:LRKH R:VVE:GXGXR, HVTKPTX:APT:SATS:DDSSNVI:LRKHR:VVR:SXGXH, YVPKPXX:APT:SATS:DDSSNVI:LRKHR:VVR:SXGXH, TVPKPXX:APT:SATS:DDSSNVI:LRKHR:VVR:AXGXH, KVGKAXX:VPT:SATS:DDMGVPT:LRKHR:VAE:XGXR, KASKAXX:VPT:SATS:DKGVVTY:LRKHR:AVS:EXGXR, GSAGPXX:TPT:SATS:NDKQQII:LRKHR:VVD:RXGXS, AAPASXX:VPA:SATS:DAANNVV:LRKHR:VVE:AXGXR, STPPTXX:VPT:SATS:DSANNVV:LRKHR:VVE:SXGXR, HVPKPXX:APT:SATS:DDSSNVI:LRKHR:VVR:SXGXH, RVPSTXX:APV:SATS:DNGRVLL:LRKHR:VEE:XGXL, ASAAPXX:VPQ:SATS:VGRKPKV:LRKHR:VRS:XKXS, ASASPXX:VSQ:SATS:IGKTPKI:LRKHR:VKS:XKXS, ASASPXX:VPQ:SATS:VGRTPKV:LRKHR:VKS:XKXS, NDEGLEX:VPT:SATS:RIKPHQGQH:LRKHR:QHN:KXEXR, NDEGLEX:VPT:SATS:RIKPHQGQH:LRKHR:EHS:QXEXR, SSVKXQP:SRV:SATS:EYVRKKPKL:LRKHR:EEH:LEXAXA, RNVQXRP:TQV:SATS:EIVRKKPIF:LRKHR:EDH:LAXKXE, KIPKAXX:VPT:SPIS:DENEKVV:LKYHY:VAE:GXGXR, GIPEPXX:VPT:SPIS:DENKNVV:LKYHY:VAE:SXAXR, SIPKAXX:VPT:SPIS:DEYDKVV:LKYHY:VAE:GXGXR, HVTKPTX:VPT:SPIS:DDSSNVI:LKYHY:VAE:SXGXH, YVPKPXX:VPT:SPIS:DDSSNVI:LKYHY:VAE:SXGXH, TVPKPXX:VPT:SPIS:DDSSNVI:LKYHY:VAE:AXGXH, AVPKAXX:VPT:SPIS:DSSNNVI:LKYHY:VAE:AXGXH, KASKAXX:VPT:SPIS:DKGVVTY:LKYHY:VAE:EXGXR, GSAGPXX:VPT:SPIS:NDKQQII:LKYHY:VAE:RXGXS, AAPASXX:VPT:SPIS:DAANNVV:LKYHY:VAE:AXGXR, STPPTXX:VPT:SPIS:DSANNVV:LKYHY:VAE:SXGXR, HVPKPXX:VPT:SPIS:DDSSNVI:LKYHY:VAE:SXGXH, RVPSTXX:VPT:SPIS:DNGRVLL:LKYHY:VAE:XGXL, ASAAPXX:VPT:SPIS:VGRKPKV:LKYHY:VAE:XKXS, ASASPXX:VPT:SPIS:IGKTPKI:LKYHY:VAE:XKXS, ASASPXX:VPT:SPIS:VGRTPKV:LKYHY:VAE:XKXS, NDEGLEX:VPT:SPIS:RIKPHQGQH:LKYHY:VAE:KXEXR, NDEGLEX:VPT:SPIS:RIKPHQGQH:LKYHY:VAE:QXEXR, SSVKXQP:VPT:SPIS:EYVRKKPKL:LKYHY:VAE:LEXAXA, RNVQXRP:VPT:SPIS:EIVRKKPIF:LKYHY:VAE:LAXKXE, KIPKAXX:VPT:SPIS:DENEKVV:LKYHY:VVE:GXGXR, GIPEPXX:VPE:SPIS:DENKNVV:LKYHY:TVE:SXAXR, SIPKAXX:VPT:SPIS:DEYDKVV:LKYHY:VVE:GXGXR, HVTKPTX:APT:SPIS:DDSSNVI:LKYHY:VVR:SXGXH, YVPKPXX:APT:SPIS:DDSSNVI:LKYHY:VVR:SXGXH, TVPKPXX:APT:SPIS:DDSSNVI:LKYHY:VVR:AXGXH, AVPKAXX:APT:SPIS:DSSNNVI:LKYHY:VVK:AXGXH, KASKAXX:VPT:SPIS:DKGVVTY:LKYHY:AVS:EXGXR, GSAGPXX:TPT:SPIS:NDKQQII:LKYHY:VVD:RXGXS, AAPASXX:VPA:SPIS:DAANNVV:LKYHY:VVE:AXGXR, STPPTXX:VPT:SPIS:DSANNVV:LKYHY:VVE:SXGXR, HVPKPXX:APT:SPIS:DDSSNVI:LKYHY:VVR:SXGXH, RVPSTXX:APV:SPIS:DNGRVLL:LKYHY:VEE:XGXL, ASAAPXX:VPQ:SPIS:VGRKPKV:LKYHY:VRS:XKXS, ASASPXX:VSQ:SPIS:IGKTPKI:LKYHY:VKS:XKXS, ASASPXX:VPQ:SPIS:VGRTPKV:LKYHY:VKS:XKXS, NDEGLEX:VPT:SPIS:RIKPHQGQH:LKYHY:QHN:KXEXR, NDEGLEX:VPT:SPIS:RIKPHQGQH:LKYHY:EHS:QXEXR, SSVKXQP:SRV:SPIS:EYVRKKPKL:LKYHY:EEH:LEXAXA, RNVQXRP:TQV:SPIS:EIVRKKPIF:LKYHY:EDH:LAXKXE, KIPKAXX:VPT:EPIS:DENEKVV:KFKYE:AVS:GXGXR, GIPEPXX:VPT:EPIS:DENKNVV:KFKYE:AVS:SXAXR, SIPKAXX:VPT:EPIS:DEYDKVV:KFKYE:AVS:GXGXR, HVTKPTX:VPT:EPIS:DDSSNVI:KFKYE:AVS:SXGXH, YVPKPXX:VPT:EPIS:DDSSNVI:KFKYE:AVS:SXGXH, TVPKPXX:VPT:EPIS:DDSSNVI:KFKYE:AVS:AXGXH, AVPKAXX:VPT:EPIS:DSSNNVI:KFKYE:AVS:AXGXH, KVGKAXX:VPT:EPIS:DDMGVPT:KFKYE:AVS:XGXR, GSAGPXX:VPT:EPIS:NDKQQII:KFKYE:AVS:RXGXS, AAPASXX:VPT:EPIS:DAANNVV:KFKYE:AVS:AXGXR, STPPTXX:VPT:EPIS:DSANNVV:KFKYE:AVS:SXGXR, HVPKPXX:VPT:EPIS:DDSSNVI:KFKYE:AVS:SXGXH, RVPSTXX:VPT:EPIS:DNGRVLL:KFKYE:AVS:XGXL, ASAAPXX:VPT:EPIS:VGRKPKV:KFKYE:AVS:XKXS, ASASPXX:VPT:EPIS:IGKTPKI:KFKYE:AVS:XKXS, ASASPXX:VPT:EPIS:VGRTPKV:KFKYE:AVS:XKXS, NDEGLEX:VPT:EPIS:RIKPHQGQH:KFKYE:AVS:KXEXR, NDEGLEX:VPT:EPIS:RIKPHQGQH:KFKYE:AVS:QXEXR, SSVKXQP:VPT:EPIS:EYVRKKPKL:KFKYE:AVS:LEXAXA, RNVQXRP:VPT:EPIS:EIVRKKPIF:KFKYE:AVS:LAXKXE, KIPKAXX:VPT:EPIS:DENEKVV:KFKYE:VVE:GXGXR, GIPEPXX:VPE:EPIS:DENKNVV:KFKYE:TVE:SXAXR, SIPKAXX:VPT:EPIS:DEYDKVV:KFKYE:VVE:GXGXR, HVTKPTX:APT:EPIS:DDSSNVI:KFKYE:VVR:SXGXH, YVPKPXX:APT:EPIS:DDSSNVI:KFKYE:VVR:SXGXH, TVPKPXX:APT:EPIS:DDSSNVI:KFKYE:VVR:AXGXH, AVPKAXX:APT:EPIS:DSSNNVI:KFKYE:VVK:AXGXH, KVGKAXX:VPT:EPIS:DDMGVPT:KFKYE:VAE:XGXR, GSAGPXX:TPT:EPIS:NDKQQII:KFKYE:VVD:RXGXS, AAPASXX:VPA:EPIS:DAANNVV:KFKYE:VVE:AXGXR, STPPTXX:VPT:EPIS:DSANNVV:KFKYE:VVE:SXGXR, HVPKPXX:APT:EPIS:DDSSNVI:KFKYE:VVR:SXGXH, RVPSTXX:APV:EPIS:DNGRVLL:KFKYE:VEE:XGXL, ASAAPXX:VPQ:EPIS:VGRKPKV:KFKYE:VRS:XKXS, ASASPXX:VSQ:EPIS:IGKTPKI:KFKYE:VKS:XKXS, ASASPXX:VPQ:EPIS:VGRTPKV:KFKYE:VKS:XKXS, NDEGLEX:VPT:EPIS:RIKPHQGQH:KFKYE:QHN:KXEXR, NDEGLEX:VPT:EPIS:RIKPHQGQH:KFKYE:EHS:QXEXR, SSVKXQP:SRV:EPIS:EYVRKKPKL:KFKYE:EEH:LEXAXA, RNVQXRP:TQV:EPIS:EIVRKKPIF:KFKYE:EDH:LAXKXE, KIPKAXX:TPT:SPIN:DENEKVV:YGKIP:VVD:GXGXR, GIPEPXX:TPT:SPIN:DENKNVV:YGKIP:VVD:SXAXR, SIPKAXX:TPT:SPIN:DEYDKVV:YGKIP:VVD:GXGXR, HVTKPTX:TPT:SPIN:DDSSNVI:YGKIP:VVD:SXGXH, YVPKPXX:TPT:SPIN:DDSSNVI:YGKIP:VVD:SXGXH, TVPKPXX:TPT:SPIN:DDSSNVI:YGKIP:VVD:AXGXH, AVPKAXX:TPT:SPIN:DSSNNVI:YGKIP:VVD:AXGXH, KVGKAXX:TPT:SPIN:DDMGVPT:YGKIP:VVD:XGXR, KASKAXX:TPT:SPIN:DKGVVTY:YGKIP:VVD:EXGXR, AAPASXX:TPT:SPIN:DAANNVV:YGKIP:VVD:AXGXR, STPPTXX:TPT:SPIN:DSANNVV:YGKIP:VVD:SXGXR, HVPKPXX:TPT:SPIN:DDSSNVI:YGKIP:VVD:SXGXH, RVPSTXX:TPT:SPIN:DNGRVLL:YGKIP:VVD:XGXL, ASAAPXX:TPT:SPIN:VGRKPKV:YGKIP:VVD:XKXS, ASASPXX:TPT:SPIN:IGKTPKI:YGKIP:VVD:XKXS, ASASPXX:TPT:SPIN:VGRTPKV:YGKIP:VVD:XKXS, NDEGLEX:TPT:SPIN:RIKPHQGQH:YGKIP:VVD:KXEXR, NDEGLEX:TPT:SPIN:RIKPHQGQH:YGKIP:VVD:QXEXR, SSVKXQP:TPT:SPIN:EYVRKKPKL:YGKIP:VVD:LEXAXA, RNVQXRP:TPT:SPIN:EIVRKKPIF:YGKIP:VVD:LAXKXE, KIPKAXX:VPT:SPIN:DENEKVV:YGKIP:VVE:GXGXR, GIPEPXX:VPE:SPIN:DENKNVV:YGKIP:TVE:SXAXR, SIPKAXX:VPT:SPIN:DEYDKVV:YGKIP:VVE:GXGXR, HVTKPTX:APT:SPIN:DDSSNVI:YGKIP:VVR:SXGXH, YVPKPXX:APT:SPIN:DDSSNVI:YGKIP:VVR:SXGXH, TVPKPXX:APT:SPIN:DDSSNVI:YGKIP:VVR:AXGXH, AVPKAXX:APT:SPIN:DSSNNVI:YGKIP:VVK:AXGXH, KVGKAXX:VPT:SPIN:DDMGVPT:YGKIP:VAE:XGXR, KASKAXX:VPT:SPIN:DKGVVTY:YGKIP:AVS:EXGXR, AAPASXX:VPA:SPIN:DAANNVV:YGKIP:VVE:AXGXR, STPPTXX:VPT:SPIN:DSANNVV:YGKIP:VVE:SXGXR, HVPKPXX:APT:SPIN:DDSSNVI:YGKIP:VVR:SXGXH, RVPSTXX:APV:SPIN:DNGRVLL:YGKIP:VEE:XGXL, ASAAPXX:VPQ:SPIN:VGRKPKV:YGKIP:VRS:XKXS, ASASPXX:VSQ:SPIN:IGKTPKI:YGKIP:VKS:XKXS, ASASPXX:VPQ:SPIN:VGRTPKV:YGKIP:VKS:XKXS, NDEGLEX:VPT:SPIN:RIKPHQGQH:YGKIP:QHN:KXEXR, NDEGLEX:VPT:SPIN:RIKPHQGQH:YGKIP:EHS:QXEXR, SSVKXQP:SRV:SPIN:EYVRKKPKL:YGKIP:EEH:LEXAXA, RNVQXRP:TQV:SPIN:EIVRKKPIF:YGKIP:EDH:LAXKXE, KIPKAXX:VPA:SPIS:DENEKVV:YKQYE:VVE:GXGXR, GIPEPXX:VPA:SPIS:DENKNVV:YKQYE:VVE:SXAXR, SIPKAXX:VPA:SPIS:DEYDKVV:YKQYE:VVE:GXGXR, HVTKPTX:VPA:SPIS:DDSSNVI:YKQYE:VVE:SXGXH, YVPKPXX:VPA:SPIS:DDSSNVI:YKQYE:VVE:SXGXH, TVPKPXX:VPA:SPIS:DDSSNVI:YKQYE:VVE:AXGXH, AVPKAXX:VPA:SPIS:DSSNNVI:YKQYE:VVE:AXGXH, KVGKAXX:VPA:SPIS:DDMGVPT:YKQYE:VVE:XGXR, KASKAXX:VPA:SPIS:DKGVVTY:YKQYE:VVE:EXGXR, GSAGPXX:VPA:SPIS:NDKQQII:YKQYE:VVE:RXGXS, STPPTXX:VPA:SPIS:DSANNVV:YKQYE:VVE:SXGXR, HVPKPXX:VPA:SPIS:DDSSNVI:YKQYE:VVE:SXGXH, RVPSTXX:VPA:SPIS:DNGRVLL:YKQYE:VVE:XGXL, ASAAPXX:VPA:SPIS:VGRKPKV:YKQYE:VVE:XKXS, ASASPXX:VPA:SPIS:IGKTPKI:YKQYE:VVE:XKXS, ASASPXX:VPA:SPIS:VGRTPKV:YKQYE:VVE:XKXS, NDEGLEX:VPA:SPIS:RIKPHQGQH:YKQYE:VVE:KXEXR, NDEGLEX:VPA:SPIS:RIKPHQGQH:YKQYE:VVE:QXEXR, SSVKXQP:VPA:SPIS:EYVRKKPKL:YKQYE:VVE:LEXAXA, RNVQXRP:VPA:SPIS:EIVRKKPIF:YKQYE:VVE:LAXKXE, KIPKAXX:VPT:SPIS:DENEKVV:YKQYE:VVE:GXGXR, GIPEPXX:VPE:SPIS:DENKNVV:YKQYE:TVE:SXAXR, SIPKAXX:VPT:SPIS:DEYDKVV:YKQYE:VVE:GXGXR, HVTKPTX:APT:SPIS:DDSSNVI:YKQYE:VVR:SXGXH, YVPKPXX:APT:SPIS:DDSSNVI:YKQYE:VVR:SXGXH, TVPKPXX:APT:SPIS:DDSSNVI:YKQYE:VVR:AXGXH, AVPKAXX:APT:SPIS:DSSNNVI:YKQYE:VVK:AXGXH, KVGKAXX:VPT:SPIS:DDMGVPT:YKQYE:VAE:XGXR, KASKAXX:VPT:SPIS:DKGVVTY:YKQYE:AVS:EXGXR, GSAGPXX:TPT:SPIS:NDKQQII:YKQYE:VVD:RXGXS, STPPTXX:VPT:SPIS:DSANNVV:YKQYE:VVE:SXGXR, HVPKPXX:APT:SPIS:DDSSNVI:YKQYE:VVR:SXGXH, RVPSTXX:APV:SPIS:DNGRVLL:YKQYE:VEE:XGXL, ASAAPXX:VPQ:SPIS:VGRKPKV:YKQYE:VRS:XKXS, ASASPXX:VSQ:SPIS:IGKTPKI:YKQYE:VKS:XKXS, ASASPXX:VPQ:SPIS:VGRTPKV:YKQYE:VKS:XKXS, NDEGLEX:VPT:SPIS:RIKPHQGQH:YKQYE:QHN:KXEXR, NDEGLEX:VPT:SPIS:RIKPHQGQH:YKQYE:EHS:QXEXR, SSVKXQP:SRV:SPIS:EYVRKKPKL:YKQYE:EEH:LEXAXA, RNVQXRP:TQV:SPIS:EIVRKKPIF:YKQYE:EDH:LAXKXE, GIPEPXX:VPT:SPIS:DENKNVV:YKQYE:VVE:SXAXR, HVTKPTX:VPT:SPIS:DDSSNVI:YKQYE:VVE:SXGXH, YVPKPXX:VPT:SPIS:DDSSNVI:YKQYE:VVE:SXGXH, TVPKPXX:VPT:SPIS:DDSSNVI:YKQYE:VVE:AXGXH, AVPKAXX:VPT:SPIS:DSSNNVI:YKQYE:VVE:AXGXH, KVGKAXX:VPT:SPIS:DDMGVPT:YKQYE:VVE:XGXR, KASKAXX:VPT:SPIS:DKGVVTY:YKQYE:VVE:EXGXR, GSAGPXX:VPT:SPIS:NDKQQII:YKQYE:VVE:RXGXS, AAPASXX:VPT:SPIS:DAANNVV:YKQYE:VVE:AXGXR, HVPKPXX:VPT:SPIS:DDSSNVI:YKQYE:VVE:SXGXH, RVPSTXX:VPT:SPIS:DNGRVLL:YKQYE:VVE:XGXL, ASAAPXX:VPT:SPIS:VGRKPKV:YKQYE:VVE:XKXS, ASASPXX:VPT:SPIS:IGKTPKI:YKQYE:VVE:XKXS, ASASPXX:VPT:SPIS:VGRTPKV:YKQYE:VVE:XKXS, NDEGLEX:VPT:SPIS:RIKPHQGQH:YKQYE:VVE:KXEXR, NDEGLEX:VPT:SPIS:RIKPHQGQH:YKQYE:VVE:QXEXR, SSVKXQP:VPT:SPIS:EYVRKKPKL:YKQYE:VVE:LEXAXA, RNVQXRP:VPT:SPIS:EIVRKKPIF:YKQYE:VVE:LAXKXE, AAPASXX:VPA:SPIS:DAANNVV:YKQYE:VVE:AXGXR, KIPKAXX:APV:KPLS:DENEKVV:DHHKD:VEE:GXGXR, GIPEPXX:APV:KPLS:DENKNVV:DHHKD:VEE:SXAXR, SIPKAXX:APV:KPLS:DEYDKVV:DHHKD:VEE:GXGXR, HVTKPTX:APV:KPLS:DDSSNVI:DHHKD:VEE:SXGXH, YVPKPXX:APV:KPLS:DDSSNVI:DHHKD:VEE:SXGXH, TVPKPXX:APV:KPLS:DDSSNVI:DHHKD:VEE:AXGXH, AVPKAXX:APV:KPLS:DSSNNVI:DHHKD:VEE:AXGXH, KVGKAXX:APV:KPLS:DDMGVPT:DHHKD:VEE:XGXR, KASKAXX:APV:KPLS:DKGVVTY:DHHKD:VEE:EXGXR, GSAGPXX:APV:KPLS:NDKQQII:DHHKD:VEE:RXGXS, AAPASXX:APV:KPLS:DAANNVV:DHHKD:VEE:AXGXR, STPPTXX:APV:KPLS:DSANNVV:DHHKD:VEE:SXGXR, HVPKPXX:APV:KPLS:DDSSNVI:DHHKD:VEE:SXGXH, ASAAPXX:APV:KPLS:VGRKPKV:DHHKD:VEE:XKXS, ASASPXX:APV:KPLS:IGKTPKI:DHHKD:VEE:XKXS, ASASPXX:APV:KPLS:VGRTPKV:DHHKD:VEE:XKXS, NDEGLEX:APV:KPLS:RIKPHQGQH:DHHKD:VEE:KXEXR, NDEGLEX:APV:KPLS:RIKPHQGQH:DHHKD:VEE:QXEXR, SSVKXQP:APV:KPLS:EYVRKKPKL:DHHKD:VEE:LEXAXA, RNVQXRP:APV:KPLS:EIVRKKPIF:DHHKD:VEE:LAXKXE, KIPKAXX:VPT:KPLS:DENEKVV:DHHKD:VVE:GXGXR, GIPEPXX:VPE:KPLS:DENKNVV:DHHKD:TVE:SXAXR, SIPKAXX:VPT:KPLS:DEYDKVV:DHHKD:VVE:GXGXR, HVTKPTX:APT:KPLS:DDSSNVI:DHHKD:VVR:SXGXH, YVPKPXX:APT:KPLS:DDSSNVI:DHHKD:VVR:SXGXH, TVPKPXX:APT:KPLS:DDSSNVI:DHHKD:VVR:AXGXH, AVPKAXX:APT:KPLS:DSSNNVI:DHHKD:VVK:AXGXH, KVGKAXX:VPT:KPLS:DDMGVPT:DHHKD:VAE:XGXR, KASKAXX:VPT:KPLS:DKGVVTY:DHHKD:AVS:EXGXR, GSAGPXX:TPT:KPLS:NDKQQII:DHHKD:VVD:RXGXS, AAPASXX:VPA:KPLS:DAANNVV:DHHKD:VVE:AXGXR, STPPTXX:VPT:KPLS:DSANNVV:DHHKD:VVE:SXGXR, HVPKPXX:APT:KPLS:DDSSNVI:DHHKD:VVR:SXGXH, ASAAPXX:VPQ:KPLS:VGRKPKV:DHHKD:VRS:XKXS, ASASPXX:VSQ:KPLS:IGKTPKI:DHHKD:VKS:XKXS, ASASPXX:VPQ:KPLS:VGRTPKV:DHHKD:VKS:XKXS, NDEGLEX:VPT:KPLS:RIKPHQGQH:DHHKD:QHN:KXEXR, NDEGLEX:VPT:KPLS:RIKPHQGQH:DHHKD:EHS:QXEXR, SSVKXQP:SRV:KPLS:EYVRKKPKL:DHHKD:EEH:LEXAXA, RNVQXRP:TQV:KPLS:EIVRKKPIF:DHHKD:EDH:LAXKXE, KIPKAXX:VPQ:EPLP:DENEKVV:EQLSN:VRS:GXGXR, GIPEPXX:VPQ:EPLP:DENKNVV:EQLSN:VRS:SXAXR, SIPKAXX:VPQ:EPLP:DEYDKVV:EQLSN:VRS:GXGXR, HVTKPTX:VPQ:EPLP:DDSSNVI:EQLSN:VRS:SXGXH, YVPKPXX:VPQ:EPLP:DDSSNVI:EQLSN:VRS:SXGXH, TVPKPXX:VPQ:EPLP:DDSSNVI:EQLSN:VRS:AXGXH, AVPKAXX:VPQ:EPLP:DSSNNVI:EQLSN:VRS:AXGXH, KVGKAXX:VPQ:EPLP:DDMGVPT:EQLSN:VRS:XGXR, KASKAXX:VPQ:EPLP:DKGVVTY:EQLSN:VRS:EXGXR, GSAGPXX:VPQ:EPLP:NDKQQII:EQLSN:VRS:RXGXS, AAPASXX:VPQ:EPLP:DAANNVV:EQLSN:VRS:AXGXR, STPPTXX:VPQ:EPLP:DSANNVV:EQLSN:VRS:SXGXR, HVPKPXX:VPQ:EPLP:DDSSNVI:EQLSN:VRS:SXGXH, RVPSTXX:VPQ:EPLP:DNGRVLL:EQLSN:VRS:XGXL, ASASPXX:VPQ:EPLP:IGKTPKI:EQLSN:VRS:XKXS, ASASPXX:VPQ:EPLP:VGRTPKV:EQLSN:VRS:XKXS, NDEGLEX:VPQ:EPLP:RIKPHQGQH:EQLSN:VRS:KXEXR, NDEGLEX:VPQ:EPLP:RIKPHQGQH:EQLSN:VRS:QXEXR, SSVKXQP:VPQ:EPLP:EYVRKKPKL:EQLSN:VRS:LEXAXA, RNVQXRP:VPQ:EPLP:EIVRKKPIF:EQLSN:VRS:LAXKXE, KIPKAXX:VPT:EPLP:DENEKVV:EQLSN:VVE:GXGXR, GIPEPXX:VPE:EPLP:DENKNVV:EQLSN:TVE:SXAXR, SIPKAXX:VPT:EPLP:DEYDKVV:EQLSN:VVE:GXGXR, HVTKPTX:APT:EPLP:DDSSNVI:EQLSN:VVR:SXGXH, YVPKPXX:APT:EPLP:DDSSNVI:EQLSN:VVR:SXGXH, TVPKPXX:APT:EPLP:DDSSNVI:EQLSN:VVR:AXGXH, AVPKAXX:APT:EPLP:DSSNNVI:EQLSN:VVK:AXGXH, KVGKAXX:VPT:EPLP:DDMGVPT:EQLSN:VAE:XGXR, KASKAXX:VPT:EPLP:DKGVVTY:EQLSN:AVS:EXGXR, GSAGPXX:TPT:EPLP:NDKQQII:EQLSN:VVD:RXGXS, AAPASXX:VPA:EPLP:DAANNVV:EQLSN:VVE:AXGXR, STPPTXX:VPT:EPLP:DSANNVV:EQLSN:VVE:SXGXR, HVPKPXX:APT:EPLP:DDSSNVI:EQLSN:VVR:SXGXH, RVPSTXX:APV:EPLP:DNGRVLL:EQLSN:VEE:XGXL, ASASPXX:VSQ:EPLP:IGKTPKI:EQLSN:VKS:XKXS, ASASPXX:VPQ:EPLP:VGRTPKV:EQLSN:VKS:XKXS, NDEGLEX:VPT:EPLP:RIKPHQGQH:EQLSN:QHN:KXEXR, NDEGLEX:VPT:EPLP:RIKPHQGQH:EQLSN:EHS:QXEXR, SSVKXQP:SRV:EPLP:EYVRKKPKL:EQLSN:EEH:LEXAXA, RNVQXRP:TQV:EPLP:EIVRKKPIF:EQLSN:EDH:LAXKXE, KIPKAXX:VSQ:EPLT:DENEKVV:EQLSN:VKS:GXGXR, GIPEPXX:VSQ:EPLT:DENKNVV:EQLSN:VKS:SXAXR, SIPKAXX:VSQ:EPLT:DEYDKVV:EQLSN:VKS:GXGXR, HVTKPTX:VSQ:EPLT:DDSSNVI:EQLSN:VKS:SXGXH, YVPKPXX:VSQ:EPLT:DDSSNVI:EQLSN:VKS:SXGXH, TVPKPXX:VSQ:EPLT:DDSSNVI:EQLSN:VKS:AXGXH, AVPKAXX:VSQ:EPLT:DSSNNVI:EQLSN:VKS:AXGXH, KVGKAXX:VSQ:EPLT:DDMGVPT:EQLSN:VKS:XGXR, KASKAXX:VSQ:EPLT:DKGVVTY:EQLSN:VKS:EXGXR, GSAGPXX:VSQ:EPLT:NDKQQII:EQLSN:VKS:RXGXS, AAPASXX:VSQ:EPLT:DAANNVV:EQLSN:VKS:AXGXR, STPPTXX:VSQ:EPLT:DSANNVV:EQLSN:VKS:SXGXR, HVPKPXX:VSQ:EPLT:DDSSNVI:EQLSN:VKS:SXGXH, RVPSTXX:VSQ:EPLT:DNGRVLL:EQLSN:VKS:XGXL, ASAAPXX:VSQ:EPLT:VGRKPKV:EQLSN:VKS:XKXS, ASASPXX:VSQ:EPLT:VGRTPKV:EQLSN:VKS:XKXS, NDEGLEX:VSQ:EPLT:RIKPHQGQH:EQLSN:VKS:KXEXR, NDEGLEX:VSQ:EPLT:RIKPHQGQH:EQLSN:VKS:QXEXR, SSVKXQP:VSQ:EPLT:EYVRKKPKL:EQLSN:VKS:LEXAXA, RNVQXRP:VSQ:EPLT:EIVRKKPIF:EQLSN:VKS:LAXKXE, KIPKAXX:VPT:EPLT:DENEKVV:EQLSN:VVE:GXGXR, GIPEPXX:VPE:EPLT:DENKNVV:EQLSN:TVE:SXAXR, SIPKAXX:VPT:EPLT:DEYDKVV:EQLSN:VVE:GXGXR, HVTKPTX:APT:EPLT:DDSSNVI:EQLSN:VVR:SXGXH, YVPKPXX:APT:EPLT:DDSSNVI:EQLSN:VVR:SXGXH, TVPKPXX:APT:EPLT:DDSSNVI:EQLSN:VVR:AXGXH, AVPKAXX:APT:EPLT:DSSNNVI:EQLSN:VVK:AXGXH, KVGKAXX:VPT:EPLT:DDMGVPT:EQLSN:VAE:XGXR, KASKAXX:VPT:EPLT:DKGVVTY:EQLSN:AVS:EXGXR, GSAGPXX:TPT:EPLT:NDKQQII:EQLSN:VVD:RXGXS, AAPASXX:VPA:EPLT:DAANNVV:EQLSN:VVE:AXGXR, STPPTXX:VPT:EPLT:DSANNVV:EQLSN:VVE:SXGXR, HVPKPXX:APT:EPLT:DDSSNVI:EQLSN:VVR:SXGXH, RVPSTXX:APV:EPLT:DNGRVLL:EQLSN:VEE:XGXL, ASAAPXX:VPQ:EPLT:VGRKPKV:EQLSN:VRS:XKXS, ASASPXX:VPQ:EPLT:VGRTPKV:EQLSN:VKS:XKXS, NDEGLEX:VPT:EPLT:RIKPHQGQH:EQLSN:QHN:KXEXR, NDEGLEX:VPT:EPLT:RIKPHQGQH:EQLSN:EHS:QXEXR, SSVKXQP:SRV:EPLT:EYVRKKPKL:EQLSN:EEH:LEXAXA, RNVQXRP:TQV:EPLT:EIVRKKPIF:EQLSN:EDH:LAXKXE, KIPKAXX:VPQ:EPLT:DENEKVV:EQLSN:VKS:GXGXR, GIPEPXX:VPQ:EPLT:DENKNVV:EQLSN:VKS:SXAXR, SIPKAXX:VPQ:EPLT:DEYDKVV:EQLSN:VKS:GXGXR, HVTKPTX:VPQ:EPLT:DDSSNVI:EQLSN:VKS:SXGXH, YVPKPXX:VPQ:EPLT:DDSSNVI:EQLSN:VKS:SXGXH, TVPKPXX:VPQ:EPLT:DDSSNVI:EQLSN:VKS:AXGXH, AVPKAXX:VPQ:EPLT:DSSNNVI:EQLSN:VKS:AXGXH, KVGKAXX:VPQ:EPLT:DDMGVPT:EQLSN:VKS:XGXR, KASKAXX:VPQ:EPLT:DKGVVTY:EQLSN:VKS:EXGXR, GSAGPXX:VPQ:EPLT:NDKQQII:EQLSN:VKS:RXGXS, AAPASXX:VPQ:EPLT:DAANNVV:EQLSN:VKS:AXGXR, STPPTXX:VPQ:EPLT:DSANNVV:EQLSN:VKS:SXGXR, HVPKPXX:VPQ:EPLT:DDSSNVI:EQLSN:VKS:SXGXH, RVPSTXX:VPQ:EPLT:DNGRVLL:EQLSN:VKS:XGXL, ASAAPXX:VPQ:EPLT:VGRKPKV:EQLSN:VKS:XKXS, ASASPXX:VPQ:EPLT:IGKTPKI:EQLSN:VKS:XKXS, NDEGLEX:VPQ:EPLT:RIKPHQGQH:EQLSN:VKS:KXEXR, NDEGLEX:VPQ:EPLT:RIKPHQGQH:EQLSN:VKS:QXEXR, SSVKXQP:VPQ:EPLT:EYVRKKPKL:EQLSN:VKS:LEXAXA, RNVQXRP:VPQ:EPLT:EIVRKKPIF:EQLSN:VKS:LAXKXE, ASASPXX:VSQ:EPLT:IGKTPKI:EQLSN:VKS:XKXS, KIPKAXX:VPT:SNIT:DENEKVV:IGEMS:QHN:GXGXR, GIPEPXX:VPT:SNIT:DENKNVV:IGEMS:QHN:SXAXR, SIPKAXX:VPT:SNIT:DEYDKVV:IGEMS:QHN:GXGXR, HVTKPTX:VPT:SNIT:DDSSNVI:IGEMS:QHN:SXGXH, YVPKPXX:VPT:SNIT:DDSSNVI:IGEMS:QHN:SXGXH, TVPKPXX:VPT:SNIT:DDSSNVI:IGEMS:QHN:AXGXH, AVPKAXX:VPT:SNIT:DSSNNVI:IGEMS:QHN:AXGXH, KVGKAXX:VPT:SNIT:DDMGVPT:IGEMS:QHN:XGXR, KASKAXX:VPT:SNIT:DKGVVTY:IGEMS:QHN:EXGXR, GSAGPXX:VPT:SNIT:NDKQQII:IGEMS:QHN:RXGXS, AAPASXX:VPT:SNIT:DAANNVV:IGEMS:QHN:AXGXR, STPPTXX:VPT:SNIT:DSANNVV:IGEMS:QHN:SXGXR, HVPKPXX:VPT:SNIT:DDSSNVI:IGEMS:QHN:SXGXH, RVPSTXX:VPT:SNIT:DNGRVLL:IGEMS:QHN:XGXL, ASAAPXX:VPT:SNIT:VGRKPKV:IGEMS:QHN:XKXS, ASASPXX:VPT:SNIT:IGKTPKI:IGEMS:QHN:XKXS, ASASPXX:VPT:SNIT:VGRTPKV:IGEMS:QHN:XKXS, NDEGLEX:VPT:SNIT:RIKPHQGQH:IGEMS:QHN:QXEXR, NDEGLEX:VPT:SNIT:RIKPHQGQH:IGEMS:QHN:KXEXR, SSVKXQP:VPT:SNIT:EYVRKKPKL:IGEMS:QHN:LEXAXA, RNVQXRP:VPT:SNIT:EIVRKKPIF:IGEMS:QHN:LAXKXE, KIPKAXX:VPT:SNIT:DENEKVV:IGEMS:VVE:GXGXR, GIPEPXX:VPE:SNIT:DENKNVV:IGEMS:TVE:SXAXR, SIPKAXX:VPT:SNIT:DEYDKVV:IGEMS:VVE:GXGXR, HVTKPTX:APT:SNIT:DDSSNVI:IGEMS:VVR:SXGXH, YVPKPXX:APT:SNIT:DDSSNVI:IGEMS:VVR:SXGXH, TVPKPXX:APT:SNIT:DDSSNVI:IGEMS:VVR:AXGXH, AVPKAXX:APT:SNIT:DSSNNVI:IGEMS:VVK:AXGXH, KVGKAXX:VPT:SNIT:DDMGVPT:IGEMS:VAE:XGXR, KASKAXX:VPT:SNIT:DKGVVTY:IGEMS:AVS:EXGXR, GSAGPXX:TPT:SNIT:NDKQQII:IGEMS:VVD:RXGXS, AAPASXX:VPA:SNIT:DAANNVV:IGEMS:VVE:AXGXR, STPPTXX:VPT:SNIT:DSANNVV:IGEMS:VVE:SXGXR, HVPKPXX:APT:SNIT:DDSSNVI:IGEMS:VVR:SXGXH, RVPSTXX:APV:SNIT:DNGRVLL:IGEMS:VEE:XGXL, ASAAPXX:VPQ:SNIT:VGRKPKV:IGEMS:VRS:XKXS, ASASPXX:VSQ:SNIT:IGKTPKI:IGEMS:VKS:XKXS, ASASPXX:VPQ:SNIT:VGRTPKV:IGEMS:VKS:XKXS, NDEGLEX:VPT:SNIT:RIKPHQGQH:IGEMS:EHS:QXEXR, SSVKXQP:SRV:SNIT:EYVRKKPKL:IGEMS:EEH:LEXAXA, RNVQXRP:TQV:SNIT:EIVRKKPIF:IGEMS:EDH:LAXKXE, KIPKAXX:VPT:SNIT:DENEKVV:LGEMS:EHS:GXGXR, GIPEPXX:VPT:SNIT:DENKNVV:LGEMS:EHS:SXAXR, SIPKAXX:VPT:SNIT:DEYDKVV:LGEMS:EHS:GXGXR, HVTKPTX:VPT:SNIT:DDSSNVI:LGEMS:EHS:SXGXH, YVPKPXX:VPT:SNIT:DDSSNVI:LGEMS:EHS:SXGXH, TVPKPXX:VPT:SNIT:DDSSNVI:LGEMS:EHS:AXGXH, AVPKAXX:VPT:SNIT:DSSNNVI:LGEMS:EHS:AXGXH, KVGKAXX:VPT:SNIT:DDMGVPT:LGEMS:EHS:XGXR, KASKAXX:VPT:SNIT:DKGVVTY:LGEMS:EHS:EXGXR, GSAGPXX:VPT:SNIT:NDKQQII:LGEMS:EHS:RXGXS, AAPASXX:VPT:SNIT:DAANNVV:LGEMS:EHS:AXGXR, STPPTXX:VPT:SNIT:DSANNVV:LGEMS:EHS:SXGXR, HVPKPXX:VPT:SNIT:DDSSNVI:LGEMS:EHS:SXGXH, RVPSTXX:VPT:SNIT:DNGRVLL:LGEMS:EHS:XGXL, ASAAPXX:VPT:SNIT:VGRKPKV:LGEMS:EHS:XKXS, ASASPXX:VPT:SNIT:IGKTPKI:LGEMS:EHS:XKXS, ASASPXX:VPT:SNIT:VGRTPKV:LGEMS:EHS:XKXS, NDEGLEX:VPT:SNIT:RIKPHQGQH:LGEMS:EHS:KXEXR, SSVKXQP:VPT:SNIT:EYVRKKPKL:LGEMS:EHS:LEXAXA, RNVQXRP:VPT:SNIT:EIVRKKPIF:LGEMS:EHS:LAXKXE, KIPKAXX:VPT:SNIT:DENEKVV:LGEMS:VVE:GXGXR, GIPEPXX:VPE:SNIT:DENKNVV:LGEMS:TVE:SXAXR, SIPKAXX:VPT:SNIT:DEYDKVV:LGEMS:VVE:GXGXR, HVTKPTX:APT:SNIT:DDSSNVI:LGEMS:VVR:SXGXH, YVPKPXX:APT:SNIT:DDSSNVI:LGEMS:VVR:SXGXH, TVPKPXX:APT:SNIT:DDSSNVI:LGEMS:VVR:AXGXH, AVPKAXX:APT:SNIT:DSSNNVI:LGEMS:VVK:AXGXH, KVGKAXX:VPT:SNIT:DDMGVPT:LGEMS:VAE:XGXR, KASKAXX:VPT:SNIT:DKGVVTY:LGEMS:AVS:EXGXR, GSAGPXX:TPT:SNIT:NDKQQII:LGEMS:VVD:RXGXS, AAPASXX:VPA:SNIT:DAANNVV:LGEMS:VVE:AXGXR, STPPTXX:VPT:SNIT:DSANNVV:LGEMS:VVE:SXGXR, HVPKPXX:APT:SNIT:DDSSNVI:LGEMS:VVR:SXGXH, RVPSTXX:APV:SNIT:DNGRVLL:LGEMS:VEE:XGXL, ASAAPXX:VPQ:SNIT:VGRKPKV:LGEMS:VRS:XKXS, ASASPXX:VSQ:SNIT:IGKTPKI:LGEMS:VKS:XKXS, ASASPXX:VPQ:SNIT:VGRTPKV:LGEMS:VKS:XKXS, NDEGLEX:VPT:SNIT:RIKPHQGQH:LGEMS:QHN:KXEXR, SSVKXQP:SRV:SNIT:EYVRKKPKL:LGEMS:EEH:LEXAXA, RNVQXRP:TQV:SNIT:EIVRKKPIF:LGEMS:EDH:LAXKXE, KIPKAXX:SRV:RSVK:DENEKVV:KEVQV:EEH:GXGXR, GIPEPXX:SRV:RSVK:DENKNVV:KEVQV:EEH:SXAXR, SIPKAXX:SRV:RSVK:DEYDKVV:KEVQV:EEH:GXGXR, HVTKPTX:SRV:RSVK:DDSSNVI:KEVQV:EEH:SXGXH, YVPKPXX:SRV:RSVK:DDSSNVI:KEVQV:EEH:SXGXH, TVPKPXX:SRV:RSVK:DDSSNVI:KEVQV:EEH:AXGXH, AVPKAXX:SRV:RSVK:DSSNNVI:KEVQV:EEH:AXGXH, KVGKAXX:SRV:RSVK:DDMGVPT:KEVQV:EEH:XGXR, KASKAXX:SRV:RSVK:DKGVVTY:KEVQV:EEH:EXGXR, GSAGPXX:SRV:RSVK:NDKQQII:KEVQV:EEH:RXGXS, AAPASXX:SRV:RSVK:DAANNVV:KEVQV:EEH:AXGXR, STPPTXX:SRV:RSVK:DSANNVV:KEVQV:EEH:SXGXR, HVPKPXX:SRV:RSVK:DDSSNVI:KEVQV:EEH:SXGXH, RVPSTXX:SRV:RSVK:DNGRVLL:KEVQV:EEH:XGXL, ASAAPXX:SRV:RSVK:VGRKPKV:KEVQV:EEH:XKXS, ASASPXX:SRV:RSVK:IGKTPKI:KEVQV:EEH:XKXS, ASASPXX:SRV:RSVK:VGRTPKV:KEVQV:EEH:XKXS, NDEGLEX:SRV:RSVK:RIKPHQGQH:KEVQV:EEH:KXEXR, NDEGLEX:SRV:RSVK:RIKPHQGQH:KEVQV:EEH:QXEXR, RNVQXRP:SRV:RSVK:EIVRKKPIF:KEVQV:EEH:LAXKXE, KIPKAXX:VPT:RSVK:DENEKVV:KEVQV:VVE:GXGXR, GIPEPXX:VPE:RSVK:DENKNVV:KEVQV:TVE:SXAXR, SIPKAXX:VPT:RSVK:DEYDKVV:KEVQV:VVE:GXGXR, HVTKPTX:APT:RSVK:DDSSNVI:KEVQV:VVR:SXGXH, YVPKPXX:APT:RSVK:DDSSNVI:KEVQV:VVR:SXGXH, TVPKPXX:APT:RSVK:DDSSNVI:KEVQV:VVR:AXGXH, AVPKAXX:APT:RSVK:DSSNNVI:KEVQV:VVK:AXGXH, KVGKAXX:VPT:RSVK:DDMGVPT:KEVQV:VAE:XGXR, KASKAXX:VPT:RSVK:DKGVVTY:KEVQV:AVS:EXGXR, GSAGPXX:TPT:RSVK:NDKQQII:KEVQV:VVD:RXGXS, AAPASXX:VPA:RSVK:DAANNVV:KEVQV:VVE:AXGXR, STPPTXX:VPT:RSVK:DSANNVV:KEVQV:VVE:SXGXR, HVPKPXX:APT:RSVK:DDSSNVI:KEVQV:VVR:SXGXH, RVPSTXX:APV:RSVK:DNGRVLL:KEVQV:VEE:XGXL, ASAAPXX:VPQ:RSVK:VGRKPKV:KEVQV:VRS:XKXS, ASASPXX:VSQ:RSVK:IGKTPKI:KEVQV:VKS:XKXS, ASASPXX:VPQ:RSVK:VGRTPKV:KEVQV:VKS:XKXS, NDEGLEX:VPT:RSVK:RIKPHQGQH:KEVQV:QHN:KXEXR, NDEGLEX:VPT:RSVK:RIKPHQGQH:KEVQV:EHS:QXEXR, RNVQXRP:TQV:RSVK:EIVRKKPIF:KEVQV:EDH:LAXKXE, KIPKAXX:TQV:RPVQ:DENEKVV:KKATV:EDH:GXGXR, GIPEPXX:TQV:RPVQ:DENKNVV:KKATV:EDH:SXAXR, SIPKAXX:TQV:RPVQ:DEYDKVV:KKATV:EDH:GXGXR, HVTKPTX:TQV:RPVQ:DDSSNVI:KKATV:EDH:SXGXH, YVPKPXX:TQV:RPVQ:DDSSNVI:KKATV:EDH:SXGXH, TVPKPXX:TQV:RPVQ:DDSSNVI:KKATV:EDH:AXGXH, AVPKAXX:TQV:RPVQ:DSSNNVI:KKATV:EDH:AXGXH, KVGKAXX:TQV:RPVQ:DDMGVPT:KKATV:EDH:XGXR, KASKAXX:TQV:RPVQ:DKGVVTY:KKATV:EDH:EXGXR, GSAGPXX:TQV:RPVQ:NDKQQII:KKATV:EDH:RXGXS, AAPASXX:TQV:RPVQ:DAANNVV:KKATV:EDH:AXGXR, STPPTXX:TQV:RPVQ:DSANNVV:KKATV:EDH:SXGXR, HVPKPXX:TQV:RPVQ:DDSSNVI:KKATV:EDH:SXGXH, RVPSTXX:TQV:RPVQ:DNGRVLL:KKATV:EDH:XGXL, ASAAPXX:TQV:RPVQ:VGRKPKV:KKATV:EDH:XKXS, ASASPXX:TQV:RPVQ:IGKTPKI:KKATV:EDH:XKXS, ASASPXX:TQV:RPVQ:VGRTPKV:KKATV:EDH:XKXS, NDEGLEX:TQV:RPVQ:RIKPHQGQH:KKATV:EDH:KXEXR, NDEGLEX:TQV:RPVQ:RIKPHQGQH:KKATV:EDH:QXEXR, SSVKXQP:TQV:RPVQ:EYVRKKPKL:KKATV:EDH:LEXAXA, KIPKAXX:VPT:RPVQ:DENEKVV:KKATV:VVE:GXGXR, GIPEPXX:VPE:RPVQ:DENKNVV:KKATV:TVE:SXAXR, SIPKAXX:VPT:RPVQ:DEYDKVV:KKATV:VVE:GXGXR, HVTKPTX:APT:RPVQ:DDSSNVI:KKATV:VVR:SXGXH, YVPKPXX:APT:RPVQ:DDSSNVI:KKATV:VVR:SXGXH, TVPKPXX:APT:RPVQ:DDSSNVI:KKATV:VVR:AXGXH, AVPKAXX:APT:RPVQ:DSSNNVI:KKATV:VVK:AXGXH, KVGKAXX:VPT:RPVQ:DDMGVPT:KKATV:VAE:XGXR, KASKAXX:VPT:RPVQ:DKGVVTY:KKATV:AVS:EXGXR, GSAGPXX:TPT:RPVQ:NDKQQII:KKATV:VVD:RXGXS, AAPASXX:VPA:RPVQ:DAANNVV:KKATV:VVE:AXGXR, STPPTXX:VPT:RPVQ:DSANNVV:KKATV:VVE:SXGXR, HVPKPXX:APT:RPVQ:DDSSNVI:KKATV:VVR:SXGXH, RVPSTXX:APV:RPVQ:DNGRVLL:KKATV:VEE:XGXL, ASAAPXX:VPQ:RPVQ:VGRKPKV:KKATV:VRS:XKXS, ASASPXX:VSQ:RPVQ:IGKTPKI:KKATV:VKS:XKXS, ASASPXX:VPQ:RPVQ:VGRTPKV:KKATV:VKS:XKXS, NDEGLEX:VPT:RPVQ:RIKPHQGQH:KKATV:QHN:KXEXR, NDEGLEX:VPT:RPVQ:RIKPHQGQH:KKATV:EHS:QXEXR and SSVKXQP:SRV:RPVQ:EYVRKKPKL:KKATV:EEH:LEXAXA. More particularly, in certain embodiments, the heptuplet PEP7:PEP3:PEP1:LINKER:PEP2:PEP4:PEP8 is selected from the group consisting of GIPEPXX:VPT:SAIS:DENKNVV:LKNYQ:VVE:SXAXR, HVTKPTX:VPT:SAIS:DDSSNVI:LKNYQ:VVE:SXGXH, YVPKPXX:VPT:SAIS:DDSSNVI:LKNYQ:VVE:SXGXH, TVPKPXX:VPT:SAIS:DDSSNVI:LKNYQ:VVE:AXGXH, AVPKAXX:VPT:SAIS:DSSNNVI:LKNYQ:VVE:AXGXH, KVGKAXX:VPT:SAIS:DDMGVPT:LKNYQ:VVE:XGXR, KASKAXX:VPT:SAIS:DKGVVTY:LKNYQ:VVE:EXGXR, GSAGPXX:VPT:SAIS:NDKQQII:LKNYQ:VVE:RXGXS, AAPASXX:VPT:SAIS:DAANNVV:LKNYQ:VVE:AXGXR, STPPTXX:VPT:SAIS:DSANNVV:LKNYQ:VVE:SXGXR, HVPKPXX:VPT:SAIS:DDSSNVI:LKNYQ:VVE:SXGXH, RVPSTXX:VPT:SAIS:DNGRVLL:LKNYQ:VVE:XGXL, ASAAPXX:VPT:SAIS:VGRKPKV:LKNYQ:VVE:XKXS, ASASPXX:VPT:SAIS:IGKTPKI:LKNYQ:VVE:XKXS, ASASPXX:VPT:SAIS:VGRTPKV:LKNYQ:VVE:XKXS, GIPEPXX:VPE:SAIS:DENKNVV:LKNYQ:TVE:SXAXR, HVTKPTX:APT:SAIS:DDSSNVI:LKNYQ:VVR:SXGXH, YVPKPXX:APT:SAIS:DDSSNVI:LKNYQ:VVR:SXGXH, TVPKPXX:APT:SAIS:DDSSNVI:LKNYQ:VVR:AXGXH, AVPKAXX:APT:SAIS:DSSNNVI:LKNYQ:VVK:AXGXH, KVGKAXX:VPT:SAIS:DDMGVPT:LKNYQ:VAE:XGXR, KASKAXX:VPT:SAIS:DKGVVTY:LKNYQ:AVS:EXGXR, GSAGPXX:TPT:SAIS:NDKQQII:LKNYQ:VVD:RXGXS, AAPASXX:VPA:SAIS:DAANNVV:LKNYQ:VVE:AXGXR, HVPKPXX:APT:SAIS:DDSSNVI:LKNYQ:VVR:SXGXH, RVPSTXX:APV:SAIS:DNGRVLL:LKNYQ:VEE:XGXL, ASAAPXX:VPQ:SAIS:VGRKPKV:LKNYQ:VRS:XKXS, ASASPXX:VSQ:SAIS:IGKTPKI:LKNYQ:VKS:XKXS, ASASPXX:VPQ:SAIS:VGRTPKV:LKNYQ:VKS:XKXS, NDEGLEX:VPT:SAIS:RIKPHQGQH:LKNYQ:QHN:KXEXR, NDEGLEX:VPT:SAIS:RIKPHQGQH:LKNYQ:EHS:QXEXR, SSVKXQP:SRV:SAIS:EYVRKKPKL:LKNYQ:EEH:LEXAXA, RNVQXRP:TQV:SAIS:EIVRKKPIF:LKNYQ:EDH:LAXKXE, KIPKAXX:VPE:SSLS:DENEKVV:LKVYP:TVE:GXGXR, SIPKAXX:VPE:SSLS:DEYDKVV:LKVYP:TVE:GXGXR, HVTKPTX:VPE:SSLS:DDSSNVI:LKVYP:TVE:SXGXH, YVPKPXX:VPE:SSLS:DDSSNVI:LKVYP:TVE:SXGXH, TVPKPXX:VPE:SSLS:DDSSNVI:LKVYP:TVE:AXGXH, AVPKAXX:VPE:SSLS:DSSNNVI:LKVYP:TVE:AXGXH, KVGKAXX:VPE:SSLS:DDMGVPT:LKVYP:TVE:XGXR, KASKAXX:VPE:SSLS:DKGVVTY:LKVYP:TVE:EXGXR, GSAGPXX:VPE:SSLS:NDKQQII:LKVYP:TVE:RXGXS, AAPASXX:VPE:SSLS:DAANNVV:LKVYP:TVE:AXGXR, STPPTXX:VPE:SSLS:DSANNVV:LKVYP:TVE:SXGXR, HVPKPXX:VPE:SSLS:DDSSNVI:LKVYP:TVE:SXGXH, RVPSTXX:VPE:SSLS:DNGRVLL:LKVYP:TVE:XGXL, ASAAPXX:VPE:SSLS:VGRKPKV:LKVYP:TVE:XKXS, ASASPXX:VPE:SSLS:IGKTPKI:LKVYP:TVE:XKXS, ASASPXX:VPE:SSLS:VGRTPKV:LKVYP:TVE:XKXS, KIPKAXX:VPT:SSLS:DENEKVV:LKVYP:VVE:GXGXR, SIPKAXX:VPT:SSLS:DEYDKVV:LKVYP:VVE:GXGXR, HVTKPTX:APT:SSLS:DDSSNVI:LKVYP:VVR:SXGXH, YVPKPXX:APT:SSLS:DDSSNVI:LKVYP:VVR:SXGXH, TVPKPXX:APT:SSLS:DDSSNVI:LKVYP:VVR:AXGXH, AVPKAXX:APT:SSLS:DSSNNVI:LKVYP:VVK:AXGXH, KVGKAXX:VPT:SSLS:DDMGVPT:LKVYP:VAE:XGXR, KASKAXX:VPT:SSLS:DKGVVTY:LKVYP:AVS:EXGXR, GSAGPXX:TPT:SSLS:NDKQQII:LKVYP:VVD:RXGXS, AAPASXX:VPA:SSLS:DAANNVV:LKVYP:VVE:AXGXR, STPPTXX:VPT:SSLS:DSANNVV:LKVYP:VVE:SXGXR, HVPKPXX:APT:SSLS:DDSSNVI:LKVYP:VVR:SXGXH, RVPSTXX:APV:SSLS:DNGRVLL:LKVYP:VEE:XGXL, ASAAPXX:VPQ:SSLS:VGRKPKV:LKVYP:VRS:XKXS, ASASPXX:VSQ:SSLS:IGKTPKI:LKVYP:VKS:XKXS, ASASPXX:VPQ:SSLS:VGRTPKV:LKVYP:VKS:XKXS, NDEGLEX:VPT:SSLS:RIKPHQGQH:LKVYP:QHN:KXEXR, NDEGLEX:VPT:SSLS:RIKPHQGQH:LKVYP:EHS:QXEXR, SSVKXQP:SRV:SSLS:EYVRKKPKL:LKVYP:EEH:LEXAXA, RNVQXRP:TQV:SSLS:EIVRKKPIF:LKVYP:EDH:LAXKXE, KIPKAXX:APT:NAIS:DENEKVV:LKKYR:VVR:GXGXR, GIPEPXX:APT:NAIS:DENKNVV:LKKYR:VVR:SXAXR, SIPKAXX:APT:NAIS:DEYDKVV:LKKYR:VVR:GXGXR, AVPKAXX:APT:NAIS:DSSNNVI:LKKYR:VVR:AXGXH, KVGKAXX:APT:NAIS:DDMGVPT:LKKYR:VVR:XGXR, KASKAXX:APT:NAIS:DKGVVTY:LKKYR:VVR:EXGXR, GSAGPXX:APT:NAIS:NDKQQII:LKKYR:VVR:RXGXS, AAPASXX:APT:NAIS:DAANNVV:LKKYR:VVR:AXGXR, STPPTXX:APT:NAIS:DSANNVV:LKKYR:VVR:SXGXR, RVPSTXX:APT:NAIS:DNGRVLL:LKKYR:VVR:XGXL, ASAAPXX:APT:NAIS:VGRKPKV:LKKYR:VVR:XKXS, ASASPXX:APT:NAIS:IGKTPKI:LKKYR:VVR:XKXS, ASASPXX:APT:NAIS:VGRTPKV:LKKYR:VVR:XKXS, KIPKAXX:VPT:NAIS:DENEKVV:LKKYR:VVE:GXGXR, GIPEPXX:VPE:NAIS:DENKNVV:LKKYR:TVE:SXAXR, SIPKAXX:VPT:NAIS:DEYDKVV:LKKYR:VVE:GXGXR, AVPKAXX:APT:NAIS:DSSNNVI:LKKYR:VVK:AXGXH, KVGKAXX:VPT:NAIS:DDMGVPT:LKKYR:VAE:XGXR, KASKAXX:VPT:NAIS:DKGVVTY:LKKYR:AVS:EXGXR, GSAGPXX:TPT:NAIS:NDKQQII:LKKYR:VVD:RXGXS, AAPASXX:VPA:NAIS:DAANNVV:LKKYR:VVE:AXGXR, STPPTXX:VPT:NAIS:DSANNVV:LKKYR:VVE:SXGXR, RVPSTXX:APV:NAIS:DNGRVLL:LKKYR:VEE:XGXL, ASAAPXX:VPQ:NAIS:VGRKPKV:LKKYR:VRS:XKXS, ASASPXX:VSQ:NAIS:IGKTPKI:LKKYR:VKS:XKXS, ASASPXX:VPQ:NAIS:VGRTPKV:LKKYR:VKS:XKXS, NDEGLEX:VPT:NAIS:RIKPHQGQH:LKKYR:QHN:KXEXR, NDEGLEX:VPT:NAIS:RIKPHQGQH:LKKYR:EHS:QXEXR, SSVKXQP:SRV:NAIS:EYVRKKPKL:LKKYR:EEH:LEXAXA, RNVQXRP:TQV:NAIS:EIVRKKPIF:LKKYR:EDH:LAXKXE, KIPKAXX:APT:SATS:DENEKVV:LRKHR:VVK:GXGXR, GIPEPXX:APT:SATS:DENKNVV:LRKHR:VVK:SXAXR, SIPKAXX:APT:SATS:DEYDKVV:LRKHR:VVK:GXGXR, HVTKPTX:APT:SATS:DDSSNVI:LRKHR:VVK:SXGXH, YVPKPXX:APT:SATS:DDSSNVI:LRKHR:VVK:SXGXH, TVPKPXX:APT:SATS:DDSSNVI:LRKHR:VVK:AXGXH, KVGKAXX:APT:SATS:DDMGVPT:LRKHR:VVK:XGXR, KASKAXX:APT:SATS:DKGVVTY:LRKHR:VVK:EXGXR, GSAGPXX:APT:SATS:NDKQQII:LRKHR:VVK:RXGXS, AAPASXX:APT:SATS:DAANNVV:LRKHR:VVK:AXGXR, STPPTXX:APT:SATS:DSANNVV:LRKHR:VVK:SXGXR, HVPKPXX:APT:SATS:DDSSNVI:LRKHR:VVK:SXGXH, RVPSTXX:APT:SATS:DNGRVLL:LRKHR:VVK:XGXL, ASAAPXX:APT:SATS:VGRKPKV:LRKHR:VVK:XKXS, ASASPXX:APT:SATS:IGKTPKI:LRKHR:VVK:XKXS, ASASPXX:APT:SATS:VGRTPKV:LRKHR:VVK:XKXS, KIPKAXX:VPT:SATS:DENEKVV:LRKHR:VVE:GXGXR, GIPEPXX:VPE:SATS:DENKNVV:LRKHR:TVE:SXAXR, SIPKAXX:VPT:SATS:DEYDKVV:LRKH R:VVE:GXGXR, HVTKPTX:APT:SATS:DDSSNVI:LRKHR:VVR:SXGXH, YVPKPXX:APT:SATS:DDSSNVI:LRKHR:VVR:SXGXH, TVPKPXX:APT:SATS:DDSSNVI:LRKHR:VVR:AXGXH, KVGKAXX:VPT:SATS:DDMGVPT:LRKHR:VAE:XGXR, KASKAXX:VPT:SATS:DKGVVTY:LRKHR:AVS:EXGXR, GSAGPXX:TPT:SATS:NDKQQII:LRKHR:VVD:RXGXS, AAPASXX:VPA:SATS:DAANNVV:LRKHR:VVE:AXGXR, STPPTXX:VPT:SATS:DSANNVV:LRKHR:VVE:SXGXR, HVPKPXX:APT:SATS:DDSSNVI:LRKHR:VVR:SXGXH, RVPSTXX:APV:SATS:DNGRVLL:LRKHR:VEE:XGXL, ASAAPXX:VPQ:SATS:VGRKPKV:LRKHR:VRS:XKXS, ASASPXX:VSQ:SATS:IGKTPKI:LRKHR:VKS:XKXS, ASASPXX:VPQ:SATS:VGRTPKV:LRKHR:VKS:XKXS, NDEGLEX:VPT:SATS:RIKPHQGQH:LRKHR:QHN:KXEXR, NDEGLEX:VPT:SATS:RIKPHQGQH:LRKHR:EHS:QXEXR, SSVKXQP:SRV:SATS:EYVRKKPKL:LRKHR:EEH:LEXAXA, RNVQXRP:TQV:SATS:EIVRKKPIF:LRKHR:EDH:LAXKXE, KIPKAXX:VPT:SPIS:DENEKVV:LKYHY:VAE:GXGXR, GIPEPXX:VPT:SPIS:DENKNVV:LKYHY:VAE:SXAXR, SIPKAXX:VPT:SPIS:DEYDKVV:LKYHY:VAE:GXGXR, HVTKPTX:VPT:SPIS:DDSSNVI:LKYHY:VAE:SXGXH, YVPKPXX:VPT:SPIS:DDSSNVI:LKYHY:VAE:SXGXH, TVPKPXX:VPT:SPIS:DDSSNVI:LKYHY:VAE:AXGXH, AVPKAXX:VPT:SPIS:DSSNNVI:LKYHY:VAE:AXGXH, KASKAXX:VPT:SPIS:DKGVVTY:LKYHY:VAE:EXGXR, GSAGPXX:VPT:SPIS:NDKQQII:LKYHY:VAE:RXGXS, AAPASXX:VPT:SPIS:DAANNVV:LKYHY:VAE:AXGXR, STPPTXX:VPT:SPIS:DSANNVV:LKYHY:VAE:SXGXR, HVPKPXX:VPT:SPIS:DDSSNVI:LKYHY:VAE:SXGXH, RVPSTXX:VPT:SPIS:DNGRVLL:LKYHY:VAE:XGXL, ASAAPXX:VPT:SPIS:VGRKPKV:LKYHY:VAE:XKXS, ASASPXX:VPT:SPIS:IGKTPKI:LKYHY:VAE:XKXS, ASASPXX:VPT:SPIS:VGRTPKV:LKYHY:VAE:XKXS, KIPKAXX:VPT:SPIS:DENEKVV:LKYHY:VVE:GXGXR, GIPEPXX:VPE:SPIS:DENKNVV:LKYHY:TVE:SXAXR, SIPKAXX:VPT:SPIS:DEYDKVV:LKYHY:VVE:GXGXR, HVTKPTX:APT:SPIS:DDSSNVI:LKYHY:VVR:SXGXH, YVPKPXX:APT:SPIS:DDSSNVI:LKYHY:VVR:SXGXH, TVPKPXX:APT:SPIS:DDSSNVI:LKYHY:VVR:AXGXH, AVPKAXX:APT:SPIS:DSSNNVI:LKYHY:VVK:AXGXH, KASKAXX:VPT:SPIS:DKGVVTY:LKYHY:AVS:EXGXR, GSAGPXX:TPT:SPIS:NDKQQII:LKYHY:VVD:RXGXS, AAPASXX:VPA:SPIS:DAANNVV:LKYHY:VVE:AXGXR, STPPTXX:VPT:SPIS:DSANNVV:LKYHY:VVE:SXGXR, HVPKPXX:APT:SPIS:DDSSNVI:LKYHY:VVR:SXGXH, RVPSTXX:APV:SPIS:DNGRVLL:LKYHY:VEE:XGXL, ASAAPXX:VPQ:SPIS:VGRKPKV:LKYHY:VRS:XKXS, ASASPXX:VSQ:SPIS:IGKTPKI:LKYHY:VKS:XKXS, ASASPXX:VPQ:SPIS:VGRTPKV:LKYHY:VKS:XKXS, NDEGLEX:VPT:SPIS:RIKPHQGQH:LKYHY:QHN:KXEXR, NDEGLEX:VPT:SPIS:RIKPHQGQH:LKYHY:EHS:QXEXR, SSVKXQP:SRV:SPIS:EYVRKKPKL:LKYHY:EEH:LEXAXA, RNVQXRP:TQV:SPIS:EIVRKKPIF:LKYHY:EDH:LAXKXE, KIPKAXX:VPT:EPIS:DENEKVV:KFKYE:AVS:GXGXR, GIPEPXX:VPT:EPIS:DENKNVV:KFKYE:AVS:SXAXR, SIPKAXX:VPT:EPIS:DEYDKVV:KFKYE:AVS:GXGXR, HVTKPTX:VPT:EPIS:DDSSNVI:KFKYE:AVS:SXGXH, YVPKPXX:VPT:EPIS:DDSSNVI:KFKYE:AVS:SXGXH, TVPKPXX:VPT:EPIS:DDSSNVI:KFKYE:AVS:AXGXH, AVPKAXX:VPT:EPIS:DSSNNVI:KFKYE:AVS:AXGXH, KVGKAXX:VPT:EPIS:DDMGVPT:KFKYE:AVS:XGXR, GSAGPXX:VPT:EPIS:NDKQQII:KFKYE:AVS:RXGXS, AAPASXX:VPT:EPIS:DAANNVV:KFKYE:AVS:AXGXR, STPPTXX:VPT:EPIS:DSANNVV:KFKYE:AVS:SXGXR, HVPKPXX:VPT:EPIS:DDSSNVI:KFKYE:AVS:SXGXH, RVPSTXX:VPT:EPIS:DNGRVLL:KFKYE:AVS:XGXL, ASAAPXX:VPT:EPIS:VGRKPKV:KFKYE:AVS:XKXS, ASASPXX:VPT:EPIS:IGKTPKI:KFKYE:AVS:XKXS, ASASPXX:VPT:EPIS:VGRTPKV:KFKYE:AVS:XKXS, KIPKAXX:VPT:EPIS:DENEKVV:KFKYE:VVE:GXGXR, GIPEPXX:VPE:EPIS:DENKNVV:KFKYE:TVE:SXAXR, SIPKAXX:VPT:EPIS:DEYDKVV:KFKYE:VVE:GXGXR, HVTKPTX:APT:EPIS:DDSSNVI:KFKYE:VVR:SXGXH, YVPKPXX:APT:EPIS:DDSSNVI:KFKYE:VVR:SXGXH, TVPKPXX:APT:EPIS:DDSSNVI:KFKYE:VVR:AXGXH, AVPKAXX:APT:EPIS:DSSNNVI:KFKYE:VVK:AXGXH, KVGKAXX:VPT:EPIS:DDMGVPT:KFKYE:VAE:XGXR, GSAGPXX:TPT:EPIS:NDKQQII:KFKYE:VVD:RXGXS, AAPASXX:VPA:EPIS:DAANNVV:KFKYE:VVE:AXGXR, STPPTXX:VPT:EPIS:DSANNVV:KFKYE:VVE:SXGXR, HVPKPXX:APT:EPIS:DDSSNVI:KFKYE:VVR:SXGXH, RVPSTXX:APV:EPIS:DNGRVLL:KFKYE:VEE:XGXL, ASAAPXX:VPQ:EPIS:VGRKPKV:KFKYE:VRS:XKXS, ASASPXX:VSQ:EPIS:IGKTPKI:KFKYE:VKS:XKXS, ASASPXX:VPQ:EPIS:VGRTPKV:KFKYE:VKS:XKXS, NDEGLEX:VPT:EPIS:RIKPHQGQH:KFKYE:QHN:KXEXR, NDEGLEX:VPT:EPIS:RIKPHQGQH:KFKYE:EHS:QXEXR, SSVKXQP:SRV:EPIS:EYVRKKPKL:KFKYE:EEH:LEXAXA, RNVQXRP:TQV:EPIS:EIVRKKPIF:KFKYE:EDH:LAXKXE, KIPKAXX:TPT:SPIN:DENEKVV:YGKIP:VVD:GXGXR, GIPEPXX:TPT:SPIN:DENKNVV:YGKIP:VVD:SXAXR, SIPKAXX:TPT:SPIN:DEYDKVV:YGKIP:VVD:GXGXR, HVTKPTX:TPT:SPIN:DDSSNVI:YGKIP:VVD:SXGXH, YVPKPXX:TPT:SPIN:DDSSNVI:YGKIP:VVD:SXGXH, TVPKPXX:TPT:SPIN:DDSSNVI:YGKIP:VVD:AXGXH, AVPKAXX:TPT:SPIN:DSSNNVI:YGKIP:VVD:AXGXH, KVGKAXX:TPT:SPIN:DDMGVPT:YGKIP:VVD:XGXR, KASKAXX:TPT:SPIN:DKGVVTY:YGKIP:VVD:EXGXR, AAPASXX:TPT:SPIN:DAANNVV:YGKIP:VVD:AXGXR, STPPTXX:TPT:SPIN:DSANNVV:YGKIP:VVD:SXGXR, HVPKPXX:TPT:SPIN:DDSSNVI:YGKIP:VVD:SXGXH, RVPSTXX:TPT:SPIN:DNGRVLL:YGKIP:VVD:XGXL, ASAAPXX:TPT:SPIN:VGRKPKV:YGKIP:VVD:XKXS, ASASPXX:TPT:SPIN:IGKTPKI:YGKIP:VVD:XKXS, ASASPXX:TPT:SPIN:VGRTPKV:YGKIP:VVD:XKXS, KIPKAXX:VPT:SPIN:DENEKVV:YGKIP:VVE:GXGXR, GIPEPXX:VPE:SPIN:DENKNVV:YGKIP:TVE:SXAXR, SIPKAXX:VPT:SPIN:DEYDKVV:YGKIP:VVE:GXGXR, HVTKPTX:APT:SPIN:DDSSNVI:YGKIP:VVR:SXGXH, YVPKPXX:APT:SPIN:DDSSNVI:YGKIP:VVR:SXGXH, TVPKPXX:APT:SPIN:DDSSNVI:YGKIP:VVR:AXGXH, AVPKAXX:APT:SPIN:DSSNNVI:YGKIP:VVK:AXGXH, KVGKAXX:VPT:SPIN:DDMGVPT:YGKIP:VAE:XGXR, KASKAXX:VPT:SPIN:DKGVVTY:YGKIP:AVS:EXGXR, AAPASXX:VPA:SPIN:DAANNVV:YGKIP:VVE:AXGXR, STPPTXX:VPT:SPIN:DSANNVV:YGKIP:VVE:SXGXR, HVPKPXX:APT:SPIN:DDSSNVI:YGKIP:VVR:SXGXH, RVPSTXX:APV:SPIN:DNGRVLL:YGKIP:VEE:XGXL, ASAAPXX:VPQ:SPIN:VGRKPKV:YGKIP:VRS:XKXS, ASASPXX:VSQ:SPIN:IGKTPKI:YGKIP:VKS:XKXS, ASASPXX:VPQ:SPIN:VGRTPKV:YGKIP:VKS:XKXS, NDEGLEX:VPT:SPIN:RIKPHQGQH:YGKIP:QHN:KXEXR, NDEGLEX:VPT:SPIN:RIKPHQGQH:YGKIP:EHS:QXEXR, SSVKXQP:SRV:SPIN:EYVRKKPKL:YGKIP:EEH:LEXAXA, RNVQXRP:TQV:SPIN:EIVRKKPIF:YGKIP:EDH:LAXKXE, KIPKAXX:VPA:SPIS:DENEKVV:YKQYE:VVE:GXGXR, GIPEPXX:VPA:SPIS:DENKNVV:YKQYE:VVE:SXAXR, SIPKAXX:VPA:SPIS:DEYDKVV:YKQYE:VVE:GXGXR, HVTKPTX:VPA:SPIS:DDSSNVI:YKQYE:VVE:SXGXH, YVPKPXX:VPA:SPIS:DDSSNVI:YKQYE:VVE:SXGXH, TVPKPXX:VPA:SPIS:DDSSNVI:YKQYE:VVE:AXGXH, AVPKAXX:VPA:SPIS:DSSNNVI:YKQYE:VVE:AXGXH, KVGKAXX:VPA:SPIS:DDMGVPT:YKQYE:VVE:XGXR, KASKAXX:VPA:SPIS:DKGVVTY:YKQYE:VVE:EXGXR, GSAGPXX:VPA:SPIS:NDKQQII:YKQYE:VVE:RXGXS, STPPTXX:VPA:SPIS:DSANNVV:YKQYE:VVE:SXGXR, HVPKPXX:VPA:SPIS:DDSSNVI:YKQYE:VVE:SXGXH, RVPSTXX:VPA:SPIS:DNGRVLL:YKQYE:VVE:XGXL, ASAAPXX:VPA:SPIS:VGRKPKV:YKQYE:VVE:XKXS, ASASPXX:VPA:SPIS:IGKTPKI:YKQYE:VVE:XKXS, ASASPXX:VPA:SPIS:VGRTPKV:YKQYE:VVE:XKXS, KIPKAXX:VPT:SPIS:DENEKVV:YKQYE:VVE:GXGXR, GIPEPXX:VPE:SPIS:DENKNVV:YKQYE:TVE:SXAXR, SIPKAXX:VPT:SPIS:DEYDKVV:YKQYE:VVE:GXGXR, HVTKPTX:APT:SPIS:DDSSNVI:YKQYE:VVR:SXGXH, YVPKPXX:APT:SPIS:DDSSNVI:YKQYE:VVR:SXGXH, TVPKPXX:APT:SPIS:DDSSNVI:YKQYE:VVR:AXGXH, AVPKAXX:APT:SPIS:DSSNNVI:YKQYE:VVK:AXGXH, KVGKAXX:VPT:SPIS:DDMGVPT:YKQYE:VAE:XGXR, KASKAXX:VPT:SPIS:DKGVVTY:YKQYE:AVS:EXGXR, GSAGPXX:TPT:SPIS:NDKQQII:YKQYE:VVD:RXGXS, STPPTXX:VPT:SPIS:DSANNVV:YKQYE:VVE:SXGXR, HVPKPXX:APT:SPIS:DDSSNVI:YKQYE:VVR:SXGXH, RVPSTXX:APV:SPIS:DNGRVLL:YKQYE:VEE:XGXL, ASAAPXX:VPQ:SPIS:VGRKPKV:YKQYE:VRS:XKXS, ASASPXX:VSQ:SPIS:IGKTPKI:YKQYE:VKS:XKXS, ASASPXX:VPQ:SPIS:VGRTPKV:YKQYE:VKS:XKXS, NDEGLEX:VPT:SPIS:RIKPHQGQH:YKQYE:QHN:KXEXR, NDEGLEX:VPT:SPIS:RIKPHQGQH:YKQYE:EHS:QXEXR, SSVKXQP:SRV:SPIS:EYVRKKPKL:YKQYE:EEH:LEXAXA, RNVQXRP:TQV:SPIS:EIVRKKPIF:YKQYE:EDH:LAXKXE, GIPEPXX:VPT:SPIS:DENKNVV:YKQYE:VVE:SXAXR, HVTKPTX:VPT:SPIS:DDSSNVI:YKQYE:VVE:SXGXH, YVPKPXX:VPT:SPIS:DDSSNVI:YKQYE:VVE:SXGXH, TVPKPXX:VPT:SPIS:DDSSNVI:YKQYE:VVE:AXGXH, AVPKAXX:VPT:SPIS:DSSNNVI:YKQYE:VVE:AXGXH, KVGKAXX:VPT:SPIS:DDMGVPT:YKQYE:VVE:XGXR, KASKAXX:VPT:SPIS:DKGVVTY:YKQYE:VVE:EXGXR, GSAGPXX:VPT:SPIS:NDKQQII:YKQYE:VVE:RXGXS, AAPASXX:VPT:SPIS:DAANNVV:YKQYE:VVE:AXGXR, HVPKPXX:VPT:SPIS:DDSSNVI:YKQYE:VVE:SXGXH, RVPSTXX:VPT:SPIS:DNGRVLL:YKQYE:VVE:XGXL, ASAAPXX:VPT:SPIS:VGRKPKV:YKQYE:VVE:XKXS, ASASPXX:VPT:SPIS:IGKTPKI:YKQYE:VVE:XKXS, ASASPXX:VPT:SPIS:VGRTPKV:YKQYE:VVE:XKXS, AAPASXX:VPA:SPIS:DAANNVV:YKQYE:VVE:AXGXR, KIPKAXX:APV:KPLS:DENEKVV:DHHKD:VEE:GXGXR, GIPEPXX:APV:KPLS:DENKNVV:DHHKD:VEE:SXAXR, SIPKAXX:APV:KPLS:DEYDKVV:DHHKD:VEE:GXGXR, HVTKPTX:APV:KPLS:DDSSNVI:DHHKD:VEE:SXGXH, YVPKPXX:APV:KPLS:DDSSNVI:DHHKD:VEE:SXGXH, TVPKPXX:APV:KPLS:DDSSNVI:DHHKD:VEE:AXGXH, AVPKAXX:APV:KPLS:DSSNNVI:DHHKD:VEE:AXGXH, KVGKAXX:APV:KPLS:DDMGVPT:DHHKD:VEE:XGXR, KASKAXX:APV:KPLS:DKGVVTY:DHHKD:VEE:EXGXR, GSAGPXX:APV:KPLS:NDKQQII:DHHKD:VEE:RXGXS, AAPASXX:APV:KPLS:DAANNVV:DHHKD:VEE:AXGXR, STPPTXX:APV:KPLS:DSANNVV:DHHKD:VEE:SXGXR, HVPKPXX:APV:KPLS:DDSSNVI:DHHKD:VEE:SXGXH, ASAAPXX:APV:KPLS:VGRKPKV:DHHKD:VEE:XKXS, ASASPXX:APV:KPLS:IGKTPKI:DHHKD:VEE:XKXS, ASASPXX:APV:KPLS:VGRTPKV:DHHKD:VEE:XKXS, KIPKAXX:VPT:KPLS:DENEKVV:DHHKD:VVE:GXGXR, GIPEPXX:VPE:KPLS:DENKNVV:DHHKD:TVE:SXAXR, SIPKAXX:VPT:KPLS:DEYDKVV:DHHKD:VVE:GXGXR, HVTKPTX:APT:KPLS:DDSSNVI:DHHKD:VVR:SXGXH, YVPKPXX:APT:KPLS:DDSSNVI:DHHKD:VVR:SXGXH, TVPKPXX:APT:KPLS:DDSSNVI:DHHKD:VVR:AXGXH, AVPKAXX:APT:KPLS:DSSNNVI:DHHKD:VVK:AXGXH, KVGKAXX:VPT:KPLS:DDMGVPT:DHHKD:VAE:XGXR, KASKAXX:VPT:KPLS:DKGVVTY:DHHKD:AVS:EXGXR, GSAGPXX:TPT:KPLS:NDKQQII:DHHKD:VVD:RXGXS, AAPASXX:VPA:KPLS:DAANNVV:DHHKD:VVE:AXGXR, STPPTXX:VPT:KPLS:DSANNVV:DHHKD:VVE:SXGXR, HVPKPXX:APT:KPLS:DDSSNVI:DHHKD:VVR:SXGXH, ASAAPXX:VPQ:KPLS:VGRKPKV:DHHKD:VRS:XKXS, ASASPXX:VSQ:KPLS:IGKTPKI:DHHKD:VKS:XKXS, ASASPXX:VPQ:KPLS:VGRTPKV:DHHKD:VKS:XKXS, NDEGLEX:VPT:KPLS:RIKPHQGQH:DHHKD:QHN:KXEXR, NDEGLEX:VPT:KPLS:RIKPHQGQH:DHHKD:EHS:QXEXR, SSVKXQP:SRV:KPLS:EYVRKKPKL:DHHKD:EEH:LEXAXA, RNVQXRP:TQV:KPLS:EIVRKKPIF:DHHKD:EDH:LAXKXE, KIPKAXX:VPQ:EPLP:DENEKVV:EQLSN:VRS:GXGXR, GIPEPXX:VPQ:EPLP:DENKNVV:EQLSN:VRS:SXAXR, SIPKAXX:VPQ:EPLP:DEYDKVV:EQLSN:VRS:GXGXR, HVTKPTX:VPQ:EPLP:DDSSNVI:EQLSN:VRS:SXGXH, YVPKPXX:VPQ:EPLP:DDSSNVI:EQLSN:VRS:SXGXH, TVPKPXX:VPQ:EPLP:DDSSNVI:EQLSN:VRS:AXGXH, AVPKAXX:VPQ:EPLP:DSSNNVI:EQLSN:VRS:AXGXH, KVGKAXX:VPQ:EPLP:DDMGVPT:EQLSN:VRS:XGXR, KASKAXX:VPQ:EPLP:DKGVVTY:EQLSN:VRS:EXGXR, GSAGPXX:VPQ:EPLP:NDKQQII:EQLSN:VRS:RXGXS, AAPASXX:VPQ:EPLP:DAANNVV:EQLSN:VRS:AXGXR, STPPTXX:VPQ:EPLP:DSANNVV:EQLSN:VRS:SXGXR, HVPKPXX:VPQ:EPLP:DDSSNVI:EQLSN:VRS:SXGXH, RVPSTXX:VPQ:EPLP:DNGRVLL:EQLSN:VRS:XGXL, ASASPXX:VPQ:EPLP:IGKTPKI:EQLSN:VRS:XKXS, ASASPXX:VPQ:EPLP:VGRTPKV:EQLSN:VRS:XKXS, KIPKAXX:VPT:EPLP:DENEKVV:EQLSN:VVE:GXGXR, GIPEPXX:VPE:EPLP:DENKNVV:EQLSN:TVE:SXAXR, SIPKAXX:VPT:EPLP:DEYDKVV:EQLSN:VVE:GXGXR, HVTKPTX:APT:EPLP:DDSSNVI:EQLSN:VVR:SXGXH, YVPKPXX:APT:EPLP:DDSSNVI:EQLSN:VVR:SXGXH, TVPKPXX:APT:EPLP:DDSSNVI:EQLSN:VVR:AXGXH, AVPKAXX:APT:EPLP:DSSNNVI:EQLSN:VVK:AXGXH, KVGKAXX:VPT:EPLP:DDMGVPT:EQLSN:VAE:XGXR, KASKAXX:VPT:EPLP:DKGVVTY:EQLSN:AVS:EXGXR, GSAGPXX:TPT:EPLP:NDKQQII:EQLSN:VVD:RXGXS, AAPASXX:VPA:EPLP:DAANNVV:EQLSN:VVE:AXGXR, STPPTXX:VPT:EPLP:DSANNVV:EQLSN:VVE:SXGXR, HVPKPXX:APT:EPLP:DDSSNVI:EQLSN:VVR:SXGXH, RVPSTXX:APV:EPLP:DNGRVLL:EQLSN:VEE:XGXL, ASASPXX:VSQ:EPLP:IGKTPKI:EQLSN:VKS:XKXS, ASASPXX:VPQ:EPLP:VGRTPKV:EQLSN:VKS:XKXS, NDEGLEX:VPT:EPLP:RIKPHQGQH:EQLSN:QHN:KXEXR, NDEGLEX:VPT:EPLP:RIKPHQGQH:EQLSN:EHS:QXEXR, SSVKXQP:SRV:EPLP:EYVRKKPKL:EQLSN:EEH:LEXAXA, RNVQXRP:TQV:EPLP:EIVRKKPIF:EQLSN:EDH:LAXKXE, KIPKAXX:VSQ:EPLT:DENEKVV:EQLSN:VKS:GXGXR, GIPEPXX:VSQ:EPLT:DENKNVV:EQLSN:VKS:SXAXR, SIPKAXX:VSQ:EPLT:DEYDKVV:EQLSN:VKS:GXGXR, HVTKPTX:VSQ:EPLT:DDSSNVI:EQLSN:VKS:SXGXH, YVPKPXX:VSQ:EPLT:DDSSNVI:EQLSN:VKS:SXGXH, TVPKPXX:VSQ:EPLT:DDSSNVI:EQLSN:VKS:AXGXH, AVPKAXX:VSQ:EPLT:DSSNNVI:EQLSN:VKS:AXGXH, KVGKAXX:VSQ:EPLT:DDMGVPT:EQLSN:VKS:XGXR, KASKAXX:VSQ:EPLT:DKGVVTY:EQLSN:VKS:EXGXR, GSAGPXX:VSQ:EPLT:NDKQQII:EQLSN:VKS:RXGXS, AAPASXX:VSQ:EPLT:DAANNVV:EQLSN:VKS:AXGXR, STPPTXX:VSQ:EPLT:DSANNVV:EQLSN:VKS:SXGXR, HVPKPXX:VSQ:EPLT:DDSSNVI:EQLSN:VKS:SXGXH, RVPSTXX:VSQ:EPLT:DNGRVLL:EQLSN:VKS:XGXL, ASAAPXX:VSQ:EPLT:VGRKPKV:EQLSN:VKS:XKXS, ASASPXX:VSQ:EPLT:VGRTPKV:EQLSN:VKS:XKXS, KIPKAXX:VPT:EPLT:DENEKVV:EQLSN:VVE:GXGXR, GIPEPXX:VPE:EPLT:DENKNVV:EQLSN:TVE:SXAXR, SIPKAXX:VPT:EPLT:DEYDKVV:EQLSN:VVE:GXGXR, HVTKPTX:APT:EPLT:DDSSNVI:EQLSN:VVR:SXGXH, YVPKPXX:APT:EPLT:DDSSNVI:EQLSN:VVR:SXGXH, TVPKPXX:APT:EPLT:DDSSNVI:EQLSN:VVR:AXGXH, AVPKAXX:APT:EPLT:DSSNNVI:EQLSN:VVK:AXGXH, KVGKAXX:VPT:EPLT:DDMGVPT:EQLSN:VAE:XGXR, KASKAXX:VPT:EPLT:DKGVVTY:EQLSN:AVS:EXGXR, GSAGPXX:TPT:EPLT:NDKQQII:EQLSN:VVD:RXGXS, AAPASXX:VPA:EPLT:DAANNVV:EQLSN:VVE:AXGXR, STPPTXX:VPT:EPLT:DSANNVV:EQLSN:VVE:SXGXR, HVPKPXX:APT:EPLT:DDSSNVI:EQLSN:VVR:SXGXH, RVPSTXX:APV:EPLT:DNGRVLL:EQLSN:VEE:XGXL, ASAAPXX:VPQ:EPLT:VGRKPKV:EQLSN:VRS:XKXS, NDEGLEX:VPT:EPLT:RIKPHQGQH:EQLSN:QHN:KXEXR, NDEGLEX:VPT:EPLT:RIKPHQGQH:EQLSN:EHS:QXEXR, SSVKXQP:SRV:EPLT:EYVRKKPKL:EQLSN:EEH:LEXAXA, RNVQXRP:TQV:EPLT:EIVRKKPIF:EQLSN:EDH:LAXKXE, KIPKAXX:VPQ:EPLT:DENEKVV:EQLSN:VKS:GXGXR, GIPEPXX:VPQ:EPLT:DENKNVV:EQLSN:VKS:SXAXR, SIPKAXX:VPQ:EPLT:DEYDKVV:EQLSN:VKS:GXGXR, HVTKPTX:VPQ:EPLT:DDSSNVI:EQLSN:VKS:SXGXH, YVPKPXX:VPQ:EPLT:DDSSNVI:EQLSN:VKS:SXGXH, TVPKPXX:VPQ:EPLT:DDSSNVI:EQLSN:VKS:AXGXH, AVPKAXX:VPQ:EPLT:DSSNNVI:EQLSN:VKS:AXGXH, KVGKAXX:VPQ:EPLT:DDMGVPT:EQLSN:VKS:XGXR, KASKAXX:VPQ:EPLT:DKGVVTY:EQLSN:VKS:EXGXR, GSAGPXX:VPQ:EPLT:NDKQQII:EQLSN:VKS:RXGXS, AAPASXX:VPQ:EPLT:DAANNVV:EQLSN:VKS:AXGXR, STPPTXX:VPQ:EPLT:DSANNVV:EQLSN:VKS:SXGXR, HVPKPXX:VPQ:EPLT:DDSSNVI:EQLSN:VKS:SXGXH, RVPSTXX:VPQ:EPLT:DNGRVLL:EQLSN:VKS:XGXL, ASAAPXX:VPQ:EPLT:VGRKPKV:EQLSN:VKS:XKXS, ASASPXX:VPQ:EPLT:IGKTPKI:EQLSN:VKS:XKXS, NDEGLEX:VPT:SNIT:RIKPHQGQH:IGEMS:QHN:QXEXR, KIPKAXX:VPT:SNIT:DENEKVV:IGEMS:VVE:GXGXR, GIPEPXX:VPE:SNIT:DENKNVV:IGEMS:TVE:SXAXR, SIPKAXX:VPT:SNIT:DEYDKVV:IGEMS:VVE:GXGXR, HVTKPTX:APT:SNIT:DDSSNVI:IGEMS:VVR:SXGXH, YVPKPXX:APT:SNIT:DDSSNVI:IGEMS:VVR:SXGXH, TVPKPXX:APT:SNIT:DDSSNVI:IGEMS:VVR:AXGXH, AVPKAXX:APT:SNIT:DSSNNVI:IGEMS:VVK:AXGXH, KVGKAXX:VPT:SNIT:DDMGVPT:IGEMS:VAE:XGXR, KASKAXX:VPT:SNIT:DKGVVTY:IGEMS:AVS:EXGXR, GSAGPXX:TPT:SNIT:NDKQQII:IGEMS:VVD:RXGXS, AAPASXX:VPA:SNIT:DAANNVV:IGEMS:VVE:AXGXR, STPPTXX:VPT:SNIT:DSANNVV:IGEMS:VVE:SXGXR, HVPKPXX:APT:SNIT:DDSSNVI:IGEMS:VVR:SXGXH, RVPSTXX:APV:SNIT:DNGRVLL:IGEMS:VEE:XGXL, ASAAPXX:VPQ:SNIT:VGRKPKV:IGEMS:VRS:XKXS, ASASPXX:VSQ:SNIT:IGKTPKI:IGEMS:VKS:XKXS, ASASPXX:VPQ:SNIT:VGRTPKV:IGEMS:VKS:XKXS, NDEGLEX:VPT:SNIT:RIKPHQGQH:IGEMS:EHS:QXEXR, SSVKXQP:SRV:SNIT:EYVRKKPKL:IGEMS:EEH:LEXAXA, RNVQXRP:TQV:SNIT:EIVRKKPIF:IGEMS:EDH:LAXKXE, NDEGLEX:VPT:SNIT:RIKPHQGQH:LGEMS:EHS:KXEXR, KIPKAXX:VPT:SNIT:DENEKVV:LGEMS:VVE:GXGXR, GIPEPXX:VPE:SNIT:DENKNVV:LGEMS:TVE:SXAXR, SIPKAXX:VPT:SNIT:DEYDKVV:LGEMS:VVE:GXGXR, HVTKPTX:APT:SNIT:DDSSNVI:LGEMS:VVR:SXGXH, YVPKPXX:APT:SNIT:DDSSNVI:LGEMS:VVR:SXGXH, TVPKPXX:APT:SNIT:DDSSNVI:LGEMS:VVR:AXGXH, AVPKAXX:APT:SNIT:DSSNNVI:LGEMS:VVK:AXGXH, KVGKAXX:VPT:SNIT:DDMGVPT:LGEMS:VAE:XGXR, KASKAXX:VPT:SNIT:DKGVVTY:LGEMS:AVS:EXGXR, GSAGPXX:TPT:SNIT:NDKQQII:LGEMS:VVD:RXGXS, AAPASXX:VPA:SNIT:DAANNVV:LGEMS:VVE:AXGXR, STPPTXX:VPT:SNIT:DSANNVV:LGEMS:VVE:SXGXR, HVPKPXX:APT:SNIT:DDSSNVI:LGEMS:VVR:SXGXH, RVPSTXX:APV:SNIT:DNGRVLL:LGEMS:VEE:XGXL, ASAAPXX:VPQ:SNIT:VGRKPKV:LGEMS:VRS:XKXS, ASASPXX:VSQ:SNIT:IGKTPKI:LGEMS:VKS:XKXS, ASASPXX:VPQ:SNIT:VGRTPKV:LGEMS:VKS:XKXS, NDEGLEX:VPT:SNIT:RIKPHQGQH:LGEMS:QHN:KXEXR, SSVKXQP:SRV:SNIT:EYVRKKPKL:LGEMS:EEH:LEXAXA, RNVQXRP:TQV:SNIT:EIVRKKPIF:LGEMS:EDH:LAXKXE, RNVQXRP:SRV:RSVK:EIVRKKPIF:KEVQV:EEH:LAXKXE, KIPKAXX:VPT:RSVK:DENEKVV:KEVQV:VVE:GXGXR, GIPEPXX:VPE:RSVK:DENKNVV:KEVQV:TVE:SXAXR, SIPKAXX:VPT:RSVK:DEYDKVV:KEVQV:VVE:GXGXR, HVTKPTX:APT:RSVK:DDSSNVI:KEVQV:VVR:SXGXH, YVPKPXX:APT:RSVK:DDSSNVI:KEVQV:VVR:SXGXH, TVPKPXX:APT:RSVK:DDSSNVI:KEVQV:VVR:AXGXH, AVPKAXX:APT:RSVK:DSSNNVI:KEVQV:VVK:AXGXH, KVGKAXX:VPT:RSVK:DDMGVPT:KEVQV:VAE:XGXR, KASKAXX:VPT:RSVK:DKGVVTY:KEVQV:AVS:EXGXR, GSAGPXX:TPT:RSVK:NDKQQII:KEVQV:VVD:RXGXS, AAPASXX:VPA:RSVK:DAANNVV:KEVQV:VVE:AXGXR, STPPTXX:VPT:RSVK:DSANNVV:KEVQV:VVE:SXGXR, HVPKPXX:APT:RSVK:DDSSNVI:KEVQV:VVR:SXGXH, RVPSTXX:APV:RSVK:DNGRVLL:KEVQV:VEE:XGXL, ASAAPXX:VPQ:RSVK:VGRKPKV:KEVQV:VRS:XKXS, ASASPXX:VSQ:RSVK:IGKTPKI:KEVQV:VKS:XKXS, ASASPXX:VPQ:RSVK:VGRTPKV:KEVQV:VKS:XKXS, NDEGLEX:VPT:RSVK:RIKPHQGQH:KEVQV:QHN:KXEXR, NDEGLEX:VPT:RSVK:RIKPHQGQH:KEVQV:EHS:QXEXR, RNVQXRP:TQV:RSVK:EIVRKKPIF:KEVQV:EDH:LAXKXE, SSVKXQP:TQV:RPVQ:EYVRKKPKL:KKATV:EDH:LEXAXA, KIPKAXX:VPT:RPVQ:DENEKVV:KKATV:VVE:GXGXR, GIPEPXX:VPE:RPVQ:DENKNVV:KKATV:TVE:SXAXR, SIPKAXX:VPT:RPVQ:DEYDKVV:KKATV:VVE:GXGXR, HVTKPTX:APT:RPVQ:DDSSNVI:KKATV:VVR:SXGXH, YVPKPXX:APT:RPVQ:DDSSNVI:KKATV:VVR:SXGXH, TVPKPXX:APT:RPVQ:DDSSNVI:KKATV:VVR:AXGXH, AVPKAXX:APT:RPVQ:DSSNNVI:KKATV:VVK:AXGXH, KVGKAXX:VPT:RPVQ:DDMGVPT:KKATV:VAE:XGXR, KASKAXX:VPT:RPVQ:DKGVVTY:KKATV:AVS:EXGXR, GSAGPXX:TPT:RPVQ:NDKQQII:KKATV:VVD:RXGXS, AAPASXX:VPA:RPVQ:DAANNVV:KKATV:VVE:AXGXR, STPPTXX:VPT:RPVQ:DSANNVV:KKATV:VVE:SXGXR, HVPKPXX:APT:RPVQ:DDSSN VI:KKATV:VVR:SXGXH, RVPSTXX:APV:RPVQ:DNGRVLL:KKATV:VEE:XGXL, ASAAPXX:VPQ:RPVQ:VGRKPKV:KKATV:VRS:XKXS, ASASPXX:VSQ:RPVQ:IGKTPKI:KKATV:VKS:XKXS, ASASPXX:VPQ:RPVQ:VGRTPKV:KKATV:VKS:XKXS, NDEGLEX:VPT:RPVQ:RIKPHQGQH:KKATV:QHN:KXEXR, NDEGLEX:VPT:RPVQ:RIKPHQGQH:KKATV:EHS:QXEXR and SSVKXQP:SRV:RPVQ:EYVRKKPKL:KKATV:EEH:LEXAXA.

[0372] In particular, in certain embodiments, the heptuplet PEP7:PEP3:PEP12:LINKER:PEP2:PEP4:PEP8 is selected from the group consisting of GIPEPXX:VPT:SAIS-AA¹¹-LYL:DENKNVV:LKNYQ:VVE:SXAXR, SIPKAXX:VPT:SAIS-AA¹⁷-LYL:DEYDKVV:LKNYQ:VVE:GXGXR, HVTKPTX:VPT:SAIS-AA¹¹-LYL:DDSSNVI:LKNYQ:VVE:SXGXH, YVPKPXX:VPT:SAIS-AA¹⁷-LYL:DDSSNVI:LKNYQ:VVE:SXGXH, TVPKPXX:VPT:SAIS-AA¹⁷-LYL:DDSSNVI:LKNYQ:VVE:AXGXH, AVPKAXX:VPT:SAIS-AA¹⁷-LYL:DSSNNVI:LKNYQ:VVE:AXGXH, KVGKAXX:VPT:SAIS-AA¹⁷-LYL:DDMGVPT:LKNYQ:VVE:XGXR, KASKAXX:VPT:SAIS-AA¹⁷-LYL:DKGVVTY:LKNYQ:VVE:EXGXR, GSAGPXX:VPT:SAIS-AA¹⁷-LYL:NDKQQII:LKNYQ:VVE:RXGXS, AAPASXX:VPT:SAIS-AA¹⁷-LYL:DAANNVV:LKNYQ:VVE:AXGXR, STPPTXX:VPT:SAIS-AA¹⁷-LYL:DSANNVV:LKNYQ:VVE:SXGXR, HVPKPXX:VPT:SAIS-AA¹⁷-LYL:DDSSNVI:LKNYQ:VVE:SXGXH, RVPSTXX:VPT:SAIS-AA¹⁷-LYL:DNGRVLL:LKNYQ:VVE:XGXL, ASAAPXX:VPT:SAIS-AA¹⁷-LYL:VGRKPKV:LKNYQ:VVE:XKXS, ASASPXX:VPT:SAIS-AA¹⁷-LYL:IGKTPKI:LKNYQ:VVE:XKXS, ASASPXX:VPT:SAIS-AA¹⁷-LYL:VGRTPKV:LKNYQ:VVE:XKXS, NDEGLEX:VPT:SAIS-AA¹⁷-LYL:RIKPHQGQH:LKNYQ:VVE:KXEXR, NDEGLEX:VPT:SAIS-AA¹⁷-LYL:RIKPHQGQH:LKNYQ:VVE:QXEXR, SSVKXQP:VPT:SAIS-AA¹⁷-LYL:EYVRKKPKL:LKNYQ:VVE:LEXAXA, RNVQXRP:VPT:SAIS-AA¹⁷-LYL:EIVRKKPIF:LKNYQ:VVE:LAXKXE, GIPEPXX:VPE:SAIS-AA¹⁷-LYL:DENKNVV:LKNYQ:TVE:SXAXR, HVTKPTX:APT:SAIS-AA¹⁷-LYL:DDSSNVI:LKNYQ:VVR:SXGXH, YVPKPXX:APT:SAIS-AA¹⁷-LYL:DDSSNVI:LKNYQ:VVR:SXGXH, TVPKPXX:APT:SAIS-AA¹⁷-LYL:DDSSNVI:LKNYQ:VVR:AXGXH, AVPKAXX:APT:SAIS-AA¹⁷-LYL:DSSNNVI:LKNYQ:VVK:AXGXH, KVGKAXX:VPT:SAIS-AA¹⁷-LYL:DDMGVPT:LKNYQ:VAE:XGXR, KASKAXX:VPT:SAIS-AA¹⁷-LYL:DKGVVTY:LKNYQ:AVS:EXGXR, GSAGPXX:TPT:SAIS-AA¹⁷-LYL:NDKQQII:LKNYQ:VVD:RXGXS, AAPASXX:VPA:SAIS-AA¹⁷-LYL:DAANNVV:LKNYQ:VVE:AXGXR, HVPKPXX:APT:SAIS-AA¹⁷-LYL:DDSSNVI:LKNYQ:VVR:SXGXH, RVPSTXX:APV:SAIS-AA¹⁷-LYL:DNGRVLL:LKNYQ:VEE:XGXL, ASAAPXX:VPQ:SAIS-AA¹⁷-LYL:VGRKPKV:LKNYQ:VRS:XKXS, ASASPXX:VSQ:SAIS-AA¹⁷-LYL:IGKTPKI:LKNYQ:VKS:XKXS, ASASPXX:VPQ:SAIS-AA¹⁷-LYL:VGRTPKV:LKNYQ:VKS:XKXS, NDEGLEX:VPT:SAIS-AA¹⁷-LYL:RIKPHQGQH:LKNYQ:QHN:KXEXR, NDEGLEX:VPT:SAIS-AA¹⁷-LYL:RIKPHQGQH:LKNYQ:EHS:QXEXR, SSVKXQP:SRV:SAIS-AA¹⁷-LYL:EYVRKKPKL:LKNYQ:EEH:LEXAXA, RNVQXRP:TQV:SAIS-AA¹⁷-LYL:EIVRKKPIF:LKNYQ:EDH:LAXKXE, KIPKAXX:VPE:SSLS-AA¹⁷-LFF:DENEKVV:LKVYP:TVE:GXGXR, SIPKAXX:VPE:SSLS-AA¹⁷-LFF:DEYDKVV:LKVYP:TVE:GXGXR, HVTKPTX:VPE:SSLS-AA¹⁷-LFF:DDSSNVI:LKVYP:TVE:SXGXH, YVPKPXX:VPE:SSLS-AA¹⁷-LFF:DDSSNVI:LKVYP:TVE:SXGXH, TVPKPXX:VPE:SSLS-AA¹⁷-LFF:DDSSNVI:LKVYP:TVE:AXGXH, AVPKAXX:VPE:SSLS-AA¹⁷-LFF:DSSNNVI:LKVYP:TVE:AXGXH, KVGKAXX:VPE:SSLS-AA¹⁷-LFF:DDMGVPT:LKVYP:TVE:XGXR, KASKAXX:VPE:SSLS-AA¹⁷-LFF:DKGVVTY:LKVYP:TVE:EXGXR, GSAGPXX:VPE:SSLS-AA¹⁷-LFF:NDKQQII:LKVYP:TVE:RXGXS, AAPASXX:VPE:SSLS-AA¹⁷-LFF:DAANNVV:LKVYP:TVE:AXGXR, STPPTXX:VPE:SSLS-AA¹⁷-LFF:DSANNVV:LKVYP:TVE:SXGXR, HVPKPXX:VPE:SSLS-AA¹⁷-LFF:DDSSNVI:LKVYP:TVE:SXGXH, RVPSTXX:VPE:SSLS-AA¹⁷-LFF:DNGRVLL:LKVYP:TVE:XGXL, ASAAPXX:VPE:SSLS-AA¹⁷-LFF:VGRKPKV:LKVYP:TVE:XKXS, ASASPXX:VPE:SSLS-AA¹⁷-LFF:IGKTPKI:LKVYP:TVE:XKXS, ASASPXX:VPE:SSLS-AA¹⁷-LFF:VGRTPKV:LKVYP:TVE:XKXS, NDEGLEX:VPE:SSLS-AA¹⁷-LFF:RIKPHQGQH:LKVYP:TVE:KXEXR, NDEGLEX:VPE:SSLS-AA¹⁷-LFF:RIKPHQGQH:LKVYP:TVE:QXEXR, SSVKXQP:VPE:SSLS-AA¹⁷-LFF:EYVRKKPKL:LKVYP:TVE:LEXAXA, RNVQXRP:VPE:SSLS-AA¹⁷-LFF:EIVRKKPIF:LKVYP:TVE:LAXKXE, KIPKAXX:VPT:SSLS-AA¹⁷-LFF:DENEKVV:LKVYP:VVE:GXGXR, SIPKAXX:VPT:SSLS-AA¹⁷-LFF:DEYDKVV:LKVYP:VVE:GXGXR, HVTKPTX:APT:SSLS-AA¹⁷-LFF:DDSSNVI:LKVYP:VVR:SXGXH, YVPKPXX:APT:SSLS-AA¹⁷-LFF:DDSSNVI:LKVYP:VVR:SXGXH, TVPKPXX:APT:SSLS-AA¹⁷-LFF:DDSSNVI:LKVYP:VVR:AXGXH, AVPKAXX:APT:SSLS-AA¹⁷-LFF:DSSNNVI:LKVYP:VVK:AXGXH, KVGKAXX:VPT:SSLS-AA¹⁷-LFF:DDMGVPT:LKVYP:VAE:XGXR, KASKAXX:VPT:SSLS-AA¹⁷-LFF:DKGVVTY:LKVYP:AVS:EXGXR, GSAGPXX:TPT:SSLS-AA¹⁷-LFF:NDKQQII:LKVYP:VVD:RXGXS, AAPASXX:VPA:SSLS-AA¹⁷-LFF:DAANNVV:LKVYP:VVE:AXGXR, STPPTXX:VPT:SSLS-AA¹⁷-LFF:DSANNVV:LKVYP:VVE:SXGXR, HVPKPXX:APT:SSLS-AA¹⁷-LFF:DDSSNVI:LKVYP:VVR:SXGXH, RVPSTXX:APV:SSLS-AA¹⁷-LFF:DNGRVLL:LKVYP:VEE:XGXL, ASAAPXX:VPQ:SSLS-AA¹⁷-LFF:VGRKPKV:LKVYP:VRS:XKXS, ASASPXX:VSQ:SSLS-AA¹⁷-LFF:IGKTPKI:LKVYP:VKS:XKXS, ASASPXX:VPQ:SSLS-AA¹⁷-LFF:VGRTPKV:LKVYP:VKS:XKXS, NDEGLEX:VPT:SSLS-AA¹⁷-LFF:RIKPHQGQH:LKVYP:QHN:KXEXR, NDEGLEX:VPT:SSLS-AA¹⁷-LFF:RIKPHQGQH:LKVYP:EHS:QXEXR, SSVKXQP:SRV:SSLS-AA¹⁷-LFF:EYVRKKPKL:LKVYP:EEH:LEXAXA, RNVQXRP:TQV:SSLS-AA¹⁷-LFF:EIVRKKPIF:LKVYP:EDH:LAXKXE, KIPKAXX:VPT:SAIS-AA¹⁷-LYL:DENEKVV:LKNYQ:VVE:GXGXR, KIPKAXX:APT:NAIS-AA¹⁷-LYF:DENEKVV:LKKYR:VVR:GXGXR, GIPEPXX:APT:NAIS-AA¹⁷-LYF:DENKNVV:LKKYR:VVR:SXAXR, SIPKAXX:APT:NAIS-AA¹⁷-LYF:DEYDKVV:LKKYR:VVR:GXGXR, YVPKPXX:APT:NAIS-AA¹⁷-LYF:DDSSNVI:LKKYR:VVR:SXGXH, TVPKPXX:APT:NAIS-AA¹⁷-LYF:DDSSNVI:LKKYR:VVR:AXGXH, AVPKAXX:APT:NAIS-AA¹⁷-LYF:DSSNNVI:LKKYR:VVR:AXGXH, KVGKAXX:APT:NAIS-AA¹⁷-LYF:DDMGVPT:LKKYR:VVR:XGXR, KASKAXX:APT:NAIS-AA¹⁷-LYF:DKGVVTY:LKKYR:VVR:EXGXR, GSAGPXX:APT:NAIS-AA¹⁷-LYF:NDKQQII:LKKYR:VVR:RXGXS, AAPASXX:APT:NAIS-AA¹⁷-LYF:DAANNVV:LKKYR:VVR:AXGXR, STPPTXX:APT:NAIS-AA¹⁷-LYF:DSANNVV:LKKYR:VVR:SXGXR, HVPKPXX:APT:NAIS-AA¹⁷-LYF:DDSSNVI:LKKYR:VVR:SXGXH, RVPSTXX:APT:NAIS-AA¹⁷-LYF:DNGRVLL:LKKYR:VVR:XGXL, ASAAPXX:APT:NAIS-AA¹⁷-LYF:VGRKPKV:LKKYR:VVR:XKXS, ASASPXX:APT:NAIS-AA¹⁷-LYF:IGKTPKI:LKKYR:VVR:XKXS, ASASPXX:APT:NAIS-AA¹⁷-LYF:VGRTPKV:LKKYR:VVR:XKXS, NDEGLEX:APT:NAIS-AA¹⁷-LYF:RIKPHQGQH:LKKYR:VVR:KXEXR, NDEGLEX:APT:NAIS-AA¹⁷-LYF:RIKPHQGQH:LKKYR:VVR:QXEXR, SSVKXQP:APT:NAIS-AA¹⁷-LYF:EYVRKKPKL:LKKYR:VVR:LEXAXA, RNVQXRP:APT:NAIS-AA¹⁷-LYF:EIVRKKPIF:LKKYR:VVR:LAXKXE, KIPKAXX:VPT:NAIS-AA¹⁷-LYF:DENEKVV:LKKYR:VVE:GXGXR, GIPEPXX:VPE:NAIS-AA¹⁷-LYF:DENKNVV:LKKYR:TVE:SXAXR, SIPKAXX:VPT:NAIS-AA¹⁷-LYF:DEYDKVV:LKKYR:VVE:GXGXR, AVPKAXX:APT:NAIS-AA¹⁷-LYF:DSSNNVI:LKKYR:VVK:AXGXH, KVGKAXX:VPT:NAIS-AA¹⁷-LYF:DDMGVPT:LKKYR:VAE:XGXR, KASKAXX:VPT:NAIS-AA¹⁷-LYF:DKGVVTY:LKKYR:AVS:EXGXR, GSAGPXX:TPT:NAIS-AA¹⁷-LYF:NDKQQII:LKKYR:VVD:RXGXS, AAPASXX:VPA:NAIS-AA¹⁷-LYF:DAANNVV:LKKYR:VVE:AXGXR, STPPTXX:VPT:NAIS-AA¹⁷-LYF:DSANNVV:LKKYR:VVE:SXGXR, RVPSTXX:APV:NAIS-AA¹⁷-LYF:DNGRVLL:LKKYR:VEE:XGXL, ASAAPXX:VPQ:NAIS-AA¹⁷-LY^{F}:VGRKPKV:LKKYR:VRS:XKXS, ASASPXX:VSQ:NAIS-AA¹⁷-LYF:IGKTPKI:LKKYR:VKS:XKXS, ASASPXX:VPQ:NAIS-AA¹⁷-LYF:VGRTPKV:LKKYR:VKS:XKXS, NDEGLEX:VPT:NAIS-AA¹⁷-LYF:RIKPHQGQH:LKKYR:QHN:KXEXR, NDEGLEX:VPT:NAIS-AA¹⁷-LYF:RIKPHQGQH:LKKYR:EHS:QXEXR, SSVKXQP:SRV:NAIS-AA¹⁷-LYF:EYVRKKPKL:LKKYR:EEH:LEXAXA, RNVQXRP:TQV:NAIS-AA¹⁷-LYF:EIVRKKPIF:LKKYR:EDH:LAXKXE, HVTKPTX:APT:NAIS-AA¹⁷-LYF:DDSSNVI:LKKYR:VVR:SXGXH, KIPKAXX:APT:SATS-AA¹⁷-LYY:DENEKVV:LRKHR:VVK:GXGXR, GIPEPXX:APT:SATS-AA¹⁷-LYY:DENKNVV:LRKHR:VVK:SXAXR, SIPKAXX:APT:SATS-AA¹⁷-LYY:DEYDKVV:LRKHR:VVK:GXGXR, HVTKPTX:APT:SATS-AA¹⁷-LYY:DDSSNVI:LRKHR:VVK:SXGXH, YVPKPXX:APT:SATS-AA¹⁷-LYY:DDSSNVI:LRKHR:VVK:SXGXH, TVPKPXX:APT:SATS-AA¹⁷-LYY:DDSSNVI:LRKHR:VVK:AXGXH, KVGKAXX:APT:SATS-AA¹⁷-LYY:DDMGVPT:LRKHR:VVK:XGXR, KASKAXX:APT:SATS-AA¹⁷-LYY:DKGVVTY:LRKHR:VVK:EXGXR, GSAGPXX:APT:SATS-AA¹⁷-LYY:NDKQQII:LRKHR:VVK:RXGXS, AAPASXX:APT:SATS-AA¹⁷-LYY:DAANNVV:LRKHR:VVK:AXGXR, STPPTXX:APT:SATS-AA¹⁷-LYY:DSANNVV:LRKHR:VVK:SXGXR, HVPKPXX:APT:SATS-AA¹⁷-LYY:DDSSNVI:LRKHR:VVK:SXGXH, RVPSTXX:APT:SATS-AA¹⁷-LYY:DNGRVLL:LRKHR:VVK:XGXL, ASAAPXX:APT:SATS-AA¹⁷-LYY:VGRKPKV:LRKHR:VVK:XKXS, ASASPXX:APT:SATS-AA¹⁷-LYY:IGKTPKI:LRKHR:VVK:XKXS, ASASPXX:APT:SATS-AA¹⁷-LYY:VGRTPKV:LRKH R:VVK:XKXS, NDEGLEX:APT:SATS-AA¹⁷-LYY:RIKPHQGQH:LRKHR:VVK:KXEXR, NDEGLEX:APT:SATS-AA¹⁷-LYY:RIKPHQGQH:LRKHR:VVK:QXEXR, SSVKXQP:APT:SATS-AA¹⁷-LYY:EYVRKKPKL:LRKHR:VVK:LEXAXA, RNVQXRP:APT:SATS-AA¹⁷-LYY:EIVRKKPIF:LRKHR:VVK:LAXKXE, KIPKAXX:VPT:SATS-AA¹⁷-LYY:DENEKVV:LRKHR:VVE:GXGXR, GIPEPXX:VPE:SATS-AA¹⁷-LYY:DENKNVV:LRKHR:TVE:SXAXR, SIPKAXX:VPT:SATS-AA¹⁷-LYY:DEYDKVV:LRKHR:VVE:GXGXR, HVTKPTX:APT:SATS-AA¹⁷-LYY:DDSSNVI:LRKHR:VVR:SXGXH, YVPKPXX:APT:SATS-AA¹⁷-LYY:DDSSNVI:LRKHR:VVR:SXGXH, TVPKPXX:APT:SATS-AA¹⁷-LYY:DDSSNVI:LRKHR:VVR:AXGXH, KVGKAXX:VPT:SATS-AA¹⁷-LYY:DDMGVPT:LRKHR:VAE:XGXR, KASKAXX:VPT:SATS-AA¹⁷-LYY:DKGVVTY:LRKHR:AVS:EXGXR, GSAGPXX:TPT:SATS-AA¹⁷-LYY:NDKQQII:LRKHR:VVD:RXGXS, AAPASXX:VPA:SATS-AA¹⁷-LYY:DAANNVV:LRKHR:VVE:AXGXR, STPPTXX:VPT:SATS-AA¹⁷-LYY:DSANNVV:LRKHR:VVE:SXGXR, HVPKPXX:APT:SATS-AA¹⁷-LYY:DDSSNVI:LRKHR:VVR:SXGXH, RVPSTXX:APV:SATS-AA¹⁷-LYY:DNGRVLL:LRKHR:VEE:XGXL, ASAAPXX:VPQ:SATS-AA¹⁷-LYY:VGRKPKV:LRKHR:VRS:XKXS, ASASPXX:VSQ:SATS-AA¹⁷-LYY:IGKTPKI:LRKHR:VKS:XKXS, ASASPXX:VPQ:SATS-AA¹⁷-LYY:VGRTPKV:LRKHR:VKS:XKXS, NDEGLEX:VPT:SATS-AA¹⁷-LYY:RIKPHQGQH:LRKHR:QHN:KXEXR, NDEGLEX:VPT:SATS-AA¹⁷-LYY:RIKPHQGQH:LRKHR:EHS:QXEXR, SSVKXQP:SRV:SATS-AA¹⁷-LYY:EYVRKKPKL:LRKHR:EEH:LEXAXA, RNVQXRP:TQV:SATS-AA¹⁷-LYY:EIVRKKPIF:LRKHR:EDH:LAXKXE, KIPKAXX:VPT:SPIS-AA¹⁷-LYK:DENEKVV:LKYHY:VAE:GXGXR, GIPEPXX:VPT:SPIS-AA¹⁷-LYK:DENKNVV:LKYHY:VAE:SXAXR, SIPKAXX:VPT:SPIS-AA¹⁷-LYK:DEYDKVV:LKYHY:VAE:GXGXR, HVTKPTX:VPT:SPIS-AA¹⁷-LYK:DDSSNVI:LKYHY:VAE:SXGXH, YVPKPXX:VPT:SPIS-AA¹⁷-LYK:DDSSNVI:LKYHY:VAE:SXGXH, TVPKPXX:VPT:SPIS-AA¹⁷-LYK:DDSSNVI:LKYHY:VAE:AXGXH, AVPKAXX:VPT:SPIS-AA¹⁷-LYK:DSSNNVI:LKYHY:VAE:AXGXH, KASKAXX:VPT:SPIS-AA¹⁷-LYK:DKGVVTY:LKYHY:VAE:EXGXR, GSAGPXX:VPT:SPIS-AA¹⁷-LYK:NDKQQII:LKYHY:VAE:RXGXS, AAPASXX:VPT:SPIS-AA¹⁷-LYK:DAANNVV:LKYHY:VAE:AXGXR, STPPTXX:VPT:SPIS-AA¹⁷-LYK:DSANNVV:LKYHY:VAE:SXGXR, HVPKPXX:VPT:SPIS-AA¹⁷-LYK:DDSSNVI:LKYHY:VAE:SXGXH, RVPSTXX:VPT:SPIS-AA¹⁷-LYK:DNGRVLL:LKYHY:VAE:XGXL, ASAAPXX:VPT:SPIS-AA¹⁷-LYK:VGRKPKV:LKYHY:VAE:XKXS, ASASPXX:VPT:SPIS-AA¹⁷-LYK:IGKTPKI:LKYHY:VAE:XKXS, ASASPXX:VPT:SPIS-AA¹⁷-LYK:VGRTPKV:LKYHY:VAE:XKXS, NDEGLEX:VPT:SPIS-AA¹⁷-LYK:RIKPHQGQH:LKYHY:VAE:KXEXR, NDEGLEX:VPT:SPIS-AA¹⁷-LYK:RIKPHQGQH:LKYHY:VAE:QXEXR, SSVKXQP:VPT:SPIS-AA¹⁷-LYK:EYVRKKPKL:LKYHY:VAE:LEXAXA, RNVQXRP:VPT:SPIS-AA¹⁷-LYK:EIVRKKPIF:LKYHY:VAE:LAXKXE, KIPKAXX:VPT:SPIS-AA¹⁷-LYK:DENEKVV:LKYHY:VVE:GXGXR, GIPEPXX:VPE:SPIS-AA¹⁷-LYK:DENKNVV:LKYHY:TVE:SXAXR, SIPKAXX:VPT:SPIS-AA¹⁷-LYK:DEYDKVV:LKYHY:VVE:GXGXR, HVTKPTX:APT:SPIS-AA¹⁷-LYK:DDSSNVI:LKYHY:VVR:SXGXH, YVPKPXX:APT:SPIS-AA¹⁷-LYK:DDSSNVI:LKYHY:VVR:SXGXH, TVPKPXX:APT:SPIS-AA¹⁷-LYK:DDSSNVI:LKYHY:VVR:AXGXH, AVPKAXX:APT:SPIS-AA¹⁷-LYK:DSSNNVI:LKYHY:VVK:AXGXH, KASKAXX:VPT:SPIS-AA¹⁷-LYK:DKGVVTY:LKYHY:AVS:EXGXR, GSAGPXX:TPT:SPIS-AA¹⁷-LYK:NDKQQII:LKYHY:VVD:RXGXS, AAPASXX:VPA:SPIS-AA¹⁷-LYK:DAANNVV:LKYHY:VVE:AXGXR, STPPTXX:VPT:SPIS-AA¹⁷-LYK:DSANNVV:LKYHY:VVE:SXGXR, HVPKPXX:APT:SPIS-AA¹⁷-LYK:DDSSNVI:LKYHY:VVR:SXGXH, RVPSTXX:APV:SPIS-AA¹⁷-LYK:DNGRVLL:LKYHY:VEE:XGXL, ASAAPXX:VPQ:SPIS-AA¹⁷-LYK:VGRKPKV:LKYHY:VRS:XKXS, ASASPXX:VSQ:SPIS-AA¹⁷-LYK:IGKTPKI:LKYHY:VKS:XKXS, ASASPXX:VPQ:SPIS-AA¹⁷-LYK:VGRTPKV:LKYHY:VKS:XKXS, NDEGLEX:VPT:SPIS-AA¹⁷-LYK:RIKPHQGQH:LKYHY:QHN:KXEXR, NDEGLEX:VPT:SPIS-AA¹⁷-LYK:RIKPHQGQH:LKYHY:EHS:QXEXR, SSVKXQP:SRV:SPIS-AA¹⁷-LYK:EYVRKKPKL:LKYHY:EEH:LEXAXA, RNVQXRP:TQV:SPIS-AA¹⁷-LYK:EIVRKKPIF:LKYHY:EDH:LAXKXE, KIPKAXX:VPT:EPIS-AA¹⁷-LYL:DENEKVV:KFKYE:AVS:GXGXR, GIPEPXX:VPT:EPIS-AA¹⁷-LYL:DENKNVV:KFKYE:AVS:SXAXR, SIPKAXX:VPT:EPIS-AA¹⁷-LYL:DEYDKVV:KFKYE:AVS:GXGXR, HVTKPTX:VPT:EPIS-AA¹⁷-LYL:DDSSNVI:KFKYE:AVS:SXGXH, YVPKPXX:VPT:EPIS-AA¹⁷-LYL:DDSSNVI:KFKYE:AVS:SXGXH, TVPKPXX:VPT:EPIS-AA¹⁷-LYL:DDSSNVI:KFKYE:AVS:AXGXH, AVPKAXX:VPT:EPIS-AA¹⁷-LYL:DSSNNVI:KFKYE:AVS:AXGXH, KVGKAXX:VPT:EPIS-AA¹⁷-LYL:DDMGVPT:KFKYE:AVS:XGXR, GSAGPXX:VPT:EPIS-AA¹⁷-LYL:NDKQQII:KFKYE:AVS:RXGXS, AAPASXX:VPT:EPIS-AA¹⁷-LYL:DAANNVV:KFKYE:AVS:AXGXR, STPPTXX:VPT:EPIS-AA¹⁷-LYL:DSANNVV:KFKYE:AVS:SXGXR, HVPKPXX:VPT:EPIS-AA¹⁷-LYL:DDSSNVI:KFKYE:AVS:SXGXH, RVPSTXX:VPT:EPIS-AA¹⁷-LYL:DNGRVLL:KFKYE:AVS:XGXL, ASAAPXX:VPT:EPIS-AA¹⁷-LYL:VGRKPKV:KFKYE:AVS:XKXS, ASASPXX:VPT:EPIS-AA¹⁷-LYL:IGKTPKI:KFKYE:AVS:XKXS, ASASPXX:VPT:EPIS-AA¹⁷-LYL:VGRTPKV:KFKYE:AVS:XKXS, NDEGLEX:VPT:EPIS-AA¹⁷-LYL:RIKPHQGQH:KFKYE:AVS:KXEXR, NDEGLEX:VPT:EPIS-AA¹⁷-LYL:RIKPHQGQH:KFKYE:AVS:QXEXR, SSVKXQP:VPT:EPIS-AA¹⁷-LYL:EYVRKKPKL:KFKYE:AVS:LEXAXA, RNVQXRP:VPT:EPIS-AA¹⁷-LYL:EIVRKKPIF:KFKYE:AVS:LAXKXE, KIPKAXX:VPT:EPIS-AA¹⁷-LYL:DENEKVV:KFKYE:VVE:GXGXR, GIPEPXX:VPE:EPIS-AA¹⁷-LYL:DENKNVV:KFKYE:TVE:SXAXR, SIPKAXX:VPT:EPIS-AA¹⁷-LYL:DEYDKVV:KFKYE:VVE:GXGXR, HVTKPTX:APT:EPIS-AA¹⁷-LYL:DDSSNVI:KFKYE:VVR:SXGXH, YVPKPXX:APT:EPIS-AA¹⁷-LYL:DDSSNVI:KFKYE:VVR:SXGXH, TVPKPXX:APT:EPIS-AA¹⁷-LYL:DDSSNVI:KFKYE:VVR:AXGXH, AVPKAXX:APT:EPIS-AA¹⁷-LYL:DSSNNVI:KFKYE:VVK:AXGXH, KVGKAXX:VPT:EPIS-AA¹⁷-LYL:DDMGVPT:KFKYE:VAE:XGXR, GSAGPXX:TPT:EPIS-AA¹⁷-LYL:NDKQQII:KFKYE:VVD:RXGXS, AAPASXX:VPA:EPIS-AA¹⁷-LYL:DAANNVV:KFKYE:VVE:AXGXR, STPPTXX:VPT:EPIS-AA¹⁷-LYL:DSANNVV:KFKYE:VVE:SXGXR, HVPKPXX:APT:EPIS-AA¹⁷-LYL:DDSSNVI:KFKYE:VVR:SXGXH, RVPSTXX:APV:EPIS-AA¹⁷-LYL:DNGRVLL:KFKYE:VEE:XGXL, ASAAPXX:VPQ:EPIS-AA¹⁷-LYL:VGRKPKV:KFKYE:VRS:XKXS, ASASPXX:VSQ:EPIS-AA¹⁷-LYL:IGKTPKI:KFKYE:VKS:XKXS, ASASPXX:VPQ:EPIS-AA¹⁷-LYL:VGRTPKV:KFKYE:VKS:XKXS, NDEGLEX:VPT:EPIS-AA¹⁷-LYL:RIKPHQGQH:KFKYE:QHN:KXEXR, NDEGLEX:VPT:EPIS-AA¹⁷-LYL:RIKPHQGQH:KFKYE:EHS:QXEXR, SSVKXQP:SRV:EPIS-AA¹⁷-LYL:EYVRKKPKL:KFKYE:EEH:LEXAXA, RNVQXRP:TQV:EPIS-AA¹⁷-LYL:EIVRKKPIF:KFKYE:EDH:LAXKXE, KIPKAXX:TPT:SPIN-AA¹⁷-LYF:DENEKVV:YGKIP:VVD:GXGXR, GIPEPXX:TPT:SPIN-AA¹⁷-LYF:DENKNVV:YGKIP:VVD:SXAXR, SIPKAXX:TPT:SPIN-AA¹⁷-LYF:DEYDKVV:YGKIP:VVD:GXGXR, HVTKPTX:TPT:SPIN-AA¹⁷-LYF:DDSSNVI:YGKIP:VVD:SXGXH, YVPKPXX:TPT:SPIN-AA¹⁷-LYF:DDSSNVI:YGKIP:VVD:SXGXH, TVPKPXX:TPT:SPIN-AA¹⁷-LYF:DDSSNVI:YGKIP:VVD:AXGXH, AVPKAXX:TPT:SPIN-AA¹⁷-LYF:DSSNNVI:YGKIP:VVD:AXGXH, KVGKAXX:TPT:SPIN-AA¹⁷-LYF:DDMGVPT:YGKIP:VVD:XGXR, KASKAXX:TPT:SPIN-AA¹⁷-LYF:DKGVVTY:YGKIP:VVD:EXGXR, AAPASXX:TPT:SPIN-AA¹⁷-LYF:DAANNVV:YGKIP:VVD:AXGXR, STPPTXX:TPT:SPIN-AA¹⁷-LYF:DSANNVV:YGKIP:VVD:SXGXR, HVPKPXX:TPT:SPIN-AA¹⁷-LYF:DDSSNVI:YGKIP:VVD:SXGXH, RVPSTXX:TPT:SPIN-AA¹⁷-LYF:DNGRVLL:YGKIP:VVD:XGXL, ASAAPXX:TPT:SPIN-AA¹⁷-LYF:VGRKPKV:YGKIP:VVD:XKXS, ASASPXX:TPT:SPIN-AA¹⁷-LYF:IGKTPKI:YGKIP:VVD:XKXS, ASASPXX:TPT:SPIN-AA¹⁷-LYF:VGRTPKV:YGKIP:VVD:XKXS, NDEGLEX:TPT:SPIN-AA¹⁷-LYF:RIKPHQGQH:YGKIP:VVD:KXEXR, NDEGLEX:TPT:SPIN-AA¹⁷-LYF:RIKPHQGQH:YGKIP:VVD:QXEXR, SSVKXQP:TPT:SPIN-AA¹⁷-LYF:EYVRKKPKL:YGKIP:VVD:LEXAXA, RNVQXRP:TPT:SPIN-AA¹⁷-LYF:EIVRKKPIF:YGKIP:VVD:LAXKXE, KIPKAXX:VPT:SPIN-AA¹⁷-LYF:DENEKVV:YGKIP:VVE:GXGXR, GIPEPXX:VPE:SPIN-AA¹⁷-LYF:DENKNVV:YGKIP:TVE:SXAXR, SIPKAXX:VPT:SPIN-AA¹⁷-LYF:DEYDKVV:YGKIP:VVE:GXGXR, HVTKPTX:APT:SPIN-AA¹⁷-LYF:DDSSNVI:YGKIP:VVR:SXGXH, YVPKPXX:APT:SPIN-AA¹⁷-LYF:DDSSNVI:YGKIP:VVR:SXGXH, TVPKPXX:APT:SPIN-AA¹⁷-LYF:DDSSNVI:YGKIP:VVR:AXGXH, AVPKAXX:APT:SPIN-AA¹⁷-LYF:DSSNNVI:YGKIP:VVK:AXGXH, KVGKAXX:VPT:SPIN-AA¹⁷-LYF:DDMGVPT:YGKIP:VAE:XGXR, KASKAXX:VPT:SPIN-AA¹⁷-LYF:DKGVVTY:YGKIP:AVS:EXGXR, AAPASXX:VPA:SPIN-AA¹⁷-LYF:DAANNVV:YGKIP:VVE:AXGXR, STPPTXX:VPT:SPIN-AA¹⁷-LYF:DSANNVV:YGKIP:VVE:SXGXR, HVPKPXX:APT:SPIN-AA¹⁷-LYF:DDSSNVI:YGKIP:VVR:SXGXH, RVPSTXX:APV:SPIN-AA¹⁷-LYF:DNGRVLL:YGKIP:VEE:XGXL, ASAAPXX:VPQ:SPIN-AA¹⁷-LYF:VGRKPKV:YGKIP:VRS:XKXS, ASASPXX:VSQ:SPIN-AA¹⁷-LYF:IGKTPKI:YGKIP:VKS:XKXS, ASASPXX:VPQ:SPIN-AA¹⁷-LYF:VGRTPKV:YGKIP:VKS:XKXS, NDEGLEX:VPT:SPIN-AA¹⁷-LYF:RIKPHQGQH:YGKIP:QHN:KXEXR, NDEGLEX:VPT:SPIN-AA¹⁷-LYF:RIKPHQGQH:YGKIP:EHS:QXEXR, SSVKXQP:SRV:SPIN-AA¹⁷-LYF:EYVRKKPKL:YGKIP:EEH:LEXAXA, RNVQXRP:TQV:SPIN-AA¹⁷-LYF:EIVRKKPIF:YGKIP:EDH:LAXKXE, KIPKAXX:VPA:SPIS-AA¹⁷-LYI:DENEKVV:YKQYE:VVE:GXGXR, GIPEPXX:VPA:SPIS-AA¹⁷-LYI:DENKNVV:YKQYE:VVE:SXAXR, SIPKAXX:VPA:SPIS-AA¹⁷-LYI:DEYDKVV:YKQYE:VVE:GXGXR, HVTKPTX:VPA:SPIS-AA¹⁷-LYI:DDSSNVI:YKQYE:VVE:SXGXH, YVPKPXX:VPA:SPIS-AA¹⁷-LYI:DDSSNVI:YKQYE:VVE:SXGXH, TVPKPXX:VPA:SPIS-AA¹⁷-LYI:DDSSNVI:YKQYE:VVE:AXGXH, AVPKAXX:VPA:SPIS-AA¹⁷-LYI:DSSNNVI:YKQYE:VVE:AXGXH, KVGKAXX:VPA:SPIS-AA¹⁷-LYI:DDMGVPT:YKQYE:VVE:XGXR, KASKAXX:VPA:SPIS-AA¹⁷-LYI:DKGVVTY:YKQYE:VVE:EXGXR, GSAGPXX:VPA:SPIS-AA¹⁷-LYI:NDKQQII:YKQYE:VVE:RXGXS, STPPTXX:VPA:SPIS-AA¹⁷-LYI:DSANNVV:YKQYE:VVE:SXGXR, HVPKPXX:VPA:SPIS-AA¹⁷-LYI:DDSSNVI:YKQYE:VVE:SXGXH, RVPSTXX:VPA:SPIS-AA¹⁷-LYI:DNGRVLL:YKQYE:VVE:XGXL, ASAAPXX:VPA:SPIS-AA¹⁷-LYI:VGRKPKV:YKQYE:VVE:XKXS, ASASPXX:VPA:SPIS-AA¹⁷-LYI:IGKTPKI:YKQYE:VVE:XKXS, ASASPXX:VPA:SPIS-AA¹⁷-LYI:VGRTPKV:YKQYE:VVE:XKXS, NDEGLEX:VPA:SPIS-AA¹⁷-LYI:RIKPHQGQH:YKQYE:VVE:KXEXR, NDEGLEX:VPA:SPIS-AA¹⁷-LYI:RIKPHQGQH:YKQYE:VVE:QXEXR, SSVKXQP:VPA:SPIS-AA¹⁷-LYI: EYVRKKPKL:YKQYE:VVE:LEXAXA, RNVQXRP:VPA:SPIS-AA¹⁷-LYI:EIVRKKPIF:YKQYE:VVE:LAXKXE, KIPKAXX:VPT:SPIS-AA¹⁷-LYI:DENEKVV:YKQYE:VVE:GXGXR, GIPEPXX:VPE:SPIS-AA¹⁷-LYI:DENKNVV:YKQYE:TVE:SXAXR, SIPKAXX:VPT:SPIS-AA¹⁷-LYI:DEYDKVV:YKQYE:VVE:GXGXR, HVTKPTX:APT:SPIS-AA¹⁷-LYI:DDSSNVI:YKQYE:VVR:SXGXH, YVPKPXX:APT:SPIS-AA¹⁷-LYI:DDSSNVI:YKQYE:VVR:SXGXH, TVPKPXX:APT:SPIS-AA¹⁷-LYI:DDSSNVI:YKQYE:VVR:AXGXH, AVPKAXX:APT:SPIS-AA¹⁷-LYI:DSSNNVI:YKQYE:VVK:AXGXH, KVGKAXX:VPT:SPIS-AA¹⁷-LYI:DDMGVPT:YKQYE:VAE:XGXR, KASKAXX:VPT:SPIS-AA¹⁷-LYI:DKGVVTY:YKQYE:AVS:EXGXR, GSAGPXX:TPT:SPIS-AA¹⁷-LYI:NDKQQII:YKQYE:VVD:RXGXS, STPPTXX:VPT:SPIS-AA¹⁷-LYI:DSANNVV:YKQYE:VVE:SXGXR, HVPKPXX:APT:SPIS-AA¹⁷-LYI:DDSSNVI:YKQYE:VVR:SXGXH, RVPSTXX:APV:SPIS-AA¹⁷-LYI:DNGRVLL:YKQYE:VEE:XGXL, ASAAPXX:VPQ:SPIS-AA¹⁷-LYI:VGRKPKV:YKQYE:VRS:XKXS, ASASPXX:VSQ:SPIS-AA¹⁷-LYI:IGKTPKI:YKQYE:VKS:XKXS, ASASPXX:VPQ:SPIS-AA¹⁷-LYI:VGRTPKV:YKQYE:VKS:XKXS, NDEGLEX:VPT:SPIS-AA¹⁷-LYI:RIKPHQGQH:YKQYE:QHN:KXEXR, NDEGLEX:VPT:SPIS-AA¹⁷-LYI:RIKPHQGQH:YKQYE:EHS:QXEXR, SSVKXQP:SRV:SPIS-AA¹⁷-LYI:EYVRKKPKL:YKQYE:EEH:LEXAXA, RNVQXRP:TQV:SPIS-AA¹⁷-LYI:EIVRKKPIF:YKQYE:EDH:LAXKXE, KIPKAXX:VPT:SPIS-AA¹⁷-LFI:DENEKVV:YKQYE:VVE:GXGXR, GIPEPXX:VPT:SPIS-AA¹⁷-LFI:DENKNVV:YKQYE:VVE:SXAXR, SIPKAXX:VPT:SPIS-AA¹⁷-LFI:DEYDKVV:YKQYE:VVE:GXGXR, HVTKPTX:VPT:SPIS-AA¹⁷-LFI:DDSSNVI:YKQYE:VVE:SXGXH, YVPKPXX:VPT:SPIS-AA¹⁷-LFI:DDSSNVI:YKQYE:VVE:SXGXH, TVPKPXX:VPT:SPIS-AA¹⁷-LFI:DDSSNVI:YKQYE:VVE:AXGXH, AVPKAXX:VPT:SPIS-AA¹⁷-LFI:DSSNNVI:YKQYE:VVE:AXGXH, KVGKAXX:VPT:SPIS-AA¹⁷-LFI:DDMGVPT:YKQYE:VVE:XGXR, KASKAXX:VPT:SPIS-AA¹⁷-LFI:DKGVVTY:YKQYE:VVE:EXGXR, GSAGPXX:VPT:SPIS-AA¹⁷-LFI:NDKQQII:YKQYE:VVE:RXGXS, AAPASXX:VPT:SPIS-AA¹⁷-LFI:DAANNVV:YKQYE:VVE:AXGXR, HVPKPXX:VPT:SPIS-AA¹⁷-LFI:DDSSNVI:YKQYE:VVE:SXGXH, RVPSTXX:VPT:SPIS-AA¹⁷-LFI:DNGRVLL:YKQYE:VVE:XGXL, ASAAPXX:VPT:SPIS-AA¹⁷-LFI:VGRKPKV:YKQYE:VVE:XKXS, ASASPXX:VPT:SPIS-AA¹⁷-LFI:IGKTPKI:YKQYE:VVE:XKXS, ASASPXX:VPT:SPIS-AA¹⁷-LFI:VGRTPKV:YKQYE:VVE:XKXS, NDEGLEX:VPT:SPIS-AA¹⁷-LFI:RIKPHQGQH:YKQYE:VVE:KXEXR, NDEGLEX:VPT:SPIS-AA¹⁷-LFI:RIKPHQGQH:YKQYE:VVE:QXEXR, SSVKXQP:VPT:SPIS-AA¹⁷-LFI:EYVRKKPKL:YKQYE:VVE:LEXAXA, RNVQXRP:VPT:SPIS-AA¹⁷-LFI:EIVRKKPIF:YKQYE:VVE:LAXKXE, GIPEPXX:VPE:SPIS-AA¹⁷-LFI:DENKNVV:YKQYE:TVE:SXAXR, HVTKPTX:APT:SPIS-AA¹⁷-LFI:DDSSNVI:YKQYE:VVR:SXGXH, YVPKPXX:APT:SPIS-AA¹⁷-LFI:DDSSNVI:YKQYE:VVR:SXGXH, TVPKPXX:APT:SPIS-AA¹⁷-LFI:DDSSNVI:YKQYE:VVR:AXGXH, AVPKAXX:APT:SPIS-AA¹⁷-LFI:DSSNNVI:YKQYE:VVK:AXGXH, KVGKAXX:VPT:SPIS-AA¹⁷-LFI:DDMGVPT:YKQYE:VAE:XGXR, KASKAXX:VPT:SPIS-AA¹⁷-LFI:DKGVVTY:YKQYE:AVS:EXGXR, GSAGPXX:TPT:SPIS-AA¹⁷-LFI:NDKQQII:YKQYE:VVD:RXGXS, AAPASXX:VPA:SPIS-AA¹⁷-LFI:DAANNVV:YKQYE:VVE:AXGXR, HVPKPXX:APT:SPIS-AA¹⁷-LFI:DDSSNVI:YKQYE:VVR:SXGXH, RVPSTXX:APV:SPIS-AA¹⁷-LFI:DNGRVLL:YKQYE:VEE:XGXL, ASAAPXX:VPQ:SPIS-AA¹⁷-LFI:VGRKPKV:YKQYE:VRS:XKXS, ASASPXX:VSQ:SPIS-AA¹⁷-LFI:IGKTPKI:YKQYE:VKS:XKXS, ASASPXX:VPQ:SPIS-AA¹⁷-LFI:VGRTPKV:YKQYE:VKS:XKXS, NDEGLEX:VPT:SPIS-AA¹⁷-LFI:RIKPHQGQH:YKQYE:QHN:KXEXR, NDEGLEX:VPT:SPIS-AA¹⁷-LFI:RIKPHQGQH:YKQYE:EHS:QXEXR, SSVKXQP:SRV:SPIS-AA¹⁷-LFI:EYVRKKPKL:YKQYE:EEH:LEXAXA, RNVQXRP:TQV:SPIS-AA¹⁷-LFI:EIVRKKPIF:YKQYE:EDH:LAXKXE, KIPKAXX:APV:KPLS-AA¹⁷-LYV:DENEKVV:DHHKD:VEE:GXGXR, GIPEPXX:APV:KPLS-AA¹⁷-LYV:DENKNVV:DHHKD:VEE:SXAXR, SIPKAXX:APV:KPLS-AA¹⁷-LYV:DEYDKVV:DHHKD:VEE:GXGXR, HVTKPTX:APV:KPLS-AA¹⁷-LYV:DDSSNVI:DHHKD:VEE:SXGXH, YVPKPXX:APV:KPLS-AA¹⁷-LYV:DDSSNVI:DHHKD:VEE:SXGXH, TVPKPXX:APV:KPLS-AA¹⁷-LYV:DDSSNVI:DHHKD:VEE:AXGXH, AVPKAXX:APV:KPLS-AA¹⁷-LYV:DSSNNVI:DHHKD:VEE:AXGXH, KVGKAXX:APV:KPLS-AA¹⁷-LYV:DDMGVPT:DHHKD:VEE:XGXR, KASKAXX:APV:KPLS-AA¹⁷-LYV:DKGVVTY:DHHKD:VEE:EXGXR, GSAGPXX:APV:KPLS-AA¹⁷-LYV:NDKQQII:DHHKD:VEE:RXGXS, AAPASXX:APV:KPLS-AA¹⁷-LYV:DAANNVV:DHHKD:VEE:AXGXR, STPPTXX:APV:KPLS-AA¹⁷-LYV:DSANNVV:DHHKD:VEE:SXGXR, HVPKPXX:APV:KPLS-AA¹⁷-LYV:DDSSNVI:DHHKD:VEE:SXGXH, ASAAPXX:APV:KPLS-AA¹⁷-LYV:VGRKPKV:DHHKD:VEE:XKXS, ASASPXX:APV:KPLS-AA¹⁷-LYV:IGKTPKI:DHHKD:VEE:XKXS, ASASPXX:APV:KPLS-AA¹⁷-LYV:VGRTPKV:DHHKD:VEE:XKXS, NDEGLEX:APV:KPLS-AA¹⁷-LYV:RIKPHQGQH:DHHKD:VEE:KXEXR, NDEGLEX:APV:KPLS-AA¹⁷-LYV:RIKPHQGQH:DHHKD:VEE:QXEXR, SSVKXQP:APV:KPLS-AA¹⁷-LYV:EYVRKKPKL:DHHKD:VEE:LEXAXA, RNVQXRP:APV:KPLS-AA¹⁷-LYV:EIVRKKPIF:DHHKD:VEE:LAXKXE, KIPKAXX:VPT:KPLS-AA¹⁷-LYV:DENEKVV:DHHKD:VVE:GXGXR, GIPEPXX:VPE:KPLS-AA¹⁷-LYV:DENKNVV:DHHKD:TVE:SXAXR, SIPKAXX:VPT:KPLS-AA¹⁷-LYV:DEYDKVV:DHHKD:VVE:GXGXR, HVTKPTX:APT:KPLS-AA¹⁷-LYV:DDSSNVI:DHHKD:VVR:SXGXH, YVPKPXX:APT:KPLS-AA¹⁷-LYV:DDSSNVI:DHHKD:VVR:SXGXH, TVPKPXX:APT:KPLS-AA¹⁷-LYV:DDSSNVI:DHHKD:VVR:AXGXH, AVPKAXX:APT:KPLS-AA¹⁷-LYV:DSSNNVI:DHHKD:VVK:AXGXH, KVGKAXX:VPT:KPLS-AA¹⁷-LYV:DDMGVPT:DHHKD:VAE:XGXR, KASKAXX:VPT:KPLS-AA¹⁷-LYV:DKGVVTY:DHHKD:AVS:EXGXR, GSAGPXX:TPT:KPLS-AA¹⁷-LYV:NDKQQII:DHHKD:VVD:RXGXS, AAPASXX:VPA:KPLS-AA¹⁷-LYV:DAANNVV:DHHKD:VVE:AXGXR, STPPTXX:VPT:KPLS-AA¹⁷-LYV:DSANNVV:DHHKD:VVE:SXGXR, HVPKPXX:APT:KPLS-AA¹⁷-LYV:DDSSNVI:DHHKD:VVR:SXGXH, ASAAPXX:VPQ:KPLS-AA¹⁷-LYV:VGRKPKV:DHHKD:VRS:XKXS, ASASPXX:VSQ:KPLS-AA¹⁷-LYV:IGKTPKI:DHHKD:VKS:XKXS, ASASPXX:VPQ:KPLS-AA¹⁷-LYV:VGRTPKV:DHHKD:VKS:XKXS, NDEGLEX:VPT:KPLS-AA¹⁷-LYV:RIKPHQGQH:DHHKD:QHN:KXEXR, NDEGLEX:VPT:KPLS-AA¹⁷-LYV:RIKPHQGQH:DHHKD:EHS:QXEXR, SSVKXQP:SRV:KPLS-AA¹⁷-LYV:EYVRKKPKL:DHHKD:EEH:LEXAXA, RNVQXRP:TQV:KPLS-AA¹⁷-LYV:EIVRKKPIF:DHHKD:EDH:LAXKXE, KIPKAXX:VPQ:EPLP-AA¹⁷-VYY:DENEKVV:EQLSN:VRS:GXGXR, GIPEPXX:VPQ:EPLP-AA¹⁷-VYY:DENKNVV:EQLSN:VRS:SXAXR, SIPKAXX:VPQ:EPLP-AA¹⁷-VYY:DEYDKVV:EQLSN:VRS:GXGXR, HVTKPTX:VPQ:EPLP-AA¹⁷-VYY:DDSSNVI:EQLSN:VRS:SXGXH, YVPKPXX:VPQ:EPLP-AA¹⁷-VYY:DDSSNVI:EQLSN:VRS:SXGXH, TVPKPXX:VPQ:EPLP-AA¹⁷-VYY:DDSSNVI:EQLSN:VRS:AXGXH, AVPKAXX:VPQ:EPLP-AA¹⁷-VYY:DSSNNVI:EQLSN:VRS:AXGXH, KVGKAXX:VPQ:EPLP-AA¹⁷-VYY:DDMGVPT:EQLSN:VRS:XGXR, KASKAXX:VPQ:EPLP-AA¹⁷-VYY:DKGVVTY:EQLSN:VRS:EXGXR, GSAGPXX:VPQ:EPLP-AA¹⁷-VYY:NDKQQII:EQLSN:VRS:RXGXS, AAPASXX:VPQ:EPLP-AA¹⁷-VYY:DAANNVV:EQLSN:VRS:AXGXR, STPPTXX:VPQ:EPLP-AA¹⁷-VYY:DSANNVV:EQLSN:VRS:SXGXR, HVPKPXX:VPQ:EPLP-AA¹⁷-VYY:DDSSNVI:EQLSN:VRS:SXGXH, RVPSTXX:VPQ:EPLP-AA¹⁷-VYY:DNGRVLL:EQLSN:VRS:XGXL, ASASPXX:VPQ:EPLP-AA¹⁷-VYY:IGKTPKI:EQLSN:VRS:XKXS, ASASPXX:VPQ:EPLP-AA¹⁷-VYY:VGRTPKV:EQLSN:VRS:XKXS, NDEGLEX:VPQ:EPLP-AA¹⁷-VYY:RIKPHQGQH:EQLSN:VRS:KXEXR, NDEGLEX:VPQ:EPLP-AA¹⁷-VYY:RIKPHQGQH:EQLSN:VRS:QXEXR, SSVKXQP:VPQ:EPLP-AA¹⁷-VYY:EYVRKKPKL:EQLSN:VRS:LEXAXA, RNVQXRP:VPQ:EPLP-AA¹⁷-VYY:EIVRKKPIF:EQLSN:VRS:LAXKXE, KIPKAXX:VPT:EPLP-AA¹⁷-VYY:DENEKVV:EQLSN:VVE:GXGXR, GIPEPXX:VPE:EPLP-AA¹⁷-VYY:DENKNVV:EQLSN:TVE:SXAXR, SIPKAXX:VPT:EPLP-AA¹⁷-VYY:DEYDKVV:EQLSN:VVE:GXGXR, HVTKPTX:APT:EPLP-AA¹⁷-VYY:DDSSNVI:EQLSN:VVR:SXGXH, YVPKPXX:APT:EPLP-AA¹⁷-VYY:DDSSNVI:EQLSN:VVR:SXGXH, TVPKPXX:APT:EPLP-AA¹⁷-VYY:DDSSNVI:EQLSN:VVR:AXGXH, AVPKAXX:APT:EPLP-AA¹⁷-VYY:DSSNNVI:EQLSN:VVK:AXGXH, KVGKAXX:VPT:EPLP-AA¹⁷-VYY:DDMGVPT:EQLSN:VAE:XGXR, KASKAXX:VPT:EPLP-AA¹⁷-VYY:DKGVVTY:EQLSN:AVS:EXGXR, GSAGPXX:TPT:EPLP-AA¹⁷-VYY:NDKQQII:EQLSN:VVD:RXGXS, AAPASXX:VPA:EPLP-AA¹⁷-VYY:DAANNVV:EQLSN:VVE:AXGXR, STPPTXX:VPT:EPLP-AA¹⁷-VYY:DSANNVV:EQLSN:VVE:SXGXR, HVPKPXX:APT:EPLP-AA¹⁷-VYY:DDSSNVI:EQLSN:VVR:SXGXH, RVPSTXX:APV:EPLP-AA¹⁷-VYY:DNGRVLL:EQLSN:VEE:XGXL, ASASPXX:VSQ:EPLP-AA¹⁷-VYY:IGKTPKI:EQLSN:VKS:XKXS, ASASPXX:VPQ:EPLP-AA¹⁷-VYY:VGRTPKV:EQLSN:VKS:XKXS, NDEGLEX:VPT:EPLP-AA¹⁷-VYY:RIKPHQGQH:EQLSN:QHN:KXEXR, NDEGLEX:VPT:EPLP-AA¹⁷-VYY:RIKPHQGQH:EQLSN:EHS:QXEXR, SSVKXQP:SRV:EPLP-AA¹⁷-VYY:EYVRKKPKL:EQLSN:EEH:LEXAXA, RNVQXRP:TQV:EPLP-AA¹⁷-VYY:EIVRKKPIF:EQLSN:EDH:LAXKXE, KIPKAXX:VSQ:EPLT-AA¹⁷-LYY:DENEKVV:EQLSN:VKS:GXGXR, GIPEPXX:VSQ:EPLT-AA¹⁷-LYY:DENKNVV:EQLSN:VKS:SXAXR, SIPKAXX:VSQ:EPLT-AA¹⁷-LYY:DEYDKVV:EQLSN:VKS:GXGXR, HVTKPTX:VSQ:EPLT-AA¹⁷-LYY:DDSSNVI:EQLSN:VKS:SXGXH, YVPKPXX:VSQ:EPLT-AA¹⁷-LYY:DDSSNVI:EQLSN:VKS:SXGXH, TVPKPXX:VSQ:EPLT-AA¹⁷-LYY:DDSSNVI:EQLSN:VKS:AXGXH, AVPKAXX:VSQ:EPLT-AA¹⁷-LYY:DSSNNVI:EQLSN:VKS:AXGXH, KVGKAXX:VSQ:EPLT-AA¹⁷-LYY:DDMGVPT:EQLSN:VKS:XGXR, KASKAXX:VSQ:EPLT-AA¹⁷-LYY:DKGVVTY:EQLSN:VKS:EXGXR, GSAGPXX:VSQ:EPLT-AA¹⁷-LYY:NDKQQII:EQLSN:VKS:RXGXS, AAPASXX:VSQ:EPLT-AA¹⁷-LYY:DAANNVV:EQLSN:VKS:AXGXR, STPPTXX:VSQ:EPLT-AA¹⁷-LYY:DSANNVV:EQLSN:VKS:SXGXR, HVPKPXX:VSQ:EPLT-AA¹⁷-LYY:DDSSNVI:EQLSN:VKS:SXGXH, RVPSTXX:VSQ:EPLT-AA¹⁷-LYY:DNGRVLL:EQLSN:VKS:XGXL, ASAAPXX:VSQ:EPLT-AA¹⁷-LYY:VGRKPKV:EQLSN:VKS:XKXS, ASASPXX:VSQ:EPLT-AA¹⁷-LYY:VGRTPKV:EQLSN:VKS:XKXS, NDEGLEX:VSQ:EPLT-AA¹⁷-LYY:RIKPHQGQH:EQLSN:VKS:KXEXR, NDEGLEX:VSQ:EPLT-AA¹⁷-LYY:RIKPHQGQH:EQLSN:VKS:QXEXR, SSVKXQP:VSQ:EPLT-AA¹⁷-LYY:EYVRKKPKL:EQLSN:VKS:LEXAXA, RNVQXRP:VSQ:EPLT-AA¹⁷-LYY:EIVRKKPIF:EQLSN:VKS:LAXKXE, KIPKAXX:VPT:EPLT-AA¹⁷-LYY:DENEKVV:EQLSN:VVE:GXGXR, GIPEPXX:VPE:EPLT-AA¹⁷-LYY:DENKNVV:EQLSN:TVE:SXAXR, SIPKAXX:VPT:EPLT-AA¹⁷-LYY:DEYDKVV:EQLSN:VVE:GXGXR, HVTKPTX:APT:EPLT-AA¹⁷-LYY:DDSSNVI:EQLSN:VVR:SXGXH, YVPKPXX:APT:EPLT-AA¹⁷-LYY:DDSSNVI:EQLSN:VVR:SXGXH, TVPKPXX:APT:EPLT-AA¹⁷-LYY:DDSSNVI:EQLSN:VVR:AXGXH, AVPKAXX:APT:EPLT-AA¹⁷-LYY:DSSNNVI:EQLSN:VVK:AXGXH, KVGKAXX:VPT:EPLT-AA¹⁷-LYY:DDMGVPT:EQLSN:VAE:XGXR, KASKAXX:VPT:EPLT-AA¹⁷-LYY:DKGVVTY:EQLSN:AVS:EXGXR, GSAGPXX:TPT:EPLT-AA¹⁷-LYY:NDKQQII:EQLSN:VVD:RXGXS, AAPASXX:VPA:EPLT-AA¹⁷-LYY:DAANNVV:EQLSN:VVE:AXGXR, STPPTXX:VPT:EPLT-AA¹⁷-LYY:DSANNVV:EQLSN:VVE:SXGXR, HVPKPXX:APT:EPLT-AA¹⁷-LYY:DDSSNVI:EQLSN:VVR:SXGXH, RVPSTXX:APV:EPLT-AA¹⁷-LYY:DNGRVLL:EQLSN:VEE:XGXL, ASAAPXX:VPQ:EPLT-AA¹⁷-LYY:VGRKPKV:EQLSN:VRS:XKXS, ASASPXX:VPQ:EPLT-AA¹⁷-LYY:VGRTPKV:EQLSN:VKS:XKXS, NDEGLEX:VPT:EPLT-AA¹⁷-LYY:RIKPHQGQH:EQLSN:QHN:KXEXR, NDEGLEX:VPT:EPLT-AA¹⁷-LYY:RIKPHQGQH:EQLSN:EHS:QXEXR, SSVKXQP:SRV:EPLT-AA¹⁷-LYY:EYVRKKPKL:EQLSN:EEH:LEXAXA, RNVQXRP:TQV:EPLT-AA¹⁷-LYY:EIVRKKPIF:EQLSN:EDH:LAXKXE, KIPKAXX:VPQ:EPLT-AA¹⁷-LYY:DENEKVV:EQLSN:VKS:GXGXR, GIPEPXX:VPQ:EPLT-AA¹⁷-LYY:DENKNVV:EQLSN:VKS:SXAXR, SIPKAXX:VPQ:EPLT-AA¹⁷-LYY:DEYDKVV:EQLSN:VKS:GXGXR, HVTKPTX:VPQ:EPLT-AA¹⁷-LYY:DDSSNVI:EQLSN:VKS:SXGXH, YVPKPXX:VPQ:EPLT-AA¹⁷-LYY:DDSSNVI:EQLSN:VKS:SXGXH, TVPKPXX:VPQ:EPLT-AA¹⁷-LYY:DDSSNVI:EQLSN:VKS:AXGXH, AVPKAXX:VPQ:EPLT-AA¹⁷-LYY:DSSNNVI:EQLSN:VKS:AXGXH, KVGKAXX:VPQ:EPLT-AA¹⁷-LYY:DDMGVPT:EQLSN:VKS:XGXR, KASKAXX:VPQ:EPLT-AA¹⁷-LYY:DKGVVTY:EQLSN:VKS:EXGXR, GSAGPXX:VPQ:EPLT-AA¹⁷-LYY:NDKQQII:EQLSN:VKS:RXGXS, AAPASXX:VPQ:EPLT-AA¹⁷-LYY:DAANNVV:EQLSN:VKS:AXGXR, STPPTXX:VPQ:EPLT-AA¹⁷-LYY:DSANNVV:EQLSN:VKS:SXGXR, HVPKPXX:VPQ:EPLT-AA¹⁷-LYY:DDSSNVI:EQLSN:VKS:SXGXH, RVPSTXX:VPQ:EPLT-AA¹⁷-LYY:DNGRVLL:EQLSN:VKS:XGXL, ASAAPXX:VPQ:EPLT-AA¹⁷-LYY:VGRKPKV:EQLSN:VKS:XKXS, ASASPXX:VPQ:EPLT-AA¹⁷-LYY:IGKTPKI:EQLSN:VKS:XKXS, NDEGLEX:VPQ:EPLT-AA¹⁷-LYY:RIKPHQGQH:EQLSN:VKS:KXEXR, NDEGLEX:VPQ:EPLT-AA¹⁷-LYY:RIKPHQGQH:EQLSN:VKS:QXEXR, SSVKXQP:VPQ:EPLT-AA¹⁷-LYY:EYVRKKPKL:EQLSN:VKS:LEXAXA, RNVQXRP:VPQ:EPLT-AA¹⁷-LYY:EIVRKKPIF:EQLSN:VKS:LAXKXE, ASASPXX:VSQ:EPLT-AA¹⁷-LYY:IGKTPKI:EQLSN:VKS:XKXS, KIPKAXX:VPT:SNIT-AA¹⁷-QIM:DENEKVV:IGEMS:QHN:GXGXR, GIPEPXX:VPT:SNIT-AA¹⁷-QIM:DENKNVV:IGEMS:QHN:SXAXR, SIPKAXX:VPT:SNIT-AA¹⁷-QIM:DEYDKVV:IGEMS:QHN:GXGXR, HVTKPTX:VPT:SNIT-AA¹⁷-QIM:DDSSNVI:IGEMS:QHN:SXGXH, YVPKPXX:VPT:SNIT-AA¹⁷-QIM:DDSSNVI:IGEMS:QHN:SXGXH, TVPKPXX:VPT:SNIT-AA¹⁷-QIM:DDSSNVI:IGEMS:QHN:AXGXH, AVPKAXX:VPT:SNIT-AA¹⁷-QIM:DSSNNVI:IGEMS:QHN:AXGXH, KVGKAXX:VPT:SNIT-AA¹⁷-QIM:DDMGVPT:IGEMS:QHN:XGXR, KASKAXX:VPT:SNIT-AA¹⁷-QIM:DKGVVTY:IGEMS:QHN:EXGXR, GSAGPXX:VPT:SNIT-AA¹⁷-QIM:NDKQQII:IGEMS:QHN:RXGXS, AAPASXX:VPT:SNIT-AA¹⁷-QIM:DAANNVV:IGEMS:QHN:AXGXR, STPPTXX:VPT:SNIT-AA¹⁷-QIM:DSANNVV:IGEMS:QHN:SXGXR, HVPKPXX:VPT:SNIT-AA¹⁷-QIM:DDSSNVI:IGEMS:QHN:SXGXH, RVPSTXX:VPT:SNIT-AA¹⁷-QIM:DNGRVLL:IGEMS:QHN:XGXL, ASAAPXX:VPT:SNIT-AA¹⁷-QIM:VGRKPKV:IGEMS:QHN:XKXS, ASASPXX:VPT:SNIT-AA¹⁷-QIM:IGKTPKI:IGEMS:QHN:XKXS, ASASPXX:VPT:SNIT-AA¹⁷-QIM:VGRTPKV:IGEMS:QHN:XKXS, NDEGLEX:VPT:SNIT-AA¹⁷-QIM:RIKPHQGQH:IGEMS:QHN:QXEXR, NDEGLEX:VPT:SNIT-AA¹⁷-QIM:RIKPHQGQH:IGEMS:QHN:KXEXR, SSVKXQP:VPT:SNIT-AA¹⁷-QIM:EYVRKKPKL:IGEMS:QHN:LEXAXA, RNVQXRP:VPT:SNIT-AA¹⁷-QIM:EIVRKKPIF:IGEMS:QHN:LAXKXE, KIPKAXX:VPT:SNIT-AA¹⁷-QIM:DENEKVV:IGEMS:VVE:GXGXR, GIPEPXX:VPE:SNIT-AA¹⁷-QIM:DENKNVV:IGEMS:TVE:SXAXR, SIPKAXX:VPT:SNIT-AA¹⁷-QIM:DEYDKVV:IGEMS:VVE:GXGXR, HVTKPTX:APT:SNIT-AA¹⁷-QIM:DDSSNVI:IGEMS:VVR:SXGXH, YVPKPXX:APT:SNIT-AA¹⁷-QIM:DDSSNVI:IGEMS:VVR:SXGXH, TVPKPXX:APT:SNIT-AA¹⁷-QIM:DDSSNVI:IGEMS:VVR:AXGXH, AVPKAXX:APT:SNIT-AA¹⁷-QIM:DSSNNVI:IGEMS:VVK:AXGXH, KVGKAXX:VPT:SNIT-AA¹⁷-QIM:DDMGVPT:IGEMS:VAE:XGXR, KASKAXX:VPT:SNIT-AA¹⁷-QIM:DKGVVTY:IGEMS:AVS:EXGXR, GSAGPXX:TPT:SNIT-AA¹⁷-QIM:NDKQQII:IGEMS:VVD:RXGXS, AAPASXX:VPA:SNIT-AA¹⁷-QIM:DAANNVV:IGEMS:VVE:AXGXR, STPPTXX:VPT:SNIT-AA¹⁷-QIM:DSANNVV:IGEMS:VVE:SXGXR, HVPKPXX:APT:SNIT-AA¹⁷-QIM:DDSSNVI:IGEMS:VVR:SXGXH, RVPSTXX:APV:SNIT-AA¹⁷-QIM:DNGRVLL:IGEMS:VEE:XGXL, ASAAPXX:VPQ:SNIT-AA¹⁷-QIM:VGRKPKV:IGEMS:VRS:XKXS, ASASPXX:VSQ:SNIT-AA¹⁷-QIM:IGKTPKI:IGEMS:VKS:XKXS, ASASPXX:VPQ:SNIT-AA¹⁷-QIM:VGRTPKV:IGEMS:VKS:XKXS, NDEGLEX:VPT:SNIT-AA¹⁷-QIM:RIKPHQGQH:IGEMS:EHS:QXEXR, SSVKXQP:SRV:SNIT-AA¹⁷-QIM:EYVRKKPKL:IGEMS:EEH:LEXAXA, RNVQXRP:TQV:SNIT-AA¹⁷-QIM:EIVRKKPIF:IGEMS:EDH:LAXKXE, KIPKAXX:VPT:SNIT-AA¹⁷-QIM:DENEKVV:LGEMS:EHS:GXGXR, GIPEPXX:VPT:SNIT-AA¹⁷-QIM:DENKNVV:LGEMS:EHS:SXAXR, SIPKAXX:VPT:SNIT-AA¹⁷-QIM:DEYDKVV:LGEMS:EHS:GXGXR, HVTKPTX:VPT:SNIT-AA¹⁷-QIM:DDSSNVI:LGEMS:EHS:SXGXH, YVPKPXX:VPT:SNIT-AA¹⁷-QIM:DDSSNVI:LGEMS:EHS:SXGXH, TVPKPXX:VPT:SNIT-AA¹⁷-QIM:DDSSNVI:LGEMS:EHS:AXGXH, AVPKAXX:VPT:SNIT-AA¹⁷-QIM:DSSNNVI:LGEMS:EHS:AXGXH, KVGKAXX:VPT:SNIT-AA¹⁷-QIM:DDMGVPT:LGEMS:EHS:XGXR, KASKAXX:VPT:SNIT-AA¹⁷-QIM:DKGVVTY:LGEMS:EHS:EXGXR, GSAGPXX:VPT:SNIT-AA¹⁷-QIM:NDKQQII:LGEMS:EHS:RXGXS, AAPASXX:VPT:SNIT-AA¹⁷-QIM:DAANNVV:LGEMS:EHS:AXGXR, STPPTXX:VPT:SNIT-AA¹⁷-QIM:DSANNVV:LGEMS:EHS:SXGXR, HVPKPXX:VPT:SNIT-AA¹⁷-QIM:DDSSNVI:LGEMS:EHS:SXGXH, RVPSTXX:VPT:SNIT-AA¹⁷-QIM:DNGRVLL:LGEMS:EHS:XGXL, ASAAPXX:VPT:SNIT-AA¹⁷-QIM:VGRKPKV:LGEMS:EHS:XKXS, ASASPXX:VPT:SNIT-AA¹⁷-QIM:IGKTPKI:LGEMS:EHS:XKXS, ASASPXX:VPT:SNIT-AA¹⁷-QIM:VGRTPKV:LGEMS:EHS:XKXS, NDEGLEX:VPT:SNIT-AA¹⁷-QIM:RIKPHQGQH:LGEMS:EHS:KXEXR, SSVKXQP:VPT:SNIT-AA¹⁷-QIM:EYVRKKPKL:LGEMS:EHS:LEXAXA, RNVQXRP:VPT:SNIT-AA¹⁷-QIM:EIVRKKPIF:LGEMS:EHS:LAXKXE, KIPKAXX:VPT:SNIT-AA¹⁷-QIM:DENEKVV:LGEMS:VVE:GXGXR, GIPEPXX:VPE:SNIT-AA¹⁷-QIM:DENKNVV:LGEMS:TVE:SXAXR, SIPKAXX:VPT:SNIT-AA¹⁷-QIM:DEYDKVV:LGEMS:VVE:GXGXR, HVTKPTX:APT:SNIT-AA¹⁷-QIM:DDSSNVI:LGEMS:VVR:SXGXH, YVPKPXX:APT:SNIT-AA¹⁷-QIM:DDSSNVI:LGEMS:VVR:SXGXH, TVPKPXX:APT:SNIT-AA¹⁷-QIM:DDSSNVI:LGEMS:VVR:AXGXH, AVPKAXX:APT:SNIT-AA¹⁷-QIM:DSSNNVI:LGEMS:VVK:AXGXH, KVGKAXX:VPT:SNIT-AA¹⁷-QIM:DDMGVPT:LGEMS:VAE:XGXR, KASKAXX:VPT:SNIT-AA¹⁷-QIM:DKGVVTY:LGEMS:AVS:EXGXR, GSAGPXX:TPT:SNIT-AA¹⁷-QIM:NDKQQII:LGEMS:VVD:RXGXS, AAPASXX:VPA:SNIT-AA¹⁷-QIM:DAANNVV:LGEMS:VVE:AXGXR, STPPTXX:VPT:SNIT-AA¹⁷-QIM:DSANNVV:LGEMS:VVE:SXGXR, HVPKPXX:APT:SNIT-AA¹⁷-QIM:DDSSNVI:LGEMS:VVR:SXGXH, RVPSTXX:APV:SNIT-AA¹⁷-QIM:DNGRVLL:LGEMS:VEE:XGXL, ASAAPXX:VPQ:SNIT-AA¹⁷-QIM:VGRKPKV:LGEMS:VRS:XKXS, ASASPXX:VSQ:SNIT-AA¹⁷-QIM:IGKTPKI:LGEMS:VKS:XKXS, ASASPXX:VPQ:SNIT-AA¹⁷-QIM:VGRTPKV:LGEMS:VKS:XKXS, NDEGLEX:VPT:SNIT-AA¹⁷-QIM:RIKPHQGQH:LGEMS:QHN:KXEXR, SSVKXQP:SRV:SNIT-AA¹⁷-QIM:EYVRKKPKL:LGEMS:EEH:LEXAXA, RNVQXRP:TQV:SNIT-AA¹⁷-QIM:EIVRKKPIF:LGEMS:EDH:LAXKXE, KIPKAXX:SRV:RSVK-AA¹⁷-AKV:DENEKVV:KEVQV:EEH:GXGXR, GIPEPXX:SRV:RSVK-AA¹⁷-AKV:DENKNVV:KEVQV:EEH:SXAXR, SIPKAXX:SRV:RSVK-AA¹⁷-AKV:DEYDKVV:KEVQV:EEH:GXGXR, HVTKPTX:SRV:RSVK-AA¹⁷-AKV:DDSSNVI:KEVQV:EEH:SXGXH, YVPKPXX:SRV:RSVK-AA¹⁷-AKV:DDSSNVI:KEVQV:EEH:SXGXH, TVPKPXX:SRV:RSVK-AA¹⁷-AKV:DDSSNVI:KEVQV:EEH:AXGXH, AVPKAXX:SRV:RSVK-AA¹⁷-AKV:DSSNNVI:KEVQV:EEH:AXGXH, KVGKAXX:SRV:RSVK-AA¹⁷-AKV:DDMGVPT:KEVQV:EEH:XGXR, KASKAXX:SRV:RSVK-AA¹⁷-AKV:DKGVVTY:KEVQV:EEH:EXGXR, GSAGPXX:SRV:RSVK-AA¹⁷-AKV:NDKQQII:KEVQV:EEH:RXGXS, AAPASXX:SRV:RSVK-AA¹⁷-AKV:DAANNVV:KEVQV:EEH:AXGXR, STPPTXX:SRV:RSVK-AA¹⁷-AKV:DSANNVV:KEVQV:EEH:SXGXR, HVPKPXX:SRV:RSVK-AA¹⁷-AKV:DDSSNVI:KEVQV:EEH:SXGXH, RVPSTXX:SRV:RSVK-AA¹⁷-AKV:DNGRVLL:KEVQV:EEH:XGXL, ASAAPXX:SRV:RSVK-AA¹⁷-AKV:VGRKPKV:KEVQV:EEH:XKXS, ASASPXX:SRV:RSVK-AA¹⁷-AKV:IGKTPKI:KEVQV:EEH:XKXS, ASASPXX:SRV:RSVK-AA¹⁷-AKV:VGRTPKV:KEVQV:EEH:XKXS, NDEGLEX:SRV:RSVK-AA¹⁷-AKV:RIKPHQGQH:KEVQV:EEH:KXEXR, NDEGLEX:SRV:RSVK-AA¹⁷-AKV:RIKPHQGQH:KEVQV:EEH:QXEXR, RNVQXRP:SRV:RSVK-AA¹⁷-AKV:EIVRKKPIF:KEVQV:EEH:LAXKXE, KIPKAXX:VPT:RSVK-AA¹⁷-AKV:DENEKVV:KEVQV:VVE:GXGXR, GIPEPXX:VPE:RSVK-AA¹⁷-AKV:DENKNVV:KEVQV:TVE:SXAXR, SIPKAXX:VPT:RSVK-AA¹⁷-AKV:DEYDKVV:KEVQV:VVE:GXGXR, HVTKPTX:APT:RSVK-AA¹⁷-AKV:DDSSNVI:KEVQV:VVR:SXGXH, YVPKPXX:APT:RSVK-AA¹⁷-AKV:DDSSNVI:KEVQV:VVR:SXGXH, TVPKPXX:APT:RSVK-AA¹⁷-AKV:DDSSNVI:KEVQV:VVR:AXGXH, AVPKAXX:APT:RSVK-AA¹⁷-AKV:DSSNNVI:KEVQV:VVK:AXGXH, KVGKAXX:VPT:RSVK-AA¹⁷-AKV:DDMGVPT:KEVQV:VAE:XGXR, KASKAXX:VPT:RSVK-AA¹⁷-AKV:DKGVVTY:KEVQV:AVS:EXGXR, GSAGPXX:TPT:RSVK-AA¹⁷-AKV:NDKQQII:KEVQV:VVD:RXGXS, AAPASXX:VPA:RSVK-AA¹⁷-AKV:DAANNVV:KEVQV:VVE:AXGXR, STPPTXX:VPT:RSVK-AA¹⁷-AKV:DSANNVV:KEVQV:VVE:SXGXR, HVPKPXX:APT:RSVK-AA¹⁷-AKV:DDSSNVI:KEVQV:VVR:SXGXH, RVPSTXX:APV:RSVK-AA¹⁷-AKV:DNGRVLL:KEVQV:VEE:XGXL, ASAAPXX:VPQ:RSVK-AA¹⁷-AKV:VGRKPKV:KEVQV:VRS:XKXS, ASASPXX:VSQ:RSVK-AA¹⁷-AKV:IGKTPKI:KEVQV:VKS:XKXS, ASASPXX:VPQ:RSVK-AA¹⁷-AKV:VGRTPKV:KEVQV:VKS:XKXS, NDEGLEX:VPT:RSVK-AA¹⁷-AKV:RIKPHQGQH:KEVQV:QHN:KXEXR, NDEGLEX:VPT:RSVK-AA¹⁷-AKV:RIKPHQGQH:KEVQV:EHS:QXEXR, RNVQXRP:TQV:RSVK-AA¹⁷-AKV:EIVRKKPIF:KEVQV:EDH:LAXKXE, KIPKAXX:TQV:RPVQ-AA¹⁷-RKI:DENEKVV:KKATV:EDH:GXGXR, GIPEPXX:TQV:RPVQ-AA¹⁷-RKI:DENKNVV:KKATV:EDH:SXAXR, SIPKAXX:TQV:RPVQ-AA¹⁷-RKI:DEYDKVV:KKATV:EDH:GXGXR, HVTKPTX:TQV:RPVQ-AA¹⁷-RKI:DDSSNVI:KKATV:EDH:SXGXH, YVPKPXX:TQV:RPVQ-AA¹⁷-RKI:DDSSNVI:KKATV:EDH:SXGXH, TVPKPXX:TQV:RPVQ-AA¹⁷-RKI:DDSSNVI:KKATV:EDH:AXGXH, AVPKAXX:TQV:RPVQ-AA¹⁷-RKI:DSSNNVI:KKATV:EDH:AXGXH, KVGKAXX:TQV:RPVQ-AA¹⁷-RKI:DDMGVPT:KKATV:EDH:XGXR, KASKAXX:TQV:RPVQ-AA¹⁷-RKI:DKGVVTY:KKATV:EDH:EXGXR, GSAGPXX:TQV:RPVQ-AA¹⁷-RKI:NDKQQII:KKATV:EDH:RXGXS, AAPASXX:TQV:RPVQ-AA¹⁷-RKI:DAANNVV:KKATV:EDH:AXGXR, STPPTXX:TQV:RPVQ-AA¹⁷-RKI:DSANNVV:KKATV:EDH:SXGXR, HVPKPXX:TQV:RPVQ-AA¹⁷-RKI:DDSSNVI:KKATV:EDH:SXGXH, RVPSTXX:TQV:RPVQ-AA¹⁷-RKI:DNGRVLL:KKATV:EDH:XGXL, ASAAPXX:TQV:RPVQ-AA¹⁷-RKI:VGRKPKV:KKATV:EDH:XKXS, ASASPXX:TQV:RPVQ-AA¹⁷-RKI:IGKTPKI:KKATV:EDH:XKXS, ASASPXX:TQV:RPVQ-AA¹⁷-RKI:VGRTPKV:KKATV:EDH:XKXS, NDEGLEX:TQV:RPVQ-AA¹⁷-RKI:RIKPHQGQH:KKATV:EDH:KXEXR, NDEGLEX:TQV:RPVQ-AA¹⁷-RKI:RIKPHQGQH:KKATV:EDH:QXEXR, SSVKXQP:TQV:RPVQ-AA¹⁷-RKI:EYVRKKPKL:KKATV:EDH:LEXAXA, KIPKAXX:VPT:RPVQ-AA¹⁷-RKI:DENEKVV:KKATV:VVE:GXGXR, GIPEPXX:VPE:RPVQ-AA¹⁷-RKI:DENKNVV:KKATV:TVE:SXAXR, SIPKAXX:VPT:RPVQ-AA¹⁷-RKI:DEYDKVV:KKATV:VVE:GXGXR, HVTKPTX:APT:RPVQ-AA¹⁷-RKI:DDSSNVI:KKATV:VVR:SXGXH, YVPKPXX:APT:RPVQ-AA¹⁷-RKI:DDSSNVI:KKATV:VVR:SXGXH, TVPKPXX:APT:RPVQ-AA¹⁷-RKI:DDSSNVI:KKATV:VVR:AXGXH, AVPKAXX:APT:RPVQ-AA¹⁷-RKI:DSSNNVI:KKATV:VVK:AXGXH, KVGKAXX:VPT:RPVQ-AA¹⁷-RKI:DDMGVPT:KKATV:VAE:XGXR, KASKAXX:VPT:RPVQ-AA¹⁷-RKI:DKGVVTY:KKATV:AVS:EXGXR, GSAGPXX:TPT:RPVQ-AA¹⁷-RKI:NDKQQII:KKATV:VVD:RXGXS, AAPASXX:VPA:RPVQ-AA¹⁷-RKI:DAANNVV:KKATV:VVE:AXGXR, STPPTXX:VPT:RPVQ-AA¹⁷-RKI:DSANNVV:KKATV:VVE:SXGXR, HVPKPXX:APT:RPVQ-AA¹⁷-RKI:DDSSNVI:KKATV:VVR:SXGXH, RVPSTXX:APV:RPVQ-AA¹⁷-RKI:DNGRVLL:KKATV:VEE:XGXL, ASAAPXX:VPQ:RPVQ-AA¹⁷-RKI:VGRKPKV:KKATV:VRS:XKXS, ASASPXX:VSQ:RPVQ-AA¹⁷-RKI:IGKTPKI:KKATV:VKS:XKXS, ASASPXX:VPQ:RPVQ-AA¹⁷-RKI:VGRTPKV:KKATV:VKS:XKXS, NDEGLEX:VPT:RPVQ-AA¹⁷-RKI:RIKPHQGQH:KKATV:QHN:KXEXR, NDEGLEX:VPT:RPVQ-AA¹⁷-RKI:RIKPHQGQH:KKATV:EHS:QXEXR and SSVKXQP:SRV:RPVQ-AA¹⁷-RKI:EYVRKKPKL:KKATV:EEH:LEXAXA; and wherein AA¹ is selected from the group consisting of G, A, V, L, I, P, F, M, W, T and S (in particular is selected from the group consisting of M, I, L, V and T). More particularly, the heptuplet PEP7:PEP3:PEP12:LINKER:PEP2:PEP4:PEP8 is selected from the group consisting of GIPEPXX:VPT:SAIS-AA¹⁷-LYL:DENKNVV:LKNYQ:VVE:SXAXR, HVTKPTX:VPT:SAIS-AA¹⁷-LYL:DDSSNVI:LKNYQ:VVE:SXGXH, YVPKPXX:VPT:SAIS-AA¹⁷-LYL:DDSSNVI:LKNYQ:VVE:SXGXH, TVPKPXX:VPT:SAIS-AA¹⁷-LYL:DDSSNVI:LKNYQ:VVE:AXGXH, AVPKAXX:VPT:SAIS-AA¹⁷-LYL:DSSNNVI:LKNYQ:VVE:AXGXH, KVGKAXX:VPT:SAIS-AA¹⁷-LYL:DDMGVPT:LKNYQ:VVE:XGXR, KASKAXX:VPT:SAIS-AA¹⁷-LYL:DKGVVTY:LKNYQ:VVE:EXGXR, GSAGPXX:VPT:SAIS-AA¹⁷-LYL:NDKQQII:LKNYQ:VVE:RXGXS, AAPASXX:VPT:SAIS-AA¹⁷-LYL:DAANNVV:LKNYQ:VVE:AXGXR, STPPTXX:VPT:SAIS-AA¹⁷-LYL:DSANNVV:LKNYQ:VVE:SXGXR, HVPKPXX:VPT:SAIS-AA¹⁷-LYL:DDSSNVI:LKNYQ:VVE:SXGXH, RVPSTXX:VPT:SAIS-AA¹⁷-LYL:DNGRVLL:LKNYQ:VVE:XGXL, ASAAPXX:VPT:SAIS-AA¹⁷-LYL:VGRKPKV:LKNYQ:VVE:XKXS, ASASPXX:VPT:SAIS-AA¹⁷-LYL:IGKTPKI:LKNYQ:VVE:XKXS, ASASPXX:VPT:SAIS-AA¹⁷-LYL:VGRTPKV:LKNYQ:VVE:XKXS, GIPEPXX:VPE:SAIS-AA¹⁷-LYL:DENKNVV:LKNYQ:TVE:SXAXR, HVTKPTX:APT:SAIS-AA¹⁷-LYL:DDSSNVI:LKNYQ:VVR:SXGXH, YVPKPXX:APT:SAIS-AA¹⁷-LYL:DDSSNVI:LKNYQ:VVR:SXGXH, TVPKPXX:APT:SAIS-AA¹⁷-LYL:DDSSNVI:LKNYQ:VVR:AXGXH, AVPKAXX:APT:SAIS-AA¹⁷-LYL:DSSNNVI:LKNYQ:VVK:AXGXH, KVGKAXX:VPT:SAIS-AA¹⁷-LYL:DDMGVPT:LKNYQ:VAE:XGXR, KASKAXX:VPT:SAIS-AA¹⁷-LYL:DKGVVTY:LKNYQ:AVS:EXGXR, GSAGPXX:TPT:SAIS-AA¹⁷-LYL:NDKQQII:LKNYQ:VVD:RXGXS, AAPASXX:VPA:SAIS-AA¹⁷-LYL:DAANNVV:LKNYQ:VVE:AXGXR, HVPKPXX:APT:SAIS-AA¹⁷-LYL:DDSSNVI:LKNYQ:VVR:SXGXH, RVPSTXX:APV:SAIS-AA¹⁷-LYL:DNGRVLL:LKNYQ:VEE:XGXL, ASAAPXX:VPQ:SAIS-AA¹⁷-LYL:VGRKPKV:LKNYQ:VRS:XKXS, ASASPXX:VSQ:SAIS-AA¹⁷-LYL:IGKTPKI:LKNYQ:VKS:XKXS, ASASPXX:VPQ:SAIS-AA¹⁷-LYL:VGRTPKV:LKNYQ:VKS:XKXS, NDEGLEX:VPT:SAIS-AA¹⁷-LYL:RIKPHQGQH:LKNYQ:QHN:KXEXR, NDEGLEX:VPT:SAIS-AA¹⁷-LYL:RIKPHQGQH:LKNYQ:EHS:QXEXR, SSVKXQP:SRV:SAIS-AA¹⁷-LYL:EYVRKKPKL:LKNYQ:EEH:LEXAXA, RNVQXRP:TQV:SAIS-AA¹⁷-LYL:EIVRKKPIF:LKNYQ:EDH:LAXKXE, KIPKAXX:VPE:SSLS-AA¹⁷-LFF:DENEKVV:LKVYP:TVE:GXGXR, SIPKAXX:VPE:SSLS-AA¹⁷-LFF:DEYDKVV:LKVYP:TVE:GXGXR, HVTKPTX:VPE:SSLS-AA¹⁷-LFF:DDSSNVI:LKVYP:TVE:SXGXH, YVPKPXX:VPE:SSLS-AA¹⁷-LFF:DDSSNVI:LKVYP:TVE:SXGXH, TVPKPXX:VPE:SSLS-AA¹⁷-LFF:DDSSNVI:LKVYP:TVE:AXGXH, AVPKAXX:VPE:SSLS-AA¹⁷-LFF:DSSNNVI:LKVYP:TVE:AXGXH, KVGKAXX:VPE:SSLS-AA¹⁷-LFF:DDMGVPT:LKVYP:TVE:XGXR, KASKAXX:VPE:SSLS-AA¹⁷-LFF:DKGVVTY:LKVYP:TVE:EXGXR, GSAGPXX:VPE:SSLS-AA¹⁷-LFF:NDKQQII:LKVYP:TVE:RXGXS, AAPASXX:VPE:SSLS-AA¹⁷-LFF:DAANNVV:LKVYP:TVE:AXGXR, STPPTXX:VPE:SSLS-AA¹⁷-LFF:DSANNVV:LKVYP:TVE:SXGXR, HVPKPXX:VPE:SSLS-AA¹⁷-LFF:DDSSNVI:LKVYP:TVE:SXGXH, RVPSTXX:VPE:SSLS-AA¹⁷-LFF:DNGRVLL:LKVYP:TVE:XGXL, ASAAPXX:VPE:SSLS-AA¹⁷-LFF:VGRKPKV:LKVYP:TVE:XKXS, ASASPXX:VPE:SSLS-AA¹⁷-LFF:IGKTPKI:LKVYP:TVE:XKXS, ASASPXX:VPE:SSLS-AA¹⁷-LFF:VGRTPKV:LKVYP:TVE:XKXS, KIPKAXX:VPT:SSLS-AA¹⁷-LFF:DENEKVV:LKVYP:VVE:GXGXR, SIPKAXX:VPT:SSLS-AA¹⁷-LFF:DEYDKVV:LKVYP:VVE:GXGXR, HVTKPTX:APT:SSLS-AA¹⁷-LFF:DDSSNVI:LKVYP:VVR:SXGXH, YVPKPXX:APT:SSLS-AA¹⁷-LFF:DDSSNVI:LKVYP:VVR:SXGXH, TVPKPXX:APT:SSLS-AA¹⁷-LFF:DDSSNVI:LKVYP:VVR:AXGXH, AVPKAXX:APT:SSLS-AA¹⁷-LFF:DSSNNVI:LKVYP:VVK:AXGXH, KVGKAXX:VPT:SSLS-AA¹⁷-LFF:DDMGVPT:LKVYP:VAE:XGXR, KASKAXX:VPT:SSLS-AA¹⁷-LFF:DKGVVTY:LKVYP:AVS:EXGXR, GSAGPXX:TPT:SSLS-AA¹⁷-LFF:NDKQQII:LKVYP:VVD:RXGXS, AAPASXX:VPA:SSLS-AA¹⁷-LFF:DAANNVV:LKVYP:VVE:AXGXR, STPPTXX:VPT:SSLS-AA¹⁷-LFF:DSANNVV:LKVYP:VVE:SXGXR, HVPKPXX:APT:SSLS-AA¹⁷-LFF:DDSSNVI:LKVYP:VVR:SXGXH, RVPSTXX:APV:SSLS-AA¹⁷-LFF:DNGRVLL:LKVYP:VEE:XGXL, ASAAPXX:VPQ:SSLS-AA¹⁷-LFF:VGRKPKV:LKVYP:VRS:XKXS, ASASPXX:VSQ:SSLS-AA¹⁷-LFF:IGKTPKI:LKVYP:VKS:XKXS, ASASPXX:VPQ:SSLS-AA¹⁷-LFF:VGRTPKV:LKVYP:VKS:XKXS, NDEGLEX:VPT:SSLS-AA¹⁷-LFF:RIKPHQGQH:LKVYP:QHN:KXEXR, NDEGLEX:VPT:SSLS-AA¹⁷-LFF:RIKPHQGQH:LKVYP:EHS:QXEXR, SSVKXQP:SRV:SSLS-AA¹⁷-LFF:EYVRKKPKL:LKVYP:EEH:LEXAXA, RNVQXRP:TQV:SSLS-AA¹⁷-LFF:EIVRKKPIF:LKVYP:EDH:LAXKXE, KIPKAXX:APT:NAIS-AA¹⁷-LYF:DENEKVV:LKKYR:VVR:GXGXR, GIPEPXX:APT:NAIS-AA¹⁷-LYF:DENKNVV:LKKYR:VVR:SXAXR, SIPKAXX:APT:NAIS-AA¹⁷-LYF:DEYDKVV:LKKYR:VVR:GXGXR, AVPKAXX:APT:NAIS-AA¹⁷-LYF:DSSNNVI:LKKYR:VVR:AXGXH, KVGKAXX:APT:NAIS-AA¹⁷-LYF:DDMGVPT:LKKYR:VVR:XGXR, KASKAXX:APT:NAIS-AA¹⁷-LYF:DKGVVTY:LKKYR:VVR:EXGXR, GSAGPXX:APT:NAIS-AA¹⁷-LYF:NDKQQII:LKKYR:VVR:RXGXS, AAPASXX:APT:NAIS-AA¹⁷-LYF:DAANNVV:LKKYR:VVR:AXGXR, STPPTXX:APT:NAIS-AA¹⁷-LYF:DSANNVV:LKKYR:VVR:SXGXR, RVPSTXX:APT:NAIS-AA¹⁷-LYF:DNGRVLL:LKKYR:VVR:XGXL, ASAAPXX:APT:NAIS-AA¹⁷-LYF:VGRKPKV:LKKYR:VVR:XKXS, ASASPXX:APT:NAIS-AA¹⁷-LYF:IGKTPKI:LKKYR:VVR:XKXS, ASASPXX:APT:NAIS-AA¹⁷-LYF:VGRTPKV:LKKYR:VVR:XKXS, KIPKAXX:VPT:NAIS-AA¹⁷-LYF:DENEKVV:LKKYR:VVE:GXGXR, GIPEPXX:VPE:NAIS-AA¹⁷-LYF:DENKNVV:LKKYR:TVE:SXAXR, SIPKAXX:VPT:NAIS-AA¹⁷-LYF:DEYDKVV:LKKYR:VVE:GXGXR, AVPKAXX:APT:NAIS-AA¹⁷-LYF:DSSNNVI:LKKYR:VVK:AXGXH, KVGKAXX:VPT:NAIS-AA¹⁷-LYF:DDMGVPT:LKKYR:VAE:XGXR, KASKAXX:VPT:NAIS-AA¹⁷-LYF:DKGVVTY:LKKYR:AVS:EXGXR, GSAGPXX:TPT:NAIS-AA¹⁷-LYF:NDKQQII:LKKYR:VVD:RXGXS, AAPASXX:VPA:NAIS-AA¹⁷-LYF:DAANNVV:LKKYR:VVE:AXGXR, STPPTXX:VPT:NAIS-AA¹⁷-LYF:DSANNVV:LKKYR:VVE:SXGXR, RVPSTXX:APV:NAIS-AA¹⁷-LYF:DNGRVLL:LKKYR:VEE:XGXL, ASAAPXX:VPQ:NAIS-AA¹⁷-LYF:VGRKPKV:LKKYR:VRS:XKXS, ASASPXX:VSQ:NAIS-AA¹⁷-LYF:IGKTPKI:LKKYR:VKS:XKXS, ASASPXX:VPQ:NAIS-AA¹⁷-LYF:VGRTPKV:LKKYR:VKS:XKXS, NDEGLEX:VPT:NAIS-AA¹⁷-LYF:RIKPHQGQH:LKKYR:QHN:KXEXR, NDEGLEX:VPT:NAIS-AA¹⁷-LYF:RIKPHQGQH:LKKYR:EHS:QXEXR, SSVKXQP:SRV:NAIS-AA¹⁷-LYF:EYVRKKPKL:LKKYR:EEH:LEXAXA, RNVQXRP:TQV:NAIS-AA¹⁷-LYF:EIVRKKPIF:LKKYR:EDH:LAXKXE, KIPKAXX:APT:SATS-AA¹⁷-LYY:DENEKVV:LRKHR:VVK:GXGXR, GIPEPXX:APT:SATS-AA¹⁷-LYY:DENKNVV:LRKHR:VVK:SXAXR, SIPKAXX:APT:SATS-AA¹⁷-LYY:DEYDKVV:LRKHR:VVK:GXGXR, HVTKPTX:APT:SATS-AA¹⁷-LYY:DDSSNVI:LRKHR:VVK:SXGXH, YVPKPXX:APT:SATS-AA¹⁷-LYY:DDSSNVI:LRKHR:VVK:SXGXH, TVPKPXX:APT:SATS-AA¹⁷-LYY:DDSSNVI:LRKHR:VVK:AXGXH, KVGKAXX:APT:SATS-AA¹⁷-LYY:DDMGVPT:LRKHR:VVK:XGXR, KASKAXX:APT:SATS-AA¹⁷-LYY:DKGVVTY:LRKHR:VVK:EXGXR, GSAGPXX:APT:SATS-AA¹⁷-LYY:NDKQQII:LRKHR:VVK:RXGXS, AAPASXX:APT:SATS-AA¹⁷-LYY:DAANNVV:LRKHR:VVK:AXGXR, STPPTXX:APT:SATS-AA¹⁷-LYY:DSANNVV:LRKHR:VVK:SXGXR, HVPKPXX:APT:SATS-AA¹⁷-LYY:DDSSNVI:LRKHR:VVK:SXGXH, RVPSTXX:APT:SATS-AA¹⁷-LYY:DNGRVLL:LRKHR:VVK:XGXL, ASAAPXX:APT:SATS-AA¹⁷-LYY:VGRKPKV:LRKHR:VVK:XKXS, ASASPXX:APT:SATS-AA¹⁷-LYY:IGKTPKI:LRKHR:VVK:XKXS, ASASPXX:APT:SATS-AA¹⁷-LYY:VGRTPKV:LRKHR:VVK:XKXS, KIPKAXX:VPT:SATS-AA¹⁷-LYY:DENEKVV:LRKHR:VVE:GXGXR, GIPEPXX:VPE:SATS-AA¹⁷-LYY:DENKNVV:LRKHR:TVE:SXAXR, SIPKAXX:VPT:SATS-AA¹⁷-LYY:DEYDKVV:LRKHR:VVE:GXGXR, HVTKPTX:APT:SATS-AA¹⁷-LYY:DDSSNVI:LRKHR:VVR:SXGXH, YVPKPXX:APT:SATS-AA¹⁷-LYY:DDSSNVI:LRKHR:VVR:SXGXH, TVPKPXX:APT:SATS-AA¹⁷-LYY:DDSSNVI:LRKHR:VVR:AXGXH, KVGKAXX:VPT:SATS-AA¹⁷-LYY:DDMGVPT:LRKHR:VAE:XGXR, KASKAXX:VPT:SATS-AA¹⁷-LYY:DKGVVTY:LRKHR:AVS:EXGXR, GSAGPXX:TPT:SATS-AA¹⁷-LYY:NDKQQII:LRKHR:VVD:RXGXS, AAPASXX:VPA:SATS-AA¹⁷-LYY:DAANNVV:LRKHR:VVE:AXGXR, STPPTXX:VPT:SATS-AA¹⁷-LYY:DSANNVV:LRKHR:VVE:SXGXR, HVPKPXX:APT:SATS-AA¹⁷-LYY:DDSSNVI:LRKHR:VVR:SXGXH, RVPSTXX:APV:SATS-AA¹⁷-LYY:DNGRVLL:LRKHR:VEE:XGXL, ASAAPXX:VPQ:SATS-AA¹⁷-LYY:VGRKPKV:LRKHR:VRS:XKXS, ASASPXX:VSQ:SATS-AA¹⁷-LYY:IGKTPKI:LRKHR:VKS:XKXS, ASASPXX:VPQ:SATS-AA¹⁷-LYY:VGRTPKV:LRKHR:VKS:XKXS, NDEGLEX:VPT:SATS-AA¹⁷-LYY:RIKPHQGQH:LRKHR:QHN:KXEXR, NDEGLEX:VPT:SATS-AA¹⁷-LYY:RIKPHQGQH:LRKHR:EHS:QXEXR, SSVKXQP:SRV:SATS-AA¹⁷-LYY:EYVRKKPKL:LRKHR:EEH:LEXAXA, RNVQXRP:TQV:SATS-AA¹⁷-LYY:EIVRKKPIF:LRKHR:EDH:LAXKXE, KIPKAXX:VPT:SPIS-AA¹⁷-LYK:DENEKVV:LKYHY:VAE:GXGXR, GIPEPXX:VPT:SPIS-AA¹⁷-LYK:DENKNVV:LKYHY:VAE:SXAXR, SIPKAXX:VPT:SPIS-AA¹⁷-LYK:DEYDKVV:LKYHY:VAE:GXGXR, HVTKPTX:VPT:SPIS-AA¹⁷-LYK:DDSSNVI:LKYHY:VAE:SXGXH, YVPKPXX:VPT:SPIS-AA¹⁷-LYK:DDSSNVI:LKYHY:VAE:SXGXH, TVPKPXX:VPT:SPIS-AA¹⁷-LYK:DDSSNVI:LKYHY:VAE:AXGXH, AVPKAXX:VPT:SPIS-AA¹⁷-LYK:DSSNNVI:LKYHY:VAE:AXGXH, KASKAXX:VPT:SPIS-AA¹⁷-LYK:DKGVVTY:LKYHY:VAE:EXGXR, GSAGPXX:VPT:SPIS-AA¹⁷-LYK:NDKQQII:LKYHY:VAE:RXGXS, AAPASXX:VPT:SPIS-AA¹⁷-LYK:DAANNVV:LKYHY:VAE:AXGXR, STPPTXX:VPT:SPIS-AA¹⁷-LYK:DSANNVV:LKYHY:VAE:SXGXR, HVPKPXX:VPT:SPIS-AA¹⁷-LYK:DDSSNVI:LKYHY:VAE:SXGXH, RVPSTXX:VPT:SPIS-AA¹⁷-LYK:DNGRVLL:LKYHY:VAE:XGXL, ASAAPXX:VPT:SPIS-AA¹⁷-LYK:VGRKPKV:LKYHY:VAE:XKXS, ASASPXX:VPT:SPIS-AA¹⁷-LYK:IGKTPKI:LKYHY:VAE:XKXS, ASASPXX:VPT:SPIS-AA¹⁷-LYK:VGRTPKV:LKYHY:VAE:XKXS, KIPKAXX:VPT:SPIS-AA¹⁷-LYK:DENEKVV:LKYHY:VVE:GXGXR, GIPEPXX:VPE:SPIS-AA¹⁷-LYK:DENKNVV:LKYHY:TVE:SXAXR, SIPKAXX:VPT:SPIS-AA¹⁷-LYK:DEYDKVV:LKYHY:VVE:GXGXR, HVTKPTX:APT:SPIS-AA¹⁷-LYK:DDSSNVI:LKYHY:VVR:SXGXH, YVPKPXX:APT:SPIS-AA¹⁷-LYK:DDSSNVI:LKYHY:VVR:SXGXH, TVPKPXX:APT:SPIS-AA¹⁷-LYK:DDSSNVI:LKYHY:VVR:AXGXH, AVPKAXX:APT:SPIS-AA¹⁷-LYK:DSSNNVI:LKYHY:VVK:AXGXH, KASKAXX:VPT:SPIS-AA¹⁷-LYK:DKGVVTY:LKYHY:AVS:EXGXR, GSAGPXX:TPT:SPIS-AA¹⁷-LYK:NDKQQII:LKYHY:VVD:RXGXS, AAPASXX:VPA:SPIS-AA¹⁷-LYK:DAANNVV:LKYHY:VVE:AXGXR, STPPTXX:VPT:SPIS-AA¹⁷-LYK:DSANNVV:LKYHY:VVE:SXGXR, HVPKPXX:APT:SPIS-AA¹⁷-LYK:DDSSNVI:LKYHY:VVR:SXGXH, RVPSTXX:APV:SPIS-AA¹⁷-LYK:DNGRVLL:LKYHY:VEE:XGXL, ASAAPXX:VPQ:SPIS-AA¹⁷-LYK:VGRKPKV:LKYHY:VRS:XKXS, ASASPXX:VSQ:SPIS-AA¹⁷-LYK:IGKTPKI:LKYHY:VKS:XKXS, ASASPXX:VPQ:SPIS-AA¹⁷-LYK:VGRTPKV:LKYHY:VKS:XKXS, NDEGLEX:VPT:SPIS-AA¹⁷-LYK:RIKPHQGQH:LKYHY:QHN:KXEXR, NDEGLEX:VPT:SPIS-AA¹⁷-LYK:RIKPHQGQH:LKYHY:EHS:QXEXR, SSVKXQP:SRV:SPIS-AA¹⁷-LYK:EYVRKKPKL:LKYHY:EEH:LEXAXA, RNVQXRP:TQV:SPIS-AA¹⁷-LYK:EIVRKKPIF:LKYHY:EDH:LAXKXE, KIPKAXX:VPT:EPIS-AA¹⁷-LYL:DENEKVV:KFKYE:AVS:GXGXR, GIPEPXX:VPT:EPIS-AA¹⁷-LYL:DENKNVV:KFKYE:AVS:SXAXR, SIPKAXX:VPT:EPIS-AA¹⁷-LYL:DEYDKVV:KFKYE:AVS:GXGXR, HVTKPTX:VPT:EPIS-AA¹⁷-LYL:DDSSNVI:KFKYE:AVS:SXGXH, YVPKPXX:VPT:EPIS-AA¹⁷-LYL:DDSSNVI:KFKYE:AVS:SXGXH, TVPKPXX:VPT:EPIS-AA¹⁷-LYL:DDSSNVI:KFKYE:AVS:AXGXH, AVPKAXX:VPT:EPIS-AA¹⁷-LYL:DSSNNVI:KFKYE:AVS:AXGXH, KVGKAXX:VPT:EPIS-AA¹⁷-LYL:DDMGVPT:KFKYE:AVS:XGXR, GSAGPXX:VPT:EPIS-AA¹⁷-LYL:NDKQQII:KFKYE:AVS:RXGXS, AAPASXX:VPT:EPIS-AA¹⁷-LYL:DAANNVV:KFKYE:AVS:AXGXR, STPPTXX:VPT:EPIS-AA¹⁷-LYL:DSANNVV:KFKYE:AVS:SXGXR, HVPKPXX:VPT:EPIS-AA¹⁷-LYL:DDSSNVI:KFKYE:AVS:SXGXH, RVPSTXX:VPT:EPIS-AA¹⁷-LYL:DNGRVLL:KFKYE:AVS:XGXL, ASAAPXX:VPT:EPIS-AA¹⁷-LYL:VGRKPKV:KFKYE:AVS:XKXS, ASASPXX:VPT:EPIS-AA¹⁷-LYL:IGKTPKI:KFKYE:AVS:XKXS, ASASPXX:VPT:EPIS-AA¹⁷-LYL:VGRTPKV:KFKYE:AVS:XKXS, KIPKAXX:VPT:EPIS-AA¹⁷-LYL:DENEKVV:KFKYE:VVE:GXGXR, GIPEPXX:VPE:EPIS-AA¹⁷-LYL:DENKNVV:KFKYE:TVE:SXAXR, SIPKAXX:VPT:EPIS-AA¹⁷-LYL:DEYDKVV:KFKYE:VVE:GXGXR, HVTKPTX:APT:EPIS-AA¹⁷-LYL:DDSSNVI:KFKYE:VVR:SXGXH, YVPKPXX:APT:EPIS-AA¹⁷-LYL:DDSSNVI:KFKYE:VVR:SXGXH, TVPKPXX:APT:EPIS-AA¹⁷-LYL:DDSSNVI:KFKYE:VVR:AXGXH, AVPKAXX:APT:EPIS-AA¹⁷-LYL:DSSNNVI:KFKYE:VVK:AXGXH, KVGKAXX:VPT:EPIS-AA¹⁷-LYL:DDMGVPT:KFKYE:VAE:XGXR, GSAGPXX:TPT:EPIS-AA¹⁷-LYL:NDKQQII:KFKYE:VVD:RXGXS, AAPASXX:VPA:EPIS-AA¹⁷-LYL:DAANNVV:KFKYE:VVE:AXGXR, STPPTXX:VPT:EPIS-AA¹⁷-LYL:DSANNVV:KFKYE:VVE:SXGXR, HVPKPXX:APT:EPIS-AA¹⁷-LYL:DDSSNVI:KFKYE:VVR:SXGXH, RVPSTXX:APV:EPIS-AA¹⁷-LYL:DNGRVLL:KFKYE:VEE:XGXL, ASAAPXX:VPQ:EPIS-AA¹⁷-LYL:VGRKPKV:KFKYE:VRS:XKXS, ASASPXX:VSQ:EPIS-AA¹⁷-LYL:IGKTPKI:KFKYE:VKS:XKXS, ASASPXX:VPQ:EPIS-AA¹⁷-LYL:VGRTPKV:KFKYE:VKS:XKXS, NDEGLEX:VPT:EPIS-AA¹⁷-LYL:RIKPHQGQH:KFKYE:QHN:KXEXR, NDEGLEX:VPT:EPIS-AA¹⁷-LYL:RIKPHQGQH:KFKYE:EHS:QXEXR, SSVKXQP:SRV:EPIS-AA¹⁷-LYL:EYVRKKPKL:KFKYE:EEH:LEXAXA, RNVQXRP:TQV:EPIS-AA¹⁷-LYL:EIVRKKPIF:KFKYE:EDH:LAXKXE, KIPKAXX:TPT:SPIN-AA¹⁷-LYF:DENEKVV:YGKIP:VVD:GXGXR, GIPEPXX:TPT:SPIN-AA¹⁷-LYF:DENKNVV:YGKIP:VVD:SXAXR, SIPKAXX:TPT:SPIN-AA¹⁷-LYF:DEYDKVV:YGKIP:VVD:GXGXR, HVTKPTX:TPT:SPIN-AA¹⁷-LYF:DDSSNVI:YGKIP:VVD:SXGXH, YVPKPXX:TPT:SPIN-AA¹⁷-LYF:DDSSNVI:YGKIP:VVD:SXGXH, TVPKPXX:TPT:SPIN-AA¹⁷-LYF:DDSSNVI:YGKIP:VVD:AXGXH, AVPKAXX:TPT:SPIN-AA¹⁷-LYF:DSSNNVI:YGKIP:VVD:AXGXH, KVGKAXX:TPT:SPIN-AA¹⁷-LYF:DDMGVPT:YGKIP:VVD:XGXR, KASKAXX:TPT:SPIN-AA¹⁷-LYF:DKGVVTY:YGKIP:VVD:EXGXR, AAPASXX:TPT:SPIN-AA¹⁷-LYF:DAANNVV:YGKIP:VVD:AXGXR, STPPTXX:TPT:SPIN-AA¹⁷-LYF:DSANNVV:YGKIP:VVD:SXGXR, HVPKPXX:TPT:SPIN-AA¹⁷-LYF:DDSSNVI:YGKIP:VVD:SXGXH, RVPSTXX:TPT:SPIN-AA¹⁷-LYF:DNGRVLL:YGKIP:VVD:XGXL, ASAAPXX:TPT:SPIN-AA¹⁷-LYF:VGRKPKV:YGKIP:VVD:XKXS, ASASPXX:TPT:SPIN-AA¹⁷-LYF:IGKTPKI:YGKIP:VVD:XKXS, ASASPXX:TPT:SPIN-AA¹⁷-LYF:VGRTPKV:YGKIP:VVD:XKXS, KIPKAXX:VPT:SPIN-AA¹⁷-LYF:DENEKVV:YGKIP:VVE:GXGXR, GIPEPXX:VPE:SPIN-AA¹⁷-LYF:DENKNVV:YGKIP:TVE:SXAXR, SIPKAXX:VPT:SPIN-AA¹⁷-LYF:DEYDKVV:YGKIP:VVE:GXGXR, HVTKPTX:APT:SPIN-AA¹⁷-LYF:DDSSNVI:YGKIP:VVR:SXGXH, YVPKPXX:APT:SPIN-AA¹⁷-LYF:DDSSNVI:YGKIP:VVR:SXGXH, TVPKPXX:APT:SPIN-AA¹⁷-LYF:DDSSNVI:YGKIP:VVR:AXGXH, AVPKAXX:APT:SPIN-AA¹⁷-LYF:DSSNNVI:YGKIP:VVK:AXGXH, KVGKAXX:VPT:SPIN-AA¹⁷-LYF:DDMGVPT:YGKIP:VAE:XGXR, KASKAXX:VPT:SPIN-AA¹⁷-LYF:DKGVVTY:YGKIP:AVS:EXGXR, AAPASXX:VPA:SPIN-AA¹⁷-LYF:DAANNVV:YGKIP:VVE:AXGXR, STPPTXX:VPT:SPIN-AA¹⁷-LYF:DSANNVV:YGKIP:VVE:SXGXR, HVPKPXX:APT:SPIN-AA¹⁷-LYF:DDSSNVI:YGKIP:VVR:SXGXH, RVPSTXX:APV:SPIN-AA¹⁷-LYF:DNGRVLL:YGKIP:VEE:XGXL, ASAAPXX:VPQ:SPIN-AA¹⁷-LYF:VGRKPKV:YGKIP:VRS:XKXS, ASASPXX:VSQ:SPIN-AA¹⁷-LYF:IGKTPKI:YGKIP:VKS:XKXS, ASASPXX:VPQ:SPIN-AA¹⁷-LYF:VGRTPKV:YGKIP:VKS:XKXS, NDEGLEX:VPT:SPIN-AA¹⁷-LYF:RIKPHQGQH:YGKIP:QHN:KXEXR, NDEGLEX:VPT:SPIN-AA¹⁷-LYF:RIKPHQGQH:YGKIP:EHS:QXEXR, SSVKXQP:SRV:SPIN-AA¹⁷-LYF:EYVRKKPKL:YGKIP:EEH:LEXAXA, RNVQXRP:TQV:SPIN-AA¹⁷-LYF:EIVRKKPIF:YGKIP:EDH:LAXKXE, KIPKAXX:VPA:SPIS-AA¹⁷-LYI:DENEKVV:YKQYE:VVE:GXGXR, GIPEPXX:VPA:SPIS-AA¹⁷-LYI:DENKNVV:YKQYE:VVE:SXAXR, SIPKAXX:VPA:SPIS-AA¹⁷-LYI:DEYDKVV:YKQYE:VVE:GXGXR, HVTKPTX:VPA:SPIS-AA¹⁷-LYI:DDSSNVI:YKQYE:VVE:SXGXH, YVPKPXX:VPA:SPIS-AA¹⁷-LYI:DDSSNVI:YKQYE:VVE:SXGXH, TVPKPXX:VPA:SPIS-AA¹⁷-LYI:DDSSNVI:YKQYE:VVE:AXGXH, AVPKAXX:VPA:SPIS-AA¹⁷-LYI:DSSNNVI:YKQYE:VVE:AXGXH, KVGKAXX:VPA:SPIS-AA¹⁷-LYI:DDMGVPT:YKQYE:VVE:XGXR, KASKAXX:VPA:SPIS-AA¹⁷-LYI:DKGVVTY:YKQYE:VVE:EXGXR, GSAGPXX:VPA:SPIS-AA¹⁷-LYI:NDKQQII:YKQYE:VVE:RXGXS, STPPTXX:VPA:SPIS-AA¹⁷-LYI:DSANNVV:YKQYE:VVE:SXGXR, HVPKPXX:VPA:SPIS-AA¹⁷-LYI:DDSSNVI:YKQYE:VVE:SXGXH, RVPSTXX:VPA:SPIS-AA¹⁷-LYI:DNGRVLL:YKQYE:VVE:XGXL, ASAAPXX:VPA:SPIS-AA¹⁷-LYI:VGRKPKV:YKQYE:VVE:XKXS, ASASPXX:VPA:SPIS-AA¹⁷-LYI:IGKTPKI:YKQYE:VVE:XKXS, ASASPXX:VPA:SPIS-AA¹⁷-LYI:VGRTPKV:YKQYE:VVE:XKXS, KIPKAXX:VPT:SPIS-AA¹⁷-LYI:DENEKVV:YKQYE:VVE:GXGXR, GIPEPXX:VPE:SPIS-AA¹⁷-LYI:DENKNVV:YKQYE:TVE:SXAXR, SIPKAXX:VPT:SPIS-AA¹⁷-LYI:DEYDKVV:YKQYE:VVE:GXGXR, HVTKPTX:APT:SPIS-AA¹⁷-LYI:DDSSNVI:YKQYE:VVR:SXGXH, YVPKPXX:APT:SPIS-AA¹⁷-LYI:DDSSNVI:YKQYE:VVR:SXGXH, TVPKPXX:APT:SPIS-AA¹⁷-LYI:DDSSNVI:YKQYE:VVR:AXGXH, AVPKAXX:APT:SPIS-AA¹⁷-LYI:DSSNNVI:YKQYE:VVK:AXGXH, KVGKAXX:VPT:SPIS-AA¹⁷-LYI:DDMGVPT:YKQYE:VAE:XGXR, KASKAXX:VPT:SPIS-AA¹⁷-LYI:DKGVVTY:YKQYE:AVS:EXGXR, GSAGPXX:TPT:SPIS-AA¹⁷-LYI:NDKQQII:YKQYE:VVD:RXGXS, STPPTXX:VPT:SPIS-AA¹⁷-LYI:DSANNVV:YKQYE:VVE:SXGXR, HVPKPXX:APT:SPIS-AA¹⁷-LYI:DDSSNVI:YKQYE:VVR:SXGXH, RVPSTXX:APV:SPIS-AA¹⁷-LYI:DNGRVLL:YKQYE:VEE:XGXL, ASAAPXX:VPQ:SPIS-AA¹⁷-LYI:VGRKPKV:YKQYE:VRS:XKXS, ASASPXX:VSQ:SPIS-AA¹⁷-LYI:IGKTPKI:YKQYE:VKS:XKXS, ASASPXX:VPQ:SPIS-AA¹⁷-LYI:VGRTPKV:YKQYE:VKS:XKXS, NDEGLEX:VPT:SPIS-AA¹⁷-LYI:RIKPHQGQH:YKQYE:QHN:KXEXR, NDEGLEX:VPT:SPIS-AA¹⁷-LYI:RIKPHQGQH:YKQYE:EHS:QXEXR, SSVKXQP:SRV:SPIS-AA¹⁷-LYI:EYVRKKPKL:YKQYE:EEH:LEXAXA, RNVQXRP:TQV:SPIS-AA¹⁷-LYI:EIVRKKPIF:YKQYE:EDH:LAXKXE, KIPKAXX:VPT:SPIS-AA¹⁷-LFI:DENEKVV:YKQYE:VVE:GXGXR, GIPEPXX:VPT:SPIS-AA¹⁷-LFI:DENKNVV:YKQYE:VVE:SXAXR, SIPKAXX:VPT:SPIS-AA¹⁷-LFI:DEYDKVV:YKQYE:VVE:GXGXR, HVTKPTX:VPT:SPIS-AA¹⁷-LFI:DDSSNVI:YKQYE:VVE:SXGXH, YVPKPXX:VPT:SPIS-AA¹⁷-LFI:DDSSNVI:YKQYE:VVE:SXGXH, TVPKPXX:VPT:SPIS-AA¹⁷-LFI:DDSSNVI:YKQYE:VVE:AXGXH, AVPKAXX:VPT:SPIS-AA¹⁷-LFI:DSSNNVI:YKQYE:VVE:AXGXH, KVGKAXX:VPT:SPIS-AA¹⁷-LFI:DDMGVPT:YKQYE:VVE:XGXR, KASKAXX:VPT:SPIS-AA¹⁷-LFI:DKGVVTY:YKQYE:VVE:EXGXR, GSAGPXX:VPT:SPIS-AA¹⁷-LFI:NDKQQII:YKQYE:VVE:RXGXS, AAPASXX:VPT:SPIS-AA¹⁷-LFI:DAANNVV:YKQYE:VVE:AXGXR, HVPKPXX:VPT:SPIS-AA¹⁷-LFI:DDSSNVI:YKQYE:VVE:SXGXH, RVPSTXX:VPT:SPIS-AA¹⁷-LFI:DNGRVLL:YKQYE:VVE:XGXL, ASAAPXX:VPT:SPIS-AA¹⁷-LFI:VGRKPKV:YKQYE:VVE:XKXS, ASASPXX:VPT:SPIS-AA¹⁷-LFI:IGKTPKI:YKQYE:VVE:XKXS, ASASPXX:VPT:SPIS-AA¹⁷-LFI:VGRTPKV:YKQYE:VVE:XKXS, GIPEPXX:VPE:SPIS-AA¹⁷-LFI:DENKNVV:YKQYE:TVE:SXAXR, HVTKPTX:APT:SPIS-AA¹⁷-LFI:DDSSNVI:YKQYE:VVR:SXGXH, YVPKPXX:APT:SPIS-AA¹⁷-LFI:DDSSNVI:YKQYE:VVR:SXGXH, TVPKPXX:APT:SPIS-AA¹⁷-LFI:DDSSNVI:YKQYE:VVR:AXGXH, AVPKAXX:APT:SPIS-AA¹⁷-LFI:DSSNNVI:YKQYE:VVK:AXGXH, KVGKAXX:VPT:SPIS-AA¹⁷-LFI:DDMGVPT:YKQYE:VAE:XGXR, KASKAXX:VPT:SPIS-AA¹⁷-LFI:DKGVVTY:YKQYE:AVS:EXGXR, GSAGPXX:TPT:SPIS-AA¹⁷-LFI:NDKQQII:YKQYE:VVD:RXGXS, AAPASXX:VPA:SPIS-AA¹⁷-LFI:DAANNVV:YKQYE:VVE:AXGXR, HVPKPXX:APT:SPIS-AA¹⁷-LFI:DDSSNVI:YKQYE:VVR:SXGXH, RVPSTXX:APV:SPIS-AA¹⁷-LFI:DNGRVLL:YKQYE:VEE:XGXL, ASAAPXX:VPQ:SPIS-AA¹⁷-LFI:VGRKPKV:YKQYE:VRS:XKXS, ASASPXX:VSQ:SPIS-AA¹⁷-LFI:IGKTPKI:YKQYE:VKS:XKXS, ASASPXX:VPQ:SPIS-AA¹⁷-LFI:VGRTPKV:YKQYE:VKS:XKXS, NDEGLEX:VPT:SPIS-AA¹⁷-LFI:RIKPHQGQH:YKQYE:QHN:KXEXR, NDEGLEX:VPT:SPIS-AA¹⁷-LFI:RIKPHQGQH:YKQYE:EHS:QXEXR, SSVKXQP:SRV:SPIS-AA¹⁷-LFI:EYVRKKPKL:YKQYE:EEH:LEXAXA, RNVQXRP:TQV:SPIS-AA¹⁷-LFI:EIVRKKPIF:YKQYE:EDH:LAXKXE, KIPKAXX:APV:KPLS-AA¹⁷-LYV:DENEKVV:DHHKD:VEE:GXGXR, GIPEPXX:APV:KPLS-AA¹⁷-LYV:DENKNVV:DHHKD:VEE:SXAXR, SIPKAXX:APV:KPLS-AA¹⁷-LYV:DEYDKVV:DHHKD:VEE:GXGXR, HVTKPTX:APV:KPLS-AA¹⁷-LYV:DDSSNVI:DHHKD:VEE:SXGXH, YVPKPXX:APV:KPLS-AA¹⁷-LYV:DDSSNVI:DHHKD:VEE:SXGXH, TVPKPXX:APV:KPLS-AA¹⁷-LYV:DDSSNVI:DHHKD:VEE:AXGXH, AVPKAXX:APV:KPLS-AA¹⁷-LYV:DSSNNVI:DHHKD:VEE:AXGXH, KVGKAXX:APV:KPLS-AA¹⁷-LYV:DDMGVPT:DHHKD:VEE:XGXR, KASKAXX:APV:KPLS-AA¹⁷-LYV:DKGVVTY:DHHKD:VEE:EXGXR, GSAGPXX:APV:KPLS-AA¹⁷-LYV:NDKQQII:DHHKD:VEE:RXGXS, AAPASXX:APV:KPLS-AA¹⁷-LYV:DAANNVV:DHHKD:VEE:AXGXR, STPPTXX:APV:KPLS-AA¹⁷-LYV:DSANNVV:DHHKD:VEE:SXGXR, HVPKPXX:APV:KPLS-AA¹⁷-LYV:DDSSNVI:DHHKD:VEE:SXGXH, ASAAPXX:APV:KPLS-AA¹⁷-LYV:VGRKPKV:DHHKD:VEE:XKXS, ASASPXX:APV:KPLS-AA¹⁷-LYV:IGKTPKI:DHHKD:VEE:XKXS, ASASPXX:APV:KPLS-AA¹⁷-LYV:VGRTPKV:DHHKD:VEE:XKXS, KIPKAXX:VPT:KPLS-AA¹⁷-LYV:DENEKVV:DHHKD:VVE:GXGXR, GIPEPXX:VPE:KPLS-AA¹⁷-LYV:DENKNVV:DHHKD:TVE:SXAXR, SIPKAXX:VPT:KPLS-AA¹⁷-LYV:DEYDKVV:DHHKD:VVE:GXGXR, HVTKPTX:APT:KPLS-AA¹⁷-LYV:DDSSNVI:DHHKD:VVR:SXGXH, YVPKPXX:APT:KPLS-AA¹⁷-LYV:DDSSNVI:DHHKD:VVR:SXGXH, TVPKPXX:APT:KPLS-AA¹⁷-LYV:DDSSNVI:DHHKD:VVR:AXGXH, AVPKAXX:APT:KPLS-AA¹⁷-LYV:DSSNNVI:DHHKD:VVK:AXGXH, KVGKAXX:VPT:KPLS-AA¹⁷-LYV:DDMGVPT:DHHKD:VAE:XGXR, KASKAXX:VPT:KPLS-AA¹⁷-LYV:DKGVVTY:DHHKD:AVS:EXGXR, GSAGPXX:TPT:KPLS-AA¹⁷-LYV:NDKQQII:DHHKD:VVD:RXGXS, AAPASXX:VPA:KPLS-AA¹⁷-LYV:DAANNVV:DHHKD:VVE:AXGXR, STPPTXX:VPT:KPLS-AA¹⁷-LYV:DSANNVV:DHHKD:VVE:SXGXR, HVPKPXX:APT:KPLS-AA¹⁷-LYV:DDSSNVI:DHHKD:VVR:SXGXH, ASAAPXX:VPQ:KPLS-AA¹⁷-LYV:VGRKPKV:DHHKD:VRS:XKXS, ASASPXX:VSQ:KPLS-AA¹⁷-LYV:IGKTPKI:DHHKD:VKS:XKXS, ASASPXX:VPQ:KPLS-AA¹⁷-LYV:VGRTPKV:DHHKD:VKS:XKXS, NDEGLEX:VPT:KPLS-AA¹⁷-LYV:RIKPHQGQH:DHHKD:QHN:KXEXR, NDEGLEX:VPT:KPLS-AA¹⁷-LYV:RIKPHQGQH:DHHKD:EHS:QXEXR, SSVKXQP:SRV:KPLS-AA¹⁷-LYV:EYVRKKPKL:DHHKD:EEH:LEXAXA, RNVQXRP:TQV:KPLS-AA¹⁷-LYV:EIVRKKPIF:DHHKD:EDH:LAXKXE, KIPKAXX:VPQ:EPLP-AA¹⁷-VYY:DENEKVV:EQLSN:VRS:GXGXR, GIPEPXX:VPQ:EPLP-AA¹⁷-VYY:DENKNVV:EQLSN:VRS:SXAXR, SIPKAXX:VPQ:EPLP-AA¹⁷-VYY:DEYDKVV:EQLSN:VRS:GXGXR, HVTKPTX:VPQ:EPLP-AA¹⁷-VYY:DDSSNVI:EQLSN:VRS:SXGXH, YVPKPXX:VPQ:EPLP-AA¹⁷-VYY:DDSSNVI:EQLSN:VRS:SXGXH, TVPKPXX:VPQ:EPLP-AA¹⁷-VYY:DDSSNVI:EQLSN:VRS:AXGXH, AVPKAXX:VPQ:EPLP-AA¹⁷-VYY:DSSNNVI:EQLSN:VRS:AXGXH, KVGKAXX:VPQ:EPLP-AA¹⁷-VYY:DDMGVPT:EQLSN:VRS:XGXR, KASKAXX:VPQ:EPLP-AA¹⁷-VYY:DKGVVTY:EQLSN:VRS:EXGXR, GSAGPXX:VPQ:EPLP-AA¹⁷-VYY:NDKQQII:EQLSN:VRS:RXGXS, AAPASXX:VPQ:EPLP-AA¹⁷-VYY:DAANNVV:EQLSN:VRS:AXGXR, STPPTXX:VPQ:EPLP-AA¹⁷-VYY:DSANNVV:EQLSN:VRS:SXGXR, HVPKPXX:VPQ:EPLP-AA¹⁷-VYY:DDSSNVI:EQLSN:VRS:SXGXH, RVPSTXX:VPQ:EPLP-AA¹⁷-VYY:DNGRVLL:EQLSN:VRS:XGXL, ASASPXX:VPQ:EPLP-AA¹⁷-VYY:IGKTPKI:EQLSN:VRS:XKXS, ASASPXX:VPQ:EPLP-AA¹⁷-VYY:VGRTPKV:EQLSN:VRS:XKXS, KIPKAXX:VPT:EPLP-AA¹⁷-VYY:DENEKVV:EQLSN:VVE:GXGXR, GIPEPXX:VPE:EPLP-AA¹⁷-VYY:DENKNVV:EQLSN:TVE:SXAXR, SIPKAXX:VPT:EPLP-AA¹⁷-VYY:DEYDKVV:EQLSN:VVE:GXGXR, HVTKPTX:APT:EPLP-AA¹⁷-VYY:DDSSNVI:EQLSN:VVR:SXGXH, YVPKPXX:APT:EPLP-AA¹⁷-VYY:DDSSNVI:EQLSN:VVR:SXGXH, TVPKPXX:APT:EPLP-AA¹⁷-VYY:DDSSNVI:EQLSN:VVR:AXGXH, AVPKAXX:APT:EPLP-AA¹⁷-VYY:DSSNNVI:EQLSN:VVK:AXGXH, KVGKAXX:VPT:EPLP-AA¹⁷-VYY:DDMGVPT:EQLSN:VAE:XGXR, KASKAXX:VPT:EPLP-AA¹⁷-VYY:DKGVVTY:EQLSN:AVS:EXGXR, GSAGPXX:TPT:EPLP-AA¹⁷-VYY:NDKQQII:EQLSN:VVD:RXGXS, AAPASXX:VPA:EPLP-AA¹⁷-VYY:DAANNVV:EQLSN:VVE:AXGXR, STPPTXX:VPT:EPLP-AA¹⁷-VYY:DSANNVV:EQLSN:VVE:SXGXR, HVPKPXX:APT:EPLP-AA¹⁷-VYY:DDSSNVI:EQLSN:VVR:SXGXH, RVPSTXX:APV:EPLP-AA¹⁷-VYY:DNGRVLL:EQLSN:VEE:XGXL, ASASPXX:VSQ:EPLP-AA¹⁷-VYY:IGKTPKI:EQLSN:VKS:XKXS, ASASPXX:VPQ:EPLP-AA¹⁷-VYY:VGRTPKV:EQLSN:VKS:XKXS, NDEGLEX:VPT:EPLP-AA¹⁷-VYY:RIKPHQGQH:EQLSN:QHN:KXEXR, NDEGLEX:VPT:EPLP-AA¹⁷-VYY:RIKPHQGQH:EQLSN:EHS:QXEXR, SSVKXQP:SRV:EPLP-AA¹⁷-VYY:EYVRKKPKL:EQLSN:EEH:LEXAXA, RNVQXRP:TQV:EPLP-AA¹⁷-VYY:EIVRKKPIF:EQLSN:EDH:LAXKXE, KIPKAXX:VSQ:EPLT-AA¹⁷-LYY:DENEKVV:EQLSN:VKS:GXGXR, GIPEPXX:VSQ:EPLT-AA¹⁷-LYY:DENKNVV:EQLSN:VKS:SXAXR, SIPKAXX:VSQ:EPLT-AA¹⁷-LYY:DEYDKVV:EQLSN:VKS:GXGXR, HVTKPTX:VSQ:EPLT-AA¹⁷-LYY:DDSSNVI:EQLSN:VKS:SXGXH, YVPKPXX:VSQ:EPLT-AA¹⁷-LYY:DDSSNVI:EQLSN:VKS:SXGXH, TVPKPXX:VSQ:EPLT-AA¹⁷-LYY:DDSSNVI:EQLSN:VKS:AXGXH, AVPKAXX:VSQ:EPLT-AA¹⁷-LYY:DSSNNVI:EQLSN:VKS:AXGXH, KVGKAXX:VSQ:EPLT-AA¹⁷-LYY:DDMGVPT:EQLSN:VKS:XGXR, KASKAXX:VSQ:EPLT-AA¹⁷-LYY:DKGVVTY:EQLSN:VKS:EXGXR, GSAGPXX:VSQ:EPLT-AA¹⁷-LYY:NDKQQII:EQLSN:VKS:RXGXS, AAPASXX:VSQ:EPLT-AA¹⁷-LYY:DAANNVV:EQLSN:VKS:AXGXR, STPPTXX:VSQ:EPLT-AA¹⁷-LYY:DSANNVV:EQLSN:VKS:SXGXR, HVPKPXX:VSQ:EPLT-AA¹⁷-LYY:DDSSNVI:EQLSN:VKS:SXGXH, RVPSTXX:VSQ:EPLT-AA¹⁷-LYY:DNGRVLL:EQLSN:VKS:XGXL, ASAAPXX:VSQ:EPLT-AA¹⁷-LYY:VGRKPKV:EQLSN:VKS:XKXS, ASASPXX:VSQ:EPLT-AA¹⁷-LYY:VGRTPKV:EQLSN:VKS:XKXS, KIPKAXX:VPT:EPLT-AA¹⁷-LYY:DENEKVV:EQLSN:VVE:GXGXR, GIPEPXX:VPE:EPLT-AA¹⁷-LYY:DENKNVV:EQLSN:TVE:SXAXR, SIPKAXX:VPT:EPLT-AA¹⁷-LYY:DEYDKVV:EQLSN:VVE:GXGXR, HVTKPTX:APT:EPLT-AA¹⁷-LYY:DDSSNVI:EQLSN:VVR:SXGXH, YVPKPXX:APT:EPLT-AA¹⁷-LYY:DDSSNVI:EQLSN:VVR:SXGXH, TVPKPXX:APT:EPLT-AA¹⁷-LYY:DDSSNVI:EQLSN:VVR:AXGXH, AVPKAXX:APT:EPLT-AA¹⁷-LYY:DSSNNVI:EQLSN:VVK:AXGXH, KVGKAXX:VPT:EPLT-AA¹⁷-LYY:DDMGVPT:EQLSN:VAE:XGXR, KASKAXX:VPT:EPLT-AA¹⁷-LYY:DKGVVTY:EQLSN:AVS:EXGXR, GSAGPXX:TPT:EPLT-AA¹⁷-LYY:NDKQQII:EQLSN:VVD:RXGXS, AAPASXX:VPA:EPLT-AA¹⁷-LYY:DAANNVV:EQLSN:VVE:AXGXR, STPPTXX:VPT:EPLT-AA¹⁷-LYY:DSANNVV:EQLSN:VVE:SXGXR, HVPKPXX:APT:EPLT-AA¹⁷-LYY:DDSSNVI:EQLSN:VVR:SXGXH, RVPSTXX:APV:EPLT-AA¹⁷-LYY:DNGRVLL:EQLSN:VEE:XGXL, ASAAPXX:VPQ:EPLT-AA¹⁷-LYY:VGRKPKV:EQLSN:VRS:XKXS, NDEGLEX:VPT:EPLT-AA¹⁷-LYY:RIKPHQGQH:EQLSN:QHN:KXEXR, NDEGLEX:VPT:EPLT-AA¹⁷-LYY:RIKPHQGQH:EQLSN:EHS:QXEXR, SSVKXQP:SRV:EPLT-AA¹⁷-LYY:EYVRKKPKL:EQLSN:EEH:LEXAXA, RNVQXRP:TQV:EPLT-AA¹⁷-LYY:EIVRKKPIF:EQLSN:EDH:LAXKXE, KIPKAXX:VPQ:EPLT-AA¹⁷-LYY:DENEKVV:EQLSN:VKS:GXGXR, GIPEPXX:VPQ:EPLT-AA¹⁷-LYY:DENKNVV:EQLSN:VKS:SXAXR, SIPKAXX:VPQ:EPLT-AA¹⁷-LYY:DEYDKVV:EQLSN:VKS:GXGXR, HVTKPTX:VPQ:EPLT-AA¹⁷-LYY:DDSSNVI:EQLSN:VKS:SXGXH, YVPKPXX:VPQ:EPLT-AA¹⁷-LYY:DDSSNVI:EQLSN:VKS:SXGXH, TVPKPXX:VPQ:EPLT-AA¹⁷-LYY:DDSSNVI:EQLSN:VKS:AXGXH, AVPKAXX:VPQ:EPLT-AA¹⁷-LYY:DSSNNVI:EQLSN:VKS:AXGXH, KVGKAXX:VPQ:EPLT-AA¹⁷-LYY:DDMGVPT:EQLSN:VKS:XGXR, KASKAXX:VPQ:EPLT-AA¹⁷-LYY:DKGVVTY:EQLSN:VKS:EXGXR, GSAGPXX:VPQ:EPLT-AA¹⁷-LYY:NDKQQII:EQLSN:VKS:RXGXS, AAPASXX:VPQ:EPLT-AA¹⁷-LYY:DAANNVV:EQLSN:VKS:AXGXR, STPPTXX:VPQ:EPLT-AA¹⁷-LYY:DSANNVV:EQLSN:VKS:SXGXR, HVPKPXX:VPQ:EPLT-AA¹⁷-LYY:DDSSNVI:EQLSN:VKS:SXGXH, RVPSTXX:VPQ:EPLT-AA¹⁷-LYY:DNGRVLL:EQLSN:VKS:XGXL, ASAAPXX:VPQ:EPLT-AA¹⁷-LYY:VGRKPKV:EQLSN:VKS:XKXS, ASASPXX:VPQ:EPLT-AA¹⁷-LYY:IGKTPKI:EQLSN:VKS:XKXS, NDEGLEX:VPT:SNIT-AA¹⁷-QIM:RIKPHQGQH:IGEMS:QHN:QXEXR, KIPKAXX:VPT:SNIT-AA¹⁷-QIM:DENEKVV:IGEMS:VVE:GXGXR, GIPEPXX:VPE:SNIT-AA¹⁷-QIM:DENKNVV:IGEMS:TVE:SXAXR, SIPKAXX:VPT:SNIT-AA¹⁷-QIM:DEYDKVV:IGEMS:VVE:GXGXR, HVTKPTX:APT:SNIT-AA¹⁷-QIM:DDSSNVI:IGEMS:VVR:SXGXH, YVPKPXX:APT:SNIT-AA¹⁷-QIM:DDSSNVI:IGEMS:VVR:SXGXH, TVPKPXX:APT:SNIT-AA¹⁷-QIM:DDSSNVI:IGEMS:VVR:AXGXH, AVPKAXX:APT:SNIT-AA¹⁷-QIM:DSSNNVI:IGEMS:VVK:AXGXH, KVGKAXX:VPT:SNIT-AA¹⁷-QIM:DDMGVPT:IGEMS:VAE:XGXR, KASKAXX:VPT:SNIT-AA¹⁷-QIM:DKGVVTY:IGEMS:AVS:EXGXR, GSAGPXX:TPT:SNIT-AA¹⁷-QIM:NDKQQII:IGEMS:VVD:RXGXS, AAPASXX:VPA:SNIT-AA¹⁷-QIM:DAANNVV:IGEMS:VVE:AXGXR, STPPTXX:VPT:SNIT-AA¹⁷-QIM:DSANNVV:IGEMS:VVE:SXGXR, HVPKPXX:APT:SNIT-AA¹⁷-QIM:DDSSNVI:IGEMS:VVR:SXGXH, RVPSTXX:APV:SNIT-AA¹⁷-QIM:DNGRVLL:IGEMS:VEE:XGXL, ASAAPXX:VPQ:SNIT-AA¹⁷-QIM:VGRKPKV:IGEMS:VRS:XKXS, ASASPXX:VSQ:SNIT-AA¹⁷-QIM:IGKTPKI:IGEMS:VKS:XKXS, ASASPXX:VPQ:SNIT-AA¹⁷-QIM:VGRTPKV:IGEMS:VKS:XKXS, NDEGLEX:VPT:SNIT-AA¹⁷-QIM:RIKPHQGQH:IGEMS:EHS:QXEXR, SSVKXQP:SRV:SNIT-AA¹⁷-QIM:EYVRKKPKL:IGEMS:EEH:LEXAXA, RNVQXRP:TQV:SNIT-AA¹⁷-QIM:EIVRKKPIF:IGEMS:EDH:LAXKXE, NDEGLEX:VPT:SNIT-AA¹⁷-QIM:RIKPHQGQH:LGEMS:EHS:KXEXR, KIPKAXX:VPT:SNIT-AA¹⁷-QIM:DENEKVV:LGEMS:VVE:GXGXR, GIPEPXX:VPE:SNIT-AA¹⁷-QIM:DENKNVV:LGEMS:TVE:SXAXR, SIPKAXX:VPT:SNIT-AA¹⁷-QIM:DEYDKVV:LGEMS:VVE:GXGXR, HVTKPTX:APT:SNIT-AA¹⁷-QIM:DDSSNVI:LGEMS:VVR:SXGXH, YVPKPXX:APT:SNIT-AA¹⁷-QIM:DDSSNVI:LGEMS:VVR:SXGXH, TVPKPXX:APT:SNIT-AA¹⁷-QIM:DDSSNVI:LGEMS:VVR:AXGXH, AVPKAXX:APT:SNIT-AA¹⁷-QIM:DSSNNVI:LGEMS:VVK:AXGXH, KVGKAXX:VPT:SNIT-AA¹⁷-QIM:DDMGVPT:LGEMS:VAE:XGXR, KASKAXX:VPT:SNIT-AA¹⁷-QIM:DKGVVTY:LGEMS:AVS:EXGXR, GSAGPXX:TPT:SNIT-AA¹⁷-QIM:NDKQQII:LGEMS:VVD:RXGXS, AAPASXX:VPA:SNIT-AA¹⁷-QIM:DAANNVV:LGEMS:VVE:AXGXR, STPPTXX:VPT:SNIT-AA¹⁷-QIM:DSANNVV:LGEMS:VVE:SXGXR, HVPKPXX:APT:SNIT-AA¹⁷-QIM:DDSSNVI:LGEMS:VVR:SXGXH, RVPSTXX:APV:SNIT-AA¹⁷-QIM:DNGRVLL:LGEMS:VEE:XGXL, ASAAPXX:VPQ:SNIT-AA¹⁷-QIM:VGRKPKV:LGEMS:VRS:XKXS, ASASPXX:VSQ:SNIT-AA¹⁷-QIM:IGKTPKI:LGEMS:VKS:XKXS, ASASPXX:VPQ:SNIT-AA¹⁷-QIM:VGRTPKV:LGEMS:VKS:XKXS, NDEGLEX:VPT:SNIT-AA¹⁷-QIM:RIKPHQGQH:LGEMS:QHN:KXEXR, SSVKXQP:SRV:SNIT-AA¹⁷-QIM:EYVRKKPKL:LGEMS:EEH:LEXAXA, RNVQXRP:TQV:SNIT-AA¹⁷-QIM:EIVRKKPIF:LGEMS:EDH:LAXKXE, RNVQXRP:SRV:RSVK-AA¹⁷-AKV:EIVRKKPIF:KEVQV:EEH:LAXKXE, KIPKAXX:VPT:RSVK-AA¹⁷-AKV:DENEKVV:KEVQV:VVE:GXGXR, GIPEPXX:VPE:RSVK-AA¹⁷-AKV:DENKNVV:KEVQV:TVE:SXAXR, SIPKAXX:VPT:RSVK-AA¹⁷-AKV:DEYDKVV:KEVQV:VVE:GXGXR, HVTKPTX:APT:RSVK-AA¹⁷-AKV:DDSSNVI:KEVQV:VVR:SXGXH, YVPKPXX:APT:RSVK-AA¹⁷-AKV:DDSSNVI:KEVQV:VVR:SXGXH, TVPKPXX:APT:RSVK-AA¹⁷-AKV:DDSSNVI:KEVQV:VVR:AXGXH, AVPKAXX:APT:RSVK-AA¹⁷-AKV:DSSNNVI:KEVQV:VVK:AXGXH, KVGKAXX:VPT:RSVK-AA¹⁷-AKV:DDMGVPT:KEVQV:VAE:XGXR, KASKAXX:VPT:RSVK-AA¹⁷-AKV:DKGVVTY:KEVQV:AVS:EXGXR, GSAGPXX:TPT:RSVK-AA¹⁷-AKV:NDKQQII:KEVQV:VVD:RXGXS, AAPASXX:VPA:RSVK-AA¹⁷-AKV:DAANNVV:KEVQV:VVE:AXGXR, STPPTXX:VPT:RSVK-AA¹⁷-AKV:DSANNVV:KEVQV:VVE:SXGXR, HVPKPXX:APT:RSVK-AA¹⁷-AKV:DDSSNVI:KEVQV:VVR:SXGXH, RVPSTXX:APV:RSVK-AA¹⁷-AKV:DNGRVLL:KEVQV:VEE:XGXL, ASAAPXX:VPQ:RSVK-AA¹⁷-AKV:VGRKPKV:KEVQV:VRS:XKXS, ASASPXX:VSQ:RSVK-AA¹⁷-AKV:IGKTPKI:KEVQV:VKS:XKXS, ASASPXX:VPQ:RSVK-AA¹⁷-AKV:VGRTPKV:KEVQV:VKS:XKXS, NDEGLEX:VPT:RSVK-AA¹⁷-AKV:RIKPHQGQH:KEVQV:QHN:KXEXR, NDEGLEX:VPT:RSVK-AA¹⁷-AKV:RIKPHQGQH:KEVQV:EHS:QXEXR, RNVQXRP:TQV:RSVK-AA¹⁷-AKV:EIVRKKPIF:KEVQV:EDH:LAXKXE, SSVKXQP:TQV:RPVQ-AA¹⁷-RKI:EYVRKKPKL:KKATV:EDH:LEXAXA, KIPKAXX:VPT:RPVQ-AA¹⁷-RKI:DENEKVV:KKATV:VVE:GXGXR, GIPEPXX:VPE:RPVQ-AA¹⁷-RKI:DENKNVV:KKATV:TVE:SXAXR, SIPKAXX:VPT:RPVQ-AA¹⁷-RKI:DEYDKVV:KKATV:VVE:GXGXR, HVTKPTX:APT:RPVQ-AA¹⁷-RKI:DDSSNVI:KKATV:VVR:SXGXH, YVPKPXX:APT:RPVQ-AA¹⁷-RKI:DDSSNVI:KKATV:VVR:SXGXH, TVPKPXX:APT:RPVQ-AA¹⁷-RKI:DDSSNVI:KKATV:VVR:AXGXH, AVPKAXX:APT:RPVQ-AA¹⁷-RKI:DSSNNVI:KKATV:VVK:AXGXH, KVGKAXX:VPT:RPVQ-AA¹⁷-RKI:DDMGVPT:KKATV:VAE:XGXR, KASKAXX:VPT:RPVQ-AA¹⁷-RKI:DKGVVTY:KKATV:AVS:EXGXR, GSAGPXX:TPT:RPVQ-AA¹⁷-RKI:NDKQQII:KKATV:VVD:RXGXS, AAPASXX:VPA:RPVQ-AA¹⁷-RKI:DAANNVV:KKATV:VVE:AXGXR, STPPTXX:VPT:RPVQ-AA¹⁷-RKI:DSANNVV:KKATV:VVE:SXGXR, HVPKPXX:APT:RPVQ-AA¹⁷-RKI:DDSSNVI:KKATV:VVR:SXGXH, RVPSTXX:APV:RPVQ-AA¹⁷-RKI:DNGRVLL:KKATV:VEE:XGXL, ASAAPXX:VPQ:RPVQ-AA¹⁷-RKI:VGRKPKV:KKATV:VRS:XKXS, ASASPXX:VSQ:RPVQ-AA¹⁷-RKI:IGKTPKI:KKATV:VKS:XKXS, ASASPXX:VPQ:RPVQ-AA¹⁷-RKI:VGRTPKV:KKATV:VKS:XKXS, NDEGLEX:VPT:RPVQ-AA¹⁷-RKI:RIKPHQGQH:KKATV:QHN:KXEXR, NDEGLEX:VPT:RPVQ-AA¹⁷-RKI:RIKPHQGQH:KKATV:EHS:QXEXR and SSVKXQP:SRV:RPVQ-AA¹⁷-RKI:EYVRKKPKL:KKATV:EEH:LEXAXA; and wherein AA¹⁷ is selected from the group consisting of G, A, V, L, I, P, F, M, W, T and S (in particular is selected from the group consisting of M, I, L, V and T).

[0373] In particular, in certain embodiments, the heptuplet PEP7:PEP5:PEP1:LINKER:PEP2:PEP6:PEP8 is selected from the group consisting of GIPEPXX:VPTKM:SAIS:DENKNVV:LKNYQ:NMVVE:SXAXR, SIPKAXX:VPTEL:SAIS:DEYDKVV:LKNYQ:EMVVE:GXGXR, HVTKPTX:VPTKL:SAIS:DDSSNVI:LKNYQ:NMVVE:SXGXH, YVPKPXX:VPTKL:SAIS:DDSSNVI:LKNYQ:NMVVE:SXGXH, TVPKPXX:VPTQL:SAIS:DDSSNVI:LKNYQ:NMVVE:AXGXH, AVPKAXX:VPTKL:SAIS:DSSNNVI:LKNYQ:NMVVE:AXGXH, KVGKAXX:VPTKL:SAIS:DDMGVPT:LKNYQ:EGMSVVE:XGXR, KASKAXX:VPTKL:SAIS:DKGVVTY:LKNYQ:GMVVE:EXGXR, GSAGPXX:VPTKM:SAIS:NDKQQII:LKNYQ:GMVVE:RXGXS, AAPASXX:VPTRL:SAIS:DAANNVV:LKNYQ:DMVVE:AXGXR, STPPTXX:VPTRL:SAIS:DSANNVV:LKNYQ:DMVVE:SXGXR, HVPKPXX:VPTKL:SAIS:DDSSNVI:LKNYQ:NMVVE:SXGXH, RVPSTXX:VPTKT:SAIS:DNGRVLL:LKNYQ:MIVVE:XGXL, ASAAPXX:VPTAL:SAIS:VGRKPKV:LKNYQ:MIVVE:XKXS, ASASPXX:VPTDL:SAIS:IGKTPKI:LKNYQ:MIVVE:XKXS, ASASPXX:VPTDL:SAIS:VGRTPKV:LKNYQ:MVVVE:XKXS, NDEGLXS:VPTEE:SAIS:RIKPHQGQH:LKNYQ:FLVVE:KXEXR, NDEGLXS:VPTGQ:SAIS:RIKPHQGQH:LKNYQ:LEVVE:QXEXR, SSVKXQP:VPTHH:SAIS:EYVRKKPKL:LKNYQ:RLVVE:LEXAXA, RNVQXRP:VPTQL:SAIS:EIVRKKPIF:LKNYQ:TLVVE:LAXKXE, GIPEPXX:VPEKM:SAIS:DENKNVV:LKNYQ:NMTVE:SXAXR, HVTKPTX:APTKL:SAIS:DDSSNVI:LKNYQ:NMVVR:SXGXH, YVPKPXX:APTKL:SAIS:DDSSNVI:LKNYQ:NMVVR:SXGXH, TVPKPXX:APTQL:SAIS:DDSSNVI:LKNYQ:NMVVR:AXGXH, AVPKAXX:APTKL:SAIS:DSSNNVI:LKNYQ:NMVVK:AXGXH, KVGKAXX:VPTKL:SAIS:DDMGVPT:LKNYQ:EGMSVAE:XGXR, KASKAXX:VPTKL:SAIS:DKGVVTY:LKNYQ:GMAVS:EXGXR, GSAGPXX:TPTKM:SAIS:NDKQQII:LKNYQ:GMVVD:RXGXS, AAPASXX:VPARL:SAIS:DAANNVV:LKNYQ:DMVVE:AXGXR, HVPKPXX:APTKL:SAIS:DDSSNVI:LKNYQ:NMVVR:SXGXH, RVPSTXX:APVKT:SAIS:DNGRVLL:LKNYQ:MIVEE:XGXL, ASAAPXX:VPQAL:SAIS:VGRKPKV:LKNYQ:MIVRS:XKXS, ASASPXX:VSQDL:SAIS:IGKTPKI:LKNYQ:MIVKS:XKXS, ASASPXX:VPQDL:SAIS:VGRTPKV:LKNYQ:MVVKS:XKXS, NDEGLXS:VPTEE:SAIS:RIKPHQGQH:LKNYQ:FLQHN:KXEXR, NDEGLXS:VPTGQ:SAIS:RIKPHQGQH:LKNYQ:LEEHS:QXEXR, SSVKXQP:SRVHH:SAIS:EYVRKKPKL:LKNYQ:RLEEH:LEXAXA, RNVQXRP:TQVQL:SAIS:EIVRKKPIF:LKNYQ:TLEDH:LAXKXE, KIPKAXX:VPEEL:SSLS:DENEKVV:LKV YP:DMTVE:GXGXR, SIPKAXX:VPEEL:SSLS:DEYDKVV:LKVYP:EMTVE:GXGXR, HVTKPTX:VPEKL:SSLS:DDSSNVI:LKVYP:NMTVE:SXGXH, YVPKPXX:VPEKL:SSLS:DDSSNVI:LKVYP:NMTVE:SXGXH, TVPKPXX:VPEQL:SSLS:DDSSNVI:LKVYP:NMTVE:AXGXH, AVPKAXX:VPEKL:SSLS:DSSNNVI:LKVYP:NMTVE:AXGXH, KVGKAXX:VPEKL:SSLS:DDMGVPT:LKVYP:EGMSTVE:XGXR, KASKAXX:VPEKL:SSLS:DKGVVTY:LKVYP:GMTVE:EXGXR, GSAGPXX:VPEKM:SSLS:NDKQQII:LKVYP:GMTVE:RXGXS, AAPASXX:VPERL:SSLS:DAANNVV:LKVYP:DMTVE:AXGXR, STPPTXX:VPERL:SSLS:DSANNVV:LKVYP:DMTVE:SXGXR, HVPKPXX:VPEKL:SSLS:DDSSNVI:LKVYP:NMTVE:SXGXH, RVPSTXX:VPEKT:SSLS:DNGRVLL:LKVYP:MITVE:XGXL, ASAAPXX:VPEAL:SSLS:VGRKPKV:LKVYP:MITVE:XKXS, ASASPXX:VPEDL:SSLS:IGKTPKI:LKVYP:MITVE:XKXS, ASASPXX:VPEDL:SSLS:VGRTPKV:LKVYP:MVTVE:XKXS, NDEGLXS:VPEEE:SSLS:RIKPHQGQH:LKVYP:FLTVE:KXEXR, NDEGLXS:VPEGQ:SSLS:RIKPHQGQH:LKVYP:LETVE:QXEXR, SSVKXQP:VPEHH:SSLS:EYVRKKPKL:LKVYP:RLTVE:LEXAXA, RNVQXRP:VPEQL:SSLS:EIVRKKPIF:LKVYP:TLTVE:LAXKXE, KIPKAXX:VPTEL:SSLS:DENEKVV:LKVYP:DMVVE:GXGXR, SIPKAXX:VPTEL:SSLS:DEYDKVV:LKVYP:EMVVE:GXGXR, HVTKPTX:APTKL:SSLS:DDSSNVI:LKVYP:NMVVR:SXGXH, YVPKPXX:APTKL:SSLS:DDSSNVI:LKVYP:NMVVR:SXGXH, TVPKPXX:APTQL:SSLS:DDSSNVI:LKVYP:NMVVR:AXGXH, AVPKAXX:APTKL:SSLS:DSSNNVI:LKVYP:NMVVK:AXGXH, KVGKAXX:VPTKL:SSLS:DDMGVPT:LKVYP:EGMSVAE:XGXR, KASKAXX:VPTKL:SSLS:DKGVVTY:LKVYP:GMAVS:EXGXR, GSAGPXX:TPTKM:SSLS:NDKQQII:LKVYP:GMVVD:RXGXS, AAPASXX:VPARL:SSLS:DAANNVV:LKVYP:DMVVE:AXGXR, STPPTXX:VPTRL:SSLS:DSANNVV:LKVYP:DMVVE:SXGXR, HVPKPXX:APTKL:SSLS:DDSSNVI:LKVYP:NMVVR:SXGXH, RVPSTXX:APVKT:SSLS:DNGRVLL:LKVYP:MIVEE:XGXL, ASAAPXX:VPQAL:SSLS:VGRKPKV:LKVYP:MIVRS:XKXS, ASASPXX:VSQDL:SSLS:IGKTPKI:LKVYP:MIVKS:XKXS, ASASPXX:VPQDL:SSLS:VGRTPKV:LKVYP:MVVKS:XKXS, NDEGLXS:VPTEE:SSLS:RIKPHQGQH:LKVYP:FLQHN:KXEXR, NDEGLXS:VPTGQ:SSLS:RIKPHQGQH:LKVYP:LEEHS:QXEXR, SSVKXQP:SRVHH:SSLS:EYVRKKPKL:LKVYP:RLEEH:LEXAXA, RNVQXRP:TQVQL:SSLS:EIVRKKPIF:LKVYP:TLEDH:LAXKXE, KIPKAXX:VPTEL:SAIS:DENEKVV:LKNYQ:DMVVE:GXGXR, KIPKAXX:APTEL:NAIS:DENEKVV:LKKYR:DMVVR:GXGXR, GIPEPXX:APTKM:NAIS:DENKNVV:LKKYR:NMVVR:SXAXR, SIPKAXX:APTEL:NAIS:DEYDKVV:LKKYR:EMVVR:GXGXR, YVPKPXX:APTKL:NAIS:DDSSNVI:LKKYR:NMVVR:SXGXH, TVPKPXX:APTQL:NAIS:DDSSNVI:LKKYR:NMVVR:AXGXH, AVPKAXX:APTKL:NAIS:DSSNNVI:LKKYR:NMVVR:AXGXH, KVGKAXX:APTKL:NAIS:DDMGVPT:LKKYR:EGMSVVR:XGXR, KASKAXX:APTKL:NAIS:DKGVVTY:LKKYR:GMVVR:EXGXR, GSAGPXX:APTKM:NAIS:NDKQQII:LKKYR:GMVVR:RXGXS, AAPASXX:APTRL:NAIS:DAANNVV:LKKYR:DMVVR:AXGXR, STPPTXX:APTRL:NAIS:DSANNVV:LKKYR:DMVVR:SXGXR, HVPKPXX:APTKL:NAIS:DDSSNVI:LKKYR:NMVVR:SXGXH, RVPSTXX:APTKT:NAIS:DNGRVLL:LKKYR:MIVVR:XGXL, ASAAPXX:APTAL:NAIS:VGRKPKV:LKKYR:MIVVR:XKXS, ASASPXX:APTDL:NAIS:IGKTPKI:LKKYR:MIVVR:XKXS, ASASPXX:APTDL:NAIS:VGRTPKV:LKKYR:MVVVR:XKXS, NDEGLXS:APTEE:NAIS:RIKPHQGQH:LKKYR:FLVVR:KXEXR, NDEGLXS:APTGQ:NAIS:RIKPHQGQH:LKKYR:LEVVR:QXEXR, SSVKXQP:APTHH:NAIS:EYVRKKPKL:LKKYR:RLVVR:LEXAXA, RNVQXRP:APTQL:NAIS:EIVRKKPIF:LKKYR:TLVVR:LAXKXE, KIPKAXX:VPTEL:NAIS:DENEKVV:LKKYR:DMVVE:GXGXR, GIPEPXX:VPEKM:NAIS:DENKNVV:LKKYR:NMTVE:SXAXR, SIPKAXX:VPTEL:NAIS:DEYDKVV:LKKYR:EMVVE:GXGXR, AVPKAXX:APTKL:NAIS:DSSNNVI:LKKYR:NMVVK:AXGXH, KVGKAXX:VPTKL:NAIS:DDMGVPT:LKKYR:EGMSVAE:XGXR, KASKAXX:VPTKL:NAIS:DKGVVTY:LKKYR:GMAVS:EXGXR, GSAGPXX:TPTKM:NAIS:NDKQQII:LKKYR:GMVVD:RXGXS, AAPASXX:VPARL:NAIS:DAANNVV:LKKYR:DMVVE:AXGXR, STPPTXX:VPTRL:NAIS:DSANNVV:LKKYR:DMVVE:SXGXR, RVPSTXX:APVKT:NAIS:DNGRVLL:LKKYR:MIVEE:XGXL, ASAAPXX:VPQAL:NAIS:VGRKPKV:LKKYR:MIVRS:XKXS, ASASPXX:VSQDL:NAIS:IGKTPKI:LKKYR:MIVKS:XKXS, ASASPXX:VPQDL:NAIS:VGRTPKV:LKKYR:MVVKS:XKXS, NDEGLXS:VPTEE:NAIS:RIKPHQGQH:LKKYR:FLQHN:KXEXR, NDEGLXS:VPTGQ:NAIS:RIKPHQGQH:LKKYR:LEEHS:QXEXR, SSVKXQP:SRVHH:NAIS:EYVRKKPKL:LKKYR:RLEEH:LEXAXA, RNVQXRP:TQVQL:NAIS:EIVRKKPIF:LKKYR:TLEDH:LAXKXE, HVTKPTX:APTKL:NAIS:DDSSNVI:LKKYR:NMVVR:SXGXH, KIPKAXX:APTEL:SATS:DENEKVV:LRKHR:DMVVK:GXGXR, GIPEPXX:APTKM:SATS:DENKNVV:LRKHR:NMVVK:SXAXR, SIPKAXX:APTEL:SATS:DEYDKVV:LRKHR:EMVVK:GXGXR, HVTKPTX:APTKL:SATS:DDSSNVI:LRKHR:NMVVK:SXGXH, YVPKPXX:APTKL:SATS:DDSSNVI:LRKHR:NMVVK:SXGXH, TVPKPXX:APTQL:SATS:DDSSNVI:LRKHR:NMVVK:AXGXH, KVGKAXX:APTKL:SATS:DDMGVPT:LRKHR:EGMSVVK:XGXR, KASKAXX:APTKL:SATS:DKGVVTY:LRKHR:GMVVK:EXGXR, GSAGPXX:APTKM:SATS:NDKQQII:LRKH R:GMVVK:RXGXS, AAPASXX:APTRL:SATS:DAANNVV:LRKHR:DMVVK:AXGXR, STPPTXX:APTRL:SATS:DSANNVV:LRKHR:DMVVK:SXGXR, HVPKPXX:APTKL:SATS:DDSSNVI:LRKHR:NMVVK:SXGXH, RVPSTXX:APTKT:SATS:DNGRVLL:LRKHR:MIVVK:XGXL, ASAAPXX:APTAL:SATS:VGRKPKV:LRKHR:MIVVK:XKXS, ASASPXX:APTDL:SATS:IGKTPKI:LRKHR:MIVVK:XKXS, ASASPXX:APTDL:SATS:VGRTPKV:LRKHR:MVVVK:XKXS, NDEGLXS:APTEE:SATS:RIKPHQGQH:LRKHR:FLVVK:KXEXR, NDEGLXS:APTGQ:SATS:RIKPHQGQH:LRKHR:LEVVK:QXEXR, SSVKXQP:APTHH:SATS:EYVRKKPKL:LRKHR:RLVVK:LEXAXA, RNVQXRP:APTQL:SATS:EIVRKKPIF:LRKHR:TLVVK:LAXKXE, KIPKAXX:VPTEL:SATS:DENEKVV:LRKHR:DMVVE:GXGXR, GIPEPXX:VPEKM:SATS:DENKNVV:LRKHR:NMTVE:SXAXR, SIPKAXX:VPTEL:SATS:DEYDKVV:LRKHR:EMVVE:GXGXR, HVTKPTX:APTKL:SATS:DDSSNVI:LRKHR:NMVVR:SXGXH, YVPKPXX:APTKL:SATS:DDSSNVI:LRKHR:NMVVR:SXGXH, TVPKPXX:APTQL:SATS:DDSSNVI:LRKHR:NMVVR:AXGXH, KVGKAXX:VPTKL:SATS:DDMGVPT:LRKHR:EGMSVAE:XGXR, KASKAXX:VPTKL:SATS:DKGVVTY:LRKHR:GMAVS:EXGXR, GSAGPXX:TPTKM:SATS:NDKQQII:LRKHR:GMVVD:RXGXS, AAPASXX:VPARL:SATS:DAANNVV:LRKHR:DMVVE:AXGXR, STPPTXX:VPTRL:SATS:DSANNVV:LRKHR:DMVVE:SXGXR, HVPKPXX:APTKL:SATS:DDSSNVI:LRKHR:NMVVR:SXGXH, RVPSTXX:APVKT:SATS:DNGRVLL:LRKHR:MIVEE:XGXL, ASAAPXX:VPQAL:SATS:VGRKPKV:LRKHR:MIVRS:XKXS, ASASPXX:VSQDL:SATS:IGKTPKI:LRKHR:MIVKS:XKXS, ASASPXX:VPQDL:SATS:VGRTPKV:LRKHR:MVVKS:XKXS, NDEGLXS:VPTEE:SATS:RIKPHQGQH:LRKHR:FLQHN:KXEXR, NDEGLXS:VPTGQ:SATS:RIKPHQGQH:LRKHR:LEEHS:QXEXR, SSVKXQP:SRVHH:SATS:EYVRKKPKL:LRKHR:RLEEH:LEXAXA, RNVQXRP:TQVQL:SATS:EIVRKKPIF:LRKHR:TLEDH:LAXKXE, KIPKAXX:VPTEL:SPIS:DENEKVV:LKYHY:DMVAE:GXGXR, GIPEPXX:VPTKM:SPIS:DENKNVV:LKYHY:NMVAE:SXAXR, SIPKAXX:VPTEL:SPIS:DEYDKVV:LKYHY:EMVAE:GXGXR, HVTKPTX:VPTKL:SPIS:DDSSNVI:LKYHY:NMVAE:SXGXH, YVPKPXX:VPTKL:SPIS:DDSSNVI:LKYHY:NMVAE:SXGXH, TVPKPXX:VPTQL:SPIS:DDSSNVI:LKYHY:NMVAE:AXGXH, AVPKAXX:VPTKL:SPIS:DSSNNVI:LKYHY:NMVAE:AXGXH, KASKAXX:VPTKL:SPIS:DKGVVTY:LKYHY:GMVAE:EXGXR, GSAGPXX:VPTKM:SPIS:NDKQQII:LKYHY:GMVAE:RXGXS, AAPASXX:VPTRL:SPIS:DAANNVV:LKYHY:DMVAE:AXGXR, STPPTXX:VPTRL:SPIS:DSANNVV:LKYHY:DMVAE:SXGXR, HVPKPXX:VPTKL:SPIS:DDSSNVI:LKYHY:NMVAE:SXGXH, RVPSTXX:VPTKT:SPIS:DNGRVLL:LKYHY:MIVAE:XGXL, ASAAPXX:VPTAL:SPIS:VGRKPKV:LKYHY:MIVAE:XKXS, ASASPXX:VPTDL:SPIS:IGKTPKI:LKYHY:MIVAE:XKXS, ASASPXX:VPTDL:SPIS:VGRTPKV:LKYHY:MVVAE:XKXS, NDEGLXS:VPTEE:SPIS:RIKPHQGQH:LKYHY:FLVAE:KXEXR, NDEGLXS:VPTGQ:SPIS:RIKPHQGQH:LKYHY:LEVAE:QXEXR, SSVKXQP:VPTHH:SPIS:EYVRKKPKL:LKYHY:RLVAE:LEXAXA, RNVQXRP:VPTQL:SPIS:EIVRKKPIF:LKYHY:TLVAE:LAXKXE, KIPKAXX:VPTEL:SPIS:DENEKVV:LKYHY:DMVVE:GXGXR, GIPEPXX:VPEKM:SPIS:DENKNVV:LKYHY:NMTVE:SXAXR, SIPKAXX:VPTEL:SPIS:DEYDKVV:LKYHY:EMVVE:GXGXR, HVTKPTX:APTKL:SPIS:DDSSNVI:LKYHY:NMVVR:SXGXH, YVPKPXX:APTKL:SPIS:DDSSNVI:LKYHY:NMVVR:SXGXH, TVPKPXX:APTQL:SPIS:DDSSNVI:LKYHY:NMVVR:AXGXH, AVPKAXX:APTKL:SPIS:DSSNNVI:LKYHY:NMVVK:AXGXH, KASKAXX:VPTKL:SPIS:DKGVVTY:LKYHY:GMAVS:EXGXR, GSAGPXX:TPTKM:SPIS:NDKQQII:LKYHY:GMVVD:RXGXS, AAPASXX:VPARL:SPIS:DAANNVV:LKYHY:DMVVE:AXGXR, STPPTXX:VPTRL:SPIS:DSANNVV:LKYHY:DMVVE:SXGXR, HVPKPXX:APTKL:SPIS:DDSSNVI:LKYHY:NMVVR:SXGXH, RVPSTXX:APVKT:SPIS:DNGRVLL:LKYHY:MIVEE:XGXL, ASAAPXX:VPQAL:SPIS:VGRKPKV:LKYHY:MIVRS:XKXS, ASASPXX:VSQDL:SPIS:IGKTPKI:LKYHY:MIVKS:XKXS, ASASPXX:VPQDL:SPIS:VGRTPKV:LKYHY:MVVKS:XKXS, NDEGLXS:VPTEE:SPIS:RIKPHQGQH:LKYHY:FLQHN:KXEXR, NDEGLXS:VPTGQ:SPIS:RIKPHQGQH:LKYHY:LEEHS:QXEXR, SSVKXQP:SRVHH:SPIS:EYVRKKPKL:LKYHY:RLEEH:LEXAXA, RNVQXRP:TQVQL:SPIS:EIVRKKPIF:LKYHY:TLEDH:LAXKXE, KIPKAXX:VPTEL:EPIS:DENEKVV:KFKYE:DMAVS:GXGXR, GIPEPXX:VPTKM:EPIS:DENKNVV:KFKYE:NMAVS:SXAXR, SIPKAXX:VPTEL:EPIS:DEYDKVV:KFKYE:EMAVS:GXGXR, HVTKPTX:VPTKL:EPIS:DDSSNVI:KFKYE:NMAVS:SXGXH, YVPKPXX:VPTKL:EPIS:DDSSNVI:KFKYE:NMAVS:SXGXH, TVPKPXX:VPTQL:EPIS:DDSSNVI:KFKYE:NMAVS:AXGXH, AVPKAXX:VPTKL:EPIS:DSSNNVI:KFKYE:NMAVS:AXGXH, KVGKAXX:VPTKL:EPIS:DDMGVPT:KFKYE:EGMSAVS:XGXR, GSAGPXX:VPTKM:EPIS:NDKQQII:KFKYE:GMAVS:RXGXS, AAPASXX:VPTRL:EPIS:DAANNVV:KFKYE:DMAVS:AXGXR, STPPTXX:VPTRL:EPIS:DSANNVV:KFKYE:DMAVS:SXGXR, HVPKPXX:VPTKL:EPIS:DDSSNVI:KFKYE:NMAVS:SXGXH, RVPSTXX:VPTKT:EPIS:DNGRVLL:KFKYE:MIAVS:XGXL, ASAAPXX:VPTAL:EPIS:VGRKPKV:KFKYE:MIAVS:XKXS, ASASPXX:VPTDL:EPIS:IGKTPKI:KFKYE:MIAVS:XKXS, ASASPXX:VPTDL:EPIS:VGRTPKV:KFKYE:MVAVS:XKXS, NDEGLXS:VPTEE:EPIS:RIKPHQGQH:KFKYE:FLAVS:KXEXR, NDEGLXS:VPTGQ:EPIS:RIKPHQGQH:KFKYE:LEAVS:QXEXR, SSVKXQP:VPTHH:EPIS:EYVRKKPKL:KFKYE:RLAVS:LEXAXA, RNVQXRP:VPTQL:EPIS:EIVRKKPIF:KFKYE:TLAVS:LAXKXE, KIPKAXX:VPTEL:EPIS:DENEKVV:KFKYE:DMVVE:GXGXR, GIPEPXX:VPEKM:EPIS:DENKNVV:KFKYE:NMTVE:SXAXR, SIPKAXX:VPTEL:EPIS:DEYDKVV:KFKYE:EMVVE:GXGXR, HVTKPTX:APTKL:EPIS:DDSSNVI:KFKYE:NMVVR:SXGXH, YVPKPXX:APTKL:EPIS:DDSSNVI:KFKYE:NMVVR:SXGXH, TVPKPXX:APTQL:EPIS:DDSSNVI:KFKYE:NMVVR:AXGXH, AVPKAXX:APTKL:EPIS:DSSNNVI:KFKYE:NMVVK:AXGXH, KVGKAXX:VPTKL:EPIS:DDMGVPT:KFKYE:EGMSVAE:XGXR, GSAGPXX:TPTKM:EPIS:NDKQQII:KFKYE:GMVVD:RXGXS, AAPASXX:VPARL:EPIS:DAANNVV:KFKYE:DMVVE:AXGXR, STPPTXX:VPTRL:EPIS:DSANNVV:KFKYE:DMVVE:SXGXR, HVPKPXX:APTKL:EPIS:DDSSNVI:KFKYE:NMVVR:SXGXH, RVPSTXX:APVKT:EPIS:DNGRVLL:KFKYE:MIVEE:XGXL, ASAAPXX:VPQAL:EPIS:VGRKPKV:KFKYE:MIVRS:XKXS, ASASPXX:VSQDL:EPIS:IGKTPKI:KFKYE:MIVKS:XKXS, ASASPXX:VPQDL:EPIS:VGRTPKV:KFKYE:MVVKS:XKXS, NDEGLXS:VPTEE:EPIS:RIKPHQGQH:KFKYE:FLQHN:KXEXR, NDEGLXS:VPTGQ:EPIS:RIKPHQGQH:KFKYE:LEEHS:QXEXR, SSVKXQP:SRVHH:EPIS:EYVRKKPKL:KFKYE:RLEEH:LEXAXA, RNVQXRP:TQVQL:EPIS:EIVRKKPIF:KFKYE:TLEDH:LAXKXE, KIPKAXX:TPTEL:SPIN:DENEKVV:YGKIP:DMVVD:GXGXR, GIPEPXX:TPTKM:SPIN:DENKNVV:YGKIP:NMVVD:SXAXR, SIPKAXX:TPTEL:SPIN:DEYDKVV:YGKIP:EMVVD:GXGXR, HVTKPTX:TPTKL:SPIN:DDSSNVI:YGKIP:NMVVD:SXGXH, YVPKPXX:TPTKL:SPIN:DDSSNVI:YGKIP:NMVVD:SXGXH, TVPKPXX:TPTQL:SPIN:DDSSNVI:YGKIP:NMVVD:AXGXH, AVPKAXX:TPTKL:SPIN:DSSNNVI:YGKIP:NMVVD:AXGXH, KVGKAXX:TPTKL:SPIN:DDMGVPT:YGKIP:EGMSVVD:XGXR, KASKAXX:TPTKL:SPIN:DKGVVTY:YGKIP:GMVVD:EXGXR, AAPASXX:TPTRL:SPIN:DAANNVV:YGKIP:DMVVD:AXGXR, STPPTXX:TPTRL:SPIN:DSANNVV:YGKIP:DMVVD:SXGXR, HVPKPXX:TPTKL:SPIN:DDSSNVI:YGKIP:NMVVD:SXGXH, RVPSTXX:TPTKT:SPIN:DNGRVLL:YGKIP:MIVVD:XGXL, ASAAPXX:TPTAL:SPIN:VGRKPKV:YGKIP:MIVVD:XKXS, ASASPXX:TPTDL:SPIN:IGKTPKI:YGKIP:MIVVD:XKXS, ASASPXX:TPTDL:SPIN:VGRTPKV:YGKIP:MVVVD:XKXS, NDEGLXS:TPTEE:SPIN:RIKPHQGQH:YGKIP:FLVVD:KXEXR, NDEGLXS:TPTGQ:SPIN:RIKPHQGQH:YGKIP:LEVVD:QXEXR, SSVKXQP:TPTHH:SPIN:EYVRKKPKL:YGKIP:RLVVD:LEXAXA, RNVQXRP:TPTQL:SPIN:EIVRKKPIF:YGKIP:TLVVD:LAXKXE, KIPKAXX:VPTEL:SPIN:DENEKVV:YGKIP:DMVVE:GXGXR, GIPEPXX:VPEKM:SPIN:DENKNVV:YGKIP:NMTVE:SXAXR, SIPKAXX:VPTEL:SPIN:DEYDKVV:YGKIP:EMVVE:GXGXR, HVTKPTX:APTKL:SPIN:DDSSNVI:YGKIP:NMVVR:SXGXH, YVPKPXX:APTKL:SPIN:DDSSNVI:YGKIP:NMVVR:SXGXH, TVPKPXX:APTQL:SPIN:DDSSNVI:YGKIP:NMVVR:AXGXH, AVPKAXX:APTKL:SPIN:DSSNNVI:YGKIP:NMVVK:AXGXH, KVGKAXX:VPTKL:SPIN:DDMGVPT:YGKIP:EGMSVAE:XGXR, KASKAXX:VPTKL:SPIN:DKGVVTY:YGKIP:GMAVS:EXGXR, AAPASXX:VPARL:SPIN:DAANNVV:YGKIP:DMVVE:AXGXR, STPPTXX:VPTRL:SPIN:DSANNVV:YGKIP:DMVVE:SXGXR, HVPKPXX:APTKL:SPIN:DDSSNVI:YGKIP:NMVVR:SXGXH, RVPSTXX:APVKT:SPIN:DNGRVLL:YGKIP:MIVEE:XGXL, ASAAPXX:VPQAL:SPIN:VGRKPKV:YGKIP:MIVRS:XKXS, ASASPXX:VSQDL:SPIN:IGKTPKI:YGKIP:MIVKS:XKXS, ASASPXX:VPQDL:SPIN:VGRTPKV:YGKIP:MVVKS:XKXS, NDEGLXS:VPTEE:SPIN:RIKPHQGQH:YGKIP:FLQHN:KXEXR, NDEGLXS:VPTGQ:SPIN:RIKPHQGQH:YGKIP:LEEHS:QXEXR, SSVKXQP:SRVHH:SPIN:EYVRKKPKL:YGKIP:RLEEH:LEXAXA, RNVQXRP:TQVQL:SPIN:EIVRKKPIF:YGKIP:TLEDH:LAXKXE, KIPKAXX:VPAEL:SPIS:DENEKVV:YKQYE:DMVVE:GXGXR, GIPEPXX:VPAKM:SPIS:DENKNVV:YKQYE:NMVVE:SXAXR, SIPKAXX:VPAEL:SPIS:DEYDKVV:YKQYE:EMVVE:GXGXR, HVTKPTX:VPAKL:SPIS:DDSSNVI:YKQYE:NMVVE:SXGXH, YVPKPXX:VPAKL:SPIS:DDSSNVI:YKQYE:NMVVE:SXGXH, TVPKPXX:VPAQL:SPIS:DDSSNVI:YKQYE:NMVVE:AXGXH, AVPKAXX:VPAKL:SPIS:DSSNNVI:YKQYE:NMVVE:AXGXH, KVGKAXX:VPAKL:SPIS:DDMGVPT:YKQYE:EGMSVVE:XGXR, KASKAXX:VPAKL:SPIS:DKGVVTY:YKQYE:GMVVE:EXGXR, GSAGPXX:VPAKM:SPIS:NDKQQII:YKQYE:GMVVE:RXGXS, STPPTXX:VPARL:SPIS:DSANNVV:YKQYE:DMVVE:SXGXR, HVPKPXX:VPAKL:SPIS:DDSSNVI:YKQYE:NMVVE:SXGXH, RVPSTXX:VPAKT:SPIS:DNGRVLL:YKQYE:MIVVE:XGXL, ASAAPXX:VPAAL:SPIS:VGRKPKV:YKQYE:MIVVE:XKXS, ASASPXX:VPADL:SPIS:IGKTPKI:YKQYE:MIVVE:XKXS, ASASPXX:VPADL:SPIS:VGRTPKV:YKQYE:MVVVE:XKXS, NDEGLXS:VPAEE:SPIS:RIKPHQGQH:YKQYE:FLVVE:KXEXR, NDEGLXS:VPAGQ:SPIS:RIKPHQGQH:YKQYE:LEVVE:QXEXR, SSVKXQP:VPAHH:SPIS:EYVRKKPKL:YKQYE:RLVVE:LEXAXA, RNVQXRP:VPAQL:SPIS:EIVRKKPIF:YKQYE:TLVVE:LAXKXE, KIPKAXX:VPTEL:SPIS:DENEKVV:YKQYE:DMVVE:GXGXR, GIPEPXX:VPEKM:SPIS:DENKNVV:YKQYE:NMTVE:SXAXR, SIPKAXX:VPTEL:SPIS:DEYDKVV:YKQYE:EMVVE:GXGXR, HVTKPTX:APTKL:SPIS:DDSSNVI:YKQYE:NMVVR:SXGXH, YVPKPXX:APTKL:SPIS:DDSSNVI:YKQYE:NMVVR:SXGXH, TVPKPXX:APTQL:SPIS:DDSSNVI:YKQYE:NMVVR:AXGXH, AVPKAXX:APTKL:SPIS:DSSNNVI:YKQYE:NMVVK:AXGXH, KVGKAXX:VPTKL:SPIS:DDMGVPT:YKQYE:EGMSVAE:XGXR, KASKAXX:VPTKL:SPIS:DKGVVTY:YKQYE:GMAVS:EXGXR, GSAGPXX:TPTKM:SPIS:NDKQQII:YKQYE:GMVVD:RXGXS, STPPTXX:VPTRL:SPIS:DSANNVV:YKQYE:DMVVE:SXGXR, HVPKPXX:APTKL:SPIS:DDSSNVI:YKQYE:NMVVR:SXGXH, RVPSTXX:APVKT:SPIS:DNGRVLL:YKQYE:MIVEE:XGXL, ASAAPXX:VPQAL:SPIS:VGRKPKV:YKQYE:MIVRS:XKXS, ASASPXX:VSQDL:SPIS:IGKTPKI:YKQYE:MIVKS:XKXS, ASASPXX:VPQDL:SPIS:VGRTPKV:YKQYE:MVVKS:XKXS, NDEGLXS:VPTEE:SPIS:RIKPHQGQH:YKQYE:FLQHN:KXEXR, NDEGLXS:VPTGQ:SPIS:RIKPHQGQH:YKQYE:LEEHS:QXEXR, SSVKXQP:SRVHH:SPIS:EYVRKKPKL:YKQYE:RLEEH:LEXAXA, RNVQXRP:TQVQL:SPIS:EIVRKKPIF:YKQYE:TLEDH:LAXKXE, GIPEPXX:VPTKM:SPIS:DENKNVV:YKQYE:NMVVE:SXAXR, HVTKPTX:VPTKL:SPIS:DDSSNVI:YKQYE:NMVVE:SXGXH, YVPKPXX:VPTKL:SPIS:DDSSNVI:YKQYE:NMVVE:SXGXH, TVPKPXX:VPTQL:SPIS:DDSSNVI:YKQYE:NMVVE:AXGXH, AVPKAXX:VPTKL:SPIS:DSSNNVI:YKQYE:NMVVE:AXGXH, KVGKAXX:VPTKL:SPIS:DDMGVPT:YKQYE:EGMSVVE:XGXR, KASKAXX:VPTKL:SPIS:DKGVVTY:YKQYE:GMVVE:EXGXR, GSAGPXX:VPTKM:SPIS:NDKQQII:YKQYE:GMVVE:RXGXS, AAPASXX:VPTRL:SPIS:DAANNVV:YKQYE:DMVVE:AXGXR, HVPKPXX:VPTKL:SPIS:DDSSNVI:YKQYE:NMVVE:SXGXH, RVPSTXX:VPTKT:SPIS:DNGRVLL:YKQYE:MIVVE:XGXL, ASAAPXX:VPTAL:SPIS:VGRKPKV:YKQYE:MIVVE:XKXS, ASASPXX:VPTDL:SPIS:IGKTPKI:YKQYE:MIVVE:XKXS, ASASPXX:VPTDL:SPIS:VGRTPKV:YKQYE:MVVVE:XKXS, NDEGLXS:VPTEE:SPIS:RIKPHQGQH:YKQYE:FLVVE:KXEXR, NDEGLXS:VPTGQ:SPIS:RIKPHQGQH:YKQYE:LEVVE:QXEXR, SSVKXQP:VPTHH:SPIS:EYVRKKPKL:YKQYE:RLVVE:LEXAXA, RNVQXRP:VPTQL:SPIS:EIVRKKPIF:YKQYE:TLVVE:LAXKXE, AAPASXX:VPARL:SPIS:DAANNVV:YKQYE:DMVVE:AXGXR, KIPKAXX:APVEL:KPLS:DENEKVV:DHHKD:DMVEE:GXGXR, GIPEPXX:APVKM:KPLS:DENKNVV:DHHKD:NMVEE:SXAXR, SIPKAXX:APVEL:KPLS:DEYDKVV:DHHKD:EMVEE:GXGXR, HVTKPTX:APVKL:KPLS:DDSSNVI:DHHKD:NMVEE:SXGXH, YVPKPXX:APVKL:KPLS:DDSSNVI:DHHKD:NMVEE:SXGXH, TVPKPXX:APVQL:KPLS:DDSSNVI:DHHKD:NMVEE:AXGXH, AVPKAXX:APVKL:KPLS:DSSNNVI:DHHKD:NMVEE:AXGXH, KVGKAXX:APVKL:KPLS:DDMGVPT:DHHKD:EGMSVEE:XGXR, KASKAXX:APVKL:KPLS:DKGVVTY:DHHKD:GMVEE:EXGXR, GSAGPXX:APVKM:KPLS:NDKQQII:DHHKD:GMVEE:RXGXS, AAPASXX:APVRL:KPLS:DAANNVV:DHHKD:DMVEE:AXGXR, STPPTXX:APVRL:KPLS:DSANNVV:DHHKD:DMVEE:SXGXR, HVPKPXX:APVKL:KPLS:DDSSNVI:DHHKD:NMVEE:SXGXH, ASAAPXX:APVAL:KPLS:VGRKPKV:DHHKD:MIVEE:XKXS, ASASPXX:APVDL:KPLS:IGKTPKI:DHHKD:MIVEE:XKXS, ASASPXX:APVDL:KPLS:VGRTPKV:DHHKD:MVVEE:XKXS, NDEGLXS:APVEE:KPLS:RIKPHQGQH:DHHKD:FLVEE:KXEXR, NDEGLXS:APVGQ:KPLS:RIKPHQGQH:DHHKD:LEVEE:QXEXR, SSVKXQP:APVHH:KPLS:EYVRKKPKL:DHHKD:RLVEE:LEXAXA, RNVQXRP:APVQL:KPLS:EIVRKKPIF:DHHKD:TLVEE:LAXKXE, KIPKAXX:VPTEL:KPLS:DENEKVV:DHHKD:DMVVE:GXGXR, GIPEPXX:VPEKM:KPLS:DENKNVV:DHHKD:NMTVE:SXAXR, SIPKAXX:VPTEL:KPLS:DEYDKVV:DHHKD:EMVVE:GXGXR, HVTKPTX:APTKL:KPLS:DDSSNVI:DHHKD:NMVVR:SXGXH, YVPKPXX:APTKL:KPLS:DDSSNVI:DHHKD:NMVVR:SXGXH, TVPKPXX:APTQL:KPLS:DDSSNVI:DHHKD:NMVVR:AXGXH, AVPKAXX:APTKL:KPLS:DSSNNVI:DHHKD:NMVVK:AXGXH, KVGKAXX:VPTKL:KPLS:DDMGVPT:DHHKD:EGMSVAE:XGXR, KASKAXX:VPTKL:KPLS:DKGVVTY:DHHKD:GMAVS:EXGXR, GSAGPXX:TPTKM:KPLS:NDKQQII:DHHKD:GMVVD:RXGXS, AAPASXX:VPARL:KPLS:DAANNVV:DHHKD:DMVVE:AXGXR, STPPTXX:VPTRL:KPLS:DSANNVV:DHHKD:DMVVE:SXGXR, HVPKPXX:APTKL:KPLS:DDSSNVI:DHHKD:NMVVR:SXGXH, ASAAPXX:VPQAL:KPLS:VGRKPKV:DHHKD:MIVRS:XKXS, ASASPXX:VSQDL:KPLS:IGKTPKI:DHHKD:MIVKS:XKXS, ASASPXX:VPQDL:KPLS:VGRTPKV:DHHKD:MVVKS:XKXS, NDEGLXS:VPTEE:KPLS:RIKPHQGQH:DHHKD:FLQHN:KXEXR, NDEGLXS:VPTGQ:KPLS:RIKPHQGQH:DHHKD:LEEHS:QXEXR, SSVKXQP:SRVHH:KPLS:EYVRKKPKL:DHHKD:RLEEH:LEXAXA, RNVQXRP:TQVQL:KPLS:EIVRKKPIF:DHHKD:TLEDH:LAXKXE, KIPKAXX:VPQEL:EPLP:DENEKVV:EQLSN:DMVRS:GXGXR, GIPEPXX:VPQKM:EPLP:DENKNVV:EQLSN:NMVRS:SXAXR, SIPKAXX:VPQEL:EPLP:DEYDKVV:EQLSN:EMVRS:GXGXR, HVTKPTX:VPQKL:EPLP:DDSSNVI:EQLSN:NMVRS:SXGXH, YVPKPXX:VPQKL:EPLP:DDSSNVI:EQLSN:NMVRS:SXGXH, TVPKPXX:VPQQL:EPLP:DDSSNVI:EQLSN:NMVRS:AXGXH, AVPKAXX:VPQKL:EPLP:DSSNNVI:EQLSN:NMVRS:AXGXH, KVGKAXX:VPQKL:EPLP:DDMGVPT:EQLSN:EGMSVRS:XGXR, KASKAXX:VPQKL:EPLP:DKGVVTY:EQLSN:GMVRS:EXGXR, GSAGPXX:VPQKM:EPLP:NDKQQII:EQLSN:GMVRS:RXGXS, AAPASXX:VPQRL:EPLP:DAANNVV:EQLSN:DMVRS:AXGXR, STPPTXX:VPQRL:EPLP:DSANNVV:EQLSN:DMVRS:SXGXR, HVPKPXX:VPQKL:EPLP:DDSSNVI:EQLSN:NMVRS:SXGXH, RVPSTXX:VPQKT:EPLP:DNGRVLL:EQLSN:MIVRS:XGXL, ASASPXX:VPQDL:EPLP:IGKTPKI:EQLSN:MIVRS:XKXS, ASASPXX:VPQDL:EPLP:VGRTPKV:EQLSN:MVVRS:XKXS, NDEGLXS:VPQEE:EPLP:RIKPHQGQH:EQLSN:FLVRS:KXEXR, NDEGLXS:VPQGQ:EPLP:RIKPHQGQH:EQLSN:LEVRS:QXEXR, SSVKXQP:VPQHH:EPLP:EYVRKKPKL:EQLSN:RLVRS:LEXAXA, RNVQXRP:VPQQL:EPLP:EIVRKKPIF:EQLSN:TLVRS:LAXKXE, KIPKAXX:VPTEL:EPLP:DENEKVV:EQLSN:DMVVE:GXGXR, GIPEPXX:VPEKM:EPLP:DENKNVV:EQLSN:NMTVE:SXAXR, SIPKAXX:VPTEL:EPLP:DEYDKVV:EQLSN:EMVVE:GXGXR, HVTKPTX:APTKL:EPLP:DDSSNVI:EQLSN:NMVVR:SXGXH, YVPKPXX:APTKL:EPLP:DDSSNVI:EQLSN:NMVVR:SXGXH, TVPKPXX:APTQL:EPLP:DDSSNVI:EQLSN:NMVVR:AXGXH, AVPKAXX:APTKL:EPLP:DSSNNVI:EQLSN:NMVVK:AXGXH, KVGKAXX:VPTKL:EPLP:DDMGVPT:EQLSN:EGMSVAE:XGXR, KASKAXX:VPTKL:EPLP:DKGVVTY:EQLSN:GMAVS:EXGXR, GSAGPXX:TPTKM:EPLP:NDKQQII:EQLSN:GMVVD:RXGXS, AAPASXX:VPARL:EPLP:DAANNVV:EQLSN:DMVVE:AXGXR, STPPTXX:VPTRL:EPLP:DSANNVV:EQLSN:DMVVE:SXGXR, HVPKPXX:APTKL:EPLP:DDSSNVI:EQLSN:NMVVR:SXGXH, RVPSTXX:APVKT:EPLP:DNGRVLL:EQLSN:MIVEE:XGXL, ASASPXX:VSQDL:EPLP:IGKTPKI:EQLSN:MIVKS:XKXS, ASASPXX:VPQDL:EPLP:VGRTPKV:EQLSN:MVVKS:XKXS, NDEGLXS:VPTEE:EPLP:RIKPHQGQH:EQLSN:FLQHN:KXEXR, NDEGLXS:VPTGQ:EPLP:RIKPHQGQH:EQLSN:LEEHS:QXEXR, SSVKXQP:SRVHH:EPLP:EYVRKKPKL:EQLSN:RLEEH:LEXAXA, RNVQXRP:TQVQL:EPLP:EIVRKKPIF:EQLSN:TLEDH:LAXKXE, KIPKAXX:VSQEL:EPLT:DENEKVV:EQLSN:DMVKS:GXGXR, GIPEPXX:VSQKM:EPLT:DENKNVV:EQLSN:NMVKS:SXAXR, SIPKAXX:VSQEL:EPLT:DEYDKVV:EQLSN:EMVKS:GXGXR, HVTKPTX:VSQKL:EPLT:DDSSNVI:EQLSN:NMVKS:SXGXH, YVPKPXX:VSQKL:EPLT:DDSSNVI:EQLSN:NMVKS:SXGXH, TVPKPXX:VSQQL:EPLT:DDSSNVI:EQLSN:NMVKS:AXGXH, AVPKAXX:VSQKL:EPLT:DSSNNVI:EQLSN:NMVKS:AXGXH, KVGKAXX:VSQKL:EPLT:DDMGVPT:EQLSN:EGMSVKS:XGXR, KASKAXX:VSQKL:EPLT:DKGVVTY:EQLSN:GMVKS:EXGXR, GSAGPXX:VSQKM:EPLT:NDKQQII:EQLSN:GMVKS:RXGXS, AAPASXX:VSQRL:EPLT:DAANNVV:EQLSN:DMVKS:AXGXR, STPPTXX:VSQRL:EPLT:DSANNVV:EQLSN:DMVKS:SXGXR, HVPKPXX:VSQKL:EPLT:DDSSNVI:EQLSN:NMVKS:SXGXH, RVPSTXX:VSQKT:EPLT:DNGRVLL:EQLSN:MIVKS:XGXL, ASAAPXX:VSQAL:EPLT:VGRKPKV:EQLSN:MIVKS:XKXS, ASASPXX:VSQDL:EPLT:VGRTPKV:EQLSN:MVVKS:XKXS, NDEGLXS:VSQEE:EPLT:RIKPHQGQH:EQLSN:FLVKS:KXEXR, NDEGLXS:VSQGQ:EPLT:RIKPHQGQH:EQLSN:LEVKS:QXEXR, SSVKXQP:VSQHH:EPLT:EYVRKKPKL:EQLSN:RLVKS:LEXAXA, RNVQXRP:VSQQL:EPLT:EIVRKKPIF:EQLSN:TLVKS:LAXKXE, KIPKAXX:VPTEL:EPLT:DENEKVV:EQLSN:DMVVE:GXGXR, GIPEPXX:VPEKM:EPLT:DENKNVV:EQLSN:NMTVE:SXAXR, SIPKAXX:VPTEL:EPLT:DEYDKVV:EQLSN:EMVVE:GXGXR, HVTKPTX:APTKL:EPLT:DDSSNVI:EQLSN:NMVVR:SXGXH, YVPKPXX:APTKL:EPLT:DDSSNVI:EQLSN:NMVVR:SXGXH, TVPKPXX:APTQL:EPLT:DDSSNVI:EQLSN:NMVVR:AXGXH, AVPKAXX:APTKL:EPLT:DSSNNVI:EQLSN:NMVVK:AXGXH, KVGKAXX:VPTKL:EPLT:DDMGVPT:EQLSN:EGMSVAE:XGXR, KASKAXX:VPTKL:EPLT:DKGVVTY:EQLSN:GMAVS:EXGXR, GSAGPXX:TPTKM:EPLT:NDKQQII:EQLSN:GMVVD:RXGXS, AAPASXX:VPARL:EPLT:DAANNVV:EQLSN:DMVVE:AXGXR, STPPTXX:VPTRL:EPLT:DSANNVV:EQLSN:DMVVE:SXGXR, HVPKPXX:APTKL:EPLT:DDSSNVI:EQLSN:NMVVR:SXGXH, RVPSTXX:APVKT:EPLT:DNGRVLL:EQLSN:MIVEE:XGXL, ASAAPXX:VPQAL:EPLT:VGRKPKV:EQLSN:MIVRS:XKXS, ASASPXX:VPQDL:EPLT:VGRTPKV:EQLSN:MVVKS:XKXS, NDEGLXS:VPTEE:EPLT:RIKPHQGQH:EQLSN:FLQHN:KXEXR, NDEGLXS:VPTGQ:EPLT:RIKPHQGQH:EQLSN:LEEHS:QXEXR, SSVKXQP:SRVHH:EPLT:EYVRKKPKL:EQLSN:RLEEH:LEXAXA, RNVQXRP:TQVQL:EPLT:EIVRKKPIF:EQLSN:TLEDH:LAXKXE, KIPKAXX:VPQEL:EPLT:DENEKVV:EQLSN:DMVKS:GXGXR, GIPEPXX:VPQKM:EPLT:DENKNVV:EQLSN:NMVKS:SXAXR, SIPKAXX:VPQEL:EPLT:DEYDKVV:EQLSN:EMVKS:GXGXR, HVTKPTX:VPQKL:EPLT:DDSSNVI:EQLSN:NMVKS:SXGXH, YVPKPXX:VPQKL:EPLT:DDSSNVI:EQLSN:NMVKS:SXGXH, TVPKPXX:VPQQL:EPLT:DDSSNVI:EQLSN:NMVKS:AXGXH, AVPKAXX:VPQKL:EPLT:DSSNNVI:EQLSN:NMVKS:AXGXH, KVGKAXX:VPQKL:EPLT:DDMGVPT:EQLSN:EGMSVKS:XGXR, KASKAXX:VPQKL:EPLT:DKGVVTY:EQLSN:GMVKS:EXGXR, GSAGPXX:VPQKM:EPLT:NDKQQII:EQLSN:GMVKS:RXGXS, AAPASXX:VPQRL:EPLT:DAANNVV:EQLSN:DMVKS:AXGXR, STPPTXX:VPQRL:EPLT:DSANNVV:EQLSN:DMVKS:SXGXR, HVPKPXX:VPQKL:EPLT:DDSSNVI:EQLSN:NMVKS:SXGXH, RVPSTXX:VPQKT:EPLT:DNGRVLL:EQLSN:MIVKS:XGXL, ASAAPXX:VPQAL:EPLT:VGRKPKV:EQLSN:MIVKS:XKXS, ASASPXX:VPQDL:EPLT:IGKTPKI:EQLSN:MIVKS:XKXS, NDEGLXS:VPQEE:EPLT:RIKPHQGQH:EQLSN:FLVKS:KXEXR, NDEGLXS:VPQGQ:EPLT:RIKPHQGQH:EQLSN:LEVKS:QXEXR, SSVKXQP:VPQHH:EPLT:EYVRKKPKL:EQLSN:RLVKS:LEXAXA, RNVQXRP:VPQQL:EPLT:EIVRKKPIF:EQLSN:TLVKS:LAXKXE, ASASPXX:VSQDL:EPLT:IGKTPKI:EQLSN:MIVKS:XKXS, KIPKAXX:VPTEL:SNIT:DENEKVV:IGEMS:DMQHN:GXGXR, GIPEPXX:VPTKM:SNIT:DENKNVV:IGEMS:NMQHN:SXAXR, SIPKAXX:VPTEL:SNIT:DEYDKVV:IGEMS:EMQHN:GXGXR, HVTKPTX:VPTKL:SNIT:DDSSNVI:IGEMS:NMQHN:SXGXH, YVPKPXX:VPTKL:SNIT:DDSSNVI:IGEMS:NMQHN:SXGXH, TVPKPXX:VPTQL:SNIT:DDSSNVI:IGEMS:NMQHN:AXGXH, AVPKAXX:VPTKL:SNIT:DSSNNVI:IGEMS:NMQHN:AXGXH, KVGKAXX:VPTKL:SNIT:DDMGVPT:IGEMS:EGMSQHN:XGXR, KASKAXX:VPTKL:SNIT:DKGVVTY:IGEMS:GMQHN:EXGXR, GSAGPXX:VPTKM:SNIT:NDKQQII:IGEMS:GMQHN:RXGXS, AAPASXX:VPTRL:SNIT:DAANNVV:IGEMS:DMQHN:AXGXR, STPPTXX:VPTRL:SNIT:DSANNVV:IGEMS:DMQHN:SXGXR, HVPKPXX:VPTKL:SNIT:DDSSNVI:IGEMS:NMQHN:SXGXH, RVPSTXX:VPTKT:SNIT:DNGRVLL:IGEMS:MIQHN:XGXL, ASAAPXX:VPTAL:SNIT:VGRKPKV:IGEMS:MIQHN:XKXS, ASASPXX:VPTDL:SNIT:IGKTPKI:IGEMS:MIQHN:XKXS, ASASPXX:VPTDL:SNIT:VGRTPKV:IGEMS:MVQHN:XKXS, NDEGLXS:VPTGQ:SNIT:RIKPHQGQH:IGEMS:LEQHN:QXEXR, NDEGLXS:VPTEE:SNIT:RIKPHQGQH:IGEMS:FLQHN:KXEXR, SSVKXQP:VPTHH:SNIT:EYVRKKPKL:IGEMS:RLQHN:LEXAXA, RNVQXRP:VPTQL:SNIT:EIVRKKPIF:IGEMS:TLQHN:LAXKXE, KIPKAXX:VPTEL:SNIT:DENEKVV:IGEMS:DMVVE:GXGXR, GIPEPXX:VPEKM:SNIT:DENKNVV:IGEMS:NMTVE:SXAXR, SIPKAXX:VPTEL:SNIT:DEYDKVV:IGEMS:EMVVE:GXGXR, HVTKPTX:APTKL:SNIT:DDSSNVI:IGEMS:NMVVR:SXGXH, YVPKPXX:APTKL:SNIT:DDSSNVI:IGEMS:NMVVR:SXGXH, TVPKPXX:APTQL:SNIT:DDSSNVI:IGEMS:NMVVR:AXGXH, AVPKAXX:APTKL:SNIT:DSSNNVI:IGEMS:NMVVK:AXGXH, KVGKAXX:VPTKL:SNIT:DDMGVPT:IGEMS:EGMSVAE:XGXR, KASKAXX:VPTKL:SNIT:DKGVVTY:IGEMS:GMAVS:EXGXR, GSAGPXX:TPTKM:SNIT:NDKQQII:IGEMS:GMVVD:RXGXS, AAPASXX:VPARL:SNIT:DAANNVV:IGEMS:DMVVE:AXGXR, STPPTXX:VPTRL:SNIT:DSANNVV:IGEMS:DMVVE:SXGXR, HVPKPXX:APTKL:SNIT:DDSSNVI:IGEMS:NMVVR:SXGXH, RVPSTXX:APVKT:SNIT:DNGRVLL:IGEMS:MIVEE:XGXL, ASAAPXX:VPQAL:SNIT:VGRKPKV:IGEMS:MIVRS:XKXS, ASASPXX:VSQDL:SNIT:IGKTPKI:IGEMS:MIVKS:XKXS, ASASPXX:VPQDL:SNIT:VGRTPKV:IGEMS:MVVKS:XKXS, NDEGLXS:VPTGQ:SNIT:RIKPHQGQH:IGEMS:LEEHS:QXEXR, SSVKXQP:SRVHH:SNIT:EYVRKKPKL:IGEMS:RLEEH:LEXAXA, RNVQXRP:TQVQL:SNIT:EIVRKKPIF:IGEMS:TLEDH:LAXKXE, KIPKAXX:VPTEL:SNIT:DENEKVV:LGEMS:DMEHS:GXGXR, GIPEPXX:VPTKM:SNIT:DENKNVV:LGEMS:NMEHS:SXAXR, SIPKAXX:VPTEL:SNIT:DEYDKVV:LGEMS:EMEHS:GXGXR, HVTKPTX:VPTKL:SNIT:DDSSNVI:LGEMS:NMEHS:SXGXH, YVPKPXX:VPTKL:SNIT:DDSSNVI:LGEMS:NMEHS:SXGXH, TVPKPXX:VPTQL:SNIT:DDSSNVI:LGEMS:NMEHS:AXGXH, AVPKAXX:VPTKL:SNIT:DSSNNVI:LGEMS:NMEHS:AXGXH, KVGKAXX:VPTKL:SNIT:DDMGVPT:LGEMS:EGMSEHS:XGXR, KASKAXX:VPTKL:SNIT:DKGVVTY:LGEMS:GMEHS:EXGXR, GSAGPXX:VPTKM:SNIT:NDKQQII:LGEMS:GMEHS:RXGXS, AAPASXX:VPTRL:SNIT:DAANNVV:LGEMS:DMEHS:AXGXR, STPPTXX:VPTRL:SNIT:DSANNVV:LGEMS:DMEHS:SXGXR, HVPKPXX:VPTKL:SNIT:DDSSNVI:LGEMS:NMEHS:SXGXH, RVPSTXX:VPTKT:SNIT:DNGRVLL:LGEMS:MIEHS:XGXL, ASAAPXX:VPTAL:SNIT:VGRKPKV:LGEMS:MI EHS:XKXS, ASASPXX:VPTDL:SNIT:IGKTPKI:LGEMS:MIEHS:XKXS, ASASPXX:VPTDL:SNIT:VGRTPKV:LGEMS:MVEHS:XKXS, NDEGLXS:VPTEE:SNIT:RIKPHQGQH:LGEMS:FLEHS:KXEXR, SSVKXQP:VPTHH:SNIT:EYVRKKPKL:LGEMS:RLEHS:LEXAXA, RNVQXRP:VPTQL:SNIT:EIVRKKPIF:LGEMS:TLEHS:LAXKXE, KIPKAXX:VPTEL:SNIT:DENEKVV:LGEMS:DMVVE:GXGXR, GIPEPXX:VPEKM:SNIT:DENKNVV:LGEMS:NMTVE:SXAXR, SIPKAXX:VPTEL:SNIT:DEYDKVV:LGEMS:EMVVE:GXGXR, HVTKPTX:APTKL:SNIT:DDSSNVI:LGEMS:NMVVR:SXGXH, YVPKPXX:APTKL:SNIT:DDSSNVI:LGEMS:NMVVR:SXGXH, TVPKPXX:APTQL:SNIT:DDSSNVI:LGEMS:NMVVR:AXGXH, AVPKAXX:APTKL:SNIT:DSSNNVI:LGEMS:NMVVK:AXGXH, KVGKAXX:VPTKL:SNIT:DDMGVPT:LGEMS:EGMSVAE:XGXR, KASKAXX:VPTKL:SNIT:DKGVVTY:LGEMS:GMAVS:EXGXR, GSAGPXX:TPTKM:SNIT:NDKQQII:LGEMS:GMVVD:RXGXS, AAPASXX:VPARL:SNIT:DAANNVV:LGEMS:DMVVE:AXGXR, STPPTXX:VPTRL:SNIT:DSANNVV:LGEMS:DMVVE:SXGXR, HVPKPXX:APTKL:SNIT:DDSSNVI:LGEMS:NMVVR:SXGXH, RVPSTXX:APVKT:SNIT:DNGRVLL:LGEMS:MIVEE:XGXL, ASAAPXX:VPQAL:SNIT:VGRKPKV:LGEMS:MIVRS:XKXS, ASASPXX:VSQDL:SNIT:IGKTPKI:LGEMS:MIVKS:XKXS, ASASPXX:VPQDL:SNIT:VGRTPKV:LGEMS:MVVKS:XKXS, NDEGLXS:VPTEE:SNIT:RIKPHQGQH:LGEMS:FLQHN:KXEXR, SSVKXQP:SRVHH:SNIT:EYVRKKPKL:LGEMS:RLEEH:LEXAXA, RNVQXRP:TQVQL:SNIT:EIVRKKPIF:LGEMS:TLEDH:LAXKXE, KIPKAXX:SRVEL:RSVK:DENEKVV:KEVQV:DMEEH:GXGXR, GIPEPXX:SRVKM:RSVK:DENKNVV:KEVQV:NMEEH:SXAXR, SIPKAXX:SRVEL:RSVK:DEYDKVV:KEVQV:EMEEH:GXGXR, HVTKPTX:SRVKL:RSVK:DDSSNVI:KEVQV:NMEEH:SXGXH, YVPKPXX:SRVKL:RSVK:DDSSNVI:KEVQV:NMEEH:SXGXH, TVPKPXX:SRVQL:RSVK:DDSSNVI:KEVQV:NMEEH:AXGXH, AVPKAXX:SRVKL:RSVK:DSSNNVI:KEVQV:NMEEH:AXGXH, KVGKAXX:SRVKL:RSVK:DDMGVPT:KEVQV:EGMSEEH:XGXR, KASKAXX:SRVKL:RSVK:DKGVVTY:KEVQV:GMEEH:EXGXR, GSAGPXX:SRVKM:RSVK:NDKQQII:KEVQV:GMEEH:RXGXS, AAPASXX:SRVRL:RSVK:DAANNVV:KEVQV:DMEEH:AXGXR, STPPTXX:SRVRL:RSVK:DSANNVV:KEVQV:DMEEH:SXGXR, HVPKPXX:SRVKL:RSVK:DDSSNVI:KEVQV:NMEEH:SXGXH, RVPSTXX:SRVKT:RSVK:DNGRVLL:KEVQV:MIEEH:XGXL, ASAAPXX:SRVAL:RSVK:VGRKPKV:KEVQV:MI EEH:XKXS, ASASPXX:SRVDL:RSVK:IGKTPKI:KEVQV:MIEEH:XKXS, ASASPXX:SRVDL:RSVK:VGRTPKV:KEVQV:MVEEH:XKXS, NDEGLXS:SRVEE:RSVK:RIKPHQGQH:KEVQV:FLEEH:KXEXR, NDEGLXS:SRVGQ:RSVK:RIKPHQGQH:KEVQV:LEEEH:QXEXR, RNVQXRP:SRVQL:RSVK:EIVRKKPIF:KEVQV:TLEEH:LAXKXE, KIPKAXX:VPTEL:RSVK:DENEKVV:KEVQV:DMVVE:GXGXR, GIPEPXX:VPEKM:RSVK:DENKNVV:KEVQV:NMTVE:SXAXR, SIPKAXX:VPTEL:RSVK:DEYDKVV:KEVQV:EMVVE:GXGXR, HVTKPTX:APTKL:RSVK:DDSSNVI:KEVQV:NMVVR:SXGXH, YVPKPXX:APTKL:RSVK:DDSSNVI:KEVQV:NMVVR:SXGXH, TVPKPXX:APTQL:RSVK:DDSSNVI:KEVQV:NMVVR:AXGXH, AVPKAXX:APTKL:RSVK:DSSNNVI:KEVQV:NMVVK:AXGXH, KVGKAXX:VPTKL:RSVK:DDMGVPT:KEVQV:EGMSVAE:XGXR, KASKAXX:VPTKL:RSVK:DKGVVTY:KEVQV:GMAVS:EXGXR, GSAGPXX:TPTKM:RSVK:NDKQQII:KEVQV:GMVVD:RXGXS, AAPASXX:VPARL:RSVK:DAANNVV:KEVQV:DMVVE:AXGXR, STPPTXX:VPTRL:RSVK:DSANNVV:KEVQV:DMVVE:SXGXR, HVPKPXX:APTKL:RSVK:DDSSNVI:KEVQV:NMVVR:SXGXH, RVPSTXX:APVKT:RSVK:DNGRVLL:KEVQV:MIVEE:XGXL, ASAAPXX:VPQAL:RSVK:VGRKPKV:KEVQV:MIVRS:XKXS, ASASPXX:VSQDL:RSVK:IGKTPKI:KEVQV:MIVKS:XKXS, ASASPXX:VPQDL:RSVK:VGRTPKV:KEVQV:MVVKS:XKXS, NDEGLXS:VPTEE:RSVK:RIKPHQGQH:KEVQV:FLQHN:KXEXR, NDEGLXS:VPTGQ:RSVK:RIKPHQGQH:KEVQV:LEEHS:QXEXR, RNVQXRP:TQVQL:RSVK:EIVRKKPIF:KEVQV:TLEDH:LAXKXE, KIPKAXX:TQVEL:RPVQ:DENEKVV:KKATV:DMEDH:GXGXR, GIPEPXX:TQVKM:RPVQ:DENKNVV:KKATV:NMEDH:SXAXR, SIPKAXX:TQVEL:RPVQ:DEYDKVV:KKATV:EMEDH:GXGXR, HVTKPTX:TQVKL:RPVQ:DDSSNVI:KKATV:NMEDH:SXGXH, YVPKPXX:TQVKL:RPVQ:DDSSNVI:KKATV:NMEDH:SXGXH, TVPKPXX:TQVQL:RPVQ:DDSSNVI:KKATV:NMEDH:AXGXH, AVPKAXX:TQVKL:RPVQ:DSSNNVI:KKATV:NMEDH:AXGXH, KVGKAXX:TQVKL:RPVQ:DDMGVPT:KKATV:EGMSEDH:XGXR, KASKAXX:TQVKL:RPVQ:DKGVVTY:KKATV:GMEDH:EXGXR, GSAGPXX:TQVKM:RPVQ:NDKQQII:KKATV:GMEDH:RXGXS, AAPASXX:TQVRL:RPVQ:DAANNVV:KKATV:DMEDH:AXGXR, STPPTXX:TQVRL:RPVQ:DSANNVV:KKATV:DMEDH:SXGXR, HVPKPXX:TQVKL:RPVQ:DDSSNVI:KKATV:NMEDH:SXGXH, RVPSTXX:TQVKT:RPVQ:DNGRVLL:KKATV:MIEDH:XGXL, ASAAPXX:TQVAL:RPVQ:VGRKPKV:KKATV:MIEDH:XKXS, ASASPXX:TQVDL:RPVQ:IGKTPKI:KKATV:MIEDH:XKXS, ASASPXX:TQVDL:RPVQ:VGRTPKV:KKATV:MVEDH:XKXS, NDEGLXS:TQVEE:RPVQ:RIKPHQGQH:KKATV:FLEDH:KXEXR, NDEGLXS:TQVGQ:RPVQ:RIKPHQGQH:KKATV:LEEDH:QXEXR, SSVKXQP:TQVHH:RPVQ:EYVRKKPKL:KKATV:RLEDH:LEXAXA, KIPKAXX:VPTEL:RPVQ:DENEKVV:KKATV:DMVVE:GXGXR, GIPEPXX:VPEKM:RPVQ:DENKNVV:KKATV:NMTVE:SXAXR, SIPKAXX:VPTEL:RPVQ:DEYDKVV:KKATV:EMVVE:GXGXR, HVTKPTX:APTKL:RPVQ:DDSSNVI:KKATV:NMVVR:SXGXH, YVPKPXX:APTKL:RPVQ:DDSSNVI:KKATV:NMVVR:SXGXH, TVPKPXX:APTQL:RPVQ:DDSSNVI:KKATV:NMVVR:AXGXH, AVPKAXX:APTKL:RPVQ:DSSNNVI:KKATV:NMVVK:AXGXH, KVGKAXX:VPTKL:RPVQ:DDMGVPT:KKATV:EGMSVAE:XGXR, KASKAXX:VPTKL:RPVQ:DKGVVTY:KKATV:GMAVS:EXGXR, GSAGPXX:TPTKM:RPVQ:NDKQQII:KKATV:GMVVD:RXGXS, AAPASXX:VPARL:RPVQ:DAANNVV:KKATV:DMVVE:AXGXR, STPPTXX:VPTRL:RPVQ:DSANNVV:KKATV:DMVVE:SXGXR, HVPKPXX:APTKL:RPVQ:DDSSNVI:KKATV:NMVVR:SXGXH, RVPSTXX:APVKT:RPVQ:DNGRVLL:KKATV:MIVEE:XGXL, ASAAPXX:VPQAL:RPVQ:VGRKPKV:KKATV:MIVRS:XKXS, ASASPXX:VSQDL:RPVQ:IGKTPKI:KKATV:MIVKS:XKXS, ASASPXX:VPQDL:RPVQ:VGRTPKV:KKATV:MVVKS:XKXS, NDEGLXS:VPTEE:RPVQ:RIKPHQGQH:KKATV:FLQHN:KXEXR, NDEGLXS:VPTGQ:RPVQ:RIKPHQGQH:KKATV:LEEHS:QXEXR, SSVKXQP:SRVHH:RPVQ:EYVRKKPKL:KKATV:RLEEH:LEXAXA. More particularly, the heptuplet PEP7:PEP5:PEP1:LINKER:PEP2:PEP6:PEP8 is selected from the group consisting of GIPEPXX:VPTKM:SAIS:DENKNVV:LKNYQ:NMVVE:SXAXR, HVTKPTX:VPTKL:SAIS:DDSSNVI:LKNYQ:NMVVE:SXGXH, YVPKPXX:VPTKL:SAIS:DDSSNVI:LKNYQ:NMVVE:SXGXH, TVPKPXX:VPTQL:SAIS:DDSSNVI:LKNYQ:NMVVE:AXGXH, AVPKAXX:VPTKL:SAIS:DSSNNVI:LKNYQ:NMVVE:AXGXH, KVGKAXX:VPTKL:SAIS:DDMGVPT:LKNYQ:EGMSVVE:XGXR, KASKAXX:VPTKL:SAIS:DKGVVTY:LKNYQ:GMVVE:EXGXR, GSAGPXX:VPTKM:SAIS:NDKQQII:LKNYQ:GMVVE:RXGXS, AAPASXX:VPTRL:SAIS:DAANNVV:LKNYQ:DMVVE:AXGXR, STPPTXX:VPTRL:SAIS:DSANNVV:LKNYQ:DMVVE:SXGXR, HVPKPXX:VPTKL:SAIS:DDSSNVI:LKNYQ:NMVVE:SXGXH, RVPSTXX:VPTKT:SAIS:DNGRVLL:LKNYQ:MIVVE:XGXL, ASAAPXX:VPTAL:SAIS:VGRKPKV:LKNYQ:MIVVE:XKXS, ASASPXX:VPTDL:SAIS:IGKTPKI:LKNYQ:MIVVE:XKXS, ASASPXX:VPTDL:SAIS:VGRTPKV:LKNYQ:MVVVE:XKXS, GIPEPXX:VPEKM:SAIS:DENKNVV:LKNYQ:NMTVE:SXAXR, HVTKPTX:APTKL:SAIS:DDSSNVI:LKNYQ:NMVVR:SXGXH, YVPKPXX:APTKL:SAIS:DDSSNVI:LKNYQ:NMVVR:SXGXH, TVPKPXX:APTQL:SAIS:DDSSNVI:LKNYQ:NMVVR:AXGXH, AVPKAXX:APTKL:SAIS:DSSNNVI:LKNYQ:NMVVK:AXGXH, KVGKAXX:VPTKL:SAIS:DDMGVPT:LKNYQ:EGMSVAE:XGXR, KASKAXX:VPTKL:SAIS:DKGVVTY:LKNYQ:GMAVS:EXGXR, GSAGPXX:TPTKM:SAIS:NDKQQII:LKNYQ:GMVVD:RXGXS, AAPASXX:VPARL:SAIS:DAANNVV:LKNYQ:DMVVE:AXGXR, HVPKPXX:APTKL:SAIS:DDSSNVI:LKNYQ:NMVVR:SXGXH, RVPSTXX:APVKT:SAIS:DNGRVLL:LKNYQ:MIVEE:XGXL, ASAAPXX:VPQAL:SAIS:VGRKPKV:LKNYQ:MIVRS:XKXS, ASASPXX:VSQDL:SAIS:IGKTPKI:LKNYQ:MIVKS:XKXS, ASASPXX:VPQDL:SAIS:VGRTPKV:LKNYQ:MVVKS:XKXS, NDEGLEX:VPTEE:SAIS:RIKPHQGQH:LKNYQ:FLQHN:KXEXR, NDEGLEX:VPTGQ:SAIS:RIKPHQGQH:LKNYQ:LEEHS:QXEXR, SSVKXQP:SRVHH:SAIS:EYVRKKPKL:LKNYQ:RLEEH:LEXAXA, RNVQXRP:TQVQL:SAIS:EIVRKKPIF:LKNYQ:TLEDH:LAXKXE, KIPKAXX:VPEEL:SSLS:DENEKVV:LKV YP:DMTVE:GXGXR, SIPKAXX:VPEEL:SSLS:DEYDKVV:LKVYP:EMTVE:GXGXR, HVTKPTX:VPEKL:SSLS:DDSSNVI:LKVYP:NMTVE:SXGXH, YVPKPXX:VPEKL:SSLS:DDSSNVI:LKVYP:NMTVE:SXGXH, TVPKPXX:VPEQL:SSLS:DDSSNVI:LKVYP:NMTVE:AXGXH, AVPKAXX:VPEKL:SSLS:DSSNNVI:LKVYP:NMTVE:AXGXH, KVGKAXX:VPEKL:SSLS:DDMGVPT:LKVYP:EGMSTVE:XGXR, KASKAXX:VPEKL:SSLS:DKGVVTY:LKVYP:GMTVE:EXGXR, GSAGPXX:VPEKM:SSLS:NDKQQII:LKVYP:GMTVE:RXGXS, AAPASXX:VPERL:SSLS:DAANNVV:LKVYP:DMTVE:AXGXR, STPPTXX:VPERL:SSLS:DSANNVV:LKVYP:DMTVE:SXGXR, HVPKPXX:VPEKL:SSLS:DDSSNVI:LKVYP:NMTVE:SXGXH, RVPSTXX:VPEKT:SSLS:DNGRVLL:LKVYP:MITVE:XGXL, ASAAPXX:VPEAL:SSLS:VGRKPKV:LKVYP:MITVE:XKXS, ASASPXX:VPEDL:SSLS:IGKTPKI:LKVYP:MITVE:XKXS, ASASPXX:VPEDL:SSLS:VGRTPKV:LKVYP:MVTVE:XKXS, KIPKAXX:VPTEL:SSLS:DENEKVV:LKVYP:DMVVE:GXGXR, SIPKAXX:VPTEL:SSLS:DEYDKVV:LKVYP:EMVVE:GXGXR, HVTKPTX:APTKL:SSLS:DDSSNVI:LKVYP:NMVVR:SXGXH, YVPKPXX:APTKL:SSLS:DDSSNVI:LKVYP:NMVVR:SXGXH, TVPKPXX:APTQL:SSLS:DDSSNVI:LKVYP:NMVVR:AXGXH, AVPKAXX:APTKL:SSLS:DSSNNVI:LKVYP:NMVVK:AXGXH, KVGKAXX:VPTKL:SSLS:DDMGVPT:LKVYP:EGMSVAE:XGXR, KASKAXX:VPTKL:SSLS:DKGVVTY:LKVYP:GMAVS:EXGXR, GSAGPXX:TPTKM:SSLS:NDKQQII:LKVYP:GMVVD:RXGXS, AAPASXX:VPARL:SSLS:DAANNVV:LKVYP:DMVVE:AXGXR, STPPTXX:VPTRL:SSLS:DSANNVV:LKVYP:DMVVE:SXGXR, HVPKPXX:APTKL:SSLS:DDSSNVI:LKVYP:NMVVR:SXGXH, RVPSTXX:APVKT:SSLS:DNGRVLL:LKVYP:MIVEE:XGXL, ASAAPXX:VPQAL:SSLS:VGRKPKV:LKVYP:MIVRS:XKXS, ASASPXX:VSQDL:SSLS:IGKTPKI:LKVYP:MIVKS:XKXS, ASASPXX:VPQDL:SSLS:VGRTPKV:LKVYP:MVVKS:XKXS, NDEGLEX:VPTEE:SSLS:RIKPHQGQH:LKVYP:FLQHN:KXEXR, NDEGLEX:VPTGQ:SSLS:RIKPHQGQH:LKVYP:LEEHS:QXEXR, SSVKXQP:SRVHH:SSLS:EYVRKKPKL:LKVYP:RLEEH:LEXAXA, RNVQXRP:TQVQL:SSLS:EIVRKKPIF:LKVYP:TLEDH:LAXKXE, KIPKAXX:APTEL:NAIS:DENEKVV:LKKYR:DMVVR:GXGXR, GIPEPXX:APTKM:NAIS:DENKNVV:LKKYR:NMVVR:SXAXR, SIPKAXX:APTEL:NAIS:DEYDKVV:LKKYR:EMVVR:GXGXR, AVPKAXX:APTKL:NAIS:DSSNNVI:LKKYR:NMVVR:AXGXH, KVGKAXX:APTKL:NAIS:DDMGVPT:LKKYR:EGMSVVR:XGXR, KASKAXX:APTKL:NAIS:DKGVVTY:LKKYR:GMVVR:EXGXR, GSAGPXX:APTKM:NAIS:NDKQQII:LKKYR:GMVVR:RXGXS, AAPASXX:APTRL:NAIS:DAANNVV:LKKYR:DMVVR:AXGXR, STPPTXX:APTRL:NAIS:DSANNVV:LKKYR:DMVVR:SXGXR, RVPSTXX:APTKT:NAIS:DNGRVLL:LKKYR:MIVVR:XGXL, ASAAPXX:APTAL:NAIS:VGRKPKV:LKKYR:MIVVR:XKXS, ASASPXX:APTDL:NAIS:IGKTPKI:LKKYR:MIVVR:XKXS, ASASPXX:APTDL:NAIS:VGRTPKV:LKKYR:MVVVR:XKXS, KIPKAXX:VPTEL:NAIS:DENEKVV:LKKYR:DMVVE:GXGXR, GIPEPXX:VPEKM:NAIS:DENKNVV:LKKYR:NMTVE:SXAXR, SIPKAXX:VPTEL:NAIS:DEYDKVV:LKKYR:EMVVE:GXGXR, AVPKAXX:APTKL:NAIS:DSSNNVI:LKKYR:NMVVK:AXGXH, KVGKAXX:VPTKL:NAIS:DDMGVPT:LKKYR:EGMSVAE:XGXR, KASKAXX:VPTKL:NAIS:DKGVVTY:LKKYR:GMAVS:EXGXR, GSAGPXX:TPTKM:NAIS:NDKQQII:LKKYR:GMVVD:RXGXS, AAPASXX:VPARL:NAIS:DAANNVV:LKKYR:DMVVE:AXGXR, STPPTXX:VPTRL:NAIS:DSANNVV:LKKYR:DMVVE:SXGXR, RVPSTXX:APVKT:NAIS:DNGRVLL:LKKYR:MIVEE:XGXL, ASAAPXX:VPQAL:NAIS:VGRKPKV:LKKYR:MIVRS:XKXS, ASASPXX:VSQDL:NAIS:IGKTPKI:LKKYR:MIVKS:XKXS, ASASPXX:VPQDL:NAIS:VGRTPKV:LKKYR:MVVKS:XKXS, NDEGLEX:VPTEE:NAIS:RIKPHQGQH:LKKYR:FLQHN:KXEXR, NDEGLEX:VPTGQ:NAIS:RIKPHQGQH:LKKYR:LEEHS:QXEXR, SSVKXQP:SRVHH:NAIS:EYVRKKPKL:LKKYR:RLEEH:LEXAXA, RNVQXRP:TQVQL:NAIS:EIVRKKPIF:LKKYR:TLEDH:LAXKXE, KIPKAXX:APTEL:SATS:DENEKVV:LRKHR:DMVVK:GXGXR, GIPEPXX:APTKM:SATS:DENKNVV:LRKHR:NMVVK:SXAXR, SIPKAXX:APTEL:SATS:DEYDKVV:LRKHR:EMVVK:GXGXR, HVTKPTX:APTKL:SATS:DDSSNVI:LRKHR:NMVVK:SXGXH, YVPKPXX:APTKL:SATS:DDSSNVI:LRKHR:NMVVK:SXGXH, TVPKPXX:APTQL:SATS:DDSSNVI:LRKHR:NMVVK:AXGXH, KVGKAXX:APTKL:SATS:DDMGVPT:LRKHR:EGMSVVK:XGXR, KASKAXX:APTKL:SATS:DKGVVTY:LRKHR:GMVVK:EXGXR, GSAGPXX:APTKM:SATS:NDKQQII:LRKH R:GMVVK:RXGXS, AAPASXX:APTRL:SATS:DAANNVV:LRKHR:DMVVK:AXGXR, STPPTXX:APTRL:SATS:DSANNVV:LRKHR:DMVVK:SXGXR, HVPKPXX:APTKL:SATS:DDSSNVI:LRKHR:NMVVK:SXGXH, RVPSTXX:APTKT:SATS:DNGRVLL:LRKHR:MIVVK:XGXL, ASAAPXX:APTAL:SATS:VGRKPKV:LRKHR:MIVVK:XKXS, ASASPXX:APTDL:SATS:IGKTPKI:LRKHR:MIVVK:XKXS, ASASPXX:APTDL:SATS:VGRTPKV:LRKHR:MVVVK:XKXS, KIPKAXX:VPTEL:SATS:DENEKVV:LRKHR:DMVVE:GXGXR, GIPEPXX:VPEKM:SATS:DENKNVV:LRKHR:NMTVE:SXAXR, SIPKAXX:VPTEL:SATS:DEYDKVV:LRKHR:EMVVE:GXGXR, HVTKPTX:APTKL:SATS:DDSSNVI:LRKHR:NMVVR:SXGXH, YVPKPXX:APTKL:SATS:DDSSNVI:LRKHR:NMVVR:SXGXH, TVPKPXX:APTQL:SATS:DDSSNVI:LRKHR:NMVVR:AXGXH, KVGKAXX:VPTKL:SATS:DDMGVPT:LRKHR:EGMSVAE:XGXR, KASKAXX:VPTKL:SATS:DKGVVTY:LRKHR:GMAVS:EXGXR, GSAGPXX:TPTKM:SATS:NDKQQII:LRKHR:GMVVD:RXGXS, AAPASXX:VPARL:SATS:DAANNVV:LRKHR:DMVVE:AXGXR, STPPTXX:VPTRL:SATS:DSANNVV:LRKHR:DMVVE:SXGXR, HVPKPXX:APTKL:SATS:DDSSNVI:LRKHR:NMVVR:SXGXH, RVPSTXX:APVKT:SATS:DNGRVLL:LRKHR:MIVEE:XGXL, ASAAPXX:VPQAL:SATS:VGRKPKV:LRKHR:MIVRS:XKXS, ASASPXX:VSQDL:SATS:IGKTPKI:LRKHR:MIVKS:XKXS, ASASPXX:VPQDL:SATS:VGRTPKV:LRKHR:MVVKS:XKXS, NDEGLEX:VPTEE:SATS:RIKPHQGQH:LRKHR:FLQHN:KXEXR, NDEGLEX:VPTGQ:SATS:RIKPHQGQH:LRKHR:LEEHS:QXEXR, SSVKXQP:SRVHH:SATS:EYVRKKPKL:LRKHR:RLEEH:LEXAXA, RNVQXRP:TQVQL:SATS:EIVRKKPIF:LRKHR:TLEDH:LAXKXE, KIPKAXX:VPTEL:SPIS:DENEKVV:LKYHY:DMVAE:GXGXR, GIPEPXX:VPTKM:SPIS:DENKNVV:LKYHY:NMVAE:SXAXR, SIPKAXX:VPTEL:SPIS:DEYDKVV:LKYHY:EMVAE:GXGXR, HVTKPTX:VPTKL:SPIS:DDSSNVI:LKYHY:NMVAE:SXGXH, YVPKPXX:VPTKL:SPIS:DDSSNVI:LKYHY:NMVAE:SXGXH, TVPKPXX:VPTQL:SPIS:DDSSNVI:LKYHY:NMVAE:AXGXH, AVPKAXX:VPTKL:SPIS:DSSNNVI:LKYHY:NMVAE:AXGXH, KASKAXX:VPTKL:SPIS:DKGVVTY:LKYHY:GMVAE:EXGXR, GSAGPXX:VPTKM:SPIS:NDKQQII:LKYHY:GMVAE:RXGXS, AAPASXX:VPTRL:SPIS:DAANNVV:LKYHY:DMVAE:AXGXR, STPPTXX:VPTRL:SPIS:DSANNVV:LKYHY:DMVAE:SXGXR, HVPKPXX:VPTKL:SPIS:DDSSNVI:LKYHY:NMVAE:SXGXH, RVPSTXX:VPTKT:SPIS:DNGRVLL:LKYHY:MIVAE:XGXL, ASAAPXX:VPTAL:SPIS:VGRKPKV:LKYHY:MIVAE:XKXS, ASASPXX:VPTDL:SPIS:IGKTPKI:LKYHY:MIVAE:XKXS, ASASPXX:VPTDL:SPIS:VGRTPKV:LKYHY:MVVAE:XKXS, KIPKAXX:VPTEL:SPIS:DENEKVV:LKYHY:DMVVE:GXGXR, GIPEPXX:VPEKM:SPIS:DENKNVV:LKYHY:NMTVE:SXAXR, SIPKAXX:VPTEL:SPIS:DEYDKVV:LKYHY:EMVVE:GXGXR, HVTKPTX:APTKL:SPIS:DDSSNVI:LKYHY:NMVVR:SXGXH, YVPKPXX:APTKL:SPIS:DDSSNVI:LKYHY:NMVVR:SXGXH, TVPKPXX:APTQL:SPIS:DDSSNVI:LKYHY:NMVVR:AXGXH, AVPKAXX:APTKL:SPIS:DSSNNVI:LKYHY:NMVVK:AXGXH, KASKAXX:VPTKL:SPIS:DKGVVTY:LKYHY:GMAVS:EXGXR, GSAGPXX:TPTKM:SPIS:NDKQQII:LKYHY:GMVVD:RXGXS, AAPASXX:VPARL:SPIS:DAANNVV:LKYHY:DMVVE:AXGXR, STPPTXX:VPTRL:SPIS:DSANNVV:LKYHY:DMVVE:SXGXR, HVPKPXX:APTKL:SPIS:DDSSNVI:LKYHY:NMVVR:SXGXH, RVPSTXX:APVKT:SPIS:DNGRVLL:LKYHY:MIVEE:XGXL, ASAAPXX:VPQAL:SPIS:VGRKPKV:LKYHY:MIVRS:XKXS, ASASPXX:VSQDL:SPIS:IGKTPKI:LKYHY:MIVKS:XKXS, ASASPXX:VPQDL:SPIS:VGRTPKV:LKYHY:MVVKS:XKXS, NDEGLEX:VPTEE:SPIS:RIKPHQGQH:LKYHY:FLQHN:KXEXR, NDEGLEX:VPTGQ:SPIS:RIKPHQGQH:LKYHY:LEEHS:QXEXR, SSVKXQP:SRVHH:SPIS:EYVRKKPKL:LKYHY:RLEEH:LEXAXA, RNVQXRP:TQVQL:SPIS:EIVRKKPIF:LKYHY:TLEDH:LAXKXE, KIPKAXX:VPTEL:EPIS:DENEKVV:KFKYE:DMAVS:GXGXR, GIPEPXX:VPTKM:EPIS:DENKNVV:KFKYE:NMAVS:SXAXR, SIPKAXX:VPTEL:EPIS:DEYDKVV:KFKYE:EMAVS:GXGXR, HVTKPTX:VPTKL:EPIS:DDSSNVI:KFKYE:NMAVS:SXGXH, YVPKPXX:VPTKL:EPIS:DDSSNVI:KFKYE:NMAVS:SXGXH, TVPKPXX:VPTQL:EPIS:DDSSNVI:KFKYE:NMAVS:AXGXH, AVPKAXX:VPTKL:EPIS:DSSNNVI:KFKYE:NMAVS:AXGXH, KVGKAXX:VPTKL:EPIS:DDMGVPT:KFKYE:EGMSAVS:XGXR, GSAGPXX:VPTKM:EPIS:NDKQQII:KFKYE:GMAVS:RXGXS, AAPASXX:VPTRL:EPIS:DAANNVV:KFKYE:DMAVS:AXGXR, STPPTXX:VPTRL:EPIS:DSANNVV:KFKYE:DMAVS:SXGXR, HVPKPXX:VPTKL:EPIS:DDSSNVI:KFKYE:NMAVS:SXGXH, RVPSTXX:VPTKT:EPIS:DNGRVLL:KFKYE:MIAVS:XGXL, ASAAPXX:VPTAL:EPIS:VGRKPKV:KFKYE:MIAVS:XKXS, ASASPXX:VPTDL:EPIS:IGKTPKI:KFKYE:MIAVS:XKXS, ASASPXX:VPTDL:EPIS:VGRTPKV:KFKYE:MVAVS:XKXS, KIPKAXX:VPTEL:EPIS:DENEKVV:KFKYE:DMVVE:GXGXR, GIPEPXX:VPEKM:EPIS:DENKNVV:KFKYE:NMTVE:SXAXR, SIPKAXX:VPTEL:EPIS:DEYDKVV:KFKYE:EMVVE:GXGXR, HVTKPTX:APTKL:EPIS:DDSSNVI:KFKYE:NMVVR:SXGXH, YVPKPXX:APTKL:EPIS:DDSSNVI:KFKYE:NMVVR:SXGXH, TVPKPXX:APTQL:EPIS:DDSSNVI:KFKYE:NMVVR:AXGXH, AVPKAXX:APTKL:EPIS:DSSNNVI:KFKYE:NMVVK:AXGXH, KVGKAXX:VPTKL:EPIS:DDMGVPT:KFKYE:EGMSVAE:XGXR, GSAGPXX:TPTKM:EPIS:NDKQQII:KFKYE:GMVVD:RXGXS, AAPASXX:VPARL:EPIS:DAANNVV:KFKYE:DMVVE:AXGXR, STPPTXX:VPTRL:EPIS:DSANNVV:KFKYE:DMVVE:SXGXR, HVPKPXX:APTKL:EPIS:DDSSNVI:KFKYE:NMVVR:SXGXH, RVPSTXX:APVKT:EPIS:DNGRVLL:KFKYE:MIVEE:XGXL, ASAAPXX:VPQAL:EPIS:VGRKPKV:KFKYE:MIVRS:XKXS, ASASPXX:VSQDL:EPIS:IGKTPKI:KFKYE:MIVKS:XKXS, ASASPXX:VPQDL:EPIS:VGRTPKV:KFKYE:MVVKS:XKXS, NDEGLEX:VPTEE:EPIS:RIKPHQGQH:KFKYE:FLQHN:KXEXR, NDEGLEX:VPTGQ:EPIS:RIKPHQGQH:KFKYE:LEEHS:QXEXR, SSVKXQP:SRVHH:EPIS:EYVRKKPKL:KFKYE:RLEEH:LEXAXA, RNVQXRP:TQVQL:EPIS:EIVRKKPIF:KFKYE:TLEDH:LAXKXE, KIPKAXX:TPTEL:SPIN:DENEKVV:YGKIP:DMVVD:GXGXR, GIPEPXX:TPTKM:SPIN:DENKNVV:YGKIP:NMVVD:SXAXR, SIPKAXX:TPTEL:SPIN:DEYDKVV:YGKIP:EMVVD:GXGXR, HVTKPTX:TPTKL:SPIN:DDSSNVI:YGKIP:NMVVD:SXGXH, YVPKPXX:TPTKL:SPIN:DDSSNVI:YGKIP:NMVVD:SXGXH, TVPKPXX:TPTQL:SPIN:DDSSNVI:YGKIP:NMVVD:AXGXH, AVPKAXX:TPTKL:SPIN:DSSNNVI:YGKIP:NMVVD:AXGXH, KVGKAXX:TPTKL:SPIN:DDMGVPT:YGKIP:EGMSVVD:XGXR, KASKAXX:TPTKL:SPIN:DKGVVTY:YGKIP:GMVVD:EXGXR, AAPASXX:TPTRL:SPIN:DAANNVV:YGKIP:DMVVD:AXGXR, STPPTXX:TPTRL:SPIN:DSANNVV:YGKIP:DMVVD:SXGXR, HVPKPXX:TPTKL:SPIN:DDSSNVI:YGKIP:NMVVD:SXGXH, RVPSTXX:TPTKT:SPIN:DNGRVLL:YGKIP:MIVVD:XGXL, ASAAPXX:TPTAL:SPIN:VGRKPKV:YGKIP:MIVVD:XKXS, ASASPXX:TPTDL:SPIN:IGKTPKI:YGKIP:MIVVD:XKXS, ASASPXX:TPTDL:SPIN:VGRTPKV:YGKIP:MVVVD:XKXS, KIPKAXX:VPTEL:SPIN:DENEKVV:YGKIP:DMVVE:GXGXR, GIPEPXX:VPEKM:SPIN:DENKNVV:YGKIP:NMTVE:SXAXR, SIPKAXX:VPTEL:SPIN:DEYDKVV:YGKIP:EMVVE:GXGXR, HVTKPTX:APTKL:SPIN:DDSSNVI:YGKIP:NMVVR:SXGXH, YVPKPXX:APTKL:SPIN:DDSSNVI:YGKIP:NMVVR:SXGXH, TVPKPXX:APTQL:SPIN:DDSSNVI:YGKIP:NMVVR:AXGXH, AVPKAXX:APTKL:SPIN:DSSNNVI:YGKIP:NMVVK:AXGXH, KVGKAXX:VPTKL:SPIN:DDMGVPT:YGKIP:EGMSVAE:XGXR, KASKAXX:VPTKL:SPIN:DKGVVTY:YGKIP:GMAVS:EXGXR, AAPASXX:VPARL:SPIN:DAANNVV:YGKIP:DMVVE:AXGXR, STPPTXX:VPTRL:SPIN:DSANNVV:YGKIP:DMVVE:SXGXR, HVPKPXX:APTKL:SPIN:DDSSNVI:YGKIP:NMVVR:SXGXH, RVPSTXX:APVKT:SPIN:DNGRVLL:YGKIP:MIVEE:XGXL, ASAAPXX:VPQAL:SPIN:VGRKPKV:YGKIP:MIVRS:XKXS, ASASPXX:VSQDL:SPIN:IGKTPKI:YGKIP:MIVKS:XKXS, ASASPXX:VPQDL:SPIN:VGRTPKV:YGKIP:MVVKS:XKXS, NDEGLEX:VPTEE:SPIN:RIKPHQGQH:YGKIP:FLQHN:KXEXR, NDEGLEX:VPTGQ:SPIN:RIKPHQGQH:YGKIP:LEEHS:QXEXR, SSVKXQP:SRVHH:SPIN:EYVRKKPKL:YGKIP:RLEEH:LEXAXA, RNVQXRP:TQVQL:SPIN:EIVRKKPIF:YGKIP:TLEDH:LAXKXE, KIPKAXX:VPAEL:SPIS:DENEKVV:YKQYE:DMVVE:GXGXR, GIPEPXX:VPAKM:SPIS:DENKNVV:YKQYE:NMVVE:SXAXR, SIPKAXX:VPAEL:SPIS:DEYDKVV:YKQYE:EMVVE:GXGXR, HVTKPTX:VPAKL:SPIS:DDSSNVI:YKQYE:NMVVE:SXGXH, YVPKPXX:VPAKL:SPIS:DDSSNVI:YKQYE:NMVVE:SXGXH, TVPKPXX:VPAQL:SPIS:DDSSNVI:YKQYE:NMVVE:AXGXH, AVPKAXX:VPAKL:SPIS:DSSNNVI:YKQYE:NMVVE:AXGXH, KVGKAXX:VPAKL:SPIS:DDMGVPT:YKQYE:EGMSVVE:XGXR, KASKAXX:VPAKL:SPIS:DKGVVTY:YKQYE:GMVVE:EXGXR, GSAGPXX:VPAKM:SPIS:NDKQQII:YKQYE:GMVVE:RXGXS, STPPTXX:VPARL:SPIS:DSANNVV:YKQYE:DMVVE:SXGXR, HVPKPXX:VPAKL:SPIS:DDSSNVI:YKQYE:NMVVE:SXGXH, RVPSTXX:VPAKT:SPIS:DNGRVLL:YKQYE:MIVVE:XGXL, ASAAPXX:VPAAL:SPIS:VGRKPKV:YKQYE:MIVVE:XKXS, ASASPXX:VPADL:SPIS:IGKTPKI:YKQYE:MIVVE:XKXS, ASASPXX:VPADL:SPIS:VGRTPKV:YKQYE:MVVVE:XKXS, KIPKAXX:VPTEL:SPIS:DENEKVV:YKQYE:DMVVE:GXGXR, GIPEPXX:VPEKM:SPIS:DENKNVV:YKQYE:NMTVE:SXAXR, SIPKAXX:VPTEL:SPIS:DEYDKVV:YKQYE:EMVVE:GXGXR, HVTKPTX:APTKL:SPIS:DDSSNVI:YKQYE:NMVVR:SXGXH, YVPKPXX:APTKL:SPIS:DDSSNVI:YKQYE:NMVVR:SXGXH, TVPKPXX:APTQL:SPIS:DDSSNVI:YKQYE:NMVVR:AXGXH, AVPKAXX:APTKL:SPIS:DSSNNVI:YKQYE:NMVVK:AXGXH, KVGKAXX:VPTKL:SPIS:DDMGVPT:YKQYE:EGMSVAE:XGXR, KASKAXX:VPTKL:SPIS:DKGVVTY:YKQYE:GMAVS:EXGXR, GSAGPXX:TPTKM:SPIS:NDKQQII:YKQYE:GMVVD:RXGXS, STPPTXX:VPTRL:SPIS:DSANNVV:YKQYE:DMVVE:SXGXR, HVPKPXX:APTKL:SPIS:DDSSNVI:YKQYE:NMVVR:SXGXH, RVPSTXX:APVKT:SPIS:DNGRVLL:YKQYE:MIVEE:XGXL, ASAAPXX:VPQAL:SPIS:VGRKPKV:YKQYE:MIVRS:XKXS, ASASPXX:VSQDL:SPIS:IGKTPKI:YKQYE:MIVKS:XKXS, ASASPXX:VPQDL:SPIS:VGRTPKV:YKQYE:MVVKS:XKXS, NDEGLEX:VPTEE:SPIS:RIKPHQGQH:YKQYE:FLQHN:KXEXR, NDEGLEX:VPTGQ:SPIS:RIKPHQGQH:YKQYE:LEEHS:QXEXR, SSVKXQP:SRVHH:SPIS:EYVRKKPKL:YKQYE:RLEEH:LEXAXA, RNVQXRP:TQVQL:SPIS:EIVRKKPIF:YKQYE:TLEDH:LAXKXE, GIPEPXX:VPTKM:SPIS:DENKNVV:YKQYE:NMVVE:SXAXR, HVTKPTX:VPTKL:SPIS:DDSSNVI:YKQYE:NMVVE:SXGXH, YVPKPXX:VPTKL:SPIS:DDSSNVI:YKQYE:NMVVE:SXGXH, TVPKPXX:VPTQL:SPIS:DDSSNVI:YKQYE:NMVVE:AXGXH, AVPKAXX:VPTKL:SPIS:DSSNNVI:YKQYE:NMVVE:AXGXH, KVGKAXX:VPTKL:SPIS:DDMGVPT:YKQYE:EGMSVVE:XGXR, KASKAXX:VPTKL:SPIS:DKGVVTY:YKQYE:GMVVE:EXGXR, GSAGPXX:VPTKM:SPIS:NDKQQII:YKQYE:GMVVE:RXGXS, AAPASXX:VPTRL:SPIS:DAANNVV:YKQYE:DMVVE:AXGXR, HVPKPXX:VPTKL:SPIS:DDSSNVI:YKQYE:NMVVE:SXGXH, RVPSTXX:VPTKT:SPIS:DNGRVLL:YKQYE:MIVVE:XGXL, ASAAPXX:VPTAL:SPIS:VGRKPKV:YKQYE:MIVVE:XKXS, ASASPXX:VPTDL:SPIS:IGKTPKI:YKQYE:MIVVE:XKXS, ASASPXX:VPTDL:SPIS:VGRTPKV:YKQYE:MVVVE:XKXS, AAPASXX:VPARL:SPIS:DAANNVV:YKQYE:DMVVE:AXGXR, KIPKAXX:APVEL:KPLS:DENEKVV:DHHKD:DMVEE:GXGXR, GIPEPXX:APVKM:KPLS:DENKNVV:DHHKD:NMVEE:SXAXR, SIPKAXX:APVEL:KPLS:DEYDKVV:DHHKD:EMVEE:GXGXR, HVTKPTX:APVKL:KPLS:DDSSNVI:DHHKD:NMVEE:SXGXH, YVPKPXX:APVKL:KPLS:DDSSNVI:DHHKD:NMVEE:SXGXH, TVPKPXX:APVQL:KPLS:DDSSNVI:DHHKD:NMVEE:AXGXH, AVPKAXX:APVKL:KPLS:DSSNNVI:DHHKD:NMVEE:AXGXH, KVGKAXX:APVKL:KPLS:DDMGVPT:DHHKD:EGMSVEE:XGXR, KASKAXX:APVKL:KPLS:DKGVVTY:DHHKD:GMVEE:EXGXR, GSAGPXX:APVKM:KPLS:NDKQQII:DHHKD:GMVEE:RXGXS, AAPASXX:APVRL:KPLS:DAANNVV:DHHKD:DMVEE:AXGXR, STPPTXX:APVRL:KPLS:DSANNVV:DHHKD:DMVEE:SXGXR, HVPKPXX:APVKL:KPLS:DDSSNVI:DHHKD:NMVEE:SXGXH, ASAAPXX:APVAL:KPLS:VGRKPKV:DHHKD:MIVEE:XKXS, ASASPXX:APVDL:KPLS:IGKTPKI:DHHKD:MIVEE:XKXS, ASASPXX:APVDL:KPLS:VGRTPKV:DHHKD:MVVEE:XKXS, KIPKAXX:VPTEL:KPLS:DENEKVV:DHHKD:DMVVE:GXGXR, GIPEPXX:VPEKM:KPLS:DENKNVV:DHHKD:NMTVE:SXAXR, SIPKAXX:VPTEL:KPLS:DEYDKVV:DHHKD:EMVVE:GXGXR, HVTKPTX:APTKL:KPLS:DDSSNVI:DHHKD:NMVVR:SXGXH, YVPKPXX:APTKL:KPLS:DDSSNVI:DHHKD:NMVVR:SXGXH, TVPKPXX:APTQL:KPLS:DDSSNVI:DHHKD:NMVVR:AXGXH, AVPKAXX:APTKL:KPLS:DSSNNVI:DHHKD:NMVVK:AXGXH, KVGKAXX:VPTKL:KPLS:DDMGVPT:DHHKD:EGMSVAE:XGXR, KASKAXX:VPTKL:KPLS:DKGVVTY:DHHKD:GMAVS:EXGXR, GSAGPXX:TPTKM:KPLS:NDKQQII:DHHKD:GMVVD:RXGXS, AAPASXX:VPARL:KPLS:DAANNVV:DHHKD:DMVVE:AXGXR, STPPTXX:VPTRL:KPLS:DSANNVV:DHHKD:DMVVE:SXGXR, HVPKPXX:APTKL:KPLS:DDSSNVI:DHHKD:NMVVR:SXGXH, ASAAPXX:VPQAL:KPLS:VGRKPKV:DHHKD:MIVRS:XKXS, ASASPXX:VSQDL:KPLS:IGKTPKI:DHHKD:MIVKS:XKXS, ASASPXX:VPQDL:KPLS:VGRTPKV:DHHKD:MVVKS:XKXS, NDEGLEX:VPTEE:KPLS:RIKPHQGQH:DHHKD:FLQHN:KXEXR, NDEGLEX:VPTGQ:KPLS:RIKPHQGQH:DHHKD:LEEHS:QXEXR, SSVKXQP:SRVHH:KPLS:EYVRKKPKL:DHHKD:RLEEH:LEXAXA, RNVQXRP:TQVQL:KPLS:EIVRKKPIF:DHHKD:TLEDH:LAXKXE, KIPKAXX:VPQEL:EPLP:DENEKVV:EQLSN:DMVRS:GXGXR, GIPEPXX:VPQKM:EPLP:DENKNVV:EQLSN:NMVRS:SXAXR, SIPKAXX:VPQEL:EPLP:DEYDKVV:EQLSN:EMVRS:GXGXR, HVTKPTX:VPQKL:EPLP:DDSSNVI:EQLSN:NMVRS:SXGXH, YVPKPXX:VPQKL:EPLP:DDSSNVI:EQLSN:NMVRS:SXGXH, TVPKPXX:VPQQL:EPLP:DDSSNVI:EQLSN:NMVRS:AXGXH, AVPKAXX:VPQKL:EPLP:DSSNNVI:EQLSN:NMVRS:AXGXH, KVGKAXX:VPQKL:EPLP:DDMGVPT:EQLSN:EGMSVRS:XGXR, KASKAXX:VPQKL:EPLP:DKGVVTY:EQLSN:GMVRS:EXGXR, GSAGPXX:VPQKM:EPLP:NDKQQII:EQLSN:GMVRS:RXGXS, AAPASXX:VPQRL:EPLP:DAANNVV:EQLSN:DMVRS:AXGXR, STPPTXX:VPQRL:EPLP:DSANNVV:EQLSN:DMVRS:SXGXR, HVPKPXX:VPQKL:EPLP:DDSSNVI:EQLSN:NMVRS:SXGXH, RVPSTXX:VPQKT:EPLP:DNGRVLL:EQLSN:MIVRS:XGXL, ASASPXX:VPQDL:EPLP:IGKTPKI:EQLSN:MIVRS:XKXS, ASASPXX:VPQDL:EPLP:VGRTPKV:EQLSN:MVVRS:XKXS, KIPKAXX:VPTEL:EPLP:DENEKVV:EQLSN:DMVVE:GXGXR, GIPEPXX:VPEKM:EPLP:DENKNVV:EQLSN:NMTVE:SXAXR, SIPKAXX:VPTEL:EPLP:DEYDKVV:EQLSN:EMVVE:GXGXR, HVTKPTX:APTKL:EPLP:DDSSNVI:EQLSN:NMVVR:SXGXH, YVPKPXX:APTKL:EPLP:DDSSNVI:EQLSN:NMVVR:SXGXH, TVPKPXX:APTQL:EPLP:DDSSNVI:EQLSN:NMVVR:AXGXH, AVPKAXX:APTKL:EPLP:DSSNNVI:EQLSN:NMVVK:AXGXH, KVGKAXX:VPTKL:EPLP:DDMGVPT:EQLSN:EGMSVAE:XGXR, KASKAXX:VPTKL:EPLP:DKGVVTY:EQLSN:GMAVS:EXGXR, GSAGPXX:TPTKM:EPLP:NDKQQII:EQLSN:GMVVD:RXGXS, AAPASXX:VPARL:EPLP:DAANNVV:EQLSN:DMVVE:AXGXR, STPPTXX:VPTRL:EPLP:DSANNVV:EQLSN:DMVVE:SXGXR, HVPKPXX:APTKL:EPLP:DDSSNVI:EQLSN:NMVVR:SXGXH, RVPSTXX:APVKT:EPLP:DNGRVLL:EQLSN:MIVEE:XGXL, ASASPXX:VSQDL:EPLP:IGKTPKI:EQLSN:MIVKS:XKXS, ASASPXX:VPQDL:EPLP:VGRTPKV:EQLSN:MVVKS:XKXS, NDEGLEX:VPTEE:EPLP:RIKPHQGQH:EQLSN:FLQHN:KXEXR, NDEGLEX:VPTGQ:EPLP:RIKPHQGQH:EQLSN:LEEHS:QXEXR, SSVKXQP:SRVHH:EPLP:EYVRKKPKL:EQLSN:RLEEH:LEXAXA, RNVQXRP:TQVQL:EPLP:EIVRKKPIF:EQLSN:TLEDH:LAXKXE, KIPKAXX:VSQEL:EPLT:DENEKVV:EQLSN:DMVKS:GXGXR, GIPEPXX:VSQKM:EPLT:DENKNVV:EQLSN:NMVKS:SXAXR, SIPKAXX:VSQEL:EPLT:DEYDKVV:EQLSN:EMVKS:GXGXR, HVTKPTX:VSQKL:EPLT:DDSSNVI:EQLSN:NMVKS:SXGXH, YVPKPXX:VSQKL:EPLT:DDSSNVI:EQLSN:NMVKS:SXGXH, TVPKPXX:VSQQL:EPLT:DDSSNVI:EQLSN:NMVKS:AXGXH, AVPKAXX:VSQKL:EPLT:DSSNNVI:EQLSN:NMVKS:AXGXH, KVGKAXX:VSQKL:EPLT:DDMGVPT:EQLSN:EGMSVKS:XGXR, KASKAXX:VSQKL:EPLT:DKGVVTY:EQLSN:GMVKS:EXGXR, GSAGPXX:VSQKM:EPLT:NDKQQII:EQLSN:GMVKS:RXGXS, AAPASXX:VSQRL:EPLT:DAANNVV:EQLSN:DMVKS:AXGXR, STPPTXX:VSQRL:EPLT:DSANNVV:EQLSN:DMVKS:SXGXR, HVPKPXX:VSQKL:EPLT:DDSSNVI:EQLSN:NMVKS:SXGXH, RVPSTXX:VSQKT:EPLT:DNGRVLL:EQLSN:MIVKS:XGXL, ASAAPXX:VSQAL:EPLT:VGRKPKV:EQLSN:MIVKS:XKXS, ASASPXX:VSQDL:EPLT:VGRTPKV:EQLSN:MVVKS:XKXS, KIPKAXX:VPTEL:EPLT:DENEKVV:EQLSN:DMVVE:GXGXR, GIPEPXX:VPEKM:EPLT:DENKNVV:EQLSN:NMTVE:SXAXR, SIPKAXX:VPTEL:EPLT:DEYDKVV:EQLSN:EMVVE:GXGXR, HVTKPTX:APTKL:EPLT:DDSSNVI:EQLSN:NMVVR:SXGXH, YVPKPXX:APTKL:EPLT:DDSSNVI:EQLSN:NMVVR:SXGXH, TVPKPXX:APTQL:EPLT:DDSSNVI:EQLSN:NMVVR:AXGXH, AVPKAXX:APTKL:EPLT:DSSNNVI:EQLSN:NMVVK:AXGXH, KVGKAXX:VPTKL:EPLT:DDMGVPT:EQLSN:EGMSVAE:XGXR, KASKAXX:VPTKL:EPLT:DKGVVTY:EQLSN:GMAVS:EXGXR, GSAGPXX:TPTKM:EPLT:NDKQQII:EQLSN:GMVVD:RXGXS, AAPASXX:VPARL:EPLT:DAANNVV:EQLSN:DMVVE:AXGXR, STPPTXX:VPTRL:EPLT:DSANNVV:EQLSN:DMVVE:SXGXR, HVPKPXX:APTKL:EPLT:DDSSNVI:EQLSN:NMVVR:SXGXH, RVPSTXX:APVKT:EPLT:DNGRVLL:EQLSN:MIVEE:XGXL, ASAAPXX:VPQAL:EPLT:VGRKPKV:EQLSN:MIVRS:XKXS, NDEGLEX:VPTEE:EPLT:RIKPHQGQH:EQLSN:FLQHN:KXEXR, NDEGLEX:VPTGQ:EPLT:RIKPHQGQH:EQLSN:LEEHS:QXEXR, SSVKXQP:SRVHH:EPLT:EYVRKKPKL:EQLSN:RLEEH:LEXAXA, RNVQXRP:TQVQL:EPLT:EIVRKKPIF:EQLSN:TLEDH:LAXKXE, KIPKAXX:VPQEL:EPLT:DENEKVV:EQLSN:DMVKS:GXGXR, GIPEPXX:VPQKM:EPLT:DENKNVV:EQLSN:NMVKS:SXAXR, SIPKAXX:VPQEL:EPLT:DEYDKVV:EQLSN:EMVKS:GXGXR, HVTKPTX:VPQKL:EPLT:DDSSNVI:EQLSN:NMVKS:SXGXH, YVPKPXX:VPQKL:EPLT:DDSSNVI:EQLSN:NMVKS:SXGXH, TVPKPXX:VPQQL:EPLT:DDSSNVI:EQLSN:NMVKS:AXGXH, AVPKAXX:VPQKL:EPLT:DSSNNVI:EQLSN:NMVKS:AXGXH, KVGKAXX:VPQKL:EPLT:DDMGVPT:EQLSN:EGMSVKS:XGXR, KASKAXX:VPQKL:EPLT:DKGVVTY:EQLSN:GMVKS:EXGXR, GSAGPXX:VPQKM:EPLT:NDKQQII:EQLSN:GMVKS:RXGXS, AAPASXX:VPQRL:EPLT:DAANNVV:EQLSN:DMVKS:AXGXR, STPPTXX:VPQRL:EPLT:DSANNVV:EQLSN:DMVKS:SXGXR, HVPKPXX:VPQKL:EPLT:DDSSNVI:EQLSN:NMVKS:SXGXH, RVPSTXX:VPQKT:EPLT:DNGRVLL:EQLSN:MIVKS:XGXL, ASAAPXX:VPQAL:EPLT:VGRKPKV:EQLSN:MIVKS:XKXS, ASASPXX:VPQDL:EPLT:IGKTPKI:EQLSN:MIVKS:XKXS, NDEGLEX:VPTGQ:SNIT:RIKPHQGQH:IGEMS:LEQHN:QXEXR, KIPKAXX:VPTEL:SNIT:DENEKVV:IGEMS:DMVVE:GXGXR, GIPEPXX:VPEKM:SNIT:DENKNVV:IGEMS:NMTVE:SXAXR, SIPKAXX:VPTEL:SNIT:DEYDKVV:IGEMS:EMVVE:GXGXR, HVTKPTX:APTKL:SNIT:DDSSNVI:IGEMS:NMVVR:SXGXH, YVPKPXX:APTKL:SNIT:DDSSNVI:IGEMS:NMVVR:SXGXH, TVPKPXX:APTQL:SNIT:DDSSNVI:IGEMS:NMVVR:AXGXH, AVPKAXX:APTKL:SNIT:DSSNNVI:IGEMS:NMVVK:AXGXH, KVGKAXX:VPTKL:SNIT:DDMGVPT:IGEMS:EGMSVAE:XGXR, KASKAXX:VPTKL:SNIT:DKGVVTY:IGEMS:GMAVS:EXGXR, GSAGPXX:TPTKM:SNIT:NDKQQII:IGEMS:GMVVD:RXGXS, AAPASXX:VPARL:SNIT:DAANNVV:IGEMS:DMVVE:AXGXR, STPPTXX:VPTRL:SNIT:DSANNVV:IGEMS:DMVVE:SXGXR, HVPKPXX:APTKL:SNIT:DDSSNVI:IGEMS:NMVVR:SXGXH, RVPSTXX:APVKT:SNIT:DNGRVLL:IGEMS:MIVEE:XGXL, ASAAPXX:VPQAL:SNIT:VGRKPKV:IGEMS:MIVRS:XKXS, ASASPXX:VSQDL:SNIT:IGKTPKI:IGEMS:MIVKS:XKXS, ASASPXX:VPQDL:SNIT:VGRTPKV:IGEMS:MVVKS:XKXS, NDEGLEX:VPTGQ:SNIT:RIKPHQGQH:IGEMS:LEEHS:QXEXR, SSVKXQP:SRVHH:SNIT:EYVRKKPKL:IGEMS:RLEEH:LEXAXA, RNVQXRP:TQVQL:SNIT:EIVRKKPIF:IGEMS:TLEDH:LAXKXE, NDEGLEX:VPTEE:SNIT:RIKPHQGQH:LGEMS:FLEHS:KXEXR, KIPKAXX:VPTEL:SNIT:DENEKVV:LGEMS:DMVVE:GXGXR, GIPEPXX:VPEKM:SNIT:DENKNVV:LGEMS:NMTVE:SXAXR, SIPKAXX:VPTEL:SNIT:DEYDKVV:LGEMS:EMVVE:GXGXR, HVTKPTX:APTKL:SNIT:DDSSNVI:LGEMS:NMVVR:SXGXH, YVPKPXX:APTKL:SNIT:DDSSNVI:LGEMS:NMVVR:SXGXH, TVPKPXX:APTQL:SNIT:DDSSNVI:LGEMS:NMVVR:AXGXH, AVPKAXX:APTKL:SNIT:DSSNNVI:LGEMS:NMVVK:AXGXH, KVGKAXX:VPTKL:SNIT:DDMGVPT:LGEMS:EGMSVAE:XGXR, KASKAXX:VPTKL:SNIT:DKGVVTY:LGEMS:GMAVS:EXGXR, GSAGPXX:TPTKM:SNIT:NDKQQII:LGEMS:GMVVD:RXGXS, AAPASXX:VPARL:SNIT:DAANNVV:LGEMS:DMVVE:AXGXR, STPPTXX:VPTRL:SNIT:DSANNVV:LGEMS:DMVVE:SXGXR, HVPKPXX:APTKL:SNIT:DDSSNVI:LGEMS:NMVVR:SXGXH, RVPSTXX:APVKT:SNIT:DNGRVLL:LGEMS:MIVEE:XGXL, ASAAPXX:VPQAL:SNIT:VGRKPKV:LGEMS:MIVRS:XKXS, ASASPXX:VSQDL:SNIT:IGKTPKI:LGEMS:MIVKS:XKXS, ASASPXX:VPQDL:SNIT:VGRTPKV:LGEMS:MVVKS:XKXS, NDEGLEX:VPTEE:SNIT:RIKPHQGQH:LGEMS:FLQHN:KXEXR, SSVKXQP:SRVHH:SNIT:EYVRKKPKL:LGEMS:RLEEH:LEXAXA, RNVQXRP:TQVQL:SNIT:EIVRKKPIF:LGEMS:TLEDH:LAXKXE, RNVQXRP:SRVQL:RSVK:EIVRKKPIF:KEVQV:TLEEH:LAXKXE, KIPKAXX:VPTEL:RSVK:DENEKVV:KEVQV:DMVVE:GXGXR, GIPEPXX:VPEKM:RSVK:DENKNVV:KEVQV:NMTVE:SXAXR, SIPKAXX:VPTEL:RSVK:DEYDKVV:KEVQV:EMVVE:GXGXR, HVTKPTX:APTKL:RSVK:DDSSNVI:KEVQV:NMVVR:SXGXH, YVPKPXX:APTKL:RSVK:DDSSNVI:KEVQV:NMVVR:SXGXH, TVPKPXX:APTQL:RSVK:DDSSNVI:KEVQV:NMVVR:AXGXH, AVPKAXX:APTKL:RSVK:DSSNNVI:KEVQV:NMVVK:AXGXH, KVGKAXX:VPTKL:RSVK:DDMGVPT:KEVQV:EGMSVAE:XGXR, KASKAXX:VPTKL:RSVK:DKGVVTY:KEVQV:GMAVS:EXGXR, GSAGPXX:TPTKM:RSVK:NDKQQII:KEVQV:GMVVD:RXGXS, AAPASXX:VPARL:RSVK:DAANNVV:KEVQV:DMVVE:AXGXR, STPPTXX:VPTRL:RSVK:DSANNVV:KEVQV:DMVVE:SXGXR, HVPKPXX:APTKL:RSVK:DDSSNVI:KEVQV:NMVVR:SXGXH, RVPSTXX:APVKT:RSVK:DNGRVLL:KEVQV:MIVEE:XGXL, ASAAPXX:VPQAL:RSVK:VGRKPKV:KEVQV:MIVRS:XKXS, ASASPXX:VSQDL:RSVK:IGKTPKI:KEVQV:MIVKS:XKXS, ASASPXX:VPQDL:RSVK:VGRTPKV:KEVQV:MVVKS:XKXS, NDEGLEX:VPTEE:RSVK:RIKPHQGQH:KEVQV:FLQHN:KXEXR, NDEGLEX:VPTGQ:RSVK:RIKPHQGQH:KEVQV:LEEHS:QXEXR, RNVQXRP:TQVQL:RSVK:EIVRKKPIF:KEVQV:TLEDH:LAXKXE, SSVKXQP:TQVHH:RPVQ:EYVRKKPKL:KKATV:RLEDH:LEXAXA, KIPKAXX:VPTEL:RPVQ:DENEKVV:KKATV:DMVVE:GXGXR, GIPEPXX:VPEKM:RPVQ:DENKNVV:KKATV:NMTVE:SXAXR, SIPKAXX:VPTEL:RPVQ:DEYDKVV:KKATV:EMVVE:GXGXR, HVTKPTX:APTKL:RPVQ:DDSSNVI:KKATV:NMVVR:SXGXH, YVPKPXX:APTKL:RPVQ:DDSSNVI:KKATV:NMVVR:SXGXH, TVPKPXX:APTQL:RPVQ:DDSSNVI:KKATV:NMVVR:AXGXH, AVPKAXX:APTKL:RPVQ:DSSNNVI:KKATV:NMVVK:AXGXH, KVGKAXX:VPTKL:RPVQ:DDMGVPT:KKATV:EGMSVAE:XGXR, KASKAXX:VPTKL:RPVQ:DKGVVTY:KKATV:GMAVS:EXGXR, GSAGPXX:TPTKM:RPVQ:NDKQQII:KKATV:GMVVD:RXGXS, AAPASXX:VPARL:RPVQ:DAANNVV:KKATV:DMVVE:AXGXR, STPPTXX:VPTRL:RPVQ:DSANNVV:KKATV:DMVVE:SXGXR, HVPKPXX:APTKL:RPVQ:DDSSNVI:KKATV:NMVVR:SXGXH, RVPSTXX:APVKT:RPVQ:DNGRVLL:KKATV:MIVEE:XGXL, ASAAPXX:VPQAL:RPVQ:VGRKPKV:KKATV:MIVRS:XKXS, ASASPXX:VSQDL:RPVQ:IGKTPKI:KKATV:MIVKS:XKXS, ASASPXX:VPQDL:RPVQ:VGRTPKV:KKATV:MVVKS:XKXS, NDEGLEX:VPTEE:RPVQ:RIKPHQGQH:KKATV:FLQHN:KXEXR, NDEGLEX:VPTGQ:RPVQ:RIKPHQGQH:KKATV:LEEHS:QXEXR and SSVKXQP:SRVHH:RPVQ:EYVRKKPKL:KKATV:RLEEH:LEXAXA.

[0374] In particular, in certain embodiments, the heptuplet PEP7:PEP5:PEP12:LINKER:PEP2:PEP6:PEP8 is selected from the group consisting of GIPEPXX:VPTKM:SAIS-AA¹⁷-LYL:DENKNVV:LKNYQ:NMVVE:SXAXR, SIPKAXX:VPTEL:SAIS-AA¹⁷-LYL:DEYDKVV:LKNYQ:EMVVE:GXGXR, HVTKPTX:VPTKL:SAIS-AA¹⁷-LYL:DDSSNVI:LKNYQ:NMVVE:SXGXH, YVPKPXX:VPTKL:SAIS-AA¹⁷-LYL:DDSSNVI:LKNYQ:NMVVE:SXGXH, TVPKPXX:VPTQL:SAIS-AA¹⁷-LYL:DDSSNVI:LKNYQ:NMVVE:AXGXH, AVPKAXX:VPTKL:SAIS-AA¹⁷-LYL:DSSNNVI:LKNYQ:NMVVE:AXGXH, KVGKAXX:VPTKL:SAIS-AA¹⁷-LYL:DDMGVPT:LKNYQ:EGMSVVE:XGXR, KASKAXX:VPTKL:SAIS-AA¹⁷-LYL:DKGVVTY:LKNYQ:GMVVE:EXGXR, GSAGPXX:VPTKM:SAIS-AA¹⁷-LYL:NDKQQII:LKNYQ:GMVVE:RXGXS, AAPASXX:VPTRL:SAIS-AA¹⁷-LYL:DAANNVV:LKNYQ:DMVVE:AXGXR, STPPTXX:VPTRL:SAIS-AA¹⁷-LYL:DSANNVV:LKNYQ:DMVVE:SXGXR, HVPKPXX:VPTKL:SAIS-AA¹⁷-LYL:DDSSNVI:LKNYQ:NMVVE:SXGXH, RVPSTXX:VPTKT:SAIS-AA¹⁷-LYL:DNGRVLL:LKNYQ:MIVVE:XGXL, ASAAPXX:VPTAL:SAIS-AA¹⁷-LYL:VGRKPKV:LKNYQ:MIVVE:XKXS, ASASPXX:VPTDL:SAIS-AA¹⁷-LYL:IGKTPKI:LKNYQ:MIVVE:XKXS, ASASPXX:VPTDL:SAIS-AA¹⁷-LYL:VGRTPKV:LKNYQ:MVVVE:XKXS, NDEGLEX:VPTEE:SAIS-AA¹⁷-LYL:RIKPHQGQH:LKNYQ:FLVVE:KXEXR, NDEGLEX:VPTGQ:SAIS-AA¹⁷-LYL:RIKPHQGQH:LKNYQ:LEVVE:QXEXR, SSVKXQP:VPTHH:SAIS-AA¹⁷-LYL:EYVRKKPKL:LKNYQ:RLVVE:LEXAXA, RNVQXRP:VPTQL:SAIS-AA¹⁷-LYL:EIVRKKPIF:LKNYQ:TLVVE:LAXKXE, GIPEPXX:VPEKM:SAIS-AA¹⁷-LYL:DENKNVV:LKNYQ:NMTVE:SXAXR, HVTKPTX:APTKL:SAIS-AA¹⁷-LYL:DDSSNVI:LKNYQ:NMVVR:SXGXH, YVPKPXX:APTKL:SAIS-AA¹⁷-LYL:DDSSNVI:LKNYQ:NMVVR:SXGXH, TVPKPXX:APTQL:SAIS-AA¹⁷-LYL:DDSSNVI:LKNYQ:NMVVR:AXGXH, AVPKAXX:APTKL:SAIS-AA¹⁷-LYL:DSSNNVI:LKNYQ:NMVVK:AXGXH, KVGKAXX:VPTKL:SAIS-AA¹⁷-LYL:DDMGVPT:LKNYQ:EGMSVAE:XGXR, KASKAXX:VPTKL:SAIS-AA¹⁷-LYL:DKGVVTY:LKNYQ:GMAVS:EXGXR, GSAGPXX:TPTKM:SAIS-AA¹⁷-LYL:NDKQQII:LKNYQ:GMVVD:RXGXS, AAPASXX:VPARL:SAIS-AA¹⁷-LYL:DAANNVV:LKNYQ:DMVVE:AXGXR, HVPKPXX:APTKL:SAIS-AA¹⁷-LYL:DDSSNVI:LKNYQ:NMVVR:SXGXH, RVPSTXX:APVKT:SAIS-AA¹⁷-LYL:DNGRVLL:LKNYQ:MIVEE:XGXL, ASAAPXX:VPQAL:SAIS-AA¹⁷-LYL:VGRKPKV:LKNYQ:MIVRS:XKXS, ASASPXX:VSQDL:SAIS-AA¹⁷-LYL:IGKTPKI:LKNYQ:MIVKS:XKXS, ASASPXX:VPQDL:SAIS-AA¹⁷-LYL:VGRTPKV:LKNYQ:MVVKS:XKXS, NDEGLEX:VPTEE:SAIS-AA¹⁷-LYL:RIKPHQGQH:LKNYQ:FLQHN:KXEXR, NDEGLEX:VPTGQ:SAIS-AA¹⁷-LYL:RIKPHQGQH:LKNYQ:LEEHS:QXEXR, SSVKXQP:SRVHH:SAIS-AA¹⁷-LYL:EYVRKKPKL:LKNYQ:RLEEH:LEXAXA, RNVQXRP:TQVQL:SAIS-AA¹⁷-LYL:EIVRKKPIF:LKNYQ:TLEDH:LAXKXE, KIPKAXX:VPEEL:SSLS-AA¹⁷-LFF:DENEKVV:LKVYP:DMTVE:GXGXR, SIPKAXX:VPEEL:SSLS-AA¹⁷-LFF:DEYDKVV:LKVYP:EMTVE:GXGXR, HVTKPTX:VPEKL:SSLS-AA¹⁷-LFF:DDSSNVI:LKVYP:NMTVE:SXGXH, YVPKPXX:VPEKL:SSLS-AA¹⁷-LFF:DDSSNVI:LKVYP:NMTVE:SXGXH, TVPKPXX:VPEQL:SSLS-AA¹⁷-LFF:DDSSNVI:LKVYP:NMTVE:AXGXH, AVPKAXX:VPEKL:SSLS-AA¹⁷-LFF:DSSNNVI:LKVYP:NMTVE:AXGXH, KVGKAXX:VPEKL:SSLS-AA¹⁷-LFF:DDMGVPT:LKVYP:EGMSTVE:XGXR, KASKAXX:VPEKL:SSLS-AA¹⁷-LFF:DKGVVTY:LKVYP:GMTVE:EXGXR, GSAGPXX:VPEKM:SSLS-AA¹⁷-LFF:NDKQQII:LKVYP:GMTVE:RXGXS, AAPASXX:VPERL:SSLS-AA¹⁷-LFF:DAANNVV:LKVYP:DMTVE:AXGXR, STPPTXX:VPERL:SSLS-AA¹⁷-LFF:DSANNVV:LKVYP:DMTVE:SXGXR, HVPKPXX:VPEKL:SSLS-AA¹⁷-LFF:DDSSNVI:LKVYP:NMTVE:SXGXH, RVPSTXX:VPEKT:SSLS-AA¹⁷-LFF:DNGRVLL:LKVYP:MITVE:XGXL, ASAAPXX:VPEAL:SSLS-AA¹⁷-LFF:VGRKPKV:LKVYP:MITVE:XKXS, ASASPXX:VPEDL:SSLS-AA¹⁷-LFF:IGKTPKI:LKVYP:MITVE:XKXS, ASASPXX:VPEDL:SSLS-AA¹⁷-LFF:VGRTPKV:LKVYP:MVTVE:XKXS, NDEGLEX:VPEEE:SSLS-AA¹⁷-LFF:RIKPHQGQH:LKVYP:FLTVE:KXEXR, NDEGLEX:VPEGQ:SSLS-AA¹⁷-LFF:RIKPHQGQH:LKVYP:LETVE:QXEXR, SSVKXQP:VPEHH:SSLS-AA¹⁷-LFF:EYVRKKPKL:LKVYP:RLTVE:LEXAXA, RNVQXRP:VPEQL:SSLS-AA¹⁷-LFF:EIVRKKPIF:LKVYP:TLTVE:LAXKXE, KIPKAXX:VPTEL:SSLS-AA¹⁷-LFF:DENEKVV:LKVYP:DMVVE:GXGXR, SIPKAXX:VPTEL:SSLS-AA¹⁷-LFF:DEYDKVV:LKVYP:EMVVE:GXGXR, HVTKPTX:APTKL:SSLS-AA¹⁷-LFF:DDSSNVI:LKVYP:NMVVR:SXGXH, YVPKPXX:APTKL:SSLS-AA¹⁷-LFF:DDSSNVI:LKVYP:NMVVR:SXGXH, TVPKPXX:APTQL:SSLS-AA¹⁷-LFF:DDSSNVI:LKVYP:NMVVR:AXGXH, AVPKAXX:APTKL:SSLS-AA¹⁷-LFF:DSSNNVI:LKVYP:NMVVK:AXGXH, KVGKAXX:VPTKL:SSLS-AA¹⁷-LFF:DDMGVPT:LKVYP:EGMSVAE:XGXR, KASKAXX:VPTKL:SSLS-AA¹⁷-LFF:DKGVVTY:LKVYP:GMAVS:EXGXR, GSAGPXX:TPTKM:SSLS-AA¹⁷-LFF:NDKQQII:LKVYP:GMVVD:RXGXS, AAPASXX:VPARL:SSLS-AA¹⁷-LFF:DAANNVV:LKVYP:DMVVE:AXGXR, STPPTXX:VPTRL:SSLS-AA¹⁷-LFF:DSANNVV:LKVYP:DMVVE:SXGXR, HVPKPXX:APTKL:SSLS-AA¹⁷-LFF:DDSSNVI:LKVYP:NMVVR:SXGXH, RVPSTXX:APVKT:SSLS-AA¹⁷-LFF:DNGRVLL:LKVYP:MIVEE:XGXL, ASAAPXX:VPQAL:SSLS-AA¹⁷-LFF:VGRKPKV:LKVYP:MIVRS:XKXS, ASASPXX:VSQDL:SSLS-AA¹⁷-LFF:IGKTPKI:LKVYP:MIVKS:XKXS, ASASPXX:VPQDL:SSLS-AA¹⁷-LFF:VGRTPKV:LKVYP:MVVKS:XKXS, NDEGLEX:VPTEE:SSLS-AA¹⁷-LFF:RIKPHQGQH:LKVYP:FLQHN:KXEXR, NDEGLEX:VPTGQ:SSLS-AA¹⁷-LFF:RIKPHQGQH:LKVYP:LEEHS:QXEXR, SSVKXQP:SRVHH:SSLS-AA¹⁷-LFF:EYVRKKPKL:LKVYP:RLEEH:LEXAXA, RNVQXRP:TQVQL:SSLS-AA¹⁷-LFF:EIVRKKPIF:LKVYP:TLEDH:LAXKXE, KIPKAXX:VPTEL:SAIS-AA¹⁷-LYL:DENEKVV:LKNYQ:DMVVE:GXGXR, KIPKAXX:APTEL:NAIS-AA¹⁷-LYF:DENEKVV:LKKYR:DMVVR:GXGXR, GIPEPXX:APTKM:NAIS-AA¹⁷-LYF:DENKNVV:LKKYR:NMVVR:SXAXR, SIPKAXX:APTEL:NAIS-AA¹⁷-LYF:DEYDKVV:LKKYR:EMVVR:GXGXR, YVPKPXX:APTKL:NAIS-AA¹⁷-LYF:DDSSNVI:LKKYR:NMVVR:SXGXH, TVPKPXX:APTQL:NAIS-AA¹⁷-LYF:DDSSNVI:LKKYR:NMVVR:AXGXH, AVPKAXX:APTKL:NAIS-AA¹⁷-LYF:DSSNNVI:LKKYR:NMVVR:AXGXH, KVGKAXX:APTKL:NAIS-AA¹⁷-LYF:DDMGVPT:LKKYR:EGMSVVR:XGXR, KASKAXX:APTKL:NAIS-AA¹⁷-LYF:DKGVVTY:LKKYR:GMVVR:EXGXR, GSAGPXX:APTKM:NAIS-AA¹⁷-LYF:NDKQQII:LKKYR:GMVVR:RXGXS, AAPASXX:APTRL:NAIS-AA¹⁷-LYF:DAANNVV:LKKYR:DMVVR:AXGXR, STPPTXX:APTRL:NAIS-AA¹⁷-LYF:DSANNVV:LKKYR:DMVVR:SXGXR, HVPKPXX:APTKL:NAIS-AA¹⁷-LYF:DDSSNVI:LKKYR:NMVVR:SXGXH, RVPSTXX:APTKT:NAIS-AA¹⁷-LYF:DNGRVLL:LKKYR:MIVVR:XGXL, ASAAPXX:APTAL:NAIS-AA¹⁷-LYF:VGRKPKV:LKKYR:MIVVR:XKXS, ASASPXX:APTDL:NAIS-AA¹⁷-LYF:IGKTPKI:LKKYR:MIVVR:XKXS, ASASPXX:APTDL:NAIS-AA¹⁷-LYF:VGRTPKV:LKKYR:MVVVR:XKXS, NDEGLEX:APTEE:NAIS-AA¹⁷-LYF:RIKPHQGQH:LKKYR:FLVVR:KXEXR, NDEGLEX:APTGQ:NAIS-AA¹⁷-LYF:RIKPHQGQH:LKKYR:LEVVR:QXEXR, SSVKXQP:APTHH:NAIS-AA¹⁷-LYF:EYVRKKPKL:LKKYR:RLVVR:LEXAXA, RNVQXRP:APTQL:NAIS-AA¹⁷-LYF:EIVRKKPIF:LKKYR:TLVVR:LAXKXE, KIPKAXX:VPTEL:NAIS-AA¹⁷-LYF:DENEKVV:LKKYR:DMVVE:GXGXR, GIPEPXX:VPEKM:NAIS-AA¹⁷-LYF:DENKNVV:LKKYR:NMTVE:SXAXR, SIPKAXX:VPTEL:NAIS-AA¹⁷-LYF:DEYDKVV:LKKYR:EMVVE:GXGXR, AVPKAXX:APTKL:NAIS-AA¹⁷-LYF:DSSNNVI:LKKYR:NMVVK:AXGXH, KVGKAXX:VPTKL:NAIS-AA¹⁷-LYF:DDMGVPT:LKKYR:EGMSVAE:XGXR, KASKAXX:VPTKL:NAIS-AA¹⁷-LYF:DKGVVTY:LKKYR:GMAVS:EXGXR, GSAGPXX:TPTKM:NAIS-AA¹⁷-LYF:NDKQQII:LKKYR:GMVVD:RXGXS, AAPASXX:VPARL:NAIS-AA¹⁷-LYF:DAANNVV:LKKYR:DMVVE:AXGXR, STPPTXX:VPTRL:NAIS-AA¹⁷-LYF:DSANNVV:LKKYR:DMVVE:SXGXR, RVPSTXX:APVKT:NAIS-AA¹⁷-LYF:DNGRVLL:LKKYR:MIVEE:XGXL, ASAAPXX:VPQAL:NAIS-AA¹⁷-LYF:VGRKPKV:LKKYR:MIVRS:XKXS, ASASPXX:VSQDL:NAIS-AA¹⁷-LYF:IGKTPKI:LKKYR:MIVKS:XKXS, ASASPXX:VPQDL:NAIS-AA¹⁷-LYF:VGRTPKV:LKKYR:MVVKS:XKXS, NDEGLEX:VPTEE:NAIS-AA¹⁷-LYF:RIKPHQGQH:LKKYR:FLQHN:KXEXR, NDEGLEX:VPTGQ:NAIS-AA¹⁷-LYF:RIKPHQGQH:LKKYR:LEEHS:QXEXR, SSVKXQP:SRVHH:NAIS-AA¹⁷-LYF:EYVRKKPKL:LKKYR:RLEEH:LEXAXA, RNVQXRP:TQVQL:NAIS-AA¹⁷-LYF:EIVRKKPIF:LKKYR:TLEDH:LAXKXE, HVTKPTX:APTKL:NAIS-AA¹⁷-LYF:DDSSNVI:LKKYR:NMVVR:SXGXH, KIPKAXX:APTEL:SATS-AA¹⁷-LYY:DENEKVV:LRKHR:DMVVK:GXGXR, GIPEPXX:APTKM:SATS-AA¹⁷-LYY:DENKNVV:LRKHR:NMVVK:SXAXR, SIPKAXX:APTEL:SATS-AA¹⁷-LYY:DEYDKVV:LRKHR:EMVVK:GXGXR, HVTKPTX:APTKL:SATS-AA¹⁷-LYY:DDSSNVI:LRKHR:NMVVK:SXGXH, YVPKPXX:APTKL:SATS-AA¹⁷-LYY:DDSSNVI:LRKHR:NMVVK:SXGXH, TVPKPXX:APTQL:SATS-AA¹⁷-LYY:DDSSNVI:LRKHR:NMVVK:AXGXH, KVGKAXX:APTKL:SATS-AA¹⁷-LYY:DDMGVPT:LRKHR:EGMSVVK:XGXR, KASKAXX:APTKL:SATS-AA¹⁷-LYY:DKGVVTY:LRKHR:GMVVK:EXGXR, GSAGPXX:APTKM:SATS-AA¹⁷-LYY:NDKQQII:LRKHR:GMVVK:RXGXS, AAPASXX:APTRL:SATS-AA¹⁷-LYY:DAANNVV:LRKHR:DMVVK:AXGXR, STPPTXX:APTRL:SATS-AA¹⁷-LYY:DSANNVV:LRKHR:DMVVK:SXGXR, HVPKPXX:APTKL:SATS-AA¹⁷-LYY:DDSSNVI:LRKHR:NMVVK:SXGXH, RVPSTXX:APTKT:SATS-AA¹⁷-LYY:DNGRVLL:LRKHR:MIVVK:XGXL, ASAAPXX:APTAL:SATS-AA¹⁷-LYY:VGRKPKV:LRKHR:MIVVK:XKXS, ASASPXX:APTDL:SATS-AA¹⁷-LYY:IGKTPKI:LRKHR:MIVVK:XKXS, ASASPXX:APTDL:SATS-AA¹⁷-LYY:VGRTPKV:LRKHR:MVVVK:XKXS, NDEGLEX:APTEE:SATS-AA¹⁷-LYY:RIKPHQGQH:LRKHR:FLVVK:KXEXR, NDEGLEX:APTGQ:SATS-AA¹⁷-LYY:RIKPHQGQH:LRKHR:LEVVK:QXEXR, SSVKXQP:APTHH:SATS-AA¹⁷-LYY:EYVRKKPKL:LRKHR:RLVVK:LEXAXA, RNVQXRP:APTQL:SATS-AA¹⁷-LYY:EIVRKKPIF:LRKHR:TLVVK:LAXKXE, KIPKAXX:VPTEL:SATS-AA¹⁷-LYY:DENEKVV:LRKHR:DMVVE:GXGXR, GIPEPXX:VPEKM:SATS-AA¹⁷-LYY:DENKNVV:LRKHR:NMTVE:SXAXR, SIPKAXX:VPTEL:SATS-AA¹⁷-LYY:DEYDKVV:LRKHR:EMVVE:GXGXR, HVTKPTX:APTKL:SATS-AA¹⁷-LYY:DDSSNVI:LRKHR:NMVVR:SXGXH, YVPKPXX:APTKL:SATS-AA¹⁷-LYY:DDSSNVI:LRKHR:NMVVR:SXGXH, TVPKPXX:APTQL:SATS-AA¹⁷-LYY:DDSSNVI:LRKHR:NMVVR:AXGXH, KVGKAXX:VPTKL:SATS-AA¹⁷-LYY:DDMGVPT:LRKHR:EGMSVAE:XGXR, KASKAXX:VPTKL:SATS-AA¹⁷-LYY:DKGVVTY:LRKHR:GMAVS:EXGXR, GSAGPXX:TPTKM:SATS-AA¹⁷-LYY:NDKQQII:LRKHR:GMVVD:RXGXS, AAPASXX:VPARL:SATS-AA¹⁷-LYY:DAANNVV:LRKHR:DMVVE:AXGXR, STPPTXX:VPTRL:SATS-AA¹⁷-LYY:DSANNVV:LRKHR:DMVVE:SXGXR, HVPKPXX:APTKL:SATS-AA¹⁷-LYY:DDSSNVI:LRKHR:NMVVR:SXGXH, RVPSTXX:APVKT:SATS-AA¹⁷-LYY:DNGRVLL:LRKHR:MIVEE:XGXL, ASAAPXX:VPQAL:SATS-AA¹⁷-LYY:VGRKPKV:LRKHR:MIVRS:XKXS, ASASPXX:VSQDL:SATS-AA¹⁷-LYY:IGKTPKI:LRKHR:MIVKS:XKXS, ASASPXX:VPQDL:SATS-AA¹⁷-LYY:VGRTPKV:LRKHR:MVVKS:XKXS, NDEGLEX:VPTEE:SATS-AA¹⁷-LYY:RIKPHQGQH:LRKHR:FLQHN:KXEXR, NDEGLEX:VPTGQ:SATS-AA¹⁷-LYY:RIKPHQGQH:LRKHR:LEEHS:QXEXR, SSVKXQP:SRVHH:SATS-AA¹⁷-LYY:EYVRKKPKL:LRKHR:RLEEH:LEXAXA, RNVQXRP:TQVQL:SATS-AA¹⁷-LYY:EIVRKKPIF:LRKHR:TLEDH:LAXKXE, KIPKAXX:VPTEL:SPIS-AA¹⁷-LYK:DENEKVV:LKYHY:DMVAE:GXGXR, GIPEPXX:VPTKM:SPIS-AA¹⁷-LYK:DENKNVV:LKYHY:NMVAE:SXAXR, SIPKAXX:VPTEL:SPIS-AA¹⁷-LYK:DEYDKVV:LKYHY:EMVAE:GXGXR, HVTKPTX:VPTKL:SPIS-AA¹⁷-LYK:DDSSNVI:LKYHY:NMVAE:SXGXH, YVPKPXX:VPTKL:SPIS-AA¹⁷-LYK:DDSSNVI:LKYHY:NMVAE:SXGXH, TVPKPXX:VPTQL:SPIS-AA¹⁷-LYK:DDSSNVI:LKYHY:NMVAE:AXGXH, AVPKAXX:VPTKL:SPIS-AA¹⁷-LYK:DSSNNVI:LKYHY:NMVAE:AXGXH, KASKAXX:VPTKL:SPIS-AA¹⁷-LYK:DKGVVTY:LKYHY:GMVAE:EXGXR, GSAGPXX:VPTKM:SPIS-AA¹⁷-LYK:NDKQQII:LKYHY:GMVAE:RXGXS, AAPASXX:VPTRL:SPIS-AA¹⁷-LYK:DAANNVV:LKYHY:DMVAE:AXGXR, STPPTXX:VPTRL:SPIS-AA¹⁷-LYK:DSANNVV:LKYHY:DMVAE:SXGXR, HVPKPXX:VPTKL:SPIS-AA¹⁷-LYK:DDSSNVI:LKYHY:NMVAE:SXGXH, RVPSTXX:VPTKT:SPIS-AA¹⁷-LYK:DNGRVLL:LKYHY:MIVAE:XGXL, ASAAPXX:VPTAL:SPIS-AA¹⁷-LYK:VGRKPKV:LKYHY:MIVAE:XKXS, ASASPXX:VPTDL:SPIS-AA¹⁷-LYK:IGKTPKI:LKYHY:MIVAE:XKXS, ASASPXX:VPTDL:SPIS-AA¹⁷-LYK:VGRTPKV:LKYHY:MVVAE:XKXS, NDEGLEX:VPTEE:SPIS-AA¹⁷-LYK:RIKPHQGQH:LKYHY:FLVAE:KXEXR, NDEGLEX:VPTGQ:SPIS-AA¹⁷-LYK:RIKPHQGQH:LKYHY:LEVAE:QXEXR, SSVKXQP:VPTHH:SPIS-AA¹⁷-LYK:EYVRKKPKL:LKYHY:RLVAE:LEXAXA, RNVQXRP:VPTQL:SPIS-AA¹⁷-LYK:EIVRKKPIF:LKYHY:TLVAE:LAXKXE, KIPKAXX:VPTEL:SPIS-AA¹⁷-LYK:DENEKVV:LKYHY:DMVVE:GXGXR, GIPEPXX:VPEKM:SPIS-AA¹⁷-LYK:DENKNVV:LKYHY:NMTVE:SXAXR, SIPKAXX:VPTEL:SPIS-AA¹⁷-LYK:DEYDKVV:LKYHY:EMVVE:GXGXR, HVTKPTX:APTKL:SPIS-AA¹⁷-LYK:DDSSNVI:LKYHY:NMVVR:SXGXH, YVPKPXX:APTKL:SPIS-AA¹⁷-LYK:DDSSNVI:LKYHY:NMVVR:SXGXH, TVPKPXX:APTQL:SPIS-AA¹⁷-LYK:DDSSNVI:LKYHY:NMVVR:AXGXH, AVPKAXX:APTKL:SPIS-AA¹⁷-LYK:DSSNNVI:LKYHY:NMVVK:AXGXH, KASKAXX:VPTKL:SPIS-AA¹⁷-LYK:DKGVVTY:LKYHY:GMAVS:EXGXR, GSAGPXX:TPTKM:SPIS-AA¹⁷-LYK:NDKQQII:LKYHY:GMVVD:RXGXS, AAPASXX:VPARL:SPIS-AA¹⁷-LYK:DAANNVV:LKYHY:DMVVE:AXGXR, STPPTXX:VPTRL:SPIS-AA¹⁷-LYK:DSANNVV:LKYHY:DMVVE:SXGXR, HVPKPXX:APTKL:SPIS-AA¹⁷-LYK:DDSSNVI:LKYHY:NMVVR:SXGXH, RVPSTXX:APVKT:SPIS-AA¹⁷-LYK:DNGRVLL:LKYHY:MIVEE:XGXL, ASAAPXX:VPQAL:SPIS-AA¹⁷-LYK:VGRKPKV:LKYHY:MIVRS:XKXS, ASASPXX:VSQDL:SPIS-AA¹⁷-LYK:IGKTPKI:LKYHY:MIVKS:XKXS, ASASPXX:VPQDL:SPIS-AA¹⁷-LYK:VGRTPKV:LKYHY:MVVKS:XKXS, NDEGLEX:VPTEE:SPIS-AA¹⁷-LYK:RIKPHQGQH:LKYHY:FLQHN:KXEXR, NDEGLEX:VPTGQ:SPIS-AA¹⁷-LYK:RIKPHQGQH:LKYHY:LEEHS:QXEXR, SSVKXQP:SRVHH:SPIS-AA¹⁷-LYK:EYVRKKPKL:LKYHY:RLEEH:LEXAXA, RNVQXRP:TQVQL:SPIS-AA¹⁷-LYK:EIVRKKPIF:LKYHY:TLEDH:LAXKXE, KIPKAXX:VPTEL:EPIS-AA¹⁷-LYL:DENEKVV:KFKYE:DMAVS:GXGXR, GIPEPXX:VPTKM:EPIS-AA¹⁷-LYL:DENKNVV:KFKYE:NMAVS:SXAXR, SIPKAXX:VPTEL:EPIS-AA¹⁷-LYL:DEYDKVV:KFKYE:EMAVS:GXGXR, HVTKPTX:VPTKL:EPIS-AA¹⁷-LYL:DDSSNVI:KFKYE:NMAVS:SXGXH, YVPKPXX:VPTKL:EPIS-AA¹⁷-LYL:DDSSNVI:KFKYE:NMAVS:SXGXH, TVPKPXX:VPTQL:EPIS-AA¹⁷-LYL:DDSSNVI:KFKYE:NMAVS:AXGXH, AVPKAXX:VPTKL:EPIS-AA¹⁷-LYL:DSSNNVI:KFKYE:NMAVS:AXGXH, KVGKAXX:VPTKL:EPIS-AA¹⁷-LYL:DDMGVPT:KFKYE:EGMSAVS:XGXR, GSAGPXX:VPTKM:EPIS-AA¹⁷-LYL:NDKQQII:KFKYE:GMAVS:RXGXS, AAPASXX:VPTRL:EPIS-AA¹⁷-LYL:DAANNVV:KFKYE:DMAVS:AXGXR, STPPTXX:VPTRL:EPIS-AA¹⁷-LYL:DSANNVV:KFKYE:DMAVS:SXGXR, HVPKPXX:VPTKL:EPIS-AA¹⁷-LYL:DDSSNVI:KFKYE:NMAVS:SXGXH, RVPSTXX:VPTKT:EPIS-AA¹⁷-LYL:DNGRVLL:KFKYE:MIAVS:XGXL, ASAAPXX:VPTAL:EPIS-AA¹⁷-LYL:VGRKPKV:KFKYE:MIAVS:XKXS, ASASPXX:VPTDL:EPIS-AA¹⁷-LYL:IGKTPKI:KFKYE:MIAVS:XKXS, ASASPXX:VPTDL:EPIS-AA¹⁷-LYL:VGRTPKV:KFKYE:MVAVS:XKXS, NDEGLEX:VPTEE:EPIS-AA¹⁷-LYL:RIKPHQGQH:KFKYE:FLAVS:KXEXR, NDEGLEX:VPTGQ:EPIS-AA¹⁷-LYL:RIKPHQGQH:KFKYE:LEAVS:QXEXR, SSVKXQP:VPTHH:EPIS-AA¹⁷-LYL:EYVRKKPKL:KFKYE:RLAVS:LEXAXA, RNVQXRP:VPTQL:EPIS-AA¹⁷-LYL:EIVRKKPIF:KFKYE:TLAVS:LAXKXE, KIPKAXX:VPTEL:EPIS-AA¹⁷-LYL:DENEKVV:KFKYE:DMVVE:GXGXR, GIPEPXX:VPEKM:EPIS-AA¹⁷-LYL:DENKNVV:KFKYE:NMTVE:SXAXR, SIPKAXX:VPTEL:EPIS-AA¹⁷-LYL:DEYDKVV:KFKYE:EMVVE:GXGXR, HVTKPTX:APTKL:EPIS-AA¹⁷-LYL:DDSSNVI:KFKYE:NMVVR:SXGXH, YVPKPXX:APTKL:EPIS-AA¹⁷-LYL:DDSSNVI:KFKYE:NMVVR:SXGXH, TVPKPXX:APTQL:EPIS-AA¹⁷-LYL:DDSSNVI:KFKYE:NMVVR:AXGXH, AVPKAXX:APTKL:EPIS-AA¹⁷-LYL:DSSNNVI:KFKYE:NMVVK:AXGXH, KVGKAXX:VPTKL:EPIS-AA¹⁷-LYL:DDMGVPT:KFKYE:EGMSVAE:XGXR, GSAGPXX:TPTKM:EPIS-AA¹⁷-LYL:NDKQQII:KFKYE:GMVVD:RXGXS, AAPASXX:VPARL:EPIS-AA¹⁷-LYL:DAANNVV:KFKYE:DMVVE:AXGXR, STPPTXX:VPTRL:EPIS-AA¹⁷-LYL:DSANNVV:KFKYE:DMVVE:SXGXR, HVPKPXX:APTKL:EPIS-AA¹⁷-LYL:DDSSNVI:KFKYE:NMVVR:SXGXH, RVPSTXX:APVKT:EPIS-AA¹⁷-LYL:DNGRVLL:KFKYE:MIVEE:XGXL, ASAAPXX:VPQAL:EPIS-AA¹⁷-LYL:VGRKPKV:KFKYE:MIVRS:XKXS, ASASPXX:VSQDL:EPIS-AA¹⁷-LYL:IGKTPKI:KFKYE:MIVKS:XKXS, ASASPXX:VPQDL:EPIS-AA¹⁷-LYL:VGRTPKV:KFKYE:MVVKS:XKXS, NDEGLEX:VPTEE:EPIS-AA¹⁷-LYL:RIKPHQGQH:KFKYE:FLQHN:KXEXR, NDEGLEX:VPTGQ:EPIS-AA¹⁷-LYL:RIKPHQGQH:KFKYE:LEEHS:QXEXR, SSVKXQP:SRVHH:EPIS-AA¹⁷-LYL:EYVRKKPKL:KFKYE:RLEEH:LEXAXA, RNVQXRP:TQVQL:EPIS-AA¹⁷-LYL:EIVRKKPIF:KFKYE:TLEDH:LAXKXE, KIPKAXX:TPTEL:SPIN-AA¹⁷-LYF:DENEKVV:YGKIP:DMVVD:GXGXR, GIPEPXX:TPTKM:SPIN-AA¹⁷-LYF:DENKNVV:YGKIP:NMVVD:SXAXR, SIPKAXX:TPTEL:SPIN-AA¹⁷-LYF:DEYDKVV:YGKIP:EMVVD:GXGXR, HVTKPTX:TPTKL:SPIN-AA¹⁷-LYF:DDSSNVI:YGKIP:NMVVD:SXGXH, YVPKPXX:TPTKL:SPIN-AA¹⁷-LYF:DDSSNVI:YGKIP:NMVVD:SXGXH, TVPKPXX:TPTQL:SPIN-AA¹⁷-LYF:DDSSNVI:YGKIP:NMVVD:AXGXH, AVPKAXX:TPTKL:SPIN-AA¹⁷-LYF:DSSNNVI:YGKIP:NMVVD:AXGXH, KVGKAXX:TPTKL:SPIN-AA¹⁷-LYF:DDMGVPT:YGKIP:EGMSVVD:XGXR, KASKAXX:TPTKL:SPIN-AA¹⁷-LYF:DKGVVTY:YGKIP:GMVVD:EXGXR, AAPASXX:TPTRL:SPIN-AA¹⁷-LYF:DAANNVV:YGKIP:DMVVD:AXGXR, STPPTXX:TPTRL:SPIN-AA¹⁷-LYF:DSANNVV:YGKIP:DMVVD:SXGXR, HVPKPXX:TPTKL:SPIN-AA¹⁷-LYF:DDSSNVI:YGKIP:NMVVD:SXGXH, RVPSTXX:TPTKT:SPIN-AA¹⁷-LYF:DNGRVLL:YGKIP:MIVVD:XGXL, ASAAPXX:TPTAL:SPIN-AA¹⁷-LYF:VGRKPKV:YGKIP:MIVVD:XKXS, ASASPXX:TPTDL:SPIN-AA¹⁷-LYF:IGKTPKI:YGKIP:MIVVD:XKXS, ASASPXX:TPTDL:SPIN-AA¹⁷-LYF:VGRTPKV:YGKIP:MVVVD:XKXS, NDEGLEX:TPTEE:SPIN-AA¹⁷-LYF:RIKPHQGQH:YGKIP:FLVVD:KXEXR, NDEGLEX:TPTGQ:SPIN-AA¹⁷-LYF:RIKPHQGQH:YGKIP:LEVVD:QXEXR, SSVKXQP:TPTHH:SPIN-AA¹⁷-LYF:EYVRKKPKL:YGKIP:RLVVD:LEXAXA, RNVQXRP:TPTQL:SPIN-AA¹⁷-LYF:EIVRKKPIF:YGKIP:TLVVD:LAXKXE, KIPKAXX:VPTEL:SPIN-AA¹⁷-LYF:DENEKVV:YGKIP:DMVVE:GXGXR, GIPEPXX:VPEKM:SPIN-AA¹⁷-LYF:DENKNVV:YGKIP:NMTVE:SXAXR, SIPKAXX:VPTEL:SPIN-AA¹⁷-LYF:DEYDKVV:YGKIP:EMVVE:GXGXR, HVTKPTX:APTKL:SPIN-AA¹⁷-LYF:DDSSNVI:YGKIP:NMVVR:SXGXH, YVPKPXX:APTKL:SPIN-AA¹⁷-LYF:DDSSNVI:YGKIP:NMVVR:SXGXH, TVPKPXX:APTQL:SPIN-AA¹⁷-LYF:DDSSNVI:YGKIP:NMVVR:AXGXH, AVPKAXX:APTKL:SPIN-AA¹⁷-LYF:DSSNNVI:YGKIP:NMVVK:AXGXH, KVGKAXX:VPTKL:SPIN-AA¹⁷-LYF:DDMGVPT:YGKIP:EGMSVAE:XGXR, KASKAXX:VPTKL:SPIN-AA¹⁷-LYF:DKGVVTY:YGKIP:GMAVS:EXGXR, AAPASXX:VPARL:SPIN-AA¹⁷-LYF:DAANNVV:YGKIP:DMVVE:AXGXR, STPPTXX:VPTRL:SPIN-AA¹⁷-LYF:DSANNVV:YGKIP:DMVVE:SXGXR, HVPKPXX:APTKL:SPIN-AA¹⁷-LYF:DDSSNVI:YGKIP:NMVVR:SXGXH, RVPSTXX:APVKT:SPIN-AA¹⁷-LYF:DNGRVLL:YGKIP:MIVEE:XGXL, ASAAPXX:VPQAL:SPIN-AA¹⁷-LYF:VGRKPKV:YGKIP:MIVRS:XKXS, ASASPXX:VSQDL:SPIN-AA¹⁷-LYF:IGKTPKI:YGKIP:MIVKS:XKXS, ASASPXX:VPQDL:SPIN-AA¹⁷-LYF:VGRTPKV:YGKIP:MVVKS:XKXS, NDEGLEX:VPTEE:SPIN-AA¹⁷-LYF:RIKPHQGQH:YGKIP:FLQHN:KXEXR, NDEGLEX:VPTGQ:SPIN-AA¹⁷-LYF:RIKPHQGQH:YGKIP:LEEHS:QXEXR, SSVKXQP:SRVHH:SPIN-AA¹⁷-LYF:EYVRKKPKL:YGKIP:RLEEH:LEXAXA, RNVQXRP:TQVQL:SPIN-AA¹⁷-LYF:EIVRKKPIF:YGKIP:TLEDH:LAXKXE, KIPKAXX:VPAEL:SPIS-AA¹⁷-LYI:DENEKVV:YKQYE:DMVVE:GXGXR, GIPEPXX:VPAKM:SPIS-AA¹⁷-LYI:DENKNVV:YKQYE:NMVVE:SXAXR, SIPKAXX:VPAEL:SPIS-AA¹⁷-LYI:DEYDKVV:YKQYE:EMVVE:GXGXR, HVTKPTX:VPAKL:SPIS-AA¹⁷-LYI:DDSSNVI:YKQYE:NMVVE:SXGXH, YVPKPXX:VPAKL:SPIS-AA¹⁷-LYI:DDSSNVI:YKQYE:NMVVE:SXGXH, TVPKPXX:VPAQL:SPIS-AA¹⁷-LYI:DDSSNVI:YKQYE:NMVVE:AXGXH, AVPKAXX:VPAKL:SPIS-AA¹⁷-LYI:DSSNNVI:YKQYE:NMVVE:AXGXH, KVGKAXX:VPAKL:SPIS-AA¹⁷-LYI:DDMGVPT:YKQYE:EGMSVVE:XGXR, KASKAXX:VPAKL:SPIS-AA¹⁷-LYI:DKGVVTY:YKQYE:GMVVE:EXGXR, GSAGPXX:VPAKM:SPIS-AA¹⁷-LYI:NDKQQII:YKQYE:GMVVE:RXGXS, STPPTXX:VPARL:SPIS-AA¹⁷-LYI:DSANNVV:YKQYE:DMVVE:SXGXR, HVPKPXX:VPAKL:SPIS-AA¹⁷-LYI:DDSSNVI:YKQYE:NMVVE:SXGXH, RVPSTXX:VPAKT:SPIS-AA¹⁷-LYI:DNGRVLL:YKQYE:MIVVE:XGXL, ASAAPXX:VPAAL:SPIS-AA¹⁷-LYI:VGRKPKV:YKQYE:MIVVE:XKXS, ASASPXX:VPADL:SPIS-AA¹⁷-LYI:IGKTPKI:YKQYE:MIVVE:XKXS, ASASPXX:VPADL:SPIS-AA¹⁷-LYI:VGRTPKV:YKQYE:MVVVE:XKXS, NDEGLEX:VPAEE:SPIS-AA¹⁷-LYI:RIKPHQGQH:YKQYE:FLVVE:KXEXR, NDEGLEX:VPAGQ:SPIS-AA¹⁷-LYI:RIKPHQGQH:YKQYE:LEVVE:QXEXR, SSVKXQP:VPAHH:SPIS-AA¹⁷-LYI:EYVRKKPKL:YKQYE:RLVVE:LEXAXA, RNVQXRP:VPAQL:SPIS-AA¹⁷-LYI:EIVRKKPIF:YKQYE:TLVVE:LAXKXE, KIPKAXX:VPTEL:SPIS-AA¹⁷-LYI:DENEKVV:YKQYE:DMVVE:GXGXR, GIPEPXX:VPEKM:SPIS-AA¹⁷-LYI:DENKNVV:YKQYE:NMTVE:SXAXR, SIPKAXX:VPTEL:SPIS-AA¹⁷-LYI:DEYDKVV:YKQYE:EMVVE:GXGXR, HVTKPTX:APTKL:SPIS-AA¹⁷-LYI:DDSSNVI:YKQYE:NMVVR:SXGXH, YVPKPXX:APTKL:SPIS-AA¹⁷-LYI:DDSSNVI:YKQYE:NMVVR:SXGXH, TVPKPXX:APTQL:SPIS-AA¹⁷-LYI:DDSSNVI:YKQYE:NMVVR:AXGXH, AVPKAXX:APTKL:SPIS-AA¹⁷-LYI:DSSNNVI:YKQYE:NMVVK:AXGXH, KVGKAXX:VPTKL:SPIS-AA¹⁷-LYI:DDMGVPT:YKQYE:EGMSVAE:XGXR, KASKAXX:VPTKL:SPIS-AA¹⁷-LYI:DKGVVTY:YKQYE:GMAVS:EXGXR, GSAGPXX:TPTKM:SPIS-AA¹⁷-LYI:NDKQQII:YKQYE:GMVVD:RXGXS, STPPTXX:VPTRL:SPIS-AA¹⁷-LYI:DSANNVV:YKQYE:DMVVE:SXGXR, HVPKPXX:APTKL:SPIS-AA¹⁷-LYI:DDSSNVI:YKQYE:NMVVR:SXGXH, RVPSTXX:APVKT:SPIS-AA¹⁷-LYI:DNGRVLL:YKQYE:MIVEE:XGXL, ASAAPXX:VPQAL:SPIS-AA¹⁷-LYI:VGRKPKV:YKQYE:MIVRS:XKXS, ASASPXX:VSQDL:SPIS-AA¹⁷-LYI:IGKTPKI:YKQYE:MIVKS:XKXS, ASASPXX:VPQDL:SPIS-AA¹⁷-LYI:VGRTPKV:YKQYE:MVVKS:XKXS, NDEGLEX:VPTEE:SPIS-AA¹⁷-LYI:RIKPHQGQH:YKQYE:FLQHN:KXEXR, NDEGLEX:VPTGQ:SPIS-AA¹⁷-LYI:RIKPHQGQH:YKQYE:LEEHS:QXEXR, SSVKXQP:SRVHH:SPIS-AA¹⁷-LYI:EYVRKKPKL:YKQYE:RLEEH:LEXAXA, RNVQXRP:TQVQL:SPIS-AA¹⁷-LYI:EIVRKKPIF:YKQYE:TLEDH:LAXKXE, KIPKAXX:VPTEL:SPIS-AA¹⁷-LFI:DENEKVV:YKQYE:DMVVE:GXGXR, GIPEPXX:VPTKM:SPIS-AA¹⁷-LFI:DENKNVV:YKQYE:NMVVE:SXAXR, SIPKAXX:VPTEL:SPIS-AA¹⁷-LFI:DEYDKVV:YKQYE:EMVVE:GXGXR, HVTKPTX:VPTKL:SPIS-AA¹⁷-LFI:DDSSNVI:YKQYE:NMVVE:SXGXH, YVPKPXX:VPTKL:SPIS-AA¹⁷-LFI:DDSSNVI:YKQYE:NMVVE:SXGXH, TVPKPXX:VPTQL:SPIS-AA¹⁷-LFI:DDSSNVI:YKQYE:NMVVE:AXGXH, AVPKAXX:VPTKL:SPIS-AA¹⁷-LFI:DSSNNVI:YKQYE:NMVVE:AXGXH, KVGKAXX:VPTKL:SPIS-AA¹⁷-LFI:DDMGVPT:YKQYE:EGMSVVE:XGXR, KASKAXX:VPTKL:SPIS-AA¹⁷-LFI:DKGVVTY:YKQYE:GMVVE:EXGXR, GSAGPXX:VPTKM:SPIS-AA¹⁷-LFI:NDKQQII:YKQYE:GMVVE:RXGXS, AAPASXX:VPTRL:SPIS-AA¹⁷-LFI:DAANNVV:YKQYE:DMVVE:AXGXR, HVPKPXX:VPTKL:SPIS-AA¹⁷-LFI:DDSSNVI:YKQYE:NMVVE:SXGXH, RVPSTXX:VPTKT:SPIS-AA¹⁷-LFI:DNGRVLL:YKQYE:MIVVE:XGXL, ASAAPXX:VPTAL:SPIS-AA¹⁷-LFI:VGRKPKV:YKQYE:MIVVE:XKXS, ASASPXX:VPTDL:SPIS-AA¹⁷-LFI:IGKTPKI:YKQYE:MIVVE:XKXS, ASASPXX:VPTDL:SPIS-AA¹⁷-LFI:VGRTPKV:YKQYE:MVVVE:XKXS, NDEGLEX:VPTEE:SPIS-AA¹⁷-LFI:RIKPHQGQH:YKQYE:FLVVE:KXEXR, NDEGLEX:VPTGQ:SPIS-AA¹⁷-LFI:RIKPHQGQH:YKQYE:LEVVE:QXEXR, SSVKXQP:VPTHH:SPIS-AA¹⁷-LFI:EYVRKKPKL:YKQYE:RLVVE:LEXAXA, RNVQXRP:VPTQL:SPIS-AA¹⁷-LFI:EIVRKKPIF:YKQYE:TLVVE:LAXKXE, GIPEPXX:VPEKM:SPIS-AA¹⁷-LFI:DENKNVV:YKQYE:NMTVE:SXAXR, HVTKPTX:APTKL:SPIS-AA¹⁷-LFI:DDSSNVI:YKQYE:NMVVR:SXGXH, YVPKPXX:APTKL:SPIS-AA¹⁷-LFI:DDSSNVI:YKQYE:NMVVR:SXGXH, TVPKPXX:APTQL:SPIS-AA¹⁷-LFI:DDSSNVI:YKQYE:NMVVR:AXGXH, AVPKAXX:APTKL:SPIS-AA¹⁷-LFI:DSSNNVI:YKQYE:NMVVK:AXGXH, KVGKAXX:VPTKL:SPIS-AA¹⁷-LFI:DDMGVPT:YKQYE:EGMSVAE:XGXR, KASKAXX:VPTKL:SPIS-AA¹⁷-LFI:DKGVVTY:YKQYE:GMAVS:EXGXR, GSAGPXX:TPTKM:SPIS-AA¹⁷-LFI:NDKQQII:YKQYE:GMVVD:RXGXS, AAPASXX:VPARL:SPIS-AA¹⁷-LFI:DAANNVV:YKQYE:DMVVE:AXGXR, HVPKPXX:APTKL:SPIS-AA¹⁷-LFI:DDSSNVI:YKQYE:NMVVR:SXGXH, RVPSTXX:APVKT:SPIS-AA¹⁷-LFI:DNGRVLL:YKQYE:MIVEE:XGXL, ASAAPXX:VPQAL:SPIS-AA¹⁷-LFI:VGRKPKV:YKQYE:MIVRS:XKXS, ASASPXX:VSQDL:SPIS-AA¹⁷-LFI:IGKTPKI:YKQYE:MIVKS:XKXS, ASASPXX:VPQDL:SPIS-AA¹⁷-LFI:VGRTPKV:YKQYE:MVVKS:XKXS, NDEGLEX:VPTEE:SPIS-AA¹⁷-LFI:RIKPHQGQH:YKQYE:FLQHN:KXEXR, NDEGLEX:VPTGQ:SPIS-AA¹⁷-LFI:RIKPHQGQH:YKQYE:LEEHS:QXEXR, SSVKXQP:SRVHH:SPIS-AA¹⁷-LFI:EYVRKKPKL:YKQYE:RLEEH:LEXAXA, RNVQXRP:TQVQL:SPIS-AA¹⁷-LFI:EIVRKKPIF:YKQYE:TLEDH:LAXKXE, KIPKAXX:APVEL:KPLS-AA¹⁷-LYV:DENEKVV:DHHKD:DMVEE:GXGXR, GIPEPXX:APVKM:KPLS-AA¹⁷-LYV:DENKNVV:DHHKD:NMVEE:SXAXR, SIPKAXX:APVEL:KPLS-AA¹⁷-LYV:DEYDKVV:DHHKD:EMVEE:GXGXR, HVTKPTX:APVKL:KPLS-AA¹⁷-LYV:DDSSNVI:DHHKD:NMVEE:SXGXH, YVPKPXX:APVKL:KPLS-AA¹⁷-LYV:DDSSNVI:DHHKD:NMVEE:SXGXH, TVPKPXX:APVQL:KPLS-AA¹⁷-LYV:DDSSNVI:DHHKD:NMVEE:AXGXH, AVPKAXX:APVKL:KPLS-AA¹⁷-LYV:DSSNNVI:DHHKD:NMVEE:AXGXH, KVGKAXX:APVKL:KPLS-AA¹⁷-LYV:DDMGVPT:DHHKD:EGMSVEE:XGXR, KASKAXX:APVKL:KPLS-AA¹⁷-LYV:DKGVVTY:DHHKD:GMVEE:EXGXR, GSAGPXX:APVKM:KPLS-AA¹⁷-LYV:NDKQQII:DHHKD:GMVEE:RXGXS, AAPASXX:APVRL:KPLS-AA¹⁷-LYV:DAANNVV:DHHKD:DMVEE:AXGXR, STPPTXX:APVRL:KPLS-AA¹⁷-LYV:DSANNVV:DHHKD:DMVEE:SXGXR, HVPKPXX:APVKL:KPLS-AA¹⁷-LYV:DDSSNVI:DHHKD:NMVEE:SXGXH, ASAAPXX:APVAL:KPLS-AA¹⁷-LYV:VGRKPKV:DHHKD:MIVEE:XKXS, ASASPXX:APVDL:KPLS-AA¹⁷-LYV:IGKTPKI:DHHKD:MIVEE:XKXS, ASASPXX:APVDL:KPLS-AA¹⁷-LYV:VGRTPKV:DHHKD:MVVEE:XKXS, NDEGLEX:APVEE:KPLS-AA¹⁷-LYV:RIKPHQGQH:DHHKD:FLVEE:KXEXR, NDEGLEX:APVGQ:KPLS-AA¹⁷-LYV:RIKPHQGQH:DHHKD:LEVEE:QXEXR, SSVKXQP:APVHH:KPLS-AA¹⁷-LYV:EYVRKKPKL:DHHKD:RLVEE:LEXAXA, RNVQXRP:APVQL:KPLS-AA¹⁷-LYV:EIVRKKPIF:DHHKD:TLVEE:LAXKXE, KIPKAXX:VPTEL:KPLS-AA¹⁷-LYV:DENEKVV:DHHKD:DMVVE:GXGXR, GIPEPXX:VPEKM:KPLS-AA¹⁷-LYV:DENKNVV:DHHKD:NMTVE:SXAXR, SIPKAXX:VPTEL:KPLS-AA¹⁷-LYV:DEYDKVV:DHHKD:EMVVE:GXGXR, HVTKPTX:APTKL:KPLS-AA¹⁷-LYV:DDSSNVI:DHHKD:NMVVR:SXGXH, YVPKPXX:APTKL:KPLS-AA¹⁷-LYV:DDSSNVI:DHHKD:NMVVR:SXGXH, TVPKPXX:APTQL:KPLS-AA¹⁷-LYV:DDSSNVI:DHHKD:NMVVR:AXGXH, AVPKAXX:APTKL:KPLS-AA¹⁷-LYV:DSSNNVI:DHHKD:NMVVK:AXGXH, KVGKAXX:VPTKL:KPLS-AA¹⁷-LYV:DDMGVPT:DHHKD:EGMSVAE:XGXR, KASKAXX:VPTKL:KPLS-AA¹⁷-LYV:DKGVVTY:DHHKD:GMAVS:EXGXR, GSAGPXX:TPTKM:KPLS-AA¹⁷-LYV:NDKQQII:DHHKD:GMVVD:RXGXS, AAPASXX:VPARL:KPLS-AA¹⁷-LYV:DAANNVV:DHHKD:DMVVE:AXGXR, STPPTXX:VPTRL:KPLS-AA¹⁷-LYV:DSANNVV:DHHKD:DMVVE:SXGXR, HVPKPXX:APTKL:KPLS-AA¹⁷-LYV:DDSSNVI:DHHKD:NMVVR:SXGXH, ASAAPXX:VPQAL:KPLS-AA¹⁷-LYV:VGRKPKV:DHHKD:MIVRS:XKXS, ASASPXX:VSQDL:KPLS-AA¹⁷-LYV:IGKTPKI:DHHKD:MIVKS:XKXS, ASASPXX:VPQDL:KPLS-AA¹⁷-LYV:VGRTPKV:DHHKD:MVVKS:XKXS, NDEGLEX:VPTEE:KPLS-AA¹⁷-LYV:RIKPHQGQH:DHHKD:FLQHN:KXEXR, NDEGLEX:VPTGQ:KPLS-AA¹⁷-LYV:RIKPHQGQH:DHHKD:LEEHS:QXEXR, SSVKXQP:SRVHH:KPLS-AA¹⁷-LYV:EYVRKKPKL:DHHKD:RLEEH:LEXAXA, RNVQXRP:TQVQL:KPLS-AA¹⁷-LYV:EIVRKKPIF:DHHKD:TLEDH:LAXKXE, KIPKAXX:VPQEL:EPLP-AA¹⁷-VYY:DENEKVV:EQLSN:DMVRS:GXGXR, GIPEPXX:VPQKM:EPLP-AA¹⁷-VYY:DENKNVV:EQLSN:NMVRS:SXAXR, SIPKAXX:VPQEL:EPLP-AA¹⁷-VYY:DEYDKVV:EQLSN:EMVRS:GXGXR, HVTKPTX:VPQKL:EPLP-AA¹⁷-VYY:DDSSNVI:EQLSN:NMVRS:SXGXH, YVPKPXX:VPQKL:EPLP-AA¹⁷-VYY:DDSSNVI:EQLSN:NMVRS:SXGXH, TVPKPXX:VPQQL:EPLP-AA¹⁷-VYY:DDSSNVI:EQLSN:NMVRS:AXGXH, AVPKAXX:VPQKL:EPLP-AA¹⁷-VYY:DSSNNVI:EQLSN:NMVRS:AXGXH, KVGKAXX:VPQKL:EPLP-AA¹⁷-VYY:DDMGVPT:EQLSN:EGMSVRS:XGXR, KASKAXX:VPQKL:EPLP-AA¹⁷-VYY:DKGVVTY:EQLSN:GMVRS:EXGXR, GSAGPXX:VPQKM:EPLP-AA¹⁷-VYY:NDKQQII:EQLSN:GMVRS:RXGXS, AAPASXX:VPQRL:EPLP-AA¹⁷-VYY:DAANNVV:EQLSN:DMVRS:AXGXR, STPPTXX:VPQRL:EPLP-AA¹⁷-VYY:DSANNVV:EQLSN:DMVRS:SXGXR, HVPKPXX:VPQKL:EPLP-AA¹⁷-VYY:DDSSNVI:EQLSN:NMVRS:SXGXH, RVPSTXX:VPQKT:EPLP-AA¹⁷-VYY:DNGRVLL:EQLSN:MIVRS:XGXL, ASASPXX:VPQDL:EPLP-AA¹⁷-VYY:IGKTPKI:EQLSN:MIVRS:XKXS, ASASPXX:VPQDL:EPLP-AA¹⁷-VYY:VGRTPKV:EQLSN:MVVRS:XKXS, NDEGLEX:VPQEE:EPLP-AA¹⁷-VYY:RIKPHQGQH:EQLSN:FLVRS:KXEXR, NDEGLEX:VPQGQ:EPLP-AA¹⁷-VYY:RIKPHQGQH:EQLSN:LEVRS:QXEXR, SSVKXQP:VPQHH:EPLP-AA¹⁷-VYY:EYVRKKPKL:EQLSN:RLVRS:LEXAXA, RNVQXRP:VPQQL:EPLP-AA¹⁷-VYY:EIVRKKPIF:EQLSN:TLVRS:LAXKXE, KIPKAXX:VPTEL:EPLP-AA¹⁷-VYY:DENEKVV:EQLSN:DMVVE:GXGXR, GIPEPXX:VPEKM:EPLP-AA¹⁷-VYY:DENKNVV:EQLSN:NMTVE:SXAXR, SIPKAXX:VPTEL:EPLP-AA¹⁷-VYY:DEYDKVV:EQLSN:EMVVE:GXGXR, HVTKPTX:APTKL:EPLP-AA¹⁷-VYY:DDSSNVI:EQLSN:NMVVR:SXGXH, YVPKPXX:APTKL:EPLP-AA¹⁷-VYY:DDSSNVI:EQLSN:NMVVR:SXGXH, TVPKPXX:APTQL:EPLP-AA¹⁷-VYY:DDSSNVI:EQLSN:NMVVR:AXGXH, AVPKAXX:APTKL:EPLP-AA¹⁷-VYY:DSSNNVI:EQLSN:NMVVK:AXGXH, KVGKAXX:VPTKL:EPLP-AA¹⁷-VYY:DDMGVPT:EQLSN:EGMSVAE:XGXR, KASKAXX:VPTKL:EPLP-AA¹⁷-VYY:DKGVVTY:EQLSN:GMAVS:EXGXR, GSAGPXX:TPTKM:EPLP-AA¹⁷-VYY:NDKQQII:EQLSN:GMVVD:RXGXS, AAPASXX:VPARL:EPLP-AA¹⁷-VYY:DAANNVV:EQLSN:DMVVE:AXGXR, STPPTXX:VPTRL:EPLP-AA¹⁷-VYY:DSANNVV:EQLSN:DMVVE:SXGXR, HVPKPXX:APTKL:EPLP-AA¹⁷-VYY:DDSSNVI:EQLSN:NMVVR:SXGXH, RVPSTXX:APVKT:EPLP-AA¹⁷-VYY:DNGRVLL:EQLSN:MIVEE:XGXL, ASASPXX:VSQDL:EPLP-AA¹⁷-VYY:IGKTPKI:EQLSN:MIVKS:XKXS, ASASPXX:VPQDL:EPLP-AA¹⁷-VYY:VGRTPKV:EQLSN:MVVKS:XKXS, NDEGLEX:VPTEE:EPLP-AA¹⁷-VYY:RIKPHQGQH:EQLSN:FLQHN:KXEXR, NDEGLEX:VPTGQ:EPLP-AA¹⁷-VYY:RIKPHQGQH:EQLSN:LEEHS:QXEXR, SSVKXQP:SRVHH:EPLP-AA¹⁷-VYY:EYVRKKPKL:EQLSN:RLEEH:LEXAXA, RNVQXRP:TQVQL:EPLP-AA¹⁷-VYY:EIVRKKPIF:EQLSN:TLEDH:LAXKXE, KIPKAXX:VSQEL:EPLT-AA¹⁷-LYY:DENEKVV:EQLSN:DMVKS:GXGXR, GIPEPXX:VSQKM:EPLT-AA¹⁷-LYY:DENKNVV:EQLSN:NMVKS:SXAXR, SIPKAXX:VSQEL:EPLT-AA¹⁷-LYY:DEYDKVV:EQLSN:EMVKS:GXGXR, HVTKPTX:VSQKL:EPLT-AA¹⁷-LYY:DDSSNVI:EQLSN:NMVKS:SXGXH, YVPKPXX:VSQKL:EPLT-AA¹⁷-LYY:DDSSNVI:EQLSN:NMVKS:SXGXH, TVPKPXX:VSQQL:EPLT-AA¹⁷-LYY:DDSSNVI:EQLSN:NMVKS:AXGXH, AVPKAXX:VSQKL:EPLT-AA¹⁷-LYY:DSSNNVI:EQLSN:NMVKS:AXGXH, KVGKAXX:VSQKL:EPLT-AA¹⁷-LYY:DDMGVPT:EQLSN:EGMSVKS:XGXR, KASKAXX:VSQKL:EPLT-AA¹⁷-LYY:DKGVVTY:EQLSN:GMVKS:EXGXR, GSAGPXX:VSQKM:EPLT-AA¹⁷-LYY:NDKQQII:EQLSN:GMVKS:RXGXS, AAPASXX:VSQRL:EPLT-AA¹⁷-LYY:DAANNVV:EQLSN:DMVKS:AXGXR, STPPTXX:VSQRL:EPLT-AA¹⁷-LYY:DSANNVV:EQLSN:DMVKS:SXGXR, HVPKPXX:VSQKL:EPLT-AA¹⁷-LYY:DDSSNVI:EQLSN:NMVKS:SXGXH, RVPSTXX:VSQKT:EPLT-AA¹⁷-LYY:DNGRVLL:EQLSN:MIVKS:XGXL, ASAAPXX:VSQAL:EPLT-AA¹⁷-LYY:VGRKPKV:EQLSN:MIVKS:XKXS, ASASPXX:VSQDL:EPLT-AA¹⁷-LYY:VGRTPKV:EQLSN:MVVKS:XKXS, NDEGLEX:VSQEE:EPLT-AA¹⁷-LYY:RIKPHQGQH:EQLSN:FLVKS:KXEXR, NDEGLEX:VSQGQ:EPLT-AA¹⁷-LYY:RIKPHQGQH:EQLSN:LEVKS:QXEXR, SSVKXQP:VSQHH:EPLT-AA¹⁷-LYY:EYVRKKPKL:EQLSN:RLVKS:LEXAXA, RNVQXRP:VSQQL:EPLT-AA¹⁷-LYY:EIVRKKPIF:EQLSN:TLVKS:LAXKXE, KIPKAXX:VPTEL:EPLT-AA¹⁷-LYY:DENEKVV:EQLSN:DMVVE:GXGXR, GIPEPXX:VPEKM:EPLT-AA¹⁷-LYY:DENKNVV:EQLSN:NMTVE:SXAXR, SIPKAXX:VPTEL:EPLT-AA¹⁷-LYY:DEYDKVV:EQLSN:EMVVE:GXGXR, HVTKPTX:APTKL:EPLT-AA¹⁷-LYY:DDSSNVI:EQLSN:NMVVR:SXGXH, YVPKPXX:APTKL:EPLT-AA¹⁷-LYY:DDSSNVI:EQLSN:NMVVR:SXGXH, TVPKPXX:APTQL:EPLT-AA¹⁷-LYY:DDSSNVI:EQLSN:NMVVR:AXGXH, AVPKAXX:APTKL:EPLT-AA¹⁷-LYY:DSSNNVI:EQLSN:NMVVK:AXGXH, KVGKAXX:VPTKL:EPLT-AA¹⁷-LYY:DDMGVPT:EQLSN:EGMSVAE:XGXR, KASKAXX:VPTKL:EPLT-AA¹⁷-LYY:DKGVVTY:EQLSN:GMAVS:EXGXR, GSAGPXX:TPTKM:EPLT-AA¹⁷-LYY:NDKQQII:EQLSN:GMVVD:RXGXS, AAPASXX:VPARL:EPLT-AA¹⁷-LYY:DAANNVV:EQLSN:DMVVE:AXGXR, STPPTXX:VPTRL:EPLT-AA¹⁷-LYY:DSANNVV:EQLSN:DMVVE:SXGXR, HVPKPXX:APTKL:EPLT-AA¹⁷-LYY:DDSSNVI:EQLSN:NMVVR:SXGXH, RVPSTXX:APVKT:EPLT-AA¹⁷-LYY:DNGRVLL:EQLSN:MIVEE:XGXL, ASAAPXX:VPQAL:EPLT-AA¹⁷-LYY:VGRKPKV:EQLSN:MIVRS:XKXS, ASASPXX:VPQDL:EPLT-AA¹⁷-LYY:VGRTPKV:EQLSN:MVVKS:XKXS, NDEGLEX:VPTEE:EPLT-AA¹⁷-LYY:RIKPHQGQH:EQLSN:FLQHN:KXEXR, NDEGLEX:VPTGQ:EPLT-AA¹⁷-LYY:RIKPHQGQH:EQLSN:LEEHS:QXEXR, SSVKXQP:SRVHH:EPLT-AA¹⁷-LYY:EYVRKKPKL:EQLSN:RLEEH:LEXAXA, RNVQXRP:TQVQL:EPLT-AA¹⁷-LYY:EIVRKKPIF:EQLSN:TLEDH:LAXKXE, KIPKAXX:VPQEL:EPLT-AA¹⁷-LYY:DENEKVV:EQLSN:DMVKS:GXGXR, GIPEPXX:VPQKM:EPLT-AA¹⁷-LYY:DENKNVV:EQLSN:NMVKS:SXAXR, SIPKAXX:VPQEL:EPLT-AA¹⁷-LYY:DEYDKVV:EQLSN:EMVKS:GXGXR, HVTKPTX:VPQKL:EPLT-AA¹⁷-LYY:DDSSNVI:EQLSN:NMVKS:SXGXH, YVPKPXX:VPQKL:EPLT-AA¹⁷-LYY:DDSSNVI:EQLSN:NMVKS:SXGXH, TVPKPXX:VPQQL:EPLT-AA¹⁷-LYY:DDSSNVI:EQLSN:NMVKS:AXGXH, AVPKAXX:VPQKL:EPLT-AA¹⁷-LYY:DSSNNVI:EQLSN:NMVKS:AXGXH, KVGKAXX:VPQKL:EPLT-AA¹⁷-LYY:DDMGVPT:EQLSN:EGMSVKS:XGXR, KASKAXX:VPQKL:EPLT-AA¹⁷-LYY:DKGVVTY:EQLSN:GMVKS:EXGXR, GSAGPXX:VPQKM:EPLT-AA¹⁷-LYY:NDKQQII:EQLSN:GMVKS:RXGXS, AAPASXX:VPQRL:EPLT-AA¹⁷-LYY:DAANNVV:EQLSN:DMVKS:AXGXR, STPPTXX:VPQRL:EPLT-AA¹⁷-LYY:DSANNVV:EQLSN:DMVKS:SXGXR, HVPKPXX:VPQKL:EPLT-AA¹⁷-LYY:DDSSNVI:EQLSN:NMVKS:SXGXH, RVPSTXX:VPQKT:EPLT-AA¹⁷-LYY:DNGRVLL:EQLSN:MIVKS:XGXL, ASAAPXX:VPQAL:EPLT-AA¹⁷-LYY:VGRKPKV:EQLSN:MIVKS:XKXS, ASASPXX:VPQDL:EPLT-AA¹⁷-LYY:IGKTPKI:EQLSN:MIVKS:XKXS, NDEGLEX:VPQEE:EPLT-AA¹⁷-LYY:RIKPHQGQH:EQLSN:FLVKS:KXEXR, NDEGLEX:VPQGQ:EPLT-AA¹⁷-LYY:RIKPHQGQH:EQLSN:LEVKS:QXEXR, SSVKXQP:VPQHH:EPLT-AA¹⁷-LYY:EYVRKKPKL:EQLSN:RLVKS:LEXAXA, RNVQXRP:VPQQL:EPLT-AA¹⁷-LYY:EIVRKKPIF:EQLSN:TLVKS:LAXKXE, ASASPXX:VSQDL:EPLT-AA¹⁷-LYY:IGKTPKI:EQLSN:MIVKS:XKXS, KIPKAXX:VPTEL:SNIT-AA¹⁷-QIM:DENEKVV:IGEMS:DMQHN:GXGXR, GIPEPXX:VPTKM:SNIT-AA¹⁷-QIM:DENKNVV:IGEMS:NMQHN:SXAXR, SIPKAXX:VPTEL:SNIT-AA¹⁷-QIM:DEYDKVV:IGEMS:EMQHN:GXGXR, HVTKPTX:VPTKL:SNIT-AA¹⁷-QIM:DDSSNVI:IGEMS:NMQHN:SXGXH, YVPKPXX:VPTKL:SNIT-AA¹⁷-QIM:DDSSNVI:IGEMS:NMQHN:SXGXH, TVPKPXX:VPTQL:SNIT-AA¹⁷-QIM:DDSSNVI:IGEMS:NMQHN:AXGXH, AVPKAXX:VPTKL:SNIT-AA¹⁷-QIM:DSSNNVI:IGEMS:NMQHN:AXGXH, KVGKAXX:VPTKL:SNIT-AA¹⁷-QIM:DDMGVPT:IGEMS:EGMSQHN:XGXR, KASKAXX:VPTKL:SNIT-AA¹⁷-QIM:DKGVVTY:IGEMS:GMQHN:EXGXR, GSAGPXX:VPTKM:SNIT-AA¹⁷-QIM:NDKQQII:IGEMS:GMQHN:RXGXS, AAPASXX:VPTRL:SNIT-AA¹⁷-QIM:DAANNVV:IGEMS:DMQHN:AXGXR, STPPTXX:VPTRL:SNIT-AA¹⁷-QIM:DSANNVV:IGEMS:DMQHN:SXGXR, HVPKPXX:VPTKL:SNIT-AA¹⁷-QIM:DDSSNVI:IGEMS:NMQHN:SXGXH, RVPSTXX:VPTKT:SNIT-AA¹⁷-QIM:DNGRVLL:IGEMS:MIQHN:XGXL, ASAAPXX:VPTAL:SNIT-AA¹⁷-QIM:VGRKPKV:IGEMS:MIQHN:XKXS, ASASPXX:VPTDL:SNIT-AA¹⁷-QIM:IGKTPKI:IGEMS:MIQHN:XKXS, ASASPXX:VPTDL:SNIT-AA¹⁷-QIM:VGRTPKV:IGEMS:MVQHN:XKXS, NDEGLEX:VPTGQ:SNIT-AA¹⁷-QIM:RIKPHQGQH:IGEMS:LEQHN:QXEXR, NDEGLEX:VPTEE:SNIT-AA¹⁷-QIM:RIKPHQGQH:IGEMS:FLQHN:KXEXR, SSVKXQP:VPTHH:SNIT-AA¹⁷-QIM:EYVRKKPKL:IGEMS:RLQHN:LEXAXA, RNVQXRP:VPTQL:SNIT-AA¹⁷-QIM:EIVRKKPIF:IGEMS:TLQHN:LAXKXE, KIPKAXX:VPTEL:SNIT-AA¹⁷-QIM:DENEKVV:IGEMS:DMVVE:GXGXR, GIPEPXX:VPEKM:SNIT-AA¹⁷-QIM:DENKNVV:IGEMS:NMTVE:SXAXR, SIPKAXX:VPTEL:SNIT-AA¹⁷-QIM:DEYDKVV:IGEMS:EMVVE:GXGXR, HVTKPTX:APTKL:SNIT-AA¹⁷-QIM:DDSSNVI:IGEMS:NMVVR:SXGXH, YVPKPXX:APTKL:SNIT-AA¹⁷-QIM:DDSSNVI:IGEMS:NMVVR:SXGXH, TVPKPXX:APTQL:SNIT-AA¹⁷-QIM:DDSSNVI:IGEMS:NMVVR:AXGXH, AVPKAXX:APTKL:SNIT-AA¹⁷-QIM:DSSNNVI:IGEMS:NMVVK:AXGXH, KVGKAXX:VPTKL:SNIT-AA¹⁷-QIM:DDMGVPT:IGEMS:EGMSVAE:XGXR, KASKAXX:VPTKL:SNIT-AA¹⁷-QIM:DKGVVTY:IGEMS:GMAVS:EXGXR, GSAGPXX:TPTKM:SNIT-AA¹⁷-QIM:NDKQQII:IGEMS:GMVVD:RXGXS, AAPASXX:VPARL:SNIT-AA¹⁷-QIM:DAANNVV:IGEMS:DMVVE:AXGXR, STPPTXX:VPTRL:SNIT-AA¹⁷-QIM:DSANNVV:IGEMS:DMVVE:SXGXR, HVPKPXX:APTKL:SNIT-AA¹⁷-QIM:DDSSNVI:IGEMS:NMVVR:SXGXH, RVPSTXX:APVKT:SNIT-AA¹⁷-QIM:DNGRVLL:IGEMS:MIVEE:XGXL, ASAAPXX:VPQAL:SNIT-AA¹⁷-QIM:VGRKPKV:IGEMS:MIVRS:XKXS, ASASPXX:VSQDL:SNIT-AA¹⁷-QIM:IGKTPKI:IGEMS:MIVKS:XKXS, ASASPXX:VPQDL:SNIT-AA¹⁷-QIM:VGRTPKV:IGEMS:MVVKS:XKXS, NDEGLEX:VPTGQ:SNIT-AA¹⁷-QIM:RIKPHQGQH:IGEMS:LEEHS:QXEXR, SSVKXQP:SRVHH:SNIT-AA¹⁷-QIM:EYVRKKPKL:IGEMS:RLEEH:LEXAXA, RNVQXRP:TQVQL:SNIT-AA¹⁷-QIM:EIVRKKPIF:IGEMS:TLEDH:LAXKXE, KIPKAXX:VPTEL:SNIT-AA¹⁷-QIM:DENEKVV:LGEMS:DMEHS:GXGXR, GIPEPXX:VPTKM:SNIT-AA¹⁷-QIM:DENKNVV:LGEMS:NMEHS:SXAXR, SIPKAXX:VPTEL:SNIT-AA¹⁷-QIM:DEYDKVV:LGEMS:EMEHS:GXGXR, HVTKPTX:VPTKL:SNIT-AA¹⁷-QIM:DDSSNVI:LGEMS:NMEHS:SXGXH, YVPKPXX:VPTKL:SNIT-AA¹⁷-QIM:DDSSNVI:LGEMS:NMEHS:SXGXH, TVPKPXX:VPTQL:SNIT-AA¹⁷-QIM:DDSSNVI:LGEMS:NMEHS:AXGXH, AVPKAXX:VPTKL:SNIT-AA¹⁷-QIM:DSSNNVI:LGEMS:NMEHS:AXGXH, KVGKAXX:VPTKL:SNIT-AA¹⁷-QIM:DDMGVPT:LGEMS:EGMSEHS:XGXR, KASKAXX:VPTKL:SNIT-AA¹⁷-QIM:DKGVVTY:LGEMS:GMEHS:EXGXR, GSAGPXX:VPTKM:SNIT-AA¹⁷-QIM:NDKQQII:LGEMS:GMEHS:RXGXS, AAPASXX:VPTRL:SNIT-AA¹⁷-QIM:DAANNVV:LGEMS:DMEHS:AXGXR, STPPTXX:VPTRL:SNIT-AA¹⁷-QIM:DSANNVV:LGEMS:DMEHS:SXGXR, HVPKPXX:VPTKL:SNIT-AA¹⁷-QIM:DDSSNVI:LGEMS:NMEHS:SXGXH, RVPSTXX:VPTKT:SNIT-AA¹⁷-QIM:DNGRVLL:LGEMS:MIEHS:XGXL, ASAAPXX:VPTAL:SNIT-AA¹⁷-QIM:VGRKPKV:LGEMS:MIEHS:XKXS, ASASPXX:VPTDL:SNIT-AA¹⁷-QIM:IGKTPKI:LGEMS:MIEHS:XKXS, ASASPXX:VPTDL:SNIT-AA¹⁷-QIM:VGRTPKV:LGEMS:MVEHS:XKXS, NDEGLEX:VPTEE:SNIT-AA¹⁷-QIM:RIKPHQGQH:LGEMS:FLEHS:KXEXR, SSVKXQP:VPTHH:SNIT-AA¹⁷-QIM:EYVRKKPKL:LGEMS:RLEHS:LEXAXA, RNVQXRP:VPTQL:SNIT-AA¹⁷-QIM:EIVRKKPIF:LGEMS:TLEHS:LAXKXE, KIPKAXX:VPTEL:SNIT-AA¹⁷-QIM:DENEKVV:LGEMS:DMVVE:GXGXR, GIPEPXX:VPEKM:SNIT-AA¹⁷-QIM:DENKNVV:LGEMS:NMTVE:SXAXR, SIPKAXX:VPTEL:SNIT-AA¹⁷-QIM:DEYDKVV:LGEMS:EMVVE:GXGXR, HVTKPTX:APTKL:SNIT-AA¹⁷-QIM:DDSSNVI:LGEMS:NMVVR:SXGXH, YVPKPXX:APTKL:SNIT-AA¹⁷-QIM:DDSSNVI:LGEMS:NMVVR:SXGXH, TVPKPXX:APTQL:SNIT-AA¹⁷-QIM:DDSSNVI:LGEMS:NMVVR:AXGXH, AVPKAXX:APTKL:SNIT-AA¹⁷-QIM:DSSNNVI:LGEMS:NMVVK:AXGXH, KVGKAXX:VPTKL:SNIT-AA¹⁷-QIM:DDMGVPT:LGEMS:EGMSVAE:XGXR, KASKAXX:VPTKL:SNIT-AA¹⁷-QIM:DKGVVTY:LGEMS:GMAVS:EXGXR, GSAGPXX:TPTKM:SNIT-AA¹⁷-QIM:NDKQQII:LGEMS:GMVVD:RXGXS, AAPASXX:VPARL:SNIT-AA¹⁷-QIM:DAANNVV:LGEMS:DMVVE:AXGXR, STPPTXX:VPTRL:SNIT-AA¹⁷-QIM:DSANNVV:LGEMS:DMVVE:SXGXR, HVPKPXX:APTKL:SNIT-AA¹⁷-QIM:DDSSNVI:LGEMS:NMVVR:SXGXH, RVPSTXX:APVKT:SNIT-AA¹⁷-QIM:DNGRVLL:LGEMS:MIVEE:XGXL, ASAAPXX:VPQAL:SNIT-AA¹⁷-QIM:VGRKPKV:LGEMS:MIVRS:XKXS, ASASPXX:VSQDL:SNIT-AA¹⁷-QIM:IGKTPKI:LGEMS:MIVKS:XKXS, ASASPXX:VPQDL:SNIT-AA¹⁷-QIM:VGRTPKV:LGEMS:MVVKS:XKXS, NDEGLEX:VPTEE:SNIT-AA¹⁷-QIM:RIKPHQGQH:LGEMS:FLQHN:KXEXR, SSVKXQP:SRVHH:SNIT-AA¹⁷-QIM:EYVRKKPKL:LGEMS:RLEEH:LEXAXA, RNVQXRP:TQVQL:SNIT-AA¹⁷-QIM:EIVRKKPIF:LGEMS:TLEDH:LAXKXE, KIPKAXX:SRVEL:RSVK-AA¹⁷-AKV:DENEKVV:KEVQV:DMEEH:GXGXR, GIPEPXX:SRVKM:RSVK-AA¹⁷-AKV:DENKNVV:KEVQV:NMEEH:SXAXR, SIPKAXX:SRVEL:RSVK-AA¹⁷-AKV:DEYDKVV:KEVQV:EMEEH:GXGXR, HVTKPTX:SRVKL:RSVK-AA¹⁷-AKV:DDSSNVI:KEVQV:NMEEH:SXGXH, YVPKPXX:SRVKL:RSVK-AA¹⁷-AKV:DDSSNVI:KEVQV:NMEEH:SXGXH, TVPKPXX:SRVQL:RSVK-AA¹⁷-AKV:DDSSNVI:KEVQV:NMEEH:AXGXH, AVPKAXX:SRVKL:RSVK-AA¹⁷-AKV:DSSNNVI:KEVQV:NMEEH:AXGXH, KVGKAXX:SRVKL:RSVK-AA¹⁷-AKV:DDMGVPT:KEVQV:EGMSEEH:XGXR, KASKAXX:SRVKL:RSVK-AA¹⁷-AKV:DKGVVTY:KEVQV:GMEEH:EXGXR, GSAGPXX:SRVKM:RSVK-AA¹⁷-AKV:NDKQQII:KEVQV:GMEEH:RXGXS, AAPASXX:SRVRL:RSVK-AA¹⁷-AKV:DAANNVV:KEVQV:DMEEH:AXGXR, STPPTXX:SRVRL:RSVK-AA¹⁷-AKV:DSANNVV:KEVQV:DMEEH:SXGXR, HVPKPXX:SRVKL:RSVK-AA¹⁷-AKV:DDSSNVI:KEVQV:NMEEH:SXGXH, RVPSTXX:SRVKT:RSVK-AA¹⁷-AKV:DNGRVLL:KEVQV:MIEEH:XGXL, ASAAPXX:SRVAL:RSVK-AA¹⁷-AKV:VGRKPKV:KEVQV:MIEEH:XKXS, ASASPXX:SRVDL:RSVK-AA¹⁷-AKV:IGKTPKI:KEVQV:MIEEH:XKXS, ASASPXX:SRVDL:RSVK-AA¹⁷-AKV:VGRTPKV:KEVQV:MVEEH:XKXS, NDEGLEX:SRVEE:RSVK-AA¹⁷-AKV:RIKPHQGQH:KEVQV:FLEEH:KXEXR, NDEGLEX:SRVGQ:RSVK-AA¹⁷-AKV:RIKPHQGQH:KEVQV:LEEEH:QXEXR, RNVQXRP:SRVQL:RSVK-AA¹⁷-AKV:EIVRKKPIF:KEVQV:TLEEH:LAXKXE, KIPKAXX:VPTEL:RSVK-AA¹⁷-AKV:DENEKVV:KEVQV:DMVVE:GXGXR, GIPEPXX:VPEKM:RSVK-AA¹⁷-AKV:DENKNVV:KEVQV:NMTVE:SXAXR, SIPKAXX:VPTEL:RSVK-AA¹⁷-AKV:DEYDKVV:KEVQV:EMVVE:GXGXR, HVTKPTX:APTKL:RSVK-AA¹⁷-AKV:DDSSNVI:KEVQV:NMVVR:SXGXH, YVPKPXX:APTKL:RSVK-AA¹⁷-AKV:DDSSNVI:KEVQV:NMVVR:SXGXH, TVPKPXX:APTQL:RSVK-AA¹⁷-AKV:DDSSNVI:KEVQV:NMVVR:AXGXH, AVPKAXX:APTKL:RSVK-AA¹⁷-AKV:DSSNNVI:KEVQV:NMVVK:AXGXH, KVGKAXX:VPTKL:RSVK-AA¹⁷-AKV:DDMGVPT:KEVQV:EGMSVAE:XGXR, KASKAXX:VPTKL:RSVK-AA¹⁷-AKV:DKGVVTY:KEVQV:GMAVS:EXGXR, GSAGPXX:TPTKM:RSVK-AA¹⁷-AKV:NDKQQII:KEVQV:GMVVD:RXGXS, AAPASXX:VPARL:RSVK-AA¹⁷-AKV:DAANNVV:KEVQV:DMVVE:AXGXR, STPPTXX:VPTRL:RSVK-AA¹⁷-AKV:DSANNVV:KEVQV:DMVVE:SXGXR, HVPKPXX:APTKL:RSVK-AA¹⁷-AKV:DDSSNVI:KEVQV:NMVVR:SXGXH, RVPSTXX:APVKT:RSVK-AA¹⁷-AKV:DNGRVLL:KEVQV:MIVEE:XGXL, ASAAPXX:VPQAL:RSVK-AA¹⁷-AKV:VGRKPKV:KEVQV:MIVRS:XKXS, ASASPXX:VSQDL:RSVK-AA¹⁷-AKV:IGKTPKI:KEVQV:MIVKS:XKXS, ASASPXX:VPQDL:RSVK-AA¹⁷-AKV:VGRTPKV:KEVQV:MVVKS:XKXS, NDEGLEX:VPTEE:RSVK-AA¹⁷-AKV:RIKPHQGQH:KEVQV:FLQHN:KXEXR, NDEGLEX:VPTGQ:RSVK-AA¹⁷-AKV:RIKPHQGQH:KEVQV:LEEHS:QXEXR, RNVQXRP:TQVQL:RSVK-AA¹⁷-AKV:EIVRKKPIF:KEVQV:TLEDH:LAXKXE, KIPKAXX:TQVEL:RPVQ-AA¹⁷-RKI:DENEKVV:KKATV:DMEDH:GXGXR, GIPEPXX:TQVKM:RPVQ-AA¹⁷-RKI:DENKNVV:KKATV:NMEDH:SXAXR, SIPKAXX:TQVEL:RPVQ-AA¹⁷-RKI:DEYDKVV:KKATV:EMEDH:GXGXR, HVTKPTX:TQVKL:RPVQ-AA¹⁷-RKI:DDSSNVI:KKATV:NMEDH:SXGXH, YVPKPXX:TQVKL:RPVQ-AA¹⁷-RKI:DDSSNVI:KKATV:NMEDH:SXGXH, TVPKPXX:TQVQL:RPVQ-AA¹⁷-RKI:DDSSNVI:KKATV:NMEDH:AXGXH, AVPKAXX:TQVKL:RPVQ-AA¹⁷-RKI:DSSNNVI:KKATV:NMEDH:AXGXH, KVGKAXX:TQVKL:RPVQ-AA¹⁷-RKI:DDMGVPT:KKATV:EGMSEDH:XGXR, KASKAXX:TQVKL:RPVQ-AA¹⁷-RKI:DKGVVTY:KKATV:GMEDH:EXGXR, GSAGPXX:TQVKM:RPVQ-AA¹⁷-RKI:NDKQQII:KKATV:GMEDH:RXGXS, AAPASXX:TQVRL:RPVQ-AA¹⁷-RKI:DAANNVV:KKATV:DMEDH:AXGXR, STPPTXX:TQVRL:RPVQ-AA¹⁷-RKI:DSANNVV:KKATV:DMEDH:SXGXR, HVPKPXX:TQVKL:RPVQ-AA¹⁷-RKI:DDSSNVI:KKATV:NMEDH:SXGXH, RVPSTXX:TQVKT:RPVQ-AA¹⁷-RKI:DNGRVLL:KKATV:MIEDH:XGXL, ASAAPXX:TQVAL:RPVQ-AA¹⁷-RKI:VGRKPKV:KKATV:MIEDH:XKXS, ASASPXX:TQVDL:RPVQ-AA¹⁷-RKI:IGKTPKI:KKATV:MIEDH:XKXS, ASASPXX:TQVDL:RPVQ-AA¹⁷-RKI:VGRTPKV:KKATV:MVEDH:XKXS, NDEGLEX:TQVEE:RPVQ-AA¹⁷-RKI:RIKPHQGQH:KKATV:FLEDH:KXEXR, NDEGLEX:TQVGQ:RPVQ-AA¹⁷-RKI:RIKPHQGQH:KKATV:LEEDH:QXEXR, SSVKXQP:TQVHH:RPVQ-AA¹⁷-RKI:EYVRKKPKL:KKATV:RLEDH:LEXAXA, KIPKAXX:VPTEL:RPVQ-AA¹⁷-RKI:DENEKVV:KKATV:DMVVE:GXGXR, GIPEPXX:VPEKM:RPVQ-AA¹⁷-RKI:DENKNVV:KKATV:NMTVE:SXAXR, SIPKAXX:VPTEL:RPVQ-AA¹⁷-RKI:DEYDKVV:KKATV:EMVVE:GXGXR, HVTKPTX:APTKL:RPVQ-AA¹⁷-RKI:DDSSNVI:KKATV:NMVVR:SXGXH, YVPKPXX:APTKL:RPVQ-AA¹⁷-RKI:DDSSNVI:KKATV:NMVVR:SXGXH, TVPKPXX:APTQL:RPVQ-AA¹⁷-RKI:DDSSNVI:KKATV:NMVVR:AXGXH, AVPKAXX:APTKL:RPVQ-AA¹⁷-RKI:DSSNNVI:KKATV:NMVVK:AXGXH, KVGKAXX:VPTKL:RPVQ-AA¹⁷-RKI:DDMGVPT:KKATV:EGMSVAE:XGXR, KASKAXX:VPTKL:RPVQ-AA¹⁷-RKI:DKGVVTY:KKATV:GMAVS:EXGXR, GSAGPXX:TPTKM:RPVQ-AA¹⁷-RKI:NDKQQII:KKATV:GMVVD:RXGXS, AAPASXX:VPARL:RPVQ-AA¹⁷-RKI:DAANNVV:KKATV:DMVVE:AXGXR, STPPTXX:VPTRL:RPVQ-AA¹⁷-RKI:DSANNVV:KKATV:DMVVE:SXGXR, HVPKPXX:APTKL:RPVQ-AA¹⁷-RKI:DDSSNVI:KKATV:NMVVR:SXGXH, RVPSTXX:APVKT:RPVQ-AA¹⁷-RKI:DNGRVLL:KKATV:MIVEE:XGXL, ASAAPXX:VPQAL:RPVQ-AA¹⁷-RKI:VGRKPKV:KKATV:MIVRS:XKXS, ASASPXX:VSQDL:RPVQ-AA¹⁷-RKI:IGKTPKI:KKATV:MIVKS:XKXS, ASASPXX:VPQDL:RPVQ-AA¹⁷-RKI:VGRTPKV:KKATV:MVVKS:XKXS, NDEGLEX:VPTEE:RPVQ-AA¹⁷-RKI:RIKPHQGQH:KKATV:FLQHN:KXEXR, NDEGLEX:VPTGQ:RPVQ-AA¹⁷-RKI:RIKPHQGQH:KKATV:LEEHS:QXEXR and SSVKXQP:SRVHH:RPVQ-AA¹⁷-RKI:EYVRKKPKL:KKATV:RLEEH:LEXAXA; and wherein AA¹⁷ is selected from the group consisting of G, A, V, L, I, P, F, M, W, T and S (in particular is selected from the group consisting of M, I, L, V and T). More particularly, the heptuplet PEP7:PEP5:PEP12:LINKER:PEP2:PEP6:PEP8 is selected from the group consisting of GIPEPXX:VPTKM:SAIS-AA¹⁷-LYL:DENKNVV:LKNYQ:NMVVE:SXAXR, HVTKPTX:VPTKL:SAIS-AA¹⁷-LYL:DDSSNVI:LKNYQ:NMVVE:SXGXH, YVPKPXX:VPTKL:SAIS-AA¹⁷-LYL:DDSSNVI:LKNYQ:NMVVE:SXGXH, TVPKPXX:VPTQL:SAIS-AA¹⁷-LYL:DDSSNVI:LKNYQ:NMVVE:AXGXH, AVPKAXX:VPTKL:SAIS-AA¹⁷-LYL:DSSNNVI:LKNYQ:NMVVE:AXGXH, KVGKAXX:VPTKL:SAIS-AA¹⁷-LYL:DDMGVPT:LKNYQ:EGMSVVE:XGXR, KASKAXX:VPTKL:SAIS-AA¹⁷-LYL:DKGVVTY:LKNYQ:GMVVE:EXGXR, GSAGPXX:VPTKM:SAIS-AA¹⁷-LYL:NDKQQII:LKNYQ:GMVVE:RXGXS, AAPASXX:VPTRL:SAIS-AA¹⁷-LYL:DAANNVV:LKNYQ:DMVVE:AXGXR, STPPTXX:VPTRL:SAIS-AA¹⁷-LYL:DSANNVV:LKNYQ:DMVVE:SXGXR, HVPKPXX:VPTKL:SAIS-AA¹⁷-LYL:DDSSNVI:LKNYQ:NMVVE:SXGXH, RVPSTXX:VPTKT:SAIS-AA¹⁷-LYL:DNGRVLL:LKNYQ:MIVVE:XGXL, ASAAPXX:VPTAL:SAIS-AA¹⁷-LYL:VGRKPKV:LKNYQ:MIVVE:XKXS, ASASPXX:VPTDL:SAIS-AA¹⁷-LYL:IGKTPKI:LKNYQ:MIVVE:XKXS, ASASPXX:VPTDL:SAIS-AA¹⁷-LYL:VGRTPKV:LKNYQ:MVVVE:XKXS, GIPEPXX:VPEKM:SAIS-AA¹⁷-LYL:DENKNVV:LKNYQ:NMTVE:SXAXR, HVTKPTX:APTKL:SAIS-AA¹⁷-LYL:DDSSNVI:LKNYQ:NMVVR:SXGXH, YVPKPXX:APTKL:SAIS-AA¹⁷-LYL:DDSSNVI:LKNYQ:NMVVR:SXGXH, TVPKPXX:APTQL:SAIS-AA¹⁷-LYL:DDSSNVI:LKNYQ:NMVVR:AXGXH, AVPKAXX:APTKL:SAIS-AA¹⁷-LYL:DSSNNVI:LKNYQ:NMVVK:AXGXH, KVGKAXX:VPTKL:SAIS-AA¹⁷-LYL:DDMGVPT:LKNYQ:EGMSVAE:XGXR, KASKAXX:VPTKL:SAIS-AA¹⁷-LYL:DKGVVTY:LKNYQ:GMAVS:EXGXR, GSAGPXX:TPTKM:SAIS-AA¹⁷-LYL:NDKQQII:LKNYQ:GMVVD:RXGXS, AAPASXX:VPARL:SAIS-AA¹⁷-LYL:DAANNVV:LKNYQ:DMVVE:AXGXR, HVPKPXX:APTKL:SAIS-AA¹⁷-LYL:DDSSNVI:LKNYQ:NMVVR:SXGXH, RVPSTXX:APVKT:SAIS-AA¹⁷-LYL:DNGRVLL:LKNYQ:MIVEE:XGXL, ASAAPXX:VPQAL:SAIS-AA¹⁷-LYL:VGRKPKV:LKNYQ:MIVRS:XKXS, ASASPXX:VSQDL:SAIS-AA¹⁷-LYL:IGKTPKI:LKNYQ:MIVKS:XKXS, ASASPXX:VPQDL:SAIS-AA¹⁷-LYL:VGRTPKV:LKNYQ:MVVKS:XKXS, NDEGLEX:VPTEE:SAIS-AA¹⁷-LYL:RIKPHQGQH:LKNYQ:FLQHN:KXEXR, NDEGLEX:VPTGQ:SAIS-AA¹⁷-LYL:RIKPHQGQH:LKNYQ:LEEHS:QXEXR, SSVKXQP:SRVHH:SAIS-AA¹⁷-LYL:EYVRKKPKL:LKNYQ:RLEEH:LEXAXA, RNVQXRP:TQVQL:SAIS-AA¹⁷-LYL:EIVRKKPIF:LKNYQ:TLEDH:LAXKXE, KIPKAXX:VPEEL:SSLS-AA¹⁷-LFF:DENEKVV:LKVYP:DMTVE:GXGXR, SIPKAXX:VPEEL:SSLS-AA¹⁷-LFF:DEYDKVV:LKVYP:EMTVE:GXGXR, HVTKPTX:VPEKL:SSLS-AA¹⁷-LFF:DDSSNVI:LKVYP:NMTVE:SXGXH, YVPKPXX:VPEKL:SSLS-AA¹⁷-LFF:DDSSNVI:LKVYP:NMTVE:SXGXH, TVPKPXX:VPEQL:SSLS-AA¹⁷-LFF:DDSSNVI:LKVYP:NMTVE:AXGXH, AVPKAXX:VPEKL:SSLS-AA¹⁷-LFF:DSSNNVI:LKVYP:NMTVE:AXGXH, KVGKAXX:VPEKL:SSLS-AA¹⁷-LFF:DDMGVPT:LKVYP:EGMSTVE:XGXR, KASKAXX:VPEKL:SSLS-AA¹⁷-LFF:DKGVVTY:LKVYP:GMTVE:EXGXR, GSAGPXX:VPEKM:SSLS-AA¹⁷-LFF:NDKQQII:LKVYP:GMTVE:RXGXS, AAPASXX:VPERL:SSLS-AA¹⁷-LFF:DAANNVV:LKVYP:DMTVE:AXGXR, STPPTXX:VPERL:SSLS-AA¹⁷-LFF:DSANNVV:LKVYP:DMTVE:SXGXR, HVPKPXX:VPEKL:SSLS-AA¹⁷-LFF:DDSSNVI:LKVYP:NMTVE:SXGXH, RVPSTXX:VPEKT:SSLS-AA¹⁷-LFF:DNGRVLL:LKVYP:MITVE:XGXL, ASAAPXX:VPEAL:SSLS-AA¹⁷-LFF:VGRKPKV:LKVYP:MITVE:XKXS, ASASPXX:VPEDL:SSLS-AA¹⁷-LFF:IGKTPKI:LKVYP:MITVE:XKXS, ASASPXX:VPEDL:SSLS-AA¹⁷-LFF:VGRTPKV:LKVYP:MVTVE:XKXS, KIPKAXX:VPTEL:SSLS-AA¹⁷-LFF:DENEKVV:LKVYP:DMVVE:GXGXR, SIPKAXX:VPTEL:SSLS-AA¹⁷-LFF:DEYDKVV:LKVYP:EMVVE:GXGXR, HVTKPTX:APTKL:SSLS-AA¹⁷-LFF:DDSSNVI:LKVYP:NMVVR:SXGXH, YVPKPXX:APTKL:SSLS-AA¹⁷-LFF:DDSSNVI:LKVYP:NMVVR:SXGXH, TVPKPXX:APTQL:SSLS-AA¹⁷-LFF:DDSSNVI:LKVYP:NMVVR:AXGXH, AVPKAXX:APTKL:SSLS-AA¹⁷-LFF:DSSNNVI:LKVYP:NMVVK:AXGXH, KVGKAXX:VPTKL:SSLS-AA¹⁷-LFF:DDMGVPT:LKVYP:EGMSVAE:XGXR, KASKAXX:VPTKL:SSLS-AA¹⁷-LFF:DKGVVTY:LKVYP:GMAVS:EXGXR, GSAGPXX:TPTKM:SSLS-AA¹⁷-LFF:NDKQQII:LKVYP:GMVVD:RXGXS, AAPASXX:VPARL:SSLS-AA¹⁷-LFF:DAANNVV:LKVYP:DMVVE:AXGXR, STPPTXX:VPTRL:SSLS-AA¹⁷-LFF:DSANNVV:LKVYP:DMVVE:SXGXR, HVPKPXX:APTKL:SSLS-AA¹⁷-LFF:DDSSNVI:LKVYP:NMVVR:SXGXH, RVPSTXX:APVKT:SSLS-AA¹⁷-LFF:DNGRVLL:LKVYP:MIVEE:XGXL, ASAAPXX:VPQAL:SSLS-AA¹⁷-LFF:VGRKPKV:LKVYP:MIVRS:XKXS, ASASPXX:VSQDL:SSLS-AA¹⁷-LFF:IGKTPKI:LKVYP:MIVKS:XKXS, ASASPXX:VPQDL:SSLS-AA¹⁷-LFF:VGRTPKV:LKVYP:MVVKS:XKXS, NDEGLEX:VPTEE:SSLS-AA¹⁷-LFF:RIKPHQGQH:LKVYP:FLQHN:KXEXR, NDEGLEX:VPTGQ:SSLS-AA¹⁷-LFF:RIKPHQGQH:LKVYP:LEEHS:QXEXR, SSVKXQP:SRVHH:SSLS-AA¹⁷-LFF:EYVRKKPKL:LKVYP:RLEEH:LEXAXA, RNVQXRP:TQVQL:SSLS-AA¹⁷-LFF:EIVRKKPIF:LKVYP:TLEDH:LAXKXE, KIPKAXX:APTEL:NAIS-AA¹⁷-LYF:DENEKVV:LKKYR:DMVVR:GXGXR, GIPEPXX:APTKM:NAIS-AA¹⁷-LYF:DENKNVV:LKKYR:NMVVR:SXAXR, SIPKAXX:APTEL:NAIS-AA¹⁷-LYF:DEYDKVV:LKKYR:EMVVR:GXGXR, AVPKAXX:APTKL:NAIS-AA¹⁷-LYF:DSSNNVI:LKKYR:NMVVR:AXGXH, KVGKAXX:APTKL:NAIS-AA¹⁷-LYF:DDMGVPT:LKKYR:EGMSVVR:XGXR, KASKAXX:APTKL:NAIS-AA¹⁷-LYF:DKGVVTY:LKKYR:GMVVR:EXGXR, GSAGPXX:APTKM:NAIS-AA¹⁷-LYF:NDKQQII:LKKYR:GMVVR:RXGXS, AAPASXX:APTRL:NAIS-AA¹⁷-LYF:DAANNVV:LKKYR:DMVVR:AXGXR, STPPTXX:APTRL:NAIS-AA¹⁷-LYF:DSANNVV:LKKYR:DMVVR:SXGXR, RVPSTXX:APTKT:NAIS-AA¹⁷-LYF:DNGRVLL:LKKYR:MIVVR:XGXL, ASAAPXX:APTAL:NAIS-AA¹⁷-LYF:VGRKPKV:LKKYR:MIVVR:XKXS, ASASPXX:APTDL:NAIS-AA¹⁷-LYF:IGKTPKI:LKKYR:MIVVR:XKXS, ASASPXX:APTDL:NAIS-AA¹⁷-LYF:VGRTPKV:LKKYR:MVVVR:XKXS, KIPKAXX:VPTEL:NAIS-AA¹⁷-LYF:DENEKVV:LKKYR:DMVVE:GXGXR, GIPEPXX:VPEKM:NAIS-AA¹⁷-LYF:DENKNVV:LKKYR:NMTVE:SXAXR, SIPKAXX:VPTEL:NAIS-AA¹⁷-LYF:DEYDKVV:LKKYR:EMVVE:GXGXR, AVPKAXX:APTKL:NAIS-AA¹⁷-LYF:DSSNNVI:LKKYR:NMVVK:AXGXH, KVGKAXX:VPTKL:NAIS-AA¹⁷-LYF:DDMGVPT:LKKYR:EGMSVAE:XGXR, KASKAXX:VPTKL:NAIS-AA¹⁷-LYF:DKGVVTY:LKKYR:GMAVS:EXGXR, GSAGPXX:TPTKM:NAIS-AA¹⁷-LYF:NDKQQII:LKKYR:GMVVD:RXGXS, AAPASXX:VPARL:NAIS-AA¹⁷-LYF:DAANNVV:LKKYR:DMVVE:AXGXR, STPPTXX:VPTRL:NAIS-AA¹⁷-LYF:DSANNVV:LKKYR:DMVVE:SXGXR, RVPSTXX:APVKT:NAIS-AA¹⁷-LYF:DNGRVLL:LKKYR:MIVEE:XGXL, ASAAPXX:VPQAL:NAIS-AA¹⁷-LYF:VGRKPKV:LKKYR:MIVRS:XKXS, ASASPXX:VSQDL:NAIS-AA¹⁷-LYF:IGKTPKI:LKKYR:MIVKS:XKXS, ASASPXX:VPQDL:NAIS-AA¹⁷-LYF:VGRTPKV:LKKYR:MVVKS:XKXS, NDEGLEX:VPTEE:NAIS-AA¹⁷-LYF:RIKPHQGQH:LKKYR:FLQHN:KXEXR, NDEGLEX:VPTGQ:NAIS-AA¹⁷-LYF:RIKPHQGQH:LKKYR:LEEHS:QXEXR, SSVKXQP:SRVHH:NAIS-AA¹⁷-LYF:EYVRKKPKL:LKKYR:RLEEH:LEXAXA, RNVQXRP:TQVQL:NAIS-AA¹⁷-LYF:EIVRKKPIF:LKKYR:TLEDH:LAXKXE, KIPKAXX:APTEL:SATS-AA¹⁷-LYY:DENEKVV:LRKHR:DMVVK:GXGXR, GIPEPXX:APTKM:SATS-AA¹⁷-LYY:DENKNVV:LRKHR:NMVVK:SXAXR, SIPKAXX:APTEL:SATS-AA¹⁷-LYY:DEYDKVV:LRKHR:EMVVK:GXGXR, HVTKPTX:APTKL:SATS-AA¹⁷-LYY:DDSSNVI:LRKHR:NMVVK:SXGXH, YVPKPXX:APTKL:SATS-AA¹⁷-LYY:DDSSNVI:LRKHR:NMVVK:SXGXH, TVPKPXX:APTQL:SATS-AA¹⁷-LYY:DDSSNVI:LRKHR:NMVVK:AXGXH, KVGKAXX:APTKL:SATS-AA¹⁷-LYY:DDMGVPT:LRKHR:EGMSVVK:XGXR, KASKAXX:APTKL:SATS-AA¹⁷-LYY:DKGVVTY:LRKHR:GMVVK:EXGXR, GSAGPXX:APTKM:SATS-AA¹⁷-LYY:NDKQQII:LRKHR:GMVVK:RXGXS, AAPASXX:APTRL:SATS-AA¹⁷-LYY:DAANNVV:LRKHR:DMVVK:AXGXR, STPPTXX:APTRL:SATS-AA¹⁷-LYY:DSANNVV:LRKHR:DMVVK:SXGXR, HVPKPXX:APTKL:SATS-AA¹⁷-LYY:DDSSNVI:LRKHR:NMVVK:SXGXH, RVPSTXX:APTKT:SATS-AA¹⁷-LYY:DNGRVLL:LRKHR:MIVVK:XGXL, ASAAPXX:APTAL:SATS-AA¹⁷-LYY:VGRKPKV:LRKHR:MIVVK:XKXS, ASASPXX:APTDL:SATS-AA¹⁷-LYY:IGKTPKI:LRKHR:MIVVK:XKXS, ASASPXX:APTDL:SATS-AA¹⁷-LYY:VGRTPKV:LRKHR:MVVVK:XKXS, KIPKAXX:VPTEL:SATS-AA¹⁷-LYY:DENEKVV:LRKHR:DMVVE:GXGXR, GIPEPXX:VPEKM:SATS-AA¹⁷-LYY:DENKNVV:LRKHR:NMTVE:SXAXR, SIPKAXX:VPTEL:SATS-AA¹⁷-LYY:DEYDKVV:LRKHR:EMVVE:GXGXR, HVTKPTX:APTKL:SATS-AA¹⁷-LYY:DDSSNVI:LRKHR:NMVVR:SXGXH, YVPKPXX:APTKL:SATS-AA¹⁷-LYY:DDSSNVI:LRKHR:NMVVR:SXGXH, TVPKPXX:APTQL:SATS-AA¹⁷-LYY:DDSSNVI:LRKHR:NMVVR:AXGXH, KVGKAXX:VPTKL:SATS-AA¹⁷-LYY:DDMGVPT:LRKHR:EGMSVAE:XGXR, KASKAXX:VPTKL:SATS-AA¹⁷-LYY:DKGVVTY:LRKHR:GMAVS:EXGXR, GSAGPXX:TPTKM:SATS-AA¹⁷-LYY:NDKQQII:LRKHR:GMVVD:RXGXS, AAPASXX:VPARL:SATS-AA¹⁷-LYY:DAANNVV:LRKHR:DMVVE:AXGXR, STPPTXX:VPTRL:SATS-AA¹⁷-LYY:DSANNVV:LRKHR:DMVVE:SXGXR, HVPKPXX:APTKL:SATS-AA¹⁷-LYY:DDSSNVI:LRKHR:NMVVR:SXGXH, RVPSTXX:APVKT:SATS-AA¹⁷-LYY:DNGRVLL:LRKHR:MIVEE:XGXL, ASAAPXX:VPQAL:SATS-AA¹⁷-LYY:VGRKPKV:LRKHR:MIVRS:XKXS, ASASPXX:VSQDL:SATS-AA¹⁷-LYY:IGKTPKI:LRKHR:MIVKS:XKXS, ASASPXX:VPQDL:SATS-AA¹⁷-LYY:VGRTPKV:LRKHR:MVVKS:XKXS, NDEGLEX:VPTEE:SATS-AA¹⁷-LYY:RIKPHQGQH:LRKHR:FLQHN:KXEXR, NDEGLEX:VPTGQ:SATS-AA¹⁷-LYY:RIKPHQGQH:LRKHR:LEEHS:QXEXR, SSVKXQP:SRVHH:SATS-AA¹⁷-LYY:EYVRKKPKL:LRKHR:RLEEH:LEXAXA, RNVQXRP:TQVQL:SATS-AA¹⁷-LYY:EIVRKKPIF:LRKHR:TLEDH:LAXKXE, KIPKAXX:VPTEL:SPIS-AA¹⁷-LYK:DENEKVV:LKYHY:DMVAE:GXGXR, GIPEPXX:VPTKM:SPIS-AA¹⁷-LYK:DENKNVV:LKYHY:NMVAE:SXAXR, SIPKAXX:VPTEL:SPIS-AA¹⁷-LYK:DEYDKVV:LKYHY:EMVAE:GXGXR, HVTKPTX:VPTKL:SPIS-AA¹⁷-LYK:DDSSNVI:LKYHY:NMVAE:SXGXH, YVPKPXX:VPTKL:SPIS-AA¹⁷-LYK:DDSSNVI:LKYHY:NMVAE:SXGXH, TVPKPXX:VPTQL:SPIS-AA¹⁷-LYK:DDSSNVI:LKYHY:NMVAE:AXGXH, AVPKAXX:VPTKL:SPIS-AA¹⁷-LYK:DSSNNVI:LKYHY:NMVAE:AXGXH, KASKAXX:VPTKL:SPIS-AA¹⁷-LYK:DKGVVTY:LKYHY:GMVAE:EXGXR, GSAGPXX:VPTKM:SPIS-AA¹⁷-LYK:NDKQQII:LKYHY:GMVAE:RXGXS, AAPASXX:VPTRL:SPIS-AA¹⁷-LYK:DAANNVV:LKYHY:DMVAE:AXGXR, STPPTXX:VPTRL:SPIS-AA¹⁷-LYK:DSANNVV:LKYHY:DMVAE:SXGXR, HVPKPXX:VPTKL:SPIS-AA¹⁷-LYK:DDSSNVI:LKYHY:NMVAE:SXGXH, RVPSTXX:VPTKT:SPIS-AA¹⁷-LYK:DNGRVLL:LKYHY:MIVAE:XGXL, ASAAPXX:VPTAL:SPIS-AA¹⁷-LYK:VGRKPKV:LKYHY:MIVAE:XKXS, ASASPXX:VPTDL:SPIS-AA¹⁷-LYK:IGKTPKI:LKYHY:MIVAE:XKXS, ASASPXX:VPTDL:SPIS-AA¹⁷-LYK:VGRTPKV:LKYHY:MVVAE:XKXS, KIPKAXX:VPTEL:SPIS-AA¹⁷-LYK:DENEKVV:LKYHY:DMVVE:GXGXR, GIPEPXX:VPEKM:SPIS-AA¹⁷-LYK:DENKNVV:LKYHY:NMTVE:SXAXR, SIPKAXX:VPTEL:SPIS-AA¹⁷-LYK:DEYDKVV:LKYHY:EMVVE:GXGXR, HVTKPTX:APTKL:SPIS-AA¹⁷-LYK:DDSSNVI:LKYHY:NMVVR:SXGXH, YVPKPXX:APTKL:SPIS-AA¹⁷-LYK:DDSSNVI:LKYHY:NMVVR:SXGXH, TVPKPXX:APTQL:SPIS-AA¹⁷-LYK:DDSSNVI:LKYHY:NMVVR:AXGXH, AVPKAXX:APTKL:SPIS-AA¹⁷-LYK:DSSNNVI:LKYHY:NMVVK:AXGXH, KASKAXX:VPTKL:SPIS-AA¹⁷-LYK:DKGVVTY:LKYHY:GMAVS:EXGXR, GSAGPXX:TPTKM:SPIS-AA¹⁷-LYK:NDKQQII:LKYHY:GMVVD:RXGXS, AAPASXX:VPARL:SPIS-AA¹⁷-LYK:DAANNVV:LKYHY:DMVVE:AXGXR, STPPTXX:VPTRL:SPIS-AA¹⁷-LYK:DSANNVV:LKYHY:DMVVE:SXGXR, HVPKPXX:APTKL:SPIS-AA¹⁷-LYK:DDSSNVI:LKYHY:NMVVR:SXGXH, RVPSTXX:APVKT:SPIS-AA¹⁷-LYK:DNGRVLL:LKYHY:MIVEE:XGXL, ASAAPXX:VPQAL:SPIS-AA¹⁷-LYK:VGRKPKV:LKYHY:MIVRS:XKXS, ASASPXX:VSQDL:SPIS-AA¹⁷-LYK:IGKTPKI:LKYHY:MIVKS:XKXS, ASASPXX:VPQDL:SPIS-AA¹⁷-LYK:VGRTPKV:LKYHY:MVVKS:XKXS, NDEGLEX:VPTEE:SPIS-AA¹⁷-LYK:RIKPHQGQH:LKYHY:FLQHN:KXEXR, NDEGLEX:VPTGQ:SPIS-AA¹⁷-LYK:RIKPHQGQH:LKYHY:LEEHS:QXEXR, SSVKXQP:SRVHH:SPIS-AA¹⁷-LYK:EYVRKKPKL:LKYHY:RLEEH:LEXAXA, RNVQXRP:TQVQL:SPIS-AA¹⁷-LYK:EIVRKKPIF:LKYHY:TLEDH:LAXKXE, KIPKAXX:VPTEL:EPIS-AA¹⁷-LYL:DENEKVV:KFKYE:DMAVS:GXGXR, GIPEPXX:VPTKM:EPIS-AA¹⁷-LYL:DENKNVV:KFKYE:NMAVS:SXAXR, SIPKAXX:VPTEL:EPIS-AA¹⁷-LYL:DEYDKVV:KFKYE:EMAVS:GXGXR, HVTKPTX:VPTKL:EPIS-AA¹⁷-LYL:DDSSNVI:KFKYE:NMAVS:SXGXH, YVPKPXX:VPTKL:EPIS-AA¹⁷-LYL:DDSSNVI:KFKYE:NMAVS:SXGXH, TVPKPXX:VPTQL:EPIS-AA¹⁷-LYL:DDSSNVI:KFKYE:NMAVS:AXGXH, AVPKAXX:VPTKL:EPIS-AA¹⁷-LYL:DSSNNVI:KFKYE:NMAVS:AXGXH, KVGKAXX:VPTKL:EPIS-AA¹⁷-LYL:DDMGVPT:KFKYE:EGMSAVS:XGXR, GSAGPXX:VPTKM:EPIS-AA¹⁷-LYL:NDKQQII:KFKYE:GMAVS:RXGXS, AAPASXX:VPTRL:EPIS-AA¹⁷-LYL:DAANNVV:KFKYE:DMAVS:AXGXR, STPPTXX:VPTRL:EPIS-AA¹⁷-LYL:DSANNVV:KFKYE:DMAVS:SXGXR, HVPKPXX:VPTKL:EPIS-AA¹⁷-LYL:DDSSNVI:KFKYE:NMAVS:SXGXH, RVPSTXX:VPTKT:EPIS-AA¹⁷-LYL:DNGRVLL:KFKYE:MIAVS:XGXL, ASAAPXX:VPTAL:EPIS-AA¹⁷-LYL:VGRKPKV:KFKYE:MIAVS:XKXS, ASASPXX:VPTDL:EPIS-AA¹⁷-LYL:IGKTPKI:KFKYE:MIAVS:XKXS, ASASPXX:VPTDL:EPIS-AA¹⁷-LYL:VGRTPKV:KFKYE:MVAVS:XKXS, KIPKAXX:VPTEL:EPIS-AA¹⁷-LYL:DENEKVV:KFKYE:DMVVE:GXGXR, GIPEPXX:VPEKM:EPIS-AA¹⁷-LYL:DENKNVV:KFKYE:NMTVE:SXAXR, SIPKAXX:VPTEL:EPIS-AA¹⁷-LYL:DEYDKVV:KFKYE:EMVVE:GXGXR, HVTKPTX:APTKL:EPIS-AA¹⁷-LYL:DDSSNVI:KFKYE:NMVVR:SXGXH, YVPKPXX:APTKL:EPIS-AA¹⁷-LYL:DDSSNVI:KFKYE:NMVVR:SXGXH, TVPKPXX:APTQL:EPIS-AA¹⁷-LYL:DDSSNVI:KFKYE:NMVVR:AXGXH, AVPKAXX:APTKL:EPIS-AA¹⁷-LYL:DSSNNVI:KFKYE:NMVVK:AXGXH, KVGKAXX:VPTKL:EPIS-AA¹⁷-LYL:DDMGVPT:KFKYE:EGMSVAE:XGXR, GSAGPXX:TPTKM:EPIS-AA¹⁷-LYL:NDKQQII:KFKYE:GMVVD:RXGXS, AAPASXX:VPARL:EPIS-AA¹⁷-LYL:DAANNVV:KFKYE:DMVVE:AXGXR, STPPTXX:VPTRL:EPIS-AA¹⁷-LYL:DSANNVV:KFKYE:DMVVE:SXGXR, HVPKPXX:APTKL:EPIS-AA¹⁷-LYL:DDSSNVI:KFKYE:NMVVR:SXGXH, RVPSTXX:APVKT:EPIS-AA¹⁷-LYL:DNGRVLL:KFKYE:MIVEE:XGXL, ASAAPXX:VPQAL:EPIS-AA¹⁷-LYL:VGRKPKV:KFKYE:MIVRS:XKXS, ASASPXX:VSQDL:EPIS-AA¹⁷-LYL:IGKTPKI:KFKYE:MIVKS:XKXS, ASASPXX:VPQDL:EPIS-AA¹⁷-LYL:VGRTPKV:KFKYE:MVVKS:XKXS, NDEGLEX:VPTEE:EPIS-AA¹⁷-LYL:RIKPHQGQH:KFKYE:FLQHN:KXEXR, NDEGLEX:VPTGQ:EPIS-AA¹⁷-LYL:RIKPHQGQH:KFKYE:LEEHS:QXEXR, SSVKXQP:SRVHH:EPIS-AA¹⁷-LYL:EYVRKKPKL:KFKYE:RLEEH:LEXAXA, RNVQXRP:TQVQL:EPIS-AA¹⁷-LYL:EIVRKKPIF:KFKYE:TLEDH:LAXKXE, KIPKAXX:TPTEL:SPIN-AA¹⁷-LYF:DENEKVV:YGKIP:DMVVD:GXGXR, GIPEPXX:TPTKM:SPIN-AA¹⁷-LYF:DENKNVV:YGKIP:NMVVD:SXAXR, SIPKAXX:TPTEL:SPIN-AA¹⁷-LYF:DEYDKVV:YGKIP:EMVVD:GXGXR, HVTKPTX:TPTKL:SPIN-AA¹⁷-LYF:DDSSNVI:YGKIP:NMVVD:SXGXH, YVPKPXX:TPTKL:SPIN-AA¹⁷-LYF:DDSSNVI:YGKIP:NMVVD:SXGXH, TVPKPXX:TPTQL:SPIN-AA¹⁷-LYF:DDSSNVI:YGKIP:NMVVD:AXGXH, AVPKAXX:TPTKL:SPIN-AA¹⁷-LYF:DSSNNVI:YGKIP:NMVVD:AXGXH, KVGKAXX:TPTKL:SPIN-AA¹⁷-LYF:DDMGVPT:YGKIP:EGMSVVD:XGXR, KASKAXX:TPTKL:SPIN-AA¹⁷-LYF:DKGVVTY:YGKIP:GMVVD:EXGXR, AAPASXX:TPTRL:SPIN-AA¹⁷-LYF:DAANNVV:YGKIP:DMVVD:AXGXR, STPPTXX:TPTRL:SPIN-AA¹⁷-LYF:DSANNVV:YGKIP:DMVVD:SXGXR, HVPKPXX:TPTKL:SPIN-AA¹⁷-LYF:DDSSNVI:YGKIP:NMVVD:SXGXH, RVPSTXX:TPTKT:SPIN-AA¹⁷-LYF:DNGRVLL:YGKIP:MIVVD:XGXL, ASAAPXX:TPTAL:SPIN-AA¹⁷-LYF:VGRKPKV:YGKIP:MIVVD:XKXS, ASASPXX:TPTDL:SPIN-AA¹⁷-LYF:IGKTPKI:YGKIP:MIVVD:XKXS, ASASPXX:TPTDL:SPIN-AA¹⁷-LYF:VGRTPKV:YGKIP:MVVVD:XKXS, KIPKAXX:VPTEL:SPIN-AA¹⁷-LYF:DENEKVV:YGKIP:DMVVE:GXGXR, GIPEPXX:VPEKM:SPIN-AA¹⁷-LYF:DENKNVV:YGKIP:NMTVE:SXAXR, SIPKAXX:VPTEL:SPIN-AA¹⁷-LYF:DEYDKVV:YGKIP:EMVVE:GXGXR, HVTKPTX:APTKL:SPIN-AA¹⁷-LYF:DDSSNVI:YGKIP:NMVVR:SXGXH, YVPKPXX:APTKL:SPIN-AA¹⁷-LYF:DDSSNVI:YGKIP:NMVVR:SXGXH, TVPKPXX:APTQL:SPIN-AA¹⁷-LYF:DDSSNVI:YGKIP:NMVVR:AXGXH, AVPKAXX:APTKL:SPIN-AA¹⁷-LYF:DSSNNVI:YGKIP:NMVVK:AXGXH, KVGKAXX:VPTKL:SPIN-AA¹⁷-LYF:DDMGVPT:YGKIP:EGMSVAE:XGXR, KASKAXX:VPTKL:SPIN-AA¹⁷-LYF:DKGVVTY:YGKIP:GMAVS:EXGXR, AAPASXX:VPARL:SPIN-AA¹⁷-LYF:DAANNVV:YGKIP:DMVVE:AXGXR, STPPTXX:VPTRL:SPIN-AA¹⁷-LYF:DSANNVV:YGKIP:DMVVE:SXGXR, HVPKPXX:APTKL:SPIN-AA¹⁷-LYF:DDSSNVI:YGKIP:NMVVR:SXGXH, RVPSTXX:APVKT:SPIN-AA¹⁷-LYF:DNGRVLL:YGKIP:MIVEE:XGXL, ASAAPXX:VPQAL:SPIN-AA¹⁷-LYF:VGRKPKV:YGKIP:MIVRS:XKXS, ASASPXX:VSQDL:SPIN-AA¹⁷-LYF:IGKTPKI:YGKIP:MIVKS:XKXS, ASASPXX:VPQDL:SPIN-AA¹⁷-LYF:VGRTPKV:YGKIP:MVVKS:XKXS, NDEGLEX:VPTEE:SPIN-AA¹⁷-LYF:RIKPHQGQH:YGKIP:FLQHN:KXEXR, NDEGLEX:VPTGQ:SPIN-AA¹⁷-LYF:RIKPHQGQH:YGKIP:LEEHS:QXEXR, SSVKXQP:SRVHH:SPIN-AA¹⁷-LYF:EYVRKKPKL:YGKIP:RLEEH:LEXAXA, RNVQXRP:TQVQL:SPIN-AA¹⁷-LYF:EIVRKKPIF:YGKIP:TLEDH:LAXKXE, KIPKAXX:VPAEL:SPIS-AA¹⁷-LYI:DENEKVV:YKQYE:DMVVE:GXGXR, GIPEPXX:VPAKM:SPIS-AA¹⁷-LYI:DENKNVV:YKQYE:NMVVE:SXAXR, SIPKAXX:VPAEL:SPIS-AA¹⁷-LYI:DEYDKVV:YKQYE:EMVVE:GXGXR, HVTKPTX:VPAKL:SPIS-AA¹⁷-LYI:DDSSNVI:YKQYE:NMVVE:SXGXH, YVPKPXX:VPAKL:SPIS-AA¹⁷-LYI:DDSSNVI:YKQYE:NMVVE:SXGXH, TVPKPXX:VPAQL:SPIS-AA¹⁷-LYI:DDSSNVI:YKQYE:NMVVE:AXGXH, AVPKAXX:VPAKL:SPIS-AA¹⁷-LYI:DSSNNVI:YKQYE:NMVVE:AXGXH, KVGKAXX:VPAKL:SPIS-AA¹⁷-LYI:DDMGVPT:YKQYE:EGMSVVE:XGXR, KASKAXX:VPAKL:SPIS-AA¹⁷-LYI:DKGVVTY:YKQYE:GMVVE:EXGXR, GSAGPXX:VPAKM:SPIS-AA¹⁷-LYI:NDKQQII:YKQYE:GMVVE:RXGXS, STPPTXX:VPARL:SPIS-AA¹⁷-LYI:DSANNVV:YKQYE:DMVVE:SXGXR, HVPKPXX:VPAKL:SPIS-AA¹⁷-LYI:DDSSNVI:YKQYE:NMVVE:SXGXH, RVPSTXX:VPAKT:SPIS-AA¹⁷-LYI:DNGRVLL:YKQYE:MIVVE:XGXL, ASAAPXX:VPAAL:SPIS-AA¹⁷-LYI:VGRKPKV:YKQYE:MIVVE:XKXS, ASASPXX:VPADL:SPIS-AA¹⁷-LYI:IGKTPKI:YKQYE:MIVVE:XKXS, ASASPXX:VPADL:SPIS-AA¹⁷-LYI:VGRTPKV:YKQYE:MVVVE:XKXS, KIPKAXX:VPTEL:SPIS-AA¹⁷-LYI:DENEKVV:YKQYE:DMVVE:GXGXR, GIPEPXX:VPEKM:SPIS-AA¹⁷-LYI:DENKNVV:YKQYE:NMTVE:SXAXR, SIPKAXX:VPTEL:SPIS-AA¹⁷-LYI:DEYDKVV:YKQYE:EMVVE:GXGXR, HVTKPTX:APTKL:SPIS-AA¹⁷-LYI:DDSSNVI:YKQYE:NMVVR:SXGXH, YVPKPXX:APTKL:SPIS-AA¹⁷-LYI:DDSSNVI:YKQYE:NMVVR:SXGXH, TVPKPXX:APTQL:SPIS-AA¹⁷-LYI:DDSSNVI:YKQYE:NMVVR:AXGXH, AVPKAXX:APTKL:SPIS-AA¹⁷-LYI:DSSNNVI:YKQYE:NMVVK:AXGXH, KVGKAXX:VPTKL:SPIS-AA¹⁷-LYI:DDMGVPT:YKQYE:EGMSVAE:XGXR, KASKAXX:VPTKL:SPIS-AA¹⁷-LYI:DKGVVTY:YKQYE:GMAVS:EXGXR, GSAGPXX:TPTKM:SPIS-AA¹⁷-LYI:NDKQQII:YKQYE:GMVVD:RXGXS, STPPTXX:VPTRL:SPIS-AA¹⁷-LYI:DSANNVV:YKQYE:DMVVE:SXGXR, HVPKPXX:APTKL:SPIS-AA¹⁷-LYI:DDSSNVI:YKQYE:NMVVR:SXGXH, RVPSTXX:APVKT:SPIS-AA¹⁷-LYI:DNGRVLL:YKQYE:MIVEE:XGXL, ASAAPXX:VPQAL:SPIS-AA¹⁷-LYI:VGRKPKV:YKQYE:MIVRS:XKXS, ASASPXX:VSQDL:SPIS-AA¹⁷-LYI:IGKTPKI:YKQYE:MIVKS:XKXS, ASASPXX:VPQDL:SPIS-AA¹⁷-LYI:VGRTPKV:YKQYE:MVVKS:XKXS, NDEGLEX:VPTEE:SPIS-AA¹⁷-LYI:RIKPHQGQH:YKQYE:FLQHN:KXEXR, NDEGLEX:VPTGQ:SPIS-AA¹⁷-LYI:RIKPHQGQH:YKQYE:LEEHS:QXEXR, SSVKXQP:SRVHH:SPIS-AA¹⁷-LYI:EYVRKKPKL:YKQYE:RLEEH:LEXAXA, RNVQXRP:TQVQL:SPIS-AA¹⁷-LYI:EIVRKKPIF:YKQYE:TLEDH:LAXKXE, KIPKAXX:VPTEL:SPIS-AA¹⁷-LFI:DENEKVV:YKQYE:DMVVE:GXGXR, GIPEPXX:VPTKM:SPIS-AA¹⁷-LFI:DENKNVV:YKQYE:NMVVE:SXAXR, SIPKAXX:VPTEL:SPIS-AA¹⁷-LFI:DEYDKVV:YKQYE:EMVVE:GXGXR, HVTKPTX:VPTKL:SPIS-AA¹⁷-LFI:DDSSNVI:YKQYE:NMVVE:SXGXH, YVPKPXX:VPTKL:SPIS-AA¹⁷-LFI:DDSSNVI:YKQYE:NMVVE:SXGXH, TVPKPXX:VPTQL:SPIS-AA¹⁷-LFI:DDSSNVI:YKQYE:NMVVE:AXGXH, AVPKAXX:VPTKL:SPIS-AA¹⁷-LFI:DSSNNVI:YKQYE:NMVVE:AXGXH, KVGKAXX:VPTKL:SPIS-AA¹⁷-LFI:DDMGVPT:YKQYE:EGMSVVE:XGXR, KASKAXX:VPTKL:SPIS-AA¹⁷-LFI:DKGVVTY:YKQYE:GMVVE:EXGXR, GSAGPXX:VPTKM:SPIS-AA¹⁷-LFI:NDKQQII:YKQYE:GMVVE:RXGXS, AAPASXX:VPTRL:SPIS-AA¹⁷-LFI:DAANNVV:YKQYE:DMVVE:AXGXR, HVPKPXX:VPTKL:SPIS-AA¹⁷-LFI:DDSSNVI:YKQYE:NMVVE:SXGXH, RVPSTXX:VPTKT:SPIS-AA¹⁷-LFI:DNGRVLL:YKQYE:MIVVE:XGXL, ASAAPXX:VPTAL:SPIS-AA¹⁷-LFI:VGRKPKV:YKQYE:MIVVE:XKXS, ASASPXX:VPTDL:SPIS-AA¹⁷-LFI:IGKTPKI:YKQYE:MIVVE:XKXS, ASASPXX:VPTDL:SPIS-AA¹⁷-LFI:VGRTPKV:YKQYE:MVVVE:XKXS, GIPEPXX:VPEKM:SPIS-AA¹⁷-LFI:DENKNVV:YKQYE:NMTVE:SXAXR, HVTKPTX:APTKL:SPIS-AA¹⁷-LFI:DDSSNVI:YKQYE:NMVVR:SXGXH, YVPKPXX:APTKL:SPIS-AA¹⁷-LFI:DDSSNVI:YKQYE:NMVVR:SXGXH, TVPKPXX:APTQL:SPIS-AA¹⁷-LFI:DDSSNVI:YKQYE:NMVVR:AXGXH, AVPKAXX:APTKL:SPIS-AA¹⁷-LFI:DSSNNVI:YKQYE:NMVVK:AXGXH, KVGKAXX:VPTKL:SPIS-AA¹⁷-LFI:DDMGVPT:YKQYE:EGMSVAE:XGXR, KASKAXX:VPTKL:SPIS-AA¹⁷-LFI:DKGVVTY:YKQYE:GMAVS:EXGXR, GSAGPXX:TPTKM:SPIS-AA¹⁷-LFI:NDKQQII:YKQYE:GMVVD:RXGXS, AAPASXX:VPARL:SPIS-AA¹⁷-LFI:DAANNVV:YKQYE:DMVVE:AXGXR, HVPKPXX:APTKL:SPIS-AA¹⁷-LFI:DDSSNVI:YKQYE:NMVVR:SXGXH, RVPSTXX:APVKT:SPIS-AA¹⁷-LFI:DNGRVLL:YKQYE:MIVEE:XGXL, ASAAPXX:VPQAL:SPIS-AA¹⁷-LFI:VGRKPKV:YKQYE:MIVRS:XKXS, ASASPXX:VSQDL:SPIS-AA¹⁷-LFI:IGKTPKI:YKQYE:MIVKS:XKXS, ASASPXX:VPQDL:SPIS-AA¹⁷-LFI:VGRTPKV:YKQYE:MVVKS:XKXS, NDEGLEX:VPTEE:SPIS-AA¹⁷-LFI:RIKPHQGQH:YKQYE:FLQHN:KXEXR, NDEGLEX:VPTGQ:SPIS-AA¹⁷-LFI:RIKPHQGQH:YKQYE:LEEHS:QXEXR, SSVKXQP:SRVHH:SPIS-AA¹⁷-LFI:EYVRKKPKL:YKQYE:RLEEH:LEXAXA, RNVQXRP:TQVQL:SPIS-AA¹⁷-LFI:EIVRKKPIF:YKQYE:TLEDH:LAXKXE, KIPKAXX:APVEL:KPLS-AA¹⁷-LYV:DENEKVV:DHHKD:DMVEE:GXGXR, GIPEPXX:APVKM:KPLS-AA¹⁷-LYV:DENKNVV:DHHKD:NMVEE:SXAXR, SIPKAXX:APVEL:KPLS-AA¹⁷-LYV:DEYDKVV:DHHKD:EMVEE:GXGXR, HVTKPTX:APVKL:KPLS-AA¹⁷-LYV:DDSSNVI:DHHKD:NMVEE:SXGXH, YVPKPXX:APVKL:KPLS-AA¹⁷-LYV:DDSSNVI:DHHKD:NMVEE:SXGXH, TVPKPXX:APVQL:KPLS-AA¹⁷-LYV:DDSSNVI:DHHKD:NMVEE:AXGXH, AVPKAXX:APVKL:KPLS-AA¹⁷-LYV:DSSNNVI:DHHKD:NMVEE:AXGXH, KVGKAXX:APVKL:KPLS-AA¹⁷-LYV:DDMGVPT:DHHKD:EGMSVEE:XGXR, KASKAXX:APVKL:KPLS-AA¹⁷-LYV:DKGVVTY:DHHKD:GMVEE:EXGXR, GSAGPXX:APVKM:KPLS-AA¹⁷-LYV:NDKQQII:DHHKD:GMVEE:RXGXS, AAPASXX:APVRL:KPLS-AA¹⁷-LYV:DAANNVV:DHHKD:DMVEE:AXGXR, STPPTXX:APVRL:KPLS-AA¹⁷-LYV:DSANNVV:DHHKD:DMVEE:SXGXR, HVPKPXX:APVKL:KPLS-AA¹⁷-LYV:DDSSNVI:DHHKD:NMVEE:SXGXH, ASAAPXX:APVAL:KPLS-AA¹⁷-LYV:VGRKPKV:DHHKD:MIVEE:XKXS, ASASPXX:APVDL:KPLS-AA¹⁷-LYV:IGKTPKI:DHHKD:MIVEE:XKXS, ASASPXX:APVDL:KPLS-AA¹⁷-LYV:VGRTPKV:DHHKD:MVVEE:XKXS, KIPKAXX:VPTEL:KPLS-AA¹⁷-LYV:DENEKVV:DHHKD:DMVVE:GXGXR, GIPEPXX:VPEKM:KPLS-AA¹⁷-LYV:DENKNVV:DHHKD:NMTVE:SXAXR, SIPKAXX:VPTEL:KPLS-AA¹⁷-LYV:DEYDKVV:DHHKD:EMVVE:GXGXR, HVTKPTX:APTKL:KPLS-AA¹⁷-LYV:DDSSNVI:DHHKD:NMVVR:SXGXH, YVPKPXX:APTKL:KPLS-AA¹⁷-LYV:DDSSNVI:DHHKD:NMVVR:SXGXH, TVPKPXX:APTQL:KPLS-AA¹⁷-LYV:DDSSNVI:DHHKD:NMVVR:AXGXH, AVPKAXX:APTKL:KPLS-AA¹⁷-LYV:DSSNNVI:DHHKD:NMVVK:AXGXH, KVGKAXX:VPTKL:KPLS-AA¹⁷-LYV:DDMGVPT:DHHKD:EGMSVAE:XGXR, KASKAXX:VPTKL:KPLS-AA¹⁷-LYV:DKGVVTY:DHHKD:GMAVS:EXGXR, GSAGPXX:TPTKM:KPLS-AA¹⁷-LYV:NDKQQII:DHHKD:GMVVD:RXGXS, AAPASXX:VPARL:KPLS-AA¹⁷-LYV:DAANNVV:DHHKD:DMVVE:AXGXR, STPPTXX:VPTRL:KPLS-AA¹⁷-LYV:DSANNVV:DHHKD:DMVVE:SXGXR, HVPKPXX:APTKL:KPLS-AA¹⁷-LYV:DDSSNVI:DHHKD:NMVVR:SXGXH, ASAAPXX:VPQAL:KPLS-AA¹⁷-LYV:VGRKPKV:DHHKD:MIVRS:XKXS, ASASPXX:VSQDL:KPLS-AA¹⁷-LYV:IGKTPKI:DHHKD:MIVKS:XKXS, ASASPXX:VPQDL:KPLS-AA¹⁷-LYV:VGRTPKV:DHHKD:MVVKS:XKXS, NDEGLEX:VPTEE:KPLS-AA¹⁷-LYV:RIKPHQGQH:DHHKD:FLQHN:KXEXR, NDEGLEX:VPTGQ:KPLS-AA¹⁷-LYV:RIKPHQGQH:DHHKD:LEEHS:QXEXR, SSVKXQP:SRVHH:KPLS-AA¹⁷-LYV:EYVRKKPKL:DHHKD:RLEEH:LEXAXA, RNVQXRP:TQVQL:KPLS-AA¹⁷-LYV:EIVRKKPIF:DHHKD:TLEDH:LAXKXE, KIPKAXX:VPQEL:EPLP-AA¹⁷-VYY:DENEKVV:EQLSN:DMVRS:GXGXR, GIPEPXX:VPQKM:EPLP-AA¹⁷-VYY:DENKNVV:EQLSN:NMVRS:SXAXR, SIPKAXX:VPQEL:EPLP-AA¹⁷-VYY:DEYDKVV:EQLSN:EMVRS:GXGXR, HVTKPTX:VPQKL:EPLP-AA¹⁷-VYY:DDSSNVI:EQLSN:NMVRS:SXGXH, YVPKPXX:VPQKL:EPLP-AA¹⁷-VYY:DDSSNVI:EQLSN:NMVRS:SXGXH, TVPKPXX:VPQQL:EPLP-AA¹⁷-VYY:DDSSNVI:EQLSN:NMVRS:AXGXH, AVPKAXX:VPQKL:EPLP-AA¹⁷-VYY:DSSNNVI:EQLSN:NMVRS:AXGXH, KVGKAXX:VPQKL:EPLP-AA¹⁷-VYY:DDMGVPT:EQLSN:EGMSVRS:XGXR, KASKAXX:VPQKL:EPLP-AA¹⁷-VYY:DKGVVTY:EQLSN:GMVRS:EXGXR, GSAGPXX:VPQKM:EPLP-AA¹⁷-VYY:NDKQQII:EQLSN:GMVRS:RXGXS, AAPASXX:VPQRL:EPLP-AA¹⁷-VYY:DAANNVV:EQLSN:DMVRS:AXGXR, STPPTXX:VPQRL:EPLP-AA¹⁷-VYY:DSANNVV:EQLSN:DMVRS:SXGXR, HVPKPXX:VPQKL:EPLP-AA¹⁷-VYY:DDSSNVI:EQLSN:NMVRS:SXGXH, RVPSTXX:VPQKT:EPLP-AA¹⁷-VYY:DNGRVLL:EQLSN:MIVRS:XGXL, ASASPXX:VPQDL:EPLP-AA¹⁷-VYY:IGKTPKI:EQLSN:MIVRS:XKXS, ASASPXX:VPQDL:EPLP-AA¹⁷-VYY:VGRTPKV:EQLSN:MVVRS:XKXS, KIPKAXX:VPTEL:EPLP-AA¹⁷-VYY:DENEKVV:EQLSN:DMVVE:GXGXR, GIPEPXX:VPEKM:EPLP-AA¹⁷-VYY:DENKNVV:EQLSN:NMTVE:SXAXR, SIPKAXX:VPTEL:EPLP-AA¹⁷-VYY:DEYDKVV:EQLSN:EMVVE:GXGXR, HVTKPTX:APTKL:EPLP-AA¹⁷-VYY:DDSSNVI:EQLSN:NMVVR:SXGXH, YVPKPXX:APTKL:EPLP-AA¹⁷-VYY:DDSSNVI:EQLSN:NMVVR:SXGXH, TVPKPXX:APTQL:EPLP-AA¹⁷-VYY:DDSSNVI:EQLSN:NMVVR:AXGXH, AVPKAXX:APTKL:EPLP-AA¹⁷-VYY:DSSNNVI:EQLSN:NMVVK:AXGXH, KVGKAXX:VPTKL:EPLP-AA¹⁷-VYY:DDMGVPT:EQLSN:EGMSVAE:XGXR, KASKAXX:VPTKL:EPLP-AA¹⁷-VYY:DKGVVTY:EQLSN:GMAVS:EXGXR, GSAGPXX:TPTKM:EPLP-AA¹⁷-VYY:NDKQQII:EQLSN:GMVVD:RXGXS, AAPASXX:VPARL:EPLP-AA¹⁷-VYY:DAANNVV:EQLSN:DMVVE:AXGXR, STPPTXX:VPTRL:EPLP-AA¹⁷-VYY:DSANNVV:EQLSN:DMVVE:SXGXR, HVPKPXX:APTKL:EPLP-AA¹⁷-VYY:DDSSNVI:EQLSN:NMVVR:SXGXH, RVPSTXX:APVKT:EPLP-AA¹⁷-VYY:DNGRVLL:EQLSN:MIVEE:XGXL, ASASPXX:VSQDL:EPLP-AA¹⁷-VYY:IGKTPKI:EQLSN:MIVKS:XKXS, ASASPXX:VPQDL:EPLP-AA¹⁷-VYY:VGRTPKV:EQLSN:MVVKS:XKXS, NDEGLEX:VPTEE:EPLP-AA¹⁷-VYY:RIKPHQGQH:EQLSN:FLQHN:KXEXR, NDEGLEX:VPTGQ:EPLP-AA¹⁷-VYY:RIKPHQGQH:EQLSN:LEEHS:QXEXR, SSVKXQP:SRVHH:EPLP-AA¹⁷-VYY:EYVRKKPKL:EQLSN:RLEEH:LEXAXA, RNVQXRP:TQVQL:EPLP-AA¹⁷-VYY:EIVRKKPIF:EQLSN:TLEDH:LAXKXE, KIPKAXX:VSQEL:EPLT-AA¹⁷-LYY:DENEKVV:EQLSN:DMVKS:GXGXR, GIPEPXX:VSQKM:EPLT-AA¹⁷-LYY:DENKNVV:EQLSN:NMVKS:SXAXR, SIPKAXX:VSQEL:EPLT-AA¹⁷-LYY:DEYDKVV:EQLSN:EMVKS:GXGXR, HVTKPTX:VSQKL:EPLT-AA¹⁷-LYY:DDSSNVI:EQLSN:NMVKS:SXGXH, YVPKPXX:VSQKL:EPLT-AA¹⁷-LYY:DDSSNVI:EQLSN:NMVKS:SXGXH, TVPKPXX:VSQQL:EPLT-AA¹⁷-LYY:DDSSNVI:EQLSN:NMVKS:AXGXH, AVPKAXX:VSQKL:EPLT-AA¹⁷-LYY:DSSNNVI:EQLSN:NMVKS:AXGXH, KVGKAXX:VSQKL:EPLT-AA¹⁷-LYY:DDMGVPT:EQLSN:EGMSVKS:XGXR, KASKAXX:VSQKL:EPLT-AA¹⁷-LYY:DKGVVTY:EQLSN:GMVKS:EXGXR, GSAGPXX:VSQKM:EPLT-AA¹⁷-LYY:NDKQQII:EQLSN:GMVKS:RXGXS, AAPASXX:VSQRL:EPLT-AA¹⁷-LYY:DAANNVV:EQLSN:DMVKS:AXGXR, STPPTXX:VSQRL:EPLT-AA¹⁷-LYY:DSANNVV:EQLSN:DMVKS:SXGXR, HVPKPXX:VSQKL:EPLT-AA¹⁷-LYY:DDSSNVI:EQLSN:NMVKS:SXGXH, RVPSTXX:VSQKT:EPLT-AA¹⁷-LYY:DNGRVLL:EQLSN:MIVKS:XGXL, ASAAPXX:VSQAL:EPLT-AA¹⁷-LYY:VGRKPKV:EQLSN:MIVKS:XKXS, ASASPXX:VSQDL:EPLT-AA¹⁷-LYY:VGRTPKV:EQLSN:MVVKS:XKXS, KIPKAXX:VPTEL:EPLT-AA¹⁷-LYY:DENEKVV:EQLSN:DMVVE:GXGXR, GIPEPXX:VPEKM:EPLT-AA¹⁷-LYY:DENKNVV:EQLSN:NMTVE:SXAXR, SIPKAXX:VPTEL:EPLT-AA¹⁷-LYY:DEYDKVV:EQLSN:EMVVE:GXGXR, HVTKPTX:APTKL:EPLT-AA¹⁷-LYY:DDSSNVI:EQLSN:NMVVR:SXGXH, YVPKPXX:APTKL:EPLT-AA¹⁷-LYY:DDSSNVI:EQLSN:NMVVR:SXGXH, TVPKPXX:APTQL:EPLT-AA¹⁷-LYY:DDSSNVI:EQLSN:NMVVR:AXGXH, AVPKAXX:APTKL:EPLT-AA¹⁷-LYY:DSSNNVI:EQLSN:NMVVK:AXGXH, KVGKAXX:VPTKL:EPLT-AA¹⁷-LYY:DDMGVPT:EQLSN:EGMSVAE:XGXR, KASKAXX:VPTKL:EPLT-AA¹⁷-LYY:DKGVVTY:EQLSN:GMAVS:EXGXR, GSAGPXX:TPTKM:EPLT-AA¹⁷-LYY:NDKQQII:EQLSN:GMVVD:RXGXS, AAPASXX:VPARL:EPLT-AA¹⁷-LYY:DAANNVV:EQLSN:DMVVE:AXGXR, STPPTXX:VPTRL:EPLT-AA¹⁷-LYY:DSANNVV:EQLSN:DMVVE:SXGXR, HVPKPXX:APTKL:EPLT-AA¹⁷-LYY:DDSSNVI:EQLSN:NMVVR:SXGXH, RVPSTXX:APVKT:EPLT-AA¹⁷-LYY:DNGRVLL:EQLSN:MIVEE:XGXL, ASAAPXX:VPQAL:EPLT-AA¹⁷-LYY:VGRKPKV:EQLSN:MIVRS:XKXS, NDEGLEX:VPTEE:EPLT-AA¹⁷-LYY:RIKPHQGQH:EQLSN:FLQHN:KXEXR, NDEGLEX:VPTGQ:EPLT-AA¹⁷-LYY:RIKPHQGQH:EQLSN:LEEHS:QXEXR, SSVKXQP:SRVHH:EPLT-AA¹⁷-LYY:EYVRKKPKL:EQLSN:RLEEH:LEXAXA, RNVQXRP:TQVQL:EPLT-AA¹⁷-LYY:EIVRKKPIF:EQLSN:TLEDH:LAXKXE, KIPKAXX:VPQEL:EPLT-AA¹⁷-LYY:DENEKVV:EQLSN:DMVKS:GXGXR, GIPEPXX:VPQKM:EPLT-AA¹⁷-LYY:DENKNVV:EQLSN:NMVKS:SXAXR, SIPKAXX:VPQEL:EPLT-AA¹⁷-LYY:DEYDKVV:EQLSN:EMVKS:GXGXR, HVTKPTX:VPQKL:EPLT-AA¹⁷-LYY:DDSSNVI:EQLSN:NMVKS:SXGXH, YVPKPXX:VPQKL:EPLT-AA¹⁷-LYY:DDSSNVI:EQLSN:NMVKS:SXGXH, TVPKPXX:VPQQL:EPLT-AA¹⁷-LYY:DDSSNVI:EQLSN:NMVKS:AXGXH, AVPKAXX:VPQKL:EPLT-AA¹⁷-LYY:DSSNNVI:EQLSN:NMVKS:AXGXH, KVGKAXX:VPQKL:EPLT-AA¹⁷-LYY:DDMGVPT:EQLSN:EGMSVKS:XGXR, KASKAXX:VPQKL:EPLT-AA¹⁷-LYY:DKGVVTY:EQLSN:GMVKS:EXGXR, GSAGPXX:VPQKM:EPLT-AA¹⁷-LYY:NDKQQII:EQLSN:GMVKS:RXGXS, AAPASXX:VPQRL:EPLT-AA¹⁷-LYY:DAANNVV:EQLSN:DMVKS:AXGXR, STPPTXX:VPQRL:EPLT-AA¹⁷-LYY:DSANNVV:EQLSN:DMVKS:SXGXR, HVPKPXX:VPQKL:EPLT-AA¹⁷-LYY:DDSSNVI:EQLSN:NMVKS:SXGXH, RVPSTXX:VPQKT:EPLT-AA¹⁷-LYY:DNGRVLL:EQLSN:MIVKS:XGXL, ASAAPXX:VPQAL:EPLT-AA¹⁷-LYY:VGRKPKV:EQLSN:MIVKS:XKXS, ASASPXX:VPQDL:EPLT-AA¹⁷-LYY:IGKTPKI:EQLSN:MIVKS:XKXS, NDEGLEX:VPTGQ:SNIT-AA¹⁷-QIM:RIKPHQGQH:IGEMS:LEQHN:QXEXR, KIPKAXX:VPTEL:SNIT-AA¹⁷-QIM:DENEKVV:IGEMS:DMVVE:GXGXR, GIPEPXX:VPEKM:SNIT-AA¹⁷-QIM:DENKNVV:IGEMS:NMTVE:SXAXR, SIPKAXX:VPTEL:SNIT-AA¹⁷-QIM:DEYDKVV:IGEMS:EMVVE:GXGXR, HVTKPTX:APTKL:SNIT-AA¹⁷-QIM:DDSSNVI:IGEMS:NMVVR:SXGXH, YVPKPXX:APTKL:SNIT-AA¹⁷-QIM:DDSSNVI:IGEMS:NMVVR:SXGXH, TVPKPXX:APTQL:SNIT-AA¹⁷-QIM:DDSSNVI:IGEMS:NMVVR:AXGXH, AVPKAXX:APTKL:SNIT-AA¹⁷-QIM:DSSNNVI:IGEMS:NMVVK:AXGXH, KVGKAXX:VPTKL:SNIT-AA¹⁷-QIM:DDMGVPT:IGEMS:EGMSVAE:XGXR, KASKAXX:VPTKL:SNIT-AA¹⁷-QIM:DKGVVTY:IGEMS:GMAVS:EXGXR, GSAGPXX:TPTKM:SNIT-AA¹⁷-QIM:NDKQQII:IGEMS:GMVVD:RXGXS, AAPASXX:VPARL:SNIT-AA¹⁷-QIM:DAANNVV:IGEMS:DMVVE:AXGXR, STPPTXX:VPTRL:SNIT-AA¹⁷-QIM:DSANNVV:IGEMS:DMVVE:SXGXR, HVPKPXX:APTKL:SNIT-AA¹⁷-QIM:DDSSNVI:IGEMS:NMVVR:SXGXH, RVPSTXX:APVKT:SNIT-AA¹⁷-QIM:DNGRVLL:IGEMS:MIVEE:XGXL, ASAAPXX:VPQAL:SNIT-AA¹⁷-QIM:VGRKPKV:IGEMS:MIVRS:XKXS, ASASPXX:VSQDL:SNIT-AA¹⁷-QIM:IGKTPKI:IGEMS:MIVKS:XKXS, ASASPXX:VPQDL:SNIT-AA¹⁷-QIM:VGRTPKV:IGEMS:MVVKS:XKXS, NDEGLEX:VPTGQ:SNIT-AA¹⁷-QIM:RIKPHQGQH:IGEMS:LEEHS:QXEXR, SSVKXQP:SRVHH:SNIT-AA¹⁷-QIM:EYVRKKPKL:IGEMS:RLEEH:LEXAXA, RNVQXRP:TQVQL:SNIT-AA¹⁷-QIM:EIVRKKPIF:IGEMS:TLEDH:LAXKXE, NDEGLEX:VPTEE:SNIT-AA¹⁷-QIM:RIKPHQGQH:LGEMS:FLEHS:KXEXR, KIPKAXX:VPTEL:SNIT-AA¹⁷-QIM:DENEKVV:LGEMS:DMVVE:GXGXR, GIPEPXX:VPEKM:SNIT-AA¹⁷-QIM:DENKNVV:LGEMS:NMTVE:SXAXR, SIPKAXX:VPTEL:SNIT-AA¹⁷-QIM:DEYDKVV:LGEMS:EMVVE:GXGXR, HVTKPTX:APTKL:SNIT-AA¹⁷-QIM:DDSSNVI:LGEMS:NMVVR:SXGXH, YVPKPXX:APTKL:SNIT-AA¹⁷-QIM:DDSSNVI:LGEMS:NMVVR:SXGXH, TVPKPXX:APTQL:SNIT-AA¹⁷-QIM:DDSSNVI:LGEMS:NMVVR:AXGXH, AVPKAXX:APTKL:SNIT-AA¹⁷-QIM:DSSNNVI:LGEMS:NMVVK:AXGXH, KVGKAXX:VPTKL:SNIT-AA¹⁷-QIM:DDMGVPT:LGEMS:EGMSVAE:XGXR, KASKAXX:VPTKL:SNIT-AA¹⁷-QIM:DKGVVTY:LGEMS:GMAVS:EXGXR, GSAGPXX:TPTKM:SNIT-AA¹⁷-QIM:NDKQQII:LGEMS:GMVVD:RXGXS, AAPASXX:VPARL:SNIT-AA¹⁷-QIM:DAANNVV:LGEMS:DMVVE:AXGXR, STPPTXX:VPTRL:SNIT-AA¹⁷-QIM:DSANNVV:LGEMS:DMVVE:SXGXR, HVPKPXX:APTKL:SNIT-AA¹⁷-QIM:DDSSNVI:LGEMS:NMVVR:SXGXH, RVPSTXX:APVKT:SNIT-AA¹⁷-QIM:DNGRVLL:LGEMS:MIVEE:XGXL, ASAAPXX:VPQAL:SNIT-AA¹⁷-QIM:VGRKPKV:LGEMS:MIVRS:XKXS, ASASPXX:VSQDL:SNIT-AA¹⁷-QIM:IGKTPKI:LGEMS:MIVKS:XKXS, ASASPXX:VPQDL:SNIT-AA¹⁷-QIM:VGRTPKV:LGEMS:MVVKS:XKXS, NDEGLEX:VPTEE:SNIT-AA¹⁷-QIM:RIKPHQGQH:LGEMS:FLQHN:KXEXR, SSVKXQP:SRVHH:SNIT-AA¹⁷-QIM:EYVRKKPKL:LGEMS:RLEEH:LEXAXA, RNVQXRP:TQVQL:SNIT-AA¹⁷-QIM:EIVRKKPIF:LGEMS:TLEDH:LAXKXE, RNVQXRP:SRVQL:RSVK-AA¹⁷-AKV:EIVRKKPIF:KEVQV:TLEEH:LAXKXE, KIPKAXX:VPTEL:RSVK-AA¹⁷-AKV:DENEKVV:KEVQV:DMVVE:GXGXR, GIPEPXX:VPEKM:RSVK-AA¹⁷-AKV:DENKNVV:KEVQV:NMTVE:SXAXR, SIPKAXX:VPTEL:RSVK-AA¹⁷-AKV:DEYDKVV:KEVQV:EMVVE:GXGXR, HVTKPTX:APTKL:RSVK-AA¹⁷-AKV:DDSSNVI:KEVQV:NMVVR:SXGXH, YVPKPXX:APTKL:RSVK-AA¹⁷-AKV:DDSSNVI:KEVQV:NMVVR:SXGXH, TVPKPXX:APTQL:RSVK-AA¹⁷-AKV:DDSSNVI:KEVQV:NMVVR:AXGXH, AVPKAXX:APTKL:RSVK-AA¹⁷-AKV:DSSNNVI:KEVQV:NMVVK:AXGXH, KVGKAXX:VPTKL:RSVK-AA¹⁷-AKV:DDMGVPT:KEVQV:EGMSVAE:XGXR, KASKAXX:VPTKL:RSVK-AA¹⁷-AKV:DKGVVTY:KEVQV:GMAVS:EXGXR, GSAGPXX:TPTKM:RSVK-AA¹⁷-AKV:NDKQQII:KEVQV:GMVVD:RXGXS, AAPASXX:VPARL:RSVK-AA¹⁷-AKV:DAANNVV:KEVQV:DMVVE:AXGXR, STPPTXX:VPTRL:RSVK-AA¹⁷-AKV:DSANNVV:KEVQV:DMVVE:SXGXR, HVPKPXX:APTKL:RSVK-AA¹⁷-AKV:DDSSNVI:KEVQV:NMVVR:SXGXH, RVPSTXX:APVKT:RSVK-AA¹⁷-AKV:DNGRVLL:KEVQV:MIVEE:XGXL, ASAAPXX:VPQAL:RSVK-AA¹⁷-AKV:VGRKPKV:KEVQV:MIVRS:XKXS, ASASPXX:VSQDL:RSVK-AA¹⁷-AKV:IGKTPKI:KEVQV:MIVKS:XKXS, ASASPXX:VPQDL:RSVK-AA¹⁷-AKV:VGRTPKV:KEVQV:MVVKS:XKXS, NDEGLEX:VPTEE:RSVK-AA¹⁷-AKV:RIKPHQGQH:KEVQV:FLQHN:KXEXR, NDEGLEX:VPTGQ:RSVK-AA¹⁷-AKV:RIKPHQGQH:KEVQV:LEEHS:QXEXR, RNVQXRP:TQVQL:RSVK-AA¹⁷-AKV:EIVRKKPIF:KEVQV:TLEDH:LAXKXE, SSVKXQP:TQVHH:RPVQ-AA¹⁷-RKI:EYVRKKPKL:KKATV:RLEDH:LEXAXA, KIPKAXX:VPTEL:RPVQ-AA¹⁷-RKI:DENEKVV:KKATV:DMVVE:GXGXR, GIPEPXX:VPEKM:RPVQ-AA¹⁷-RKI:DENKNVV:KKATV:NMTVE:SXAXR, SIPKAXX:VPTEL:RPVQ-AA¹⁷-RKI:DEYDKVV:KKATV:EMVVE:GXGXR, HVTKPTX:APTKL:RPVQ-AA¹⁷-RKI:DDSSNVI:KKATV:NMVVR:SXGXH, YVPKPXX:APTKL:RPVQ-AA¹⁷-RKI:DDSSNVI:KKATV:NMVVR:SXGXH, TVPKPXX:APTQL:RPVQ-AA¹⁷-RKI:DDSSNVI:KKATV:NMVVR:AXGXH, AVPKAXX:APTKL:RPVQ-AA¹⁷-RKI:DSSNNVI:KKATV:NMVVK:AXGXH, KVGKAXX:VPTKL:RPVQ-AA¹⁷-RKI:DDMGVPT:KKATV:EGMSVAE:XGXR, KASKAXX:VPTKL:RPVQ-AA¹⁷-RKI:DKGVVTY:KKATV:GMAVS:EXGXR, GSAGPXX:TPTKM:RPVQ-AA¹⁷-RKI:NDKQQII:KKATV:GMVVD:RXGXS, AAPASXX:VPARL:RPVQ-AA¹⁷-RKI:DAANNVV:KKATV:DMVVE:AXGXR, STPPTXX:VPTRL:RPVQ-AA¹⁷-RKI:DSANNVV:KKATV:DMVVE:SXGXR, HVPKPXX:APTKL:RPVQ-AA¹⁷-RKI:DDSSNVI:KKATV:NMVVR:SXGXH, RVPSTXX:APVKT:RPVQ-AA¹⁷-RKI:DNGRVLL:KKATV:MIVEE:XGXL, ASAAPXX:VPQAL:RPVQ-AA¹⁷-RKI:VGRKPKV:KKATV:MIVRS:XKXS, ASASPXX:VSQDL:RPVQ-AA¹⁷-RKI:IGKTPKI:KKATV:MIVKS:XKXS, ASASPXX:VPQDL:RPVQ-AA¹⁷-RKI:VGRTPKV:KKATV:MVVKS:XKXS, NDEGLEX:VPTEE:RPVQ-AA¹⁷-RKI:RIKPHQGQH:KKATV:FLQHN:KXEXR, NDEGLEX:VPTGQ:RPVQ-AA¹⁷-RKI:RIKPHQGQH:KKATV:LEEHS:QXEXR and SSVKXQP:SRVHH:RPVQ-AA¹⁷-RKI:EYVRKKPKL:KKATV:RLEEH:LEXAXA; and wherein AA¹⁷ is selected from the group consisting of G, A, V, L, I, P, F, M, W, T and S (in particular is selected from the group consisting of M, I, L, V and T).

[0375] In one example, said cyclic GFR-binding compound is a synthetic molecule as defined herein in the definition section.

[0376] In one particular example, said cyclic GFR-binding compound is a synthetic peptide, or a variant or analog thereof, or a cyclic peptidomimetic.

[0377] In one most particular example, said GFR-binding compound is a cyclic synthetic peptide.

[0378] In one example, a length of said cyclic GFR-binding compound, in solution, such as in a physiologically acceptable solvent such as water or PBS, is comprised between about 6 and about 20 nm, preferably between about 6 and about 16 nm, as determined using the standard «3D» procedure described above.

[0379] In one particular example, said cyclic GFR-binding compounds may be any one of peptides of SEQ ID NO: 1 to 130880 as listed in the appended sequence listing.

[0380] Linker

[0381] In one particular example, said LINKER has a Mw comprised between about 28 and about 2,000 Da. In one particular example, said LINKER has a Mw comprised between about 75 and about 2,000 Da. In one particular example, said LINKER has a Mw comprised between about 150 and about 2,000 Da. In one particular example, said LINKER has a Mw comprised between about 150 and about 1,500 Da. In one most particular example, said LINKER has a Mw comprised between about 300 and about 1,000 Da. In one even more particular example, said LINKER has a Mw comprised between about 300 and about 800 Da.

[0382] The chemical nature of said LINKER is not meant to be particularly limited and may be any organic molecule capable of covalently connecting two peptide fragments such as PEP(A) and PEP(B) or PEP(C)-PEP12 and PEP2-PEP(D) and/or capable of covalently connecting two ends of a peptide or a peptidomimetic such as PEP(A)-LINKER-PEP(B) or PEP(C)-PEP12-LINKER-PEP2-PEP(D) so as to form a cyclic compound, so long as LINKER provides sufficient spacing between the two elements connected therethrough and adequate cycle stability for these two connected elements to provide or conserve the required tissue regeneration activity. LINKER may thus be, for example, in certain embodiments, a peptide, or variant, analog or peptidomimetic thereof, a polysaccharide, a polynucleotide, a saturated or unsaturated hydrocarbon chain, or a mixture thereof.

[0383] For example, in certain embodiments, LINKER is a peptide with 2 to 16 amino acids. In one particular example, LINKER is a peptide with 2 to 10 amino acids. In one particular example, LINKER is a peptide with 2 to 9 amino acids. In one most particular example, LINKER is a peptide with 3 to 9 amino acids.

[0384] Thus, in one particular example, said cyclic GFR-binding compound is a peptide, a variant or analog thereof as defined herein, with between 15-60 (in particular between 15-55, more particularly between 19-60, and even more particularly between 19-55) amino acids, or between 15-35 (in particular between 15-30, more particularly between 19-35, and even more particularly between 19-30) amino acids, comprising a peptide, a variant or analog thereof of general formula (I); wherein one end of LINKER interacts covalently with one end of PEP(A); wherein another end of LINKER interacts covalently with one end of PEP(B); wherein PEP(A) comprises PEP1 or PEP12; wherein PEP(B) comprises PEP2; wherein LINKER is a peptide comprising 2 to 16 amino acids (in particular 2 to 10, 2 to 9, or 3 to 9 amino acids).

[0385] Thus, in one particular example, said cyclic GFR-binding compound is a peptide, a variant or analog thereof as defined herein, with between 15-60 (in particular between 15-55, more particularly between 19-60, and even more particularly between 19-55) amino acids, or between 15-35 (in particular between 15-30, more particularly between 19-35, and even more particularly between 19-30) amino acids, comprising a peptide, a variant or analog thereof of general formula (II); wherein LINKER is a peptide comprising 2 to 16 amino acids (in particular 2 to 10, 2 to 9, or 3 to 9 amino acids); wherein PEP12 is a peptide with 8 amino acids of formula PEP1-AA¹⁷-PEP11 as already defined herein; wherein PEP1, PEP2, PEP11, PEP(C) and PEP(D) are as already defined herein; wherein AA¹³ and AA²¹ may be both N-terminal amino acids or both C-terminal amino acids; wherein AA²⁵ and AA²⁰ may be both N-terminal amino acids or both C-terminal amino acids; wherein one end of LINKER interacts covalently with one end of PEP12 via AA²⁰; wherein another end of LINKER interacts covalently with PEP2 via AA²¹; wherein one end of PEP(C) interacts covalently with PEP12 via AA¹³; wherein one end of PEP(D) interacts covalently with PEP2 via AA²⁵.

[0386] Thus, in one particular example, said cyclic GFR-binding compound is a peptide, a variant or analog thereof as defined herein, with between 15-60 (in particular between 15-55, more particularly between 19-60, and even more particularly between 19-55) amino acids, or between 15-35 (in particular between 15-30, more particularly between 19-35, and even more particularly between 19-30) amino acids, having any one of the general formula (V) to (XXXIV); wherein LINKER is a peptide comprising 2 to 16 amino acids (in particular 2 to 10, 2 to 9, or 3 to 9 amino acids).

[0387] In certain embodiments, said cyclic GFR-binding compound is a cyclic peptidomimetic as defined herein, with between 15-60 (in particular between 15-55, more particularly between 19-60, and even more particularly between 19-55) amino acids, or between 15-35 (in particular between 15-30, more particularly between 19-35, and even more particularly between 19-30) amino acids, of general formula (II); wherein LINKER is not a peptide but may comprise amino acids or peptides in covalent or non-covalent (preferably covalent) association with other groups or residues other than amino acids or peptides.

[0388] In one particular example, LINKER comprises (or is) a peptide of general formula (XXXV):

*AA²⁰¹-AA²⁰²-AA²⁰³-AA²⁰⁴-AA²⁰⁵-AA²⁰⁶-AA²⁰⁷-AA²⁰⁸-AA²⁰⁹** (XXXV)

[0389] wherein said peptide of formula (XXXV) may be selected from the group consisting of *AA^{III}-AA^{I}-AA^{I}-AA^{II}-AA^{VII}-AA^{XII}-AA^{XII}-AA^{XIII}-AA^{XIII}**, *AA^{III}-AA^{I}-AA^{VI}-AA^{II}-AA^{VII}-AA^{XII}-AA^{XII}-AA^{XIII}-AA^{XII}**, *AA^{III}-AA^{I}-AA^{I}-AA^{II}-AA^{II}-AA^{XII}-AA^{XII}-AA^{XII}-AA^{XIII}**. *AA^{III}-AA^{I}-AA^{II}-AA^{II}-AA^{VII}-AA^{XI}-AA^{XI}-AA^{XII}-AA^{XII}**, *AA^{II}-AA^{I}-AA^{I}-AA^{IV}-AA^{IV}-AA^{XII}-AA^{XII}-AA^{XII}-AA^{XII}**, *AA^{I}-AA^{I}-AA^{II}-AA^{II}-AA^{II}-AA^{XII}-AA^{XII}-AA^{XII}-AA^{XIII}-AA^{XII}**, *AA^{II}-AA^{II}-AA^{II}-AA^{II}-AA^{II}-AA^{XII}-AA^{XII}-AA^{XII}-AA^{XII}**. *AA^{III}-AA^{I}-AA^{I}-AA^{II}-AA^{II}-AA^{XI}-AA^{XII}-AA^{XIII}-AA^{XIII}**, *AA^{V}-AA^{V}-AA^{VII}-AA^{VII}-AA^{XII}-AA^{XII}-AA^{XIII}-AA^{XIII}**, *AA^{VIII}-AA^{V}-AA^{VI}-AA^{II}-AA^{XII}-AA^{XII}-AA^{XIII}-AA^{XII}** and *AA^{V}-AA^{V}-AA^{VII}-AA^{II}-AA^{II}-AA^{XII}-AA^{XIII}-AA^{XIII}*; wherein AA^{I} is any amino acid as defined herein, AA^{II} is any polar amino acid as defined herein, AA^{III} is any acidic amino acid as defined herein, AA^{V} is any aliphatic amino acid as defined herein, AA^{V} is any apolar amino acid as defined herein, AA^{VI} is any aromatic amino acid as defined herein, AA^{VII} is any basic amino acid as defined herein, AA^{VI} is L or I as defined herein, AA^{XII} is an amino acid selected from the group consisting of G, A, V, L, I, P, M, K, R, H, Y and E, wherein AA^{XII} is absent, AA^{II} or AA^{V}, preferably absent; and wherein any one of the fragment AA²⁰¹, AA²⁰¹-AA²⁰², AA²⁰¹-AA²⁰²-AA²⁰³, AA²⁰¹-AA²⁰²-AA²⁰³-AA²⁰⁴, AA²⁰¹-AA²⁰²-AA²⁰³-AA²⁰⁴-AA²⁰⁵, AA²⁰¹-AA²⁰²-AA²⁰³-AA²⁰⁴-AA²⁰⁵-AA²⁰⁶, AA²⁰¹-AA²⁰²-AA²⁰³-AA²⁰⁴-AA²⁰⁵-AA²⁰⁶-AA²⁰⁷, AA²⁰³-AA²⁰⁴-AA²⁰⁵-AA²⁰⁶-AA²⁰⁷-AA²⁰⁸-AA²⁰⁹, AA²⁰⁴-AA²⁰⁵-AA²⁰⁶-AA²⁰⁷-AA²⁰⁸-AA²⁰⁹, AA²⁰⁵-AA²⁰⁶-AA²⁰⁷-AA²⁰⁸-AA²⁰⁹, AA²⁰⁶-AA²⁰⁷-AA²⁰⁸-AA²⁰⁹, AA²⁰⁷-AA²⁰⁸-AA²⁰⁹, AA²⁰⁸-AA²⁰⁹ or AA²⁰⁹, may be absent. In the peptides of formula (XXXV), any one of the amino acid labelled “*” or the amino acid labelled “**” is an N-terminal amino acid and the other is a C-terminal amino acid.

[0390] For instance, in the peptide of formula *AA^{III}-AA^{I}-AA^{I}-AA^{II}-AA^{VII}-AA^{XII}-AA^{XIII}-AA^{XIII}-AA^{XIII}** (XXXV-1), AA^{III} occupies position AA²⁰¹, *AA^{I} occupies position AA²⁰², AA^{I} occupies position AA²⁰³, AA^{II} occupies position AA²⁰⁴, AA^{VII} occupies position AA²⁰⁵, AA^{XII} occupies position AA²⁰⁶, AA^{XII} occupies position AA²⁰⁷, AA^{XIII} occupies position AA²⁰⁸ and AA^{XII}** occupies position AA²⁰⁹.

[0391] Likewise, in the peptide of formula *AA^{V}-AA^{V}-AA^{VII}-AA^{II}-AA^{XII}-AA^{XII}-AA^{XII}-AA^{XIII}** (XXXV-1) AA^{V} occupies position AA²⁰¹, AA^{V} occupies position AA²⁰², AA^{VII} occupies position AA²⁰³, AA^{II} occupies position AA²⁰⁴, AA^{XII} occupies position AA²⁰⁵, AA^{XII} occupies position AA²⁰⁶, AA^{XIII} occupies position AA²⁰⁷, AA^{XIII} occupies position AA²⁰⁸ and position AA²⁰⁹ is vacant, thus AA²⁰⁸ would be the amino acid which interacts, in certain embodiments, with PEP2 via AA²¹.

[0392] In one example, LINKER may thus be any one of the following peptides:

[0393] *AA²⁰¹-AA²⁰²-AA²³-AA²⁰⁴-AA²⁰⁵-AA²⁰⁶-AA²⁰⁷-AA²⁰⁸** (XXXV-1); *AA²⁰¹-AA²⁰²-AA²⁰³-AA²⁰⁴-AA²⁰⁵-AA²⁰⁶-AA²⁰⁷**(XXXV-2); *AA²⁰¹-AA²⁰²-AA²⁰³-AA²⁰⁴-AA²⁰-AA²⁰⁶** (XXXV-3); *AA²⁰¹-AA²⁰²-AA²⁰³-AA²⁰⁴-AA²⁰⁵** (XXXV-4); *AA²⁰¹-AA²⁰²-AA²⁰³-AA²⁰⁴** (XXXV-5); *AA²⁰¹-AA²⁰²-AA²⁰³** (XXXV-6); *AA²⁰¹-AA²⁰²** (XXXV-7); *AA²⁰²-AA²⁰³-AA²⁰⁴-AA²⁰⁵-AA²⁰⁶-AA²⁰⁷-AA²⁰-AA²⁰⁹** (XXXV-8); *AA²⁰³-AA²⁰⁴-AA²⁰⁵-AA²⁰⁶-AA²⁰⁷-AA²⁰⁸-AA²⁰⁹** (XXXV-9); *AA²⁰⁴-AA²⁰-AA²⁰⁶-AA²⁰⁷-AA-AA²⁰⁹** (XXXV-10); *AA²⁰⁵-AA²⁰⁶-AA²⁰⁷-AA²⁰⁵-AA²⁰⁹** (XXXV-11); *AA²⁰⁶-AA²⁰⁷-AA²⁰⁵-AA²⁰⁹** (XXXV-12); *AA²⁰⁷-AA²⁰⁸-AA²⁰⁹** (XXXV-13); *AA²⁰-AA²⁰⁹** (XXXV-14); wherein, for instance, said peptide of formulae (XXXV-1) may thus be selected from the group consisting of *AA^{II}-AA^{I}-AA^{I}-AA^{II}-AA^{VII}-AA^{XII}-AA^{XII}-AA^{XII}**, *AA^{III}-AA^{I}-AA^{VI}-AA^{II}-AA^{XII}-AA^{XII}-AA^{XII}-AA^{XIII}**, *AA^{III}-AA^{I}-AA^{I}-AA^{II}-AA^{II}-AA^{I}-AA^{XII}-AA^{XIII}**, *AA^{III}-AA^{I}-AA^{II}-AA^{II}-AA^{VII}-AA^{XII}-AA^{XII}-AA^{XIII}**, *AA^{III}-AA^{I}-AA^{II}-AA^{IV}-AA^{IV}-AA^{XII}-AA^{XII}-AA^{XIII}**. *AA^{I}-AA^{I}-AA^{I}-AA^{I}-AA^{I}-AA^{XII}-AA^{XII}-AA^{XII}-AA^{XIII}**, *AA^{III}-AA^{III}-AA^{II}-AA^{VII}-AA^{II}-AA^{XII}-AA^{XII}-AA^{XIII}**, *AA^{II}-AA^{I}-AA^{I}-AA^{II}-AA^{II}-AA^{XI}-AA^{XII}-AA^{XII}-AA^{XIII}**, *AA^{V}-AA^{V}-AA^{VII}-AA^{VII}-AA^{XII}-AA^{XII}-AA^{XII}**, *AA^{VIII}-AA^{V}-AA^{VII}-AA^{II}-AA^{XI}-AA^{XII}-AA^{XII}** and *AA^{V}-AA^{V}-AA^{VII}-AA^{II}-AA^{XI}-AA^{XII}-AA^{XIII}**.

[0394] In one particular example, LINKER comprises a peptide of formula (XXXV), (XXXV-2) or (XXXV-4).

[0395] In one example, LINKER comprises (or is) a poly-(aliphatic amino acid) peptide such as poly-alanine peptide (A)ₙ, or a poly-glycine (G)ₙ, n being an integer comprised between 2 and 16, preferably between 2 to 9, such as A-A-A-A-A-A-A-A-A, A-A-A-A-A-A-A, A-A-A-A-A, G-G-G-G-G-G-G-G-G, G-G-G-G-G-G-G or G-G-G-G-G.

[0396] In one particular example, LINKER comprises (or is) a peptide of general formulae (XXXV) to (XXXV-14), more particularly (XXXV), (XXXV-2) or (XXXV-4), or a poly-(aliphatic amino acid)ₙ peptide as defined herein.

[0397] For example, in certain embodiments, LINKER is a polysaccharide comprising 2 to 16 saccharides. In one particular example, LINKER is a polysaccharide comprising 2 to 10 saccharides. In one particular example, LINKER is a polysaccharide comprising 2 to 9 saccharides. In one most particular example, LINKER is a polysaccharide comprising 3 to 9 saccharides. Suitable monosaccharides include, but are not limited to, glucose (dextrose), fructose (levulose) and galactose. Monosaccharides are the building blocks of disaccharides (such as sucrose) and polysaccharides (such as celluloses, chitosans, ulvanes and starches). Further, each carbon atom that supports a hydroxyl group (except for the first and last) is chiral, giving rise to a number of isomeric forms all with the same chemical formula. A large number of biologically important modified monosaccharides exists e.g. amino sugars such as Galactosamine, Glucosamine, Sialic acid, N-Acetylglucosamine, and sulfosugars such as Sulfoquinovose. All of these monosaccharide and polysaccharide derivatives may be used as LINKER in the present invention.

[0398] Thus, in one particular example, said cyclic GFR-binding compound is a hydride peptide/polysaccharide peptidomimetic of between 1,500 and 7,000 Da and comprising compound (I) as defined herein; wherein one end of LINKER interacts covalently with one end of PEP(A); wherein another end of LINKER interacts covalently with one end of PEP(B); wherein PEP(A) comprises PEP1 or PEP12; wherein PEP(B) comprises PEP2; wherein LINKER is a polysaccharide comprising 2 to 16 saccharides (in particular 2 to 10, 2 to 9, or 3 to 9 saccharides).

[0399] Thus, in one particular example, said cyclic GFR-binding compound is a hydride peptide/polysaccharide peptidomimetic of between 1,500 and 7,000 Da and comprising compound (II) as defined herein; wherein LINKER is a polysaccharide comprising 2 to 16 saccharides (in particular 2 to 10, 2 to 9, or 3 to 9 saccharides); wherein PEP12 is a peptide with 8 amino acids of formula PEP1-AA¹⁷-PEP11 as already defined herein; wherein PEP1, PEP2, PEP11, PEP(C) and PEP(D) are as already defined herein; wherein AA¹³ and AA²¹ may be both N-terminal amino acids or both C-terminal amino acids; wherein AA²⁵ and AA²⁰ may be both N-terminal amino acids or both C-terminal amino acids; wherein one end of LINKER interacts covalently with one end of PEP12 via AA²⁰; wherein another end of LINKER interacts covalently with PEP2 via AA²¹; wherein one end of PEP(C) interacts covalently with PEP12 via AA¹³; wherein one end of PEP(D) interacts covalently with PEP2 via AA²⁵.

[0400] For example, in certain embodiments, LINKER is a polynucleotide comprising 2 to 16 nucleotides. In one particular example, LINKER is a polynucleotide comprising 2 to 10 nucleotides. In one particular example, LINKER is a polynucleotide comprising 2 to 9 nucleotides. In one most particular example, LINKER is a polynucleotide comprising 3 to 9 nucleotides. Suitable nucleotides include adenine (A), guanine (G), thymine (T), cytosine (C), uracil (U) and derivatives, analogues and/or mimetic thereof.

[0401] Thus, in one particular example, said cyclic GFR-binding compound is a hydride peptide/polynucleotide peptidomimetic of between 1,500 and 7,000 Da and comprising compound (I) as defined herein; wherein one end of LINKER interacts covalently with one end of PEP(A); wherein another end of LINKER interacts covalently with one end of PEP(B); wherein PEP(A) comprises PEP1 or PEP12; wherein PEP(B) comprises PEP2; wherein LINKER is a polynucleotide comprising 2 to 16 nucleotides (in particular 2 to 10, 2 to 9, or 3 to 9 nucleotides).

[0402] Thus, in one particular example, said cyclic GFR-binding compound is a hydride peptide/polynucleotide peptidomimetic of between 1,500 and 7,000 Da and comprising compound (II) as defined herein; wherein LINKER is a polynucleotide comprising 2 to 16 nucleotides (in particular 2 to 10, 2 to 9, or 3 to 9 nucleotides); wherein PEP12 is a peptide with 8 amino acids of formula PEP1-AA¹⁷-PEP11 as already defined herein; wherein PEP1, PEP2, PEP11, PEP(C) and PEP(D) are as already defined herein; wherein AA¹³ and AA²¹ may be both N-terminal amino acids or both C-terminal amino acids; wherein AA²⁵ and AA²⁰ may be both N-terminal amino acids or both C-terminal amino acids; wherein one end of LINKER interacts covalently with one end of PEP12 via AA²⁰; wherein another end of LINKER interacts covalently with PEP2 via AA²¹; wherein one end of PEP(C) interacts covalently with PEP12 via AA³; wherein one end of PEP(D) interacts covalently with PEP2 via AA²⁵.

[0403] For example, in certain embodiments, LINKER is a saturated or unsaturated hydrocarbon chain comprising between 1 and 22, between 1 and 16, between 1 and 12, between 1 and 8 or between 1 and 6 carbon atoms, wherein said hydrocarbon chain is optionally interrupted by one or more non-carbon atom, preferably between 1 and 16, between 1 and 12 or between 1 and 8 non-carbon atoms as appropriate, wherein said non-carbon atom is selected from the group consisting of —O—, —S—, —C(═O), —SO₂—, —N(Ri)(C═O)—, and -N(Ri)-, wherein Ri is selected from the group consisting of a hydrogen atom, a C1-C6 alkyl group and an aryl group, and wherein said hydrocarbon chain is non-substituted or substituted by at least one radical selected from the group consisting of a halogen, a monosaccharide, a poly(1-6)saccharide, a nucleotide, a poly(1-6)nucleotide, a C1-C10 alkyl group and an aryl group. Thus, in one particular example, said cyclic GFR-binding compound is a hydride peptide/hydrocarbon chain peptidomimetic of between 1,500 and 7,000 Da and comprising compound (I) as defined herein; wherein one end of LINKER interacts covalently with one end of PEP(A); wherein another end of LINKER interacts covalently with one end of PEP(B); wherein PEP(A) comprises PEP1 or PEP12; wherein PEP(B) comprises PEP2; wherein LINKER is a saturated or unsaturated hydrocarbon chain comprising between 1 and 22 as defined herein.

[0404] Thus, in one particular example, said cyclic GFR-binding compound is a hydride peptide/hydrocarbon chain peptidomimetic of between 1,500 and 7,000 Da and comprising compound (II) as defined herein; wherein LINKER is a saturated or unsaturated hydrocarbon chain comprising between 1 and 22 as defined herein; wherein PEP12 is a peptide with 8 amino acids of formula PEP1-AA¹⁷-PEP11 as already defined herein; wherein PEP1, PEP2, PEP11, PEP(C) and PEP(D) are as already defined herein; wherein AA¹³ and AA²¹ may be both N-terminal amino acids or both C-terminal amino acids; wherein AA²⁵ and AA²⁰ may be both N-terminal amino acids or both C-terminal amino acids; wherein one end of LINKER interacts covalently with one end of PEP12 via AA²⁰; wherein another end of LINKER interacts covalently with PEP2 via AA²¹; wherein one end of PEP(C) interacts covalently with PEP12 via AA¹³; wherein one end of PEP(D) interacts covalently with PEP2 via AA²⁵.

[0405] In one example, LINKER is a saturated or unsaturated hydrocarbon chain of at most 10 nanometres (nm) in length, preferably at most 8 nm, 6 nm, 4 nm or 2 nm as determined using the standard «2D» procedure described above.

[0406] In one example, such saturated or unsaturated hydrocarbon chains include polyethylene glycol (PEG) or any one of its derivatives.

[0407] More particularly, LINKER is a tripeptide (three amino acids). More particularly, LINKER is a tetrapeptide (four amino acids). More particularly, LINKER is a pentapeptide (five amino acids). More particularly, LINKER is a hexapeptide (six amino acids). More particularly, LINKER is a heptapeptide (seven amino acids). More particularly, LINKER is an octapeptide (eight amino acids). More particularly, LINKER is a nonapeptide (nine amino acids).

[0408] In one particular example, LINKER is a peptide selected from the group consisting of DENEKVV, DENKNVV, DEYDKVV, DDSSNVI, DSSNNVI, DDMGVPT, DKGVVTY, NDKQQII, DAANNVV, DSANNVV, DDSSNVI, DNGRVLL, VGRKPKV, IGKTPKI, VGRTPKV, RIKPHQGQH, EYVRKKPKL, EIVRKKPIF, EYVRKKP, EIVRKKP, polyalanine (A₁₋₉) (preferably A₂₋₅) and polyglycine (G₁₋₉) (preferably G₂₋₅).

[0409] For example, in certain embodiments, to synthetise cyclic GFR-binding compounds of the present disclosure, the covalent bonds between e.g. LINKER, PEP(A) to (D) or PEP1 to PEP12, may be created through the chemical reaction between a free amine moiety e.g. of a N-terminal amino acid (—NH₂ or —NH₃X, X generally being a halide anion selected from the group consisting of F⁻, Cl⁻ and Br), typically acting as a nucleophile, and an electrophile moiety of e.g. a C-terminal amino acid. Such an electrophile moiety includes, but is not limited to, alkyl halides (—CR₂—X), alcohols (—CR₂—OH), acid chlorides (—C(═O)X), esters, (—C(═O)OR), phosphate (—OP(OR)₃), phosphinate (—OP(OR)R₂), phosphonates (—OP(OR)₂R), phosphonite (—P(OR)₂R) or sulfonic esters (—SO, OR). More particularly, this covalent bond is an amide bond (in particular a peptide bond) formed through conventional peptide synthesis using conventional coupling reagents as already defined herein.

[0410] For example, in certain embodiments, to synthetise cyclic GFR-binding compounds of the present disclosure, the covalent bonds between e.g. LINKER, PEP(A) to (D) or PEP1 to PEP12, may be created through the chemical reaction between a free carboxylic acid moiety e.g. of a C-terminal amino acid (—CO₂H or —CO₂X, X generally being an inorganic cation such as alkaline cations (e.g. Li⁺, Na⁺ or K⁺) or an organic cation such as ammonium cations), typically acting as an electrophile, and a nucleophile moiety of e.g. an N-terminal amino acid. Such a nucleophile moiety includes, but is not limited to, alcohols (—OH), amines (—NH₂), phosphines (—PR₃), thiols (—SH). More particularly, this covalent interaction is a peptide bond formed through conventional peptide synthesis using conventional coupling reagents as already defined herein.

[0411] Cyclisation of a cyclic GFR-binding compound of the present disclosure may be carried out as described above using conventional peptide bond formation procedures, click chemistry, formation of disulphide bonds, etc.

[0412] Bone

[0413] Certain embodiments of the invention are particularly useful for inducing differentiation of mensenchymal or progenitor stem cells from the bone cell lineage, regenerating bone tissues, repairing bone and protecting from osteoporosis.

[0414] In certain embodiments useful for inducing differentiation of mensenchymal or progenitor stem cells from the bone cell lineage, regenerating bone tissues, repairing bone and protecting from osteoporosis, PEP1 is selected from the group consisting of SAIS, NAIS, SATS and SPIS.

[0415] In certain embodiments useful for inducing differentiation of mensenchymal or progenitor stem cells from the bone cell lineage, regenerating bone tissues, repairing bone and protecting from osteoporosis, PEP2 is selected from the group consisting of LKNYQ, LKKYR, LRKHR and LKYHY.

[0416] In certain embodiments useful for inducing differentiation of mensenchymal or progenitor stem cells from the bone cell lineage, regenerating bone tissues, repairing bone and protecting from osteoporosis, PEP3 is selected from the group consisting of VPT, APT, VPQ, VSQ and TQV.

[0417] In certain embodiments useful for inducing differentiation of mensenchymal or progenitor stem cells from the bone cell lineage, regenerating bone tissues, repairing bone and protecting from osteoporosis, PEP4 is selected from the group consisting of VVE, VVR, VVK, VAE, VRS, VKS and EDH.

[0418] In certain embodiments useful for inducing differentiation of mensenchymal or progenitor stem cells from the bone cell lineage, regenerating bone tissues, repairing bone and protecting from osteoporosis, PEP5 is a peptide of general formula PEP3-AA¹¹-AA¹²; wherein PEP3 is selected from the group consisting of VPT, APT, VPQ, VSQ and TQV; wherein AA¹¹ is selected from the group consisting of E, K, Q, R, A, D, G and H, in particular E, K, Q, A and D; wherein AA¹² is selected from the group consisting of L, M, T, E, Q and H, in particular L. In one particular example, PEP5 is selected from the group consisting of VPTEL, APTKL, APTQL, VPTKL, VPQAL, VSQDL, VPQDL and TQVQL.

[0419] In certain embodiments useful for inducing differentiation of mensenchymal or progenitor stem cells from the bone cell lineage, regenerating bone tissues, repairing bone and protecting from osteoporosis, PEP6 is a peptide of general formula AA²⁶-AA²⁷-AA²⁸-AA²⁹-PEP4; wherein PEP4 is selected from the group consisting of VVE, VVR, VVK, VAE, VRS, VKS and EDH; wherein AA²⁶ is absent or selected from the group consisting of AA^{III} amino acids, preferably is absent or E; wherein AA²⁷ and AA²⁸ are independently selected from the group consisting of AA^{III} and AA^{V} amino acids, preferably AA²⁷ is selected from the group consisting of D, E, N, G, M and T, preferably AA²⁸ is selected from the group consisting of M, I, V and L; wherein AA²⁹ is absent or selected from the group consisting of AA^{II} amino acids, preferably absent or S. In one particular example, PEP6 is selected from the group consisting of DMVVE, EMVVE, NMVVR, NMVVK, EGMSVAE, MIVRS, MIVKS, MVVKS and TLEDH.

[0420] In certain embodiments useful for inducing differentiation of mensenchymal or progenitor stem cells from the bone cell lineage, regenerating bone tissues, repairing bone and protecting from osteoporosis, PEP7 is an amino acid or a peptide with between two and seven amino acids of general formula AA¹-AA²-AA³-AA⁴-AA⁵-AA⁶-AA⁷; wherein AA¹, AA², AA³, AA⁴, and AA⁵ are independently absent or AA^{I} as defined herein; wherein AA⁶ is absent or selected from the group consisting of S, T, C, E, Q, P and R, preferably C, S, T or R; wherein AA⁷ is absent or is selected from the group consisting of S, T, C, E, Q, P and R, preferably is selected from the group consisting of C, S and P; and wherein at least one of AA¹, AA², AA³, AA⁴, AA⁵, AA⁶ or AA⁷ is not absent. In one particular example, PEP7 is selected from the group consisting of KIPKAXX, SIPKAXX, HVTKPTX, YVPKPXX, TVPKPXX, AVPKAXX, KVGKAXX, ASAAPXX, ASASPXX and RNVQXRP.

[0421] In certain embodiments useful for inducing differentiation of mensenchymal or progenitor stem cells from the bone cell lineage, regenerating bone tissues, repairing bone and protecting from osteoporosis, PEP8 is an amino acid or a peptide with between two and six amino acids of general formula AA³³-AA³⁴-AA³⁵-AA³⁶-AA³⁷-AA³⁸; wherein AA³³ is absent or is selected from the group consisting of AA^{I} amino acids at the exception of AA¹ amino acids; AA³⁴ is absent or is selected from the group consisting of AA^{III} and AA^{IV} amino acids; wherein AA³⁵ is absent or is selected from the group consisting of AA^{II} amino acids, preferably is S or C; wherein AA³⁶ is absent or is selected from the group consisting of AA^{III} and AA^{IV} amino acids; wherein AA³⁷ is absent or is selected from the group consisting of AA^{II} amino acids, preferably is S or C; wherein AA³⁸ is absent or is selected from the group consisting of AA^{I}; and wherein at least one of AA³³, AA³⁴, AA³⁵, AA³⁶, AA³⁷ or AA³⁸ is not absent. In one particular example, PEP8 is selected from the group consisting of GXGXR, SXGXH, AXGXH, XGXR, XKXS and LAXKXE.

[0422] In certain embodiments useful for inducing differentiation of mensenchymal or progenitor stem cells from the bone cell lineage, regenerating bone tissues, repairing bone and protecting from osteoporosis, PEP9 is a peptide of general formula AA¹-AA²-AA³-AA⁴-AA⁵-AA⁶-AA⁷-PEP5; wherein PEP5 is a peptide of formula PEP3-AA-AA¹²; wherein PEP3 is selected from the group consisting of VPT, APT, VPQ, VSQ and TQV; wherein AA¹ is selected from the group consisting of E, K, Q, R, A, D, G and H, in particular E, K, Q, A and D; wherein AA¹² is selected from the group consisting of L, M, T, E, Q and H, in particular L; wherein AA¹, AA², AA³, AA⁴, and AA⁵ are independently absent or AA^{I} as defined herein; wherein AA⁶ is absent or selected from the group consisting of S, T, C, E, Q, P and R, preferably C, S, T or R; wherein AA⁷ is selected from the group consisting of S, T, C, E, Q, P and R, preferably is selected from the group consisting of C, S and P. In one particular example, PEP9 is selected from the group consisting of KIPKAXXVPTEL, SIPKAXXVPTEL, HVTKPTXAPTKL, YVPKPXXAPTKL, TVPKPXXAPTQL, AVPKAXXAPTKL, KVGKAXXVPTKL, ASAAPXXVPQAL, ASASPXXVSQDL, ASASPXXVPQDL and RNVQXRPTQVQL.

[0423] In certain embodiments useful for inducing differentiation of mensenchymal or progenitor stem cells from the bone cell lineage, regenerating bone tissues, repairing bone and protecting from osteoporosis, PEP10 is a peptide of general formula PEP6-AA³³-AA³⁴-AA³⁵-AA³⁶-AA³⁷-AA³⁸; wherein PEP6 is a peptide of formula AA²⁶-AA²⁷-AA²⁸-AA²⁹-PEP4; wherein PEP4 is selected from the group consisting of VVE, VVR, VVK, VAE, VRS, VKS and EDH; wherein AA²⁶ is absent or selected from the group consisting of AA^{II} amino acids, preferably E; wherein AA²⁷ and AA²⁸ are independently selected from the group consisting of AA^{III} and AA^{V} amino acids, preferably AA²⁷ is selected from the group consisting of D, E, N, G, M and T, preferably AA²⁸ is selected from the group consisting of M, I, V and L; wherein AA²⁹ is absent or selected from the group consisting of AA^{II} amino acids, preferably absent or S; wherein AA³³ is absent or is selected from the group consisting of AA^{I} amino acids at the exception of AA^{VI} amino acids; AA³⁴ is absent or is selected from the group consisting of AA^{III} and AA^{IV} amino acids; wherein AA³⁵ is absent or is selected from the group consisting of AA^{II} amino acids, preferably is S or C; wherein AA³⁶ is absent or is selected from the group consisting of AA^{III} and AA^{IV} amino acids; wherein AA³⁷ is absent or is selected from the group consisting of AA^{II} amino acids, preferably is S or C; wherein AA³⁸ is absent or is selected from the group consisting of AA^{I}. In one particular example, PEP10 is selected from the group consisting of DMVVEGXGXR, EMVVEGXGXR, NMVVRSXGXH, NMVVRAXGXH, NMVVKAXGXH, EGMSVAEXGXR, MIVRSXKXS, MIVKSXKXS, MVVKSXKXS and TLEDHLAXKXE.

[0424] In certain embodiments useful for inducing differentiation of mensenchymal or progenitor stem cells from the bone cell lineage, regenerating bone tissues, repairing bone and protecting from osteoporosis, PEP12 is a peptide of general formula PEP1-AA¹⁷-PEP11; wherein AA¹⁷ is selected from the group consisting of G, A, V, L, I, P, F, M, W, T and S (in particular is selected from the group consisting of M, I, L, V and T); wherein PEP1 is selected from the group consisting of SAIS, NAIS, SATS and SPIS.

[0425] In certain embodiments useful for inducing differentiation of mensenchymal or progenitor stem cells from the bone cell lineage, regenerating bone tissues, repairing bone and protecting from osteoporosis, PEP11 is a peptide with 3 amino acids of general formula AA¹-AA¹⁹-AA²⁰; wherein AA¹⁸ is selected from the group consisting of L, V, Q, A and R, in particular is L; wherein AA¹⁹ is selected from the group consisting of F, W, H and Y (in particular is an aromatic, polar amino acid such as Y); wherein AA²⁰ is selected from the group consisting of L, F, Y, K, I, V and M, in particular is selected from the group consisting of L, F, Y, and K. In one particular example, PEP11 is selected from the group consisting of LYL, LYF, LYY and LYK.

[0426] The definitions of “PEP” pairs, quadruplets, hexaplets and heptuplet e.g. PEP1:PEP2, PEP12:PEP2, or PEP7:PEP5:PEP12:LINKER:PEP2:PEP6:PEP8, most particularly useful for inducing differentiation of mensenchymal or progenitor stem cells from the bone cell lineage, regenerating bone tissues, repairing bone and protecting from osteoporosis, are as already defined herein to the extent that PEP1 to PEP12 are particularly useful for these applications as defined in the present bone section. For instances: In certain embodiments, useful for inducing differentiation of mensenchymal or progenitor stem cells from the bone cell lineage, regenerating bone tissues, repairing bone and protecting from osteoporosis, the pair PEP1:PEP2 is selected from the group consisting of SAIS:LKNYQ, NAIS:LKKYR, SATS:LRKHR and SPIS:LKYHY.

[0427] In certain embodiments, useful for inducing differentiation of mensenchymal or progenitor stem cells from the bone cell lineage, regenerating bone tissues, repairing bone and protecting from osteoporosis, the pair PEP12:PEP2 is selected from the group consisting of SAIS-AA¹⁷-LYL:LKNYQ, NAIS-AA¹⁷-LYF:LKKYR, SATS-AA¹⁷-LYY:LRKHR and SPIS-AA¹⁷-LYK:LKYHY; wherein AA¹⁷ is selected from the group consisting of G, A, V, L, I, P, F, M, W, T and S (in particular is selected from the group consisting of M, V and T).

[0428] In certain embodiments useful for inducing differentiation of mensenchymal or progenitor stem cells from the bone cell lineage, regenerating bone tissues, repairing bone and protecting from osteoporosis, PEP3 is selected from the group consisting of VPT, APT, VPQ, VSQ and TQV; PEP4 is selected from the group consisting of VVE, VVR, VVK, VAE, VRS, VKS and EDH; and wherein the pair PEP3:PEP4 is selected from the group consisting of VPT:VVE, APT:VVR, APT:VVK, VPT:VAE, VPQ:VRS, VSQ:VKS, VPQ:VKS and TQV:EDH.

[0429] In certain embodiments useful for inducing differentiation of mensenchymal or progenitor stem cells from the bone cell lineage, regenerating bone tissues, repairing bone and protecting from osteoporosis, PEP5 is selected from the group consisting of VPTEL, APTKL, APTQL, VPTKL, VPQAL, VSQDL, VPQDL and TQVQL; PEP6 is selected from the group consisting of DMVVE, EMVVE, NMVVR, NMVVK, EGMSVAE, MIVRS, MIVKS, MVVKS and TLEDH; and wherein the pair PEP5:PEP6 is selected from the group consisting of VPTEL:DMVVE, VPTEL:EMVVE, APTKL:NMVVR, APTQL:NMVVR, APTKL:NMVVK, VPTKL:EGMSVAE, VPQAL:MIVRS, VSQDL:MIVKS, VPQDL:MVVKS and TQVQL:TLEDH.

[0430] In certain embodiments useful for inducing differentiation of mensenchymal or progenitor stem cells from the bone cell lineage, regenerating bone tissues, repairing bone and protecting from osteoporosis, PEP7 is selected from the group consisting of KIPKAXX, SIPKAXX, HVTKPTX, YVPKPXX, TVPKPXX, AVPKAXX, KVGKAXX, ASAAPXX, ASASPXX and RNVQXRP; wherein PEP8 is selected from the group consisting of GXGXR, SXGXH, AXGXH, XGXR, XKXS and LAXKXE; and wherein the pair PEP7:PEP8 is selected from the group consisting of KIPKAXX:GXGXR, SIPKAXX:GXGXR, HVTKPTX:SXGXH, YVPKPXX:SXGXH, KVGKAXX:XGXR, ASAAPXX:XKXS, ASASPXX:XKXS and RNVQXRP:LAXKXE.

[0431] In certain embodiments useful for inducing differentiation of mensenchymal or progenitor stem cells from the bone cell lineage, regenerating bone tissues, repairing bone and protecting from osteoporosis, PEP9 is selected from the group consisting of KIPKAXXVPTEL, SIPKAXXVPTEL, HVTKPTXAPTKL, YVPKPXXAPTKL, TVPKPXXAPTQL, AVPKAXXAPTKL, KVGKAXXVPTKL, ASAAPXXVPQAL, ASASPXXVSQDL, ASASPXXVPQDL and RNVQXRPTQVQL; PEP10 is selected from the group consisting of DMVVEGXGXR, EMVVEGXGXR, NMVVRSXGXH, NMVVRAXGXH, NMVVKAXGXH, EGMSVAEXGXR, MIVRSXKXS, MIVKSXKXS, MVVKSXKXS and TLEDHLAXKXE; and wherein the pair PEP9:PEP10 is selected from the group consisting of KIPKAXXVPTEL:DMVVEGXGXR, SIPKAXXVPTEL:EMVVEGXGXR, HVTKPTXAPTKL:NMVVRSXGXH, YVPKPXXAPTKL:NMVVRSXGXH, KVGKAXXVPTKL:EGMSVAEXGXR, ASAAPXXVPQAL:MIVRSXKXS, ASASPXXVSQDL:MIVKSXKXS, ASASPXXVPQDL:MVVKSXKXS and RNVQXRPTQVQL:TLEDHLAXKXE.

[0432] In certain embodiments useful for inducing differentiation of mensenchymal or progenitor stem cells from the bone cell lineage, regenerating bone tissues, repairing bone and protecting from osteoporosis, PEP5 is selected from the group consisting of VPTEL, APTKL, APTQL, VPTKL, VPQAL, VSQDL, VPQDL and TQVQL; PEP6 is selected from the group consisting of DMVVE, EMVVE, NMVVR, NMVVK, EGMSVAE, MIVRS, MIVKS, MVVKS and TLEDH; and wherein the pair PEP5:PEP6 is selected from the group consisting of VPTEL:DMVVE, VPTEL:EMVVE, APTKL:NMVVR, APTQL:NMVVR, APTKL:NMVVK, VPTKL:EGMSVAE, VPQAL:MIVRS, VSQDL:MIVKS, VPQDL:MVVKS and TQVQL:TLEDH; and wherein the pair PEP5:PEP6 is not VPTEL:DMVVE when PEP1 is SAIS and PEP2 is LKNYQ; wherein the pair PEP5:PEP6 is not VPTEL:EMVVE when PEP1 is SAIS and PEP2 is LKNYQ; wherein the pair PEP5:PEP6 is not APTKL:NMVVR when PEP1 is NAIS and PEP2 is LKKYR; wherein the pair PEP5:PEP6 is not APTQL:NMVVR when PEP1 is NAIS and PEP2 is LKKYR; wherein the pair PEP5:PEP6 is not APTKL:NMVVK when PEP1 is SATS and PEP2 is LRKHR; wherein the pair PEP5:PEP6 is not VPTKL:EGMSVAE when PEP1 is SPIS and PEP2 is LKYHY.

[0433] In certain embodiments useful for inducing differentiation of mensenchymal or progenitor stem cells from the bone cell lineage, regenerating bone tissues, repairing bone and protecting from osteoporosis, PEP9 is selected from the group consisting of KIPKAXXVPTEL, SIPKAXXVPTEL, HVTKPTXAPTKL, YVPKPXXAPTKL, TVPKPXXAPTQL, AVPKAXXAPTKL, KVGKAXXVPTKL, ASAAPXXVPQAL, ASASPXXVSQDL, ASASPXXVPQDL and RNVQXRPTQVQL; PEP10 is selected from the group consisting of DMVVEGXGXR, EMVVEGXGXR, NMVVRSXGXH, NMVVRAXGXH, NMVVKAXGXH, EGMSVAEXGXR, MIVRSXKXS, MIVKSXKXS, MVVKSXKXS and TLEDHLAXKXE; and wherein the pair PEP9:PEP10 is selected from the group consisting of KIPKAXXVPTEL:DMVVEGXGXR, SIPKAXXVPTEL:EMVVEGXGXR, HVTKPTXAPTKL:NMVVRSXGXH, YVPKPXXAPTKL:NMVVRSXGXH, KVGKAXXVPTKL:EGMSVAEXGXR, ASAAPXXVPQAL:MIVRSXKXS, ASASPXXVSQDL:MIVKSXKXS, ASASPXXVPQDL:MVVKSXKXS and RNVQXRPTQVQL:TLEDHLAXKXE; and wherein PEP9:PEP10 is not KIPKAXXVPTEL:DMVVEGXGXR when PEP1 is SAIS and PEP2 is LKNYQ; wherein PEP9:PEP10 is not SIPKAXXVPTEL:EMVVEGXGXR when PEP1 is SAIS and PEP2 is LKNYQ; wherein PEP9:PEP10 is not HVTKPTXAPTKL:NMVVRSXGXH when PEP1 is NAIS and PEP2 is LKKYR; wherein PEP9:PEP10 is not YVPKPXXAPTKL:NMVVRSXGXH when PEP1 is NAIS and PEP2 is LKKYR; wherein PEP9:PEP10 is not TVPKPXXAPTQL:NMVVRAXGXH when PEP1 is NAIS and PEP2 is LKKYR; wherein PEP9:PEP10 is not AVPKAXXAPTKL:NMVVKAXGXH when PEP1 is SATS and PEP2 is LRKHR; wherein PEP9:PEP10 is not KVGKAXXVPTKL:EGMSVAEXGXR when PEP1 is SPIS and PEP2 is LKYHY.

[0434] In certain embodiments useful for inducing differentiation of mensenchymal or progenitor stem cells from the bone cell lineage, regenerating bone tissues, repairing bone and protecting from osteoporosis, PEP1 is selected from the group consisting of SAIS, NAIS, SATS and SPIS; PEP11 is selected from the group consisting of LYL, LFF, LYF, LYY, LYK, LYI, LFI, LYV, VYY, QIM, AKV and RKI; and the pair PEP1:PEP11 is selected from the group consisting of SAIS:LYL, NAIS:LYF, SATS:LYY and SPIS:LYK.

[0435] In one aspect, the present disclosure provides a cyclic GFR-binding compound, wherein said cyclic GFR-binding compound is a cyclic peptide, a variant or analog thereof, or a cyclic peptidomimetic as defined herein, with between 15-60 (in particular between 15-55, more particularly between 19-60, and even more particularly between 19-55) amino acids, or between 15-35 (in particular between 15-30, more particularly between 19-35, and even more particularly between 19-30) amino acids, comprising a peptide with four amino acids (PEP1) or a peptide with eight amino acids (PEP12), a peptide with five amino acids (PEP2), and optionally a pair of peptides selected form the group consisting of PEP3:PEP4, PEP3:PEP6, PEP3:PEP10, PEP5:PEP4, PEP9:PEP4, PEP5:PEP6, PEP5:PEP10, PEP9:PEP6 and PEP9:PEP10; wherein said cyclic GFR-binding compound does not comprise the pair of peptides VPTEL:DMVVE when PEP1 is SAIS and PEP2 is LKNYQ; wherein said cyclic GFR-binding compound does not comprise the pair of peptides VPTEL:EMVVE when PEP1 is SAIS and PEP2 is LKNYQ; wherein said cyclic GFR-binding compound does not comprise the pair of peptides APTKL:NMVVR when PEP1 is NAIS and PEP2 is LKKYR; wherein said cyclic GFR-binding compound does not comprise the pair of peptides APTQL:NMVVR when PEP1 is NAIS and PEP2 is LKKYR; wherein said cyclic GFR-binding compound does not comprise the pair of peptides APTKL:NMVVK when PEP1 is SATS and PEP2 is LRKHR; wherein said cyclic GFR-binding compound does not comprise the pair of peptides VPTKL:EGMSVAE when PEP1 is SPIS and PEP2 is LKYHY.

[0436] In one aspect, the present disclosure provides a cyclic GFR-binding compound, wherein said cyclic GFR-binding compound is a cyclic peptide, a variant or analog thereof, or a cyclic peptidomimetic as defined herein, with between 15-60 (in particular between 15-55, more particularly between 19-60, and even more particularly between 19-55) amino acids, or between 15-35 (in particular between 15-30, more particularly between 19-35, and even more particularly between 19-30) amino acids, comprising a peptide with four amino acids (PEP1) or a peptide with eight amino acids (PEP12), a peptide with five amino acids (PEP2), and optionally a pair of peptides selected form the group consisting of PEP3:PEP4, PEP3:PEP6, PEP3:PEP10, PEP5:PEP4, PEP9:PEP4, PEP5:PEP6, PEP5:PEP10, PEP9:PEP6 and PEP9:PEP10; wherein said cyclic GFR-binding compound does not comprise the pair of peptides KIPKAXXVPTEL:DMVVEGXGXR when PEP1 is SAIS and PEP2 is LKNYQ; wherein said cyclic GFR-binding compound does not comprise the pair of peptides SIPKAXXVPTEL:EMVVEGXGXR when PEP1 is SAIS and PEP2 is LKNYQ; wherein said cyclic GFR-binding compound does not comprise the pair of peptides HVTKPTXAPTKL:NMVVRSXGXH when PEP1 is NAIS and PEP2 is LKKYR; wherein said cyclic GFR-binding compound does not comprise the pair of peptides YVPKPXXAPTKL:NMVVRSXGXH when PEP1 is NAIS and PEP2 is LKKYR; wherein said cyclic GFR-binding compound does not comprise the pair of peptides TVPKPXXAPTQL:NMVVRAXGXH when PEP1 is NAIS and PEP2 is LKKYR; wherein said cyclic GFR-binding compound does not comprise the pair of peptides AVPKAXXAPTKL:NMVVKAXGXH when PEP1 is SATS and PEP2 is LRKHR; wherein said cyclic GFR-binding compound does not comprise the pair of peptides KVGKAXXVPTKL:EGMSVAEXGXR when PEP1 is SPIS and PEP2 is LKYHY.

[0437] In certain embodiments useful for inducing differentiation of mensenchymal or progenitor stem cells from the bone cell lineage, regenerating bone tissues, repairing bone and protecting from osteoporosis, said cyclic GFR-binding compound is a synthetic molecule as defined herein in the definition section.

[0438] In certain embodiments useful for inducing differentiation of mensenchymal or progenitor stem cells from the bone cell lineage, regenerating bone tissues, repairing bone and protecting from osteoporosis, said cyclic GFR-binding compound is a synthetic peptide, or a variant or analog thereof, or a cyclic peptidomimetic.

[0439] Cartilage

[0440] Certain embodiments of the invention are particularly useful for inducing differentiation of mensenchymal or progenitor stem cells from the cartilage cell lineage, regenerating cartilage tissues, repairing cartilage and protecting from, for instance, osteoarthritis, costochondritis, Herniation, achondroplasia or relapsing polychondritis.

[0441] In certain embodiments useful for inducing differentiation of mensenchymal or progenitor stem cells from the cartilage cell lineage, regenerating cartilage tissues, repairing cartilage and protecting from, for instance, osteoarthritis, costochondritis, Herniation, achondroplasia or relapsing polychondritis, PEP1 is selected from the group consisting of SAIS, NAIS, SPIS, EPLP and EPLT.

[0442] In certain embodiments useful for inducing differentiation of mensenchymal or progenitor stem cells from the cartilage cell lineage, regenerating cartilage tissues, repairing cartilage and protecting from, for instance, osteoarthritis, costochondritis, Herniation, achondroplasia or relapsing polychondritis, PEP2 is selected from the group consisting of LKNYQ, LKKYR, YKQYE and EQLSN.

[0443] In certain embodiments useful for inducing differentiation of mensenchymal or progenitor stem cells from the cartilage cell lineage, regenerating cartilage tissues, repairing cartilage and protecting from, for instance, osteoarthritis, costochondritis, Herniation, achondroplasia or relapsing polychondritis, PEP3 is selected from the group consisting of VPT, APT, VPQ and VSQ.

[0444] In certain embodiments useful for inducing differentiation of mensenchymal or progenitor stem cells from the cartilage cell lineage, regenerating cartilage tissues, repairing cartilage and protecting from, for instance, osteoarthritis, costochondritis, Herniation, achondroplasia or relapsing polychondritis, PEP4 is selected from the group consisting of VVE, VVR, VRS and VKS.

[0445] In certain embodiments useful for inducing differentiation of mensenchymal or progenitor stem cells from the cartilage cell lineage, regenerating cartilage tissues, repairing cartilage and protecting from, for instance, osteoarthritis, costochondritis, Herniation, achondroplasia or relapsing polychondritis, PEP5 is a peptide of general formula PEP3-AA¹¹-AA¹²; wherein PEP3 is selected from the group consisting of VPT, APT, VPQ and VSQ; wherein AA¹¹ is selected from the group consisting of E, K, Q, R, A, D, G and H, in particular E, K, Q, R, A and D; wherein AA¹² is selected from the group consisting of L, M, T, E, Q and H, in particular is L. In one particular example, PEP5 is selected from the group consisting of VPTEL, APTKL, APTQL, VPTRL, VPQAL, VSQDL and VPQDL.

[0446] In certain embodiments useful for inducing differentiation of mensenchymal or progenitor stem cells from the cartilage cell lineage, regenerating cartilage tissues, repairing cartilage and protecting from, for instance, osteoarthritis, costochondritis, Herniation, achondroplasia or relapsing polychondritis, PEP6 is a peptide of general formula AA²⁶-AA²⁷-AA²⁸-AA²⁹-PEP4; wherein PEP4 is selected from the group consisting of VVE, VVR, VRS and VKS; wherein AA²⁶ is absent or selected from the group consisting of AA^{III} amino acids, preferably is absent; wherein AA²⁷ and AA²⁸ are independently selected from the group consisting of AA^{III} and AA^{V} amino acids, preferably AA²⁷ is selected from the group consisting of D, E, N and M, preferably AA²⁸ is selected from the group consisting of M, I and V; wherein AA²⁹ is absent or selected from the group consisting of AA^{II} amino acids, preferably absent. In one particular example, PEP6 is selected from the group consisting of DMVVE, EMVVE, NMVVR, DMVVE, MIVRS, MIVKS and MVVKS.

[0447] In certain embodiments useful for inducing differentiation of mensenchymal or progenitor stem cells from the cartilage cell lineage, regenerating cartilage tissues, repairing cartilage and protecting from, for instance, osteoarthritis, costochondritis, Herniation, achondroplasia or relapsing polychondritis, PEP7 is an amino acid or a peptide with between two and seven amino acids of general formula AA¹-AA²-AA³-AA⁴-AA⁵-AA⁶-AA⁷; wherein AA¹, AA², AA³, AA⁴, and AA⁵ are independently absent or AA^{I} as defined herein; wherein AA⁶ is absent or selected from the group consisting of S, T, C, E, Q, P and R, preferably is S, C or T; wherein AA⁷ is absent or is selected from the group consisting of S, T, C, E, Q, P and R, preferably is S or C; and wherein at least one of AA¹, AA², AA³, AA⁴, AA⁵, AA⁶ or AA⁷ is not absent. In one particular example, PEP7 is selected from the group consisting of KIPKAXX, SIPKAXX, HVTKPTX, YVPKPXX, TVPKPXX, STPPTXX, ASAAPXX and ASASPXX.

[0448] In certain embodiments useful for inducing differentiation of mensenchymal or progenitor stem cells from the cartilage cell lineage, regenerating cartilage tissues, repairing cartilage and protecting from, for instance, osteoarthritis, costochondritis, Herniation, achondroplasia or relapsing polychondritis, PEP8 is an amino acid or a peptide with between two and six amino acids of general formula AA³³-AA³⁴-AA³⁵-AA³⁶-AA³⁷-AA³⁸; wherein AA³³ is absent or is selected from the group consisting of AA^{I} amino acids at the exception of AA^{VI} amino acids, preferably absent, G, S or A; AA³⁴ is absent or is selected from the group consisting of AA^{III} and AA^{IV} amino acids, preferably absent; wherein AA³⁵ is absent or is selected from the group consisting of AA^{II} amino acids, preferably is S or C; wherein AA³⁶ is absent or is selected from the group consisting of AA^{III} and AA^{IV} amino acids, preferably is G or K; wherein AA³⁷ is absent or is selected from the group consisting of AA^{II} amino acids, preferably is S or C; wherein AA³⁸ is absent or is selected from the group consisting of AA^{I}; and wherein at least one of AA³³, AA³⁴, AA³⁵, AA³⁶, AA³⁷ or AA³⁸ is not absent. In one particular example, PEP8 is selected from the group consisting of GXGXR, SXGXH, AXGXH, SXGXR and XKXS.

[0449] In certain embodiments useful for inducing differentiation of mensenchymal or progenitor stem cells from the cartilage cell lineage, regenerating cartilage tissues, repairing cartilage and protecting from, for instance, osteoarthritis, costochondritis, Herniation, achondroplasia or relapsing polychondritis, PEP9 is a peptide of general formula AA¹-AA²-AA³-AA⁴-AA⁵-AA⁶-AA⁷-PEP5; wherein PEP5 is a peptide of formula PEP3-AA¹¹-AA¹²; wherein PEP3 is selected from the group consisting of VPT, APT, VPQ and VSQ; wherein AA¹¹ is selected from the group consisting of E, K, Q, R, A, D, G and H, in particular E, K, Q, R, A and D; wherein AA¹² is selected from the group consisting of L, M, T, E, Q and H, in particular is L; wherein AA¹, AA², AA³, AA⁴, and AA⁵ are independently absent or AA^{I} as defined herein; wherein AA⁶ is absent or selected from the group consisting of S, T, C, E, Q, P and R, preferably is S, C or T; wherein AA⁷ is selected from the group consisting of S, T, C, E, Q, P and R, preferably is S or C. In one particular example, PEP9 is selected from the group consisting of KIPKAXXVPTEL, SIPKAXXVPTEL, HVTKPTXAPTKL, YVPKPXXAPTKL, TVPKPXXAPTQL, STPPTXXVPTRL, ASAAPXXVPQAL, ASASPXXVSQDL and ASASPXXVPQDL.

[0450] In certain embodiments useful for inducing differentiation of mensenchymal or progenitor stem cells from the cartilage cell lineage, regenerating cartilage tissues, repairing cartilage and protecting from, for instance, osteoarthritis, costochondritis, Herniation, achondroplasia or relapsing polychondritis, PEP10 is a peptide of general formula PEP6-AA³³-AA³⁴-AA³⁵-AA³⁶-AA³⁷-AA³⁸; wherein PEP6 is a peptide of formula AA²⁶-AA²⁷-AA²⁸-AA²⁹-PEP4; wherein PEP4 is selected from the group consisting of VVE, VVR, VRS and VKS; wherein AA²⁶ is absent or selected from the group consisting of AA^{III} amino acids, preferably absent; wherein AA²⁷ and AA²⁸ are independently selected from the group consisting of AA^{III} and AA^{V} amino acids, preferably AA²⁷ is selected from the group consisting of D, E, N and M, preferably AA²⁸ is selected from the group consisting of M, I and V; wherein AA²⁹ is absent or selected from the group consisting of AA^{II} amino acids, preferably absent; wherein AA³³ is absent or is selected from the group consisting of AA^{I} amino acids at the exception of AA^{V} amino acids, preferably absent, G, S or A; AA³⁴ is absent or is selected from the group consisting of AA^{III} and AA^{IV} amino acids, preferably absent; wherein AA³⁵ is absent or is selected from the group consisting of AA^{II} amino acids, preferably is S or C; wherein AA³⁶ is absent or is selected from the group consisting of AA^{III} and AA^{IV} amino acids, preferably is G or K; wherein AA³⁷ is absent or is selected from the group consisting of AA^{II} amino acids, preferably is S or C; wherein AA³⁸ is absent or is selected from the group consisting of AA^{I}. In one particular example, PEP10 is selected from the group consisting of DMVVEGXGXR, EMVVEGXGXR, NMVVRSXGXH, NMVVRAXGXH, DMVVESXGXR, MIVRSXKXS, MIVKSXKXS and MVVKSXKXS.

[0451] In certain embodiments useful for inducing differentiation of mensenchymal or progenitor stem cells from the cartilage cell lineage, regenerating cartilage tissues, repairing cartilage and protecting from, for instance, osteoarthritis, costochondritis, Herniation, achondroplasia or relapsing polychondritis, PEP12 is a peptide of general formula PEP1-AA¹⁷-PEP11; wherein AA¹⁷ is selected from the group consisting of G, A, V, L, I, P, F, M, W, T and S (in particular is selected from the group consisting of M, I, L, V and T); wherein PEP1 is selected from the group consisting of SAIS, NAIS, SPIS, EPLP and EPLT.

[0452] In certain embodiments useful for inducing differentiation of mensenchymal or progenitor stem cells from the cartilage cell lineage, regenerating cartilage tissues, repairing cartilage and protecting from, for instance, osteoarthritis, costochondritis, Herniation, achondroplasia or relapsing polychondritis, PEP11 is a peptide with 3 amino acids of general formula AA¹⁸-AA¹⁹-AA²⁰; wherein AA¹⁸ is selected from the group consisting of L, V, Q, A and R, in particular is L or V; wherein AA¹⁹ is selected from the group consisting of F, W, H and Y, in particular is Y or F; wherein AA²⁰ is selected from the group consisting of L, F, Y and I. In one particular example, PEP11 is selected from the group consisting of LYL, LYF, LFI, VYY and LYY.

[0453] The definitions of “PEP” pairs, quadruplets, hexaplets and heptuplet e.g. PEP1:PEP2, PEP12:PEP2, or PEP7:PEP5:PEP12:LINKER:PEP2:PEP6:PEP8, most particularly useful for inducing differentiation of mensenchymal or progenitor stem cells from the cartilage cell lineage, regenerating cartilage tissues, repairing cartilage and protecting from, for instance, osteoarthritis, costochondritis, Herniation, achondroplasia or relapsing polychondritis, are as already defined herein to the extent that PEP1 to PEP12 are particularly useful for these applications. For instances:

[0454] In certain embodiments useful for inducing differentiation of mensenchymal or progenitor stem cells from the cartilage cell lineage, regenerating cartilage tissues, repairing cartilage and protecting from, for instance, osteoarthritis, costochondritis, Herniation, achondroplasia or relapsing polychondritis, the pair PEP1:PEP2 is selected from the group consisting of SAIS:LKNYQ, NAIS:LKKYR, SPIS:YKQYE, EPLP:EQLSN and EPLT:EQLSN.

[0455] In certain embodiments useful for inducing differentiation of mensenchymal or progenitor stem cells from the cartilage cell lineage, regenerating cartilage tissues, repairing cartilage and protecting from, for instance, osteoarthritis, costochondritis, Herniation, achondroplasia or relapsing polychondritis, the pair PEP12:PEP2 is selected from the group consisting of SAIS-AA¹⁷-LYL:LKNYQ, NAIS-AA¹⁷-LYF:LKKYR, SPIS-AA¹⁷-LFI:YKQYE, EPLP-AA¹⁷-VYY:EQLSN and EPLT-AA¹⁷-LYY:EQLSN; wherein AA¹⁷ is selected from the group consisting of G, A, V, L, I, P, F, M, W, T and S (in particular is selected from the group consisting of M, I, V and T).

[0456] In certain embodiments useful for inducing differentiation of mensenchymal or progenitor stem cells from the cartilage cell lineage, regenerating cartilage tissues, repairing cartilage and protecting from, for instance, osteoarthritis, costochondritis, Herniation, achondroplasia or relapsing polychondritis, PEP3 is selected from the group consisting of VPT, APT, VPQ and VSQ; PEP4 is selected from the group consisting of VVE, VVR, VRS and VKS; and wherein the pair PEP3:PEP4 is selected from the group consisting of VPT:VVE, APT:VVR, VPQ:VRS, VSQ:VKS and VPQ:VKS.

[0457] In certain embodiments useful for inducing differentiation of mensenchymal or progenitor stem cells from the cartilage cell lineage, regenerating cartilage tissues, repairing cartilage and protecting from, for instance, osteoarthritis, costochondritis, Herniation, achondroplasia or relapsing polychondritis, PEP5 is selected from the group consisting of VPTEL, APTKL, APTQL, VPTRL, VPQAL, VSQDL and VPQDL; PEP6 is selected from the group consisting of DMVVE, EMVVE, NMVVR, DMVVE, MIVRS, MIVKS and MVVKS; and wherein the pair PEP5:PEP6 is selected from the group consisting of VPTEL:DMVVE, VPTEL:EMVVE, APTKL:NMVVR, APTQL:NMVVR, VPTRL:DMVVE, VPQAL:MIVRS, VSQDL:MIVKS and VPQDL:MVVKS.

[0458] In certain embodiments useful for inducing differentiation of mensenchymal or progenitor stem cells from the cartilage cell lineage, regenerating cartilage tissues, repairing cartilage and protecting from, for instance, osteoarthritis, costochondritis, Herniation, achondroplasia or relapsing polychondritis, PEP7 is selected from the group consisting of KIPKAXX, SIPKAXX, HVTKPTX, YVPKPXX, TVPKPXX, STPPTXX, ASAAPXX and ASASPXX; wherein PEP8 is selected from the group consisting of GXGXR, SXGXH, AXGXH, SXGXR and XKXS; and wherein the pair PEP7:PEP8 is selected from the group consisting of KIPKAXX:GXGXR, SIPKAXX:GXGXR, HVTKPTX:SXGXH, YVPKPXX:SXGXH, TVPKPXX:AXGXH, STPPTXX:SXGSR, ASAAPXX:XKXS and ASASPXX:XKXS.

[0459] In certain embodiments useful for inducing differentiation of mensenchymal or progenitor stem cells from the cartilage cell lineage, regenerating cartilage tissues, repairing cartilage and protecting from, for instance, osteoarthritis, costochondritis, Herniation, achondroplasia or relapsing polychondritis, PEP9 is selected from the group consisting of KIPKAXXVPTEL, SIPKAXXVPTEL, HVTKPTXAPTKL, YVPKPXXAPTKL, TVPKPXXAPTQL, STPPTXXVPTRL, ASAAPXXVPQAL, ASASPXXVSQDL and ASASPXXVPQDL; PEP10 is selected from the group consisting of DMVVEGXGXR, EMVVEGXGXR, NMVVRSXGXH, NMVVRAXGXH, DMVVESXGXR, MIVRSXKXS, MIVKSXKXS and MVVKSXKXS; and wherein the pair PEP9:PEP10 is selected from the group consisting of KIPKAXXVPTEL:DMVVEGXGXR, SIPKAXXVPTEL:EMVVEGXGXR, HVTKPTXAPTKL:NMVVRSXGXH, YVPKPXXAPTKL:NMVVRSXGXH, TVPKPXXAPTQL:NMVVRAXGXH, STPPTXXVPTRL:DMVVESXGSR, ASAAPXXVPQAL:MIVRSXKXS, ASASPXXVSQDL:MIVKSXKXS and ASASPXXVPQDL:MVVKSXKXS.

[0460] In certain embodiments useful for inducing differentiation of mensenchymal or progenitor stem cells from the cartilage cell lineage, regenerating cartilage tissues, repairing cartilage and protecting from, for instance, osteoarthritis, costochondritis, Herniation, achondroplasia or relapsing polychondritis, PEP5 is selected from the group consisting of VPTEL, APTKL, APTQL, VPTRL, VPQAL, VSQDL and VPQDL; PEP6 is selected from the group consisting of DMVVE, EMVVE, NMVVR, DMVVE, MIVRS, MIVKS and MVVKS; and wherein the pair PEP5:PEP6 is selected from the group consisting of VPTEL:DMVVE, VPTEL:EMVVE, APTKL:NMVVR, APTQL:NMVVR, VPTRL:DMVVE, VPQAL:MIVRS, VSQDL:MIVKS and VPQDL:MVVKS; wherein the pair PEP5:PEP6 is not VPTEL:DMVVE when PEP1 is SAIS and PEP2 is LKNYQ; wherein the pair PEP5:PEP6 is not VPTEL:EMVVE when PEP1 is SAIS and PEP2 is LKNYQ; wherein the pair PEP5:PEP6 is not APTKL:NMVVR when PEP1 is NAIS and PEP2 is LKKYR; wherein the pair PEP5:PEP6 is not APTQL:NMVVR when PEP1 is NAIS and PEP2 is LKKYR; wherein the pair PEP5:PEP6 is not VPTRL:DMVVE when PEP1 is SPIS and PEP2 is YKQYE; wherein the pair PEP5:PEP6 is not VPQAL:MIVRS when PEP1 is EPLP and PEP2 is EQLSN; wherein the pair PEP5:PEP6 is not VSQDL:MIVKS when PEP1 is EPLT and PEP2 is EQLSN; wherein the pair PEP5:PEP6 is not VPQDL:MVVKS when PEP1 is EPLT and PEP2 is EQLSN.

[0461] In certain embodiments useful for inducing differentiation of mensenchymal or progenitor stem cells from the cartilage cell lineage, regenerating cartilage tissues, repairing cartilage and protecting from, for instance, osteoarthritis, costochondritis, Herniation, achondroplasia or relapsing polychondritis, PEP9 is selected from the group consisting of KIPKAXXVPTEL, SIPKAXXVPTEL, HVTKPTXAPTKL, YVPKPXXAPTKL, TVPKPXXAPTQL, STPPTXXVPTRL, ASAAPXXVPQAL, ASASPXXVSQDL and ASASPXXVPQDL; PEP10 is selected from the group consisting of DMVVEGXGXR, EMVVEGXGXR, NMVVRSXGXH, NMVVRAXGXH, DMVVESXGXR, MIVRSXKXS, MIVKSXKXS and MVVKSXKXS; and wherein the pair PEP9:PEP10 is selected from the group consisting of KIPKAXXVPTEL:DMVVEGXGXR, SIPKAXXVPTEL:EMVVEGXGXR, HVTKPTXAPTKL:NMVVRSXGXH, YVPKPXXAPTKL:NMVVRSXGXH, TVPKPXXAPTQL:NMVVRAXGXH, STPPTXXVPTRL:DMVVESXGSR, ASAAPXXVPQAL:MIVRSXKXS, ASASPXXVSQDL:MIVKSXKXS and ASASPXXVPQDL:MVVKSXKXS; wherein PEP9:PEP10 is not KIPKAXXVPTEL:DMVVEGXGXR when PEP1 is SAIS and PEP2 is LKNYQ; wherein PEP9:PEP10 is not SIPKAXXVPTEL:EMVVEGXGXR when PEP1 is SAIS and PEP2 is LKNYQ; wherein PEP9:PEP10 is not HVTKPTXAPTKL:NMVVRSXGXH when PEP1 is NAIS and PEP2 is LKKYR; wherein PEP9:PEP10 is not YVPKPXXAPTKL:NMVVRSXGXH when PEP1 is NAIS and PEP2 is LKKYR; wherein PEP9:PEP10 is not TVPKPXXAPTQL:NMVVRAXGXH when PEP1 is NAIS and PEP2 is LKKYR; wherein PEP9:PEP10 is not STPPTXXVPTRL:DMVVESXGSR when PEP1 is SPIS; wherein PEP9:PEP10 is not ASAAPXXVPQAL:MIVRSXKXS when PEP1 is EPLP and PEP2 is EQLSN; wherein PEP9:PEP10 is not ASASPXXVSQDL:MIVKSXKXS when PEP1 is EPLT and PEP2 is EQLSN; wherein PEP9:PEP10 is not ASASPXXVPQDL:MVVKSXKXS when PEP1 is EPLT and PEP2 is EQLSN.

[0462] In certain embodiments useful for inducing differentiation of mensenchymal or progenitor stem cells from the cartilage cell lineage, regenerating cartilage tissues, repairing cartilage and protecting from, for instance, osteoarthritis, costochondritis, Herniation, achondroplasia or relapsing polychondritis, PEP1 is selected from the group consisting of SAIS, NAIS, SPIS, EPLP and EPLT; PEP11 is selected from the group consisting of LYL, LYF, LFI, VYY and LYY; and the pair PEP1:PEP11 is selected from the group consisting of SAIS:LYL, NAIS:LYF, SPIS:LFI, EPLP:VYY and EPLT:LYY.

[0463] In one aspect, the present disclosure provides a cyclic GFR-binding compound, wherein said cyclic GFR-binding compound is a cyclic peptide, a variant or analog thereof, or a cyclic peptidomimetic as defined herein, with between 15-60 (in particular between 15-55, more particularly between 19-60, and even more particularly between 19-55) amino acids, or between 15-35 (in particular between 15-30, more particularly between 19-35, and even more particularly between 19-30) amino acids, comprising a peptide with four amino acids (PEP1) or a peptide with eight amino acids (PEP12), a peptide with five amino acids (PEP2), and optionally a pair of peptides selected form the group consisting of PEP3:PEP4, PEP3:PEP6, PEP3:PEP10, PEP5:PEP4, PEP9:PEP4, PEP5:PEP6, PEP5:PEP10, PEP9:PEP6 and PEP9:PEP10; wherein said cyclic GFR-binding compound does not comprise the pair of peptides VPTEL:DMVVE when PEP1 is SAIS and PEP2 is LKNYQ; wherein said cyclic GFR-binding compound does not comprise the pair of peptides VPTEL:EMVVE when PEP1 is SAIS and PEP2 is LKNYQ; wherein said cyclic GFR-binding compound does not comprise the pair of peptides APTKL:NMVVR when PEP1 is NAIS and PEP2 is LKKYR; wherein said cyclic GFR-binding compound does not comprise the pair of peptides APTQL:NMVVR when PEP1 is NAIS and PEP2 is LKKYR; wherein said cyclic GFR-binding compound does not comprise the pair of peptides VPTRL:DMVVE when PEP1 is SPIS and PEP2 is YKQYE; wherein said cyclic GFR-binding compound does not comprise the pair of peptides VPQAL:MIVRS when PEP1 is EPLP and PEP2 is EQLSN; wherein said cyclic GFR-binding compound does not comprise the pair of peptides VSQDL:MIVKS when PEP1 is EPLT and PEP2 is EQLSN; wherein said cyclic GFR-binding compound does not comprise the pair of peptides VPQDL:MVVKS when PEP1 is EPLT and PEP2 is EQLSN.

[0464] In one aspect, the present disclosure provides a cyclic GFR-binding compound, wherein said cyclic GFR-binding compound is a cyclic peptide, a variant or analog thereof, or a cyclic peptidomimetic as defined herein, with between 15-60 (in particular between 15-55, more particularly between 19-60, and even more particularly between 19-55) amino acids, or between 15-35 (in particular between 15-30, more particularly between 19-35, and even more particularly between 19-30) amino acids, comprising a peptide with four amino acids (PEP1) or a peptide with eight amino acids (PEP12), a peptide with five amino acids (PEP2), and optionally a pair of peptides selected form the group consisting of PEP3:PEP4, PEP3:PEP6, PEP3:PEP10, PEP5:PEP4, PEP9:PEP4, PEP5:PEP6, PEP5:PEP10, PEP9:PEP6 and PEP9:PEP10; wherein said cyclic GFR-binding compound does not comprise the pair of peptides KIPKAXXVPTEL:DMVVEGXGXR when PEP1 is SAIS and PEP2 is LKNYQ; wherein said cyclic GFR-binding compound does not comprise the pair of peptides SIPKAXXVPTEL:EMVVEGXGXR when PEP1 is SAIS and PEP2 is LKNYQ; wherein said cyclic GFR-binding compound does not comprise the pair of peptides HVTKPTXAPTKL:NMVVRSXGXH when PEP1 is NAIS and PEP2 is LKKYR; wherein said cyclic GFR-binding compound does not comprise the pair of peptides YVPKPXXAPTKL:NMVVRSXGXH when PEP1 is NAIS and PEP2 is LKKYR; wherein said cyclic GFR-binding compound does not comprise the pair of peptides TVPKPXXAPTQL:NMVVRAXGXH when PEP1 is NAIS and PEP2 is LKKYR; wherein said cyclic GFR-binding compound does not comprise the pair of peptides STPPTXXVPTRL:DMVVESXGSR when PEP1 is SPIS; wherein said cyclic GFR-binding compound does not comprise the pair of peptides ASAAPXXVPQAL:MIVRSXKXS when PEP1 is EPLP and PEP2 is EQLSN; wherein said cyclic GFR-binding compound does not comprise the pair of peptides ASASPXXVSQDL:MIVKSXKXS when PEP1 is EPLT and PEP2 is EQLSN; wherein said cyclic GFR-binding compound does not comprise the pair of peptides ASASPXXVPQDL:MVVKSXKXS when PEP1 is EPLT and PEP2 is EQLSN.

[0465] In certain embodiments useful for inducing differentiation of mensenchymal or progenitor stem cells from the cartilage cell lineage, regenerating cartilage tissues, repairing cartilage and protecting from, for instance, osteoarthritis, costochondritis, Herniation, achondroplasia or relapsing polychondritis, said cyclic GFR-binding compound is a synthetic molecule as defined herein in the definition section.

[0466] In certain embodiments useful for inducing differentiation of mensenchymal or progenitor stem cells from the cartilage cell lineage, regenerating cartilage tissues, repairing cartilage and protecting from, for instance, osteoarthritis, costochondritis, Herniation, achondroplasia or relapsing polychondritis, said cyclic GFR-binding compound is a synthetic peptide, or a variant or analog thereof, or a cyclic peptidomimetic.

[0467] Vascular Tissues

[0468] Certain embodiments of the invention are particularly useful for inducing differentiation of mensenchymal or progenitor stem cells from the vascular cell lineage, enhancing of endothelization, vascularization/angiogenesis, protecting a subject from heart tissue degeneration-related diseases, disorders, conditions or pathologies.

[0469] In other embodiments also useful for inducing differentiation of mensenchymal or progenitor stem cells from the vascular cell lineage, enhancing of endothelization, vascularization/angiogenesis, protecting a subject from heart tissue degeneration-related diseases, disorders, conditions or pathologies, PEP1 is selected from the group consisting of SNIT, RPVQ and RSVK.

[0470] In other embodiments also useful for inducing differentiation of mensenchymal or progenitor stem cells from the vascular cell lineage, enhancing of endothelization, vascularization/angiogenesis, protecting a subject from heart tissue degeneration-related diseases, disorders, conditions or pathologies, PEP2 is selected from the group consisting of IGEMS, LGEMS, KEVQV and KKATV.

[0471] In other embodiments also useful for inducing differentiation of mensenchymal or progenitor stem cells from the vascular cell lineage, enhancing of endothelization, vascularization/angiogenesis, protecting a subject from heart tissue degeneration-related diseases, disorders, conditions or pathologies, PEP3 is selected from the group consisting of VPT, SRV and TQV.

[0472] In other embodiments also useful for inducing differentiation of mensenchymal or progenitor stem cells from the vascular cell lineage, enhancing of endothelization, vascularization/angiogenesis, protecting a subject from heart tissue degeneration-related diseases, disorders, conditions or pathologies, PEP4 is selected from the group consisting of QHN, EHS, EEH and EDH.

[0473] In other embodiments also useful for inducing differentiation of mensenchymal or progenitor stem cells from the vascular cell lineage, enhancing of endothelization, vascularization/angiogenesis, protecting a subject from heart tissue degeneration-related diseases, disorders, conditions or pathologies, PEP5 is a peptide of general formula PEP3-AA¹¹-AA¹²; wherein PEP3 is selected from the group consisting of VPT, SRV and TQV; wherein AA¹¹ is selected from the group consisting of E, K, Q, R, A, D, G and H, in particular is E, G, H and Q; wherein AA¹² is selected from the group consisting of L, M, T, E, Q and H, in particular is selected from the group consisting of E, Q, H and L. In one particular example, PEP5 is selected from the group consisting of VPTGQ, VPTEE, SRVHH and TQVQL.

[0474] In other embodiments also useful for inducing differentiation of mensenchymal or progenitor stem cells from the vascular cell lineage, enhancing of endothelization, vascularization/angiogenesis, protecting a subject from heart tissue degeneration-related diseases, disorders, conditions or pathologies, PEP6 is a peptide of general formula AA²⁶-AA²⁷-AA²⁸-AA²⁹-PEP4; wherein PEP4 is selected from the group consisting of QHN, EHS, EEH and EDH; wherein AA²⁶ is absent or selected from the group consisting of AA^{III} amino acids, preferably is absent; wherein AA²⁷ and AA²⁸ are independently selected from the group consisting of AA^{III} and AA^{V} amino acids, preferably AA²⁷ is selected from the group consisting of F, L, R and T, preferably AA²⁸ is L or E; wherein AA²⁹ is absent or selected from the group consisting of AA^{II} amino acids, preferably is absent. In one particular example, PEP6 is selected from the group consisting of LEEHS, FLQHN, RLEEH and TLEDH.

[0475] In other embodiments also useful for inducing differentiation of mensenchymal or progenitor stem cells from the vascular cell lineage, enhancing of endothelization, vascularization/angiogenesis, protecting a subject from heart tissue degeneration-related diseases, disorders, conditions or pathologies, PEP7 is an amino acid or a peptide with between two and seven amino acids of general formula AA¹-AA²-AA³-AA⁴-AA⁵-AA⁶-AA⁷; wherein AA¹, AA², AA³, AA⁴, and AA⁵ are independently absent or AA^{I} as defined herein; wherein AA⁶ is absent or selected from the group consisting of S, T, C, E, Q, P and R, preferably is selected from the group consisting of E, Q and R; wherein AA⁷ is absent or is selected from the group consisting of S, T, C, E, Q, P and R, preferably is selected from the group consisting of S, C and P; and wherein at least one of AA¹, AA², AA³, AA⁴, AA⁵, AA⁶ or AA⁷ is not absent. In one particular example, PEP7 is selected from the group consisting of NDEGLEX, SSVKXQP and RNVQXRP.

[0476] In other embodiments also useful for inducing differentiation of mensenchymal or progenitor stem cells from the vascular cell lineage, enhancing of endothelization, vascularization/angiogenesis, protecting a subject from heart tissue degeneration-related diseases, disorders, conditions or pathologies, PEP8 is an amino acid or a peptide with between two and six amino acids of general formula AA³³-AA³⁴-AA³⁵-AA³⁶-AA³⁷-AA³⁸; wherein AA³³ is absent or is selected from the group consisting of AA^{I} amino acids at the exception of AA¹ amino acids, in particular is selected from the group consisting of K, Q and L; AA³⁴ is absent or is selected from the group consisting of AA^{III} and AA^{IV} amino acids, in particular is absent, E or A; wherein AA³⁵ is absent or is selected from the group consisting of AA^{II} amino acids, preferably is S or C; wherein AA³⁶ is absent or is selected from the group consisting of AA^{III} and AA^{V} amino acids, in particular is selected from the group consisting of E, A and K; wherein AA³⁷ is absent or is selected from the group consisting of AA^{II} amino acids, preferably is S or C; wherein AA³⁸ is absent or is selected from the group consisting of AA^{I}, in particular is selected from the group consisting of R, A and E; and wherein at least one of AA³³, AA³⁴, AA³⁵, AA³⁶, AA³⁷ or AA³⁸ is not absent. In one particular example, PEP8 is selected from the group consisting of KXEXR, QXEXR, LEXAXA and LAXKXE.

[0477] In other embodiments also useful for inducing differentiation of mensenchymal or progenitor stem cells from the vascular cell lineage, enhancing of endothelization, vascularization/angiogenesis, protecting a subject from heart tissue degeneration-related diseases, disorders, conditions or pathologies, PEP9 is a peptide of general formula AA¹-AA²-AA³-AA⁴-AA⁵-AA⁶-AA⁷-PEP5; wherein PEP5 is a peptide of formula PEP3-AA¹¹-AA¹²; wherein PEP3 is selected from the group consisting of VPT, SRV and TQV; wherein AA¹ is selected from the group consisting of E, K, Q, R, A, D, G and H, in particular is E, G, H and Q; wherein AA¹² is selected from the group consisting of L, M, T, E, Q and H, in particular is selected from the group consisting of E, Q, H and L; wherein AA¹, AA², AA³, AA⁴, and AA⁵ are independently absent or AA^{I} as defined herein; wherein AA⁶ is absent or selected from the group consisting of S, T, C, E, Q, P and R, preferably is selected from the group consisting of E, Q and R; wherein AA⁷ is selected from the group consisting of S, T, C, E, Q, P and R, preferably is selected from the group consisting of S, C and P. In one particular example, PEP9 is selected from the group consisting of NDEGLEXVPTEE, NDEGLEXVPTGQ, SSVKXQPSRVHH and RNVQXRPTQVQL.

[0478] In other embodiments also useful for inducing differentiation of mensenchymal or progenitor stem cells from the vascular cell lineage, enhancing of endothelization, vascularization/angiogenesis, protecting a subject from heart tissue degeneration-related diseases, disorders, conditions or pathologies, PEP10 is a peptide of general formula PEP6-AA³³-AA³⁴-AA³⁵-AA³⁶-AA³⁷-AA³⁸; wherein PEP6 is a peptide of formula AA²⁶-AA²⁷-AA²⁸-AA²⁹-PEP4; wherein PEP4 is selected from the group consisting of QHN, EHS, EEH and EDH; wherein AA²⁶ is absent or selected from the group consisting of AA^{III} amino acids, preferably is absent; wherein AA²⁷ and AA²⁸ are independently selected from the group consisting of AA^{III} and AA^{V} amino acids, preferably AA²⁷ is selected from the group consisting of F, L, R and T, preferably AA²⁸ is L or E; wherein AA²⁹ is absent or selected from the group consisting of AA^{II} amino acids, preferably is absent; wherein AA³³ is absent or is selected from the group consisting of AA^{I} amino acids at the exception of AA^{VI} amino acids, in particular is selected from the group consisting of K, Q and L; AA³⁴ is absent or is selected from the group consisting of AA^{III} and AA^{IV} amino acids, in particular is absent, E or A; wherein AA³⁵ is absent or is selected from the group consisting of AA^{II} amino acids, preferably is S or C; wherein AA³⁶ is absent or is selected from the group consisting of AA^{II} and AA^{I} amino acids, in particular is selected from the group consisting of E, A and K; wherein AA³⁷ is absent or is selected from the group consisting of AA^{II} amino acids, preferably is S or C; wherein AA³⁸ is absent or is selected from the group consisting of AA^{I}, in particular is selected from the group consisting of R, A and E. In one particular example, PEP10 is selected from the group consisting of FLQHNKXEXR, LEEHSQXEXR, RLEEHLEXAXA and TLEDHLAXKXE.

[0479] In other embodiments also useful for inducing differentiation of mensenchymal or progenitor stem cells from the vascular cell lineage, enhancing of endothelization, vascularization/angiogenesis, protecting a subject from heart tissue degeneration-related diseases, disorders, conditions or pathologies, PEP12 is a peptide of general formula PEP1-AA¹⁷-PEP11; wherein AA¹⁷ is selected from the group consisting of G, A, V, L, I, P, F, M, W, T and S (in particular is selected from the group consisting of M, I, L, V and T); wherein PEP1 is selected from the group consisting of SNIT, RPVQ and RSVK.

[0480] In other embodiments also useful for inducing differentiation of mensenchymal or progenitor stem cells from the vascular cell lineage, enhancing of endothelization, vascularization/angiogenesis, protecting a subject from heart tissue degeneration-related diseases, disorders, conditions or pathologies, PEP11 is a peptide with 3 amino acids of general formula AA¹⁸-AA¹⁹-AA²⁰; wherein AA¹⁸ is selected from the group consisting of L, V, Q, A and R, in particular is selected from the group consisting of Q, A and R; wherein AA¹⁹ is selected from the group consisting of F, W, H, Y, I and K, in particular is I or K; wherein AA²⁰ is selected from the group consisting of L, F, Y, K, I, V and M, in particular is selected from the group consisting of M, V and I. In one particular example, PEP11 is selected from the group consisting of QIM, AKV and RKI.

[0481] The definitions of “PEP” pairs, quadruplets, hexaplets and heptuplet e.g. PEP1:PEP2, PEP12:PEP2, or PEP7:PEP5:PEP12:LINKER:PEP2:PEP6:PEP8, most particularly useful for inducing differentiation of mensenchymal or progenitor stem cells from the vascular cell lineage, enhancing of endothelization, vascularization/angiogenesis, protecting a subject from heart tissue degeneration-related diseases, disorders, conditions or pathologies, are as already defined herein to the extent that PEP1 to PEP12 are particularly useful for these applications. For instances:

[0482] In other embodiments also useful for inducing differentiation of mensenchymal or progenitor stem cells from the vascular cell lineage, enhancing of endothelization, vascularization/angiogenesis, protecting a subject from heart tissue degeneration-related diseases, disorders, conditions or pathologies, the pair PEP1:PEP2 is selected from the group consisting of SNIT:IGEMS, SNIT:LGEMS, RSVK:KEVQV and RPVQ:KKATV.

[0483] In other embodiments also useful for inducing differentiation of mensenchymal or progenitor stem cells from the vascular cell lineage, enhancing of endothelization, vascularization/angiogenesis, protecting a subject from heart tissue degeneration-related diseases, disorders, conditions or pathologies, the pair PEP12:PEP2 is selected from the group consisting of SNIT-AA¹⁷-QIM:IGEMS, SNIT-AA¹⁷-QIM:LGEMS, RSVK-AA¹⁷-AKV:KEVQV and RPVQ-AA¹⁷-RKI:KKATV; wherein AA¹⁷ is selected from the group consisting of G, A, V, L, I, P, F, M, W, T and S (in particular is selected from the group consisting of M, V and T).

[0484] In other embodiments also useful for inducing differentiation of mensenchymal or progenitor stem cells from the vascular cell lineage, enhancing of endothelization, vascularization/angiogenesis, protecting a subject from heart tissue degeneration-related diseases, disorders, conditions or pathologies, PEP3 is selected from the group consisting of VPT, SRV and TQV; PEP4 is selected from the group consisting of QHN, EHS, EEH and EDH; and wherein the pair PEP3:PEP4 is selected from the group consisting of VPT:QHN, VPT:EHS, SRV:EEH and TQV:EDH.

[0485] In other embodiments also useful for inducing differentiation of mensenchymal or progenitor stem cells from the vascular cell lineage, enhancing of endothelization, vascularization/angiogenesis, protecting a subject from heart tissue degeneration-related diseases, disorders, conditions or pathologies, PEP5 is selected from the group consisting of VPTGQ, VPTEE, SRVHH and TQVQL; PEP6 is selected from the group consisting of LEEHS, FLQHN, RLEEH and TLEDH; and wherein the pair PEP5:PEP6 is selected from the group consisting of VPTGQ:LEEHS, VPTEE:FLQHN, SRVHH:RLEEH and TQVQL:TLEDH.

[0486] In other embodiments also useful for inducing differentiation of mensenchymal or progenitor stem cells from the vascular cell lineage, enhancing of endothelization, vascularization/angiogenesis, protecting a subject from heart tissue degeneration-related diseases, disorders, conditions or pathologies, PEP7 is selected from the group consisting of NDEGLEX, SSVKXQP and RNVQXRP; wherein PEP8 is selected from the group consisting of KXEXR, QXEXR, LEXAXA and LAXKXE; and wherein the pair PEP7:PEP8 is selected from the group consisting of NDEGLEX:KXEXR, NDEGLEX:QXEXR, SSVKXQP:LEXAXA and RNVQXRP:LAXKXE.

[0487] In other embodiments also useful for inducing differentiation of mensenchymal or progenitor stem cells from the vascular cell lineage, enhancing of endothelization, vascularization/angiogenesis, protecting a subject from heart tissue degeneration-related diseases, disorders, conditions or pathologies, PEP9 is selected from the group consisting of NDEGLEXVPTEE, NDEGLEXVPTGQ, SSVKXQPSRVHH and RNVQXRPTQVQL; PEP10 is selected from the group consisting of FLQHNKXEXR, LEEHSQXEXR, RLEEHLEXAXA and TLEDHLAXKXE; and wherein the pair PEP9:PEP10 is selected from the group consisting of NDEGLEXVPTEE:FLQHNKXEXR, NDEGLEXVPTGQ:LEEHSQXEXR, SSVKXQPSRVHH:RLEEHLEXAXA and RNVQXRPTQVQL:TLEDHLAXKXE.

[0488] In other embodiments also useful for inducing differentiation of mensenchymal or progenitor stem cells from the vascular cell lineage, enhancing of endothelization, vascularization/angiogenesis, protecting a subject from heart tissue degeneration-related diseases, disorders, conditions or pathologies, PEP5 is selected from the group consisting of VPTGQ, VPTEE, SRVHH and TQVQL; PEP6 is selected from the group consisting of LEEHS, FLQHN, RLEEH and TLEDH; and wherein the pair PEP5:PEP6 is selected from the group consisting of VPTGQ:LEEHS, VPTEE:FLQHN, SRVHH:RLEEH and TQVQL:TLEDH; wherein the pair PEP5:PEP6 is not VPTEE:FLQHN when PEP1 is SNIT and PEP2 is IGEMS; wherein the pair PEP5:PEP6 is not VPTGQ:LEEHS when PEP1 is SNIT and PEP2 is LGEMS; wherein the pair PEP5:PEP6 is not SRVHH:RLEEH when PEP1 is RSVK and PEP2 is KEVQV; and wherein the pair PEP5:PEP6 is not TQVQL:TLEDH when PEP1 is RPVQ and PEP2 is KKATV.

[0489] In other embodiments also useful for inducing differentiation of mensenchymal or progenitor stem cells from the vascular cell lineage, enhancing of endothelization, vascularization/angiogenesis, protecting a subject from heart tissue degeneration-related diseases, disorders, conditions or pathologies, PEP9 is selected from the group consisting of NDEGLEXVPTEE, NDEGLEXVPTGQ, SSVKXQPSRVHH and RNVQXRPTQVQL; PEP10 is selected from the group consisting of FLQHNKXEXR, LEEHSQXEXR, RLEEHLEXAXA and TLEDHLAXKXE; and wherein the pair PEP9:PEP10 is selected from the group consisting of NDEGLEXVPTEE:FLQHNKXEXR, NDEGLEXVPTGQ:LEEHSQXEXR, SSVKXQPSRVHH:RLEEHLEXAXA and RNVQXRPTQVQL:TLEDHLAXKXE; wherein the pair PEP9:PEP10 is not NDEGLEXVPTEE:FLQHNKXEXR when PEP1 is SNIT and PEP2 is IGEMS; wherein the pair PEP9:PEP10 is not NDEGLEXVPTGQ:LEEHSQXEXR when PEP1 is SNIT and PEP2 is LGEMS; wherein the pair PEP9:PEP10 is not SSVKXQPSRVHH:RLEEHLEXAXA when PEP1 is RSVK and PEP2 is KEVQV; and wherein the pair PEP9:PEP10 is not RNVQXRPTQVQL:TLEDHLAXKXE when PEP1 is RPVQ and PEP2 is KKATV.

[0490] In other embodiments also useful for inducing differentiation of mensenchymal or progenitor stem cells from the vascular cell lineage, enhancing of endothelization, vascularization/angiogenesis, protecting a subject from heart tissue degeneration-related diseases, disorders, conditions or pathologies, PEP1 is selected from the group consisting of SNIT, RPVQ and RSVK; PEP11 is selected from the group consisting of QIM, AKV and RKI; and the pair PEP1:PEP11 is selected from the group consisting of SNIT:QIM, RSVK:KEVQV and RPVQ:KKATV.

[0491] In one aspect, the present disclosure provides a cyclic GFR-binding compound, wherein said cyclic GFR-binding compound is a cyclic peptide, a variant or analog thereof, or a cyclic peptidomimetic as defined herein, with between 15-60 (in particular between 15-55, more particularly between 19-60, and even more particularly between 19-55) amino acids, or between 15-35 (in particular between 15-30, more particularly between 19-35, and even more particularly between 19-30) amino acids, comprising a peptide with four amino acids (PEP1) or a peptide with eight amino acids (PEP12), a peptide with five amino acids (PEP2), and optionally a pair of peptides selected form the group consisting of PEP3:PEP4, PEP3:PEP6, PEP3:PEP10, PEP5:PEP4, PEP9:PEP4, PEP5:PEP6, PEP5:PEP10, PEP9:PEP6 and PEP9:PEP10; wherein said cyclic GFR-binding compound does not comprise the pair of peptides VPTEE:FLQHN when PEP1 is SNIT and PEP2 is IGEMS; wherein said cyclic GFR-binding compound does not comprise the pair of peptides VPTGQ:LEEHS when PEP1 is SNIT and PEP2 is LGEMS; wherein said cyclic GFR-binding compound does not comprise the pair of peptides SRVHH:RLEEH when PEP1 is RSVK and PEP2 is KEVQV; and wherein said cyclic GFR-binding compound does not comprise the pair of peptides TQVQL:TLEDH when PEP1 is RPVQ and PEP2 is KKATV.

[0492] In one aspect, the present disclosure provides a cyclic GFR-binding compound, wherein said cyclic GFR-binding compound is a cyclic peptide, a variant or analog thereof, or a cyclic peptidomimetic as defined herein, with between 15-60 (in particular between 15-55, more particularly between 19-60, and even more particularly between 19-55) amino acids, or between 15-35 (in particular between 15-30, more particularly between 19-35, and even more particularly between 19-30) amino acids, comprising a peptide with four amino acids (PEP1) or a peptide with eight amino acids (PEP12), a peptide with five amino acids (PEP2), and optionally a pair of peptides selected form the group consisting of PEP3:PEP4, PEP3:PEP6, PEP3:PEP10, PEP5:PEP4, PEP9:PEP4, PEP5:PEP6, PEP5:PEP10, PEP9:PEP6 and PEP9:PEP10; wherein said cyclic GFR-binding compound does not comprise the pair of peptides NDEGLEXVPTEE:FLQHNKXEXR when PEP1 is SNIT and PEP2 is IGEMS; wherein said cyclic GFR-binding compound does not comprise the pair of peptides NDEGLEXVPTGQ:LEEHSQXEXR when PEP1 is SNIT and PEP2 is LGEMS; wherein said cyclic GFR-binding compound does not comprise the pair of peptides SSVKXQPSRVHH:RLEEHLEXAXA when PEP1 is RSVK and PEP2 is KEVQV; and wherein said cyclic GFR-binding compound does not comprise the pair of peptides RNVQXRPTQVQL:TLEDHLAXKXE when PEP1 is RPVQ and PEP2 is KKATV.

[0493] In other embodiments also useful for inducing differentiation of mensenchymal or progenitor stem cells from the vascular cell lineage, enhancing of endothelization, vascularization/angiogenesis, protecting a subject from heart tissue degeneration-related diseases, disorders, conditions or pathologies, said cyclic GFR-binding compound is a synthetic molecule as defined herein in the definition section.

[0494] In other embodiments also useful for inducing differentiation of mensenchymal or progenitor stem cells from the vascular cell lineage, enhancing of endothelization, vascularization/angiogenesis, protecting a subject from heart tissue degeneration-related diseases, disorders, conditions or pathologies, said cyclic GFR-binding compound is a synthetic peptide, or a variant or analog thereof, or a cyclic peptidomimetic.

[0495] Neuroregeneration

[0496] Certain embodiments of the invention are particularly useful for inducing differentiation of mensenchymal or progenitor stem cells from the neuronal cell lineage, promoting neuron-regeneration, and protecting from neuron degeneration-related conditions and diseases.

[0497] In certain embodiments useful for inducing differentiation of mensenchymal or progenitor stem cells from the neuronal cell lineage, promoting neuron-regeneration, and protecting from neuron degeneration-related conditions and diseases, PEP1 is selected from the group consisting of NAIS, SPIS and EPIS.

[0498] In certain embodiments useful for inducing differentiation of mensenchymal or progenitor stem cells from the neuronal cell lineage, promoting neuron-regeneration, and protecting from neuron degeneration-related conditions and diseases, PEP2 is selected from the group consisting of LKKYR, LKYHY, YKQYE and KFKYE.

[0499] In certain embodiments useful for inducing differentiation of mensenchymal or progenitor stem cells from the neuronal cell lineage, promoting neuron-regeneration, and protecting from neuron degeneration-related conditions and diseases, PEP3 is selected from the group consisting of VPT, APT, VPA, VPQ and VSQ.

[0500] In certain embodiments useful for inducing differentiation of mensenchymal or progenitor stem cells from the neuronal cell lineage, promoting neuron-regeneration, and protecting from neuron degeneration-related conditions and diseases, PEP4 is selected from the group consisting of VVE, VVR, VVK, VAE, AVS, VRS and VKS.

[0501] In certain embodiments useful for inducing differentiation of mensenchymal or progenitor stem cells from the neuronal cell lineage, promoting neuron-regeneration, and protecting from neuron degeneration-related conditions and diseases, PEP5 is a peptide of general formula PEP3-AA¹¹-AA¹²; wherein PEP3 is selected from the group consisting of VPT, APT, VPA, VPQ and VSQ; wherein AA¹¹ is selected from the group consisting of E, K, Q, R, A, D, G and H, in particular E, K, Q, R, A and D; wherein AA¹² is selected from the group consisting of L, M, T, E, Q and H, in particular L. In one particular example, PEP5 is selected from the group consisting of VPTEL, APTKL, APTQL, VPTKL, VPARL, VPQAL, VSQDL and VPQDL.

[0502] In certain embodiments useful for inducing differentiation of mensenchymal or progenitor stem cells from the neuronal cell lineage, promoting neuron-regeneration, and protecting from neuron degeneration-related conditions and diseases, PEP6 is a peptide of general formula AA²⁶-AA²⁷-AA²⁸-AA²⁹-PEP4; wherein PEP4 is selected from the group consisting of VVE, VVR, VVK, VAE, AVS, VRS and VKS; wherein AA²⁶ is absent or selected from the group consisting of AA^{II} amino acids, preferably absent or E; wherein AA²⁷ and AA²⁸ are independently selected from the group consisting of AA^{III} and AA^{V} amino acids, preferably AA²⁷ is selected from the group consisting of D, E, N, G and M, preferably AA²⁸ is selected from the group consisting of M, I and V; wherein AA²⁹ is absent or selected from the group consisting of AA^{II} amino acids, preferably absent or S. In one particular example, PEP6 is selected from the group consisting of DMVVE, EMVVE, NMVVR, NMVVK, EGMSVAE, GMAVS, DMVVE, MIVRS, MIVKS and MVVKS.

[0503] In certain embodiments useful for inducing differentiation of mensenchymal or progenitor stem cells from the neuronal cell lineage, promoting neuron-regeneration, and protecting from neuron degeneration-related conditions and diseases, PEP7 is an amino acid or a peptide with between two and seven amino acids of general formula AA¹-AA²-AA³-AA⁴-AA⁵-AA⁶-AA⁷; wherein AA¹, AA², AA³, AA⁴, and AA⁵ are independently absent or AA^{I} as defined herein; wherein AA⁶ is absent or selected from the group consisting of S, T, C, E, Q, P and R, preferably S or C; wherein AA⁷ is absent or is selected from the group consisting of S, T, C, E, Q, P and R, preferably is S or C; and wherein at least one of AA¹, AA², AA³, AA⁴, AA⁵, AA⁶ or AA⁷ is not absent. In one particular example, PEP7 is selected from the group consisting of KIPKAXX, SIPKAXX, HVTKPTX, YVPKPXX, TVPKPXX, AVPKAXX, KVGKAXX, ASAAPXX, ASASPXX and RNVQXRP.

[0504] In certain embodiments useful for inducing differentiation of mensenchymal or progenitor stem cells from the neuronal cell lineage, promoting neuron-regeneration, and protecting from neuron degeneration-related conditions and diseases, PEP8 is an amino acid or a peptide with between two and six amino acids of general formula AA³³-AA³⁴-AA³⁵-AA³⁶-AA³⁷-AA³⁸; wherein AA³³ is absent or is selected from the group consisting of AA^{I} amino acids at the exception of AA¹ amino acids, in particular is absent or is selected from the group consisting of G, S, A and E; AA³⁴ is absent or is selected from the group consisting of AA^{III} and AA^{IV} amino acids, in particular is absent; wherein AA³⁵ is absent or is selected from the group consisting of AA^{II} amino acids, preferably is S or C; wherein AA³⁶ is absent or is selected from the group consisting of AA^{III} and AA^{IV} amino acids, in particular is G or K; wherein AA³⁷ is absent or is selected from the group consisting of AA^{II} amino acids, preferably is S or C; wherein AA³⁸ is absent or is selected from the group consisting of AA^{I}, in particular is selected from the group consisting of R, H and S; and wherein at least one of AA³³, AA³⁴, AA³⁵, AA³⁶, AA³⁷ or AA³⁸ is not absent. In one particular example, PEP8 is selected from the group consisting of GXGXR, SXGXH, AXGXH, XGXR, XKXS and LAXKXE.

[0505] In certain embodiments useful for inducing differentiation of mensenchymal or progenitor stem cells from the neuronal cell lineage, promoting neuron-regeneration, and protecting from neuron degeneration-related conditions and diseases, PEP9 is a peptide of general formula AA¹-AA²-AA³-AA⁴-AA⁵-AA⁶-AA⁷-PEP5; wherein PEP5 is a peptide of formula PEP3-AA¹¹-AA¹²; wherein PEP3 is selected from the group consisting of VPT, APT, VPA, VPQ and VSQ; wherein AA¹¹ is selected from the group consisting of E, K, Q, R, A, D, G and H, in particular E, K, Q, R, A and D; wherein AA¹² is selected from the group consisting of L, M, T, E, Q and H, in particular L; wherein AA¹, AA², AA³, AA⁴, and AA⁵ are independently absent or AA^{I} as defined herein; wherein AA⁶ is absent or selected from the group consisting of S, T, C, E, Q, P and R, preferably S or C; wherein AA⁷ is selected from the group consisting of S, T, C, E, Q, P and R, preferably is S or C. In one particular example, PEP9 is selected from the group consisting of KIPKAXXVPTEL, SIPKAXXVPTEL, HVTKPTXAPTKL, YVPKPXXAPTKL, TVPKPXXAPTQL, AVPKAXXAPTKL, KVGKAXXVPTKL, ASAAPXXVPQAL, ASASPXXVSQDL, ASASPXXVPQDL and RNVQXRPTQVQL.

[0506] In certain embodiments useful for inducing differentiation of mensenchymal or progenitor stem cells from the neuronal cell lineage, promoting neuron-regeneration, and protecting from neuron degeneration-related conditions and diseases, PEP10 is a peptide of general formula PEP6-AA³³-AA³⁴-AA³⁵-AA³⁶-AA³⁷-AA³⁸; wherein PEP6 is a peptide of formula AA²⁶-AA²⁷-AA²⁸-AA²⁹-PEP4; wherein PEP4 is selected from the group consisting of VVE, VVR, VVK, VAE, AVS, VRS and VKS; wherein AA²⁶ is absent or selected from the group consisting of AA^{II} amino acids, preferably absent or E; wherein AA²⁷ and AA²⁸ are independently selected from the group consisting of AA^{III} and AA^{V} amino acids, preferably AA²⁷ is selected from the group consisting of D, E, N, G and M, preferably AA²⁸ is selected from the group consisting of M, I and V; wherein AA²⁹ is absent or selected from the group consisting of AA^{II} amino acids, preferably absent or S; wherein AA³³ is absent or is selected from the group consisting of AA^{I} amino acids at the exception of AA¹ amino acids, in particular is absent or is selected from the group consisting of G, S, A and E; AA³⁴ is absent or is selected from the group consisting of AA^{III} and AA^{V} amino acids, in particular is absent; wherein AA³⁵ is absent or is selected from the group consisting of AA^{II} amino acids, preferably is S or C; wherein AA³⁶ is absent or is selected from the group consisting of AA^{III} and AA^{V} amino acids, in particular is G or K; wherein AA³⁷ is absent or is selected from the group consisting of AA^{II} amino acids, preferably is S or C; wherein AA³⁸ is absent or is selected from the group consisting of AA^{I}, in particular is selected from the group consisting of R, H and S. In one particular example, PEP10 is selected from the group consisting of DMVVEGXGXR, EMVVEGXGXR, NMVVRSXGXH, NMVVRAXGXH, NMVVKAXGXH, EGMSVAEXGXR, MIVRSXKXS, MIVKSXKXS, MVVKSXKXS and TLEDHLAXKXE.

[0507] In certain embodiments useful for inducing differentiation of mensenchymal or progenitor stem cells from the neuronal cell lineage, promoting neuron-regeneration, and protecting from neuron degeneration-related conditions and diseases, PEP12 is a peptide of general formula PEP1-AA¹⁷-PEP11; wherein AA¹⁷ is selected from the group consisting of G, A, V, L, I, P, F, M, W, T and S (in particular is selected from the group consisting of M, I, L, V and T); wherein PEP1 is selected from the group consisting of NAIS, SPIS and EPIS.

[0508] In certain embodiments useful for inducing differentiation of mensenchymal or progenitor stem cells from the neuronal cell lineage, promoting neuron-regeneration, and protecting from neuron degeneration-related conditions and diseases, PEP11 is a peptide with 3 amino acids of general formula AA¹-AA⁹-AA²⁰; wherein AA¹⁸ is selected from the group consisting of L, V, Q, A and R, in particular is L; wherein AA¹⁹ is selected from the group consisting of F, W, H and Y (in particular is an aromatic, polar amino acid such as Y); wherein AA²⁰ is selected from the group consisting of L, F, Y, K, I, V and M, in particular is selected from the group consisting of L, F, I, and K. In one particular example, PEP11 is selected from the group consisting of LYL, LYF, LYI and LYK.

[0509] The definitions of “PEP” pairs, quadruplets, hexaplets and heptuplet e.g. PEP1:PEP2, PEP12:PEP2, or PEP7:PEP5:PEP12:LINKER:PEP2:PEP6:PEP8, most particularly useful for inducing differentiation of mensenchymal or progenitor stem cells from the neuronal cell lineage, promoting neuron-regeneration, and protecting from neuron degeneration-related conditions and diseases, are as already defined herein to the extent that PEP1 to PEP12 are particularly useful for these applications. For instances: In certain embodiments useful for inducing differentiation of mensenchymal or progenitor stem cells from the neuronal cell lineage, promoting neuron-regeneration, and protecting from neuron degeneration-related conditions and diseases, the pair PEP1:PEP2 is selected from the group consisting of NAIS:LKKYR, SPIS:LKYHY, EPIS:KFKYE and SPIS:YKQYE.

[0510] In certain embodiments useful for inducing differentiation of mensenchymal or progenitor stem cells from the neuronal cell lineage, promoting neuron-regeneration, and protecting from neuron degeneration-related conditions and diseases, the pair PEP12:PEP2 is selected from the group consisting of NAIS-AA¹¹-LYF:LKKYR, SPIS-AA¹⁷-LYK:LKYHY, EPIS-AA¹⁷-LYL:KFKYE and SPIS-AA¹⁷-LYI:YKQYE; wherein AA¹⁷ is selected from the group consisting of G, A, V, L, I, P, F, M, W, T and S (in particular is selected from the group consisting of V, I and T).

[0511] In certain embodiments useful for inducing differentiation of mensenchymal or progenitor stem cells from the neuronal cell lineage, promoting neuron-regeneration, and protecting from neuron degeneration-related conditions and diseases, PEP3 is selected from the group consisting of VPT, APT, VPA, VPQ and VSQ; PEP4 is selected from the group consisting of VVE, VVR, VVK, VAE, AVS, VRS and VKS; and wherein the pair PEP3:PEP4 is selected from the group consisting of VPT:VVE, APT:VVR, APT:VVK, VPT:VAE, VPT:AVS, VPA:VVE, VPQ:VRS, VSQ:VKS and VPQ:VKS.

[0512] In certain embodiments useful for inducing differentiation of mensenchymal or progenitor stem cells from the neuronal cell lineage, promoting neuron-regeneration, and protecting from neuron degeneration-related conditions and diseases, PEP5 is selected from the group consisting of VPTEL, APTKL, APTQL, VPTKL, VPARL, VPQAL, VSQDL and VPQDL; PEP6 is selected from the group consisting of DMVVE, EMVVE, NMVVR, NMVVK, EGMSVAE, GMAVS, DMVVE, MIVRS, MIVKS and MVVKS; and wherein the pair PEP5:PEP6 is selected from the group consisting of VPTEL:DMVVE, VPTEL:EMVVE, APTKL:NMVVR, APTQL:NMVV, APTKL:NMVVK, VPTKL:EGMSVAE, VPTKL:EGMAVS, VPARL:DMVVE, VPQAL:MIVRS, VSQDL:MIVKS and VPQDL:MVVKS.

[0513] In certain embodiments useful for inducing differentiation of mensenchymal or progenitor stem cells from the neuronal cell lineage, promoting neuron-regeneration, and protecting from neuron degeneration-related conditions and diseases, PEP7 is selected from the group consisting of KIPKAXX, SIPKAXX, HVTKPTX, YVPKPXX, TVPKPXX, AVPKAXX, KVGKAXX, ASAAPXX, ASASPXX and RNVQXRP; wherein PEP8 is selected from the group consisting of GXGXR, SXGXH, AXGXH, XGXR, XKXS and LAXKXE; and wherein the pair PEP7:PEP8 is selected from the group consisting of KIPKAXX:GXGXR, SIPKAXX:GXGXR, HVTKPTX:SXGXH, YVPKPXX:SXGXH, TVPKPXX:AXGXH, AVPKAXX:AXGXH, KVGKAXX:XGXR, KASKAXX:EXGXR, AAPASXX:AXGXR, ASAAPXX:XKXS, ASASPXX:XKXS and ASASPXX:XKXS.

[0514] In certain embodiments useful for inducing differentiation of mensenchymal or progenitor stem cells from the neuronal cell lineage, promoting neuron-regeneration, and protecting from neuron degeneration-related conditions and diseases, PEP9 is selected from the group consisting of KIPKAXXVPTEL, SIPKAXXVPTEL, HVTKPTXAPTKL, YVPKPXXAPTKL, TVPKPXXAPTQL, AVPKAXXAPTKL, KVGKAXXVPTKL, ASAAPXXVPQAL, ASASPXXVSQDL, ASASPXXVPQDL and RNVQXRPTQVQL; PEP10 is selected from the group consisting of DMVVEGXGXR, EMVVEGXGXR, NMVVRSXGXH, NMVVRAXGXH, NMVVKAXGXH, EGMSVAEXGXR, MIVRSXKXS, MIVKSXKXS, MVVKSXKXS and TLEDHLAXKXE; and wherein the pair PEP9:PEP10 is selected from the group consisting of KIPKAXXVPTEL:DMVVEGXGXR, SIPKAXXVPTEL:EMVVEGXGXR, HVTKPTXAPTKL:NMVVRSXGXH, YVPKPXXAPTKL:NMVVRSXGXH, TVPKPXXAPTQL:NMVVRAXGXH, AVPKAXXAPTKL:NMVVKAXGXH, KVGKAXXVPTKL:EGMSVAEXGXR, KASKAXXVPTKL:GMAVSEXGXR, AAPASXXVPARL:DMVVEAXGXR, ASAAPXXVPQAL:MIVRSXKXS, ASASPXXVSQDL:MIVKSXKXS and ASASPXXVPQDL:MVVKSXKXS.

[0515] In certain embodiments useful for inducing differentiation of mensenchymal or progenitor stem cells from the neuronal cell lineage, promoting neuron-regeneration, and protecting from neuron degeneration-related conditions and diseases, PEP5 is selected from the group consisting of VPTEL, APTKL, APTQL, VPTKL, VPARL, VPQAL, VSQDL and VPQDL; PEP6 is selected from the group consisting of DMVVE, EMVVE, NMVVR, NMVVK, EGMSVAE, GMAVS, DMVVE, MIVRS, MIVKS and MVVKS; and wherein the pair PEP5:PEP6 is selected from the group consisting of VPTEL:DMVVE, VPTEL:EMVVE, APTKL:NMVVR, APTQL:NMVV, APTKL:NMVVK, VPTKL:EGMSVAE, VPTKL:EGMAVS, VPARL:DMVVE, VPQAL:MIVRS, VSQDL:MIVKS and VPQDL:MVVKS; wherein the pair PEP5:PEP6 is not APTQL:NMVVR when PEP1 is NAIS and PEP2 is LKKYR; wherein the pair PEP5:PEP6 is not VPTKL:EGMSVAE when PEP1 is SPIS and PEP2 is LKYHY; wherein the pair PEP5:PEP6 is not VPTKL:GMAVS when PEP1 is EPIS and PEP2 is KFKYE; and wherein the pair PEP5:PEP6 is not VPARL:DMVVE when PEP1 is SPIS and PEP2 is YKQYE.

[0516] In certain embodiments useful for inducing differentiation of mensenchymal or progenitor stem cells from the neuronal cell lineage, promoting neuron-regeneration, and protecting from neuron degeneration-related conditions and diseases, PEP9 is selected from the group consisting of KIPKAXXVPTEL, SIPKAXXVPTEL, HVTKPTXAPTKL, YVPKPXXAPTKL, TVPKPXXAPTQL, AVPKAXXAPTKL, KVGKAXXVPTKL, ASAAPXXVPQAL, ASASPXXVSQDL, ASASPXXVPQDL and RNVQXRPTQVQL; PEP10 is selected from the group consisting of DMVVEGXGXR, EMVVEGXGXR, NMVVRSXGXH, NMVVRAXGXH, NMVVKAXGXH, EGMSVAEXGXR, MIVRSXKXS, MIVKSXKXS, MVVKSXKXS and TLEDHLAXKXE; and wherein the pair PEP9:PEP10 is selected from the group consisting of KIPKAXXVPTEL:DMVVEGXGXR, SIPKAXXVPTEL:EMVVEGXGXR, HVTKPTXAPTKL:NMVVRSXGXH, YVPKPXXAPTKL:NMVVRSXGXH, TVPKPXXAPTQL:NMVVRAXGXH, AVPKAXXAPTKL:NMVVKAXGXH, KVGKAXXVPTKL:EGMSVAEXGXR, KASKAXXVPTKL:GMAVSEXGXR, AAPASXXVPARL:DMVVEAXGXR, ASAAPXXVPQAL:MIVRSXKXS, ASASPXXVSQDL:MIVKSXKXS and ASASPXXVPQDL:MVVKSXKXS; wherein PEP9:PEP10 is not TVPKPXXAPTQL:NMVVRAXGXH when PEP1 is NAIS and PEP2 is LKKYR; wherein PEP9:PEP10 is not KVGKAXXVPTKL:EGMSVAEXGXR when PEP1 is SPIS and PEP2 is LKYHY; wherein PEP9:PEP10 is not KASKAXXVPTKL:GMAVSEXGXR when PEP1 is EPIS and PEP2 is KFKYE; wherein PEP9:PEP10 is not AAPASXXVPARL:DMVVEAXGXR when PEP1 is SPIS.

[0517] In certain embodiments useful for inducing differentiation of mensenchymal or progenitor stem cells from the neuronal cell lineage, promoting neuron-regeneration, and protecting from neuron degeneration-related conditions and diseases, PEP1 is selected from the group consisting of NAIS, SPIS and EPIS; PEP11 is selected from the group consisting of LYF, LYK, LYL and LYI; and the pair PEP1:PEP11 is selected from the group consisting of NAIS:LYF, SPIS:LYK, EPIS:LYL and SPIS:LYI.

[0518] In one aspect, the present disclosure provides a cyclic GFR-binding compound, wherein said cyclic GFR-binding compound is a cyclic peptide, a variant or analog thereof, or a cyclic peptidomimetic as defined herein, with between 15-60 (in particular between 15-55, more particularly between 19-60, and even more particularly between 19-55) amino acids, or between 15-35 (in particular between 15-30, more particularly between 19-35, and even more particularly between 19-30) amino acids, comprising a peptide with four amino acids (PEP1) or a peptide with eight amino acids (PEP12), a peptide with five amino acids (PEP2), and optionally a pair of peptides selected form the group consisting of PEP3:PEP4, PEP3:PEP6, PEP3:PEP10, PEP5:PEP4, PEP9:PEP4, PEP5:PEP6, PEP5:PEP10, PEP9:PEP6 and PEP9:PEP10; wherein said cyclic GFR-binding compound does not comprise the pair of peptides APTQL:NMVVR when PEP1 is NAIS and PEP2 is LKKYR; wherein said cyclic GFR-binding compound does not comprise the pair of peptides VPTKL:EGMSVAE when PEP1 is SPIS and PEP2 is LKYHY; wherein said cyclic GFR-binding compound does not comprise the pair of peptides VPTKL:GMAVS when PEP1 is EPIS and PEP2 is KFKYE; and wherein said cyclic GFR-binding compound does not comprise the pair of peptides VPARL:DMVVE when PEP1 is SPIS and PEP2 is YKQYE.

[0519] In one aspect, the present disclosure provides a cyclic GFR-binding compound, wherein said cyclic GFR-binding compound is a cyclic peptide, a variant or analog thereof, or a cyclic peptidomimetic as defined herein, with between 15-60 (in particular between 15-55, more particularly between 19-60, and even more particularly between 19-55) amino acids, or between 15-35 (in particular between 15-30, more particularly between 19-35, and even more particularly between 19-30) amino acids, comprising a peptide with four amino acids (PEP1) or a peptide with eight amino acids (PEP12), a peptide with five amino acids (PEP2), and optionally a pair of peptides selected form the group consisting of PEP3:PEP4, PEP3:PEP6, PEP3:PEP10, PEP5:PEP4, PEP9:PEP4, PEP5:PEP6, PEP5:PEP10, PEP9:PEP6 and PEP9:PEP10; wherein said cyclic GFR-binding compound does not comprise the pair of peptides TVPKPXXAPTQL:NMVVRAXGXH when PEP1 is NAIS and PEP2 is LKKYR; wherein said cyclic GFR-binding compound does not comprise the pair of peptides KVGKAXXVPTKL:EGMSVAEXGXR when PEP1 is SPIS and PEP2 is LKYHY; wherein said cyclic GFR-binding compound does not comprise the pair of peptides KASKAXXVPTKL:GMAVSEXGXR when PEP1 is EPIS and PEP2 is KFKYE; wherein said cyclic GFR-binding compound does not comprise the pair of peptides AAPASXXVPARL:DMVVEAXGXR when PEP1 is SPIS.

[0520] In certain embodiments useful for inducing differentiation of mensenchymal or progenitor stem cells from the neuronal cell lineage, promoting neuron-regeneration, and protecting from neuron degeneration-related conditions and diseases, said cyclic GFR-binding compound is a synthetic molecule as defined herein in the definition section.

[0521] In certain embodiments useful for inducing differentiation of mensenchymal or progenitor stem cells from the neuronal cell lineage, promoting neuron-regeneration, and protecting from neuron degeneration-related conditions and diseases, said cyclic GFR-binding compound is a synthetic peptide, or a variant or analog thereof, or a cyclic peptidomimetic.

[0522] Eye Retina

[0523] Certain embodiments of the invention are particularly useful for inducing differentiation of mensenchymal or progenitor stem cells from the retinal cell lineage, promoting eye retina cell regeneration and protecting from eye retina cell degeneration-related conditions or diseases such as macular degeneration.

[0524] In certain embodiments useful for inducing differentiation of mensenchymal or progenitor stem cells from the retinal cell lineage, promoting eye retina cell regeneration and protecting from eye retina cell degeneration-related conditions or diseases, PEP1 is SPIN.

[0525] In certain embodiments useful for inducing differentiation of mensenchymal or progenitor stem cells from the retinal cell lineage, promoting eye retina cell regeneration and protecting from eye retina cell degeneration-related conditions or diseases, PEP2 is YGKIP.

[0526] In certain embodiments useful for inducing differentiation of mensenchymal or progenitor stem cells from the retinal cell lineage, promoting eye retina cell regeneration and protecting from eye retina cell degeneration-related conditions or diseases, PEP3 is selected from the group consisting of VPT, APT, TPT, VPA and APV.

[0527] In certain embodiments useful for inducing differentiation of mensenchymal or progenitor stem cells from the retinal cell lineage, promoting eye retina cell regeneration and protecting from eye retina cell degeneration-related conditions or diseases, PEP4 is selected from the group consisting of VVE, VVR, VVK, VAE, AVS, VVD and VEE.

[0528] In certain embodiments useful for inducing differentiation of mensenchymal or progenitor stem cells from the retinal cell lineage, promoting eye retina cell regeneration and protecting from eye retina cell degeneration-related conditions or diseases, PEP5 is a peptide of general formula PEP3-AA¹¹-AA¹²; wherein PEP3 is selected from the group consisting of VPT, APT, TPT, VPA and APV; wherein AA¹¹ is selected from the group consisting of E, K, Q, R, A, D, G and H, in particular is E, K, Q and R; wherein AA¹² is selected from the group consisting of L, M, T, E, Q and H, in particular is L, M or T. In one particular example, PEP5 is selected from the group consisting of VPTEL, APTKL, APTQL, VPTKL, TPTKM, VPARL, VPTRL and APVKT.

[0529] In certain embodiments useful for inducing differentiation of mensenchymal or progenitor stem cells from the retinal cell lineage, promoting eye retina cell regeneration and protecting from eye retina cell degeneration-related conditions or diseases, PEP6 is a peptide of general formula AA²⁶-AA²⁷-AA²⁸-AA²⁹-PEP4; wherein PEP4 is selected from the group consisting of VVE, VVR, VVK, VAE, AVS, VVD and VEE; wherein AA²⁶ is absent or selected from the group consisting of AA^{II} amino acids, preferably absent or E; wherein AA²⁷ and AA²⁸ are independently selected from the group consisting of AA^{III} and AA^{V} amino acids, preferably AA²⁷ is selected from the group consisting of D, E, N, G and M, preferably AA²⁸ is M or I; wherein AA²⁹ is absent or selected from the group consisting of AA^{II} amino acids, preferably absent or S. In one particular example, PEP6 is selected from the group consisting of DMVVE, EMVVE, NMVVR, NMVVK, EGMSVAE, EGMAVS, GMVVD and DMIVEE.

[0530] In certain embodiments useful for inducing differentiation of mensenchymal or progenitor stem cells from the retinal cell lineage, promoting eye retina cell regeneration and protecting from eye retina cell degeneration-related conditions or diseases, PEP7 is an amino acid or a peptide with between two and seven amino acids of general formula AA¹-AA²-AA³-AA⁴-AA⁵-AA⁶-AA⁷; wherein AA¹, AA², AA³, AA⁴, and AA⁵ are independently absent or AA^{I} as defined herein; wherein AA⁶ is absent or selected from the group consisting of S, T, C, E, Q, P and R, preferably is S or C; wherein AA⁷ is absent or is selected from the group consisting of S, T, C, E, Q, P and R, preferably is S or C; and wherein at least one of AA¹, AA², AA³, AA⁴, AA⁵, AA⁶ or AA⁷ is not absent. In one particular example, PEP7 is selected from the group consisting of KIPKAXX, SIPKAXX, HVTKPTX, YVPKPXX, TVPKPXX, AVPKAXX, KVGKAXX, KASKAXX, GSAGPXX, AAPAXXS, STPPTXX, HVPKPXX and RVPSTXX.

[0531] In certain embodiments useful for inducing differentiation of mensenchymal or progenitor stem cells from the retinal cell lineage, promoting eye retina cell regeneration and protecting from eye retina cell degeneration-related conditions or diseases, PEP8 is an amino acid or a peptide with between two and six amino acids of general formula AA³³-AA³⁴-AA³⁵-AA³⁶-AA³⁷-AA³⁸; wherein AA³³ is absent or is selected from the group consisting of AA^{I} amino acids at the exception of AA¹ amino acids, in particular is absent or is selected from the group consisting of G, S, A, E and R; AA³⁴ is absent or is selected from the group consisting of AA^{III} and AA^{I} amino acids, in particular is absent; wherein AA³⁵ is absent or is selected from the group consisting of AA^{II} amino acids, preferably is S or C; wherein AA³⁶ is absent or is selected from the group consisting of AA^{II} and AA^{I} amino acids; wherein AA³⁷ is absent or is selected from the group consisting of AA^{II} amino acids, preferably is S or C; wherein AA³⁸ is absent or is selected from the group consisting of AA^{I}, in particular is selected from the group consisting of R, H, S and L; and wherein at least one of AA³³, AA³⁴, AA³⁵, AA³⁶, AA³⁷ or AA³⁸ is not absent. In one particular example, PEP8 is selected from the group consisting of GXGXR, SXGXH, AXGXH, XGXR, EXGXR, RXGXS, AXGXR, SXGXR and XGXL.

[0532] In certain embodiments useful for inducing differentiation of mensenchymal or progenitor stem cells from the retinal cell lineage, promoting eye retina cell regeneration and protecting from eye retina cell degeneration-related conditions or diseases, PEP9 is a peptide of general formula AA¹-AA²-AA³-AA⁴-AA⁵-AA⁶-AA⁷-PEP5; wherein PEP5 is a peptide of formula PEP3-AA¹¹-AA¹²; wherein PEP3 is selected from the group consisting of VPT, APT, TPT, VPA and APV; wherein AA¹ is selected from the group consisting of E, K, Q, R, A, D, G and H, in particular is E, K, Q and R; wherein AA¹² is selected from the group consisting of L, M, T, E, Q and H, in particular is L, M or T; wherein AA¹, AA², AA³, AA⁴, and AA⁵ are independently absent or AA^{I} as defined herein; wherein AA⁶ is absent or selected from the group consisting of S, T, C, E, Q, P and R, preferably is S or C; wherein AA⁷ is selected from the group consisting of S, T, C, E, Q, P and R, preferably is S or C. In one particular example, PEP9 is selected from the group consisting of KIPKAXXVPTEL, SIPKAXXVPTEL, HVTKPTXAPTKL, YVPKPXXAPTKL, TVPKPXXAPTQL, AVPKAXXAPTKL, KVGKAXXVPTKL, KASKAXXVPTKL, GSAGPXXTPTKL, AAPASXXVPARL, STPPTXXVPTRL, HVPKPXXAPTKL and RVPSTXXAPVKT.

[0533] In certain embodiments useful for inducing differentiation of mensenchymal or progenitor stem cells from the retinal cell lineage, promoting eye retina cell regeneration and protecting from eye retina cell degeneration-related conditions or diseases, PEP10 is a peptide of general formula PEP6-AA³³-AA³⁴-AA³⁵-AA³⁶-AA³⁷-AA³⁸; wherein PEP6 is a peptide of formula AA²⁶-AA²⁷-AA²⁸-AA²⁹-PEP4; wherein PEP4 is selected from the group consisting of VVE, VVR, VVK, VAE, AVS, VVD and VEE; wherein AA²⁶ is absent or selected from the group consisting of AA^{III} amino acids, preferably absent or E; wherein AA²⁷ and AA²⁸ are independently selected from the group consisting of AA^{III} and AA^{V} amino acids, preferably AA²⁷ is selected from the group consisting of D, E, N, G and M, preferably AA²⁸ is M or I; wherein AA²⁹ is absent or selected from the group consisting of AA^{II} amino acids, preferably absent or S; wherein AA³³ is absent or is selected from the group consisting of AA^{I} amino acids at the exception of AA¹ amino acids, in particular is absent or is selected from the group consisting of G, S, A, E and R; AA³⁴ is absent or is selected from the group consisting of AA^{III} and AA^{IV} amino acids, in particular is absent; wherein AA³⁵ is absent or is selected from the group consisting of AA^{II} amino acids, preferably is S or C; wherein AA³⁶ is absent or is selected from the group consisting of AA^{III} and AA^{IV} amino acids; wherein AA³⁷ is absent or is selected from the group consisting of AA^{II} amino acids, preferably is S or C; wherein AA³⁸ is absent or is selected from the group consisting of AA^{I}, in particular is selected from the group consisting of R, H, S and L. In one particular example, PEP10 is selected from the group consisting of DMVVEGXGXR, EMVVEGXGXR, NMVVRSXGXH, NMVVRAXGXH, NMVVKAXGXH, EGMSVAEXGXR, GMAVSEXGXR, GMVVDRXGXS, DMVVEAXGXR, DMVVESXGXR, NMVVRSXGXH and MIVEEXGXL.

[0534] In certain embodiments useful for inducing differentiation of mensenchymal or progenitor stem cells from the retinal cell lineage, promoting eye retina cell regeneration and protecting from eye retina cell degeneration-related conditions or diseases, PEP12 is a peptide of general formula PEP1-AA¹⁷-PEP11; wherein AA¹ is selected from the group consisting of G, A, V, L, I, P, F, M, W, T and S (in particular is selected from the group consisting of M, I, L, V and T); wherein PEP1 is SPIN.

[0535] In certain embodiments useful for inducing differentiation of mensenchymal or progenitor stem cells from the retinal cell lineage, promoting eye retina cell regeneration and protecting from eye retina cell degeneration-related conditions or diseases, PEP11 is a peptide with 3 amino acids of general formula AA¹-AA¹⁹-AA²⁰; wherein AA¹⁸ is selected from the group consisting of L, V, Q, A and R, in particular is L; wherein AA¹⁹ is selected from the group consisting of F, W, H and Y, in particular is Y or F; wherein AA²⁰ is selected from the group consisting of L, F, Y, K, I, V and M, in particular is selected from the group consisting of L, F, Y, K, I and V. In one particular example, PEP11 is LYF.

[0536] The definitions of “PEP” pairs, quadruplets, hexaplets and heptuplet e.g. PEP1:PEP2, PEP12:PEP2, or PEP7:PEP5:PEP12:LINKER:PEP2:PEP6:PEP8, most particularly useful for inducing differentiation of mensenchymal or progenitor stem cells from the retinal cell lineage, promoting eye retina cell regeneration and protecting from eye retina cell degeneration-related conditions or diseases, are as already defined herein to the extent that PEP1 to PEP12 are particularly useful for these applications. For instances: In certain embodiments useful for inducing differentiation of mensenchymal or progenitor stem cells from the retinal cell lineage, promoting eye retina cell regeneration and protecting from eye retina cell degeneration-related conditions or diseases, PEP3 is selected from the group consisting of VPT, APT, TPT, VPA and APV; PEP4 is selected from the group consisting of VVE, VVR, VVK, VAE, AVS, VVD and VEE; and wherein the pair PEP3:PEP4 is selected from the group consisting of VPT:VVE, APT:VVR, APT:VVK, VPT:VAE, VPT:AVS, TPT:VVD, VPA:VVE and APV:VEE.

[0537] In certain embodiments useful for inducing differentiation of mensenchymal or progenitor stem cells from the retinal cell lineage, promoting eye retina cell regeneration and protecting from eye retina cell degeneration-related conditions or diseases, PEP5 is selected from the group consisting of VPTEL, APTKL, APTQL, VPTKL, TPTKM, VPARL, VPTRL and APVKT; PEP6 is selected from the group consisting of DMVVE, EMVVE, NMVVR, NMVVK, EGMSVAE, EGMAVS, GMVVD and DMIVEE; and wherein the pair PEP5:PEP6 is selected from the group consisting of VPTEL:DMVVE, VPTEL:EMVVE, APTKL:NMVVR, APTQL:NMVVR, APTKL:NMVVK, VPTKL:EGMSVAE, VPTKL:EGMAVS, TPTKM:GMVVD, VPARL:DMVVE, VPTRL:DMVVE, APTKL:NMVVR and APVKT:DMIVEE.

[0538] In certain embodiments useful for inducing differentiation of mensenchymal or progenitor stem cells from the retinal cell lineage, promoting eye retina cell regeneration and protecting from eye retina cell degeneration-related conditions or diseases, PEP7 is selected from the group consisting of KIPKAXX, SIPKAXX, HVTKPTX, YVPKPXX, TVPKPXX, AVPKAXX, KVGKAXX, KASKAXX, GSAGPXX, AAPAXXS, STPPTXX, HVPKPXX and RVPSTXX; wherein PEP8 is selected from the group consisting of GXGXR, SXGXH, AXGXH, XGXR, EXGXR, RXGXS, AXGXR, SXGXR and XGXL; and wherein the pair PEP7:PEP8 is selected from the group consisting of KIPKAXX:GXGXR, SIPKAXX:GXGXR, HVTKPTX:SXGXH, YVPKPXX:SXGSH, TVPKPXX:AXGXH, AVPKAXX:AXGXH, KVGKAXX:XGXR, KASKAXX:EXGXR, GSAGPXX:RXGXS, AAPASXX:AXGXR, STPPTXX:SXGXR, HVPKPXX:SXGXH and RVPSTXX:XGXL.

[0539] In certain embodiments useful for inducing differentiation of mensenchymal or progenitor stem cells from the retinal cell lineage, promoting eye retina cell regeneration and protecting from eye retina cell degeneration-related conditions or diseases, PEP9 is selected from the group consisting of KIPKAXXVPTEL, SIPKAXXVPTEL, HVTKPTXAPTKL, YVPKPXXAPTKL, TVPKPXXAPTQL, AVPKAXXAPTKL, KVGKAXXVPTKL, KASKAXXVPTKL, GSAGPXXTPTKL, AAPASXXVPARL, STPPTXXVPTRL, HVPKPXXAPTKL and RVPSTXXAPVKT; PEP10 is selected from the group consisting of DMVVEGXGXR, EMVVEGXGXR, NMVVRSXGXH, NMVVRAXGXH, NMVVKAXGXH, EGMSVAEXGXR, GMAVSEXGXR, GMVVDRXGXS, DMVVEAXGXR, DMVVESXGXR, NMVVRSXGXH and MIVEEXGXL; and wherein the pair PEP9:PEP10 is selected from the group consisting of KIPKAXXVPTEL:DMVVEGXGXR, SIPKAXXVPTEL:EMVVEGXGXR, HVTKPTXAPTKL:NMVVRSXGXH, YVPKPXXAPTKL:NMVVRSXGXH, TVPKPXXAPTQL:NMVVRAXGXH, AVPKAXXAPTKL:NMVVKAXGXH, KVGKAXXVPTKL:EGMSVAEXGXR, KASKAXXVPTKL:GMAVSEXGXR, GSAGPXXTPTKM:GMVVDRXGXS, AAPASXXVPARL:DMVVEAXGXR, STPPTXXVPTRL:DMVVESXGXR, HVPKPXXAPTKL:NMVVRSXGXH and RVPSTXXAPVKT:MIVEEXGXL.

[0540] In certain embodiments useful for inducing differentiation of mensenchymal or progenitor stem cells from the retinal cell lineage, promoting eye retina cell regeneration and protecting from eye retina cell degeneration-related conditions or diseases, PEP5 is selected from the group consisting of VPTEL, APTKL, APTQL, VPTKL, VPARL, VPQAL, VSQDL and VPQDL; PEP6 is selected from the group consisting of DMVVE, EMVVE, NMVVR, NMVVK, EGMSVAE, GMAVS, DMVVE, MIVRS, MIVKS and MVVKS; and wherein the pair PEP5:PEP6 is selected from the group consisting of VPTEL:DMVVE, VPTEL:EMVVE, APTKL:NMVVR, APTQL:NMVVR, APTKL:NMVVK, VPTKL:EGMSVAE, VPTKL:EGMAVS, TPTKM:GMVVD, VPARL:DMVVE, VPTRL:DMVVE, APTKL:NMVVR and APVKT:DMIVEE; and wherein the pair PEP5:PEP6 is not TPTKM:GMVVD when PEP1 is SPIN and PEP2 is YGKIP.

[0541] In certain embodiments useful for inducing differentiation of mensenchymal or progenitor stem cells from the retinal cell lineage, promoting eye retina cell regeneration and protecting from eye retina cell degeneration-related conditions or diseases, PEP9 is selected from the group consisting of KIPKAXXVPTEL, SIPKAXXVPTEL, HVTKPTXAPTKL, YVPKPXXAPTKL, TVPKPXXAPTQL, AVPKAXXAPTKL, KVGKAXXVPTKL, KASKAXXVPTKL, GSAGPXXTPTKL, AAPASXXVPARL, STPPTXXVPTRL, HVPKPXXAPTKL and RVPSTXXAPVKT; PEP10 is selected from the group consisting of DMVVEGXGXR, EMVVEGXGXR, NMVVRSXGXH, NMVVRAXGXH, NMVVKAXGXH, EGMSVAEXGXR, GMAVSEXGXR, GMVVDRXGXS, DMVVEAXGXR, DMVVESXGXR, NMVVRSXGXH and MIVEEXGXL; and wherein the pair PEP9:PEP10 is selected from the group consisting of KIPKAXXVPTEL:DMVVEGXGXR, SIPKAXXVPTEL:EMVVEGXGXR, HVTKPTXAPTKL:NMVVRSXGXH, YVPKPXXAPTKL:NMVVRSXGXH, TVPKPXXAPTQL:NMVVRAXGXH, AVPKAXXAPTKL:NMVVKAXGXH, KVGKAXXVPTKL:EGMSVAEXGXR, KASKAXXVPTKL:GMAVSEXGXR, GSAGPXXTPTKM:GMVVDRXGXS, AAPASXXVPARL:DMVVEAXGXR, STPPTXXVPTRL:DMVVESXGXR, HVPKPXXAPTKL:NMVVRSXGXH and RVPSTXXAPVKT:MIVEEXGXL; and wherein PEP9:PEP10 is not GSAGPXXTPTKM:GMVVDRXGXS when PEP1 is SPIN and PEP2 is YGKIP.

[0542] In certain embodiments useful for inducing differentiation of mensenchymal or progenitor stem cells from the retinal cell lineage, promoting eye retina cell regeneration and protecting from eye retina cell degeneration-related conditions or diseases, PEP1 is SPIN and PEP11 is LYF.

[0543] In one aspect, the present disclosure provides a cyclic GFR-binding compound, wherein said cyclic GFR-binding compound is a cyclic peptide, a variant or analog thereof, or a cyclic peptidomimetic as defined herein, with between 15-60 (in particular between 15-55, more particularly between 19-60, and even more particularly between 19-55) amino acids, or between 15-35 (in particular between 15-30, more particularly between 19-35, and even more particularly between 19-30) amino acids, comprising a peptide with four amino acids (PEP1) or a peptide with eight amino acids (PEP12), a peptide with five amino acids (PEP2), and optionally a pair of peptides selected form the group consisting of PEP3:PEP4, PEP3:PEP6, PEP3:PEP10, PEP5:PEP4, PEP9:PEP4, PEP5:PEP6, PEP5:PEP10, PEP9:PEP6 and PEP9:PEP10; wherein said cyclic GFR-binding compound does not comprise the pair of peptides TPTKM:GMVVD when PEP1 is SPIN and PEP2 is YGKIP.

[0544] In one aspect, the present disclosure provides a cyclic GFR-binding compound, wherein said cyclic GFR-binding compound is a cyclic peptide, a variant or analog thereof, or a cyclic peptidomimetic as defined herein, with between 15-60 (in particular between 15-55, more particularly between 19-60, and even more particularly between 19-55) amino acids, or between 15-35 (in particular between 15-30, more particularly between 19-35, and even more particularly between 19-30) amino acids, comprising a peptide with four amino acids (PEP1) or a peptide with eight amino acids (PEP12), a peptide with five amino acids (PEP2), and optionally a pair of peptides selected form the group consisting of PEP3:PEP4, PEP3:PEP6, PEP3:PEP10, PEP5:PEP4, PEP9:PEP4, PEP5:PEP6, PEP5:PEP10, PEP9:PEP6 and PEP9:PEP10; wherein said cyclic GFR-binding compound does not comprise the pair of peptides GSAGPXXTPTKM:GMVVDRXGXS when PEP1 is SPIN and PEP2 is YGKIP.

[0545] In certain embodiments useful for inducing differentiation of mensenchymal or progenitor stem cells from the retinal cell lineage, promoting eye retina cell regeneration and protecting from eye retina cell degeneration-related conditions or diseases, said cyclic GFR-binding compound is a synthetic molecule as defined herein in the definition section.

[0546] In certain embodiments useful for inducing differentiation of mensenchymal or progenitor stem cells from the retinal cell lineage, promoting eye retina cell regeneration and protecting from eye retina cell degeneration-related conditions or diseases, said cyclic GFR-binding compound is a synthetic peptide, or a variant or analog thereof, or a cyclic peptidomimetic.

[0547] Renal Tissues

[0548] Certain embodiments of the invention are particularly useful for inducing differentiation of mensenchymal or progenitor stem cells from the renal cell lineage, promoting renal cell regeneration and/or renal functions and protecting from renal cell degeneration-related conditions or diseases such as chronic kidney disease or renal fibrosis.

[0549] In certain embodiments useful for inducing differentiation of mensenchymal or progenitor stem cells from the renal cell lineage, promoting renal cell regeneration and/or renal functions and protecting from renal cell degeneration-related conditions or diseases, PEP1 is SPIN.

[0550] In certain embodiments useful for inducing differentiation of mensenchymal or progenitor stem cells from the renal cell lineage, promoting renal cell regeneration and/or renal functions and protecting from renal cell degeneration-related conditions or diseases, PEP2 is YGKIP.

[0551] In certain embodiments useful for inducing differentiation of mensenchymal or progenitor stem cells from the renal cell lineage, promoting renal cell regeneration and/or renal functions and protecting from renal cell degeneration-related conditions or diseases, PEP3 is selected from the group consisting of VPT, APT, TPT, VPA and APV.

[0552] In certain embodiments useful for inducing differentiation of mensenchymal or progenitor stem cells from the renal cell lineage, promoting renal cell regeneration and/or renal functions and protecting from renal cell degeneration-related conditions or diseases, PEP4 is selected from the group consisting of VVE, VVR, VVK, VAE, AVS, VVD and VEE.

[0553] In certain embodiments useful for inducing differentiation of mensenchymal or progenitor stem cells from the renal cell lineage, promoting renal cell regeneration and/or renal functions and protecting from renal cell degeneration-related conditions or diseases, PEP5 is a peptide of general formula PEP3-AA¹¹-AA¹²; wherein PEP3 is selected from the group consisting of VPT, APT, TPT, VPA and APV; wherein AA¹¹ is selected from the group consisting of E, K, Q, R, A, D, G and H, in particular is E, K, Q and R; wherein AA¹² is selected from the group consisting of L, M, T, E, Q and H, in particular is L, M or T. In one particular example, PEP5 is selected from the group consisting of VPTEL, APTKL, APTQL, VPTKL, TPTKM, VPARL, VPTRL and APVKT.

[0554] In certain embodiments useful for inducing differentiation of mensenchymal or progenitor stem cells from the renal cell lineage, promoting renal cell regeneration and/or renal functions and protecting from renal cell degeneration-related conditions or diseases, PEP6 is a peptide of general formula AA²⁶-AA²⁷-AA²⁸-AA²⁹-PEP4; wherein PEP4 is selected from the group consisting of VVE, VVR, VVK, VAE, AVS, VVD and VEE; wherein AA²⁶ is absent or selected from the group consisting of AA^{III} amino acids, preferably absent or E; wherein AA²⁷ and AA²⁸ are independently selected from the group consisting of AA^{III} and AA^{V} amino acids, preferably AA²⁷ is selected from the group consisting of D, E, N, G and M, preferably AA²⁸ is M or I; wherein AA²⁹ is absent or selected from the group consisting of AA^{II} amino acids, preferably absent or S. In one particular example, PEP6 is selected from the group consisting of DMVVE, EMVVE, NMVVR, NMVVK, EGMSVAE, EGMAVS, GMVVD and DMIVEE.

[0555] In certain embodiments useful for inducing differentiation of mensenchymal or progenitor stem cells from the renal cell lineage, promoting renal cell regeneration and/or renal functions and protecting from renal cell degeneration-related conditions or diseases, PEP7 is an amino acid or a peptide with between two and seven amino acids of general formula AA¹-AA²-AA³-AA⁴-AA⁵-AA⁶-AA⁷; wherein AA¹, AA², AA³, AA⁴, and AA⁵ are independently absent or AA^{I} as defined herein; wherein AA⁶ is absent or selected from the group consisting of S, T, C, E, Q, P and R, preferably is S or C; wherein AA⁷ is absent or is selected from the group consisting of S, T, C, E, Q, P and R, preferably is S or C; and wherein at least one of AA¹, AA², AA³, AA⁴, AA⁵, AA⁶ or AA⁷ is not absent. In one particular example, PEP7 is selected from the group consisting of KIPKAXX, SIPKAXX, HVTKPTX, YVPKPXX, TVPKPXX, AVPKAXX, KVGKAXX, KASKAXX, GSAGPXX, AAPAXXS, STPPTXX, HVPKPXX and RVPSTXX.

[0556] In certain embodiments useful for inducing differentiation of mensenchymal or progenitor stem cells from the renal cell lineage, promoting renal cell regeneration and/or renal functions and protecting from renal cell degeneration-related conditions or diseases, PEP8 is an amino acid or a peptide with between two and six amino acids of general formula AA³³-AA³⁴-AA³⁵-AA³⁶-AA³⁷-AA³⁸; wherein AA³³ is absent or is selected from the group consisting of AA^{I} amino acids at the exception of AA^{VI} amino acids, in particular is absent or is selected from the group consisting of G, S, A, E and R; AA³⁴ is absent or is selected from the group consisting of AA^{III} and AA^{IV} amino acids, in particular is absent; wherein AA³⁵ is absent or is selected from the group consisting of AA^{II} amino acids, preferably is S or C; wherein AA³⁶ is absent or is selected from the group consisting of AA^{III} and AA^{IV} amino acids; wherein AA³⁷ is absent or is selected from the group consisting of AA^{II} amino acids, preferably is S or C; wherein AA³⁸ is absent or is selected from the group consisting of AA^{I}, in particular is selected from the group consisting of R, H, S and L; and wherein at least one of AA³³, AA³⁴, AA³⁵, AA³⁶, AA³⁷ or AA³⁸ is not absent. In one particular example, PEP8 is selected from the group consisting of GXGXR, SXGXH, AXGXH, XGXR, EXGXR, RXGXS, AXGXR, SXGXR and XGXL.

[0557] In certain embodiments useful for inducing differentiation of mensenchymal or progenitor stem cells from the renal cell lineage, promoting renal cell regeneration and/or renal functions and protecting from renal cell degeneration-related conditions or diseases, PEP9 is a peptide of general formula AA¹-AA²-AA³-AA⁴-AA⁵-AA⁶-AA⁷-PEP5; wherein PEP5 is a peptide of formula PEP3-AA¹¹-AA¹²; wherein PEP3 is selected from the group consisting of VPT, APT, TPT, VPA and APV; wherein AA¹ is selected from the group consisting of E, K, Q, R, A, D, G and H, in particular is E, K, Q and R; wherein AA¹² is selected from the group consisting of L, M, T, E, Q and H, in particular is L, M or T; wherein AA¹, AA², AA³, AA⁴, and AA⁵ are independently absent or AA^{I} as defined herein; wherein AA⁶ is absent or selected from the group consisting of S, T, C, E, Q, P and R, preferably is S or C; wherein AA⁷ is selected from the group consisting of S, T, C, E, Q, P and R, preferably is S or C. In one particular example, PEP9 is selected from the group consisting of KIPKAXXVPTEL, SIPKAXXVPTEL, HVTKPTXAPTKL, YVPKPXXAPTKL, TVPKPXXAPTQL, AVPKAXXAPTKL, KVGKAXXVPTKL, KASKAXXVPTKL, GSAGPXXTPTKL, AAPASXXVPARL, STPPTXXVPTRL, HVPKPXXAPTKL and RVPSTXXAPVKT.

[0558] In certain embodiments useful for inducing differentiation of mensenchymal or progenitor stem cells from the renal cell lineage, promoting renal cell regeneration and/or renal functions and protecting from renal cell degeneration-related conditions or diseases, PEP10 is a peptide of general formula PEP6-AA³³-AA³⁴-AA³⁵-AA³⁶-AA³⁷-AA³⁸; wherein PEP6 is a peptide of formula AA²⁶-AA²⁷-AA²⁸-AA²⁹-PEP4; wherein PEP4 is selected from the group consisting of VVE, VVR, VVK, VAE, AVS, VVD and VEE; wherein AA²⁶ is absent or selected from the group consisting of AA^{III} amino acids, preferably absent or E; wherein AA²⁷ and AA²⁸ are independently selected from the group consisting of AA^{III} and AA^{V} amino acids, preferably AA²⁷ is selected from the group consisting of D, E, N, G and M, preferably AA²⁸ is M or I; wherein AA²⁹ is absent or selected from the group consisting of AA^{II} amino acids, preferably absent or S; wherein AA³³ is absent or is selected from the group consisting of AA^{I} amino acids at the exception of AA¹ amino acids, in particular is absent or is selected from the group consisting of G, S, A, E and R; AA³⁴ is absent or is selected from the group consisting of AA^{III} and AA^{IV} amino acids, in particular is absent; wherein AA³⁵ is absent or is selected from the group consisting of AA^{II} amino acids, preferably is S or C; wherein AA³⁶ is absent or is selected from the group consisting of AA^{III} and AA^{IV} amino acids; wherein AA³⁷ is absent or is selected from the group consisting of AA^{II} amino acids, preferably is S or C; wherein AA³⁸ is absent or is selected from the group consisting of AA^{I}, in particular is selected from the group consisting of R, H, S and L. In one particular example, PEP10 is selected from the group consisting of DMVVEGXGXR, EMVVEGXGXR, NMVVRSXGXH, NMVVRAXGXH, NMVVKAXGXH, EGMSVAEXGXR, GMAVSEXGXR, GMVVDRXGXS, DMVVEAXGXR, DMVVESXGXR, NMVVRSXGXH and MIVEEXGXL.

[0559] In certain embodiments useful for inducing differentiation of mensenchymal or progenitor stem cells from the renal cell lineage, promoting renal cell regeneration and/or renal functions and protecting from renal cell degeneration-related conditions or diseases, PEP12 is a peptide of general formula PEP1-AA¹⁷-PEP11; wherein AA¹⁷ is selected from the group consisting of G, A, V, L, I, P, F, M, W, T and S (in particular is selected from the group consisting of M, I, L, V and T); wherein PEP1 is SPIN.

[0560] In certain embodiments useful for inducing differentiation of mensenchymal or progenitor stem cells from the renal cell lineage, promoting renal cell regeneration and/or renal functions and protecting from renal cell degeneration-related conditions or diseases, PEP11 is a peptide with 3 amino acids of general formula AA¹⁸-AA¹⁹-AA²⁰; wherein AA¹⁸ is selected from the group consisting of L, V, Q, A and R, in particular is L; wherein AA¹⁹ is selected from the group consisting of F, W, H and Y, in particular is Y or F; wherein AA²⁰ is selected from the group consisting of L, F, Y, K, I, V and M, in particular is selected from the group consisting of L, F, Y, K, I and V. In one particular example, PEP11 is LYF.

[0561] The definitions of “PEP” pairs, quadruplets, hexaplets and heptuplet e.g. PEP1:PEP2, PEP12:PEP2, or PEP7:PEP5:PEP12:LINKER:PEP2:PEP6:PEP8, most particularly useful for inducing differentiation of mensenchymal or progenitor stem cells from the renal cell lineage, promoting renal cell regeneration and/or renal functions and protecting from renal cell degeneration-related conditions or diseases, are as already defined herein to the extent that PEP1 to PEP12 are particularly useful for these applications. For instances:

[0562] In certain embodiments useful for inducing differentiation of mensenchymal or progenitor stem cells from the renal cell lineage, promoting renal cell regeneration and/or renal functions and protecting from renal cell degeneration-related conditions or diseases, PEP3 is selected from the group consisting of VPT, APT, TPT, VPA and APV; PEP4 is selected from the group consisting of VVE, VVR, VVK, VAE, AVS, VVD and VEE; and wherein the pair PEP3:PEP4 is selected from the group consisting of VPT:VVE, APT:VVR, APT:VVK, VPT:VAE, VPT:AVS, TPT:VVD, VPA:VVE and APV:VEE.

[0563] In certain embodiments useful for inducing differentiation of mensenchymal or progenitor stem cells from the renal cell lineage, promoting renal cell regeneration and/or renal functions and protecting from renal cell degeneration-related conditions or diseases, PEP5 is selected from the group consisting of VPTEL, APTKL, APTQL, VPTKL, TPTKM, VPARL, VPTRL and APVKT; PEP6 is selected from the group consisting of DMVVE, EMVVE, NMVVR, NMVVK, EGMSVAE, EGMAVS, GMVVD and DMIVEE; and wherein the pair PEP5:PEP6 is selected from the group consisting of VPTEL:DMVVE, VPTEL:EMVVE, APTKL:NMVVR, APTQL:NMVVR, APTKL:NMVVK, VPTKL:EGMSVAE, VPTKL:EGMAVS, TPTKM:GMVVD, VPARL:DMVVE, VPTRL:DMVVE, APTKL:NMVVR and APVKT:DMIVEE.

[0564] In certain embodiments useful for inducing differentiation of mensenchymal or progenitor stem cells from the renal cell lineage, promoting renal cell regeneration and/or renal functions and protecting from renal cell degeneration-related conditions or diseases, PEP7 is selected from the group consisting of KIPKAXX, SIPKAXX, HVTKPTX, YVPKPXX, TVPKPXX, AVPKAXX, KVGKAXX, KASKAXX, GSAGPXX, AAPAXXS, STPPTXX, HVPKPXX and RVPSTXX; wherein PEP8 is selected from the group consisting of GXGXR, SXGXH, AXGXH, XGXR, EXGXR, RXGXS, AXGXR, SXGXR and XGXL; and wherein the pair PEP7:PEP8 is selected from the group consisting of KIPKAXX:GXGXR, SIPKAXX:GXGXR, HVTKPTX:SXGXH, YVPKPXX:SXGXH, TVPKPXX:AXGXH, AVPKAXX:AXGXH, KVGKAXX:XGXR, KASKAXX:EXGXR, GSAGPXX:RXGXS, AAPASXX:AXGXR, STPPTXX:SXGXR, HVPKPXX:SXGXH and RVPSTXX:XGXL.

[0565] In certain embodiments useful for inducing differentiation of mensenchymal or progenitor stem cells from the renal cell lineage, promoting renal cell regeneration and/or renal functions and protecting from renal cell degeneration-related conditions or diseases, PEP9 is selected from the group consisting of KIPKAXXVPTEL, SIPKAXXVPTEL, HVTKPTXAPTKL, YVPKPXXAPTKL, TVPKPXXAPTQL, AVPKAXXAPTKL, KVGKAXXVPTKL, KASKAXXVPTKL, GSAGPXXTPTKL, AAPASXXVPARL, STPPTXXVPTRL, HVPKPXXAPTKL and RVPSTXXAPVKT; PEP10 is selected from the group consisting of DMVVEGXGXR, EMVVEGXGXR, NMVVRSXGXH, NMVVRAXGXH, NMVVKAXGXH, EGMSVAEXGXR, GMAVSEXGXR, GMVVDRXGXS, DMVVEAXGXR, DMVVESXGXR, NMVVRSXGXH and MIVEEXGXL; and wherein the pair PEP9:PEP10 is selected from the group consisting of KIPKAXXVPTEL:DMVVEGXGXR, SIPKAXXVPTEL:EMVVEGXGXR, HVTKPTXAPTKL:NMVVRSXGXH, YVPKPXXAPTKL:NMVVRSXGXH, TVPKPXXAPTQL:NMVVRAXGXH, AVPKAXXAPTKL:NMVVKAXGXH, KVGKAXXVPTKL:EGMSVAEXGXR, KASKAXXVPTKL:GMAVSEXGXR, GSAGPXXTPTKM:GMVVDRXGXS, AAPASXXVPARL:DMVVEAXGXR, STPPTXXVPTRL:DMVVESXGXR, HVPKPXXAPTKL:NMVVRSXGXH and RVPSTXXAPVKT:MIVEEXGXL.

[0566] In certain embodiments useful for inducing differentiation of mensenchymal or progenitor stem cells from the renal cell lineage, promoting renal cell regeneration and/or renal functions and protecting from renal cell degeneration-related conditions or diseases, PEP5 is selected from the group consisting of VPTEL, APTKL, APTQL, VPTKL, VPARL, VPQAL, VSQDL and VPQDL; PEP6 is selected from the group consisting of DMVVE, EMVVE, NMVVR, NMVVK, EGMSVAE, GMAVS, DMVVE, MIVRS, MIVKS and MVVKS; and wherein the pair PEP5:PEP6 is selected from the group consisting of VPTEL:DMVVE, VPTEL:EMVVE, APTKL:NMVVR, APTQL:NMVVR, APTKL:NMVVK, VPTKL:EGMSVAE, VPTKL:EGMAVS, TPTKM:GMVVD, VPARL:DMVVE, VPTRL:DMVVE, APTKL:NMVVR and APVKT:DMIVEE; and wherein the pair PEP5:PEP6 is not TPTKM:GMVVD when PEP1 is SPIN and PEP2 is YGKIP.

[0567] In certain embodiments useful for inducing differentiation of mensenchymal or progenitor stem cells from the renal cell lineage, promoting renal cell regeneration and/or renal functions and protecting from renal cell degeneration-related conditions or diseases, PEP9 is selected from the group consisting of KIPKAXXVPTEL, SIPKAXXVPTEL, HVTKPTXAPTKL, YVPKPXXAPTKL, TVPKPXXAPTQL, AVPKAXXAPTKL, KVGKAXXVPTKL, KASKAXXVPTKL, GSAGPXXTPTKL, AAPASXXVPARL, STPPTXXVPTRL, HVPKPXXAPTKL and RVPSTXXAPVKT; PEP10 is selected from the group consisting of DMVVEGXGXR, EMVVEGXGXR, NMVVRSXGXH, NMVVRAXGXH, NMVVKAXGXH, EGMSVAEXGXR, GMAVSEXGXR, GMVVDRXGXS, DMVVEAXGXR, DMVVESXGXR, NMVVRSXGXH and MIVEEXGXL; and wherein the pair PEP9:PEP10 is selected from the group consisting of KIPKAXXVPTEL:DMVVEGXGXR, SIPKAXXVPTEL:EMVVEGXGXR, HVTKPTXAPTKL:NMVVRSXGXH, YVPKPXXAPTKL:NMVVRSXGXH, TVPKPXXAPTQL:NMVVRAXGXH, AVPKAXXAPTKL:NMVVKAXGXH, KVGKAXXVPTKL:EGMSVAEXGXR, KASKAXXVPTKL:GMAVSEXGXR, GSAGPXXTPTKM:GMVVDRXGXS, AAPASXXVPARL:DMVVEAXGXR, STPPTXXVPTRL:DMVVESXGXR, HVPKPXXAPTKL:NMVVRSXGXH and RVPSTXXAPVKT:MIVEEXGXL; and wherein PEP9:PEP10 is not GSAGPXXTPTKM:GMVVDRXGXS when PEP1 is SPIN and PEP2 is YGKIP.

[0568] In certain embodiments useful for inducing differentiation of mensenchymal or progenitor stem cells from the renal cell lineage, promoting renal cell regeneration and/or renal functions and protecting from renal cell degeneration-related conditions or diseases, PEP1 is SPIN and PEP11 is LYF.

[0569] In one aspect, the present disclosure provides a cyclic GFR-binding compound, wherein said cyclic GFR-binding compound is a cyclic peptide, a variant or analog thereof, or a cyclic peptidomimetic as defined herein, with between 15-60 (in particular between 15-55, more particularly between 19-60, and even more particularly between 19-55) amino acids, or between 15-35 (in particular between 15-30, more particularly between 19-35, and even more particularly between 19-30) amino acids, comprising a peptide with four amino acids (PEP1) or a peptide with eight amino acids (PEP12), a peptide with five amino acids (PEP2), and optionally a pair of peptides selected form the group consisting of PEP3:PEP4, PEP3:PEP6, PEP3:PEP10, PEP5:PEP4, PEP9:PEP4, PEP5:PEP6, PEP5:PEP10, PEP9:PEP6 and PEP9:PEP10; wherein said cyclic GFR-binding compound does not comprise the pair of peptides TPTKM:GMVVD when PEP1 is SPIN and PEP2 is YGKIP.

[0570] In one aspect, the present disclosure provides a cyclic GFR-binding compound, wherein said cyclic GFR-binding compound is a cyclic peptide, a variant or analog thereof, or a cyclic peptidomimetic as defined herein, with between 15-60 (in particular between 15-55, more particularly between 19-60, and even more particularly between 19-55) amino acids, or between 15-35 (in particular between 15-30, more particularly between 19-35, and even more particularly between 19-30) amino acids, comprising a peptide with four amino acids (PEP1) or a peptide with eight amino acids (PEP12), a peptide with five amino acids (PEP2), and optionally a pair of peptides selected form the group consisting of PEP3:PEP4, PEP3:PEP6, PEP3:PEP10, PEP5:PEP4, PEP9:PEP4, PEP5:PEP6, PEP5:PEP10, PEP9:PEP6 and PEP9:PEP10; wherein said cyclic GFR-binding compound does not comprise the pair of peptides GSAGPXXTPTKM:GMVVDRXGXS when PEP1 is SPIN and PEP2 is YGKIP.

[0571] In certain embodiments useful for inducing differentiation of mensenchymal or progenitor stem cells from the renal cell lineage, promoting renal cell regeneration and/or renal functions and protecting from renal cell degeneration-related conditions or diseases, said cyclic GFR-binding compound is a synthetic molecule as defined herein in the definition section.

[0572] In certain embodiments useful for inducing differentiation of mensenchymal or progenitor stem cells from the renal cell lineage, promoting renal cell regeneration and/or renal functions and protecting from renal cell degeneration-related conditions or diseases, said cyclic GFR-binding compound is a synthetic peptide, or a variant or analog thereof, or a cyclic peptidomimetic.

[0573] Ligaments and Tendons

[0574] Certain embodiments of the invention are particularly useful for inducing differentiation of mensenchymal or progenitor stem cells from the ligament and tendon (L/T) cell lineage, promoting fibrous tissue formation and T/L regeneration and protecting from L/T cell degeneration and L/T cell degeneration-related diseases, conditions, disorders or pathologies.

[0575] In certain embodiments useful for inducing differentiation of mensenchymal or progenitor stem cells from the ligament and tendon (L/T) cell lineage, promoting fibrous tissue formation and T/L regeneration and protecting from L/T cell degeneration and L/T cell degeneration-related diseases, conditions, disorders or pathologies, PEP1 is selected from the group consisting of NAIS, SPIS, EPLP and EPLT.

[0576] In certain embodiments useful for inducing differentiation of mensenchymal or progenitor stem cells from the ligament and tendon (L/T) cell lineage, promoting fibrous tissue formation and T/L regeneration and protecting from L/T cell degeneration and L/T cell degeneration-related diseases, conditions, disorders or pathologies, PEP2 is selected from the group consisting of LKKYR, YKQYE and EQLSN.

[0577] In certain embodiments useful for inducing differentiation of mensenchymal or progenitor stem cells from the ligament and tendon (L/T) cell lineage, promoting fibrous tissue formation and T/L regeneration and protecting from L/T cell degeneration and L/T cell degeneration-related diseases, conditions, disorders or pathologies, PEP3 is selected from the group consisting of VPT, APT, VPQ and VSQ.

[0578] In certain embodiments useful for inducing differentiation of mensenchymal or progenitor stem cells from the ligament and tendon (L/T) cell lineage, promoting fibrous tissue formation and T/L regeneration and protecting from L/T cell degeneration and L/T cell degeneration-related diseases, conditions, disorders or pathologies, PEP4 is selected from the group consisting of VVE, VVR, VRS, VKS and VVK.

[0579] In certain embodiments useful for inducing differentiation of mensenchymal or progenitor stem cells from the ligament and tendon (L/T) cell lineage, promoting fibrous tissue formation and T/L regeneration and protecting from L/T cell degeneration and L/T cell degeneration-related diseases, conditions, disorders or pathologies, PEP5 is a peptide of general formula PEP3-AA¹¹-AA¹²; wherein PEP3 is selected from the group consisting of VPT, APT, VPQ and VSQ; wherein AA¹¹ is selected from the group consisting of E, K, Q, R, A, D, G and H, in particular is E, K, Q, R, A and D; wherein AA¹² is selected from the group consisting of L, M, T, E, Q and H, in particular is L. In one particular example, PEP5 is selected from the group consisting of VPTEL, APTKL, APTQL, VPTRL, VPQAL, VSQDL and VPQDL.

[0580] In certain embodiments useful for inducing differentiation of mensenchymal or progenitor stem cells from the ligament and tendon (L/T) cell lineage, promoting fibrous tissue formation and T/L regeneration and protecting from L/T cell degeneration and L/T cell degeneration-related diseases, conditions, disorders or pathologies, PEP6 is a peptide of general formula AA²⁶-AA²⁷-AA²⁸-AA²⁹-PEP4; wherein PEP4 is selected from the group consisting of VVE, VVR, VRS, VKS and VVK; wherein AA²⁶ is absent or selected from the group consisting of AA^{III} amino acids, preferably is absent; wherein AA²⁷ and AA²⁸ are independently selected from the group consisting of AA^{III} and AA^{V} amino acids, preferably AA²⁷ is selected from the group consisting of D, E, N and M, preferably AA²⁸ is selected from the group consisting of M, I and V; wherein AA²⁹ is absent or selected from the group consisting of AA^{II} amino acids, preferably is absent. In one particular example, PEP6 is selected from the group consisting of DMVVE, EMVVE, NMVVR, DMVVE, MIVRS, MIVKS and NMVVK.

[0581] In certain embodiments useful for inducing differentiation of mensenchymal or progenitor stem cells from the ligament and tendon (L/T) cell lineage, promoting fibrous tissue formation and T/L regeneration and protecting from L/T cell degeneration and L/T cell degeneration-related diseases, conditions, disorders or pathologies, PEP7 is an amino acid or a peptide with between two and seven amino acids of general formula AA¹-AA²-AA³-AA⁴-AA⁵-AA⁶-AA⁷; wherein AA¹, AA², AA³, AA⁴, and AA⁵ are independently absent or AA^{I} as defined herein; wherein AA⁶ is absent or selected from the group consisting of S, T, C, E, Q, P and R, preferably is selected from the group consisting of T, S and C; wherein AA⁷ is absent or is selected from the group consisting of S, T, C, E, Q, P and R, preferably S or C; and wherein at least one of AA¹, AA², AA³, AA⁴, AA⁵, AA⁶ or AA⁷ is not absent. In one particular example, PEP7 is selected from the group consisting of KIPKAXX, SIPKAXX, HVTKPTX, YVPKPXX, TVPKPXX, STPPTXX, ASAAPXX and ASASPXX.

[0582] In certain embodiments useful for inducing differentiation of mensenchymal or progenitor stem cells from the ligament and tendon (L/T) cell lineage, promoting fibrous tissue formation and T/L regeneration and protecting from L/T cell degeneration and L/T cell degeneration-related diseases, conditions, disorders or pathologies, PEP8 is an amino acid or a peptide with between two and six amino acids of general formula AA³³-AA³⁴-AA³⁵-AA³⁶-AA³⁷-AA³⁸; wherein AA³³ is absent or is selected from the group consisting of AA^{I} amino acids at the exception of AA^{VI} amino acids, in particular is absent or is selected from the group consisting of G, S and A; AA³⁴ is absent or is selected from the group consisting of AA^{III} and AA^{V} amino acids, in particular is absent; wherein AA³⁵ is absent or is selected from the group consisting of AA^{II} amino acids, preferably is S or C; wherein AA³⁶ is absent or is selected from the group consisting of AA^{II} and AA^{V} amino acids, in particular is G or K; wherein AA³⁷ is absent or is selected from the group consisting of AA^{II} amino acids, preferably is S or C; wherein AA³⁸ is absent or is selected from the group consisting of AA^{I}, in particular is selected from the group consisting of R, H and S; and wherein at least one of AA³³, AA³⁴, AA³⁵, AA³⁶, AA³⁷ or AA³⁸ is not absent. In one particular example, PEP8 is selected from the group consisting of GXGXR, SXGXH, AXGXH, SXGXR, XKXS and SXKXS.

[0583] In certain embodiments useful for inducing differentiation of mensenchymal or progenitor stem cells from the ligament and tendon (L/T) cell lineage, promoting fibrous tissue formation and T/L regeneration and protecting from L/T cell degeneration and L/T cell degeneration-related diseases, conditions, disorders or pathologies, PEP9 is a peptide of general formula AA¹-AA²-AA³-AA⁴-AA⁵-AA⁶-AA⁷-PEP5; wherein PEP5 is a peptide of formula PEP3-AA¹¹-AA¹²; wherein PEP3 is selected from the group consisting of VPT, APT, VPQ and VSQ; wherein AA¹ is selected from the group consisting of E, K, Q, R, A, D, G and H, in particular is E, K, Q, R, A and D; wherein AA¹² is selected from the group consisting of L, M, T, E, Q and H, in particular is L; wherein AA¹, AA², AA³, AA⁴, and AA⁵ are independently absent or AA^{I} as defined herein; wherein AA⁶ is absent or selected from the group consisting of S, T, C, E, Q, P and R, preferably is selected from the group consisting of T, S and C; wherein AA⁷ is selected from the group consisting of S, T, C, E, Q, P and R, preferably S or C. In one particular example, PEP9 is selected from the group consisting of KIPKAXXVPTEL, SIPKAXXVPTEL, HVTKPTXAPTKL, YVPKPXXAPTKL, TVPKPXXAPTQL, STPPTXXVPTRL, ASAAPXXVPQAL, ASASPXXVSQDL and ASASPXXVPQDL.

[0584] In certain embodiments useful for inducing differentiation of mensenchymal or progenitor stem cells from the ligament and tendon (L/T) cell lineage, promoting fibrous tissue formation and T/L regeneration and protecting from L/T cell degeneration and L/T cell degeneration-related diseases, conditions, disorders or pathologies, PEP10 is a peptide of general formula PEP6-AA³³-AA³⁴-AA³-AA³⁶-AA³⁷-AA³⁸; wherein PEP6 is a peptide of formula AA²⁶-AA²⁷-AA²⁸-AA²⁹-PEP4; wherein PEP4 is selected from the group consisting of VVE, VVR, VRS, VKS and VVK; wherein AA²⁶ is absent or selected from the group consisting of AA^{III} amino acids, preferably is absent; wherein AA²⁷ and AA²⁸ are independently selected from the group consisting of AA^{III} and AA^{V} amino acids, preferably AA²⁷ is selected from the group consisting of D, E, N and M, preferably AA²⁸ is selected from the group consisting of M, I and V; wherein AA²⁹ is absent or selected from the group consisting of AA^{II} amino acids, preferably is absent; wherein AA³³ is absent or is selected from the group consisting of AA^{I} amino acids at the exception of AA¹ amino acids, in particular is absent or is selected from the group consisting of G, S and A; AA³⁴ is absent or is selected from the group consisting of AA^{III} and AA^{IV} amino acids, in particular is absent; wherein AA³⁵ is absent or is selected from the group consisting of AA^{II} amino acids, preferably is S or C; wherein AA³⁶ is absent or is selected from the group consisting of AA^{III} and AA^{IV} amino acids, in particular is G or K; wherein AA³⁷ is absent or is selected from the group consisting of AA^{II} amino acids, preferably is S or C; wherein AA³⁸ is absent or is selected from the group consisting of AA^{I}, in particular is selected from the group consisting of R, H and S. In one particular example, PEP10 is selected from the group consisting of DMVVEGXGXR, EMVVEGXGXR, NMVVRSXGXH, NMVVRAXGXH, DMVVESXGXR, MIVRSXKXS, MIVKSXKXS and MVVKSXKXS.

[0585] In certain embodiments useful for inducing differentiation of mensenchymal or progenitor stem cells from the ligament and tendon (L/T) cell lineage, promoting fibrous tissue formation and T/L regeneration and protecting from L/T cell degeneration and L/T cell degeneration-related diseases, conditions, disorders or pathologies, PEP12 is a peptide of general formula PEP1-AA¹⁷-PEP11; wherein AA¹⁷ is selected from the group consisting of G, A, V, L, I, P, F, M, W, T and S (in particular is selected from the group consisting of M, I, L, V and T); wherein PEP1 is selected from the group consisting of NAIS, SPIS, EPLP and EPLT.

[0586] In certain embodiments useful for inducing differentiation of mensenchymal or progenitor stem cells from the ligament and tendon (L/T) cell lineage, promoting fibrous tissue formation and T/L regeneration and protecting from L/T cell degeneration and L/T cell degeneration-related diseases, conditions, disorders or pathologies, PEP11 is a peptide with 3 amino acids of general formula AA¹⁸-AA¹⁹-AA²⁰; wherein AA¹⁸ is selected from the group consisting of L, V, Q, A and R, in particular is L or V; wherein AA¹⁹ is selected from the group consisting of F, W, H and Y, in particular is Y or F; wherein AA²⁰ is selected from the group consisting of L, F, Y, K, I, V and M, in particular is selected from the group consisting of F, I and Y. In one particular example, PEP11 is selected from the group consisting of LYF, LFI, VYY and LYY.

[0587] The definitions of “PEP” pairs, quadruplets, hexaplets and heptuplet e.g. PEP1:PEP2, PEP12:PEP2, or PEP7:PEP5:PEP12:LINKER:PEP2:PEP6:PEP8, most particularly useful for inducing differentiation of mensenchymal or progenitor stem cells from the ligament and tendon (L/T) cell lineage, promoting fibrous tissue formation and T/L regeneration and protecting from L/T cell degeneration and L/T cell degeneration-related diseases, conditions, disorders or pathologies, are as already defined herein to the extent that PEP1 to PEP12 are particularly useful for these applications. For instances: In certain embodiments useful for inducing differentiation of mensenchymal or progenitor stem cells from the ligament and tendon (L/T) cell lineage, promoting fibrous tissue formation and T/L regeneration and protecting from L/T cell degeneration and L/T cell degeneration-related diseases, conditions, disorders or pathologies, the pair PEP1:PEP2 is selected from the group consisting of NAIS:LKKYR, SPIS:YKQYE, EPLP:EQLSN and EPLT:EQLSN.

[0588] In certain embodiments useful for inducing differentiation of mensenchymal or progenitor stem cells from the ligament and tendon (L/T) cell lineage, promoting fibrous tissue formation and T/L regeneration and protecting from L/T cell degeneration and L/T cell degeneration-related diseases, conditions, disorders or pathologies, the pair PEP12:PEP2 is selected from the group consisting of NAIS-AA¹⁷-LYF:LKKYR, SPIS-AA¹⁷-LFI:YKQYE, EPLP-AA¹⁷-VYY:EQLSN and EPLT-AA¹⁷-LYY:EQLSN; wherein AA¹⁷ is selected from the group consisting of G, A, V, L, I, P, F, M, W, T and S (in particular is selected from the group consisting of V, I and T).

[0589] In certain embodiments useful for inducing differentiation of mensenchymal or progenitor stem cells from the ligament and tendon (L/T) cell lineage, promoting fibrous tissue formation and T/L regeneration and protecting from L/T cell degeneration and L/T cell degeneration-related diseases, conditions, disorders or pathologies, PEP3 is selected from the group consisting of VPT, APT, VPQ and VSQ; PEP4 is selected from the group consisting of VVE, VVR, VRS, VKS and VVK; and wherein the pair PEP3:PEP4 is selected from the group consisting of VPT:VVE, APT:VVR, VPT:VVE, VPQ:VRS, VSQ:VKS and VPQ:VVK.

[0590] In certain embodiments useful for inducing differentiation of mensenchymal or progenitor stem cells from the ligament and tendon (L/T) cell lineage, promoting fibrous tissue formation and T/L regeneration and protecting from L/T cell degeneration and L/T cell degeneration-related diseases, conditions, disorders or pathologies, PEP5 is selected from the group consisting of VPTEL, APTKL, APTQL, VPTRL, VPQAL, VSQDL and VPQDL; PEP6 is selected from the group consisting of DMVVE, EMVVE, NMVVR, DMVVE, MIVRS, MIVKS and NMVVK; and wherein the pair PEP5:PEP6 is selected from the group consisting of VPTEL:DMVVE, VPTEL:EMVVE, APTKL:NMVVR, APTQL:NMVVR, VPTRL:DMVVE, VPQAL:MIVRS, VSQDL:MIVKS and VPQDL:NMVVK.

[0591] In certain embodiments useful for inducing differentiation of mensenchymal or progenitor stem cells from the ligament and tendon (L/T) cell lineage, promoting fibrous tissue formation and T/L regeneration and protecting from L/T cell degeneration and L/T cell degeneration-related diseases, conditions, disorders or pathologies, PEP7 is selected from the group consisting of KIPKAXX, SIPKAXX, HVTKPTX, YVPKPXX, TVPKPXX, STPPTXX, ASAAPXX and ASASPXX; wherein PEP8 is selected from the group consisting of GXGXR, SXGXH, AXGXH, SXGXR, XKXS and SXKXS; and wherein the pair PEP7:PEP8 is selected from the group consisting of KIPKAXX:GXGXR, SIPKAXX:GXGXR, HVTKPTX:SXGXH, YVPKPXX:SXGXH, TVPKPXX:AXGXH, STPPTXX:SXGXR, ASAAPXX:XKXS and ASASPXX:XKXS.

[0592] In certain embodiments useful for inducing differentiation of mensenchymal or progenitor stem cells from the ligament and tendon (L/T) cell lineage, promoting fibrous tissue formation and T/L regeneration and protecting from L/T cell degeneration and L/T cell degeneration-related diseases, conditions, disorders or pathologies, PEP9 is selected from the group consisting of KIPKAXXVPTEL, SIPKAXXVPTEL, HVTKPTXAPTKL, YVPKPXXAPTKL, TVPKPXXAPTQL, STPPTXXVPTRL, ASAAPXXVPQAL, ASASPXXVSQDL and ASASPXXVPQDL; PEP10 is selected from the group consisting of DMVVEGXGXR, EMVVEGXGXR, NMVVRSXGXH, NMVVRAXGXH, DMVVESXGXR, MIVRSXKXS, MIVKSXKXS and MVVKSXKXS; and wherein the pair PEP9:PEP10 is selected from the group consisting of KIPKAXXVPTEL:DMVVEGXGXR, SIPKAXXVPTEL:EMVVEGXGXR, HVTKPTXAPTKL:NMVVRSXGXH, YVPKPXXAPTKL:NMVVRSXGXH, TVPKPXXAPTQL:NMVVRAXGXH, STPPTXXVPTRL:DMVVESXGXR, ASAAPXXVPQAL:MIVRSXKXS, ASASPXXVSQDL:MIVKSXKXS and ASASPXXVPQDL:MVVKSXKXS.

[0593] In certain embodiments useful for inducing differentiation of mensenchymal or progenitor stem cells from the ligament and tendon (L/T) cell lineage, promoting fibrous tissue formation and T/L regeneration and protecting from L/T cell degeneration and L/T cell degeneration-related diseases, conditions, disorders or pathologies, PEP5 is selected from the group consisting of VPTEL, APTKL, APTQL, VPTRL, VPQAL, VSQDL and VPQDL; PEP6 is selected from the group consisting of DMVVE, EMVVE, NMVVR, DMVVE, MIVRS, MIVKS and NMVVK; and wherein the pair PEP5:PEP6 is selected from the group consisting of VPTEL:DMVVE, VPTEL:EMVVE, APTKL:NMVVR, APTQL:NMVVR, VPTRL:DMVVE, VPQAL:MIVRS, VSQDL:MIVKS and VPQDL:NMVVK; wherein the pair PEP5:PEP6 is not APTQL:NMVVR when PEP1 is NAIS and PEP2 is LKKYR; wherein the pair PEP5:PEP6 is not VPTRL:DMVVE when PEP1 is SPIS and PEP2 is YKQYE; wherein the pair PEP5:PEP6 is not VPQAL:MIVRS when PEP1 is EPLP and PEP2 is EQLSN; wherein the pair PEP5:PEP6 is not VSQDL:MIVKS when PEP1 is EPLT and PEP2 is EQLSN; and wherein the pair PEP5:PEP6 is not VPQDL:NMVVK when PEP1 is EPLT and PEP2 is EQLSN.

[0594] In certain embodiments useful for inducing differentiation of mensenchymal or progenitor stem cells from the ligament and tendon (L/T) cell lineage, promoting fibrous tissue formation and T/L regeneration and protecting from L/T cell degeneration and L/T cell degeneration-related diseases, conditions, disorders or pathologies, PEP9 is selected from the group consisting of KIPKAXXVPTEL, SIPKAXXVPTEL, HVTKPTXAPTKL, YVPKPXXAPTKL, TVPKPXXAPTQL, STPPTXXVPTRL, ASAAPXXVPQAL, ASASPXXVSQDL and ASASPXXVPQDL; PEP10 is selected from the group consisting of DMVVEGXGXR, EMVVEGXGXR, NMVVRSXGXH, NMVVRAXGXH, DMVVESXGXR, MIVRSXKXS, MIVKSXKXS and MVVKSXKXS; and wherein the pair PEP9:PEP10 is selected from the group consisting of KIPKAXXVPTEL:DMVVEGXGXR, SIPKAXXVPTEL:EMVVEGXGXR, HVTKPTXAPTKL:NMVVRSXGXH, YVPKPXXAPTKL:NMVVRSXGXH, TVPKPXXAPTQL:NMVVRAXGXH, STPPTXXVPTRL:DMVVESXGXR, ASAAPXXVPQAL:MIVRSXKXS, ASASPXXVSQDL:MIVKSXKXS and ASASPXXVPQDL:MVVKSXKXS;

[0595] wherein the pair PEP9:PEP10 is not TVPKPXXAPTQL:NMVVRAXGXH when PEP1 is NAIS and PEP2 is LKKYR; wherein the pair PEP9:PEP10 is not STPPTXXVPTRL:DMVVESXGXR when PEP1 is SPIS and PEP2 is YKQYE; wherein the pair PEP9:PEP10 is not ASAAPXXVPQAL:MIVRSXKXS when PEP1 is EPLP and PEP2 is EQLSN; wherein the pair PEP9:PEP10 is not ASASPXXVSQDL:MIVKSXKXS when PEP1 is EPLT and PEP2 is EQLSN; and wherein the pair PEP9:PEP10 is not ASASPXXVPQDL:MVVKSXKXS when PEP1 is EPLT and PEP2 is EQLSN.

[0596] In certain embodiments useful for inducing differentiation of mensenchymal or progenitor stem cells from the ligament and tendon (L/T) cell lineage, promoting fibrous tissue formation and T/L regeneration and protecting from L/T cell degeneration and L/T cell degeneration-related diseases, conditions, disorders or pathologies, PEP1 is selected from the group consisting of NAIS, SPIS, EPLP and EPLT; PEP11 is selected from the group consisting of LYF, LFI, VYY and LYY; and the pair PEP1:PEP11 is selected from the group consisting of NAIS:LYF, SPIS:LFI, EPLP:VYY and EPLT:LYY.

[0597] In one aspect, the present disclosure provides a cyclic GFR-binding compound, wherein said cyclic GFR-binding compound is a cyclic peptide, a variant or analog thereof, or a cyclic peptidomimetic as defined herein, with between 15-60 (in particular between 15-55, more particularly between 19-60, and even more particularly between 19-55) amino acids, or between 15-35 (in particular between 15-30, more particularly between 19-35, and even more particularly between 19-30) amino acids, comprising a peptide with four amino acids (PEP1) or a peptide with eight amino acids (PEP12), a peptide with five amino acids (PEP2), and optionally a pair of peptides selected form the group consisting of PEP3:PEP4, PEP3:PEP6, PEP3:PEP10, PEP5:PEP4, PEP9:PEP4, PEP5:PEP6, PEP5:PEP10, PEP9:PEP6 and PEP9:PEP10; wherein said cyclic GFR-binding compound does not comprise the pair of peptides APTQL:NMVVR when PEP1 is NAIS and PEP2 is LKKYR; wherein said cyclic GFR-binding compound does not comprise the pair of peptides VPTRL:DMVVE when PEP1 is SPIS and PEP2 is YKQYE; wherein said cyclic GFR-binding compound does not comprise the pair of peptides VPQAL:MIVRS when PEP1 is EPLP and PEP2 is EQLSN; wherein said cyclic GFR-binding compound does not comprise the pair of peptides VSQDL:MIVKS when PEP1 is EPLT and PEP2 is EQLSN; and wherein said cyclic GFR-binding compound does not comprise the pair of peptides VPQDL:NMVVK when PEP1 is EPLT and PEP2 is EQLSN.

[0598] In one aspect, the present disclosure provides a cyclic GFR-binding compound, wherein said cyclic GFR-binding compound is a cyclic peptide, a variant or analog thereof, or a cyclic peptidomimetic as defined herein, with between 15-60 (in particular between 15-55, more particularly between 19-60, and even more particularly between 19-55) amino acids, or between 15-35 (in particular between 15-30, more particularly between 19-35, and even more particularly between 19-30) amino acids, comprising a peptide with four amino acids (PEP1) or a peptide with eight amino acids (PEP12), a peptide with five amino acids (PEP2), and optionally a pair of peptides selected form the group consisting of PEP3:PEP4, PEP3:PEP6, PEP3:PEP10, PEP5:PEP4, PEP9:PEP4, PEP5:PEP6, PEP5:PEP10, PEP9:PEP6 and PEP9:PEP10; wherein said cyclic GFR-binding compound does not comprise the pair of peptides TVPKPXXAPTQL:NMVVRAXGXH when PEP1 is NAIS and PEP2 is LKKYR; wherein said cyclic GFR-binding compound does not comprise the pair of peptides STPPTXXVPTRL:DMVVESXGXR when PEP1 is SPIS and PEP2 is YKQYE; wherein said cyclic GFR-binding compound does not comprise the pair of peptides ASAAPXXVPQAL:MIVRSXKXS when PEP1 is EPLP and PEP2 is EQLSN; wherein said cyclic GFR-binding compound does not comprise the pair of peptides ASASPXXVSQDL:MIVKSXKXS when PEP1 is EPLT and PEP2 is EQLSN; and wherein said cyclic GFR-binding compound does not comprise the pair of peptides ASASPXXVPQDL:MVVKSXKXS when PEP1 is EPLT and PEP2 is EQLSN.

[0599] In certain embodiments useful for inducing differentiation of mensenchymal or progenitor stem cells from the ligament and tendon (L/T) cell lineage, promoting fibrous tissue formation and T/L regeneration and protecting from L/T cell degeneration and L/T cell degeneration-related diseases, conditions, disorders or pathologies, said cyclic GFR-binding compound is a synthetic molecule as defined herein in the definition section.

[0600] In certain embodiments useful for inducing differentiation of mensenchymal or progenitor stem cells from the ligament and tendon (L/T) cell lineage, promoting fibrous tissue formation and T/L regeneration and protecting from L/T cell degeneration and L/T cell degeneration-related diseases, conditions, disorders or pathologies, said cyclic GFR-binding compound is a synthetic peptide, or a variant or analog thereof, or a cyclic peptidomimetic.

[0601] In other embodiments also useful for inducing differentiation of mensenchymal or progenitor stem cells from the ligament and tendon (L/T) cell lineage, promoting fibrous tissue formation and T/L regeneration and protecting from L/T cell degeneration and L/T cell degeneration-related diseases, conditions, disorders or pathologies, PEP1 is SPIS.

[0602] In other embodiments also useful for inducing differentiation of mensenchymal or progenitor stem cells from the ligament and tendon (L/T) cell lineage, promoting fibrous tissue formation and T/L regeneration and protecting from L/T cell degeneration and L/T cell degeneration-related diseases, conditions, disorders or pathologies, PEP2 is YKQYE.

[0603] In other embodiments also useful for inducing differentiation of mensenchymal or progenitor stem cells from the ligament and tendon (L/T) cell lineage, promoting fibrous tissue formation and T/L regeneration and protecting from L/T cell degeneration and L/T cell degeneration-related diseases, conditions, disorders or pathologies, PEP3 is selected from the group consisting of VPT, APT, TPT, VPA and APV.

[0604] In other embodiments also useful for inducing differentiation of mensenchymal or progenitor stem cells from the ligament and tendon (L/T) cell lineage, promoting fibrous tissue formation and T/L regeneration and protecting from L/T cell degeneration and L/T cell degeneration-related diseases, conditions, disorders or pathologies, PEP4 is selected from the group consisting of VVE, VVR, VVK, VAE, AVS, VVD and VEE.

[0605] In other embodiments also useful for inducing differentiation of mensenchymal or progenitor stem cells from the ligament and tendon (L/T) cell lineage, promoting fibrous tissue formation and T/L regeneration and protecting from L/T cell degeneration and L/T cell degeneration-related diseases, conditions, disorders or pathologies, PEP5 is a peptide of general formula PEP3-AA¹¹-AA¹²; wherein PEP3 is selected from the group consisting of VPT, APT, TPT, VPA and APV; wherein AA¹¹ is selected from the group consisting of E, K, Q, R, A, D, G and H, in particular is selected from the group consisting of E, K, Q and R; wherein AA¹² is selected from the group consisting of L, M, T, E, Q and H, in particular is selected from the group consisting of L, M and T. In one particular example, PEP5 is selected from the group consisting of VPTEL, APTKL, APTQL, VPTKL, TPTKM, VPARL, VPTRL and APVKT.

[0606] In other embodiments also useful for inducing differentiation of mensenchymal or progenitor stem cells from the ligament and tendon (L/T) cell lineage, promoting fibrous tissue formation and T/L regeneration and protecting from L/T cell degeneration and L/T cell degeneration-related diseases, conditions, disorders or pathologies, PEP6 is a peptide of general formula AA²⁶-AA²⁷-AA²⁸-AA²⁹-PEP4; wherein PEP4 is selected from the group consisting of VVE, VVR, VVK, VAE, AVS, VVD and VEE; wherein AA²⁶ is absent or selected from the group consisting of AA^{III} amino acids, preferably absent or E; wherein AA²⁷ and AA²⁸ are independently selected from the group consisting of AA^{III} and AA^{V} amino acids, preferably AA²⁷ is selected from the group consisting of D, E, N, G and M, preferably AA²⁸ is M or I; wherein AA²⁹ is absent or selected from the group consisting of AA^{II} amino acids, preferably absent or S. In one particular example, PEP6 is selected from the group consisting of DMVVE, EMVVE, NMVVR, NMVVK, EGMSVAE, EGMAVS, GMVVD and DMIVEE.

[0607] In other embodiments also useful for inducing differentiation of mensenchymal or progenitor stem cells from the ligament and tendon (L/T) cell lineage, promoting fibrous tissue formation and T/L regeneration and protecting from L/T cell degeneration and L/T cell degeneration-related diseases, conditions, disorders or pathologies, PEP7 is an amino acid or a peptide with between two and seven amino acids of general formula AA¹-AA²-AA³-AA⁴-AA⁵-AA⁶-AA⁷; wherein AA¹, AA², AA³, AA⁴, and AA⁵ are independently absent or AA^{I} as defined herein; wherein AA⁶ is absent or selected from the group consisting of S, T, C, E, Q, P and R, preferably is S or C; wherein AA⁷ is absent or is selected from the group consisting of S, T, C, E, Q, P and R, preferably is S or C; and wherein at least one of AA¹, AA², AA³, AA⁴, AA⁵, AA⁶ or AA⁷ is not absent. In one particular example, PEP7 is selected from the group consisting of KIPKAXX, SIPKAXX, HVTKPTX, YVPKPXX, TVPKPXX, AVPKAXX, KVGKAXX, KASKAXX, GSAGPXX, AAPAXXS, STPPTXX, HVPKPXX and RVPSTXX.

[0608] In other embodiments also useful for inducing differentiation of mensenchymal or progenitor stem cells from the ligament and tendon (L/T) cell lineage, promoting fibrous tissue formation and T/L regeneration and protecting from L/T cell degeneration and L/T cell degeneration-related diseases, conditions, disorders or pathologies, PEP8 is an amino acid or a peptide with between two and six amino acids of general formula AA³³-AA³⁴-AA³⁵-AA³⁶-AA³⁷-AA³⁸; wherein AA³³ is absent or is selected from the group consisting of AA^{I} amino acids at the exception of AA^{VI} amino acids, in particular is absent or is selected from the group consisting of G, S, A, E and R; AA³⁴ is absent or is selected from the group consisting of AA^{III} and AA^{IV} amino acids, in particular is absent; wherein AA³⁵ is absent or is selected from the group consisting of AA^{II} amino acids, preferably is S or C; wherein AA³⁶ is absent or is selected from the group consisting of AA^{III} and AA^{IV} amino acids; wherein AA³⁷ is absent or is selected from the group consisting of AA^{II} amino acids, preferably is S or C; wherein AA³⁸ is absent or is selected from the group consisting of AA^{I}, in particular is selected from the group consisting of R, H, S and L; and wherein at least one of AA³³, AA³⁴, AA³⁵, AA³⁶, AA³⁷ or AA³⁸ is not absent. In one particular example, PEP8 is selected from the group consisting of GXGXR, SXGXH, AXGXH, XGXR, EXGXR, RXGXS, AXGXR, SXGXR and XGXL.

[0609] In other embodiments also useful for inducing differentiation of mensenchymal or progenitor stem cells from the ligament and tendon (L/T) cell lineage, promoting fibrous tissue formation and T/L regeneration and protecting from L/T cell degeneration and L/T cell degeneration-related diseases, conditions, disorders or pathologies, PEP9 is a peptide of general formula AA¹-AA²-AA³-AA⁴-AA⁵-AA⁶-AA⁷-PEP5; wherein PEP5 is a peptide of formula PEP3-AA¹¹-AA¹²; wherein PEP3 is selected from the group consisting of VPT, APT, TPT, VPA and APV; wherein AA¹ is selected from the group consisting of E, K, Q, R, A, D, G and H, in particular is E, K, Q and R; wherein AA¹² is selected from the group consisting of L, M, T, E, Q and H, in particular is L, M or T; wherein AA¹, AA², AA³, AA⁴, and AA⁵ are independently absent or AA^{I} as defined herein; wherein AA⁶ is absent or selected from the group consisting of S, T, C, E, Q, P and R, preferably is S or C; wherein AA⁷ is selected from the group consisting of S, T, C, E, Q, P and R, preferably is S or C. In one particular example, PEP9 is selected from the group consisting of KIPKAXXVPTEL, SIPKAXXVPTEL, HVTKPTXAPTKL, YVPKPXXAPTKL, TVPKPXXAPTQL, AVPKAXXAPTKL, KVGKAXXVPTKL, KASKAXXVPTKL, GSAGPXXTPTKL, AAPASXXVPARL, STPPTXXVPTRL, HVPKPXXAPTKL and RVPSTXXAPVKT.

[0610] In other embodiments also useful for inducing differentiation of mensenchymal or progenitor stem cells from the ligament and tendon (L/T) cell lineage, promoting fibrous tissue formation and T/L regeneration and protecting from L/T cell degeneration and L/T cell degeneration-related diseases, conditions, disorders or pathologies, PEP10 is a peptide of general formula PEP6-AA³³-AA³⁴-AA³⁵-AA³⁶-AA³⁷-AA³⁸; wherein PEP6 is a peptide of formula AA²⁶-AA²⁷-AA²⁸-AA²⁹-PEP4; wherein PEP4 is selected from the group consisting of VVE, VVR, VVK, VAE, AVS, VVD and VEE; wherein AA²⁶ is absent or selected from the group consisting of AA^{II} amino acids, preferably absent or E; wherein AA²⁷ and AA²⁸ are independently selected from the group consisting of AA^{III} and AA^{V} amino acids, preferably AA²⁷ is selected from the group consisting of D, E, N, G and M, preferably AA²⁸ is M or I; wherein AA²⁹ is absent or selected from the group consisting of AA^{II} amino acids, preferably absent or S; wherein AA³³ is absent or is selected from the group consisting of AA^{I} amino acids at the exception of AA¹ amino acids, in particular is absent or is selected from the group consisting of G, S, A, E and R; AA³⁴ is absent or is selected from the group consisting of AA^{III} and AA^{IV} amino acids, in particular is absent; wherein AA³⁵ is absent or is selected from the group consisting of AA^{II} amino acids, preferably is S or C; wherein AA³⁶ is absent or is selected from the group consisting of AA^{III} and AA^{IV} amino acids; wherein AA³⁷ is absent or is selected from the group consisting of AA^{II} amino acids, preferably is S or C; wherein AA³⁸ is absent or is selected from the group consisting of AA^{I}, in particular is selected from the group consisting of R, H, S and L. In one particular example, PEP10 is selected from the group consisting of DMVVEGXGXR, EMVVEGXGXR, NMVVRSXGXH, NMVVRAXGXH, NMVVKAXGXH, EGMSVAEXGXR, GMAVSEXGXR, GMVVDRXGXS, DMVVEAXGXR, DMVVESXGXR, NMVVRSXGXH and MIVEEXGXL.

[0611] In other embodiments also useful for inducing differentiation of mensenchymal or progenitor stem cells from the ligament and tendon (L/T) cell lineage, promoting fibrous tissue formation and T/L regeneration and protecting from L/T cell degeneration and L/T cell degeneration-related diseases, conditions, disorders or pathologies, PEP12 is a peptide of general formula PEP1-AA¹⁷-PEP11; wherein AA¹⁷ is selected from the group consisting of G, A, V, L, I, P, F, M, W, T and S (in particular is selected from the group consisting of M, I, L, V and T); wherein PEP1 is SPIS.

[0612] In other embodiments also useful for inducing differentiation of mensenchymal or progenitor stem cells from the ligament and tendon (L/T) cell lineage, promoting fibrous tissue formation and T/L regeneration and protecting from L/T cell degeneration and L/T cell degeneration-related diseases, conditions, disorders or pathologies, PEP11 is a peptide with 3 amino acids of general formula AA¹-AA⁹-AA²⁰; wherein AA⁸ is selected from the group consisting of L, V, Q, A and R, in particular is L; wherein AA¹⁹ is selected from the group consisting of F, W, H and Y, in particular is a polar aromatic amino acid such as Y; wherein AA²⁰ is selected from the group consisting of L, F, Y, K, I, V and M, in particular is I. In one particular example, PEP11 is LYI.

[0613] The definitions of “PEP” pairs, quadruplets, hexaplets and heptuplet e.g. PEP1:PEP2, PEP12:PEP2, or PEP7:PEP5:PEP12:LINKER:PEP2:PEP6:PEP8, also useful for inducing differentiation of mensenchymal or progenitor stem cells from the ligament and tendon (L/T) cell lineage, promoting fibrous tissue formation and T/L regeneration and protecting from L/T cell degeneration and L/T cell degeneration-related diseases, conditions, disorders or pathologies, are as already defined herein to the extent that PEP1 to PEP12 are particularly useful for these applications. For instances: In other embodiments also useful for inducing differentiation of mensenchymal or progenitor stem cells from the ligament and tendon (L/T) cell lineage, promoting fibrous tissue formation and T/L regeneration and protecting from L/T cell degeneration and L/T cell degeneration-related diseases, conditions, disorders or pathologies, PEP3 is selected from the group consisting of VPT, APT, TPT, VPA and APV; PEP4 is selected from the group consisting of VVE, VVR, VVK, VAE, AVS, VVD and VEE; and wherein the pair PEP3:PEP4 is selected from the group consisting of VPT:VVE, APT:VVR, APT:VVK, VPT:VAE, VPT:AVS, TPT:VVD, VPA:VVE and APV:VEE.

[0614] In other embodiments also useful for inducing differentiation of mensenchymal or progenitor stem cells from the ligament and tendon (L/T) cell lineage, promoting fibrous tissue formation and T/L regeneration and protecting from L/T cell degeneration and L/T cell degeneration-related diseases, conditions, disorders or pathologies, PEP5 is selected from the group consisting of VPTEL, APTKL, APTQL, VPTKL, TPTKM, VPARL, VPTRL and APVKT; PEP6 is selected from the group consisting of DMVVE, EMVVE, NMVVR, NMVVK, EGMSVAE, EGMAVS, GMVVD and DMIVEE; and wherein the pair PEP5:PEP6 is selected from the group consisting of VPTEL:DMVVE, VPTEL:EMVVE, APTKL:NMVVR, APTQL:NMVVR, APTKL:NMVVK, VPTKL:EGMSVAE, VPTKL:EGMAVS, TPTKM:GMVVD, VPARL:DMVVE, VPTRL:DMVVE, APTKL:NMVVR and APVKT:DMIVEE.

[0615] In other embodiments also useful for inducing differentiation of mensenchymal or progenitor stem cells from the ligament and tendon (L/T) cell lineage, promoting fibrous tissue formation and T/L regeneration and protecting from L/T cell degeneration and L/T cell degeneration-related diseases, conditions, disorders or pathologies, PEP7 is selected from the group consisting of KIPKAXX, SIPKAXX, HVTKPTX, YVPKPXX, TVPKPXX, AVPKAXX, KVGKAXX, KASKAXX, GSAGPXX, AAPAXXS, STPPTXX, HVPKPXX and RVPSTXX; wherein PEP8 is selected from the group consisting of GXGXR, SXGXH, AXGXH, XGXR, EXGXR, RXGXS, AXGXR, SXGXR and XGXL; and wherein the pair PEP7:PEP8 is selected from the group consisting of KIPKAXX:GXGXR, SIPKAXX:GXGXR, HVTKPTX:SXGXH, YVPKPXX:SXGXH, TVPKPXX:AXGXH, AVPKAXX:AXGXH, KVGKAXX:XGXR, KASKAXX:EXGXR, GSAGPXX:RXGXS, AAPASXX:AXGXR, STPPTXX:SXGXR, HVPKPXX:SXGXH and RVPSTXX:XGXL.

[0616] In other embodiments also useful for inducing differentiation of mensenchymal or progenitor stem cells from the ligament and tendon (L/T) cell lineage, promoting fibrous tissue formation and T/L regeneration and protecting from L/T cell degeneration and L/T cell degeneration-related diseases, conditions, disorders or pathologies, PEP9 is selected from the group consisting of KIPKAXXVPTEL, SIPKAXXVPTEL, HVTKPTXAPTKL, YVPKPXXAPTKL, TVPKPXXAPTQL, AVPKAXXAPTKL, KVGKAXXVPTKL, KASKAXXVPTKL, GSAGPXXTPTKL, AAPASXXVPARL, STPPTXXVPTRL, HVPKPXXAPTKL and RVPSTXXAPVKT; PEP10 is selected from the group consisting of DMVVEGXGXR, EMVVEGXGXR, NMVVRSXGXH, NMVVRAXGXH, NMVVKAXGXH, EGMSVAEXGXR, GMAVSEXGXR, GMVVDRXGXS, DMVVEAXGXR, DMVVESXGXR, NMVVRSXGXH and MIVEEXGXL; and wherein the pair PEP9:PEP10 is selected from the group consisting of KIPKAXXVPTEL:DMVVEGXGXR, SIPKAXXVPTEL:EMVVEGXGXR, HVTKPTXAPTKL:NMVVRSXGXH, YVPKPXXAPTKL:NMVVRSXGXH, TVPKPXXAPTQL:NMVVRAXGXH, AVPKAXXAPTKL:NMVVKAXGXH, KVGKAXXVPTKL:EGMSVAEXGXR, KASKAXXVPTKL:GMAVSEXGXR, GSAGPXXTPTKM:GMVVDRXGXS, AAPASXXVPARL:DMVVEAXGXR, STPPTXXVPTRL:DMVVESXGXR, HVPKPXXAPTKL:NMVVRSXGXH and RVPSTXXAPVKT:MIVEEXGXL.

[0617] In other embodiments also useful for inducing differentiation of mensenchymal or progenitor stem cells from the ligament and tendon (L/T) cell lineage, promoting fibrous tissue formation and T/L regeneration and protecting from L/T cell degeneration and L/T cell degeneration-related diseases, conditions, disorders or pathologies, PEP5 is selected from the group consisting of VPTEL, APTKL, APTQL, VPTKL, VPARL, VPQAL, VSQDL and VPQDL; PEP6 is selected from the group consisting of DMVVE, EMVVE, NMVVR, NMVVK, EGMSVAE, GMAVS, DMVVE, MIVRS, MIVKS and MVVKS; and wherein the pair PEP5:PEP6 is selected from the group consisting of VPTEL:DMVVE, VPTEL:EMVVE, APTKL:NMVVR, APTQL:NMVVR, APTKL:NMVVK, VPTKL:EGMSVAE, VPTKL:EGMAVS, TPTKM:GMVVD, VPARL:DMVVE, VPTRL:DMVVE, APTKL:NMVVR and APVKT:DMIVEE; and wherein the pair PEP5:PEP6 is not VPARL:DMVVE when PEP1 is SPIS and PEP2 is YKQYE.

[0618] In other embodiments also useful for inducing differentiation of mensenchymal or progenitor stem cells from the ligament and tendon (L/T) cell lineage, promoting fibrous tissue formation and T/L regeneration and protecting from L/T cell degeneration and L/T cell degeneration-related diseases, conditions, disorders or pathologies, PEP9 is selected from the group consisting of KIPKAXXVPTEL, SIPKAXXVPTEL, HVTKPTXAPTKL, YVPKPXXAPTKL, TVPKPXXAPTQL, AVPKAXXAPTKL, KVGKAXXVPTKL, KASKAXXVPTKL, GSAGPXXTPTKL, AAPASXXVPARL, STPPTXXVPTRL, HVPKPXXAPTKL and RVPSTXXAPVKT; PEP10 is selected from the group consisting of DMVVEGXGXR, EMVVEGXGXR, NMVVRSXGXH, NMVVRAXGXH, NMVVKAXGXH, EGMSVAEXGXR, GMAVSEXGXR, GMVVDRXGXS, DMVVEAXGXR, DMVVESXGXR, NMVVRSXGXH and MIVEEXGXL; and wherein the pair PEP9:PEP10 is selected from the group consisting of KIPKAXXVPTEL:DMVVEGXGXR, SIPKAXXVPTEL:EMVVEGXGXR, HVTKPTXAPTKL:NMVVRSXGXH, YVPKPXXAPTKL:NMVVRSXGXH, TVPKPXXAPTQL:NMVVRAXGXH, AVPKAXXAPTKL:NMVVKAXGXH, KVGKAXXVPTKL:EGMSVAEXGXR, KASKAXXVPTKL:GMAVSEXGXR, GSAGPXXTPTKM:GMVVDRXGXS, AAPASXXVPARL:DMVVEAXGXR, STPPTXXVPTRL:DMVVESXGXR, HVPKPXXAPTKL:NMVVRSXGXH and RVPSTXXAPVKT:MIVEEXGXL; and wherein PEP9:PEP10 is not AAPASXXVPARL:DMVVEAXGXR when PEP1 is SPIS and PEP2 is YKQYE.

[0619] In other embodiments also useful for inducing differentiation of mensenchymal or progenitor stem cells from the ligament and tendon (L/T) cell lineage, promoting fibrous tissue formation and T/L regeneration and protecting from L/T cell degeneration and L/T cell degeneration-related diseases, conditions, disorders or pathologies, PEP1 is SPIS and PEP11 is LYI.

[0620] In one aspect, the present disclosure provides a cyclic GFR-binding compound, wherein said cyclic GFR-binding compound is a cyclic peptide, a variant or analog thereof, or a cyclic peptidomimetic as defined herein, with between 15-60 (in particular between 15-55, more particularly between 19-60, and even more particularly between 19-55) amino acids, or between 15-35 (in particular between 15-30, more particularly between 19-35, and even more particularly between 19-30) amino acids, comprising a peptide with four amino acids (PEP1) or a peptide with eight amino acids (PEP12), a peptide with five amino acids (PEP2), and optionally a pair of peptides selected form the group consisting of PEP3:PEP4, PEP3:PEP6, PEP3:PEP10, PEP5:PEP4, PEP9:PEP4, PEP5:PEP6, PEP5:PEP10, PEP9:PEP6 and PEP9:PEP10; wherein said cyclic GFR-binding compound does not comprise the pair of peptides VPARL:DMVVE when PEP1 is SPIS and PEP2 is YKQYE.

[0621] In one aspect, the present disclosure provides a cyclic GFR-binding compound, wherein said cyclic GFR-binding compound is a cyclic peptide, a variant or analog thereof, or a cyclic peptidomimetic as defined herein, with between 15-60 (in particular between 15-55, more particularly between 19-60, and even more particularly between 19-55) amino acids, or between 15-35 (in particular between 15-30, more particularly between 19-35, and even more particularly between 19-30) amino acids, comprising a peptide with four amino acids (PEP1) or a peptide with eight amino acids (PEP12), a peptide with five amino acids (PEP2), and optionally a pair of peptides selected form the group consisting of PEP3:PEP4, PEP3:PEP6, PEP3:PEP10, PEP5:PEP4, PEP9:PEP4, PEP5:PEP6, PEP5:PEP10, PEP9:PEP6 and PEP9:PEP10; wherein said cyclic GFR-binding compound does not comprise the pair of peptides AAPASXXVPARL:DMVVEAXGXR when PEP1 is SPIS and PEP2 is YKQYE.

[0622] In other embodiments also useful for inducing differentiation of mensenchymal or progenitor stem cells from the ligament and tendon (L/T) cell lineage, promoting fibrous tissue formation and T/L regeneration and protecting from L/T cell degeneration and L/T cell degeneration-related diseases, conditions, disorders or pathologies, said cyclic GFR-binding compound is a synthetic molecule as defined herein in the definition section.

[0623] In other embodiments also useful for inducing differentiation of mensenchymal or progenitor stem cells from the ligament and tendon (L/T) cell lineage, promoting fibrous tissue formation and T/L regeneration and protecting from L/T cell degeneration and L/T cell degeneration-related diseases, conditions, disorders or pathologies, said cyclic GFR-binding compound is a synthetic peptide, or a variant or analog thereof, or a cyclic peptidomimetic.

[0624] Wound Healing

[0625] Certain embodiments of the invention are particularly useful for inducing differentiation of mensenchymal or progenitor stem cells involved in the process of wound healing as defined herein, promoting wound healing, skin repair and cellular migration.

[0626] In certain embodiments useful for inducing differentiation of mensenchymal or progenitor stem cells involved in the process of wound healing as defined herein, promoting wound healing, skin repair and cellular migration, PEP1 is selected from the group consisting of SNIT, RPVQ and RSVK.

[0627] In certain embodiments useful for inducing differentiation of mensenchymal or progenitor stem cells involved in the process of wound healing as defined herein, promoting wound healing, skin repair and cellular migration, PEP2 is selected from the group consisting of IGEMS, LGEMS, KEVQV and KKATV.

[0628] In certain embodiments useful for inducing differentiation of mensenchymal or progenitor stem cells involved in the process of wound healing as defined herein, promoting wound healing, skin repair and cellular migration, PEP3 is selected from the group consisting of VPT, SRV and TQV.

[0629] In certain embodiments useful for inducing differentiation of mensenchymal or progenitor stem cells involved in the process of wound healing as defined herein, promoting wound healing, skin repair and cellular migration, PEP4 is selected from the group consisting of QHN, EHS, EEH and EDH.

[0630] In certain embodiments useful for inducing differentiation of mensenchymal or progenitor stem cells involved in the process of wound healing as defined herein, promoting wound healing, skin repair and cellular migration, PEP5 is a peptide of general formula PEP3-AA¹¹-AA¹²; wherein PEP3 is selected from the group consisting of VPT, SRV and TQV; wherein AA¹¹ is selected from the group consisting of E, K, Q, R, A, D, G and H, in particular is selected from the group consisting of E, G, H and Q; wherein AA¹² is selected from the group consisting of L, M, T, E, Q and H, in particular is selected from the group consisting of E, Q, H and L. In one particular example, PEP5 is selected from the group consisting of VPTGQ, VPTEE, SRVHH and TQVQL.

[0631] In certain embodiments useful for inducing differentiation of mensenchymal or progenitor stem cells involved in the process of wound healing as defined herein, promoting wound healing, skin repair and cellular migration, PEP6 is a peptide of general formula AA²⁶-AA²⁷-AA²⁸-AA²⁹-PEP4; wherein PEP4 is selected from the group consisting of QHN, EHS, EEH and EDH; wherein AA²⁶ is absent or selected from the group consisting of AA^{II} amino acids, preferably is absent; wherein AA²⁷ and AA²⁸ are independently selected from the group consisting of AA^{III} and AA^{V} amino acids, preferably AA²⁷ is selected from the group consisting of F, L, R and T, preferably AA²⁸ is L or E; wherein AA²⁹ is absent or selected from the group consisting of AA^{II} amino acids, preferably is absent. In one particular example, PEP6 is selected from the group consisting of LEEHS, FLQHN, RLEEH and TLEDH.

[0632] In certain embodiments useful for inducing differentiation of mensenchymal or progenitor stem cells involved in the process of wound healing as defined herein, promoting wound healing, skin repair and cellular migration, PEP7 is an amino acid or a peptide with between two and seven amino acids of general formula AA¹-AA²-AA³-AA⁴-AA⁵-AA⁶-AA⁷; wherein AA¹, AA², AA³, AA⁴, and AA⁵ are independently absent or AA^{I} as defined herein; wherein AA⁶ is absent or selected from the group consisting of S, T, C, E, Q, P and R, preferably is selected from the group consisting of E, Q and R; wherein AA⁷ is absent or is selected from the group consisting of S, T, C, E, Q, P and R, preferably is selected from the group consisting of S, C and P; and wherein at least one of AA¹, AA², AA³, AA⁴, AA⁵, AA⁶ or AA⁷ is not absent. In one particular example, PEP7 is selected from the group consisting of NDEGLEX, SSVKXQP and RNVQXRP.

[0633] In certain embodiments useful for inducing differentiation of mensenchymal or progenitor stem cells involved in the process of wound healing as defined herein, promoting wound healing, skin repair and cellular migration, PEP8 is an amino acid or a peptide with between two and six amino acids of general formula AA³³-AA³⁴-AA³⁵-AA³⁶-AA³⁷-AA³⁸; wherein AA³³ is absent or is selected from the group consisting of AA^{I} amino acids at the exception of AA¹ amino acids, in particular is selected from the group consisting of K, Q and L; AA³⁴ is absent or is selected from the group consisting of AA^{III} and AA^{IV} amino acids, in particular is absent, E or A; wherein AA³⁵ is absent or is selected from the group consisting of AA^{II} amino acids, preferably is S or C; wherein AA³⁶ is absent or is selected from the group consisting of AA^{II} and AA^{IV} amino acids, in particular is selected from the group consisting of E, A and K; wherein AA³⁷ is absent or is selected from the group consisting of AA^{II} amino acids, preferably is S or C; wherein AA³⁸ is absent or is selected from the group consisting of AA^{I}, in particular is selected from the group consisting of R, A and E; and wherein at least one of AA³³, AA³⁴, AA³⁵, AA³⁶, AA³⁷ or AA³⁸ is not absent. In one particular example, PEP8 is selected from the group consisting of KXEXR, QXEXR, LEXAXA and LAXKXE.

[0634] In certain embodiments useful for inducing differentiation of mensenchymal or progenitor stem cells involved in the process of wound healing as defined herein, promoting wound healing, skin repair and cellular migration, PEP9 is a peptide of general formula AA¹-AA²-AA³-AA⁴-AA⁵-AA⁶-AA⁷-PEP5; wherein PEP5 is a peptide of formula PEP3-AA¹¹-AA¹²; wherein PEP3 is selected from the group consisting of VPT, SRV and TQV; wherein AA¹¹ is selected from the group consisting of E, K, Q, R, A, D, G and H, in particular is E, G, H and Q; wherein AA¹² is selected from the group consisting of L, M, T, E, Q and H, in particular is selected from the group consisting of E, Q, H and L; wherein AA¹, AA², AA³, AA⁴, and AA⁵ are independently absent or AA^{I} as defined herein; wherein AA⁶ is absent or selected from the group consisting of S, T, C, E, Q, P and R, preferably is selected from the group consisting of E, Q and R; wherein AA⁷ is selected from the group consisting of S, T, C, E, Q, P and R, preferably is selected from the group consisting of S, C and P. In one particular example, PEP9 is selected from the group consisting of NDEGLEXVPTEE, NDEGLEXVPTGQ, SSVKXQPSRVHH and RNVQXRPTQVQL.

[0635] In certain embodiments useful for inducing differentiation of mensenchymal or progenitor stem cells involved in the process of wound healing as defined herein, promoting wound healing, skin repair and cellular migration, PEP10 is a peptide of general formula PEP6-AA³³-AA³⁴-AA³⁵-AA³⁶-AA³⁷-AA³⁸; wherein PEP6 is a peptide of formula AA²⁶-AA²⁷-AA²⁸-AA²⁹-PEP4; wherein PEP4 is selected from the group consisting of QHN, EHS, EEH and EDH; wherein AA²⁶ is absent or selected from the group consisting of AA^{III} amino acids, preferably is absent; wherein AA²⁷ and AA²⁸ are independently selected from the group consisting of AA^{III} and AA^{V} amino acids, preferably AA²⁷ is selected from the group consisting of F, L, R and T, preferably AA²⁸ is L or E; wherein AA²⁹ is absent or selected from the group consisting of AA^{II} amino acids, preferably is absent; wherein AA³³ is absent or is selected from the group consisting of AA^{I} amino acids at the exception of AA¹ amino acids, in particular is selected from the group consisting of K, Q and L; AA³⁴ is absent or is selected from the group consisting of AA^{III} and AA^{V} amino acids, in particular is absent, E or A; wherein AA³⁵ is absent or is selected from the group consisting of AA^{II} amino acids, preferably is S or C; wherein AA³⁶ is absent or is selected from the group consisting of AA^{II} and AA^{V} amino acids, in particular is selected from the group consisting of E, A and K; wherein AA³⁷ is absent or is selected from the group consisting of AA^{II} amino acids, preferably is S or C; wherein AA³⁸ is absent or is selected from the group consisting of AA^{I}, in particular is selected from the group consisting of R, A and E. In one particular example, PEP10 is selected from the group consisting of FLQHNKXEXR, LEEHSQXEXR, RLEEHLEXAXA and TLEDHLAXKXE.

[0636] In certain embodiments useful for inducing differentiation of mensenchymal or progenitor stem cells involved in the process of wound healing as defined herein, promoting wound healing, skin repair and cellular migration, PEP12 is a peptide of general formula PEP1-AA¹⁷-PEP11; wherein AA¹⁷ is selected from the group consisting of G, A, V, L, I, P, F, M, W, T and S (in particular is selected from the group consisting of M, I, L, V and T); wherein PEP1 is selected from the group consisting of SNIT, RPVQ and RSVK.

[0637] In certain embodiments useful for inducing differentiation of mensenchymal or progenitor stem cells involved in the process of wound healing as defined herein, promoting wound healing, skin repair and cellular migration, PEP11 is a peptide with 3 amino acids of general formula AA¹-AA¹⁹-AA²⁰; wherein AA¹⁸ is selected from the group consisting of L, V, Q, A and R, in particular is selected from the group consisting of Q, A and R; wherein AA¹⁹ is selected from the group consisting of F, W, H, Y, I and K, in particular is I or K; wherein AA²⁰ is selected from the group consisting of L, F, Y, K, I, V and M, in particular is selected from the group consisting of M, V and I. In one particular example, PEP11 is selected from the group consisting of QIM, AKV and RKI.

[0638] The definitions of “PEP” pairs, quadruplets, hexaplets and heptuplet e.g. PEP1:PEP2, PEP12:PEP2, or PEP7:PEP5:PEP12:LINKER:PEP2:PEP6:PEP8, useful for inducing differentiation of mensenchymal or progenitor stem cells involved in the process of wound healing as defined herein, promoting wound healing, skin repair and cellular migration, are as already defined herein to the extent that PEP1 to PEP12 are particularly useful for these applications. For instances: In other embodiments also useful for inducing differentiation of mensenchymal or progenitor stem cells from the vascular cell lineage, enhancing of endothelization, vascularization/angiogenesis, protecting from heart diseases, the pair PEP1:PEP2 is selected from the group consisting of SNIT:IGEMS, SNIT:LGEMS, RSVK:KEVQV and RPVQ:KKATV.

[0639] In other embodiments also useful for inducing differentiation of mensenchymal or progenitor stem cells from the vascular cell lineage, enhancing of endothelization, vascularization/angiogenesis, protecting from heart diseases, the pair PEP12:PEP2 is selected from the group consisting of SNIT-AA¹⁷-QIM:IGEMS, SNIT-AA¹⁷-QIM:LGEMS, RSVK-AA¹⁷-AKV:KEVQV and RPVQ-AA¹⁷-RKI:KKATV; wherein AA¹⁷ is selected from the group consisting of G, A, V, L, I, P, F, M, W, T and S (in particular is selected from the group consisting of M, V and T).

[0640] In certain embodiments useful for inducing differentiation of mensenchymal or progenitor stem cells involved in the process of wound healing as defined herein, promoting wound healing, skin repair and cellular migration, PEP3 is selected from the group consisting of VPT, SRV and TQV; PEP4 is selected from the group consisting of QHN, EHS, EEH and EDH; and wherein the pair PEP3:PEP4 is selected from the group consisting of VPT:QHN, VPT:EHS, SRV:EEH and TQV:EDH.

[0641] In certain embodiments useful for inducing differentiation of mensenchymal or progenitor stem cells involved in the process of wound healing as defined herein, promoting wound healing, skin repair and cellular migration, PEP5 is selected from the group consisting of VPTGQ, VPTEE, SRVHH and TQVQL; PEP6 is selected from the group consisting of LEEHS, FLQHN, RLEEH and TLEDH; and wherein the pair PEP5:PEP6 is selected from the group consisting of VPTGQ:LEEHS, VPTEE:FLQHN, SRVHH:RLEEH and TQVQL:TLEDH.

[0642] In certain embodiments useful for inducing differentiation of mensenchymal or progenitor stem cells involved in the process of wound healing as defined herein, promoting wound healing, skin repair and cellular migration, PEP7 is selected from the group consisting of NDEGLEX, SSVKXQP and RNVQXRP; wherein PEP8 is selected from the group consisting of KXEXR, QXEXR, LEXAXA and LAXKXE; and wherein the pair PEP7:PEP8 is selected from the group consisting of NDEGLEX:KXEXR, NDEGLEX:QXEXR, SSVKXQP:LEXAXA and RNVQXRP:LAXKXE.

[0643] In certain embodiments useful for inducing differentiation of mensenchymal or progenitor stem cells involved in the process of wound healing as defined herein, promoting wound healing, skin repair and cellular migration, PEP9 is selected from the group consisting of NDEGLEXVPTEE, NDEGLEXVPTGQ, SSVKXQPSRVHH and RNVQXRPTQVQL; PEP10 is selected from the group consisting of FLQHNKXEXR, LEEHSQXEXR, RLEEHLEXAXA and TLEDHLAXKXE; and wherein the pair PEP9:PEP10 is selected from the group consisting of NDEGLEXVPTEE:FLQHNKXEXR, NDEGLEXVPTGQ:LEEHSQXEXR, SSVKXQPSRVHH:RLEEHLEXAXA and RNVQXRPTQVQL:TLEDHLAXKXE.

[0644] In certain embodiments useful for inducing differentiation of mensenchymal or progenitor stem cells involved in the process of wound healing as defined herein, promoting wound healing, skin repair and cellular migration, PEP5 is selected from the group consisting of VPTGQ, VPTEE, SRVHH and TQVQL; PEP6 is selected from the group consisting of LEEHS, FLQHN, RLEEH and TLEDH; and wherein the pair PEP5:PEP6 is selected from the group consisting of VPTGQ:LEEHS, VPTEE:FLQHN, SRVHH:RLEEH and TQVQL:TLEDH; wherein the pair PEP5:PEP6 is not VPTEE:FLQHN when PEP1 is SNIT and PEP2 is IGEMS; wherein the pair PEP5:PEP6 is not VPTGQ:LEEHS when PEP1 is SNIT and PEP2 is LGEMS; wherein the pair PEP5:PEP6 is not SRVHH:RLEEH when PEP1 is RSVK and PEP2 is KEVQV; and wherein the pair PEP5:PEP6 is not TQVQL:TLEDH when PEP1 is RPVQ and PEP2 is KKATV.

[0645] In certain embodiments useful for inducing differentiation of mensenchymal or progenitor stem cells involved in the process of wound healing as defined herein, promoting wound healing, skin repair and cellular migration, PEP9 is selected from the group consisting of NDEGLEXVPTEE, NDEGLEXVPTGQ, SSVKXQPSRVHH and RNVQXRPTQVQL; PEP10 is selected from the group consisting of FLQHNKXEXR, LEEHSQXEXR, RLEEHLEXAXA and TLEDHLAXKXE; and wherein the pair PEP9:PEP10 is selected from the group consisting of NDEGLEXVPTEE:FLQHNKXEXR, NDEGLEXVPTGQ:LEEHSQXEXR, SSVKXQPSRVHH:RLEEHLEXAXA and RNVQXRPTQVQL:TLEDHLAXKXE; wherein the pair PEP9:PEP10 is not NDEGLEXVPTEE:FLQHNKXEXR when PEP1 is SNIT and PEP2 is IGEMS; wherein the pair PEP9:PEP10 is not NDEGLEXVPTGQ:LEEHSQXEXR when PEP1 is SNIT and PEP2 is LGEMS; wherein the pair PEP9:PEP10 is not SSVKXQPSRVHH:RLEEHLEXAXA when PEP1 is RSVK and PEP2 is KEVQV; and wherein the pair PEP9:PEP10 is not RNVQXRPTQVQL:TLEDHLAXKXE when PEP1 is RPVQ and PEP2 is KKATV.

[0646] In certain embodiments useful for inducing differentiation of mensenchymal or progenitor stem cells involved in the process of wound healing as defined herein, promoting wound healing, skin repair and cellular migration, PEP1 is selected from the group consisting of SNIT, RPVQ and RSVK; PEP11 is selected from the group consisting of QIM, AKV and RKI; and the pair PEP1:PEP11 is selected from the group consisting of SNIT:QIM, RSVK:KEVQV and RPVQ:KKATV.

[0647] In one aspect, the present disclosure provides a cyclic GFR-binding compound, wherein said cyclic GFR-binding compound is a cyclic peptide, a variant or analog thereof, or a cyclic peptidomimetic as defined herein, with between 15-60 (in particular between 15-55, more particularly between 19-60, and even more particularly between 19-55) amino acids, or between 15-35 (in particular between 15-30, more particularly between 19-35, and even more particularly between 19-30) amino acids, comprising a peptide with four amino acids (PEP1) or a peptide with eight amino acids (PEP12), a peptide with five amino acids (PEP2), and optionally a pair of peptides selected form the group consisting of PEP3:PEP4, PEP3:PEP6, PEP3:PEP10, PEP5:PEP4, PEP9:PEP4, PEP5:PEP6, PEP5:PEP10, PEP9:PEP6 and PEP9:PEP10; wherein said cyclic GFR-binding compound does not comprise the pair of peptides VPTEE:FLQHN when PEP1 is SNIT and PEP2 is IGEMS; wherein said cyclic GFR-binding compound does not comprise the pair of peptides VPTGQ:LEEHS when PEP1 is SNIT and PEP2 is LGEMS; wherein said cyclic GFR-binding compound does not comprise the pair of peptides SRVHH:RLEEH when PEP1 is RSVK and PEP2 is KEVQV; and wherein said cyclic GFR-binding compound does not comprise the pair of peptides TQVQL:TLEDH when PEP1 is RPVQ and PEP2 is KKATV.

[0648] In one aspect, the present disclosure provides a cyclic GFR-binding compound, wherein said cyclic GFR-binding compound is a cyclic peptide, a variant or analog thereof, or a cyclic peptidomimetic as defined herein, with between 15-60 (in particular between 15-55, more particularly between 19-60, and even more particularly between 19-55) amino acids, or between 15-35 (in particular between 15-30, more particularly between 19-35, and even more particularly between 19-30) amino acids, comprising a peptide with four amino acids (PEP1) or a peptide with eight amino acids (PEP12), a peptide with five amino acids (PEP2), and optionally a pair of peptides selected form the group consisting of PEP3:PEP4, PEP3:PEP6, PEP3:PEP10, PEP5:PEP4, PEP9:PEP4, PEP5:PEP6, PEP5:PEP10, PEP9:PEP6 and PEP9:PEP10; wherein said cyclic GFR-binding compound does not comprise the pair of peptides NDEGLEXVPTEE:FLQHNKXEXR when PEP1 is SNIT and PEP2 is IGEMS; wherein said cyclic GFR-binding compound does not comprise the pair of peptides NDEGLEXVPTGQ:LEEHSQXEXR when PEP1 is SNIT and PEP2 is LGEMS; wherein said cyclic GFR-binding compound does not comprise the pair of peptides SSVKXQPSRVHH:RLEEHLEXAXA when PEP1 is RSVK and PEP2 is KEVQV; and wherein said cyclic GFR-binding compound does not comprise the pair of peptides RNVQXRPTQVQL:TLEDHLAXKXE when PEP1 is RPVQ and PEP2 is KKATV.

[0649] In certain embodiments useful for inducing differentiation of mensenchymal or progenitor stem cells involved in the process of wound healing as defined herein, promoting wound healing, skin repair and cellular migration, said cyclic GFR-binding compound is a synthetic molecule as defined herein in the definition section.

[0650] In certain embodiments useful for inducing differentiation of mensenchymal or progenitor stem cells involved in the process of wound healing as defined herein, promoting wound healing, skin repair and cellular migration, said cyclic GFR-binding compound is a synthetic peptide, or a variant or analog thereof, or a cyclic peptidomimetic.

[0651] Skin Regeneration and Anti-Aging

[0652] Certain embodiments of the invention are particularly useful for inducing differentiation of mensenchymal or progenitor stem cells from the fibroblast lineage, inducing skin tissue regeneration and tubular formation, preventing, attenuating, masking or removing wrinkles, firming the skin, preventing, decreasing or suppressing skin pigmentation, and protecting patients from skin tissue degeneration-related diseases, disorders, conditions or pathologies.

[0653] In certain embodiments useful for inducing differentiation of mensenchymal or progenitor stem cells from the fibroblast lineage, inducing skin tissue regeneration and tubular formation, preventing, attenuating, masking or removing wrinkles, firming the skin, preventing, decreasing or suppressing skin pigmentation, and protecting patients from skin tissue degeneration-related diseases, disorders, conditions or pathologies, PEP1 is selected from the group consisting of EPLP, EPLT, SNIT, RSVK and RPVQ.

[0654] In certain embodiments useful for inducing differentiation of mensenchymal or progenitor stem cells from the fibroblast lineage, inducing skin tissue regeneration and tubular formation, preventing, attenuating, masking or removing wrinkles, firming the skin, preventing, decreasing or suppressing skin pigmentation, and protecting patients from skin tissue degeneration-related diseases, disorders, conditions or pathologies, PEP2 is selected from the group consisting of EQLSN, IGEMS, KEVQV and KKATV.

[0655] In certain embodiments useful for inducing differentiation of mensenchymal or progenitor stem cells from the fibroblast lineage, inducing skin tissue regeneration and tubular formation, preventing, attenuating, masking or removing wrinkles, firming the skin, preventing, decreasing or suppressing skin pigmentation, and protecting patients from skin tissue degeneration-related diseases, disorders, conditions or pathologies, PEP3 is selected from the group consisting of VPT, APT, VPQ, VSQ, SRV and TQV.

[0656] In certain embodiments useful for inducing differentiation of mensenchymal or progenitor stem cells from the fibroblast lineage, inducing skin tissue regeneration and tubular formation, preventing, attenuating, masking or removing wrinkles, firming the skin, preventing, decreasing or suppressing skin pigmentation, and protecting patients from skin tissue degeneration-related diseases, disorders, conditions or pathologies, PEP4 is selected from the group consisting of VVE, VVR, VRS, VKS, VVK, QHN, EEH and EDH.

[0657] In certain embodiments useful for inducing differentiation of mensenchymal or progenitor stem cells from the fibroblast lineage, inducing skin tissue regeneration and tubular formation, preventing, attenuating, masking or removing wrinkles, firming the skin, preventing, decreasing or suppressing skin pigmentation, and protecting patients from skin tissue degeneration-related diseases, disorders, conditions or pathologies, PEP5 is a peptide of general formula PEP3-AA¹¹-AA¹²; wherein PEP3 is selected from the group consisting of VPT, APT, VPQ, VSQ, SRV and TQV; wherein AA¹¹ is selected from the group consisting of E, K, Q, R, A, D, G and H, in particular is selected from the group consisting of E, K, Q, A, D and H; wherein AA¹² is selected from the group consisting of L, M, T, E, Q and H, in particular is selected from the group consisting of L, E and H. In one particular example, PEP5 is selected from the group consisting of VPTEL, APTKL, APTQL, VPQAL, VSQDL, VPQDL, VPTEE, SRVHH and TQVQL.

[0658] In certain embodiments useful for inducing differentiation of mensenchymal or progenitor stem cells from the fibroblast lineage, inducing skin tissue regeneration and tubular formation, preventing, attenuating, masking or removing wrinkles, firming the skin, preventing, decreasing or suppressing skin pigmentation, and protecting patients from skin tissue degeneration-related diseases, disorders, conditions or pathologies, PEP6 is a peptide of general formula AA²⁶-AA²⁷-AA²⁸-AA²⁹-PEP4; wherein PEP4 is selected from the group consisting of VVE, VVR, VRS, VKS, VVK, QHN, EEH and EDH; wherein AA²⁶ is absent or selected from the group consisting of AA^{III} amino acids, preferably is absent; wherein AA²⁷ and AA²⁸ are independently selected from the group consisting of AA^{III} and AA^{V} amino acids, preferably AA²⁷ is selected from the group consisting of D, N, E, M, F, T and R, preferably AA²⁸ is selected from the group consisting of M, I, V and L; wherein AA²⁹ is absent or selected from the group consisting of AA^{II} amino acids, preferably is absent. In one particular example, PEP6 is selected from the group consisting of DMVVE, EMVVE, NMVVR, MIVRS, MIVKS, NMVVK, FLQHN, RLEEH and TLEDH.

[0659] In certain embodiments useful for inducing differentiation of mensenchymal or progenitor stem cells from the fibroblast lineage, inducing skin tissue regeneration and tubular formation, preventing, attenuating, masking or removing wrinkles, firming the skin, preventing, decreasing or suppressing skin pigmentation, and protecting patients from skin tissue degeneration-related diseases, disorders, conditions or pathologies, PEP7 is an amino acid or a peptide with between two and seven amino acids of general formula AA¹-AA²-AA³-AA⁴-AA⁵-AA⁶-AA⁷; wherein AA¹, AA², AA³, AA⁴, and AA⁵ are independently absent or AA^{I} as defined herein; wherein AA⁶ is absent or selected from the group consisting of S, T, C, E, Q, P and R, preferably is selected from the group consisting of C, S, T, E, R and Q; wherein AA⁷ is absent or is selected from the group consisting of S, T, C, E, Q, P and R, preferably is selected from the group consisting of S, C and P; and wherein at least one of AA¹, AA², AA³, AA⁴, AA⁵, AA⁶ or AA⁷ is not absent. In one particular example, PEP7 is selected from the group consisting of KIPKAXX, SIPKAXX, HVTKPTX, YVPKPXX, TVPKPXX, ASAAPXX, ASASPXX, NDEGLEX, SSVKXQP and RNVQXRP.

[0660] In certain embodiments useful for inducing differentiation of mensenchymal or progenitor stem cells from the fibroblast lineage, inducing skin tissue regeneration and tubular formation, preventing, attenuating, masking or removing wrinkles, firming the skin, preventing, decreasing or suppressing skin pigmentation, and protecting patients from skin tissue degeneration-related diseases, disorders, conditions or pathologies, PEP8 is an amino acid or a peptide with between two and six amino acids of general formula AA³³-AA³⁴-AA³⁵-AA³⁶-AA³⁷-AA³⁸; wherein AA³³ is absent or is selected from the group consisting of AA^{I} amino acids at the exception of AA¹ amino acids, in particular is absent or is selected from the group consisting of G, S, A, K and L; AA³⁴ is absent or is selected from the group consisting of AA^{III} and AA^{IV} amino acids, in particular is absent, A or E; wherein AA³⁵ is absent or is selected from the group consisting of AA^{II} amino acids, preferably is S or C; wherein AA³⁶ is absent or is selected from the group consisting of AA^{III} and AA^{IV} amino acids, in particular is selected from the group consisting of G, A, K and E; wherein AA³⁷ is absent or is selected from the group consisting of AA^{II} amino acids, preferably is S or C; wherein AA³⁸ is absent or is selected from the group consisting of AA^{I}, in particular is selected from the group consisting of R, H, S, E and A; and wherein at least one of AA³³, AA³⁴, AA³⁵, AA³⁶, AA³⁷ or AA³⁸ is not absent. In one particular example, PEP8 is selected from the group consisting of GXGXR, SXGXH, AXGXH, XKXS, KXEXR, LEXAXA and LAXKXE.

[0661] In certain embodiments useful for inducing differentiation of mensenchymal or progenitor stem cells from the fibroblast lineage, inducing skin tissue regeneration and tubular formation, preventing, attenuating, masking or removing wrinkles, firming the skin, preventing, decreasing or suppressing skin pigmentation, and protecting patients from skin tissue degeneration-related diseases, disorders, conditions or pathologies, PEP9 is a peptide of general formula AA¹-AA²-AA³-AA⁴-AA⁵-AA⁶-AA⁷-PEP5; wherein PEP5 is a peptide of formula PEP3-AA¹¹-AA¹²; wherein PEP3 is selected from the group consisting of VPT, APT, VPQ, VSQ, SRV and TQV; wherein AA¹¹ is selected from the group consisting of E, K, Q, R, A, D, G and H, in particular is selected from the group consisting of E, K, Q, A, D and H; wherein AA¹² is selected from the group consisting of L, M, T, E, Q and H, in particular is selected from the group consisting of L, E and H; wherein AA¹, AA², AA³, AA⁴, and AA⁵ are independently absent or AA^{I} as defined herein; wherein AA⁶ is absent or selected from the group consisting of S, T, C, E, Q, P and R, preferably is selected from the group consisting of C, S, T, E, R and Q; wherein AA⁷ is selected from the group consisting of S, T, C, E, Q, P and R, preferably is selected from the group consisting of S, C and P.

[0662] In one particular example, PEP9 is selected from the group consisting of KIPKAXXVPTEL, SIPKAXXVPTEL, HVTKPTXAPTKL, YVPKPXXAPTKL, TVPKPXXAPTQL, ASAAPXXVPQAL, ASASPXXVSQDL, ASASPXXVPQDL, NDEGLEXVPTEE, SSVKXQPSRVHH and RNVQXRPTQVQL.

[0663] In certain embodiments useful for inducing differentiation of mensenchymal or progenitor stem cells from the fibroblast lineage, inducing skin tissue regeneration and tubular formation, preventing, attenuating, masking or removing wrinkles, firming the skin, preventing, decreasing or suppressing skin pigmentation, and protecting patients from skin tissue degeneration-related diseases, disorders, conditions or pathologies, PEP10 is a peptide of general formula PEP6-AA³³-AA³⁴-AA³⁵-AA³⁶-AA³⁷-AA³⁸; wherein PEP6 is a peptide of formula AA²⁶-AA²⁷-AA²⁸-AA²⁹-PEP4; wherein PEP4 is selected from the group consisting of VVE, VVR, VRS, VKS, VVK, QHN, EEH and EDH; wherein AA²⁶ is absent or selected from the group consisting of AA^{III} amino acids, preferably is absent; wherein AA²⁷ and AA²⁸ are independently selected from the group consisting of AA^{III} and AA^{V} amino acids, preferably AA²⁷ is selected from the group consisting of D, N, E, M, F, T and R, preferably AA²⁸ is selected from the group consisting of M, I, V and L; wherein AA²⁹ is absent or selected from the group consisting of AA^{II} amino acids, preferably is absent; wherein AA³³ is absent or is selected from the group consisting of AA^{I} amino acids at the exception of AA^{VI} amino acids, in particular is absent or is selected from the group consisting of G, S, A, K and L; AA³⁴ is absent or is selected from the group consisting of AA^{III} and AA^{IV} amino acids, in particular is absent, A or E; wherein AA³⁵ is absent or is selected from the group consisting of AA^{II} amino acids, preferably is S or C; wherein AA³⁶ is absent or is selected from the group consisting of AA^{III} and AA^{IV} amino acids, in particular is selected from the group consisting of G, A, K and E; wherein AA³⁷ is absent or is selected from the group consisting of AA^{II} amino acids, preferably is S or C; wherein AA³⁸ is absent or is selected from the group consisting of AA^{I}, in particular is selected from the group consisting of R, H, S, E and A. In one particular example, PEP10 is selected from the group consisting of DMVVEGXGXR, EMVVEGXGXR, NMVVRSXGXH, NMVVRAXGXH, MIVRSXKXS, MIVKSXKXS, MVVKSXKXS, FLQHNKXEXR, RLEEHLEXAXA and TLEDHLAXKXE.

[0664] In certain embodiments useful for inducing differentiation of mensenchymal or progenitor stem cells from the fibroblast lineage, inducing skin tissue regeneration and tubular formation, preventing, attenuating, masking or removing wrinkles, firming the skin, preventing, decreasing or suppressing skin pigmentation, and protecting patients from skin tissue degeneration-related diseases, disorders, conditions or pathologies, PEP12 is a peptide of general formula PEP1-AA¹⁷-PEP11; wherein AA¹⁷ is selected from the group consisting of G, A, V, L, I, P, F, M, W, T and S (in particular is selected from the group consisting of M, I, L, V and T); wherein PEP1 is selected from the group consisting of EPLP, EPLT, SNIT, RSVK and RPVQ.

[0665] In certain embodiments useful for inducing differentiation of mensenchymal or progenitor stem cells from the fibroblast lineage, inducing skin tissue regeneration and tubular formation, preventing, attenuating, masking or removing wrinkles, firming the skin, preventing, decreasing or suppressing skin pigmentation, and protecting patients from skin tissue degeneration-related diseases, disorders, conditions or pathologies, PEP11 is a peptide with 3 amino acids of general formula AA¹⁸-AA¹⁹-AA²⁰; wherein AA¹⁸ is selected from the group consisting of L, V, Q, A and R; wherein AA¹⁹ is selected from the group consisting of F, W, H, Y, I and K, in particular is selected from the group consisting of Y, I and K; wherein AA²⁰ is selected from the group consisting of L, F, Y, K, I, V and M, in particular is selected from the group consisting of Y, M, V and I. In one particular example, PEP11 is selected from the group consisting of VYY, LYY, QIM, AKV and RKI.

[0666] The definitions of “PEP” pairs, quadruplets, hexaplets and heptuplet e.g. PEP1:PEP2, PEP12:PEP2, or PEP7:PEP5:PEP12:LINKER:PEP2:PEP6:PEP8, useful for inducing differentiation of mensenchymal or progenitor stem cells from the fibroblast lineage, inducing skin tissue regeneration and tubular formation, preventing, attenuating, masking or removing wrinkles, firming the skin, preventing, decreasing or suppressing skin pigmentation, and protecting patients from skin tissue degeneration-related diseases, disorders, conditions or pathologies, are as already defined herein to the extent that PEP1 to PEP12 are particularly useful for these applications. For instances:

[0667] In certain embodiments useful for inducing differentiation of mensenchymal or progenitor stem cells from the fibroblast lineage, inducing skin tissue regeneration and tubular formation, preventing, attenuating, masking or removing wrinkles, firming the skin, preventing, decreasing or suppressing skin pigmentation, and protecting patients from skin tissue degeneration-related diseases, disorders, conditions or pathologies, the pair PEP1:PEP2 is selected from the group consisting of EPLP:EQLSN, EPLT:EQLSN and SNIT:IGEMS.

[0668] In certain embodiments useful for inducing differentiation of mensenchymal or progenitor stem cells from the fibroblast lineage, inducing skin tissue regeneration and tubular formation, preventing, attenuating, masking or removing wrinkles, firming the skin, preventing, decreasing or suppressing skin pigmentation, and protecting patients from skin tissue degeneration-related diseases, disorders, conditions or pathologies, the pair PEP12:PEP2 is selected from the group consisting of EPLP-AA¹⁷-VYY:EQLSN, EPLT-AA¹⁷-LYY:EQLSN and SNIT-AA¹⁷-QIM:IGEMS; wherein AA¹⁷ is selected from the group consisting of G, A, V, L, I, P, F, M, W, T and S (in particular is selected from the group consisting of M, I, V and T).

[0669] In certain embodiments useful for inducing differentiation of mensenchymal or progenitor stem cells from the fibroblast lineage, inducing skin tissue regeneration and tubular formation, preventing, attenuating, masking or removing wrinkles, firming the skin, preventing, decreasing or suppressing skin pigmentation, and protecting patients from skin tissue degeneration-related diseases, disorders, conditions or pathologies, PEP3 is selected from the group consisting of VPT, APT, VPQ, VSQ, SRV and TQV; PEP4 is selected from the group consisting of VVE, VVR, VRS, VKS, VVK, QHN, EEH and EDH; and wherein the pair PEP3:PEP4 is selected from the group consisting of VPT:VVE, APT:VVR, VPQ:VRS, VSQ:VKS, VPQ:VVK, VPT:QHN, SRV:EEH and TQV:EDH.

[0670] In certain embodiments useful for inducing differentiation of mensenchymal or progenitor stem cells from the fibroblast lineage, inducing skin tissue regeneration and tubular formation, preventing, attenuating, masking or removing wrinkles, firming the skin, preventing, decreasing or suppressing skin pigmentation, and protecting patients from skin tissue degeneration-related diseases, disorders, conditions or pathologies, PEP5 is selected from the group consisting of VPTEL, APTKL, APTQL, VPQAL, VSQDL, VPQDL, VPTEE, SRVHH and TQVQL; PEP6 is selected from the group consisting of DMVVE, EMVVE, NMVVR, MIVRS, MIVKS, NMVVK, FLQHN, RLEEH and TLEDH; and wherein the pair PEP5:PEP6 is selected from the group consisting of VPTEL:DMVVE, VPTEL:EMVVE, APTKL:NMVVR, APTQL:NMVVR, VPQAL:MIVRS, VSQDL:MIVKS, VPQDL:NMVVK, VPTEE:FLQHN, SRVHH:RLEEH and TQVQL:TLEDH.

[0671] In certain embodiments useful for inducing differentiation of mensenchymal or progenitor stem cells from the fibroblast lineage, inducing skin tissue regeneration and tubular formation, preventing, attenuating, masking or removing wrinkles, firming the skin, preventing, decreasing or suppressing skin pigmentation, and protecting patients from skin tissue degeneration-related diseases, disorders, conditions or pathologies, PEP7 is selected from the group consisting of KIPKAXX, SIPKAXX, HVTKPTX, YVPKPXX, TVPKPXX, ASAAPXX, ASASPXX, NDEGLEX, SSVKXQP and RNVQXRP; wherein PEP8 is selected from the group consisting of GXGXR, SXGXH, AXGXH, XKXS, KXEXR, LEXAXA and LAXKXE; and wherein the pair PEP7:PEP8 is selected from the group consisting of KIPKAXX:GXGXR, SIPKAXX:GXGXR, HVTKPTX:SXGXH, YVPKPXX:SXGXH, TVPKPXX:AXGXH, ASAAPXX:XKXS, ASASPXX:XKXS, NDEGLEX:KXEXR, SSVKXQP:LEXAXA and RNVQXRP:LAXKXE.

[0672] In certain embodiments useful for inducing differentiation of mensenchymal or progenitor stem cells from the fibroblast lineage, inducing skin tissue regeneration and tubular formation, preventing, attenuating, masking or removing wrinkles, firming the skin, preventing, decreasing or suppressing skin pigmentation, and protecting patients from skin tissue degeneration-related diseases, disorders, conditions or pathologies, PEP9 is selected from the group consisting of KIPKAXXVPTEL, SIPKAXXVPTEL, HVTKPTXAPTKL, YVPKPXXAPTKL, TVPKPXXAPTQL, ASAAPXXVPQAL, ASASPXXVSQDL, ASASPXXVPQDL, NDEGLEXVPTEE, SSVKXQPSRVHH and RNVQXRPTQVQL; PEP10 is selected from the group consisting of DMVVEGXGXR, EMVVEGXGXR, NMVVRSXGXH, NMVVRAXGXH, MIVRSXKXS, MIVKSXKXS, MVVKSXKXS, FLQHNKXEXR, RLEEHLEXAXA and TLEDHLAXKXE; and wherein the pair PEP9:PEP10 is selected from the group consisting of KIPKAXXVPTEL:DMVVEGXGXR, SIPKAXXVPTEL:EMVVEGXGXR, HVTKPTXAPTKL:NMVVRSXGXH, YVPKPXXAPTKL:NMVVRSXGXH, TVPKPXXAPTQL:NMVVRAXGXH, ASAAPXXVPQAL:MIVRSXKXS, ASASPXXVSQDL:MIVKSXKXS, ASASPXXVPQDL:MVVKSXKXS, NDEGLEXVPTEE:FLQHNKXEXR, SSVKXQPSRVHH:RLEEHLEXAXA and RNVQXRPTQVQL:TLEDHLAXKXE.

[0673] In certain embodiments useful for inducing differentiation of mensenchymal or progenitor stem cells from the fibroblast lineage, inducing skin tissue regeneration and tubular formation, preventing, attenuating, masking or removing wrinkles, firming the skin, preventing, decreasing or suppressing skin pigmentation, and protecting patients from skin tissue degeneration-related diseases, disorders, conditions or pathologies, PEP5 is selected from the group consisting of VPTEL, APTKL, APTQL, VPQAL, VSQDL, VPQDL, VPTEE, SRVHH and TQVQL; PEP6 is selected from the group consisting of DMVVE, EMVVE, NMVVR, MIVRS, MIVKS, NMVVK, FLQHN, RLEEH and TLEDH; and wherein the pair PEP5:PEP6 is selected from the group consisting of VPTEL:DMVVE, VPTEL:EMVVE, APTKL:NMVVR, APTQL:NMVVR, VPQAL:MIVRS, VSQDL:MIVKS, VPQDL:NMVVK, VPTEE:FLQHN, SRVHH:RLEEH and TQVQL:TLEDH; wherein the pair PEP5:PEP6 is not VPQAL:MIVRS when PEP1 is EPLP and PEP2 is EQLSN; wherein the pair PEP5:PEP6 is not VSQDL:MIVKS when PEP1 is EPLT and PEP2 is EQLSN; wherein the pair PEP5:PEP6 is not VPQDL:MVVVK when PEP1 is EPLT and PEP2 is EQLSN; wherein the pair PEP5:PEP6 is not VPTEE:FLQHN when PEP1 is SNIT and PEP2 is IGEMS; wherein the pair PEP5:PEP6 is not SRVHH:RLEEH when PEP1 is RSVK and PEP2 is KEVQV; and wherein the pair PEP5:PEP6 is not TQVQL:TLEDH when PEP1 is RPVQ and PEP2 is KKATV.

[0674] In certain embodiments useful for inducing differentiation of mensenchymal or progenitor stem cells from the fibroblast lineage, inducing skin tissue regeneration and tubular formation, preventing, attenuating, masking or removing wrinkles, firming the skin, preventing, decreasing or suppressing skin pigmentation, and protecting patients from skin tissue degeneration-related diseases, disorders, conditions or pathologies, PEP9 is selected from the group consisting of KIPKAXXVPTEL, SIPKAXXVPTEL, HVTKPTXAPTKL, YVPKPXXAPTKL, TVPKPXXAPTQL, ASAAPXXVPQAL, ASASPXXVSQDL, ASASPXXVPQDL, NDEGLEXVPTEE, SSVKXQPSRVHH and RNVQXRPTQVQL; PEP10 is selected from the group consisting of DMVVEGXGXR, EMVVEGXGXR, NMVVRSXGXH, NMVVRAXGXH, MIVRSXKXS, MIVKSXKXS, MVVKSXKXS, FLQHNKXEXR, RLEEHLEXAXA and TLEDHLAXKXE; and wherein the pair PEP9:PEP10 is selected from the group consisting of KIPKAXXVPTEL:DMVVEGXGXR, SIPKAXXVPTEL:EMVVEGXGXR, HVTKPTXAPTKL:NMVVRSXGXH, YVPKPXXAPTKL:NMVVRSXGXH, TVPKPXXAPTQL:NMVVRAXGXH, ASAAPXXVPQAL:MIVRSXKXS, ASASPXXVSQDL:MIVKSXKXS, ASASPXXVPQDL:MVVKSXKXS, NDEGLEXVPTEE:FLQHNKXEXR, SSVKXQPSRVHH:RLEEHLEXAXA and RNVQXRPTQVQL:TLEDHLAXKXE; wherein the pair PEP9:PEP10 is not ASAAPXXVPQAL:MIVRSXKXS when PEP1 is EPLP and PEP2 is EQLSN; wherein the pair PEP9:PEP10 is not ASASPXXVSQDL:MIVKSXKXS when PEP1 is EPLT and PEP2 is EQLSN; wherein the pair PEP9:PEP10 is not ASASPXXVPQDL:MVVKSXKXS when PEP1 is EPLT and PEP2 is EQLSN; wherein the pair PEP9:PEP10 is not NDEGLEXVPTEE:FLQHNKXEXR when PEP1 is SNIT and PEP2 is IGEMS; wherein the pair PEP9:PEP10 is not SSVKXQPSRVHH:RLEEHLEXAXA when PEP1 is RSVK and PEP2 is KEVQV; and wherein the pair PEP9:PEP10 is not RNVQXRPTQVQL:TLEDHLAXKXE when PEP1 is RPVQ and PEP2 is KKATV.

[0675] In certain embodiments useful for inducing differentiation of mensenchymal or progenitor stem cells from the fibroblast lineage, inducing skin tissue regeneration and tubular formation, preventing, attenuating, masking or removing wrinkles, firming the skin, preventing, decreasing or suppressing skin pigmentation, and protecting patients from skin tissue degeneration-related diseases, disorders, conditions or pathologies, PEP1 is selected from the group consisting of EPLP, EPLT, SNIT, RSVK and RPVQ; PEP11 is selected from the group consisting of VYY, LYY, QIM, AKV and RKI; and the pair PEP1:PEP11 is selected from the group consisting of EPLP:VYY, EPLT:LYY, SNIT:QIM, RSVK:KEVQV and RPVQ:KKATV.

[0676] In one aspect, the present disclosure provides a cyclic GFR-binding compound, wherein said cyclic GFR-binding compound is a cyclic peptide, a variant or analog thereof, or a cyclic peptidomimetic as defined herein, with between 15-60 (in particular between 15-55, more particularly between 19-60, and even more particularly between 19-55) amino acids, or between 15-35 (in particular between 15-30, more particularly between 19-35, and even more particularly between 19-30) amino acids, comprising a peptide with four amino acids (PEP1) or a peptide with eight amino acids (PEP12), a peptide with five amino acids (PEP2), and optionally a pair of peptides selected form the group consisting of PEP3:PEP4, PEP3:PEP6, PEP3:PEP10, PEP5:PEP4, PEP9:PEP4, PEP5:PEP6, PEP5:PEP10, PEP9:PEP6 and PEP9:PEP10; wherein said cyclic GFR-binding compound does not comprise the pair of peptides VPQAL:MIVRS when PEP1 is EPLP and PEP2 is EQLSN; wherein said cyclic GFR-binding compound does not comprise the pair of peptides VSQDL:MIVKS when PEP1 is EPLT and PEP2 is EQLSN; wherein said cyclic GFR-binding compound does not comprise the pair of peptides VPQDL:MVVVK when PEP1 is EPLT and PEP2 is EQLSN; wherein said cyclic GFR-binding compound does not comprise the pair of peptides VPTEE:FLQHN when PEP1 is SNIT and PEP2 is IGEMS; wherein said cyclic GFR-binding compound does not comprise the pair of peptides SRVHH:RLEEH when PEP1 is RSVK and PEP2 is KEVQV; and wherein said cyclic GFR-binding compound does not comprise the pair of peptides TQVQL:TLEDH when PEP1 is RPVQ and PEP2 is KKATV.

[0677] In one aspect, the present disclosure provides a cyclic GFR-binding compound, wherein said cyclic GFR-binding compound is a cyclic peptide, a variant or analog thereof, or a cyclic peptidomimetic as defined herein, with between 15-60 (in particular between 15-55, more particularly between 19-60, and even more particularly between 19-55) amino acids, or between 15-35 (in particular between 15-30, more particularly between 19-35, and even more particularly between 19-30) amino acids, comprising a peptide with four amino acids (PEP1) or a peptide with eight amino acids (PEP12), a peptide with five amino acids (PEP2), and optionally a pair of peptides selected form the group consisting of PEP3:PEP4, PEP3:PEP6, PEP3:PEP10, PEP5:PEP4, PEP9:PEP4, PEP5:PEP6, PEP5:PEP10, PEP9:PEP6 and PEP9:PEP10; wherein said cyclic GFR-binding compound does not comprise the pair of peptides ASAAPXXVPQAL:MIVRSXKXS when PEP1 is EPLP and PEP2 is EQLSN; wherein said cyclic GFR-binding compound does not comprise the pair of peptides ASASPXXVSQDL:MIVKSXKXS when PEP1 is EPLT and PEP2 is EQLSN; wherein said cyclic GFR-binding compound does not comprise the pair of peptides ASASPXXVPQDL:MVVKSXKXS when PEP1 is EPLT and PEP2 is EQLSN; wherein said cyclic GFR-binding compound does not comprise the pair of peptides NDEGLEXVPTEE:FLQHNKXEXR when PEP1 is SNIT and PEP2 is IGEMS; wherein said cyclic GFR-binding compound does not comprise the pair of peptides SSVKXQPSRVHH:RLEEHLEXAXA when PEP1 is RSVK and PEP2 is KEVQV; and wherein said cyclic GFR-binding compound does not comprise the pair of peptides RNVQXRPTQVQL:TLEDHLAXKXE when PEP1 is RPVQ and PEP2 is KKATV.

[0678] In certain embodiments useful for inducing differentiation of mensenchymal or progenitor stem cells from the fibroblast lineage, inducing skin tissue regeneration and tubular formation, preventing, attenuating, masking or removing wrinkles, firming the skin, preventing, decreasing or suppressing skin pigmentation, and protecting patients from skin tissue degeneration-related diseases, disorders, conditions or pathologies, said cyclic GFR-binding compound is a synthetic molecule as defined herein in the definition section.

[0679] In certain embodiments useful for inducing differentiation of mensenchymal or progenitor stem cells from the fibroblast lineage, inducing skin tissue regeneration and tubular formation, preventing, attenuating, masking or removing wrinkles, firming the skin, preventing, decreasing or suppressing skin pigmentation, and protecting patients from skin tissue degeneration-related diseases, disorders, conditions or pathologies, said cyclic GFR-binding compound is a synthetic peptide, or a variant or analog thereof, or a cyclic peptidomimetic.

[0680] Hair

[0681] Certain embodiments of the invention are particularly useful for inducing differentiation of mensenchymal or progenitor stem cells from the hair follicle cell lineage, hair follicle tissue regeneration and formation (hair growth), and for protecting from hair follicle-related diseases, disorders, conditions or pathologies.

[0682] In certain embodiments useful for inducing differentiation of mensenchymal or progenitor stem cells from the hair follicle cell lineage, hair follicle tissue regeneration and formation (hair growth), and for protecting from hair follicle-related diseases, disorders, conditions or pathologies, PEP1 is SSLS.

[0683] In certain embodiments useful for inducing differentiation of mensenchymal or progenitor stem cells from the hair follicle cell lineage, hair follicle tissue regeneration and formation (hair growth), and for protecting from hair follicle-related diseases, disorders, conditions or pathologies, PEP2 is LKVYP.

[0684] In certain embodiments useful for inducing differentiation of mensenchymal or progenitor stem cells from the hair follicle cell lineage, hair follicle tissue regeneration and formation (hair growth), and for protecting from hair follicle-related diseases, disorders, conditions or pathologies, PEP3 is selected from the group consisting of VPT, VPE, APT, TPT, VPA, APV, VPQ, VSQ and SRV.

[0685] In certain embodiments useful for inducing differentiation of mensenchymal or progenitor stem cells from the hair follicle cell lineage, hair follicle tissue regeneration and formation (hair growth), and for protecting from hair follicle-related diseases, disorders, conditions or pathologies, PEP4 is selected from the group consisting of VVE, TVE, VVR, VVK, VAE, AVS, VVD, VEE, VRS, VKS, QHN and EEH.

[0686] In certain embodiments useful for inducing differentiation of mensenchymal or progenitor stem cells from the hair follicle cell lineage, hair follicle tissue regeneration and formation (hair growth), and for protecting from hair follicle-related diseases, disorders, conditions or pathologies, PEP5 is a peptide of general formula PEP3-AA¹¹-AA¹²; wherein PEP3 is selected from the group consisting of VPT, VPE, APT, TPT, VPA, APV, VPQ, VSQ and SRV; wherein AA¹¹ is selected from the group consisting of E, K, Q, R, A, D, G and H, in particular is selected from the group consisting of E, K, Q, R, A, D and H; wherein AA¹² is selected from the group consisting of L, M, T, E, Q and H, in particular is selected from the group consisting of L, M, T, E and H. In one particular example, PEP5 is selected from the group consisting of VPTEL, VPEKM, APTKL, APTQL, VPTKL, TPTKM, VPARL, VPTRL, APVKT, VPQAL, VSQDL, VPQDL, VPTEE and SRVHH.

[0687] In certain embodiments useful for inducing differentiation of mensenchymal or progenitor stem cells from the hair follicle cell lineage, hair follicle tissue regeneration and formation (hair growth), and for protecting from hair follicle-related diseases, disorders, conditions or pathologies, PEP6 is a peptide of general formula AA²⁶-AA²⁷-AA²⁸-AA²⁹-PEP4; wherein PEP4 is selected from the group consisting of VVE, TVE, VVR, VVK, VAE, AVS, VVD, VEE, VRS, VKS, QHN and EEH; wherein AA²⁶ is absent or selected from the group consisting of AA^{III} amino acids, preferably is absent or is E; wherein AA²⁷ and AA²⁸ are independently selected from the group consisting of AA^{III} and AA^{V} amino acids, preferably AA²⁷ is selected from the group consisting of D, N, E, G, M, F and R, preferably AA²⁸ is selected from the group consisting of M, I, V and L; wherein AA²⁹ is absent or selected from the group consisting of AA^{II} amino acids, preferably is absent or is S. In one particular example, PEP6 is selected from the group consisting of DMVVE, NMTVE, EMVVE, NMVVR, NMVVK, EGMSVAE, GMAVS, GMVVD, MIVEE, MIVRS, MIVKS, MVVKS, FLQHN and RLEEH.

[0688] In certain embodiments useful for inducing differentiation of mensenchymal or progenitor stem cells from the hair follicle cell lineage, hair follicle tissue regeneration and formation (hair growth), and for protecting from hair follicle-related diseases, disorders, conditions or pathologies, PEP7 is an amino acid or a peptide with between two and seven amino acids of general formula AA¹-AA²-AA³-AA⁴-AA⁵-AA⁶-AA⁷; wherein AA¹, AA², AA³, AA⁴, and AA⁵ are independently absent or AA^{I} as defined herein; wherein AA⁶ is absent or selected from the group consisting of S, T, C, E, Q, P and R, preferably is selected from the group consisting of C, S, T, E and Q; wherein AA⁷ is absent or is selected from the group consisting of S, T, C, E, Q, P and R, preferably is selected from the group consisting of S, C and P; and wherein at least one of AA¹, AA², AA³, AA⁴, AA⁵, AA⁶ or AA⁷ is not absent. In one particular example, PEP7 is selected from the group consisting of KIPKAXX, GIPEPXX, SIPKAXX, HVTKPTX, YVPKPXX, TVPKPXX, AVPKAXX, KVGKAXX, KASKAXX, GSAGPXX, AAPASXX, STPPTXX, HVPKPXX, RVPSTXX, ASAAPXX, ASASPXX, NDEGLEX and SSVKXQP.

[0689] In certain embodiments useful for inducing differentiation of mensenchymal or progenitor stem cells from the hair follicle cell lineage, hair follicle tissue regeneration and formation (hair growth), and for protecting from hair follicle-related diseases, disorders, conditions or pathologies, PEP8 is an amino acid or a peptide with between two and six amino acids of general formula AA³³-AA³⁴-AA³⁵-AA³⁶-AA³⁷-AA³⁸; wherein AA³³ is absent or is selected from the group consisting of AA^{I} amino acids at the exception of AA amino acids, in particular is absent or is selected from the group consisting of G, S, A, E, R, K and L; AA³⁴ is absent or is selected from the group consisting of AA^{III} and AA^{V} amino acids, in particular is absent or E; wherein AA³⁵ is absent or is selected from the group consisting of AA^{II} amino acids, preferably is S or C; wherein AA³⁶ is absent or is selected from the group consisting of AA^{III} and AA^{IV} amino acids, in particular is selected from the group consisting of G, A, K and E; wherein AA³⁷ is absent or is selected from the group consisting of AA^{II} amino acids, preferably is S or C; wherein AA³⁸ is absent or is selected from the group consisting of AA^{I}, in particular is selected from the group consisting of R, H, S, L and A; and wherein at least one of AA³³, AA³⁴-AA³⁵, AA³⁶, AA³⁷ or AA³⁸ is not absent. In one particular example, PEP8 is selected from the group consisting of GXGXR, SXASR, SXGXH, AXGXH, XGXR, EXGXR, RXGXS, AXGXR, SXGXR, XGXL, XKXS, KXEXR and LEXAXA.

[0690] In certain embodiments useful for inducing differentiation of mensenchymal or progenitor stem cells from the hair follicle cell lineage, hair follicle tissue regeneration and formation (hair growth), and for protecting from hair follicle-related diseases, disorders, conditions or pathologies, PEP9 is a peptide of general formula AA¹-AA²-AA³-AA⁴-AA⁵-AA⁶-AA⁷-PEP5; wherein PEP5 is a peptide of formula PEP3-AA¹¹-AA¹²; wherein PEP3 is selected from the group consisting of VPT, VPE, APT, TPT, VPA, APV, VPQ, VSQ and SRV; wherein AA¹ is selected from the group consisting of E, K, Q, R, A, D, G and H, in particular is selected from the group consisting of E, K, Q, R, A, D and H; wherein AA¹² is selected from the group consisting of L, M, T, E, Q and H, in particular is selected from the group consisting of L, M, T, E and H; wherein AA¹, AA², AA³, AA⁴, and AA⁵ are independently absent or AA^{I} as defined herein; wherein AA⁶ is absent or selected from the group consisting of S, T, C, E, Q, P and R, preferably is selected from the group consisting of C, S, T, E and Q; wherein AA⁷ is selected from the group consisting of S, T, C, E, Q, P and R, preferably is selected from the group consisting of S, C and P. In one particular example, PEP9 is selected from the group consisting of KIPKAXXVPTEL, GIPEPXXVPEKM, SIPKAXXVPTEL, HVTKPTXAPTKL, YVPKPXXAPTKL, TVPKPXXAPTQL, AVPKAXXAPTKL, KVGKAXXVPTKL, KASKAXXVPTKL, GSAGPXXTPTKM, AAPASXXVPARL, STPPTXXVPTRL, HVPKPXXAPTKL, RVPSTXXAPVKT, ASAAPXXVPQAL, ASASPXXVSQDL, ASASPXXVPQDL, NDEGLEXVPTEE and SSVKXQPSRVHH.

[0691] In certain embodiments useful for inducing differentiation of mensenchymal or progenitor stem cells from the hair follicle cell lineage, hair follicle tissue regeneration and formation (hair growth), and for protecting from hair follicle-related diseases, disorders, conditions or pathologies, PEP10 is a peptide of general formula PEP6-AA³³-AA³⁴-AA³⁵-AA³⁶-AA³⁷-AA³⁸; wherein PEP6 is a peptide of formula AA²⁶-AA²⁷-AA²⁸-AA²⁹-PEP4; wherein PEP4 is selected from the group consisting of VVE, TVE, VVR, VVK, VAE, AVS, VVD, VEE, VRS, VKS, QHN and EEH; wherein AA²⁶ is absent or selected from the group consisting of AA^{II} amino acids, preferably is absent or is E; wherein AA²⁷ and AA²⁸ are independently selected from the group consisting of AA^{III} and AA^{V} amino acids, preferably AA²⁷ is selected from the group consisting of D, N, E, G, M, F and R, preferably AA²⁸ is selected from the group consisting of M, I, V and L; wherein AA²⁹ is absent or selected from the group consisting of AA^{II} amino acids, preferably is absent or is S; wherein AA³³ is absent or is selected from the group consisting of AA^{I} amino acids at the exception of AA¹ amino acids, in particular is absent or is selected from the group consisting of G, S, A, E, R, K and L; AA³⁴ is absent or is selected from the group consisting of AA^{III} and AA^{V} amino acids, in particular is absent or E; wherein AA³⁵ is absent or is selected from the group consisting of AA^{II} amino acids, preferably is S or C; wherein AA³⁶ is absent or is selected from the group consisting of AA^{III} and AA^{IV} amino acids, in particular is selected from the group consisting of G, A, K and E; wherein AA³⁷ is absent or is selected from the group consisting of AA^{II} amino acids, preferably is S or C; wherein AA³⁸ is absent or is selected from the group consisting of AA^{I}, in particular is selected from the group consisting of R, H, S, L and A. In one particular example, PEP10 is selected from the group consisting of DMVVEGXGXR, NMTVESXASR, EMVVEGXGXR, NMVVRSXGXH, NMVVRAXGXH, NMVVKAXGXH, EGMSVAEXGXR, GMAVSEXGXR, GMVVDRXGXS, DMVVEAXGXR, DMVVESXGXR, MIVEEXGXL, MIVRSXKXS, MIVKSXKXS, MVVKSXKXS, FLQHNKXEXR and RLEEHLEXAXA.

[0692] In certain embodiments useful for inducing differentiation of mensenchymal or progenitor stem cells from the hair follicle cell lineage, hair follicle tissue regeneration and formation (hair growth), and for protecting from hair follicle-related diseases, disorders, conditions or pathologies, PEP12 is a peptide of general formula PEP1-AA¹⁷-PEP11; wherein AA¹⁷ is selected from the group consisting of G, A, V, L, I, P, F, M, W, T and S (in particular is selected from the group consisting of M, I, L, V and T); wherein PEP1 is SSLS.

[0693] In certain embodiments useful for inducing differentiation of mensenchymal or progenitor stem cells from the hair follicle cell lineage, hair follicle tissue regeneration and formation (hair growth), and for protecting from hair follicle-related diseases, disorders, conditions or pathologies, PEP11 is a peptide with 3 amino acids of general formula AA¹⁸-AA¹⁹-AA²⁰; wherein AA¹⁸ is selected from the group consisting of L, V, Q, A and R, in particular is L; wherein AA¹⁹ is selected from the group consisting of F, W, H, Y, I and K, in particular is F; wherein AA²⁰ is selected from the group consisting of L, F, Y, K, I, V and M, in particular is F. In one particular example, PEP11 is LFF.

[0694] The definitions of “PEP” pairs, quadruplets, hexaplets and heptuplet e.g. PEP1:PEP2, PEP12:PEP2, or PEP7:PEP5:PEP12:LINKER:PEP2:PEP6:PEP8, useful for inducing differentiation of mensenchymal or progenitor stem cells from the hair follicle cell lineage, hair follicle tissue regeneration and formation (hair growth), and for protecting from hair follicle-related diseases, disorders, conditions or pathologies, are as already defined herein to the extent that PEP1 to PEP12 are particularly useful for these applications. For instances:

[0695] In certain embodiments useful for inducing differentiation of mensenchymal or progenitor stem cells from the hair follicle cell lineage, hair follicle tissue regeneration and formation (hair growth), and for protecting from hair follicle-related diseases, disorders, conditions or pathologies, PEP3 is selected from the group consisting of VPT, VPE, APT, TPT, VPA, APV, VPQ, VSQ and SRV; PEP4 is selected from the group consisting of VVE, TVE, VVR, VVK, VAE, AVS, VVD, VEE, VRS, VKS, QHN and EEH; and wherein the pair PEP3:PEP4 is selected from the group consisting of VPT:VVE, VPE:TVE, APT:VVR, APT:VVK, VPT:VAE, VPT:AVS, TPT:VVD, VPA:VVE, APV:VEE, VPQ:VRS, VSQ:VKS, VPQ:VKS, VPT:QHN and SRV:EEH.

[0696] In certain embodiments useful for inducing differentiation of mensenchymal or progenitor stem cells from the hair follicle cell lineage, hair follicle tissue regeneration and formation (hair growth), and for protecting from hair follicle-related diseases, disorders, conditions or pathologies, PEP5 is selected from the group consisting of VPTEL, VPEKM, APTKL, APTQL, VPTKL, TPTKM, VPARL, VPTRL, APVKT, VPQAL, VSQDL, VPQDL, VPTEE and SRVHH; PEP6 is selected from the group consisting of DMVVE, NMTVE, EMVVE, NMVVR, NMVVK, EGMSVAE, GMAVS, GMVVD, MIVEE, MIVRS, MIVKS, MVVKS, FLQHN and RLEEH; and wherein the pair PEP5:PEP6 is selected from the group consisting of VPTEL:DMVVE, VPEKM:NMTVE, VPTEL:EMVVE, APTKL:NMVVR, APTQL:NMVVR, APTKL:NMVVK, VPTKL:EGMSVAE, VPTKL:GMAVS, TPTKM:GMVVD, VPARL:DMVVE, VPTRL:DMVVE, APVKT:MIVEE, VPQAL:MIVRS, VSQDL:MIVKS, VPQDL:NMVVK, VPTEE:FLQHN and SRVHH:RLEEH.

[0697] In certain embodiments useful for inducing differentiation of mensenchymal or progenitor stem cells from the hair follicle cell lineage, hair follicle tissue regeneration and formation (hair growth), and for protecting from hair follicle-related diseases, disorders, conditions or pathologies, PEP7 is selected from the group consisting of KIPKAXX, GIPEPXX, SIPKAXX, HVTKPTX, YVPKPXX, TVPKPXX, AVPKAXX, KVGKAXX, KASKAXX, GSAGPXX, AAPASXX, STPPTXX, HVPKPXX, RVPSTXX, ASAAPXX, ASASPXX, NDEGLEX and SSVKXQP; wherein PEP8 is selected from the group consisting of GXGXR, SXASR, SXGXH, AXGXH, XGXR, EXGXR, RXGXS, AXGXR, SXGXR, XGXL, XKXS, KXEXR and LEXAXA; and wherein the pair PEP7:PEP8 is selected from the group consisting of KIPKAXX:GXGXR, GIPEPXX:SXASR, SIPKAXX:GXGXR, HVTKPTX:SXGXH, YVPKPXX:SXGXH, TVPKPXX:AXGXH, AVPKAXX:AXGXH, KVGKAXX:XGXR, KASKAXX:EXGXR, GSAGPXX:RXGXS, AAPASXX:AXGXR, STPPTXX:SXGXR, HVPKPXX:SXGXH, RVPSTXX:XGXL, ASAAPXX:XKXS, ASASPXX:XKXS, NDEGLEX:KXEXR and SSVKXQP:LEXAXA.

[0698] In certain embodiments useful for inducing differentiation of mensenchymal or progenitor stem cells from the hair follicle cell lineage, hair follicle tissue regeneration and formation (hair growth), and for protecting from hair follicle-related diseases, disorders, conditions or pathologies, PEP9 is selected from the group consisting of KIPKAXXVPTEL, GIPEPXXVPEKM, SIPKAXXVPTEL, HVTKPTXAPTKL, YVPKPXXAPTKL, TVPKPXXAPTQL, AVPKAXXAPTKL, KVGKAXXVPTKL, KASKAXXVPTKL, GSAGPXXTPTKM, AAPASXXVPARL, STPPTXXVPTRL, HVPKPXXAPTKL, RVPSTXXAPVKT, ASAAPXXVPQAL, ASASPXXVSQDL, ASASPXXVPQDL, NDEGLEXVPTEE and SSVKXQPSRVHH; PEP10 is selected from the group consisting of DMVVEGXGXR, NMTVESXASR, EMVVEGXGXR, NMVVRSXGXH, NMVVRAXGXH, NMVVKAXGXH, EGMSVAEXGXR, GMAVSEXGXR, GMVVDRXGXS, DMVVEAXGXR, DMVVESXGXR, MIVEEXGXL, MIVRSXKXS, MIVKSXKXS, MVVKSXKXS, FLQHNKXEXR and RLEEHLEXAXA; and wherein the pair PEP9:PEP10 is selected from the group consisting of KIPKAXXVPTEL:DMVVEGXGXR, GIPEPXXVPEKM:NMTVESXASR, SIPKAXXVPTEL:EMVVEGXGXR, HVTKPTXAPTKL:NMVVRSXGXH, YVPKPXXAPTKL:NMVVRSXGXH, TVPKPXXAPTQL:NMVVRAXGXH, AVPKAXXAPTKL:NMVVKAXGXH, KVGKAXXVPTKL:EGMSVAEXGXR, KASKAXXVPTKL:GMAVSEXGXR, GSAGPXXTPTKM:GMVVDRXGXS, AAPASXXVPARL:DMVVEAXGXR, STPPTXXVPTRL:DMVVESXGXR, HVPKPXXAPTKL:NMVVRSXGXH, RVPSTXXAPVKT:MIVEEXGXL, ASAAPXXVPQAL:MIVRSXKXS, ASASPXXVSQDL:MIVKSXKXS, ASASPXXVPQDL:MVVKSXKXS, NDEGLEXVPTEE:FLQHNKXEXR and SSVKXQPSRVHH:RLEEHLEXAXA.

[0699] In certain embodiments useful for inducing differentiation of mensenchymal or progenitor stem cells from the hair follicle cell lineage, hair follicle tissue regeneration and formation (hair growth), and for protecting from hair follicle-related diseases, disorders, conditions or pathologies, PEP5 is selected from the group consisting of VPTEL, VPEKM, APTKL, APTQL, VPTKL, TPTKM, VPARL, VPTRL, APVKT, VPQAL, VSQDL, VPQDL, VPTEE and SRVHH; PEP6 is selected from the group consisting of DMVVE, NMTVE, EMVVE, NMVVR, NMVVK, EGMSVAE, GMAVS, GMVVD, MIVEE, MIVRS, MIVKS, MVVKS, FLQHN and RLEEH; and wherein the pair PEP5:PEP6 is selected from the group consisting of VPTEL:DMVVE, VPEKM:NMTVE, VPTEL:EMVVE, APTKL:NMVVR, APTQL:NMVVR, APTKL:NMVVK, VPTKL:EGMSVAE, VPTKL:GMAVS, TPTKM:GMVVD, VPARL:DMVVE, VPTRL:DMVVE, APVKT:MIVEE, VPQAL:MIVRS, VSQDL:MIVKS, VPQDL:NMVVK, VPTEE:FLQHN and SRVHH:RLEEH; and wherein the pair PEP5:PEP6 is not VPEKM:NMTVE when PEP1 is SSLS and PEP2 is LKVYP.

[0700] In certain embodiments useful for inducing differentiation of mensenchymal or progenitor stem cells from the hair follicle cell lineage, hair follicle tissue regeneration and formation (hair growth), and for protecting from hair follicle-related diseases, disorders, conditions or pathologies, PEP9 is selected from the group consisting of KIPKAXXVPTEL, GIPEPXXVPEKM, SIPKAXXVPTEL, HVTKPTXAPTKL, YVPKPXXAPTKL, TVPKPXXAPTQL, AVPKAXXAPTKL, KVGKAXXVPTKL, KASKAXXVPTKL, GSAGPXXTPTKM, AAPASXXVPARL, STPPTXXVPTRL, HVPKPXXAPTKL, RVPSTXXAPVKT, ASAAPXXVPQAL, ASASPXXVSQDL, ASASPXXVPQDL, NDEGLEXVPTEE and SSVKXQPSRVHH; PEP10 is selected from the group consisting of DMVVEGXGXR, NMTVESXASR, EMVVEGXGXR, NMVVRSXGXH, NMVVRAXGXH, NMVVKAXGXH, EGMSVAEXGXR, GMAVSEXGXR, GMVVDRXGXS, DMVVEAXGXR, DMVVESXGXR, MIVEEXGXL, MIVRSXKXS, MIVKSXKXS, MVVKSXKXS, FLQHNKXEXR and RLEEHLEXAXA; and wherein the pair PEP9:PEP10 is selected from the group consisting of KIPKAXXVPTEL:DMVVEGXGXR, GIPEPXXVPEKM:NMTVESXASR, SIPKAXXVPTEL:EMVVEGXGXR, HVTKPTXAPTKL:NMVVRSXGXH, YVPKPXXAPTKL:NMVVRSXGXH, TVPKPXXAPTQL:NMVVRAXGXH, AVPKAXXAPTKL:NMVVKAXGXH, KVGKAXXVPTKL:EGMSVAEXGXR, KASKAXXVPTKL:GMAVSEXGXR, GSAGPXXTPTKM:GMVVDRXGXS, AAPASXXVPARL:DMVVEAXGXR, STPPTXXVPTRL:DMVVESXGXR, HVPKPXXAPTKL:NMVVRSXGXH, RVPSTXXAPVKT:MIVEEXGXL, ASAAPXXVPQAL:MIVRSXKXS, ASASPXXVSQDL:MIVKSXKXS, ASASPXXVPQDL:MVVKSXKXS, NDEGLEXVPTEE:FLQHNKXEXR and SSVKXQPSRVHH:RLEEHLEXAXA; and wherein the pair PEP9:PEP10 is not GIPEPXXVPEKM:NMTVESXASR when PEP1 is SSLS and PEP2 is LKVYP.

[0701] In certain embodiments useful for inducing differentiation of mensenchymal or progenitor stem cells from the hair follicle cell lineage, hair follicle tissue regeneration and formation (hair growth), and for protecting from hair follicle-related diseases, disorders, conditions or pathologies, PEP1 is SSLS and PEP11 is LFF.

[0702] In one aspect, the present disclosure provides a cyclic GFR-binding compound, wherein said cyclic GFR-binding compound is a cyclic peptide, a variant or analog thereof, or a cyclic peptidomimetic as defined herein, with between 15-60 (in particular between 15-55, more particularly between 19-60, and even more particularly between 19-55) amino acids, or between 15-35 (in particular between 15-30, more particularly between 19-35, and even more particularly between 19-30) amino acids, comprising a peptide with four amino acids (PEP1) or a peptide with eight amino acids (PEP12), a peptide with five amino acids (PEP2), and optionally a pair of peptides selected form the group consisting of PEP3:PEP4, PEP3:PEP6, PEP3:PEP10, PEP5:PEP4, PEP9:PEP4, PEP5:PEP6, PEP5:PEP10, PEP9:PEP6 and PEP9:PEP10; wherein said cyclic GFR-binding compound does not comprise the pair of peptides VPEKM:NMTVE when PEP1 is SSLS and PEP2 is LKVYP.

[0703] In one aspect, the present disclosure provides a cyclic GFR-binding compound, wherein said cyclic GFR-binding compound is a cyclic peptide, a variant or analog thereof, or a cyclic peptidomimetic as defined herein, with between 15-60 (in particular between 15-55, more particularly between 19-60, and even more particularly between 19-55) amino acids, or between 15-35 (in particular between 15-30, more particularly between 19-35, and even more particularly between 19-30) amino acids, comprising a peptide with four amino acids (PEP1) or a peptide with eight amino acids (PEP12), a peptide with five amino acids (PEP2), and optionally a pair of peptides selected form the group consisting of PEP3:PEP4, PEP3:PEP6, PEP3:PEP10, PEP5:PEP4, PEP9:PEP4, PEP5:PEP6, PEP5:PEP10, PEP9:PEP6 and PEP9:PEP10; wherein said cyclic GFR-binding compound does not comprise the pair of peptides GIPEPXXVPEKM:NMTVESXASR when PEP1 is SSLS and PEP2 is LKVYP.

[0704] In certain embodiments useful for inducing differentiation of mensenchymal or progenitor stem cells from the hair follicle cell lineage, hair follicle tissue regeneration and formation (hair growth), and for protecting from hair follicle-related diseases, disorders, conditions or pathologies, said cyclic GFR-binding compound is a synthetic molecule as defined herein in the definition section.

[0705] In certain embodiments useful for inducing differentiation of mensenchymal or progenitor stem cells from the hair follicle cell lineage, hair follicle tissue regeneration and formation (hair growth), and for protecting from hair follicle-related diseases, disorders, conditions or pathologies, said cyclic GFR-binding compound is a synthetic peptide, or a variant or analog thereof, or a cyclic peptidomimetic.

[0706] Fertility and Reproduction

[0707] Certain embodiments of the invention are particularly useful for inducing differentiation of mensenchymal or progenitor stem cells from the reproduction system lineage, enhancing female fertility, treating, preventing, decreasing or suppressing female infertility or any diseases, conditions, disorders or pathologies related thereof.

[0708] In certain embodiments useful for inducing differentiation of mensenchymal or progenitor stem cells from the reproduction system lineage, enhancing female fertility, treating, preventing, decreasing or suppressing female infertility or any diseases, conditions, disorders or pathologies related thereof, PEP1 is NAIS.

[0709] In certain embodiments useful for inducing differentiation of mensenchymal or progenitor stem cells from the reproduction system lineage, enhancing female fertility, treating, preventing, decreasing or suppressing female infertility or any diseases, conditions, disorders or pathologies related thereof, PEP2 is LKKYR.

[0710] In certain embodiments useful for inducing differentiation of mensenchymal or progenitor stem cells from the reproduction system lineage, enhancing female fertility, treating, preventing, decreasing or suppressing female infertility or any diseases, conditions, disorders or pathologies related thereof, PEP3 is selected from the group consisting of VPT, APT, TPT, VPA and APV.

[0711] In certain embodiments useful for inducing differentiation of mensenchymal or progenitor stem cells from the reproduction system lineage, enhancing female fertility, treating, preventing, decreasing or suppressing female infertility or any diseases, conditions, disorders or pathologies related thereof, PEP4 is selected from the group consisting of VVE, VVR, VVK, VAE, AVS, VVD and VEE.

[0712] In certain embodiments useful for inducing differentiation of mensenchymal or progenitor stem cells from the reproduction system lineage, enhancing female fertility, treating, preventing, decreasing or suppressing female infertility or any diseases, conditions, disorders or pathologies related thereof, PEP5 is a peptide of general formula PEP3-AA¹¹-AA¹²; wherein PEP3 is selected from the group consisting of VPT, APT, TPT, VPA and APV; wherein AA¹¹ is selected from the group consisting of E, K, Q, R, A, D, G and H, in particular is selected from the group consisting of E, K, Q and R; wherein AA¹² is selected from the group consisting of L, M, T, E, Q and H, in particular is selected from the group consisting of L, M and T. In one particular example, PEP5 is selected from the group consisting of VPTEL, APTKL, APTQL, VPTKL, TPTKM, VPARL, VPTRL and APVKT.

[0713] In certain embodiments useful for inducing differentiation of mensenchymal or progenitor stem cells from the reproduction system lineage, enhancing female fertility, treating, preventing, decreasing or suppressing female infertility or any diseases, conditions, disorders or pathologies related thereof, PEP6 is a peptide of general formula AA²⁶-AA²⁷-AA²⁸-AA²⁹-PEP4; wherein PEP4 is selected from the group consisting of VVE, VVR, VRS, VKS, VVK, QHN, EEH and EDH; wherein AA²⁶ is absent or selected from the group consisting of AA^{II} amino acids, preferably is absent or E; wherein AA²⁷ and AA²⁸ are independently selected from the group consisting of AA^{III} and AA^{V} amino acids, preferably AA²⁷ is selected from the group consisting of D, N, E, M and G, preferably AA²⁸ is M or I; wherein AA²⁹ is absent or selected from the group consisting of AA^{II} amino acids, preferably is absent or S. In one particular example, PEP6 is selected from the group consisting of DMVVE, EMVVE, NMVVR, NMVVK, EGMSVAE, GMAVS, GMVVD and MIVEE.

[0714] In certain embodiments useful for inducing differentiation of mensenchymal or progenitor stem cells from the reproduction system lineage, enhancing female fertility, treating, preventing, decreasing or suppressing female infertility or any diseases, conditions, disorders or pathologies related thereof, PEP7 is an amino acid or a peptide with between two and seven amino acids of general formula AA¹-AA²-AA³-AA⁴-AA⁵-AA⁶-AA⁷; wherein AA¹, AA², AA³, AA⁴, and AA⁵ are independently absent or AA^{I} as defined herein; wherein AA⁶ is absent or selected from the group consisting of S, T, C, E, Q, P and R, preferably is selected from the group consisting of C, S and T; wherein AA⁷ is absent or is selected from the group consisting of S, T, C, E, Q, P and R, preferably is selected from the group consisting of S and C; and wherein at least one of AA¹, AA², AA³, AA⁴, AA⁵, AA⁶ or AA⁷ is not absent. In one particular example, PEP7 is selected from the group consisting of KIPKAXX, SIPKAXX, HVTKPTX, YVPKPXX, TVPKPXX, AVPKAXX, KVGKAXX, KASKAXX, GSAGPXX, AAPASXX, STPPTXX, HVPKPXX and RVPSTXX.

[0715] In certain embodiments useful for inducing differentiation of mensenchymal or progenitor stem cells from the reproduction system lineage, enhancing female fertility, treating, preventing, decreasing or suppressing female infertility or any diseases, conditions, disorders or pathologies related thereof, PEP8 is an amino acid or a peptide with between two and six amino acids of general formula AA³³-AA³⁴-AA³⁵-AA³⁶-AA³⁷-AA³⁸; wherein AA³³ is absent or is selected from the group consisting of AA^{I} amino acids at the exception of AA¹ amino acids, in particular is absent or is selected from the group consisting of G, S, A, E and R; AA³⁴ is absent or is selected from the group consisting of AA^{III} and AA^{V} amino acids, in particular is absent; wherein AA³⁵ is absent or is selected from the group consisting of AA^{II} amino acids, preferably is S or C; wherein AA³⁶ is absent or is selected from the group consisting of AA^{III} and AA^{IV} amino acids, in particular is G; wherein AA³⁷ is absent or is selected from the group consisting of AA^{II} amino acids, preferably is S or C; wherein AA³⁸ is absent or is selected from the group consisting of AA^{I}, in particular is selected from the group consisting of R, H, S and L; and wherein at least one of AA³³, AA³⁴, AA³⁵, AA³⁶, AA³⁷ or AA³⁸ is not absent. In one particular example, PEP8 is selected from the group consisting of GXGXR, SXGXH, AXGXH, XGXR, EXGXR, RXGXS, AXGXR, SXGXR and XGXL.

[0716] In certain embodiments useful for inducing differentiation of mensenchymal or progenitor stem cells from the reproduction system lineage, enhancing female fertility, treating, preventing, decreasing or suppressing female infertility or any diseases, conditions, disorders or pathologies related thereof, PEP9 is a peptide of general formula AA¹-AA²-AA³-AA⁴-AA⁵-AA⁶-AA⁷-PEP5; wherein PEP5 is a peptide of formula PEP3-AA¹¹-AA¹²; wherein PEP3 is selected from the group consisting of VPT, APT, TPT, VPA and APV; wherein AA¹¹ is selected from the group consisting of E, K, Q, R, A, D, G and H, in particular is selected from the group consisting of E, K, Q and R; wherein AA¹² is selected from the group consisting of L, M, T, E, Q and H, in particular is selected from the group consisting of L, M and T; wherein AA¹, AA², AA³, AA⁴, and AA⁵ are independently absent or AA^{I} as defined herein; wherein AA⁶ is absent or selected from the group consisting of S, T, C, E, Q, P and R, preferably is selected from the group consisting of C, S and T; wherein AA⁷ is selected from the group consisting of S, T, C, E, Q, P and R, preferably is selected from the group consisting of S and C. In one particular example, PEP9 is selected from the group consisting of KIPKAXXVPTEL, SIPKAXXVPTEL, HVTKPTXAPTKL, YVPKPXXAPTKL, TVPKPXXAPTQL, AVPKAXXAPTKL, KVGKAXXVPTKL, KASKAXXVPTKL, GSAGPXXTPTKM, AAPASXXVPARL, STPPTXXVPTRL, HVPKPXXAPTKL and RVPSTXXAPVKT.

[0717] In certain embodiments useful for inducing differentiation of mensenchymal or progenitor stem cells from the reproduction system lineage, enhancing female fertility, treating, preventing, decreasing or suppressing female infertility or any diseases, conditions, disorders or pathologies related thereof, PEP10 is a peptide of general formula PEP6-AA³³-AA³⁴-AA³⁵-AA³⁶-AA³⁷-AA³⁸; wherein PEP6 is a peptide of formula AA²⁶-AA²⁷-AA²⁸-AA²⁹-PEP4; wherein PEP4 is selected from the group consisting of VVE, VVR, VVK, VAE, AVS, VVD and VEE; wherein AA²⁶ is absent or selected from the group consisting of AA^{II} amino acids, preferably is absent or E; wherein AA²⁷ and AA²⁸ are independently selected from the group consisting of AA^{III} and AA^{V} amino acids, preferably AA²⁷ is selected from the group consisting of D, N, E, M and G, preferably AA²⁸ is M or I; wherein AA²⁹ is absent or selected from the group consisting of AA^{II} amino acids, preferably is absent or is S; wherein AA³³ is absent or is selected from the group consisting of AA^{I} amino acids at the exception of AA^{VI} amino acids, in particular is absent or is selected from the group consisting of G, S, A, E and R; AA³⁴ is absent or is selected from the group consisting of AA^{II} and AA^{IV} amino acids, in particular is absent; wherein AA³⁵ is absent or is selected from the group consisting of AA^{II} amino acids, preferably is S or C; wherein AA³⁶ is absent or is selected from the group consisting of AA^{III} and AA^{IV} amino acids, in particular is G; wherein AA³⁷ is absent or is selected from the group consisting of AA^{II} amino acids, preferably is S or C; wherein AA³⁸ is absent or is selected from the group consisting of AA^{I}, in particular is selected from the group consisting of R, H, S and L. In one particular example, PEP10 is selected from the group consisting of DMVVEGXGXR, EMVVEGXGXR, NMVVRSXGXH, NMVVRSXGXH, NMVVRAXGXH, NMVVKAXGXH, EGMSVAEXGXR, GMAVSEXGXR, GMVVDRXGXS, DMVVEAXGXR, DMVVESXGXR, NMVVRSXGXH and MIVEEXGXL.

[0718] In certain embodiments useful for inducing differentiation of mensenchymal or progenitor stem cells from the reproduction system lineage, enhancing female fertility, treating, preventing, decreasing or suppressing female infertility or any diseases, conditions, disorders or pathologies related thereof, PEP12 is a peptide of general formula PEP1-AA¹⁷-PEP11; wherein AA¹⁷ is selected from the group consisting of G, A, V, L, I, P, F, M, W, T and S (in particular is selected from the group consisting of M, I, L, V and T); wherein PEP1 is NAIS.

[0719] In certain embodiments useful for inducing differentiation of mensenchymal or progenitor stem cells from the reproduction system lineage, enhancing female fertility, treating, preventing, decreasing or suppressing female infertility or any diseases, conditions, disorders or pathologies related thereof, PEP11 is a peptide with 3 amino acids of general formula AA¹⁸-AA¹⁹-AA²⁰; wherein AA¹⁸ is selected from the group consisting of L, V, Q, A and R, in particular is L; wherein AA¹⁹ is selected from the group consisting of F, W, H, Y, I and K, in particular is Y; wherein AA²⁰ is selected from the group consisting of L, F, Y, K, I, V and M, in particular is F. In one particular example, PEP11 is LYF.

[0720] The definitions of “PEP” pairs, quadruplets, hexaplets and heptuplet e.g. PEP1:PEP2, PEP12:PEP2, or PEP7:PEP5:PEP12:LINKER:PEP2:PEP6:PEP8, useful for inducing differentiation of mensenchymal or progenitor stem cells from the reproduction system lineage, enhancing female fertility, treating, preventing, decreasing or suppressing female infertility or any diseases, conditions, disorders or pathologies related thereof, are as already defined herein to the extent that PEP1 to PEP12 are particularly useful for these applications. For instances:

[0721] In certain embodiments useful for inducing differentiation of mensenchymal or progenitor stem cells from the reproduction system lineage, enhancing female fertility, treating, preventing, decreasing or suppressing female infertility or any diseases, conditions, disorders or pathologies related thereof, PEP3 is selected from the group consisting of VPT, APT, TPT, VPA and APV; PEP4 is selected from the group consisting of VVE, VVR, VVK, VAE, AVS, VVD and VEE; and wherein the pair PEP3:PEP4 is selected from the group consisting of VPT:VVE, APT:VVR, APT:VVK, VPT:VAE, VPT:AVS, TPT:VVD, VPA:VVE and APV:VEE.

[0722] In certain embodiments useful for inducing differentiation of mensenchymal or progenitor stem cells from the reproduction system lineage, enhancing female fertility, treating, preventing, decreasing or suppressing female infertility or any diseases, conditions, disorders or pathologies related thereof, PEP5 is selected from the group consisting of VPTEL, APTKL, APTQL, VPTKL, TPTKM, VPARL, VPTRL and APVKT; PEP6 is selected from the group consisting of DMVVE, EMVVE, NMVVR, NMVVK, EGMSVAE, GMAVS, GMVVD and MIVEE; and wherein the pair PEP5:PEP6 is selected from the group consisting of VPTEL:DMVVE, VPTEL:EMVVE, APTKL:NMVVR, APTQL:NMVVR, APTKL:NMVVK, VPTKL:EGMSVAE, VPTKL:GMAVS, TPTKM:GMVVD, VPARL:DMVVE, VPTRL:DMVVE and APVKT:MIVEE.

[0723] In certain embodiments useful for inducing differentiation of mensenchymal or progenitor stem cells from the reproduction system lineage, enhancing female fertility, treating, preventing, decreasing or suppressing female infertility or any diseases, conditions, disorders or pathologies related thereof, PEP7 is selected from the group consisting of KIPKAXX, SIPKAXX, HVTKPTX, YVPKPXX, TVPKPXX, AVPKAXX, KVGKAXX, KASKAXX, GSAGPXX, AAPASXX, STPPTXX, HVPKPXX and RVPSTXX; wherein PEP8 is selected from the group consisting of GXGXR, SXGXH, AXGXH, XGXR, EXGXR, RXGXS, AXGXR, SXGXR and XGXL; and wherein the pair PEP7:PEP8 is selected from the group consisting of KIPKAXX:GXGXR, SIPKAXX:GXGXR, HVTKPTX:SXGXH, YVPKPXX:SXGXH, TVPKPXX:AXGXH, AVPKAXX:AXGXH, KVGKAXX:XGXR, KASKAXX:EXGXR, GSAGPXX:RXGXS, AAPASXX:AXGXR, STPPTXX:SXGXR, HVPKPXX:SXGXH and RVPSTXX:XGXL.

[0724] In certain embodiments useful for inducing differentiation of mensenchymal or progenitor stem cells from the reproduction system lineage, enhancing female fertility, treating, preventing, decreasing or suppressing female infertility or any diseases, conditions, disorders or pathologies related thereof, PEP9 is selected from the group consisting of KIPKAXXVPTEL, SIPKAXXVPTEL, HVTKPTXAPTKL, YVPKPXXAPTKL, TVPKPXXAPTQL, AVPKAXXAPTKL, KVGKAXXVPTKL, KASKAXXVPTKL, GSAGPXXTPTKM, AAPASXXVPARL, STPPTXXVPTRL, HVPKPXXAPTKL and RVPSTXXAPVKT; PEP10 is selected from the group consisting of DMVVEGXGXR, EMVVEGXGXR, NMVVRSXGXH, NMVVRSXGXH, NMVVRAXGXH, NMVVKAXGXH, EGMSVAEXGXR, GMAVSEXGXR, GMVVDRXGXS, DMVVEAXGXR, DMVVESXGXR, NMVVRSXGXH and MIVEEXGXL; and wherein the pair PEP9:PEP10 is selected from the group consisting of KIPKAXXVPTEL:DMVVEGXGXR, SIPKAXXVPTEL:EMVVEGXGXR, HVTKPTXAPTKL:NMVVRSXGXH, YVPKPXXAPTKL:NMVVRSXGXH, TVPKPXXAPTQL:NMVVRAXGXH, AVPKAXXAPTKL:NMVVKAXGXH, KVGKAXXVPTKL:EGMSVAEXGXR, KASKAXXVPTKL:GMAVSEXGXR, GSAGPXXTPTKM:GMVVDRXGXS, AAPASXXVPARL:DMVVEAXGXR, STPPTXXVPTRL:DMVVESXGXR, HVPKPXXAPTKL:NMVVRSXGXH and RVPSTXXAPVKT:MIVEEXGXL.

[0725] In certain embodiments useful for inducing differentiation of mensenchymal or progenitor stem cells from the reproduction system lineage, enhancing female fertility, treating, preventing, decreasing or suppressing female infertility or any diseases, conditions, disorders or pathologies related thereof, PEP5 is selected from the group consisting of VPTEL, APTKL, APTQL, VPTKL, TPTKM, VPARL, VPTRL and APVKT; PEP6 is selected from the group consisting of DMVVE, EMVVE, NMVVR, NMVVK, EGMSVAE, GMAVS, GMVVD and MIVEE; and wherein the pair PEP5:PEP6 is selected from the group consisting of VPTEL:DMVVE, VPTEL:EMVVE, APTKL:NMVVR, APTQL:NMVVR, APTKL:NMVVK, VPTKL:EGMSVAE, VPTKL:GMAVS, TPTKM:GMVVD, VPARL:DMVVE, VPTRL:DMVVE and APVKT:MIVEE; and wherein the pair PEP5:PEP6 is not APTKL:NMVVR when PEP1 is NAIS and PEP2 is LKKYR.

[0726] In certain embodiments useful for inducing differentiation of mensenchymal or progenitor stem cells from the reproduction system lineage, enhancing female fertility, treating, preventing, decreasing or suppressing female infertility or any diseases, conditions, disorders or pathologies related thereof, PEP9 is selected from the group consisting of KIPKAXXVPTEL, SIPKAXXVPTEL, HVTKPTXAPTKL, YVPKPXXAPTKL, TVPKPXXAPTQL, AVPKAXXAPTKL, KVGKAXXVPTKL, KASKAXXVPTKL, GSAGPXXTPTKM, AAPASXXVPARL, STPPTXXVPTRL, HVPKPXXAPTKL and RVPSTXXAPVKT; PEP10 is selected from the group consisting of DMVVEGXGXR, EMVVEGXGXR, NMVVRSXGXH, NMVVRSXGXH, NMVVRAXGXH, NMVVKAXGXH, EGMSVAEXGXR, GMAVSEXGXR, GMVVDRXGXS, DMVVEAXGXR, DMVVESXGXR, NMVVRSXGXH and MIVEEXGXL; and wherein the pair PEP9:PEP10 is selected from the group consisting of KIPKAXXVPTEL:DMVVEGXGXR, SIPKAXXVPTEL:EMVVEGXGXR, HVTKPTXAPTKL:NMVVRSXGXH, YVPKPXXAPTKL:NMVVRSXGXH, TVPKPXXAPTQL:NMVVRAXGXH, AVPKAXXAPTKL:NMVVKAXGXH, KVGKAXXVPTKL:EGMSVAEXGXR, KASKAXXVPTKL:GMAVSEXGXR, GSAGPXXTPTKM:GMVVDRXGXS, AAPASXXVPARL:DMVVEAXGXR, STPPTXXVPTRL:DMVVESXGXR, HVPKPXXAPTKL:NMVVRSXGXH and RVPSTXXAPVKT:MIVEEXGXL; and wherein the pair PEP9:PEP10 is not HVPKPXXAPTKL:NMVVRSXGXH when PEP1 is NAIS and PEP2 is LKKYR.

[0727] In certain embodiments useful for inducing differentiation of mensenchymal or progenitor stem cells from the reproduction system lineage, enhancing female fertility, treating, preventing, decreasing or suppressing female infertility or any diseases, conditions, disorders or pathologies related thereof, PEP1 is NAIS and PEP11 is LYF.

[0728] In one aspect, the present disclosure provides a cyclic GFR-binding compound, wherein said cyclic GFR-binding compound is a cyclic peptide, a variant or analog thereof, or a cyclic peptidomimetic as defined herein, with between 15-60 (in particular between 15-55, more particularly between 19-60, and even more particularly between 19-55) amino acids, or between 15-35 (in particular between 15-30, more particularly between 19-35, and even more particularly between 19-30) amino acids, comprising a peptide with four amino acids (PEP1) or a peptide with eight amino acids (PEP12), a peptide with five amino acids (PEP2), and optionally a pair of peptides selected form the group consisting of PEP3:PEP4, PEP3:PEP6, PEP3:PEP10, PEP5:PEP4, PEP9:PEP4, PEP5:PEP6, PEP5:PEP10, PEP9:PEP6 and PEP9:PEP10; wherein said cyclic GFR-binding compound does not comprise the pair of peptides APTKL:NMVVR when PEP1 is NAIS and PEP2 is LKKYR.

[0729] In one aspect, the present disclosure provides a cyclic GFR-binding compound, wherein said cyclic GFR-binding compound is a cyclic peptide, a variant or analog thereof, or a cyclic peptidomimetic as defined herein, with between 15-60 (in particular between 15-55, more particularly between 19-60, and even more particularly between 19-55) amino acids, or between 15-35 (in particular between 15-30, more particularly between 19-35, and even more particularly between 19-30) amino acids, comprising a peptide with four amino acids (PEP1) or a peptide with eight amino acids (PEP12), a peptide with five amino acids (PEP2), and optionally a pair of peptides selected form the group consisting of PEP3:PEP4, PEP3:PEP6, PEP3:PEP10, PEP5:PEP4, PEP9:PEP4, PEP5:PEP6, PEP5:PEP10, PEP9:PEP6 and PEP9:PEP10; wherein said cyclic GFR-binding compound does not comprise the pair of peptides HVPKPXXAPTKL:NMVVRSXGXH when PEP1 is NAIS and PEP2 is LKKYR.

[0730] In certain embodiments useful for inducing differentiation of mensenchymal or progenitor stem cells from the reproduction system lineage, enhancing female fertility, treating, preventing, decreasing or suppressing female infertility or any diseases, conditions, disorders or pathologies related thereof, said cyclic GFR-binding compound is a synthetic molecule as defined herein in the definition section.

[0731] In certain embodiments useful for inducing differentiation of mensenchymal or progenitor stem cells from the reproduction system lineage, enhancing female fertility, treating, preventing, decreasing or suppressing female infertility or any diseases, conditions, disorders or pathologies related thereof, said cyclic GFR-binding compound is a synthetic peptide, or a variant or analog thereof, or a cyclic peptidomimetic.

[0732] Lung

[0733] Certain embodiments of the invention are particularly useful for inducing differentiation of mensenchymal or progenitor stem cells from the lung cell lineage, regenerating lung tissues, and protecting patients from lung tissue degeneration-related diseases, conditions, disorders or pathologies.

[0734] In certain embodiments useful for inducing differentiation of mensenchymal or progenitor stem cells from the lung cell lineage, regenerating lung tissues, and protecting patients from lung tissue degeneration-related diseases, conditions, disorders or pathologies, PEP1 is selected from the group consisting of NAIS, SATS, SPIS, EPIS and SPIN.

[0735] In certain embodiments useful for inducing differentiation of mensenchymal or progenitor stem cells from the lung cell lineage, regenerating lung tissues, and protecting patients from lung tissue degeneration-related diseases, conditions, disorders or pathologies, PEP2 is selected from the group consisting of LKKYR, LRKHR, LKYHY, KFKYE and YGKIP.

[0736] In certain embodiments useful for inducing differentiation of mensenchymal or progenitor stem cells from the lung cell lineage, regenerating lung tissues, and protecting patients from lung tissue degeneration-related diseases, conditions, disorders or pathologies, PEP3 is selected from the group consisting of VPT, VPE, APT, TPT, VPA, APV, VPQ and VSQ.

[0737] In certain embodiments useful for inducing differentiation of mensenchymal or progenitor stem cells from the lung cell lineage, regenerating lung tissues, and protecting patients from lung tissue degeneration-related diseases, conditions, disorders or pathologies, PEP4 is selected from the group consisting of VVE, TVE, VVR, VVK, VAE, AVS, VVD, VEE, VRS and VKS.

[0738] In certain embodiments useful for inducing differentiation of mensenchymal or progenitor stem cells from the lung cell lineage, regenerating lung tissues, and protecting patients from lung tissue degeneration-related diseases, conditions, disorders or pathologies, PEP5 is a peptide of general formula PEP3-AA¹-AA¹²; wherein PEP3 is selected from the group consisting of VPT, VPE, APT, TPT, VPA, APV, VPQ and VSQ; wherein AA¹ is selected from the group consisting of E, K, Q, R, A, D, G and H, in particular is selected from the group consisting of E, K, Q, R, A and D; wherein AA¹² is selected from the group consisting of L, M, T, E, Q and H, in particular selected from the group consisting of L, M and T. In one particular example, PEP5 is selected from the group consisting of VPTEL, VPEKM, APTKL, APTQL, VPTKL, TPTKM, VPARL, VPTRL, APVKT, VPQAL, VSQDL and VPQDL.

[0739] In certain embodiments useful for inducing differentiation of mensenchymal or progenitor stem cells from the lung cell lineage, regenerating lung tissues, and protecting patients from lung tissue degeneration-related diseases, conditions, disorders or pathologies, PEP6 is a peptide of general formula AA²⁶-AA²⁷-AA²⁸-AA²⁹-PEP4; wherein PEP4 is selected from the group consisting of VVE, TVE, VVR, VVK, VAE, AVS, VVD, VEE, VRS and VKS; wherein AA²⁶ is absent or selected from the group consisting of AA^{III} amino acids, preferably is absent or E; wherein AA²⁷ and AA²⁸ are independently selected from the group consisting of AA^{III} and AA^{V} amino acids, preferably AA²⁷ is selected from the group consisting of D, E, N, G and M, preferably AA²⁸ is selected from the group consisting of M, I and V; wherein AA²⁹ is absent or selected from the group consisting of AA^{II} amino acids, preferably absent or S. In one particular example, PEP6 is selected from the group consisting of DMVVE, NMTVE, EMVVE, NMVVR, NMVVK, EGMSVAE, GMAVS, GMVVD, DMVVE, MIVEE, MIVRS, MIVKS and MVVKS.

[0740] In certain embodiments useful for inducing differentiation of mensenchymal or progenitor stem cells from the lung cell lineage, regenerating lung tissues, and protecting patients from lung tissue degeneration-related diseases, conditions, disorders or pathologies, PEP7 is an amino acid or a peptide with between two and seven amino acids of general formula AA¹-AA²-AA³-AA⁴-AA⁵-AA⁶-AA⁷; wherein AA¹, AA², AA³, AA⁴, and AA⁵ are independently absent or AA^{I} as defined herein; wherein AA⁶ is absent or selected from the group consisting of S, T, C, E, Q, P and R, preferably is selected from the group consisting of C, S and T; wherein AA⁷ is absent or is selected from the group consisting of S, T, C, E, Q, P and R, preferably is C or S; and wherein at least one of AA¹, AA², AA³, AA⁴, AA⁵, AA⁶ or AA⁷ is not absent. In one particular example, PEP7 is selected from the group consisting of KIPKAXX, GIPEPXX, SIPKAXX, HVTKPTX, YVPKPXX, TVPKPXX, AVPKAXX, KVGKAXX, KASKAXX, GSAGPXX, AAPASXX, STPPTXX, HVPKPXX, RVPSTXX, ASAAPXX and ASASPXX.

[0741] In certain embodiments useful for inducing differentiation of mensenchymal or progenitor stem cells from the lung cell lineage, regenerating lung tissues, and protecting patients from lung tissue degeneration-related diseases, conditions, disorders or pathologies, PEP8 is an amino acid or a peptide with between two and six amino acids of general formula AA³³-AA³⁴-AA³⁵-AA³⁶-AA³⁷-AA³⁸; wherein AA³³ is absent or is selected from the group consisting of AA^{I} amino acids at the exception of AA¹ amino acids; AA³⁴ is absent or is selected from the group consisting of AA^{III} and AA^{IV} amino acids; wherein AA³⁵ is absent or is selected from the group consisting of AA^{II} amino acids, preferably is S or C; wherein AA³⁶ is absent or is selected from the group consisting of AA^{III} and AA^{IV} amino acids; wherein AA³⁷ is absent or is selected from the group consisting of AA^{II} amino acids, preferably is S or C; wherein AA³⁸ is absent or is selected from the group consisting of AA^{I}; and wherein at least one of AA³³, AA³⁴, AA³⁵, AA³⁶, AA³⁷ or AA³⁸ is not absent. In one particular example, PEP8 is selected from the group consisting of GXGXR, SXAXR, SXGXH, AXGXH, XGXR, EXGXR, RXGXS, AXGXR, SXGXR, XGXL and XKXS.

[0742] In certain embodiments useful for inducing differentiation of mensenchymal or progenitor stem cells from the lung cell lineage, regenerating lung tissues, and protecting patients from lung tissue degeneration-related diseases, conditions, disorders or pathologies, PEP9 is a peptide of general formula AA¹-AA²-AA³-AA⁴-AA⁵-AA⁶-AA⁷-PEP5; wherein PEP5 is a peptide of formula PEP3-AA¹¹-AA¹²; wherein PEP3 is selected from the group consisting of VPT, VPE, APT, TPT, VPA, APV, VPQ and VSQ; wherein AA¹¹ is selected from the group consisting of E, K, Q, R, A, D, G and H, in particular E, K, Q, R, A and D; wherein AA¹² is selected from the group consisting of L, M, T, E, Q and H, in particular selected from the group consisting of L, M and T; wherein AA¹, AA², AA³, AA⁴, and AA⁵ are independently absent or AA^{I} as defined herein; wherein AA⁶ is absent or selected from the group consisting of S, T, C, E, Q, P and R, preferably is selected from the group consisting of C, S and T; wherein AA⁷ is selected from the group consisting of S, T, C, E, Q, P and R, preferably is C or S. In one particular example, PEP9 is selected from the group consisting of KIPKAXXVPTEL, GIPEPXXVPEKM, SIPKAXXVPTEL, HVTKPTXAPTKL, YVPKPXXAPTKL, TVPKPXXAPTQL, AVPKAXXAPTKL, KVGKAXXVPTKL, KASKAXXVPTKL, GSAGPXXTPTKM, AAPASXXVPARL, STPPTXXVPTRL, HVPKPXXAPTKL, RVPSTXXAPVKT, ASAAPXXVPQAL, ASASPXXVSQDL and ASASPXXVPQDL.

[0743] In certain embodiments useful for inducing differentiation of mensenchymal or progenitor stem cells from the lung cell lineage, regenerating lung tissues, and protecting patients from lung tissue degeneration-related diseases, conditions, disorders or pathologies, PEP10 is a peptide of general formula PEP6-AA³³-AA³⁴-AA³⁵-AA³⁶-AA³⁷-AA³⁸; wherein PEP6 is a peptide of formula AA²⁶-AA²⁷-AA²⁸-AA²⁹-PEP4; wherein PEP4 is selected from the group consisting of VVE, TVE, VVR, VVK, VAE, AVS, VVD, VEE, VRS and VKS; wherein AA²⁶ is absent or selected from the group consisting of AA^{II} amino acids, preferably is absent or E; wherein AA²⁷ and AA²⁸ are independently selected from the group consisting of AA^{III} and AA^{V} amino acids, preferably AA²⁷ is selected from the group consisting of D, E, N, G and M, preferably AA²⁸ is selected from the group consisting of M, I and V; wherein AA²⁹ is absent or selected from the group consisting of AA^{II} amino acids, preferably absent or S; wherein AA³³ is absent or is selected from the group consisting of AA^{I} amino acids at the exception of AA^{VI} amino acids; AA³⁴ is absent or is selected from the group consisting of AA^{III} and AA^{IV} amino acids; wherein AA³⁵ is absent or is selected from the group consisting of AA^{II} amino acids, preferably is S or C; wherein AA³⁶ is absent or is selected from the group consisting of AA^{III} and AA^{IV} amino acids; wherein AA³⁷ is absent or is selected from the group consisting of AA^{II} amino acids, preferably is S or C; wherein AA³⁸ is absent or is selected from the group consisting of AA^{I}. In one particular example, PEP10 is selected from the group consisting of DMVVEGXGXR, NMTVESXAXR, EMVVEGXGXR, NMVVRSXGXH, NMVVRSXGXH, NMVVRAXGXH, NMVVKAXGXH, EGMSVAEXGXR, GMAVSEXGXR, GMVVDRXGXS, DMVVEAXGXR, DMVVESXGXR, NMVVRSXGXH, MIVEEXGXL, MIVRSXKXS, MIVKSXKXS and MVVKSXKXS.

[0744] In certain embodiments useful for inducing differentiation of mensenchymal or progenitor stem cells from the lung cell lineage, regenerating lung tissues, and protecting patients from lung tissue degeneration-related diseases, conditions, disorders or pathologies, PEP12 is a peptide of general formula PEP1-AA¹⁷-PEP11; wherein AA¹⁷ is selected from the group consisting of G, A, V, L, I, P, F, M, W, T and S (in particular is selected from the group consisting of M, I, L, V and T); wherein PEP1 is selected from the group consisting of NAIS, SATS, SPIS, EPIS and SPIN.

[0745] In certain embodiments useful for inducing differentiation of mensenchymal or progenitor stem cells from the lung cell lineage, regenerating lung tissues, and protecting patients from lung tissue degeneration-related diseases, conditions, disorders or pathologies, PEP11 is a peptide with 3 amino acids of general formula AA¹⁸-AA¹⁹-AA²⁰; wherein AA¹⁸ is selected from the group consisting of L, V, Q, A and R, in particular is L; wherein AA¹⁹ is selected from the group consisting of F, W, H and Y (in particular is a polar aromatic amino acid such as Y); wherein AA²⁰ is selected from the group consisting of L, F, Y, K, I, V and M, in particular is selected from the group consisting of L, F, Y, and K. In one particular example, PEP11 is selected from the group consisting of LYF, LYY, LYK and LYL.

[0746] The definitions of “PEP” pairs, quadruplets, hexaplets and heptuplet e.g. PEP1:PEP2, PEP12:PEP2, or PEP7:PEP5:PEP12:LINKER:PEP2:PEP6:PEP8, useful for inducing differentiation of mensenchymal or progenitor stem cells from the lung cell lineage, regenerating lung tissues, and protecting patients from lung tissue degeneration-related diseases, conditions, disorders or pathologies, are as already defined herein to the extent that PEP1 to PEP12 are particularly useful for these applications. For instances:

[0747] In certain embodiments useful for inducing differentiation of mensenchymal or progenitor stem cells from the lung cell lineage, regenerating lung tissues, and protecting patients from lung tissue degeneration-related diseases, conditions, disorders or pathologies, the pair PEP1:PEP2 is selected from the group consisting of NAIS:LKKYR, SATS:LRKHR, SPIS:LKYHY, EPIS:KFKYE and SPIN:YGKIP.

[0748] In certain embodiments useful for inducing differentiation of mensenchymal or progenitor stem cells from the lung cell lineage, regenerating lung tissues, and protecting patients from lung tissue degeneration-related diseases, conditions, disorders or pathologies, the pair PEP12:PEP2 is selected from the group consisting of NAIS-AA¹⁷-LYF:LKKYR, SATS-AA¹⁷-LYY:LRKHR, SPIS-AA¹⁷-LYK:LKYHY, EPIS-AA¹⁷-LYL:KFKYE and SPIN-AA¹⁷-LYF:YGKIP; wherein AA¹⁷ is selected from the group consisting of G, A, V, L, I, P, F, M, W, T and S (in particular is selected from the group consisting of M, I, V and T).

[0749] In certain embodiments useful for inducing differentiation of mensenchymal or progenitor stem cells from the lung cell lineage, regenerating lung tissues, and protecting patients from lung tissue degeneration-related diseases, conditions, disorders or pathologies, PEP3 is selected from the group consisting of VPT, VPE, APT, TPT, VPA, APV, VPQ and VSQ; PEP4 is selected from the group consisting of VVE, TVE, VVR, VVK, VAE, AVS, VVD, VEE, VRS and VKS; and wherein the pair PEP3:PEP4 is selected from the group consisting of VPT:VVE, VPE:TVE, APT:VVR, APT:VVK, VPT:VAE, VPT:AVS, TPT:VVD, VPA:VVE, APV:VEE, VPQ:VRS, VSQ:VKS and VPQ:VKS.

[0750] In certain embodiments useful for inducing differentiation of mensenchymal or progenitor stem cells from the lung cell lineage, regenerating lung tissues, and protecting patients from lung tissue degeneration-related diseases, conditions, disorders or pathologies, PEP5 is selected from the group consisting of VPTEL, VPEKM, APTKL, APTQL, VPTKL, TPTKM, VPARL, VPTRL, APVKT, VPQAL, VSQDL and VPQDL; PEP6 is selected from the group consisting of DMVVE, NMTVE, EMVVE, NMVVR, NMVVK, EGMSVAE, GMAVS, GMVVD, DMVVE, MIVEE, MIVRS, MIVKS and MVVKS; and wherein the pair PEP5:PEP6 is selected from the group consisting of VPTEL:DMVVE, VPEKM:NMTVE, VPTEL:EMVVE, APTKL:NMVVR, APTQL:NMVVR, APTKL:NMVVK, VPTKL:EGMSVAE, VPTKL:GMAVS, TPTKM:GMVVD, VPARL:DMVVE, VPTRL:DMVVE, APVKT:MIVEE, VPQAL:MIVRS, VSQDL:MIVKS and VPQDL:MVVKS.

[0751] In certain embodiments useful for inducing differentiation of mensenchymal or progenitor stem cells from the lung cell lineage, regenerating lung tissues, and protecting patients from lung tissue degeneration-related diseases, conditions, disorders or pathologies, PEP7 is selected from the group consisting of KIPKAXX, GIPEPXX, SIPKAXX, HVTKPTX, YVPKPXX, TVPKPXX, AVPKAXX, KVGKAXX, KASKAXX, GSAGPXX, AAPASXX, STPPTXX, HVPKPXX, RVPSTXX, ASAAPXX and ASASPXX; wherein PEP8 is selected from the group consisting of GXGXR, SXAXR, SXGXH, AXGXH, XGXR, EXGXR, RXGXS, AXGXR, SXGXR, XGXL and XKXS; and wherein the pair PEP7:PEP8 is selected from the group consisting of KIPKAXX:GXGXR, GIPEPXX:SXAXR, SIPKAXX:GXGXR, HVTKPTX:SXGXH, YVPKPXX:SXGXH, TVPKPXX:AXGXH, AVPKAXX:AXGXH, KVGKAXX:XGXR, KASKAXX:EXGXR, GSAGPXX:RXGXS, AAPASXX:AXGXR, STPPTXX:SXGXR, HVPKPXX:SXGXH, RVPSTXX:XGXL, ASAAPXX:XKXS and ASASPXX:XKXS.

[0752] In certain embodiments useful for inducing differentiation of mensenchymal or progenitor stem cells from the lung cell lineage, regenerating lung tissues, and protecting patients from lung tissue degeneration-related diseases, conditions, disorders or pathologies, PEP9 is selected from the group consisting of KIPKAXXVPTEL, GIPEPXXVPEKM, SIPKAXXVPTEL, HVTKPTXAPTKL, YVPKPXXAPTKL, TVPKPXXAPTQL, AVPKAXXAPTKL, KVGKAXXVPTKL, KASKAXXVPTKL, GSAGPXXTPTKM, AAPASXXVPARL, STPPTXXVPTRL, HVPKPXXAPTKL, RVPSTXXAPVKT, ASAAPXXVPQAL, ASASPXXVSQDL and ASASPXXVPQDL; PEP10 is selected from the group consisting of DMVVEGXGXR, NMTVESXAXR, EMVVEGXGXR, NMVVRSXGXH, NMVVRSXGXH, NMVVRAXGXH, NMVVKAXGXH, EGMSVAEXGXR, GMAVSEXGXR, GMVVDRXGXS, DMVVEAXGXR, DMVVESXGXR, NMVVRSXGXH, MIVEEXGXL, MIVRSXKXS, MIVKSXKXS and MVVKSXKXS; and wherein the pair PEP9:PEP10 is selected from the group consisting of KIPKAXXVPTEL:DMVVEGXGXR, GIPEPXXVPEKM:NMTVESXAXR, SIPKAXXVPTEL:EMVVEGXGXR, HVTKPTXAPTKL:NMVVRSXGXH, YVPKPXXAPTKL:NMVVRSXGXH, TVPKPXXAPTQL:NMVVRAXGXH, AVPKAXXAPTKL:NMVVKAXGXH, KVGKAXXVPTKL:EGMSVAEXGXR, KASKAXXVPTKL:GMAVSEXGXR, GSAGPXXTPTKM:GMVVDRXGXS, AAPASXXVPARL:DMVVEAXGXR, STPPTXXVPTRL:DMVVESXGXR, HVPKPXXAPTKL:NMVVRSXGXH, RVPSTXXAPVKT:MIVEEXGXL, ASAAPXXVPQAL:MIVRSXKXS, ASASPXXVSQDL:MIVKSXKXS and ASASPXXVPQDL:MVVKSXKXS.

[0753] In certain embodiments useful for inducing differentiation of mensenchymal or progenitor stem cells from the lung cell lineage, regenerating lung tissues, and protecting patients from lung tissue degeneration-related diseases, conditions, disorders or pathologies, PEP5 is selected from the group consisting of VPTEL, VPEKM, APTKL, APTQL, VPTKL, TPTKM, VPARL, VPTRL, APVKT, VPQAL, VSQDL and VPQDL; PEP6 is selected from the group consisting of DMVVE, NMTVE, EMVVE, NMVVR, NMVVK, EGMSVAE, GMAVS, GMVVD, DMVVE, MIVEE, MIVRS, MIVKS and MVVKS; and wherein the pair PEP5:PEP6 is selected from the group consisting of VPTEL:DMVVE, VPEKM:NMTVE, VPTEL:EMVVE, APTKL:NMVVR, APTQL:NMVVR, APTKL:NMVVK, VPTKL:EGMSVAE, VPTKL:GMAVS, TPTKM:GMVVD, VPARL:DMVVE, VPTRL:DMVVE, APVKT:MIVEE, VPQAL:MIVRS, VSQDL:MIVKS and VPQDL:MVVKS; wherein the pair PEP5:PEP6 is not APTKL:NMVVR when PEP1 is NAIS and PEP2 is LKKYR; wherein the pair PEP5:PEP6 is not APTQL:NMVVR when PEP1 is NAIS and PEP2 is LKKYR; wherein the pair PEP5:PEP6 is not APTKL:NMVVK when PEP1 is SATS and PEP2 is LRKHR; wherein the pair PEP5:PEP6 is not VPTKL:EGMSVAE when PEP1 is SPIS and PEP2 is LKYHY; wherein the pair PEP5:PEP6 is not VPTKL:GMAVS when PEP1 is EPIS and PEP2 is KFKYE; and wherein the pair PEP5:PEP6 is not TPTKM:GMVVD when PEP1 is SPIN and PEP2 is YGKIP.

[0754] In certain embodiments useful for inducing differentiation of mensenchymal or progenitor stem cells from the lung cell lineage, regenerating lung tissues, and protecting patients from lung tissue degeneration-related diseases, conditions, disorders or pathologies, PEP9 is selected from the group consisting of KIPKAXXVPTEL, GIPEPXXVPEKM, SIPKAXXVPTEL, HVTKPTXAPTKL, YVPKPXXAPTKL, TVPKPXXAPTQL, AVPKAXXAPTKL, KVGKAXXVPTKL, KASKAXXVPTKL, GSAGPXXTPTKM, AAPASXXVPARL, STPPTXXVPTRL, HVPKPXXAPTKL, RVPSTXXAPVKT, ASAAPXXVPQAL, ASASPXXVSQDL and ASASPXXVPQDL; PEP10 is selected from the group consisting of DMVVEGXGXR, NMTVESXAXR, EMVVEGXGXR, NMVVRSXGXH, NMVVRSXGXH, NMVVRAXGXH, NMVVKAXGXH, EGMSVAEXGXR, GMAVSEXGXR, GMVVDRXGXS, DMVVEAXGXR, DMVVESXGXR, NMVVRSXGXH, MIVEEXGXL, MIVRSXKXS, MIVKSXKXS and MVVKSXKXS; and wherein the pair PEP9:PEP10 is selected from the group consisting of KIPKAXXVPTEL:DMVVEGXGXR, GIPEPXXVPEKM:NMTVESXAXR, SIPKAXXVPTEL:EMVVEGXGXR, HVTKPTXAPTKL:NMVVRSXGXH, YVPKPXXAPTKL:NMVVRSXGXH, TVPKPXXAPTQL:NMVVRAXGXH, AVPKAXXAPTKL:NMVVKAXGXH, KVGKAXXVPTKL:EGMSVAEXGXR, KASKAXXVPTKL:GMAVSEXGXR, GSAGPXXTPTKM:GMVVDRXGXS, AAPASXXVPARL:DMVVEAXGXR, STPPTXXVPTRL:DMVVESXGXR, HVPKPXXAPTKL:NMVVRSXGXH, RVPSTXXAPVKT:MIVEEXGXL, ASAAPXXVPQAL:MIVRSXKXS, ASASPXXVSQDL:MIVKSXKXS and ASASPXXVPQDL:MVVKSXKXS; wherein the pair PEP9:PEP10 is not YVPKPXXAPTKL:NMVVRSXGXH when PEP1 is NAIS and PEP2 is LKKYR; wherein the pair PEP9:PEP10 is not TVPKPXXAPTQL:NMVVRAXGXH when PEP1 is NAIS and PEP2 is LKKYR; wherein the pair PEP9:PEP10 is not AVPKAXXAPTKL:NMVVKAXGXH when PEP1 is SATS and PEP2 is LRKHR; wherein the pair PEP9:PEP10 is not KVGKAXXVPTKL:EGMSVAEXGXR when PEP1 is SPIS and PEP2 is LKYHY; wherein the pair PEP9:PEP10 is not KASKAXXVPTKL:GMAVSEXGXR when PEP1 is EPIS and PEP2 is KFKYE; and wherein the pair PEP9:PEP10 is not GSAGPXXTPTKM:GMVVDRXGXS when PEP1 is SPIN and PEP2 is YGKIP.

[0755] In certain embodiments useful for inducing differentiation of mensenchymal or progenitor stem cells from the lung cell lineage, regenerating lung tissues, and protecting patients from lung tissue degeneration-related diseases, conditions, disorders or pathologies, PEP1 is selected from the group consisting of NAIS, SATS, SPIS, EPIS and SPIN; PEP11 is selected from the group consisting of LYF, LYY, LYK and LYL; and the pair PEP1:PEP11 is selected from the group consisting of NAIS:LYF, SATS:LYY, SPIS:LYK, EPIS:LYL and SPIN:LYF.

[0756] In one aspect, the present disclosure provides a cyclic GFR-binding compound, wherein said cyclic GFR-binding compound is a cyclic peptide, a variant or analog thereof, or a cyclic peptidomimetic as defined herein, with between 15-60 (in particular between 15-55, more particularly between 19-60, and even more particularly between 19-55) amino acids, or between 15-35 (in particular between 15-30, more particularly between 19-35, and even more particularly between 19-30) amino acids, comprising a peptide with four amino acids (PEP1) or a peptide with eight amino acids (PEP12), a peptide with five amino acids (PEP2), and optionally a pair of peptides selected form the group consisting of PEP3:PEP4, PEP3:PEP6, PEP3:PEP10, PEP5:PEP4, PEP9:PEP4, PEP5:PEP6, PEP5:PEP10, PEP9:PEP6 and PEP9:PEP10; wherein said cyclic GFR-binding compound does not comprise the pair of peptides APTKL:NMVVR when PEP1 is NAIS and PEP2 is LKKYR; wherein said cyclic GFR-binding compound does not comprise the pair of peptides APTQL:NMVVR when PEP1 is NAIS and PEP2 is LKKYR; wherein said cyclic GFR-binding compound does not comprise the pair of peptides APTKL:NMVVK when PEP1 is SATS and PEP2 is LRKHR; wherein said cyclic GFR-binding compound does not comprise the pair of peptides VPTKL:EGMSVAE when PEP1 is SPIS and PEP2 is LKYHY; wherein said cyclic GFR-binding compound does not comprise the pair of peptides VPTKL:GMAVS when PEP1 is EPIS and PEP2 is KFKYE; and wherein said cyclic GFR-binding compound does not comprise the pair of peptides TPTKM:GMVVD when PEP1 is SPIN and PEP2 is YGKIP.

[0757] In one aspect, the present disclosure provides a cyclic GFR-binding compound, wherein said cyclic GFR-binding compound is a cyclic peptide, a variant or analog thereof, or a cyclic peptidomimetic as defined herein, with between 15-60 (in particular between 15-55, more particularly between 19-60, and even more particularly between 19-55) amino acids, or between 15-35 (in particular between 15-30, more particularly between 19-35, and even more particularly between 19-30) amino acids, comprising a peptide with four amino acids (PEP1) or a peptide with eight amino acids (PEP12), a peptide with five amino acids (PEP2), and optionally a pair of peptides selected form the group consisting of PEP3:PEP4, PEP3:PEP6, PEP3:PEP10, PEP5:PEP4, PEP9:PEP4, PEP5:PEP6, PEP5:PEP10, PEP9:PEP6 and PEP9:PEP10; wherein said cyclic GFR-binding compound does not comprise the pair of peptides YVPKPXXAPTKL:NMVVRSXGXH when PEP1 is NAIS and PEP2 is LKKYR; wherein said cyclic GFR-binding compound does not comprise the pair of peptides TVPKPXXAPTQL:NMVVRAXGXH when PEP1 is NAIS and PEP2 is LKKYR; wherein said cyclic GFR-binding compound does not comprise the pair of peptides AVPKAXXAPTKL:NMVVKAXGXH when PEP1 is SATS and PEP2 is LRKHR; wherein said cyclic GFR-binding compound does not comprise the pair of peptides KVGKAXXVPTKL:EGMSVAEXGXR when PEP1 is SPIS and PEP2 is LKYHY; wherein said cyclic GFR-binding compound does not comprise the pair of peptides KASKAXXVPTKL:GMAVSEXGXR when PEP1 is EPIS and PEP2 is KFKYE; and wherein said cyclic GFR-binding compound does not comprise the pair of peptides GSAGPXXTPTKM:GMVVDRXGXS when PEP1 is SPIN and PEP2 is YGKIP.

[0758] In certain embodiments useful for inducing differentiation of mensenchymal or progenitor stem cells from the lung cell lineage, regenerating lung tissues, and protecting patients from lung tissue degeneration-related diseases, conditions, disorders or pathologies, said cyclic GFR-binding compound is a synthetic molecule as defined herein in the definition section.

[0759] In certain embodiments useful for inducing differentiation of mensenchymal or progenitor stem cells from the lung cell lineage, regenerating lung tissues, and protecting patients from lung tissue degeneration-related diseases, conditions, disorders or pathologies, said cyclic GFR-binding compound is a synthetic peptide, or a variant or analog thereof, or a cyclic peptidomimetic.

[0760] Muscle

[0761] Certain embodiments of the invention are particularly useful for inducing differentiation of mensenchymal or progenitor stem cells from the muscle cell lineage, regenerating muscle tissues, enhancing of myogenesis, reinforcing muscle tissues, repairing damaged muscles, and protecting a subject from one or more muscle tissue degeneration-related diseases, disorders, conditions or pathologies.

[0762] In certain embodiments useful for inducing differentiation of mensenchymal or progenitor stem cells from the muscle cell lineage, regenerating muscle tissues, enhancing of myogenesis, reinforcing muscle tissues, repairing damaged muscles, and protecting a subject from one or more muscle tissue degeneration-related diseases, disorders, conditions or pathologies, PEP1 is RSVK or RPVQ.

[0763] In certain embodiments useful for inducing differentiation of mensenchymal or progenitor stem cells from the muscle cell lineage, regenerating muscle tissues, enhancing of myogenesis, reinforcing muscle tissues, repairing damaged muscles, and protecting a subject from one or more muscle tissue degeneration-related diseases, disorders, conditions or pathologies, PEP2 is KEVQV or KKATV.

[0764] In certain embodiments useful for inducing differentiation of mensenchymal or progenitor stem cells from the muscle cell lineage, regenerating muscle tissues, enhancing of myogenesis, reinforcing muscle tissues, repairing damaged muscles, and protecting a subject from one or more muscle tissue degeneration-related diseases, disorders, conditions or pathologies, PEP3 is selected from the group consisting of VPQ, VSQ and VPT.

[0765] In certain embodiments useful for inducing differentiation of mensenchymal or progenitor stem cells from the muscle cell lineage, regenerating muscle tissues, enhancing of myogenesis, reinforcing muscle tissues, repairing damaged muscles, and protecting a subject from one or more muscle tissue degeneration-related diseases, disorders, conditions or pathologies, PEP4 is selected from the group consisting of VRS, VKS, QHN and EHS.

[0766] In certain embodiments useful for inducing differentiation of mensenchymal or progenitor stem cells from the muscle cell lineage, regenerating muscle tissues, enhancing of myogenesis, reinforcing muscle tissues, repairing damaged muscles, and protecting a subject from one or more muscle tissue degeneration-related diseases, disorders, conditions or pathologies, PEP5 is a peptide of general formula PEP3-AA¹¹-AA¹²; wherein PEP3 is selected from the group consisting of VPQ, VSQ and VPT; wherein AA¹¹ is selected from the group consisting of E, K, Q, R, A, D, G and H, in particular A, D, E and G; wherein AA¹² is selected from the group consisting of L, M, T, E, Q and H, in particular L, E and Q. In one particular example, PEP5 is selected from the group consisting of VPQAL, VSQDL, VPQDL, VPTEE and VPTGQ.

[0767] In certain embodiments useful for inducing differentiation of mensenchymal or progenitor stem cells from the muscle cell lineage, regenerating muscle tissues, enhancing of myogenesis, reinforcing muscle tissues, repairing damaged muscles, and protecting a subject from one or more muscle tissue degeneration-related diseases, disorders, conditions or pathologies, PEP6 is a peptide of general formula AA²⁶-AA²⁷-AA²⁸-AA²⁹-PEP4; wherein PEP4 is selected from the group consisting of VRS, VKS, QHN and EHS; wherein AA²⁶ is absent or selected from the group consisting of AA^{II} amino acids, preferably is absent; wherein AA²⁷ and AA²⁸ are independently selected from the group consisting of AA^{III} and AA^{V} amino acids, preferably AA²⁷ is selected from the group consisting of M, F and L, preferably AA²⁸ is selected from the group consisting of I, V, L and E; wherein AA²⁹ is absent or selected from the group consisting of AA^{II} amino acids, preferably absent. In one particular example, PEP6 is selected from the group consisting of MIVRS, MIVKS, MVVKS, FLQHN and LEEHS.

[0768] In certain embodiments useful for inducing differentiation of mensenchymal or progenitor stem cells from the muscle cell lineage, regenerating muscle tissues, enhancing of myogenesis, reinforcing muscle tissues, repairing damaged muscles, and protecting a subject from one or more muscle tissue degeneration-related diseases, disorders, conditions or pathologies, PEP7 is an amino acid or a peptide with between two and seven amino acids of general formula AA¹-AA²-AA³-AA⁴-AA⁵-AA⁶-AA⁷; wherein AA¹, AA², AA³, AA⁴, and AA⁵ are independently absent or AA^{I} as defined herein; wherein AA⁶ is absent or selected from the group consisting of S, T, C, E, Q, P and R, preferably C, S, or E; wherein AA⁷ is absent or is selected from the group consisting of S, T, C, E, Q, P and R, preferably is S or C; and wherein at least one of AA¹, AA², AA³, AA⁴, AA⁵, AA⁶ or AA⁷ is not absent. In one particular example, PEP7 is selected from the group consisting of ASAAPXX, ASASPXX and NDEGLEX.

[0769] In certain embodiments useful for inducing differentiation of mensenchymal or progenitor stem cells from the muscle cell lineage, regenerating muscle tissues, enhancing of myogenesis, reinforcing muscle tissues, repairing damaged muscles, and protecting a subject from one or more muscle tissue degeneration-related diseases, disorders, conditions or pathologies, PEP8 is an amino acid or a peptide with between two and six amino acids of general formula AA³³-AA³⁴-AA³⁵-AA³⁶-AA³⁷-AA³⁸; wherein AA³³ is absent or is selected from the group consisting of AA^{I} amino acids at the exception of AA¹ amino acids; AA³⁴ is absent or is selected from the group consisting of AA^{III} and AA^{IV} amino acids; wherein AA³⁵ is absent or is selected from the group consisting of AA^{II} amino acids, preferably is S or C; wherein AA³⁶ is absent or is selected from the group consisting of AA^{II} and AA^{I} amino acids; wherein AA³⁷ is absent or is selected from the group consisting of AA^{II} amino acids, preferably is S or C; wherein AA³⁸ is absent or is selected from the group consisting of AA^{I}; and wherein at least one of AA³³, AA³⁴, AA³⁵, AA³⁶, AA³⁷ or AA³⁸ is not absent. In one particular example, PEP8 is selected from the group consisting of XKXS, KXEXR and QXEXR.

[0770] In certain embodiments useful for inducing differentiation of mensenchymal or progenitor stem cells from the muscle cell lineage, regenerating muscle tissues, enhancing of myogenesis, reinforcing muscle tissues, repairing damaged muscles, and protecting a subject from one or more muscle tissue degeneration-related diseases, disorders, conditions or pathologies, PEP9 is a peptide of general formula AA¹-AA²-AA³-AA⁴-AA⁵-AA⁶-AA⁷-PEP5; wherein PEP5 is a peptide of formula PEP3-AA¹¹-AA¹²; wherein PEP3 is selected from the group consisting of VPQ, VSQ and VPT; wherein AA¹ is selected from the group consisting of E, K, Q, R, A, D, G and H, in particular A, D, E and G; wherein AA¹² is selected from the group consisting of L, M, T, E, Q and H, in particular L, E and Q; wherein AA¹, AA², AA³, AA⁴, and AA⁵ are independently absent or AA^{I} as defined herein; wherein AA⁶ is absent or selected from the group consisting of S, T, C, E, Q, P and R, preferably C, S, or E; wherein AA⁷ is selected from the group consisting of S, T, C, E, Q, P and R, preferably is S or C. In one particular example, PEP9 is selected from the group consisting of ASAAPXXVPQAL, ASASPXXVSQDL, ASASPXXVPQDL, NDEGLEXVPTEE and NDEGLEXVPTGQ.

[0771] In certain embodiments useful for inducing differentiation of mensenchymal or progenitor stem cells from the muscle cell lineage, regenerating muscle tissues, enhancing of myogenesis, reinforcing muscle tissues, repairing damaged muscles, and protecting a subject from one or more muscle tissue degeneration-related diseases, disorders, conditions or pathologies, PEP10 is a peptide of general formula PEP6-AA³³-AA³⁴-AA³⁵-AA³⁶-AA³⁷-AA³⁸; wherein PEP6 is a peptide of formula AA²⁶-AA²⁷-AA²⁸-AA²⁹-PEP4; wherein PEP4 is selected from the group consisting of VRS, VKS, QHN and EHS; wherein AA²⁶ is absent or selected from the group consisting of AA^{II} amino acids, preferably is absent; wherein AA²⁷ and AA²⁸ are independently selected from the group consisting of AA^{III} and AA^{V} amino acids, preferably AA²⁷ is selected from the group consisting of M, F and L, preferably AA²⁸ is selected from the group consisting of I, V, L and E; wherein AA²⁹ is absent or selected from the group consisting of AA^{II} amino acids, preferably absent; wherein AA³³ is absent or is selected from the group consisting of AA^{I} amino acids at the exception of AA¹ amino acids; AA³⁴ is absent or is selected from the group consisting of AA^{II} and AA^{V} amino acids; wherein AA³⁵ is absent or is selected from the group consisting of AA^{II} amino acids, preferably is S or C; wherein AA³⁶ is absent or is selected from the group consisting of AA^{III} and AA^{V} amino acids; wherein AA³⁷ is absent or is selected from the group consisting of AA^{II} amino acids, preferably is S or C; wherein AA³⁸ is absent or is selected from the group consisting of AA^{I}. In one particular example, PEP10 is selected from the group consisting of MIVRSXKXS, MIVKSXKXS, MVVKSXKXS, FLQHNKXEXR and LEEHSQXEXR.

[0772] In certain embodiments useful for inducing differentiation of mensenchymal or progenitor stem cells from the muscle cell lineage, regenerating muscle tissues, enhancing of myogenesis, reinforcing muscle tissues, repairing damaged muscles, and protecting a subject from one or more muscle tissue degeneration-related diseases, disorders, conditions or pathologies, PEP12 is a peptide of general formula PEP1-AA¹⁷-PEP11; wherein AA¹⁷ is selected from the group consisting of G, A, V, L, I, P, F, M, W, T and S (in particular is I or M); wherein PEP1 is RSVK or RPVQ.

[0773] In certain embodiments useful for inducing differentiation of mensenchymal or progenitor stem cells from the muscle cell lineage, regenerating muscle tissues, enhancing of myogenesis, reinforcing muscle tissues, repairing damaged muscles, and protecting a subject from one or more muscle tissue degeneration-related diseases, disorders, conditions or pathologies, PEP11 is a peptide with 3 amino acids of general formula AA¹⁸-AA¹⁹-AA²⁰; wherein AA¹⁸ is selected from the group consisting of L, V, Q, A and R, in particular is A or R; wherein AA¹⁹ is selected from the group consisting of AA^{VII} amino acids (in particular is K); wherein AA²⁰ is selected from the group consisting of L, F, Y, K, I, V and M, in particular is V or I. In one particular example, PEP11 is AKV or RKI.

[0774] The definitions of “PEP” pairs, quadruplets, hexaplets and heptuplet e.g. PEP1:PEP2, PEP12:PEP2, or PEP7:PEP5:PEP12:LINKER:PEP2:PEP6:PEP8, useful for inducing differentiation of mensenchymal or progenitor stem cells from the muscle cell lineage, regenerating muscle tissues, enhancing of myogenesis, reinforcing muscle tissues, repairing damaged muscles, and protecting a subject from one or more muscle tissue degeneration-related diseases, disorders, conditions or pathologies, are as already defined herein to the extent that PEP1 to PEP12 are particularly useful for these applications. For instances:

[0775] In certain embodiments useful for inducing differentiation of mensenchymal or progenitor stem cells from the muscle cell lineage, regenerating muscle tissues, enhancing of myogenesis, reinforcing muscle tissues, repairing damaged muscles, and protecting a subject from one or more muscle tissue degeneration-related diseases, disorders, conditions or pathologies, the pair PEP1:PEP2 is RSVK:KEVQV or RPVQ:KKATV.

[0776] In certain embodiments, useful for inducing differentiation of mensenchymal or progenitor stem cells from the muscle cell lineage, regenerating muscle tissues, enhancing of myogenesis, reinforcing muscle tissues, repairing damaged muscles, and protecting a subject from one or more muscle tissue degeneration-related diseases, disorders, conditions or pathologies, the pair PEP12:PEP2 is RSVK-AA¹⁷-AKV:KEVQV or RPVQ-AA¹⁷-RKI:KKATV; wherein AA¹⁷ is selected from the group consisting of G, A, V, L, I, P, F, M, W, T and S (in particular is I or M).

[0777] In certain embodiments useful for inducing differentiation of mensenchymal or progenitor stem cells from the muscle cell lineage, regenerating muscle tissues, enhancing of myogenesis, reinforcing muscle tissues, repairing damaged muscles, and protecting a subject from one or more muscle tissue degeneration-related diseases, disorders, conditions or pathologies, PEP3 is selected from the group consisting of VPQ, VSQ and VPT; PEP4 is selected from the group consisting of VRS, VKS, QHN and EHS; and wherein the pair PEP3:PEP4 is selected from the group consisting of VPQ:VRS, VSQ:VKS, VPQ:VKS, VPT:QHN and VPT:EHS.

[0778] In certain embodiments useful for inducing differentiation of mensenchymal or progenitor stem cells from the muscle cell lineage, regenerating muscle tissues, enhancing of myogenesis, reinforcing muscle tissues, repairing damaged muscles, and protecting a subject from one or more muscle tissue degeneration-related diseases, disorders, conditions or pathologies, PEP5 is selected from the group consisting of VPQAL, VSQDL, VPQDL, VPTEE and VPTGQ; PEP6 is selected from the group consisting of MIVRS, MIVKS, MVVKS, FLQHN and LEEHS; and wherein the pair PEP5:PEP6 is selected from the group consisting of VPQAL:MIVRS, VSQDL:MIVKS, VPQDL:MVVKS, VPTEE:FLQHN and VPTGQ:LEEHS.

[0779] In certain embodiments useful for inducing differentiation of mensenchymal or progenitor stem cells from the muscle cell lineage, regenerating muscle tissues, enhancing of myogenesis, reinforcing muscle tissues, repairing damaged muscles, and protecting a subject from one or more muscle tissue degeneration-related diseases, disorders, conditions or pathologies, PEP7 is selected from the group consisting of ASAAPXX, ASASPXX and NDEGLEX; wherein PEP8 is selected from the group consisting of XKXS, KXEXR and QXEXR; and wherein the pair PEP7:PEP8 is selected from the group consisting of ASAAPXX:XKXS, ASASPXX:XKXS, NDEGLEX:KXEXR and NDEGLEX:QXEXR.

[0780] In certain embodiments useful for inducing differentiation of mensenchymal or progenitor stem cells from the muscle cell lineage, regenerating muscle tissues, enhancing of myogenesis, reinforcing muscle tissues, repairing damaged muscles, and protecting a subject from one or more muscle tissue degeneration-related diseases, disorders, conditions or pathologies, PEP9 is selected from the group consisting of ASAAPXXVPQAL, ASASPXXVSQDL, ASASPXXVPQDL, NDEGLEXVPTEE and NDEGLEXVPTGQ; PEP10 is selected from the group consisting of MIVRSXKXS, MIVKSXKXS, MVVKSXKXS, FLQHNKXEXR and LEEHSQXEXR; and wherein the pair PEP9:PEP10 is selected from the group consisting of ASAAPXXVPQAL:MIVRSXKXS, ASASPXXVSQDL:MIVKSXKXS, ASASPXXVPQDL:MVVKSXKXS, NDEGLEXVPTEE:FLQHNKXEXR and NDEGLEXVPTGQ:LEEHSQXEXR.

[0781] In certain embodiments useful for inducing differentiation of mensenchymal or progenitor stem cells from the muscle cell lineage, regenerating muscle tissues, enhancing of myogenesis, reinforcing muscle tissues, repairing damaged muscles, and protecting a subject from one or more muscle tissue degeneration-related diseases, disorders, conditions or pathologies, PEP1 is RSVK or RPVQ; PEP11 is is AKV or RKI; and the pair PEP1:PEP11 is RSVK:AKV or RPVQ:RKI.

[0782] In certain embodiments useful for inducing differentiation of mensenchymal or progenitor stem cells from the muscle cell lineage, regenerating muscle tissues, enhancing of myogenesis, reinforcing muscle tissues, repairing damaged muscles, and protecting a subject from one or more muscle tissue degeneration-related diseases, disorders, conditions or pathologies, said cyclic GFR-binding compound is a synthetic molecule as defined herein in the definition section.

[0783] In certain embodiments useful for inducing differentiation of mensenchymal or progenitor stem cells from the muscle cell lineage, regenerating muscle tissues, enhancing of myogenesis, reinforcing muscle tissues, repairing damaged muscles, and protecting a subject from one or more muscle tissue degeneration-related diseases, disorders, conditions or pathologies, said cyclic GFR-binding compound is a synthetic peptide, or a variant or analog thereof, or a cyclic peptidomimetic.

[0784] Blood

[0785] Certain embodiments of the invention are particularly useful for inducing differentiation of mensenchymal or progenitor stem cells from the blood cell lineage, regenerating blood tissues, and protecting patients from blood cell degeneration-related disease, conditions, disorders or pathologies.

[0786] In certain embodiments useful for inducing differentiation of mensenchymal or progenitor stem cells from the blood cell lineage, regenerating blood tissues, and protecting patients from blood cell degeneration-related disease, conditions, disorders or pathologies, PEP1 is SNIT.

[0787] In certain embodiments useful for inducing differentiation of mensenchymal or progenitor stem cells from the blood cell lineage, regenerating blood tissues, and protecting patients from blood cell degeneration-related disease, conditions, disorders or pathologies, PEP2 is IGEMS or LGEMS.

[0788] In certain embodiments useful for inducing differentiation of mensenchymal or progenitor stem cells from the blood cell lineage, regenerating blood tissues, and protecting patients from blood cell degeneration-related disease, conditions, disorders or pathologies, PEP3 is selected from the group consisting of TPT, VPA, VPT, APT, APV, VPQ, VSQ, SRV and TQV.

[0789] In certain embodiments useful for inducing differentiation of mensenchymal or progenitor stem cells from the blood cell lineage, regenerating blood tissues, and protecting patients from blood cell degeneration-related disease, conditions, disorders or pathologies, PEP4 is selected from the group consisting of VVD, VVE, VVR, VEE, VRS, VKS, EEH and EDH.

[0790] In certain embodiments useful for inducing differentiation of mensenchymal or progenitor stem cells from the blood cell lineage, regenerating blood tissues, and protecting patients from blood cell degeneration-related disease, conditions, disorders or pathologies, PEP5 is a peptide of general formula PEP3-AA¹¹-AA¹²; wherein PEP3 is selected from the group consisting of TPT, VPA, VPT, APT, APV, VPQ, VSQ, SRV and TQV; wherein AA¹ is selected from the group consisting of E, K, Q, R, A, D, G and H, in particular is selected from the group consisting of K, R, A, D, H and Q; wherein AA¹² is selected from the group consisting of L, M, T, E, Q and H, in particular is selected from the group consisting of M, L, T and H. In one particular example, PEP5 is selected from the group consisting of TPTKM, VPARL, VPTRL, APTKL, APVKT, VPQAL, VSQDL, VPQDL, SRVHH and TQVQL.

[0791] In certain embodiments useful for inducing differentiation of mensenchymal or progenitor stem cells from the blood cell lineage, regenerating blood tissues, and protecting patients from blood cell degeneration-related disease, conditions, disorders or pathologies, PEP6 is a peptide of general formula AA²⁶-AA²⁷-AA²⁸-AA²⁹-PEP4; wherein PEP4 is selected from the group consisting of VVD, VVE, VVR, VEE, VRS, VKS, EEH and EDH; wherein AA²⁶ is absent or selected from the group consisting of AA^{III} amino acids, preferably is absent; wherein AA²⁷ and AA²⁸ are independently selected from the group consisting of AA^{III} and AA^{V} amino acids, preferably AA²⁷ is selected from the group consisting of G, D, N, M, R and T, preferably AA²⁸ is selected from the group consisting of M, I, V and L; wherein AA²⁹ is absent or selected from the group consisting of AA^{II} amino acids, preferably is absent. In one particular example, PEP6 is selected from the group consisting of GMVVD, DMVVE, NMVVR, MIVEE, MIVRS, MIVKS, MVVKS, RLEEH and TLEDH.

[0792] In certain embodiments useful for inducing differentiation of mensenchymal or progenitor stem cells from the blood cell lineage, regenerating blood tissues, and protecting patients from blood cell degeneration-related disease, conditions, disorders or pathologies, PEP7 is an amino acid or a peptide with between two and seven amino acids of general formula AA¹-AA²-AA³-AA⁴-AA⁵-AA⁶-AA⁷; wherein AA¹, AA², AA³, AA⁴, and AA⁵ are independently absent or AA^{I} as defined herein; wherein AA⁶ is absent or selected from the group consisting of S, T, C, E, Q, P and R, preferably is selected from the group consisting of S, C, Q and R; wherein AA⁷ is absent or is selected from the group consisting of S, T, C, E, Q, P and R, preferably is selected from the group consisting of C, S and P; and wherein at least one of AA¹, AA², AA³, AA⁴, AA⁵, AA⁶ or AA⁷ is not absent. In one particular example, PEP7 is selected from the group consisting of GSAGPXX, AAPASXX, STPPTXX, HVPKPXX, RVPSTXX, ASAAPXX, ASASPXX, SSVKXQP and RNVQXRP.

[0793] In certain embodiments useful for inducing differentiation of mensenchymal or progenitor stem cells from the blood cell lineage, regenerating blood tissues, and protecting patients from blood cell degeneration-related disease, conditions, disorders or pathologies, PEP8 is an amino acid or a peptide with between two and six amino acids of general formula AA³³-AA³⁴-AA³⁵-AA³⁶-AA³⁷-AA³⁸; wherein AA³³ is absent or is selected from the group consisting of AA^{I} amino acids at the exception of AA¹ amino acids; AA³⁴ is absent or is selected from the group consisting of AA^{III} and AA^{IV} amino acids; wherein AA³⁵ is absent or is selected from the group consisting of AA^{II} amino acids, preferably is S or C; wherein AA³⁶ is absent or is selected from the group consisting of AA^{III} and AA^{IV} amino acids; wherein AA³⁷ is absent or is selected from the group consisting of AA^{II} amino acids, preferably is S or C; wherein AA³⁸ is absent or is selected from the group consisting of AA^{I}; and wherein at least one of AA³³, AA³⁴, AA³⁵, AA³⁶, AA³⁷ or AA³⁸ is not absent. In one particular example, PEP8 is selected from the group consisting of RXGXS, AXGXR, SXGXR, SXGXH, XGXL, XKXS, LEXAXA and LAXKXE.

[0794] In certain embodiments useful for inducing differentiation of mensenchymal or progenitor stem cells from the blood cell lineage, regenerating blood tissues, and protecting patients from blood cell degeneration-related disease, conditions, disorders or pathologies, PEP9 is a peptide of general formula AA¹-AA²-AA³-AA⁴-AA⁵-AA⁶-AA⁷-PEP5; wherein PEP5 is a peptide of formula PEP3-AA-AA¹²; wherein PEP3 is selected from the group consisting of TPT, VPA, VPT, APT, APV, VPQ, VSQ, SRV and TQV; wherein AA¹¹ is selected from the group consisting of E, K, Q, R, A, D, G and H, in particular is selected from the group consisting of K, R, A, D, H and Q; wherein AA¹² is selected from the group consisting of L, M, T, E, Q and H, in particular is selected from the group consisting of M, L, T and H; wherein AA¹, AA², AA³, AA⁴, and AA⁵ are independently absent or AA^{I} as defined herein; wherein AA⁶ is absent or selected from the group consisting of S, T, C, E, Q, P and R, preferably is selected from the group consisting of S, C, Q and R; wherein AA⁷ is selected from the group consisting of S, T, C, E, Q, P and R, preferably is selected from the group consisting of C, S and P. In one particular example, PEP9 is selected from the group consisting of GSAGPXXTPTKM, AAPASXXVPARL, STPPTXXVPTRL, HVPKPXXAPTKL, RVPSTXXAPVKT, ASAAPXXVPQAL, ASASPXXVSQDL, ASASPXXVPQDL, SSVKXQPSRVHH and RNVQXRPTQVQL.

[0795] In certain embodiments useful for inducing differentiation of mensenchymal or progenitor stem cells from the blood cell lineage, regenerating blood tissues, and protecting patients from blood cell degeneration-related disease, conditions, disorders or pathologies, PEP10 is a peptide of general formula PEP6-AA³³-AA³⁴-AA³⁵-AA³⁶-AA³⁷-AA³⁸; wherein PEP6 is a peptide of formula AA²⁶-AA²⁷-AA²⁸-AA²⁹-PEP4; wherein PEP4 is selected from the group consisting of VVD, VVE, VVR, VEE, VRS, VKS, EEH and EDH; wherein AA²⁶ is absent or selected from the group consisting of AA^{III} amino acids, preferably is absent; wherein AA²⁷ and AA²⁸ are independently selected from the group consisting of AA^{III} and AA^{V} amino acids, preferably AA²⁷ is selected from the group consisting of G, D, N, M, R and T, preferably AA²⁸ is selected from the group consisting of M, I, V and L; wherein AA²⁹ is absent or selected from the group consisting of AA^{II} amino acids, preferably is absent; wherein AA³³ is absent or is selected from the group consisting of AA^{I} amino acids at the exception of AA¹ amino acids; AA³⁴ is absent or is selected from the group consisting of AA^{III} and AA^{V} amino acids; wherein AA³⁵ is absent or is selected from the group consisting of AA^{II} amino acids, preferably is S or C; wherein AA³⁶ is absent or is selected from the group consisting of AA^{III} and AA^{IV} amino acids; wherein AA³⁷ is absent or is selected from the group consisting of AA^{II} amino acids, preferably is S or C; wherein AA³⁸ is absent or is selected from the group consisting of AA^{I}. In one particular example, PEP10 is selected from the group consisting of GMVVDRXGXS, DMVVEAXGXR, DMVVESXGXR, NMVVRSXGXH, MIVEEXGXL, MIVRSXKXS, MIVKSXKXS, MVVKSXKXS, RLEEHLEXAXA and TLEDHLAXKXE.

[0796] In certain embodiments useful for inducing differentiation of mensenchymal or progenitor stem cells from the blood cell lineage, regenerating blood tissues, and protecting patients from blood cell degeneration-related disease, conditions, disorders or pathologies, PEP12 is a peptide of general formula PEP1-AA¹⁷-PEP11; wherein AA¹⁷ is selected from the group consisting of G, A, V, L, I, P, F, M, W, T and S (in particular is selected from the group consisting of M, I, V and T); wherein PEP1 is SNIT.

[0797] In certain embodiments useful for inducing differentiation of mensenchymal or progenitor stem cells from the blood cell lineage, regenerating blood tissues, and protecting patients from blood cell degeneration-related disease, conditions, disorders or pathologies, PEP11 is a peptide with 3 amino acids of general formula AA¹⁸-AA¹⁹-AA²⁰; wherein AA¹⁸ is selected from the group consisting of L, V, Q, A and R, in particular is Q; wherein AA¹⁹ is selected from the group consisting of F, W, H, I and Y (in particular is I); wherein AA²⁰ is selected from the group consisting of L, F, Y, K, I, V and M, in particular is M. In one particular example, PEP11 is QIM.

[0798] In certain embodiments useful for inducing differentiation of mensenchymal or progenitor stem cells from the blood cell lineage, regenerating blood tissues, and protecting patients from blood cell degeneration-related disease, conditions, disorders or pathologies, the pair PEP1:PEP2 is SNIT:IGEMS or SNIT:LGEMS.

[0799] In certain embodiments useful for inducing differentiation of mensenchymal or progenitor stem cells from the blood cell lineage, regenerating blood tissues, and protecting patients from blood cell degeneration-related disease, conditions, disorders or pathologies, the pair PEP12:PEP2 is SNIT-AA¹⁷-QIM:IGEMS or SNIT-AA¹⁷-QIM:LGEMS; wherein AA¹⁷ is selected from the group consisting of G, A, V, L, I, P, F, M, W, T and S (in particular is selected from the group consisting of M, I, V and T).

[0800] The definitions of “PEP” pairs, quadruplets, hexaplets and heptuplet e.g. PEP1:PEP2, PEP12:PEP2, or PEP7:PEP5:PEP12:LINKER:PEP2:PEP6:PEP8, useful for inducing differentiation of mensenchymal or progenitor stem cells from the blood cell lineage, regenerating blood tissues, and protecting patients from blood cell degeneration-related disease, conditions, disorders or pathologies, are as already defined herein to the extent that PEP1 to PEP12 are particularly useful for these applications. For instances:

[0801] In certain embodiments useful for inducing differentiation of mensenchymal or progenitor stem cells from the blood cell lineage, regenerating blood tissues, and protecting patients from blood cell degeneration-related disease, conditions, disorders or pathologies, PEP3 is selected from the group consisting of TPT, VPA, VPT, APT, APV, VPQ, VSQ, SRV and TQV; PEP4 is selected from the group consisting of VVD, VVE, VVR, VEE, VRS, VKS, EEH and EDH; and wherein the pair PEP3:PEP4 is selected from the consisting of TPT:VVD, VPA:VVE, VPT:VVE, APT:VVR, APV:VEE, VPQ:VRS, VSQ:VKS, VPQ:VKS, SRV:EEH and TQV:EDH.

[0802] In certain embodiments useful for inducing differentiation of mensenchymal or progenitor stem cells from the blood cell lineage, regenerating blood tissues, and protecting patients from blood cell degeneration-related disease, conditions, disorders or pathologies, PEP5 is selected from the group consisting of TPTKM, VPARL, VPTRL, APTKL, APVKT, VPQAL, VSQDL, VPQDL, SRVHH and TQVQL; PEP6 is selected from the group consisting of GMVVD, DMVVE, NMVVR, MIVEE, MIVRS, MIVKS, MVVKS, RLEEH and TLEDH; and wherein the pair PEP5:PEP6 is selected from the group consisting of TPTKM:GMVVD, VPARL:DMVVE, VPTRL:DMVVE, APTKL:NMVVR, APVKT:MIVEE, VPQAL:MIVRS, VSQDL:MIVKS, VPQDL:MVVKS, SRVHH:RLEEH and TQVQL:TLEDH.

[0803] In certain embodiments useful for inducing differentiation of mensenchymal or progenitor stem cells from the blood cell lineage, regenerating blood tissues, and protecting patients from blood cell degeneration-related disease, conditions, disorders or pathologies, PEP7 is selected from the group consisting of GSAGPXX, AAPASXX, STPPTXX, HVPKPXX, RVPSTXX, ASAAPXX, ASASPXX, SSVKXQP and RNVQXRP; wherein PEP8 is selected from the group consisting of RXGXS, AXGXR, SXGXR, SXGXH, XGXL, XKXS, LEXAXA and LAXKXE; and wherein the pair PEP7:PEP8 is selected from the group consisting of GSAGPXX:RXGXS, AAPASXX:AXGXR, STPPTXX:SXGXR, HVPKPXX:SXGXH, RVPSTXX:XGXL, ASAAPXX:XKXS, ASASPXX:XKXS, SSVKXQP:LEXAXA and RNVQXRP:LAXKXE.

[0804] In certain embodiments useful for inducing differentiation of mensenchymal or progenitor stem cells from the blood cell lineage, regenerating blood tissues, and protecting patients from blood cell degeneration-related disease, conditions, disorders or pathologies, PEP9 is selected from the group consisting of GSAGPXXTPTKM, AAPASXXVPARL, STPPTXXVPTRL, HVPKPXXAPTKL, RVPSTXXAPVKT, ASAAPXXVPQAL, ASASPXXVSQDL, ASASPXXVPQDL, SSVKXQPSRVHH and RNVQXRPTQVQL; PEP10 is selected from the group consisting of GMVVDRXGXS, DMVVEAXGXR, DMVVESXGXR, NMVVRSXGXH, MIVEEXGXL, MIVRSXKXS, MIVKSXKXS, MVVKSXKXS, RLEEHLEXAXA and TLEDHLAXKXE; and wherein the pair PEP9:PEP10 is selected from the group consisting of GSAGPXXTPTKM:GMVVDRXGXS, AAPASXXVPARL:DMVVEAXGXR, STPPTXXVPTRL:DMVVESXGXR, HVPKPXXAPTKL:NMVVRSXGXH, RVPSTXXAPVKT:MIVEEXGXL, ASAAPXXVPQAL:MIVRSXKXS, ASASPXXVSQDL:MIVKSXKXS, ASASPXXVPQDL:MVVKSXKXS, SSVKXQPSRVHH:RLEEHLEXAXA and RNVQXRPTQVQL:TLEDHLAXKXE.

[0805] In certain embodiments useful for inducing differentiation of mensenchymal or progenitor stem cells from the blood cell lineage, regenerating blood tissues, and protecting patients from blood cell degeneration-related disease, conditions, disorders or pathologies, PEP1 is SNIT and PEP11 is QIM.

[0806] In one aspect, the present disclosure provides a cyclic GFR-binding compound, wherein said cyclic GFR-binding compound is a cyclic peptide, a variant or analog thereof, or a cyclic peptidomimetic as defined herein, with between 15-60 (in particular between 15-55, more particularly between 19-60, and even more particularly between 19-55) amino acids, or between 15-35 (in particular between 15-30, more particularly between 19-35, and even more particularly between 19-30) amino acids, comprising a peptide with four amino acids (PEP1) or a peptide with eight amino acids (PEP12), a peptide with five amino acids (PEP2), and optionally a pair of peptides selected form the group consisting of PEP3:PEP4, PEP3:PEP6, PEP3:PEP10, PEP5:PEP4, PEP9:PEP4, PEP5:PEP6, PEP5:PEP10, PEP9:PEP6 and PEP9:PEP10.

[0807] In certain embodiments useful for inducing differentiation of mensenchymal or progenitor stem cells from the blood cell lineage, regenerating blood tissues, and protecting patients from blood cell degeneration-related disease, conditions, disorders or pathologies, said cyclic GFR-binding compound is a synthetic molecule as defined herein in the definition section.

[0808] In certain embodiments useful for inducing differentiation of mensenchymal or progenitor stem cells from the blood cell lineage, regenerating blood tissues, and protecting patients from blood cell degeneration-related disease, conditions, disorders or pathologies, said cyclic GFR-binding compound is a synthetic peptide, or a variant or analog thereof, or a cyclic peptidomimetic.

[0809] Adipose Tissues

[0810] Certain embodiments of the invention are particularly useful for inducing differentiation of mensenchymal or progenitor stem cells from the adipocyte lineage, regenerating adipose tissues and protecting patients from adipose tissue degeneration-related diseases, conditions, disorders or pathologies.

[0811] In certain embodiments useful for inducing differentiation of mensenchymal or progenitor stem cells from the adipocyte lineage, regenerating adipose tissues and protecting patients from adipose tissue degeneration-related diseases, conditions, disorders or pathologies, PEP1 is SAIS or NAIS.

[0812] In certain embodiments useful for inducing differentiation of mensenchymal or progenitor stem cells from the adipocyte lineage, regenerating adipose tissues and protecting patients from adipose tissue degeneration-related diseases, conditions, disorders or pathologies, PEP2 is LKNYQ or LKKYR.

[0813] In certain embodiments useful for inducing differentiation of mensenchymal or progenitor stem cells from the adipocyte lineage, regenerating adipose tissues and protecting patients from adipose tissue degeneration-related diseases, conditions, disorders or pathologies, PEP3 is selected from the group consisting of VPT, VPE, APT, TPT, VPA, APV, VPQ and VSQ.

[0814] In certain embodiments useful for inducing differentiation of mensenchymal or progenitor stem cells from the adipocyte lineage, regenerating adipose tissues and protecting patients from adipose tissue degeneration-related diseases, conditions, disorders or pathologies, PEP4 is selected from the group consisting of VVE, TVE, VVR, VVK, VAE, AVS, VVD, VEE, VRS and VKS.

[0815] In certain embodiments useful for inducing differentiation of mensenchymal or progenitor stem cells from the adipocyte lineage, regenerating adipose tissues and protecting patients from adipose tissue degeneration-related diseases, conditions, disorders or pathologies, PEP5 is a peptide of general formula PEP3-AA¹¹-AA¹²; wherein PEP3 is selected from the group consisting of VPT, VPE, APT, TPT, VPA, APV, VPQ and VSQ; wherein AA¹¹ is selected from the group consisting of E, K, Q, R, A, D, G and H, in particular is selected from the group consisting of E, K, Q, R, A and D; wherein AA¹² is selected from the group consisting of L, M, T, E, Q and H, in particular selected from the group consisting of L, M and T. In one particular example, PEP5 is selected from the group consisting of VPTEL, VPEKM, APTKL, APTQL, VPTKL, TPTKM, VPARL, VPTRL, APVKT, VPQAL, VSQDL and VPQDL.

[0816] In certain embodiments useful for inducing differentiation of mensenchymal or progenitor stem cells from the adipocyte lineage, regenerating adipose tissues and protecting patients from adipose tissue degeneration-related diseases, conditions, disorders or pathologies, PEP6 is a peptide of general formula AA²⁶-AA²⁷-AA²⁸-AA²⁹-PEP4; wherein PEP4 is selected from the group consisting of VVE, TVE, VVR, VVK, VAE, AVS, VVD, VEE, VRS and VKS; wherein AA²⁶ is absent or selected from the group consisting of AA^{III} amino acids, preferably is absent or E; wherein AA²⁷ and AA²⁸ are independently selected from the group consisting of AA^{III} and AA^{V} amino acids, preferably AA²⁷ is selected from the group consisting of D, E, N, G and M, preferably AA²⁸ is selected from the group consisting of M, I and V; wherein AA²⁹ is absent or selected from the group consisting of AA^{II} amino acids, preferably absent or S. In one particular example, PEP6 is selected from the group consisting of DMVVE, NMTVE, EMVVE, NMVVR, NMVVK, EGMSVAE, GMAVS, GMVVD, DMVVE, MIVEE, MIVRS, MIVKS and MVVKS.

[0817] In certain embodiments useful for inducing differentiation of mensenchymal or progenitor stem cells from the adipocyte lineage, regenerating adipose tissues and protecting patients from adipose tissue degeneration-related diseases, conditions, disorders or pathologies, PEP7 is an amino acid or a peptide with between two and seven amino acids of general formula AA¹-AA²-AA³-AA⁴-AA⁵-AA⁶-AA⁷; wherein AA¹, AA², AA³, AA⁴, and AA⁵ are independently absent or AA^{I} as defined herein; wherein AA⁶ is absent or selected from the group consisting of S, T, C, E, Q, P and R, preferably is selected from the group consisting of C, S and T; wherein AA⁷ is absent or is selected from the group consisting of S, T, C, E, Q, P and R, preferably is C or S; and wherein at least one of AA¹, AA², AA³, AA⁴, AA⁵, AA⁶ or AA⁷ is not absent. In one particular example, PEP7 is selected from the group consisting of KIPKAXX, GIPEPXX, SIPKAXX, HVTKPTX, YVPKPXX, TVPKPXX, AVPKAXX, KVGKAXX, KASKAXX, GSAGPXX, AAPASXX, STPPTXX, HVPKPXX, RVPSTXX, ASAAPXX and ASASPXX.

[0818] In certain embodiments useful for inducing differentiation of mensenchymal or progenitor stem cells from the adipocyte lineage, regenerating adipose tissues and protecting patients from adipose tissue degeneration-related diseases, conditions, disorders or pathologies, PEP8 is an amino acid or a peptide with between two and six amino acids of general formula AA³³-AA³⁴-AA³⁵-AA³⁶-AA³⁷-AA³⁸; wherein AA³³ is absent or is selected from the group consisting of AA^{I} amino acids at the exception of AA^{VI} amino acids; AA³⁴ is absent or is selected from the group consisting of AA^{III} and AA^{IV} amino acids; wherein AA³⁵ is absent or is selected from the group consisting of AA^{II} amino acids, preferably is S or C; wherein AA³⁶ is absent or is selected from the group consisting of AA^{III} and AA^{IV} amino acids; wherein AA³⁷ is absent or is selected from the group consisting of AA^{II} amino acids, preferably is S or C; wherein AA³⁸ is absent or is selected from the group consisting of AA^{I}; and wherein at least one of AA³³, AA³⁴, AA³⁵, AA³⁶, AA³⁷ or AA³⁸ is not absent. In one particular example, PEP8 is selected from the group consisting of GXGXR, SXAXR, SXGXH, AXGXH, XGXR, EXGXR, RXGXS, AXGXR, SXGXR, XGXL and XKXS.

[0819] In certain embodiments useful for inducing differentiation of mensenchymal or progenitor stem cells from the adipocyte lineage, regenerating adipose tissues and protecting patients from adipose tissue degeneration-related diseases, conditions, disorders or pathologies, PEP9 is a peptide of general formula AA¹-AA²-AA³-AA⁴-AA⁵-AA⁶-AA⁷-PEP5; wherein PEP5 is a peptide of formula PEP3-AA¹¹-AA¹²; wherein PEP3 is selected from the group consisting of VPT, VPE, APT, TPT, VPA, APV, VPQ and VSQ; wherein AA¹¹ is selected from the group consisting of E, K, Q, R, A, D, G and H, in particular E, K, Q, R, A and D; wherein AA¹² is selected from the group consisting of L, M, T, E, Q and H, in particular selected from the group consisting of L, M and T; wherein AA¹, AA², AA³, AA⁴, and AA⁵ are independently absent or AA^{I} as defined herein; wherein AA⁶ is absent or selected from the group consisting of S, T, C, E, Q, P and R, preferably is selected from the group consisting of C, S and T; wherein AA⁷ is selected from the group consisting of S, T, C, E, Q, P and R, preferably is C or S. In one particular example, PEP9 is selected from the group consisting of KIPKAXXVPTEL, GIPEPXXVPEKM, SIPKAXXVPTEL, HVTKPTXAPTKL, YVPKPXXAPTKL, TVPKPXXAPTQL, AVPKAXXAPTKL, KVGKAXXVPTKL, KASKAXXVPTKL, GSAGPXXTPTKM, AAPASXXVPARL, STPPTXXVPTRL, HVPKPXXAPTKL, RVPSTXXAPVKT, ASAAPXXVPQAL, ASASPXXVSQDL and ASASPXXVPQDL.

[0820] In certain embodiments useful for inducing differentiation of mensenchymal or progenitor stem cells from the adipocyte lineage, regenerating adipose tissues and protecting patients from adipose tissue degeneration-related diseases, conditions, disorders or pathologies, PEP10 is a peptide of general formula PEP6-AA³³-AA³⁴-AA³⁵-AA³⁶-AA³⁷-AA³⁸; wherein PEP6 is a peptide of formula AA²⁶-AA²⁷-AA²⁸-AA²⁹-PEP4; wherein PEP4 is selected from the group consisting of VVE, TVE, VVR, VVK, VAE, AVS, VVD, VEE, VRS and VKS; wherein AA²⁶ is absent or selected from the group consisting of AA^{III} amino acids, preferably is absent or E; wherein AA²⁷ and AA²⁸ are independently selected from the group consisting of AA^{III} and AA^{V} amino acids, preferably AA²⁷ is selected from the group consisting of D, E, N, G and M, preferably AA²⁸ is selected from the group consisting of M, I and V; wherein AA²⁹ is absent or selected from the group consisting of AA^{II} amino acids, preferably absent or S; wherein AA³³ is absent or is selected from the group consisting of AA^{I} amino acids at the exception of AA¹ amino acids; AA³⁴ is absent or is selected from the group consisting of AA^{III} and AA^{IV} amino acids; wherein AA³⁵ is absent or is selected from the group consisting of AA^{II} amino acids, preferably is S or C; wherein AA³⁶ is absent or is selected from the group consisting of AA^{III} and AA^{IV} amino acids; wherein AA³⁷ is absent or is selected from the group consisting of AA^{II} amino acids, preferably is S or C; wherein AA³⁸ is absent or is selected from the group consisting of AA^{I}. In one particular example, PEP10 is selected from the group consisting of DMVVEGXGXR, NMTVESXAXR, EMVVEGXGXR, NMVVRSXGXH, NMVVRSXGXH, NMVVRAXGXH, NMVVKAXGXH, EGMSVAEXGXR, GMAVSEXGXR, GMVVDRXGXS, DMVVEAXGXR, DMVVESXGXR, NMVVRSXGXH, MIVEEXGXL, MIVRSXKXS, MIVKSXKXS and MVVKSXKXS.

[0821] In certain embodiments useful for inducing differentiation of mensenchymal or progenitor stem cells from the adipocyte lineage, regenerating adipose tissues and protecting patients from adipose tissue degeneration-related diseases, conditions, disorders or pathologies, PEP12 is a peptide of general formula PEP1-AA¹⁷-PEP11; wherein AA¹⁷ is selected from the group consisting of G, A, V, L, I, P, F, M, W, T and S (in particular is selected from the group consisting of M, V and T); wherein PEP1 is SAIS or NAIS.

[0822] In certain embodiments useful for inducing differentiation of mensenchymal or progenitor stem cells from the adipocyte lineage, regenerating adipose tissues and protecting patients from adipose tissue degeneration-related diseases, conditions, disorders or pathologies, PEP11 is a peptide with 3 amino acids of general formula AA¹⁸-AA¹⁹-AA²⁰; wherein AA¹⁸ is selected from the group consisting of L, V, Q, A and R, in particular is L; wherein AA¹⁹ is selected from the group consisting of F, W, H and Y (in particular is a polar aromatic amino acid such as Y); wherein AA²⁰ is selected from the group consisting of L, F, Y, K, I, V and M, in particular is L or F. In one particular example, PEP11 is LYL or LYF. The definitions of “PEP” pairs, quadruplets, hexaplets and heptuplet e.g. PEP1:PEP2, PEP12:PEP2, or PEP7:PEP5:PEP12:LINKER:PEP2:PEP6:PEP8, useful for inducing differentiation of mensenchymal or progenitor stem cells from the adipocyte lineage, regenerating adipose tissues and protecting patients from adipose tissue degeneration-related diseases, conditions, disorders or pathologies, are as already defined herein to the extent that PEP1 to PEP12 are particularly useful for these applications. For instances:

[0823] In certain embodiments useful for inducing differentiation of mensenchymal or progenitor stem cells from the adipocyte lineage, regenerating adipose tissues and protecting patients from adipose tissue degeneration-related diseases, conditions, disorders or pathologies, the pair PEP1:PEP2 is SAIS:LKNYQ or NAIS:LKKYR.

[0824] In certain embodiments useful for inducing differentiation of mensenchymal or progenitor stem cells from the adipocyte lineage, regenerating adipose tissues and protecting patients from adipose tissue degeneration-related diseases, conditions, disorders or pathologies, the pair PEP12:PEP2 is SAIS-AA¹⁷-LYL:LKNYQ or NAIS-AA¹⁷-LYF:LKKYR; wherein AA¹⁷ is selected from the group consisting of G, A, V, L, I, P, F, M, W, T and S (in particular is selected from the group consisting of M, V and T).

[0825] In certain embodiments useful for inducing differentiation of mensenchymal or progenitor stem cells from the adipocyte lineage, regenerating adipose tissues and protecting patients from adipose tissue degeneration-related diseases, conditions, disorders or pathologies, PEP3 is selected from the group consisting of VPT, VPE, APT, TPT, VPA, APV, VPQ and VSQ; PEP4 is selected from the group consisting of VVE, TVE, VVR, VVK, VAE, AVS, VVD, VEE, VRS and VKS; and wherein the pair PEP3:PEP4 is selected from the group consisting of VPT:VVE, VPE:TVE, APT:VVR, APT:VVK, VPT:VAE, VPT:AVS, TPT:VVD, VPA:VVE, APV:VEE, VPQ:VRS, VSQ:VKS and VPQ:VKS.

[0826] In certain embodiments useful for inducing differentiation of mensenchymal or progenitor stem cells from the adipocyte lineage, regenerating adipose tissues and protecting patients from adipose tissue degeneration-related diseases, conditions, disorders or pathologies, PEP5 is selected from the group consisting of VPTEL, VPEKM, APTKL, APTQL, VPTKL, TPTKM, VPARL, VPTRL, APVKT, VPQAL, VSQDL and VPQDL; PEP6 is selected from the group consisting of DMVVE, NMTVE, EMVVE, NMVVR, NMVVK, EGMSVAE, GMAVS, GMVVD, DMVVE, MIVEE, MIVRS, MIVKS and MVVKS; and wherein the pair PEP5:PEP6 is selected from the group consisting of VPTEL:DMVVE, VPEKM:NMTVE, VPTEL:EMVVE, APTKL:NMVVR, APTQL:NMVVR, APTKL:NMVVK, VPTKL:EGMSVAE, VPTKL:GMAVS, TPTKM:GMVVD, VPARL:DMVVE, VPTRL:DMVVE, APVKT:MIVEE, VPQAL:MIVRS, VSQDL:MIVKS and VPQDL:MVVKS.

[0827] In certain embodiments useful for inducing differentiation of mensenchymal or progenitor stem cells from the adipocyte lineage, regenerating adipose tissues and protecting patients from adipose tissue degeneration-related diseases, conditions, disorders or pathologies, PEP7 is selected from the group consisting of KIPKAXX, GIPEPXX, SIPKAXX, HVTKPTX, YVPKPXX, TVPKPXX, AVPKAXX, KVGKAXX, KASKAXX, GSAGPXX, AAPASXX, STPPTXX, HVPKPXX, RVPSTXX, ASAAPXX and ASASPXX; wherein PEP8 is selected from the group consisting of GXGXR, SXAXR, SXGXH, AXGXH, XGXR, EXGXR, RXGXS, AXGXR, SXGXR, XGXL and XKXS; and wherein the pair PEP7:PEP8 is selected from the group consisting of KIPKAXX:GXGXR, GIPEPXX:SXAXR, SIPKAXX:GXGXR, HVTKPTX:SXGXH, YVPKPXX:SXGXH, TVPKPXX:AXGXH, AVPKAXX:AXGXH, KVGKAXX:XGXR, KASKAXX:EXGXR, GSAGPXX:RXGXS, AAPASXX:AXGXR, STPPTXX:SXGXR, HVPKPXX:SXGXH, RVPSTXX:XGXL, ASAAPXX:XKXS and ASASPXX:XKXS.

[0828] In certain embodiments useful for inducing differentiation of mensenchymal or progenitor stem cells from the adipocyte lineage, regenerating adipose tissues and protecting patients from adipose tissue degeneration-related diseases, conditions, disorders or pathologies, PEP9 is selected from the group consisting of KIPKAXXVPTEL, GIPEPXXVPEKM, SIPKAXXVPTEL, HVTKPTXAPTKL, YVPKPXXAPTKL, TVPKPXXAPTQL, AVPKAXXAPTKL, KVGKAXXVPTKL, KASKAXXVPTKL, GSAGPXXTPTKM, AAPASXXVPARL, STPPTXXVPTRL, HVPKPXXAPTKL, RVPSTXXAPVKT, ASAAPXXVPQAL, ASASPXXVSQDL and ASASPXXVPQDL; PEP10 is selected from the group consisting of DMVVEGXGXR, NMTVESXAXR, EMVVEGXGXR, NMVVRSXGXH, NMVVRSXGXH, NMVVRAXGXH, NMVVKAXGXH, EGMSVAEXGXR, GMAVSEXGXR, GMVVDRXGXS, DMVVEAXGXR, DMVVESXGXR, NMVVRSXGXH, MIVEEXGXL, MIVRSXKXS, MIVKSXKXS and MVVKSXKXS; and wherein the pair PEP9:PEP10 is selected from the group consisting of KIPKAXXVPTEL:DMVVEGXGXR, GIPEPXXVPEKM:NMTVESXAXR, SIPKAXXVPTEL:EMVVEGXGXR, HVTKPTXAPTKL:NMVVRSXGXH, YVPKPXXAPTKL:NMVVRSXGXH, TVPKPXXAPTQL:NMVVRAXGXH, AVPKAXXAPTKL:NMVVKAXGXH, KVGKAXXVPTKL:EGMSVAEXGXR, KASKAXXVPTKL:GMAVSEXGXR, GSAGPXXTPTKM:GMVVDRXGXS, AAPASXXVPARL:DMVVEAXGXR, STPPTXXVPTRL:DMVVESXGXR, HVPKPXXAPTKL:NMVVRSXGXH, RVPSTXXAPVKT:MIVEEXGXL, ASAAPXXVPQAL:MIVRSXKXS, ASASPXXVSQDL:MIVKSXKXS and ASASPXXVPQDL:MVVKSXKXS.

[0829] In certain embodiments useful for inducing differentiation of mensenchymal or progenitor stem cells from the adipocyte lineage, regenerating adipose tissues and protecting patients from adipose tissue degeneration-related diseases, conditions, disorders or pathologies, PEP5 is selected from the group consisting of VPTEL, VPEKM, APTKL, APTQL, VPTKL, TPTKM, VPARL, VPTRL, APVKT, VPQAL, VSQDL and VPQDL; PEP6 is selected from the group consisting of DMVVE, NMTVE, EMVVE, NMVVR, NMVVK, EGMSVAE, GMAVS, GMVVD, DMVVE, MIVEE, MIVRS, MIVKS and MVVKS; and wherein the pair PEP5:PEP6 is selected from the group consisting of VPTEL:DMVVE, VPEKM:NMTVE, VPTEL:EMVVE, APTKL:NMVVR, APTQL:NMVVR, APTKL:NMVVK, VPTKL:EGMSVAE, VPTKL:GMAVS, TPTKM:GMVVD, VPARL:DMVVE, VPTRL:DMVVE, APVKT:MIVEE, VPQAL:MIVRS, VSQDL:MIVKS and VPQDL:MVVKS; wherein the pair PEP5:PEP6 is not VPTEL:DMVVE when PEP1 is SAIS and PEP2 is LKNYQ; wherein the pair PEP5:PEP6 is not VPTEL:EMVVE when PEP1 is SAIS and PEP2 is LKNYQ; wherein the pair PEP5:PEP6 is not APTQL:NMVVR when PEP1 is NAIS and PEP2 is LKKYR; and wherein the pair PEP5:PEP6 is not APTKL:NMVVR when PEP1 is NAIS and PEP2 is LKKYR.

[0830] In certain embodiments useful for inducing differentiation of mensenchymal or progenitor stem cells from the adipocyte lineage, regenerating adipose tissues and protecting patients from adipose tissue degeneration-related diseases, conditions, disorders or pathologies, PEP9 is selected from the group consisting of KIPKAXXVPTEL, GIPEPXXVPEKM, SIPKAXXVPTEL, HVTKPTXAPTKL, YVPKPXXAPTKL, TVPKPXXAPTQL, AVPKAXXAPTKL, KVGKAXXVPTKL, KASKAXXVPTKL, GSAGPXXTPTKM, AAPASXXVPARL, STPPTXXVPTRL, HVPKPXXAPTKL, RVPSTXXAPVKT, ASAAPXXVPQAL, ASASPXXVSQDL and ASASPXXVPQDL; PEP10 is selected from the group consisting of DMVVEGXGXR, NMTVESXAXR, EMVVEGXGXR, NMVVRSXGXH, NMVVRSXGXH, NMVVRAXGXH, NMVVKAXGXH, EGMSVAEXGXR, GMAVSEXGXR, GMVVDRXGXS, DMVVEAXGXR, DMVVESXGXR, NMVVRSXGXH, MIVEEXGXL, MIVRSXKXS, MIVKSXKXS and MVVKSXKXS; and wherein the pair PEP9:PEP10 is selected from the group consisting of KIPKAXXVPTEL:DMVVEGXGXR, GIPEPXXVPEKM:NMTVESXAXR, SIPKAXXVPTEL:EMVVEGXGXR, HVTKPTXAPTKL:NMVVRSXGXH, YVPKPXXAPTKL:NMVVRSXGXH, TVPKPXXAPTQL:NMVVRAXGXH, AVPKAXXAPTKL:NMVVKAXGXH, KVGKAXXVPTKL:EGMSVAEXGXR, KASKAXXVPTKL:GMAVSEXGXR, GSAGPXXTPTKM:GMVVDRXGXS, AAPASXXVPARL:DMVVEAXGXR, STPPTXXVPTRL:DMVVESXGXR, HVPKPXXAPTKL:NMVVRSXGXH, RVPSTXXAPVKT:MIVEEXGXL, ASAAPXXVPQAL:MIVRSXKXS, ASASPXXVSQDL:MIVKSXKXS and ASASPXXVPQDL:MVVKSXKXS; wherein the pair PEP9:PEP10 is not KIPKAXXVPTEL:DMVVEGXGXR when PEP1 is SAIS and PEP2 is LKNYQ; wherein the pair PEP9:PEP10 is not SIPKAXXVPTEL:EMVVEGXGXR when PEP1 is SAIS and PEP2 is LKNYQ; wherein the pair PEP9:PEP10 is not HVTKPTXAPTKL:NMVVRSXGXH when PEP1 is NAIS and PEP2 is LKKYR; wherein the pair PEP9:PEP10 is not YVPKPXXAPTKL:NMVVRSXGXH when PEP1 is NAIS and PEP2 is LKKYR; wherein the pair PEP9:PEP10 is not TVPKPXXAPTQL:NMVVRAXGXH when PEP1 is NAIS and PEP2 is LKKYR; and wherein the pair PEP9:PEP10 is not HVPKPXXAPTKL:NMVVRSXGXH when PEP1 is NAIS and PEP2 is LKKYR.

[0831] In certain embodiments useful for inducing differentiation of mensenchymal or progenitor stem cells from the adipocyte lineage, regenerating adipose tissues and protecting patients from adipose tissue degeneration-related diseases, conditions, disorders or pathologies, PEP1 is SAIS or NAIS; PEP11 is LYL or LYF; and the pair PEP1:PEP11 is SAIS:LYL or NAIS:LYF.

[0832] In one aspect, the present disclosure provides a cyclic GFR-binding compound, wherein said cyclic GFR-binding compound is a cyclic peptide, a variant or analog thereof, or a cyclic peptidomimetic as defined herein, with between 15-60 (in particular between 15-55, more particularly between 19-60, and even more particularly between 19-55) amino acids, or between 15-35 (in particular between 15-30, more particularly between 19-35, and even more particularly between 19-30) amino acids, comprising a peptide with four amino acids (PEP1) or a peptide with eight amino acids (PEP12), a peptide with five amino acids (PEP2), and optionally a pair of peptides selected form the group consisting of PEP3:PEP4, PEP3:PEP6, PEP3:PEP10, PEP5:PEP4, PEP9:PEP4, PEP5:PEP6, PEP5:PEP10, PEP9:PEP6 and PEP9:PEP10; wherein said cyclic GFR-binding compound does not comprise the pair of peptides VPTEL:DMVVE when PEP1 is SAIS and PEP2 is LKNYQ; wherein said cyclic GFR-binding compound does not comprise the pair of peptides VPTEL:EMVVE when PEP1 is SAIS and PEP2 is LKNYQ; wherein said cyclic GFR-binding compound does not comprise the pair of peptides APTQL:NMVVR when PEP1 is NAIS and PEP2 is LKKYR; and wherein said cyclic GFR-binding compound does not comprise the pair of peptides APTKL:NMVVR when PEP1 is NAIS and PEP2 is LKKYR.

[0833] In one aspect, the present disclosure provides a cyclic GFR-binding compound, wherein said cyclic GFR-binding compound is a cyclic peptide, a variant or analog thereof, or a cyclic peptidomimetic as defined herein, with between 15-60 (in particular between 15-55, more particularly between 19-60, and even more particularly between 19-55) amino acids, or between 15-35 (in particular between 15-30, more particularly between 19-35, and even more particularly between 19-30) amino acids, comprising a peptide with four amino acids (PEP1) or a peptide with eight amino acids (PEP12), a peptide with five amino acids (PEP2), and optionally a pair of peptides selected form the group consisting of PEP3:PEP4, PEP3:PEP6, PEP3:PEP10, PEP5:PEP4, PEP9:PEP4, PEP5:PEP6, PEP5:PEP10, PEP9:PEP6 and PEP9:PEP10; wherein said cyclic GFR-binding compound does not comprise the pair of peptides KIPKAXXVPTEL:DMVVEGXGXR when PEP1 is SAIS and PEP2 is LKNYQ; wherein said cyclic GFR-binding compound does not comprise the pair of peptides SIPKAXXVPTEL:EMVVEGXGXR when PEP1 is SAIS and PEP2 is LKNYQ; wherein said cyclic GFR-binding compound does not comprise the pair of peptides HVTKPTXAPTKL:NMVVRSXGXH when PEP1 is NAIS and PEP2 is LKKYR; wherein said cyclic GFR-binding compound does not comprise the pair of peptides YVPKPXXAPTKL:NMVVRSXGXH when PEP1 is NAIS and PEP2 is LKKYR; wherein said cyclic GFR-binding compound does not comprise the pair of peptides TVPKPXXAPTQL:NMVVRAXGXH when PEP1 is NAIS and PEP2 is LKKYR; and wherein said cyclic GFR-binding compound does not comprise the pair of peptides HVPKPXXAPTKL:NMVVRSXGXH when PEP1 is NAIS and PEP2 is LKKYR.

[0834] In certain embodiments useful for inducing differentiation of mensenchymal or progenitor stem cells from the adipocyte lineage, regenerating adipose tissues and protecting patients from adipose tissue degeneration-related diseases, conditions, disorders or pathologies, said cyclic GFR-binding compound is a synthetic molecule as defined herein in the definition section.

[0835] In certain embodiments useful for inducing differentiation of mensenchymal or progenitor stem cells from the adipocyte lineage, regenerating adipose tissues and protecting patients from adipose tissue degeneration-related diseases, conditions, disorders or pathologies, said cyclic GFR-binding compound is a synthetic peptide, or a variant or analog thereof, or a cyclic peptidomimetic.

[0836] Tissue Closure

[0837] In certain embodiments useful for promoting tissue closure, the choice of PEP1, PEP2, PEP3, PEP4, PEP5, PEP6, PEP7, PEP8, PEP9, PEP10, PEP12, PEP11 and AA¹⁷ will depend on the type of specific tissue closure to be performed and may include any of the suitable amino acids, peptides, analog or variant thereof, or peptidomimetic, already disclosed herein with respect to the bone, cartilage, vascular, wound healing, neuronal, eye-retinal, kidneys, liver, L/T and skin applications. For instance, in certain embodiments, during bone repair surgery, different layers of tissue such as skin, muscle and blood vessel are incised in order to reach the damaged bone part. Thus, suitable PEP1, PEP2, PEP3, PEP4, PEP5, PEP6, PEP7, PEP8, PEP9, PEP10, PEP12, PEP11 and AA¹⁷ for implementing embodiments of the invention in this specific situation may include such amino acids, peptides, analog or variant thereof, or peptidomimetic, already described herein with respect to skin, muscle, vascular and bone tissue regeneration/formation and cell migration. Likewise, for example, in certain embodiments, during heart surgery, different layers of tissue such as skin, muscle and blood vessel, are incised in order to reach the patient's heart. Thus, suitable PEP1, PEP2, PEP3, PEP4, PEP5, PEP6, PEP7, PEP8, PEP9, PEP10, PEP12, PEP11 and AA¹⁷ for implementing embodiments of the invention in this specific situation include such amino acids, peptides, analog or variant thereof, or peptidomimetic, already described herein with respect to the skin, muscle and blood vessel tissue regeneration/formation and cell migration.

[0838] Interactions

[0839] Cyclic GFR-binding compounds may form at least one intramolecular non-covalent interaction. Such interactions may be one of electrostatic interactions, π-interactions, van der Waals forces, hydrophobic interactions or any combinations thereof. Such interactions may be formed between 2 or more amino acids' side chains, between 2 or more amino acids' backbones or between amino acids' side chains and backbones. Such interactions may increase the stability of the cyclic GFR-binding compounds in vitro and/or in vivo thus reducing or preventing physiological degradation. In one example, cyclic GFR-binding compounds may form at least one, preferably more than one, of the following intramolecular non-covalent interactions: AA²⁰///AA²⁰⁶, AA¹⁹///AA²⁰⁷, AA¹⁸///AA²¹, AA¹⁷///AA²², AA¹⁶///AA²³, AA¹⁵///AA²⁴, AA¹⁵///AA²⁵, wherein /// represents a non-covalent interaction.

### III. Bioactive Carriers

[0840] The present invention may achieve its intended therapeutic and/or cosmetic action(s) e.g. through efficient tissue induction, by functional combination (or association) with a bioactive carrier. In one example, said cyclic GFR-binding compound and said bioactive carrier are thus operably associated, combined, linked or connected as defined herein and thus may form a pharmaceutical, dermatological, prophylactic, diagnostic, imaging or cosmetic association or combination for uses and methods as defined herein.

[0841] As may be used herein, the term “bioactive carrier”, “biocompatible carrier”, “bioactive material”, “biocompatible material”, “bioactive substance”, “bio-substance”, “biocompatible substance”, are used interchangeably.

[0842] A suitable bioactive carrier is compatible with living cells, tissues, organs or systems posing little to no risk of injury, toxicity or rejection by the immune system. Bioactive carriers suitable for implementing embodiments of the present invention include, but are not limited to, (a) a biopolymer such as (a1) collagen, (a2) fibrin; (b) a synthetic polymer such as (b1) ultra-high molecular weight polyethylene (UHMWPE), (b2) polyurethane (PE), (b3) polyurethane (PU), (b4) polytetrafuoroethylene (PTFE), (b5) polyacetal (PA), (b6) polymethylmethacrylate (PMMA), (b7) polyethylene terepthalate (PET), (b8) silicone rubber (SR), (b9) polyetheretherketone (PEEK), (b10) poly(lactic acid) (PLA), (b11) polysulfone (PS), (b12) PLLA, (b13) PLGA or (b14) PLDA; (c) metals and metal oxides such as (c1) gold and gold alloys, (c2) silver and silver alloys, (c3) platinum and platinum alloys, (c4) tantalum, (c5) Ti6Al4V, (c6) 316L stainless steel, (c7) Co—Cr Alloys, (c8) titanium alloys such as such as □-type, β-type, □+□-type Ti alloy, Ti—Nb alloys such as Ti29Nb13Ta4.6Zr or Ti35Nb4Sn); (d) metallic glasses; (e) amorphous alloys such as Zr-based alloys; (f) porous metals such as the ones reported in Ryan et al., 2006, Biomaterials, 27, 2651; Lopez-Heredia et al. 2008, Biomaterials, 29, 2608; Ryan et al., 2008, Biomaterials, 29, 3625; Li et al., 2007, Biomaterials, 28, 2810; or Hollander et al., 2006, Biomaterials, 27, 955; all being incorporated herein in their entirety; (g) gel or solid ceramics such as (g1) alumina, (g2) zirconia, (g3) carbon, (g4) titania, (g5) bioglass, or (g6) hydroxyapatite (HA); (h) composites such as (h1) silica/SR, (h2) CF/UHMWPE, (h3) CF/PTFE, (h4) HA/PE, (h5) CF/epoxy, (h6) CF/PEEK, (h7) CF/C or (h8) Al₂O₃/PTFE; (i) hydrogels such as (i1) polyisocyanopeptide hydrogels such as oligo(ethylene)glycol polyisocyanopeptides as described, for instance, in Van Buul, et al.; Chem. Sci. 4, 2357-2363 (2013), incorporated herein by reference in its entirety, (i2) polysaccharides such as alginates, chitosans, chitins, guar gums, pectins, gellan gums, heparins, carrageenans, hyaluronans, starches, agars, xanthan gums, methylcellulose, carboxymethylcellulose, hydroxypropyl methyl cellulose, (i3) polyglycols such as polyethyleneglycol or polypropyleneglycol, (i4) polyvinylpyrrolidone, (i5) poly(vinylalcohol), (i6) polyacrylic acids, (i7) glycerophosphates, (i8) 2-acrylamido-2-methylpropanesuIfonic acid, (i9) polyphosphazenes; (j) other suitable materials such as demineralized bone matrix; and any combinations thereof.

[0843] Suitable sources of bioactive carriers for implementing embodiments of the present invention include, but are not limited to, autographs, allographs, xenographs, plants, solutions, excipients, ceramics, metals, metal alloys, organic and inorganic polymers, bioglasses, carbon-containing structures, or combination thereof.

[0844] Particularly suitable as bioactive carriers for implementing embodiments of the present invention include bioactive carriers comprising at least one naturally occurring hydroxyl group on at least one surface thereof and bioactive carriers which do not naturally comprise at least one hydroxyl group on a surface thereof but which have been modified using conventional surface treatment techniques such that at least one hydroxyl group is present on a surface of the bioactive carrier. In one example, said hydroxyl group is an available hydroxyl group i.e. it is not prevented from interacting and/or reacting with a compound of the present disclosure. Suitable as bioactive carriers naturally containing hydroxyl groups on a surface thereof for implementing embodiments of the invention specifically include metal oxides such as titanium oxides and non-metal oxides such ceramics. Also suitable as bioactive carriers for implementing embodiments of the invention include bioactive carriers comprising at least one naturally occurring carboxylate group (—COOH) or amine group (—NH₂) on at least one of a surface thereof and bioactive carriers which do not naturally comprise at least one carboxylate group (—COOH) or amine group (—NH₂) onto a surface thereof but which have been modified using conventional surface treatment techniques such that at least one carboxylate group (—COOH) or amine group (—NH₂) is present on a surface of the bioactive carrier.

[0845] In one example, said bioactive carrier includes a biomaterial. Suitable biomaterials for implementing certain embodiments of the present disclosure may be derived from nature or synthesized in the laboratory using a variety of chemical approaches utilizing metallic components, polymers, ceramics or composite materials. They are often used and/or adapted for a medical application, and thus comprise whole or part of a living structure or biomedical device. Suitable biomaterials for implementing certain embodiments of the present disclosure are commonly used in joint replacements, bone plates, bone cement, artificial ligaments and tendons, dental implants for tooth fixation, blood vessel prostheses, heart valves, skin repair devices (artificial tissue), cochlear replacements, contact lenses, breast implants, drug delivery mechanisms, sustainable materials, vascular grafts, stents, nerve conduits. Particularly suitable biomaterials for implementing certain embodiments of the present disclosure such as metals and alloys (pages 94-95), ceramics (pages 95-97), polymeric biomaterials (pages 97-98) and biocomposite materials (pages 98-99) are described in Nitesh et al., International Journal of Emerging Technology and Advanced Engineering, ISSN 2250-2459, Volume 2, Issue 4, 2012, which is herein incorporated by reference in its entirety.

[0846] In one particular example, said bioactive carrier is a biomaterial.

[0847] In certain embodiments, particularly suitable bioactive carriers are selected from the group consisting of bioinert biomaterials, bioactive biomaterials and bioresorbable biomaterials.

[0848] The nature of the biomaterial is an important parameter. Particularly good results have been obtained using bioactive carriers composed mostly with the main material component of the tissue to be regenerated and/or repaired. This generally allows for a better integration of the bioactive carrier, a better resorption from the surrounding cells already present and therefore a better regeneration or repair of the targeted tissue to be achieved. For example, it was discovered that particularly good results may be obtained when a solid ceramic component (granulated ceramic powder or ceramic scaffolds) or a gel ceramic component is used in combination of a GFR-binding peptide of the present disclosure to regenerate bone and protect from osteoporosis. For example, it was also discovered that particularly good results may be obtained when collagen, in particular collagen types I, II, III and XI, is used in combination of a GFR-binding peptide of the present disclosure to regenerate cartilage. For example, it was also discovered that particularly good results may be obtained when collagen, in particular collagen types I and III, or a biodegradable hydrogel is used in combination of a GFR-binding peptide of the present disclosure to regenerate muscle, skin, tendons and ligaments. For example, it was also discovered that particularly good results may be obtained when a collagen or a biodegradable hydrogel is used in combination of a GFR-binding peptide of the present disclosure to regenerate tissues and/or functions of vascular, neuron, eye retina, renal, wound healing, hair, fertility and reproduction, lung, and adipose tissues.

[0849] Bioinert biomaterials: As used herein, unless indicated otherwise or contradictory in context, the term “bioinert biomaterials” refers to any material that once placed in the human body has minimal interaction with its surrounding tissue. Examples of these are stainless steel, titanium, alumina, partially stabilised zirconia, and ultra-high molecular weight polyethylene. Generally a fibrous capsule might form around bioinert implants hence its biofunctionality relies on tissue integration through the implant. Bioactive biomaterial: As used herein, unless indicated otherwise or contradictory in context, the term “bioactive biomaterial” refers to a material which, upon being placed within the human body, interacts with the surrounding bone and in some cases, even soft tissue. This occurs through a time-dependent kinetic modification of the surface, triggered by their implantation within the living bone. An ion-exchange reaction between the bioactive implant and surrounding body fluids, results in the formation of a biologically active carbonate apatite (CHAp) layer on the implant that is chemically and crystallographically equivalent to the mineral phase in bone. Examples of these materials are synthetic hydroxyapatite [Ca₁₀(PO₄)₆(OH)₂], glass ceramic A-W and Bioglass®.

[0850] Bioresorbable Biomaterials: As used herein, unless indicated otherwise or contradictory in context, the term “bioresorbable biomaterials” refers to a material which, upon placement within the human body, starts to dissolve (resorbed) and slowly replaced by advancing tissue (such as bone). Examples of bioresorbable materials include, but are not limited to, tricalcium phosphate [Ca₃(PO₄)₂], polylactic-polyglycolic acid copolymers, calcium oxide, calcium carbonate and gypsum.

[0851] Therefore, no particular limitation should be ascribed to the substance, material or molecule suitable as being bioactive carriers for implementing embodiments of the present invention insofar as said substance, material or molecule is (a) biocompatible as defined herein and (b) combinable or associable with a cyclic GFR-binding compound as defined herein. In one preferred example, said bioactive carrier has a stiffness of at least 5 kPa, more preferably at least 35 kPa and preferably not more than 3 or 5 GPa as measured using conventional Dynamic Mechanical Analysis such as described in details in Gong J P et al., Double-network hydrogels with extremely high mechanical strength, Adv Mater 2003, 15(14), 1155e8, which is incorporated herein by reference.

[0852] In one particular example, a biomaterial as defined herein for use in neuron-related applications has a stiffness comprised between about 0.01 kPa and about 3 kPa, preferably between about 0.01 kPa and about 1 kPa. In one particular example, a biomaterial as defined herein for use in muscle, cartilage and tendon/ligament-related applications has a stiffness comprised between about 3 kPa and about 200 kPa, preferably between about 10 kPa and about 30 kPa. In one particular example, a biomaterial as defined herein for use in bone-related applications has a stiffness comprised between about 30 kPa and about 3 GPa, preferably between about 70 kPa and about 200 kPa for instance in applications such as the treatment or prevention of osteoporosis and bone tissue regeneration. In one particular example, a biomaterial as defined herein for use in hair-related applications has a stiffness comprised between about 0.01 kPa and about 200 kPa, preferably between about 3 kPa and about 70 kPa. In one particular example, a biomaterial as defined herein for use in endothelization-related applications has a stiffness comprised between about 500 kPa and about 2.5 GPa. In one particular example, a biomaterial as defined herein for use in angiogenesis-related applications has a stiffness comprised between about 0.01 kPa and about 100 kPa. In one particular example, a biomaterial as defined herein for use in wound healing and skin-related applications has a stiffness comprised between about 0.01 kPa and about 70 kPa.

[0853] Available hydroxyl groups: As used herein, unless indicated otherwise or contradictory in context, the term “free hydroxyl” or “available hydroxyl” means an hydroxyl group, which may be —OH or a radical (—O.) or an anion (—O—) fully or partially ionised, which is able to/free to act as a nucleophile in a reaction with an electrophile such as compound (A) or compound (B) defined below.

[0854] Available hydroxyl-containing surface: As used herein, unless indicated otherwise or contradictory in context, the term “available hydroxyl-containing surface” or “free hydroxyl-containing surface” means a surface containing at least one free or available hydroxyl group as defined herein.

[0855] Ceramics: As used herein, unless indicated otherwise or contradictory in context, the term “ceramic” refers to an inorganic material with a high melting point, above 1000° C. Most typically, materials ref erred to as “ceramics” are obtained by a process in which raw material solid particles are heated in order to sinter them. Materials referred to as “ceramics” may broadly be split into two groups, these being “oxide ceramics” and “non-oxide ceramics”. “Oxide ceramics” include, but are not limited to, alkaline earth oxides such as MgO and BaO, Al₂O₃ and aluminates, TiO₂ and titanates, ZrO₂ and zirconates, silicates such as clays and clay-derived materials. Since the term “ceramics” may encompass crystalline, partially amorphous and fully amorphous materials, the term “oxide ceramics” may also be interpreted as covering fully amorphous silicate glasses. “Non-oxide ceramics” include, but are not limited to, carbides and nitrides, and also borides and silicides, for example silicon carbide and silicon nitride, and also metal carbides and nitrides. In one particular example, solid ceramics e.g. in granulated powder or as a scaffold, is used as a bioactive carrier in the meaning of the present disclosure in bone-related applications. In one particular example, gel ceramics is used as a bioactive carrier in the meaning of the present disclosure in bone-related applications.

[0856] Metal oxides: As used herein, unless indicated otherwise or contradictory in context, the term “metal oxide” means a chemical compound that contains at least one oxygen atom and one other element in its chemical formula. Metal oxides typically contain an anion of oxygen in the oxidation state of −2. They can be obtained by hydrolysis or air/oxygen oxidation. Examples of such metal oxides are titanium oxides (e.g. TiO, Ti₂O₃, TiO₂), silicon oxide (SiO₂), aluminum oxide (Al₂O₃), iron (II, III) oxides such as Fe₂O₃, and zinc oxide (ZnO).

[0857] Biopolymer: As used herein, unless indicated otherwise or contradictory in context, the term “biopolymer” refers to a polymer produced by living organisms and includes, but is not limited to, polypeptides and proteins (such as collagen and fibrin), polysaccharides (such as cellulose, starch, chitin and chitosan), nucleic acids (such as DNA and RNA), and hydrides thereof.

[0858] Hydrogel: As used herein, unless indicated otherwise or contradictory in context, the term “hydrogel” refers to “Hydrogel” refers to a class of polymeric materials which are swollen in an aqueous medium, but which do not dissolve in water. Hydrogels are highly absorbent (they can contain over 99% water) natural or synthetic polymers. Hydrogels also possess a degree of flexibility very similar to natural tissue, due to their significant water content. U.S. Pat. No. 6,475,516, for example, provides hydrogels being covalently bound to the surface of an in-dwelling medical device such as an implant, which may be functionalized with a GFR-binding compound of the present disclosure using, for instance, a process as described herein. In one particular example, biodegradable hydrogels are used as bioactive carriers in the meaning of the present disclosure.

[0859] Collagen: As used herein, unless indicated otherwise or contradictory in context, the term “collagen” refers to the main structural protein of the various connective tissues in animals which is mostly found in fibrous tissues such as tendons, ligaments and skin, and is also abundant in corneas, cartilage, bones, blood vessels, the gut, and intervertebral discs. Collagen is typically composed of a triple helix and generally contains high hydroxyproline content. The most common motifs in its amino acid sequence glycine-proline-X and glycine-X-hydroxyproline, where X is any amino acid other than glycine, proline or hydroxyproline. 28 types of collagen have been identified and described in the literature, which are all presently contemplated to be suitable for implementing embodiments of the invention. The five most common types are: Collagen I which may be found in skin, tendon, vascular ligature, organs, bone (main component of the organic part of bone); Collagen II which may be found in cartilage (main component of cartilage); Collagen III which may be found in reticulate (main component of reticular fibers); Collagen IV which may be found in the basal lamina, the epithelium-secreted layer of the basement membrane; Collagen V which may be found on cell surfaces, hair and placenta. For example, in certain embodiments, suitable collagens for implementing embodiments of the present invention particularly include collagen type-I and type-IV. In one particular example, collagen, in particular collagen types I, II, III and XI, is used as a bioactive carrier in the meaning of the present disclosure in cartilage-related applications. In one particular example, collagen, in particular collagen types I and III, is used as a bioactive carrier in the meaning of the present disclosure in muscle-related applications, skin-related applications, and T/L-related applications. In one particular example, any type of collagen is used as a bioactive carrier in the meaning of the present disclosure in vascular, neuron, eye retina, renal, wound healing, hair, fertility and reproduction, lung, adipose-related applications.

[0860] In certain embodiments, said association, combination, linkage or connection between said cyclic GFR-binding compound and a bioactive carrier may occur via a bioactive carrier-affinity-containing group as defined herein.

### IV. Bioactive Carrier-Affinity-Containing Group (BCAC Group)

[0861] In one aspect, the present disclosure provides a cyclic GFR-binding compound as already defined herein modified or functionalised with at least one bioactive carrier-affinity-containing group. Said at least one bioactive carrier-affinity-containing group provides said cyclic GFR-binding compound with the ability to, covalently or non-covalently, interact with, or be connected to, a bioactive carrier as defined herein (in particular, a biomaterial as defined herein).

[0862] In such embodiments where affinity is required via covalent interaction or binding, said bioactive carrier-affinity-containing group may be a thiol (SH)-containing group or a cysteine-containing group, in particular, a thiol (SH)-containing peptide or a cysteine-containing peptide. In such embodiments where affinity is required via covalent interaction or binding, said bioactive carrier-affinity-containing group may particularly be a cysteine.

[0863] In such embodiments where affinity is required via non-covalent interaction or binding, said bioactive carrier-affinity-containing group may comprise (or be) a peptide group such as any one of the peptide groups disclosed in US patent application No. 2008/0268015 A1, which is hereby incorporated by reference in its entirety. In particular, peptides containing amino acid sequences rich in large aromatic amino acid residues (aromatic amino acid-containing peptides or peptidomimetics) that include one or more of Phe, Trp, Tyr such as SEQ ID NO: 1 to 45 described in US 2008/0268015 A1 are suitable as a biomaterial-affinity-containing fragment for implementing embodiments of the present invention. Said fragment may also be a peptide fragment such as any one of the peptide fragments disclosed in U.S. Pat. No. 6,818,620 B2, which is hereby incorporated by reference in its entirety. In particular, peptides of SEQ ID NO: 1 to 7 described in U.S. Pat. No. 6,818,620 B2 are suitable as a biomaterial-affinity-containing fragment for implementing embodiments of the present invention.

[0864] In one particular example, said bioactive carrier-affinity-containing group is a bioactive carrier high-affinity-containing group such as a biomaterial high-affinity-containing group.

[0865] In certain embodiments, said bioactive carrier-affinity-containing group has some affinity (preferably high affinity) with a given bioactive carrier (in particular, a biomaterial) such as collagen, apatite, titanium or any of those listed in e.g. US patent application No. 2008/0268015 A1, which is incorporated herein by reference. For instance, a group having some affinity with a biomaterial is any group capable to non-covalently interact/bind to a biomaterial with an affinity/specificity selected from at least 10%, at least 20%, at least 30%, at least 40%, at least 50%, at least 60%, at least 70%, at least 80%, at least 90%, at least 100%, at least 200%, at least 300%, at least 400%, at least 500%, or a higher percentage, with respect to an affinity where said group binds to an appropriate control such as, for example, a different material or surface, or a protein typically used for such comparisons such as bovine serum albumin. In one example, a biomaterial-affinity-containing group has a binding specificity that is characterized by a relative binding affinity as measured by an EC50 of 10 □M or less, and in certain embodiments, less than 1 □M. In certain embodiments, a relative affinity comprised between 1 pM and 100 □M, between 1 pM and 10 □M, or between 1 pM and 1 □M is particularly suitable. The EC50 is determined using any number of methods known in the art. In this case, the EC50 represents the concentration of fragment producing 50% of the maximal binding observed for that fragment in the assay.

[0866] In one particular example, said bioactive carrier-affinity-containing group is selected from the group consisting of GTPGP, which may preferably non-covalently interact with a bioactive carrier such as an apatite, and WWFWG, which may preferably non-covalently interact with a bioactive carrier such as a collagen.

### V. Modified Cyclic GFR-Binding Compound

[0867] Thus, in one aspect, the present disclosure provides a modified cyclic GFR-binding compound comprising a cyclic GFR-binding compound as defined in the present disclosure and a bioactive carrier-affinity-containing group.

[0868] For example, in certain embodiments, the present disclosure provides a modified cyclic GFR-binding compound comprising a cyclic GFR-binding compound as defined in the present disclosure and a bioactive carrier-affinity-containing group; wherein said bioactive carrier-affinity-containing group is selected from the group consisting of a thiol-containing group (in particular, a thiol-containing peptide), a cysteine-containing group (in particular, a cysteine-containing peptide and more particularly, a cysteine), and an aromatic amino acid-containing peptide or peptidomimetic.

[0869] For example, in certain embodiments, the present disclosure provides a modified cyclic GFR-binding compound comprising a cyclic GFR-binding compound and a bioactive carrier-affinity-containing group; wherein said cyclic GFR-binding compound is a cyclic peptide, a variant or analog thereof, or a cyclic peptidomimetic as defined herein, with (comprising, or exclusively consisting of, or constituted of) between 15-60 amino acids, in particular between 15-55 amino acids, more particularly between 19-60 amino acids, and even more particularly between 19-55 amino acids, or between 15-35 amino acids, in particular between 15-30 amino acids, more particularly between 19-35 amino acids, and even more particularly between 19-30 amino acids; comprising a peptide with four amino acids (PEP1) selected from the group consisting of SAIS, SSLS, NAIS, SATS, SPIS, EPIS, SPIN, KPLS, EPLP, EPLT, SNIT, RSVK and RPVQ; and a peptide with five amino acids (PEP2) selected from the group consisting of LKNYQ, LKVYP, LKKYR, LRKHR, LKYHY, KFKYE, YGKIP, YKQYE, DHHKD, EQLSN, IGEMS, LGEMS, KEVQV and KKATV; wherein said bioactive carrier-affinity-containing group is selected from the group consisting of a thiol-containing group (in particular, a thiol-containing peptide), a cysteine-containing group (in particular, a cysteine-containing peptide and more particularly, a cysteine), and an aromatic amino acid-containing peptide or peptidomimetic.

[0870] For example, in certain embodiments, the present disclosure provides a modified cyclic GFR-binding compound comprising a cyclic GFR-binding compound and a bioactive carrier-affinity-containing group; wherein said cyclic GFR-binding compound is a cyclic peptide, a variant or analog thereof, or a cyclic peptidomimetic as defined herein, with (comprising, or exclusively consisting of, or constituted of) between 15-60 amino acids, in particular between 15-55 amino acids, more particularly between 19-60 amino acids, and even more particularly between 19-55 amino acids, or between 15-35 amino acids, in particular between 15-30 amino acids, more particularly between 19-35 amino acids, and even more particularly between 19-30 amino acids; comprising a peptide with height amino acids of general formula (PEP12): PEP1-AA¹⁷-PEP11, and a peptide with five amino acids (PEP2) selected from the group consisting of LKNYQ, LKVYP, LKKYR, LRKHR, LKYHY, KFKYE, YGKIP, YKQYE, DHHKD, EQLSN, IGEMS, LGEMS, KEVQV and KKATV; wherein PEP1 is a peptide with four amino acids selected from the group consisting of SAIS, SSLS, NAIS, SATS, SPIS, EPIS, SPIN, KPLS, EPLP, EPLT, SNIT, RSVK and RPVQ; wherein PEP11 is a peptide with 3 amino acids of formula AA¹⁸-AA¹⁹-AA²⁰; wherein AA¹⁷ is selected from the group consisting of G, A, V, L, I, P, F, M, W, T and S (in particular is selected from the group consisting of M, I, L, V and T); wherein AA¹⁸ is selected from the group consisting of L, V, Q, A and R; wherein AA¹⁹ is selected from the group consisting of F, W, H and Y (in particular is an aromatic, polar amino acid such as Y); wherein AA²⁰ is selected from the group consisting of L, F, Y, K, I, V and M; wherein said bioactive carrier-affinity-containing group is selected from the group consisting of a thiol-containing group (in particular, a thiol-containing peptide), a cysteine-containing group (in particular, a cysteine-containing peptide and more particularly, a cysteine), and an aromatic amino acid-containing peptide or peptidomimetic.

[0871] For example, in certain embodiments, the present disclosure provides a modified cyclic GFR-binding compound comprising a cyclic GFR-binding compound and a bioactive carrier-affinity-containing group; wherein said cyclic GFR-binding compound is a cyclic peptide, a variant or analog thereof, or a cyclic peptidomimetic as defined herein, with (comprising, or exclusively consisting of, or constituted of) between 15-60 amino acids, in particular between 15-55 amino acids, more particularly between 19-60 amino acids, and even more particularly between 19-55 amino acids, or between 15-35 amino acids, in particular between 15-30 amino acids, more particularly between 19-35 amino acids, and even more particularly between 19-30 amino acids, comprising a peptide, a variant or analog thereof, or a peptidomimetic having the following general formula (I) (hereinafter may also be referred to as compound (I) or peptide (I)):

PEP(A)-LINKER-PEP(B) (I)

[0872] wherein one end of LINKER interacts covalently with one end of PEP(A); wherein another end of LINKER interacts covalently with one end of PEP(B); wherein PEP(A) comprises PEP1 or PEP12; wherein PEP(B) comprises PEP2; wherein LINKER is a linear or branched organic divalent radical, moiety or compound having a molecular weight (Mw) comprised between about 28 and about 2,000 Da, in particular, between about 300 and about 1000 Da, more particularly between about 300 and about 800 Da; wherein said bioactive carrier-affinity-containing group is covalently or non-covalently attached to PEP(A) or PEP(B); wherein said bioactive carrier-affinity-containing group is selected from the group consisting of a thiol-containing group (in particular, a thiol-containing peptide), a cysteine-containing group (in particular, a cysteine-containing peptide and more particularly, a cysteine), and an aromatic amino acid-containing peptide or peptidomimetic.

[0873] For example, in certain embodiments, the present disclosure provides a modified cyclic GFR-binding compound comprising a cyclic GFR-binding compound and a bioactive carrier-affinity-containing group; wherein said cyclic GFR-binding compound is a cyclic peptide, a variant or analog thereof, or a cyclic peptidomimetic as defined herein, with (comprising, or exclusively consisting of, or constituted of) between 15-60 amino acids, in particular between 15-55 amino acids, more particularly between 19-60 amino acids, and even more particularly between 19-55 amino acids, or between 15-35 amino acids, in particular between 15-30 amino acids, more particularly between 19-35 amino acids, and even more particularly between 19-30 amino acids, comprising a peptide, a variant or analog thereof, or a peptidomimetic having the following general formula (II) (hereinafter may also be referred to as compound (II) or peptide (II)):

PEP(C)-PEP12-LINKER-PEP2-PEP(D) (II)

[0874] wherein LINKER is a linear or branched organic divalent radical, moiety or compound having a molecular weight (Mw) comprised between about 28 and about 2,000 Da, in particular, between about 300 and about 1000 Da, more particularly between about 300 and about 800 Da; wherein PEP12 is a peptide with 8 amino acids of formula PEP1-AA¹⁷-PEP11; wherein AA¹⁷, PEP1, PEP2, PEP12 and PEP11 are as already defined herein; wherein one end of PEP(C) interacts covalently with PEP12 via AA¹³; wherein one end of PEP(D) interacts covalently with PEP2 via AA²⁵; wherein one end of LINKER interacts covalently with one end of PEP12 via AA²⁰; wherein another end of LINKER interacts covalently with PEP2 via AA²¹; wherein AA¹³ and AA²¹ may be both N-terminal amino acids or both C-terminal amino acids; wherein AA²⁵ and AA²⁰ may be both N-terminal amino acids or both C-terminal amino acids; wherein PEP(C) is a peptide with at least 5 amino acids, in particular a peptide with between 5 and 12 amino acids; wherein PEP(D) is a peptide with at least 5 amino acids, in particular a peptide with between 5 and 12 amino acids; wherein said bioactive carrier-affinity-containing group is covalently or non-covalently attached to PEP(C) or PEP(D), in particular is covalently or non-covalently attached to PEP3 through AA⁸, PEP4 through AA³², PEP5 through AA⁸, PEP6 through AA³², PEP9 through AA¹, AA², AA³, AA⁴, AA⁵ or AA⁶, or PEP10 through AA³³, AA³⁴, AA³⁵, AA³⁶, AA³⁷ or AA³⁸; wherein said bioactive carrier-affinity-containing group is selected from the group consisting of a thiol-containing group (in particular, a thiol-containing peptide), a cysteine-containing group (in particular, a cysteine-containing peptide and more particularly, a cysteine), and an aromatic amino acid-containing peptide or peptidomimetic.

[0875] In one particular example, said bioactive carrier-affinity-containing group is comprised within said cyclic GFR-binding compound e.g. is comprised in at least one LINKER, or is at least one LINKER. For example, in certain embodiments, said modified cyclic GFR-binding compound may have any one of the following general schematic formulae:

[0876] wherein curved lines represents covalent bonds between LINKERs, PEP1 to PEP12 and AAs “boxes”. Curved lines' lengths may not be representative of the actual relative distance between the LINKERs, PEP1 to PEP12 and AAs.

### VI. Functionalised Bioactive Carriers

[0877] In one aspect, the present disclosure provides a functionalised bioactive carrier, which may be used for inducing, in-vitro, ex-vivo or in-vivo, tissue regeneration, comprising at least one cyclic GFR-binding compound (in particular, at least one modified cyclic GFR-binding compound) as defined in the present disclosure. In one example, said (modified) cyclic GFR-binding compound and bioactive carrier are both active principles/ingredients. In certain embodiments, said functionalised bioactive carrier is a modified, functionalised, coated or grafted biomaterial as defined herein, in particular, a modified, functionalised, coated or grafted tissue regeneration compatible-biomaterial.

[0878] In one example, said functionalised bioactive carrier comprises one (modified) cyclic GFR-binding compound. In one example, said functionalised bioactive carrier comprises two or more distinct (modified) cyclic GFR-binding compounds. In one example, said functionalised bioactive carrier comprises three or more distinct (modified) cyclic GFR-binding compounds. In one example, said functionalised bioactive carrier comprises four or more distinct (modified) cyclic GFR-binding compounds.

[0879] Active or bioactive principles or ingredients: In the present description and unless otherwise indicated or contradictory in context, the term “(bio)active principle” or “(bio)active ingredient” generally refers to a molecule, compound or substance which is responsible for providing the desired biological effect. Without said active ingredient, the formulation or composition containing it, would not provide the desired biological effect. For example, in certain embodiments, formulation excipients are not considered as active ingredients in the pharmaceutical composition as defined herein.

[0880] In one example, said functionalised bioactive carrier is formed using a method comprising, or exclusively consisting of, contacting a bioactive carrier as defined herein and a (modified) cyclic GFR-binding compound under reacting conditions thereby functionalizing at least one part (or at least one part of a surface) of said bioactive carrier and thus forming a functional association, interaction or bond between said bioactive carrier and said (modified) cyclic GFR-binding compound.

[0881] In the present description and unless otherwise indicated or contradictory in context, the terms “functionally associated”, “functionally combined”, “functionalized”, “immobilized”, “deposited”, “coated”, or “grafted” all refer to the action of associating or functionalising at least one part of a bioactive carrier with a (modified) cyclic GFR-binding compound so that the desired biological, therapeutic and/or cosmetic effect e.g. inducing tissue formation, is obtained. The association or combination may be covalent and form, between said (modified) cyclic GFR-binding compound and said bioactive carrier, a covalent interaction as already defined herein, or, the association or combination may be non-covalent and form, between said (modified) cyclic GFR-binding compound and said bioactive carrier, a non-covalent interaction as already defined herein.

[0882] For example, in certain embodiments, a (modified) cyclic GFR-binding compound interacts covalently (makes at least one functional covalent interaction) with said bioactive carrier.

[0883] In one aspect, the present disclosure thus provides a functionalised bioactive carrier comprising a (modified) cyclic GFR-binding compound, wherein said (modified) cyclic GFR-binding compound (before any modifications) is a peptide, or a variant or analog thereof, having growth factor receptor-binding capability or capabilities, exclusively consisting of (or constituted of) at least 15 (in particular between 15-35, more particularly between 19-35, and even more particularly between 19-30) amino acids.

[0884] In one aspect, the present disclosure provides a functionalised bioactive carrier comprising a (modified) cyclic GFR-binding compound, wherein said (modified) cyclic GFR-binding compound (before any modifications) is a cyclic peptidomimetic as defined herein, having growth factor receptor-binding capability or capabilities, comprising at least 15 (in particular between 15-35, more particularly between 19-35, and even more particularly between 19-30) amino acids; wherein said cyclic GFR-binding compound has a molecular weight comprised between 1,500 and 7,000 Daltons.

[0885] In one aspect, the present disclosure provides a functionalised bioactive carrier comprising a (modified) cyclic GFR-binding compound, wherein said (modified) cyclic GFR-binding compound (before any modifications) is a cyclic peptide, a variant or analog thereof, or a cyclic peptidomimetic as defined herein, having growth factor receptor-binding capability or capabilities, with at least 15 (in particular between 15-35, more particularly between 19-35, and even more particularly between 19-30) amino acids, comprising a peptide with four amino acids (PEP1) and a peptide with five amino acids (PEP2).

[0886] In one aspect, the present disclosure provides a functionalised bioactive carrier comprising a (modified) cyclic GFR-binding compound, wherein said (modified) cyclic GFR-binding compound (before any modifications) is a cyclic peptide, a variant or analog thereof, or a cyclic peptidomimetic as defined herein, with at least 15 (in particular between 15-35, more particularly between 19-35, and even more particularly between 19-30) amino acids, comprising a peptide with eight amino acids (PEP12) and a peptide with five amino acids (PEP2).

[0887] In one aspect, the present disclosure provides a functionalised bioactive carrier comprising a (modified) cyclic GFR-binding compound, wherein said (modified) cyclic GFR-binding compound (before any modifications) is a cyclic peptide, a variant or analog thereof, or a cyclic peptidomimetic as defined herein, with at least 15 (in particular between 15-35, more particularly between 19-35, and even more particularly between 19-30) amino acids, comprising a peptide with four amino acids (PEP1) and a peptide with five amino acids (PEP2); wherein said cyclic GFR-binding compound further comprises a peptide with three amino acids (PEP3) and a peptide with three amino acids (PEP4).

[0888] In one aspect, the present disclosure provides a functionalised bioactive carrier comprising a (modified) cyclic GFR-binding compound, wherein said (modified) cyclic GFR-binding compound (before any modifications) is a cyclic peptide, a variant or analog thereof, or a cyclic peptidomimetic as defined herein, with at least 15 (in particular between 15-35, more particularly between 19-35, and even more particularly between 19-30) amino acids, comprising a peptide with eight amino acids (PEP12) and a peptide with five amino acids (PEP2); wherein said cyclic GFR-binding compound further comprises a peptide with three amino acids (PEP3) and a peptide with three amino acids (PEP4).

[0889] In one aspect, the present disclosure provides a functionalised bioactive carrier comprising a (modified) cyclic GFR-binding compound, wherein said (modified) cyclic GFR-binding compound (before any modifications) is a cyclic peptide, a variant or analog thereof, or a cyclic peptidomimetic as defined herein, with at least 15 (in particular between 15-35, more particularly between 19-35, and even more particularly between 19-30) amino acids, comprising a peptide with four amino acids (PEP1) and a peptide with five amino acids (PEP2); wherein said cyclic GFR-binding compound further comprises a peptide with five amino acids (PEP5) and a peptide with between five and seven amino acids (PEP6).

[0890] In one aspect, the present disclosure provides a functionalised bioactive carrier comprising a (modified) cyclic GFR-binding compound, wherein said (modified) cyclic GFR-binding compound (before any modifications) is a cyclic peptide, a variant or analog thereof, or a cyclic peptidomimetic as defined herein, with at least 15 (in particular between 15-35, more particularly between 19-35, and even more particularly between 19-30) amino acids, comprising a peptide with eight amino acids (PEP12) and a peptide with five amino acids (PEP2); wherein said cyclic GFR-binding compound further comprises a peptide with five amino acids (PEP5) and a peptide with between five and seven amino acids (PEP6).

[0891] In one aspect, the present disclosure provides a functionalised bioactive carrier comprising a (modified) cyclic GFR-binding compound, wherein said (modified) cyclic GFR-binding compound (before any modifications) is a cyclic peptide, a variant or analog thereof, or a cyclic peptidomimetic as defined herein, with at least 15 (in particular between 15-35, more particularly between 19-35, and even more particularly between 19-30) amino acids, comprising a peptide with four amino acids (PEP1) and a peptide with five amino acids (PEP2); wherein said cyclic GFR-binding compound further comprises a peptide with between six and twelve amino acids (PEP9) and a peptide with between six and eleven amino acids (PEP10).

[0892] In one aspect, the present disclosure provides a functionalised bioactive carrier comprising a (modified) cyclic GFR-binding compound, wherein said (modified) cyclic GFR-binding compound (before any modifications) is a cyclic peptide, a variant or analog thereof, or a cyclic peptidomimetic as defined herein, with at least 15 (in particular between 15-35, more particularly between 19-35, and even more particularly between 19-30) amino acids, comprising a peptide with eight amino acids (PEP12) and a peptide with five amino acids (PEP2); wherein said cyclic GFR-binding compound further comprises a peptide with between six and twelve amino acids (PEP9) and a peptide with between six and eleven amino acids (PEP10).

[0893] In one aspect, the present disclosure provides a functionalised bioactive carrier comprising a (modified) cyclic GFR-binding compound, wherein said (modified) cyclic GFR-binding compound (before any modifications) is a cyclic peptide, a variant or analog thereof, or a cyclic peptidomimetic as defined herein, with at least 15 (in particular between 15-35, more particularly between 19-35, and even more particularly between 19-30) amino acids, comprising a peptide with four amino acids (PEP1) and a peptide with five amino acids (PEP2); wherein said cyclic GFR-binding compound further comprises a peptide with three amino acids (PEP3) and a peptide with between five and seven amino acids (PEP6).

[0894] In one aspect, the present disclosure provides a functionalised bioactive carrier comprising a (modified) cyclic GFR-binding compound, wherein said (modified) cyclic GFR-binding compound (before any modifications) is a cyclic peptide, a variant or analog thereof, or a cyclic peptidomimetic as defined herein, with at least 15 (in particular between 15-35, more particularly between 19-35, and even more particularly between 19-30) amino acids, comprising a peptide with eight amino acids (PEP12) and a peptide with five amino acids (PEP2); wherein said cyclic GFR-binding compound further comprises a peptide with three amino acids (PEP3) and a peptide with between five and seven amino acids (PEP6).

[0895] In one aspect, the present disclosure provides a functionalised bioactive carrier comprising a (modified) cyclic GFR-binding compound, wherein said (modified) cyclic GFR-binding compound (before any modifications) is a cyclic peptide, a variant or analog thereof, or a cyclic peptidomimetic as defined herein, with at least 15 (in particular between 15-35, more particularly between 19-35, and even more particularly between 19-30) amino acids, comprising a peptide with four amino acids (PEP1) and a peptide with five amino acids (PEP2); wherein said cyclic GFR-binding compound further comprises a peptide with three amino acids (PEP3) and a peptide with between six and eleven amino acids (PEP10).

[0896] In one aspect, the present disclosure provides a functionalised bioactive carrier comprising a (modified) cyclic GFR-binding compound, wherein said (modified) cyclic GFR-binding compound (before any modifications) is a cyclic peptide, a variant or analog thereof, or a cyclic peptidomimetic as defined herein, with at least 15 (in particular between 15-35, more particularly between 19-35, and even more particularly between 19-30) amino acids, comprising a peptide with eight amino acids (PEP12) and a peptide with five amino acids (PEP2); wherein said cyclic GFR-binding compound further comprises a peptide with three amino acids (PEP3) and a peptide with between six and eleven amino acids (PEP10).

[0897] In one aspect, the present disclosure provides a functionalised bioactive carrier comprising a (modified) cyclic GFR-binding compound, wherein said (modified) cyclic GFR-binding compound (before any modifications) is a cyclic peptide, a variant or analog thereof, or a cyclic peptidomimetic as defined herein, with at least 15 (in particular between 15-35, more particularly between 19-35, and even more particularly between 19-30) amino acids, comprising a peptide with four amino acids (PEP1) and a peptide with five amino acids (PEP2); wherein said cyclic GFR-binding compound further comprises a peptide with five amino acids (PEP5) and a peptide with three amino acids (PEP4).

[0898] In one aspect, the present disclosure provides a functionalised bioactive carrier comprising a (modified) cyclic GFR-binding compound, wherein said (modified) cyclic GFR-binding compound (before any modifications) is a cyclic peptide, a variant or analog thereof, or a cyclic peptidomimetic as defined herein, with at least 15 (in particular between 15-35, more particularly between 19-35, and even more particularly between 19-30) amino acids, comprising a peptide with four amino acids (PEP12) and a peptide with five amino acids (PEP2); wherein said cyclic GFR-binding compound further comprises a peptide with five amino acids (PEP5) and a peptide with three amino acids (PEP4).

[0899] In one aspect, the present disclosure provides a functionalised bioactive carrier comprising a (modified) cyclic GFR-binding compound, wherein said (modified) cyclic GFR-binding compound (before any modifications) is a cyclic peptide, a variant or analog thereof, or a cyclic peptidomimetic as defined herein, with at least 15 (in particular between 15-35, more particularly between 19-35, and even more particularly between 19-30) amino acids, comprising a peptide with four amino acids (PEP1) and a peptide with five amino acids (PEP2); wherein said cyclic GFR-binding compound further comprises a peptide with between six and twelve amino acids (PEP9) and a peptide with three amino acids (PEP4).

[0900] In one aspect, the present disclosure provides a functionalised bioactive carrier comprising a (modified) cyclic GFR-binding compound, wherein said (modified) cyclic GFR-binding compound (before any modifications) is a cyclic peptide, a variant or analog thereof, or a cyclic peptidomimetic as defined herein, with at least 15 (in particular between 15-35, more particularly between 19-35, and even more particularly between 19-30) amino acids, comprising a peptide with four amino acids (PEP12) and a peptide with five amino acids (PEP2); wherein said cyclic GFR-binding compound further comprises a peptide with between six and twelve amino acids (PEP9) and a peptide with three amino acids (PEP4).

[0901] In one aspect, the present disclosure provides a functionalised bioactive carrier comprising a (modified) cyclic GFR-binding compound, wherein said (modified) cyclic GFR-binding compound (before any modifications) is a cyclic peptide, a variant or analog thereof, or a cyclic peptidomimetic as defined herein, with at least 15 (in particular between 15-35, more particularly between 19-35, and even more particularly between 19-30) amino acids, comprising a peptide with four amino acids (PEP1) and a peptide with five amino acids (PEP2); wherein said cyclic GFR-binding compound further comprises a peptide with five amino acids (PEP5) and a peptide with three amino acids (PEP4).

[0902] In one aspect, the present disclosure provides a functionalised bioactive carrier comprising a (modified) cyclic GFR-binding compound, wherein said (modified) cyclic GFR-binding compound (before any modifications) is a cyclic peptide, a variant or analog thereof, or a cyclic peptidomimetic as defined herein, with at least 15 (in particular between 15-35, more particularly between 19-35, and even more particularly between 19-30) amino acids, comprising a peptide with four amino acids (PEP12) and a peptide with five amino acids (PEP2); wherein said cyclic GFR-binding compound further comprises a peptide with five amino acids (PEP5) and a peptide with three amino acids (PEP4).

[0903] In one aspect, the present disclosure provides a functionalised bioactive carrier comprising a (modified) cyclic GFR-binding compound, wherein said (modified) cyclic GFR-binding compound (before any modifications) is a cyclic peptide, a variant or analog thereof, or a cyclic peptidomimetic as defined herein, with at least 15 (in particular between 15-35, more particularly between 19-35, and even more particularly between 19-30) amino acids, comprising a peptide with four amino acids (PEP1) and a peptide with five amino acids (PEP2); wherein said cyclic GFR-binding compound further comprises a peptide with five amino acids (PEP5) and a peptide with between six and eleven amino acids (PEP10).

[0904] In one aspect, the present disclosure provides a functionalised bioactive carrier comprising a (modified) cyclic GFR-binding compound, wherein said (modified) cyclic GFR-binding compound (before any modifications) is a cyclic peptide, a variant or analog thereof, or a cyclic peptidomimetic as defined herein, with at least 15 (in particular between 15-35, more particularly between 19-35, and even more particularly between 19-30) amino acids, comprising a peptide with four amino acids (PEP12) and a peptide with five amino acids (PEP2); wherein said cyclic GFR-binding compound further comprises a peptide with five amino acids (PEP5) and a peptide with between six and eleven amino acids (PEP10).

[0905] In one aspect, the present disclosure provides a functionalised bioactive carrier comprising a (modified) cyclic GFR-binding compound, wherein said (modified) cyclic GFR-binding compound (before any modifications) is a cyclic peptide, a variant or analog thereof, or a cyclic peptidomimetic as defined herein, with at least 15 (in particular between 15-35, more particularly between 19-35, and even more particularly between 19-30) amino acids, comprising a peptide with four amino acids (PEP1) and a peptide with five amino acids (PEP2); wherein said cyclic GFR-binding compound further comprises a peptide with between six and twelve amino acids (PEP9) and a peptide with between five and seven amino acids (PEP6).

[0906] In one aspect, the present disclosure provides a functionalised bioactive carrier comprising a (modified) cyclic GFR-binding compound, wherein said (modified) cyclic GFR-binding compound (before any modifications) is a cyclic peptide, a variant or analog thereof, or a cyclic peptidomimetic as defined herein, with at least 15 (in particular between 15-35, more particularly between 19-35, and even more particularly between 19-30) amino acids, comprising a peptide with four amino acids (PEP12) and a peptide with five amino acids (PEP2); wherein said cyclic GFR-binding compound further comprises a peptide with between six and twelve amino acids (PEP9) and a peptide with between five and seven amino acids (PEP6).

[0907] In one aspect, the present disclosure provides a functionalised bioactive carrier comprising a (modified) cyclic GFR-binding compound, wherein said (modified) cyclic GFR-binding compound (before any modifications) is a cyclic peptide, a variant or analog thereof, or a cyclic peptidomimetic as defined herein, with between 15-60 (in particular between 15-55, more particularly between 19-60, and even more particularly between 19-55) amino acids, or between 15-35 (in particular between 15-30, more particularly between 19-35, and even more particularly between 19-30) amino acids, comprising a peptide, a variant or analog thereof, or a peptidomimetic having the following general formula (I) (hereinafter may also be referred to as compound (I) or peptide (I)):

PEP(A)-LINKER-PEP(B) (I)

[0908] wherein one end of LINKER interacts covalently with one end of PEP(A); wherein another end of LINKER interacts covalently with one end of PEP(B); wherein PEP(A) comprises PEP1; wherein PEP(B) comprises PEP2; wherein LINKER is a linear or branched organic divalent radical, moiety or compound having a molecular weight (Mw) comprised between about 28 and about 2,000 Da, in particular, between about 300 and about 1000 Da, more particularly between about 300 and about 800 Da.

[0909] In the present description, the molecular weight of LINKER refer to the calculated molecular weight prior to being connected to/reacted with any of the elements it is configured to connect to or react with e.g. PEP(A), PEP(B) or any other groups defined herein.

[0910] In one aspect, the present disclosure provides a functionalised bioactive carrier comprising a (modified) cyclic GFR-binding compound, wherein said (modified) cyclic GFR-binding compound (before any modifications) is a cyclic peptide, a variant or analog thereof, or a cyclic peptidomimetic as defined herein, with between 15-60 (in particular between 15-55, more particularly between 19-60, and even more particularly between 19-55) amino acids, or between 15-35 (in particular between 15-30, more particularly between 19-35, and even more particularly between 19-30) amino acids, comprising a peptide, a variant or analog thereof, or a peptidomimetic having the following general formula (I) (hereinafter may also be referred to as compound (I) or peptide (I)):

PEP(A)-LINKER-PEP(B) (I)

[0911] wherein one end of LINKER interacts covalently with one end of PEP(A); wherein another end of LINKER interacts covalently with one end of PEP(B); wherein PEP(A) comprises PEP12; wherein PEP(B) comprises PEP2; wherein LINKER is a linear or branched organic divalent radical, moiety or compound having a molecular weight (Mw) comprised between about 28 and about 2,000 Da, in particular, between about 300 and about 1000 Da, more particularly between about 300 and about 800 Da.

[0912] In one aspect, the present disclosure provides a functionalised bioactive carrier comprising a (modified) cyclic GFR-binding compound, wherein said (modified) cyclic GFR-binding compound (before any modifications) is a cyclic peptide, a variant or analog thereof, or a cyclic peptidomimetic as defined herein, with between 15-60 (in particular between 15-55, more particularly between 19-60, and even more particularly between 19-55) amino acids, or between 15-35 (in particular between 15-30, more particularly between 19-35, and even more particularly between 19-30) amino acids, comprising a peptide, a variant or analog thereof, or a peptidomimetic having the following general formula (II) (hereinafter may also be referred to as compound (II) or peptide (II)):

PEP(C)-PEP12-LINKER-PEP2-PEP(D) (II)

[0913] wherein LINKER is a linear or branched organic divalent radical, moiety or compound having a molecular weight (Mw) comprised between about 28 and about 2,000 Da, in particular, between about 300 and about 1000 Da, more particularly between about 300 and about 800 Da; wherein PEP12 is a peptide with 8 amino acids of formula PEP1-AA¹⁷-PEP11 as defined herein; wherein PEP2 is a peptide with five amino acids as already defined herein; wherein one end of PEP(C) interacts covalently with PEP12 via one end of PEP1; wherein one end of PEP(D) interacts covalently with one end of PEP2; wherein one end of LINKER interacts covalently with one end of PEP12 via one end of PEP11; wherein another end of LINKER interacts covalently with another end of PEP2; wherein PEP(C) is a peptide with at least 5 amino acids, in particular a peptide with between 5 and 12 amino acids; wherein PEP(D) is a peptide with at least 5 amino acids, in particular a peptide with between 5 and 11 amino acids.

[0914] In one aspect, the present disclosure provides a functionalised bioactive carrier comprising a (modified) cyclic GFR-binding compound, wherein said (modified) cyclic GFR-binding compound (before any modifications) is a cyclic peptide, a variant or analog thereof, or a cyclic peptidomimetic as defined herein, with between 15-60 (in particular between 15-55, more particularly between 19-60, and even more particularly between 19-55) amino acids, or between 15-35 (in particular between 15-30, more particularly between 19-35, and even more particularly between 19-30) amino acids, comprising a peptide, a variant or analog thereof, or a peptidomimetic having the following general formula (III) (hereinafter may also be referred to as compound (III) or peptide (III)):

PEP7-PEP5-PEP12-LINKER-PEP2-PEP6-PEP8 (III)

[0915] wherein LINKER is a linear or branched organic divalent radical, moiety or compound having a molecular weight (Mw) comprised between about 28 and about 2,000 Da, in particular, between about 300 and about 1000 Da, more particularly between about 300 and about 800 Da; wherein PEP12 is a peptide with 8 amino acids of formula PEP1-AA¹⁷-PEP11 as defined herein; wherein PEP2 is a peptide with five amino acids as already defined herein; wherein PEP5 is a peptide with five amino acids as already defined herein; wherein PEP6 is a peptide with between five and seven amino acids as already defined herein; wherein PEP7 an amino acid or a peptide with between two and seven amino acids as already defined herein; wherein PEP8 an amino acid or a peptide with between two and six amino acids as already defined herein; wherein one end of LINKER interacts covalently with one end of PEP12 via AA²⁰; wherein another end of LINKER interacts covalently with one end of PEP2 via AA²¹; wherein one end of PEP5 interacts covalently with another end of PEP12 via AA¹²; wherein another end of PEP5 interacts covalently with one end of PEP7 via AA⁸; wherein one end of PEP6 interacts covalently with another end of PEP2 via AA²⁶; wherein another end of PEP6 interacts covalently with one end of PEP8 via AA³².

[0916] In one aspect, the present disclosure provides a functionalised bioactive carrier comprising a (modified) cyclic GFR-binding compound, wherein said (modified) cyclic GFR-binding compound (before any modifications) is a cyclic peptide, a variant or analog thereof, or a cyclic peptidomimetic as defined herein, with between 15-60 (in particular between 15-55, more particularly between 19-60, and even more particularly between 19-55) amino acids, or between 15-35 (in particular between 15-30, more particularly between 19-35, and even more particularly between 19-30) amino acids, comprising a peptide, a variant or analog thereof, or a peptidomimetic having the following general formula (IV) (hereinafter may also be referred to as compound (IV) or peptide (IV)):

AA¹-AA²-AA³-AA⁴-AA⁵-AA⁶-AA⁷-AA⁸-AA⁹-AA¹⁰-AA¹¹-AA¹²-AA¹³-AA¹⁴-AA¹⁵-AA¹⁶-AA¹⁷-AA¹⁸-AA¹⁹-AA²⁰-LINKER-AA²¹-AA²²-AA²³-AA²⁴-AA²⁵-AA-AA²⁷--AA²⁶-AA²⁹-AA-AA³¹-AA³²-AA³³-AA³⁴-AA³⁵-AA³⁶-AA³⁷-AA³⁸ (IV)

[0917] wherein LINKER is a linear or branched organic divalent radical, moiety or compound having a molecular weight (Mw) comprised between about 28 and about 2,000 Da, in particular, between about 300 and about 1000 Da, more particularly between about 300 and about 800 Da; wherein AA¹-AA²-AA³-AA⁴-AA⁵-AA⁶-AA⁷ is PEP7 as defined herein; wherein AA¹³-AA¹⁴-AA¹⁵-AA¹⁶-AA¹⁷-AA¹⁸-AA¹⁹-AA²⁰ is PEP12 as defined herein; wherein AA²¹-AA²²-AA²³-AA²⁴-AA²⁵ is PEP2 as already defined herein; wherein AA⁸-AA⁹-AA¹⁰ is PEP3 as defined herein; wherein AA³⁰-AA³¹-AA³² is PEP4 as defined herein; wherein AA³³-AA³⁴-AA³⁵-AA³⁶-AA³⁷-AA³⁸ is PEP8 as defined herein; wherein AA¹¹, AA¹², AA²⁶, AA²⁷, AA²⁸, and AA²⁹ are as defined herein; wherein one end of LINKER interacts covalently with AA²⁰; wherein another end of LINKER interacts covalently with AA²¹; wherein AA¹ and AA²¹ may be both N-terminal amino acids or both C-terminal amino acids; wherein AA³⁸ and AA²⁰ may be both N-terminal amino acids or both C-terminal amino acids.

[0918] In one aspect, the present disclosure provides a functionalised bioactive carrier comprising a (modified) cyclic GFR-binding compound, wherein said (modified) cyclic GFR-binding compound (before any modifications) is a cyclic peptide, a variant or analog thereof, or a cyclic peptidomimetic as defined herein, with between 15-60 (in particular between 15-55, more particularly between 19-60, and even more particularly between 19-55) amino acids, or between 15-35 (in particular between 15-30, more particularly between 19-35, and even more particularly between 19-30) amino acids, having any one of the following schematic general formulae (V) to (XXVIII):

[0919] wherein LINKER is a linear or branched organic divalent radical, moiety or compound having a molecular weight (Mw) comprised between about 28 and about 2,000 Da, in particular, between about 300 and about 1000 Da, more particularly between about 300 and about 800 Da; wherein PEP12 is a peptide with 8 amino acids of formula PEP1-AA¹⁷-PEP11 as defined herein; wherein PEP2 is a peptide with five amino acids as already defined herein; wherein PEP5 is a peptide with five amino acids as already defined herein; wherein PEP6 is a peptide with between five and seven amino acids as already defined herein; wherein PEP7 an amino acid or a peptide with between two and seven amino acids as already defined herein; wherein PEP8 an amino acid or a peptide with between two and six amino acids as already defined herein; wherein PEP9 is a peptide with between six and twelve amino acids; wherein PEP10 is a peptide with between six and eleven amino acids; wherein curved lines represents covalent bonds between LINKERs and PEP1 to PEP12. Curved lines' lengths may not be representative of the actual distance between the LINKERs and PEP1 to PEP12.

[0920] In one aspect, the present disclosure provides a functionalised bioactive carrier comprising a (modified) cyclic GFR-binding compound, wherein said (modified) cyclic GFR-binding compound (before any modifications) is a cyclic peptide, a variant or analog thereof, or a cyclic peptidomimetic as defined herein, with between 15-60 (in particular between 15-55, more particularly between 19-60, and even more particularly between 19-55) amino acids, or between 15-35 (in particular between 15-30, more particularly between 19-35, and even more particularly between 19-30) amino acids, having any one of the following schematic general formulae (XXIX) to (XXXIV):

[0921] wherein LINKER is a linear or branched organic divalent radical, moiety or compound having a molecular weight (Mw) comprised between about 28 and about 2,000 Da, in particular, between about 300 and about 1000 Da, more particularly between about 300 and about 800 Da; wherein AA¹³-AA¹⁴-AA¹⁵-AA¹⁶-AA¹⁷-AA¹⁸-AA¹⁹-AA²⁰ is PEP12 as defined herein; wherein AA²¹-AA²²-AA²³-AA²⁴-AA²⁵ is PEP2 as already defined herein; wherein AA⁸-AA⁹-AA¹⁰ is PEPS as defined herein; wherein AA³⁰-AA³¹-AA³² is PEP4 as defined herein; wherein AA¹¹, AA¹², AA²⁶, AA²⁷, AA²⁸, and AA²⁹ are as defined herein; wherein one end of LINKER interacts covalently with AA¹⁶ or AA²⁰; wherein another end of LINKER interacts covalently with AA²¹.

[0922] In one aspect, the present disclosure provides a functionalised bioactive carrier comprising a (modified) cyclic GFR-binding compound, wherein said (modified) cyclic GFR-binding compound (before any modifications) is a cyclic peptide, a variant or analog thereof, or a cyclic peptidomimetic as defined herein, with between 15-60 (in particular between 15-55, more particularly between 19-60, and even more particularly between 19-55) amino acids, or between 15-35 (in particular between 15-30, more particularly between 19-35, and even more particularly between 19-30) amino acids, having any one of the following schematic general formulae (XXXVI) to (XXXX):

[0923] In one aspect, the present disclosure provides a functionalised bioactive carrier comprising a (modified) cyclic GFR-binding compound, wherein said (modified) cyclic GFR-binding compounds may be any one of SEQ ID NO: 1 to 130880 as listed in the appended sequence listing.

[0924] The present disclosure provides a functionalised bioactive carrier comprising a (modified) cyclic GFR-binding compound, wherein all of PEP1, PEP2, PEP3, PEP4, PEP5, PEP6, PEP9, PEP10, PEP12, PEP11 and AA¹⁷, pairs, quadruplets, hexaplets and heptuplets thereof, disclaimers and provisos, are as already defined herein.

[0925] Suitable covalent association or functionalization techniques for implementing embodiments of the present invention include, but are not limited to, reductive amination coupling or photo-grafting such as described in H. Freichel et al., Macromol. Rapid Commun. 2011, 32, 616-621 and V. Pourcelle et al., Biomacromol. 2009, 10, 966-974, the content of which is hereby incorporated by reference in its entirety.

[0926] In one aspect, the present disclosure provides a production method or process useful for producing a functionalised bioactive carrier according to the present disclosure wherein said bioactive carrier is a biomaterial such as a ceramic or a titanium, comprising, or exclusively consisting of, the contacting of a compound of formula (C-I) and a bioactive carrier as defined herein under suitable covalent-bond formation conditions thereby forming at least one covalent bond between said compound (C-I) and said bioactive carrier thus forming a functionalised bioactive carrier according to the present disclosure:

[chemical structure]

[0927] wherein X is Si; wherein Y is a divalent organic linker; wherein A is a (modified) cyclic GFR-binding compound according to the present disclosure, wherein R¹ and R² are both independently an organic spacing-compound other than a leaving group as defined herein, and wherein R³ is a leaving group as defined herein;

[0928] In one particular example, a process or method which may be used to functionally associate or combine a (modified) cyclic GFR-binding compound with a bioactive carrier such as a ceramic or a titanium is shown in Scheme 1:

[chemical structure]

[0929] Such syntheses involve the formation of a covalent interaction (or association) between a (modified) cyclic GFR-binding compound (represented as (A)-SH in Scheme 1) and a bioactive carrier as defined herein.

[0930] In one particular example, a process or method which may be used to functionally associate or combine a (modified) cyclic GFR-binding compound with a bioactive carrier is a method for covalent functionalization or depositing of a (modified) cyclic GFR-binding compound onto a polyetheretherketone polymer (PEEK) surface wherein (i) the polymer is treated with ethylene diamine (NH₂═NH₂) to create NH₂ functions on a PEEK surface from ketone (—O) functions and (ii) the hereby modified PEEK-NH₂ polymer is immersed in a solution of a chosen hetero-bifunctional cross-linker such as 3-succinimidyl-3-maleimidopropionate thereby reacting the maleimide group with a (modified) cyclic GFR-binding compound through e.g. a thiol group thereof.

[0931] In one particular example, a process or method which may be used to functionally associate or combine a (modified) cyclic GFR-binding compound with a bioactive carrier is a method for covalent functionalization or depositing of a (modified) cyclic GFR-binding compound onto a polylactic acid (PLLA) polymer wherein (i) the polymer is immersed in a solution containing, for instance, (dimethylaminopropyl)-3-ethylcarbodiimide hydrochloride+N-hydroxysuccinimide in (2-(N-morpholino)-ethanesulfonic acid and then (ii) rinsed using e.g. MilliQ water.

[0932] Leaving groups: As used herein, unless indicated otherwise or contradictory in context, the term “leaving group” means a molecular fragment which possesses the ability to depart with a pair of electrons in a heterolytic bond cleavage. Leaving groups are anions or neutral molecules and possess the ability to stabilize the additional electron density that results from bond heterolysis. Common anionic leaving groups are halogen atoms such as chlorine (Cl), bromine (Br), and iodine (I), which leaves as a chloride ion (Cl⁻), a bromide ion (Br⁻) and an iodide ion (I⁻), respectively. Other leaving groups include sulfonate esters, such as tosylate (TsO⁻). Conventional neutral molecule leaving groups are water and ammonia. Suitable as leaving groups for implementing embodiments of the invention preferably include the group consisting of a halogen, a substituted or unsubstituted alkoxy group (—OR), a substituted or unsubstituted aryloxy or heteroaryloxy group (—OAr), a substituted or unsubstituted alkylcarbonyloxy group (—O₂CR), a substituted or unsubstituted arylcarbonyloxy or heteroarylcarbonyloxy group (—O₂CAr), a substituted or unsubstituted alkylsulfonyloxy group (—O₃SR), a substituted or unsubstituted arylsulfonyloxy or heteroarylsulfonyloxy group (—O₃SAr). Substituents of leaving groups include halogens, alkyl (preferably C1 to C5-alkyl) groups and alkoxy (preferably C1 to C5-alkoxy) groups.

[0933] Y Group

[0934] In the present disclosure, the Y group is not aimed at being particularly limited and any moiety comprising at least one atom and having the ability to covalently or non-covalently, preferably covalently, link or interact with the X and A groups as defined herein thereby providing a stable connection between an active substance A and the X group as defined herein, is, unless contradictory or non-adapted in context, suitable for implementing embodiments of the present disclosure and is comprised within the scope of the invention.

[0935] Thus, in the present description and unless otherwise indicated, the term “linker”, when used in relation to a Y group, means any organic moiety comprising at least one atom and having the ability to interact covalently or non-covalently with an active substance A and covalently interact with an X group as defined herein.

[0936] In one example, Y groups include divalent organic radicals selected from the group consisting of a saturated or unsaturated, preferably saturated, hydrocarbon chain comprising between 1 and 30 carbon atoms, wherein said hydrocarbon chain is optionally interrupted by one or more non-carbon atom, preferably between 1 and 16, between 1 and 12 or between 1 and 8 non-carbon atoms as appropriate, wherein said non-carbon atom is selected, for instance, from the group consisting of —O—, —S—, —C(═O), —SO₂—, —N(Ri)(C═O)—, —N(Ri)-, and the following radical:

[chemical structure]

[0937] wherein Ri is selected from the group consisting of a hydrogen atom, a C1-C6 alkyl group and a aryl group, and wherein said hydrocarbon chain is non-substituted or substituted, by at least one radical selected from the group consisting of a halogen, a hydroxyl group, a C1-C20 alkyl group and a aryl group.

[0938] Suitable as Y groups for implementing embodiments of the invention include saturated or unsaturated hydrocarbon chains comprising between 1 and 20 carbon atoms, saturated or unsaturated hydrocarbon chains comprising between 1 and 10 carbon atoms, saturated or unsaturated hydrocarbon chains comprising between 1 and 5 carbon atoms, saturated or unsaturated hydrocarbon chains comprising 1, 2 or 3 carbon atoms, all of which being specifically and individually preferred.

[0939] Also suitable as Y groups for implementing embodiments of the invention include saturated or unsaturated hydrocarbon chains comprising between 1 and 20 carbon atoms, saturated or unsaturated hydrocarbon chains comprising between 1 and 10 carbon atoms, saturated or unsaturated hydrocarbon chains comprising between 1 and 5 carbon atoms, saturated or unsaturated hydrocarbon chains comprising 1, 2 or 3 carbon atoms, and in which said hydrocarbon chain is optionally interrupted by one or more, preferably between 1 and 16, between 1 and 12 or between 1 and 8, non-carbon atom, selected from the group consisting of an oxygen atom, a nitrogen atom, a carbonyl group and/or the following radical:

[chemical structure]

all of which being specifically preferred and individually contemplated.

[0940] Also suitable as Y groups for implementing embodiments of the invention is:

[chemical structure]

[0941] wherein n is comprised between 1 and 29, in particular between 1 and 5; and wherein m is comprised between 1 and 29, in particular between 1 and 5.

[0942] Suitable covalent-bond formation conditions: As used herein, unless indicated otherwise or contradictory in context, the term “suitable covalent-bond formation conditions” means reaction conditions such as pressure, temperature, reagent quantities, solvent's type and quantity, or stirring, under which starting materials may contact and provide at least one further material resulting from the formation of at least one covalent bond between said starting materials. Suitable as covalent-bond formation conditions for implementing embodiments of the present invention preferably include substantially atmospheric conditions.

[0943] Organic spacing-compound: In the present description and unless otherwise indicated, the term “organic spacing compound” means an organic chemical radical (preferably monofunctional radical) having the ability to create a steric effect/hindrance and/or electronic effect/hindrance in a direct vicinity of a (modified) cyclic GFR-binding compound of the present disclosure. Suitable organic spacing compounds include, but are not limited to, monovalent organic radicals independently selected from the group consisting of a saturated or unsaturated hydrocarbon chain of at most 20 nanometres (nm) in length, preferably at most 10 nm, 5 nm, 1 nm, 0.5 nm, 0.1 nm, 0.05 nm or 0.01 nm, wherein said hydrocarbon chain is optionally interrupted by one or more, preferably between 1 and 16, between 1 and 12 or between 1 and 8 non-carbon atoms as appropriate, wherein said non-carbon atom is selected from the group consisting of —O—, —S—, —C(═O), —SO₂—, —N(Rⁱ)(C═O)—, and —N(R′)—, wherein Rⁱ is selected from the group consisting of a hydrogen atom, a C1-C6 alkyl group and an aryl group, and wherein said hydrocarbon chain is non-substituted or substituted by at least one radical selected from the group consisting of a halogen, a hydroxyl group, a C1-C20 alkyl group and an aryl group. In particular, organic spacing compounds include saturated or unsaturated hydrocarbon chains comprising between 1 and 80 carbon atoms, saturated or unsaturated hydrocarbon chains comprising between 1 and 60 carbon atoms, saturated or unsaturated hydrocarbon chains comprising between 1 and 40 carbon atoms, saturated or unsaturated hydrocarbon chains comprising between 1 and 20 carbon atoms, saturated or unsaturated hydrocarbon chains comprising between 1 and 10 carbon atoms, saturated hydrocarbon chains comprising 1, 2, 3, 4, 5 or 6 carbon atoms, all of which being specifically and individually preferred. In one example, the saturated hydrocarbon chain may be methyl, ethyl, propyl, butyl or pentyl. In one example, said unsaturated hydrocarbon chain may be ethylene, propene, 1- or 2-butene, 1-, 2- or 3-pentene, acetylene, propyne, 1- or 2-butyne, 1-, 2- or 3-pentyne.

[0944] Saturated hydrocarbon chain: In the present description and unless otherwise indicated, the terms “saturated hydrocarbon chain” means a chain of carbon atoms linked together by single bonds and has hydrogen atoms filling all of the other bonding orbitals of the carbon atoms. Unsaturated hydrocarbon chain: In the present description and unless otherwise indicated, the terms “unsaturated hydrocarbon chain” means a chain of carbon that contains carbon-carbon double bonds or triple bonds, such as those found in alkenes or alkynes, respectively.

[0945] Atmospheric conditions: As used herein, unless indicated otherwise or contradictory in context, the term “atmospheric conditions” or “ambient conditions”, which are interchangeably used, refers to conditions which may be found naturally at an experimentation location. For example, in certain embodiments, typical atmospheric conditions in a chemistry/biology laboratory are a temperature of between about 15C and about 35° C. and a pressure of about 1 atm.

[0946] Solution: As used herein, unless indicated otherwise or contradictory in context, the term “solution” means a homogeneous mixture composed of only one phase, which is stable, which does not allow beam of light to scatter, in which the particles of solute cannot be seen by naked eye and from which a solute cannot be separated by filtration.

[0947] Suspension: As used herein, unless indicated otherwise or contradictory in context, the term “suspension” means a heterogeneous mixture containing solid particles that are sufficiently large for sedimentation. Typically, said solid particles are larger than one micrometer. In general, the internal phase (solid) is dispersed throughout the external phase (fluid) through mechanical agitation, with the use of certain excipients or suspending agents.

[0948] Suitable non-covalent association or functionalization techniques for implementing embodiments of the present invention include, but are not limited to, association(s) between a bioactive carrier-affinity containing group as already defined herein and at least part of a bioactive carrier. Such association(s) involves the formation of at least one non-covalent interaction (or attachment) between a (modified) cyclic GFR-binding compound and a bioactive carrier as defined herein.

[0949] In one example, said functionalised bioactive carrier is functionally associated with at least two, at least three, at least four, at least five, at least six, at least seven, at least eight, at least nine or at least ten (modified) cyclic GFR-binding compounds, each possessing a different and distinct chemical structure.

[0950] In one example, said functionalised bioactive carrier does not comprise a layer of polysiloxane.

[0951] For example, in certain embodiments, a functionalised bioactive carrier as defined herein comprises at least one (modified) cyclic GFR-binding compound, and at least one bioactive carrier, wherein said bioactive carrier:
[0952] has a porosity (or average pore diameter) comprised between 1 nm and 1000 μm, as measured by scanning electronic microscopy for pore sizes within the supra-nanometre range and by atomic force microscopy for pore sizes within the nanometre range, and/or
[0953] comprises a stiffness of at least 5 kPa, preferably at least 35 kPa, as measured by Dynamic Mechanical Analysis, and/or
[0954] is selected from the group consisting of biopolymers (collagen, fibrin, . . . etc), synthetic polymers (PEEK, PET, . . . etc), solid materials (Titanium, Metals . . . etc) and ceramics (Hydroxyapatite, Beta-tricalcium Phosphate, Biphasic Calcium Phosphate . . . etc), and/or
[0955] comprises a density or concentration of associated compound (I) comprised between 0.05×10⁻¹² mol/mm² and 50×10⁻¹² mol/mm², as measured by conventional fluorescence microscopy or calculated theoretically on the basis of the peptide size, and/or
[0956] does not comprise a layer of polysiloxane.

[0957] Porosity: As used herein, unless indicated otherwise or contradictory in context, the term “porosity” refers to the measure of the void spaces in a substance or material, and is a fraction of the volume of voids over the total volume, between 0 and 1, or as a percentage between 0 and 100%. There are many ways to test and measure the porosity of a substance or material, but for the purpose of the present disclosure, and for the avoidance of any doubts, porosity values are provided in manometers (nm) as obtained using atomic force microscopy for small pore diameters (up to 100 nm) and scanning electron microscopy for larger pore sizes.

[0958] Stiffness: As used herein, unless indicated otherwise or contradictory in context, the term “stiffness” refers to the rigidity of a substance or material i.e. the extent to which it resists deformation in response to an applied force. There are many ways to test and measure the stiffness of a substance or material, but for the purpose of the present disclosure, and for the avoidance of any doubts, stiffness values are provided in Pascal (Pa) as obtained using Dynamic Mechanical Analysis (DMA). Particularly preferred stiffness values are comprised between 1 kPa and 100 kPa and not more than 5 GPa depending on the tissue to be regenerated or repaired.

[0959] As already stated, the nature of the biomaterial is an important parameter. Particularly good results have been obtained using bioactive carriers composed mostly with the main material component of the tissue to be regenerated and/or repaired. This generally allows for a better integration of the bioactive carrier, a better resorption from the surrounding cells already present and therefore a better regeneration or repair of the targeted tissue to be achieved.

[0960] In one example, said bioactive carrier for use in neuroregeneration-related applications has a stiffness comprised between about 0.01 kPa and about 3 kPa, preferably between about 0.01 kPa and about 1 kPa. In one example, said bioactive carrier for use in muscle, cartilage and T/L-related applications has a stiffness comprised between about 3 kPa and about 200 kPa, preferably between about 10 kPa and about 30 kPa. In one example, said bioactive carrier for use in bone-related applications has a stiffness comprised between about 30 kPa and about 3 GPa, preferably between about 70 kPa and about 200 kPa for instance in applications such as the treatment or prevention of osteoporosis and bone tissue regeneration. In one example, said bioactive carrier for use in hair-related applications has a stiffness comprised between about 0.01 kPa and about 200 kPa, preferably between about 3 kPa and about 70 kPa. In one example, said bioactive carrier for use in endothelization-related applications has a stiffness comprised between about 500 kPa and about 2.5 GPa. In one example, said bioactive carrier for use in angiogenesis-related applications has a stiffness comprised between about 0.01 kPa and about 100 kPa. In one example, said bioactive carrier for use in wound healing and skin-related applications has a stiffness comprised between about 0.01 kPa and about 70 kPa. For example, in certain embodiments, a pharmaceutical, dermatological or cosmetic association or combination of the present invention may be in the form of a dry, sterile powder.

[0961] In one particular example, the concentration or density (as defined herein) of a (modified) cyclic GFR-binding compound in, or on the surface of, a bioactive carrier as defined herein is comprised between 0.05 and 50 pmol/mm², in particular comprised between 0.1 and 30 pmol/mm², comprised between 0.1 and 10 pmol/mm², comprised between 0.1 and 5 pmol/mm², or comprised between 0.1 and 2 pmol/mm², each range being preferred and specifically contemplated to be combined with any other numerical or non-numerical ranges as described herein. Most particularly, the density is comprised between 0.2 and 2 pmol/mm².

### VII. Medical Devices

[0962] For in-vivo administration, cyclic GFR-binding compounds, modified cyclic GFR-binding compounds or functionalised bioactive carriers of the present invention may be injected e.g. using an appropriate syringe, to a specific target site so that they may be delivered directly to the interior of e.g. a body articulation or under the skin in close proximity with the cells to be treated via, for instance, a PTD or cell-permeable peptide. Alternately, a medical device or implant (or implantable medical device) comprising such cyclic GFR-binding compounds, modified cyclic GFR-binding compounds or functionalised bioactive carriers may be used. Implants may contain reservoirs in which to place the cyclic GFR-binding compound, modified cyclic GFR-binding compound or functionalised bioactive carrier of the invention for release into the surrounding tissue, or may comprise a porous composition which may be soaked in a solution containing one or more cyclic GFR-binding compounds or modified cyclic GFR-binding compounds of the present disclosure prior to implantation.

[0963] Hydrogels, time-release capsules or spheres, liposomes, microspheres, nanospheres, biodegradable polymers, or other such drug delivery systems may also be employed to deliver cyclic GFR-binding compounds of the present invention to target cells and tissues. U.S. Pat. No. 6,475,516, for example, provides hydrogels being covalently bound to the surface of an in-dwelling medical device such as an implant, which may be used with cyclic GFR-binding compounds of the present disclosure.

[0964] In one aspect, the present disclosure provides a medical device comprising at least one GFR-compound, modified cyclic GFR-binding compound or functionalised bioactive carrier as defined herein. In one particular example, the medical device of the invention may be, partly or entirely, made of a functionalised bioactive carrier as defined herein or contain, for example, in certain embodiments, within a cavity thereof, said functionalised bioactive carrier.

[0965] In one example, said medical device may comprise between 1 wt % and 100 wt % of a functionalised bioactive carrier of the invention with respect to the total weight of the medical device. In one example, said medical device comprises between about 50 wt % and 100 wt %, between about 60 wt % and 100 wt %, between about 70 wt % and 100 wt %, between about 80 wt % and 100 wt %, between about 90 wt % and 100 wt % of a functionalised bioactive carrier of the invention with respect to the total weight of the medical device, all of which being specifically and individually preferred.

[0966] In an example, at least one part of a surface of said medical device comprises a cyclic GFR-binding compound, a modified cyclic GFR-binding compound or a functionalised bioactive carrier of the invention. For example, in certain embodiments, said medical device is preferably an implantable medical device.

[0967] Also suitable as medical devices for implementing embodiments of the present invention include stents, stitches, powders, granules, sponges, putties, injectable and non-injectable liquids, curable compositions, moldable compositions, membranes, glues, sprays, pills, filaments, prosthesis, or combinations thereof.

[0968] In one aspect, the present disclosure provides a bone graft material comprising a cyclic GFR-binding compound or a modified cyclic GFR-binding compound of the invention and a collagen as defined herein. In the present description and unless otherwise indicated, the term “bone graft material” means a material suitable for bone grafting.

### VIII. Antibody:Cyclic GFR-Binding Compound Complex

[0969] In one aspect, the present disclosure provides an antibody:cyclic GFR-binding compound complex comprising at least one (modified) cyclic GFR-binding compound and at least one antibody or any functional fragment thereof; wherein said (modified) cyclic GFR-binding compound is as defined herein.

[0970] Antibody: As used herein, unless indicated otherwise or contradictory in context, the terms “antibody” or “antibodies” refer to a light chain and heavy chain protein of an antibody that are encoded by a gene or genes that are either a naturally occurring gene or a codon-optimized gene. The antibody light chain and heavy chain genes may be human antibody light chain and heavy chain genes. Antibodies, or immunoglobulins, are proteins produced by cells of the immune system to identify and neutralize foreign substances, such as bacteria, viruses, or improperly proliferating native cells. Immunoglobulins are one class of desired globulin molecules and include, but are not limited to, IgG, IgM, IgA, IgD, IgE, IgY, lambda chains, kappa chains and fragments thereof; bi-specific antibodies, and fragments thereof; scFv fragments, Fc fragments, and Fab fragments as well as dimeric, trimeric and oligomeric forms of antibody fragments. Suitable antibodies include, but are not limited to, naturally occurring antibodies, animal-specific antibodies, human antibodies, humanized antibodies, autoantibodies and hybrid antibodies. Suitable antibodies also include antibodies with the ability to bind specific ligands. Suitable antibodies also include, but are not limited to, primary antibodies, secondary antibodies, designer antibodies, anti-protein antibodies, anti-peptide antibodies, anti-DNA antibodies, anti-RNA antibodies, anti-hormone antibodies, anti-hypophysiotropic peptides, antibodies against non-natural antigens, anti-anterior pituitary hormone antibodies, anti-posterior pituitary hormone antibodies, anti-venom antibodies, anti-tumor marker antibodies, antibodies directed against epitopes associated with infectious disease, including, anti-viral, anti-bacterial, anti-protozoal, anti-fungal, anti-parasitic, anti-receptor, anti-lipid, anti-phospholipid, anti-growth factor, anti-cytokine, anti-monokine, antiidiotype, and anti-accessory (presentation) protein antibodies. Suitable antibodies also include, but are not limited to, 3F8, 8H9, Abagovomab, Abciximab, Abituzumab, Abrilumab, Actoxumab, Adalimumab, Adecatumumab, Aducanumab, Afelimomab, Afutuzumab, Alacizumab pegol, ALD518, Alemtuzumab, Alirocumab, Altumomab pentetate, Amatuximab, Anatumomab mafenatox, Anetumab ravtansine, Anifrolumab, Anrukinzumab, Apolizumab, Arcitumomab, Ascrinvacumab, Aselizumab, Atezolizumab, Atinumab, Atlizumab, Atorolimumab, Bapineuzumab, Basiliximab, Bavituximab, Bectumomab, Begelomab, Belimumab, Benralizumab, Bertilimumab, Besilesomab, Bevacizumab, Bezlotoxumab, Biciromab, Bimagrumab, Bimekizumab, Bivatuzumab mertansine, Blinatumomab, Blosozumab, Bococizumab, Brentuximab vedotin, Briakinumab, Brodalumab, Brolucizumab, Brontictuzumab, Canakinumab, Cantuzumab mertansine, Cantuzumab ravtansine, Caplacizumab, Capromab pendetide, Carlumab, Catumaxomab, cBR96-doxorubicin immunoconjugate, CC49, Cedelizumab, Certolizumab pegol, Cetuximab, Ch.14.18, Citatuzumab bogatox, Cixutumumab, Clazakizumab, Clenoliximab, Clivatuzumab tetraxetan, Codrituzumab, Coltuximab ravtansine, Conatumumab, Concizumab, CR6261, Crenezumab, Dacetuzumab, Daclizumab, Dalotuzumab, Dapirolizumab pegol, Daratumumab, Dectrekumab, Demcizumab, Denintuzumab mafodotin, Denosumab, Derlotuximab biotin, Detumomab, Dinutuximab, Diridavumab, Dorlimomab aritox, Drozitumab, Duligotumab, Dupilumab, Durvalumab, Dusigitumab, Ecromeximab, Eculizumab, Edobacomab, Edrecolomab, Efalizumab, Efungumab, Eldelumab, Elgemtumab, Elotuzumab, Elsilimomab, Emactuzumab, Emibetuzumab, Enavatuzumab, Enfortumab vedotin, Enlimomab pegol, Enoblituzumab, Enokizumab, Enoticumab, Ensituximab, Epitumomab cituxetan, Epratuzumab, Erlizumab, Ertumaxomab, Etaracizumab, Etrolizumab, Evinacumab, Evolocumab, Exbivirumab, Fanolesomab, Faralimomab, Farletuzumab, Fasinumab, FBTA05, Felvizumab, Fezakinumab, Ficlatuzumab, Figitumumab, Firivumab, Flanvotumab, Fletikumab, Fontolizumab, Foralumab, Foravirumab, Fresolimumab, Fulranumab, Futuximab, Galiximab, Ganitumab, Gantenerumab, Gavilimomab, Gemtuzumab ozogamicin, Gevokizumab, Girentuximab, Glembatumumab vedotin, Golimumab, Gomiliximab, Guselkumab, Ibalizumab, Ibritumomab tiuxetan, Icrucumab, Idarucizumab, Igovomab, IMAB362, Imalumab, Imciromab, Imgatuzumab, Inclacumab, Indatuximab ravtansine, Indusatumab vedotin, Infliximab, Inolimomab, Inotuzumab ozogamicin, Intetumumab, Ipilimumab, Iratumumab, Isatuximab, Itolizumab, Ixekizumab, Keliximab, Labetuzumab, Lambrolizumab, Lampalizumab, Lebrikizumab, Lemalesomab, Lenzilumab, Lerdelimumab, Lexatumumab, Libivirumab, Lifastuzumab vedotin, Ligelizumab, Lilotomab satetraxetan, Lintuzumab, Lirilumab, Lodelcizumab, Lokivetmab, Lorvotuzumab mertansine, Lucatumumab, Lulizumab pegol, Lumiliximab, Lumretuzumab, Mapatumumab, Margetuximab, Maslimomab, Matuzumab, Mavrilimumab, Mepolizumab, Metelimumab, Milatuzumab, Minretumomab, Mirvetuximab soravtansine, Mitumomab, Mogamulizumab, Morolimumab, Motavizumab, Moxetumomab pasudotox, Muromonab-CD3, Nacolomab tafenatox, Namilumab, Naptumomab estafenatox, Narnatumab, Natalizumab, Nebacumab, Necitumumab, Nemolizumab, Nerelimomab, Nesvacumab, Nimotuzumab, Nivolumab, Nofetumomab merpentan, Obiltoxaximab, Ocaratuzumab, Ocrelizumab, Odulimomab, Ofatumumab, Olaratumab, Olokizumab, Omalizumab, Onartuzumab, Ontuxizumab, Opicinumab, Oportuzumab monatox, Oregovomab, Orticumab, Otelixizumab, Otlertuzumab, Oxelumab, Ozanezumab, Ozoralizumab, Pagibaximab, Palivizumab, Panitumumab, Pankomab, Panobacumab, Parsatuzumab, Pascolizumab, Pasotuxizumab, Pateclizumab, Patritumab, Pembrolizumab, Pemtumomab, Perakizumab, Pertuzumab, Pexelizumab, Pidilizumab, Pinatuzumab vedotin, Pintumomab, Placulumab, Polatuzumab vedotin, Ponezumab, Priliximab, Pritoxaximab, Pritumumab, PRO 140, Quilizumab, Racotumomab, Radretumab, Rafivirumab, Ralpancizumab, Ramucirumab, Ranibizumab, Raxibacumab, Refanezumab, Regavirumab, Reslizumab, Rilotumumab, Rinucumab, Rituximab, Robatumumab, Roledumab, Romosozumab, Rontalizumab, Rovelizumab, Ruplizumab, Sacituzumab govitecan, Samalizumab, Sarilumab, Satumomab pendetide, Secukinumab, Seribantumab, Setoxaximab, Sevirumab, SGN-CD19A, SGN-CD33A, Sibrotuzumab, Sifalimumab, Siltuximab, Simtuzumab, Siplizumab, Sirukumab, Sofituzumab vedotin, Solanezumab, Solitomab, Sonepcizumab, Sontuzumab, Stamulumab, Sulesomab, Suvizumab, Tabalumab, Tacatuzumab tetraxetan, Tadocizumab, Talizumab, Tanezumab, Taplitumomab paptox, Tarextumab, Tefibazumab, Telimomab aritox, Tenatumomab, Teneliximab, Teplizumab, Teprotumumab, Tesidolumab, TGN1412, Ticilimumab, Tigatuzumab, Tildrakizumab, TNX-650, Tocilizumab, Toralizumab, Tosatoxumab, Tositumomab, Tovetumab, Tralokinumab, Trastuzumab, TRBS07, Tregalizumab, Tremelimumab, Trevogrumab, Tucotuzumab celmoleukin, Tuvirumab, Ublituximab, Ulocuplumab, Urelumab, Urtoxazumab, Ustekinumab, Vandortuzumab vedotin, Vantictumab, Vanucizumab, Vapaliximab, Varlilumab, Vatelizumab, Vedolizumab, Veltuzumab, Vepalimomab, Vesencumab, Visilizumab, Volociximab, Vorsetuzumab mafodotin, Votumumab, Zalutumumab, Zanolimumab, Zatuximab, Ziralimumab, or Zolimomab aritox.

[0971] In certain embodiments, said antibody:cyclic GFR-binding compound complex is a covalent complex. In certain embodiments, said antibody:cyclic GFR-binding compound complex is a non-covalent complex.

### IX. Dendrimer:Cyclic GFR-Binding Compound Complex

[0972] In one aspect, the present disclosure provides a dendrimer:cyclic GFR-binding compound complex comprising at least one (modified) cyclic GFR-binding compound and at least one dendrimer or any functional fragment thereof; wherein said (modified) cyclic GFR-binding compound is as defined herein; and wherein said dendrimer is as already defined herein.

[0973] In certain embodiments, said dendrimer:cyclic GFR-binding compound complex is a covalent complex. In certain embodiments, said dendrimer:cyclic GFR-binding compound complex is a non-covalent complex.

### X. Polynucleotides

[0974] The extracellular biological action of the cyclic GFR-binding peptides may also be conveyed via expression, by a cell, of the appropriate polynucleotide sequence engineered to encode a particular non-cyclic, cyclizable-GFR-binding peptide having the same sequence as the cyclic GFR-binding peptide of interest and having the relevant N- and C-terminal modifications so that, once expressed by the cell, the non-cyclic sequence is able to appropriately cyclize to form, in-situ, the desired cyclic GFR-binding peptide. One example of such N- and C-terminal modifications is the sulfide modification in which the polynucleotide sequence encoding the peptide sequence of interest also contains, as part of its coding region, nucleotides encoding for an N-terminal cysteine and a C-terminal cysteine, so that the peptide sequence is expressed with two termini cysteines capable of forming, under appropriate conditions, a disulfide bond (S—S) resulting in the formation of a cyclic GFR-binding peptide. One may thus inject or administer, to a mammal subject, a cyclizable-GFR-binding-peptide-encoding polynucleotide (such as a messenger RNA), wherein said polynucleotide would enable the intracellular production of the encoded cyclizable GFR-binding peptide, which may, after cyclization and once released outside the host cell, exert its extracellular action on the host cell and/or on neighbouring cells and/or distant cells. In other words, GFR-binding peptides may be produced ex-vivo (e.g. using a peptide synthesizer) or in-vivo (e.g. via cell expression of a cyclizable GFR-binding-peptide-encoding polynucleotide), and in all cases have an extracellular biological action of activation of growth factor receptors to induce cell differentiation and/or tissue regeneration.

[0975] Thus, in one aspect, the present disclosure provides a polynucleotide encoding at least one peptide as disclosed herein together with the appropriate termini modifications as described above. In one particular example, said polynucleotide is a messenger RNA or a primary construct thereof. Said messenger RNA may additionally have a 5′ cap structure chosen from the group consisting of m⁷G(5′)ppp (5′)A,G(5′)ppp(5′)A and G(5′)ppp(5′)G. In one example, the messenger RNA additionally has a poly-A tail of from about 10 to 200 adenosine nucleotides. In one example, the messenger RNA additionally has a poly-C tail of from about 10 to 200 cytosine nucleotides. In one example, the messenger RNA additionally codes a tag for purification chosen from the group consisting of a hexahistidine tag (HIS tag, polyhistidine tag), a streptavidin tag (Strep tag), an SBP tag (streptavidin-binding tag) or a GST (glutathione S-transferase) tag, or codes for a tag for purification via an antibody epitope chosen from the group consisting of antibody-binding tags, a Myc tag, a Swal 1 epitope, a FLAG tag or an HA tag. In one example, the messenger RNA additionally codes a signal peptide and/or a localization sequence, in particular a secretion sequence. In one example, said polynucleotide is a complementary DNA of said messenger RNA or a primary construct thereof.

[0976] In one aspect, the present disclosure also provides a vector comprising a polynucleotide as defined in the present disclosure.

[0977] In one aspect, the present disclosure also provides a cultured cell comprising a vector as defined in the present disclosure.

[0978] In one aspect, the present disclosure also provides a method of expressing a peptide of interest, variant or analog thereof, in a mammalian cell, said method comprising: (i) providing an mRNA as defined in the present disclosure; and (ii) introducing said mRNA to a mammalian cell under conditions that permit the expression of the peptide of interest by the mammalian cell.

[0979] In one aspect, the present disclosure also provides a mRNA as disclosed herein for use in a medical treatment or prophylactic method. In one example, said medical treatment method is a therapeutic, surgical, or diagnostic method. In one particular example, said method is a method for treating or preventing cell-degeneration-associated diseases, disorders, conditions, or pathologies as defined in the present disclosure. In one particular example, said method is a method for regenerating mammalian tissues as disclosed herein.

[0980] In one aspect, the present disclosure also provides a use of a RNA or mRNA as defined in the present disclosure for the preparation of a pharmaceutical composition for the treatment or prevention of cell-degeneration-associated diseases, disorders, conditions, or pathologies as disclosed herein.

[0981] In one aspect, the present disclosure also provides a medical composition comprising a polynucleotide, a vector, or a transfected cell, all as defined in the present disclosure, and a medically acceptable excipient or carrier.

[0982] Expression: As used herein, “expression” of a nucleic acid sequence refers to one or more of the following events: (1) production of an RNA template from a DNA sequence (e.g., by transcription); (2) processing of an RNA transcript (e.g., by splicing, editing, 5′ cap formation, and/or 3′ end processing); (3) translation of an RNA into a polypeptide or protein; and (4) post-translational modification of a polypeptide or protein.

[0983] mRNA: As used herein, the term “mRNA” refers to messenger RNA. Traditionally, the basic components of an mRNA molecule include at least a coding region, a 5′UTR, a 3′UTR, a 5′cap and a poly-A tail. Whereas the 5′UTR, 3′UTR, 5′cap and the poly-A tail are usually required to improve e.g. stability, translation and/or recognition by the ribosome, it is the coding region which comprises the sequence encoding the protein(s), polypeptide(s), or peptide(s) of (therapeutic) interest. Therefore, when the mRNA molecule as disclosed herein is conventionally described with reference to its coding region, any mRNA molecule also comprising at least one of a 5′UTR, a 3′UTR, a 5′cap or a poly-A tail forms an integral part of the present disclosure.

[0984] Coding region: As used herein, the term “coding region” or “coding sequence” refers to a portion of a polynucleotide that codes for a peptide or peptides of interest.

[0985] Primary RNA construct or transcript: As used herein, unless indicated otherwise or contradictory in context, the term “Primary RNA construct” or “Primary RNA transcript” refers to any precursor RNA molecule from a mature and functional (i.e. translatable) RNA molecule may be obtained. For instance, a precursor messenger RNA (pre-mRNA) is a type of primary transcript that becomes a messenger RNA (mRNA) after processing. Newly synthesized primary transcripts are modified in several ways to yield their mature form before they can be translated into a protein of interest. Such modifications include, but are not limited to, excision of introns, splicing of exons, addition of 5′cap and poly-A tail. Therefore, when reference is made to an RNA molecule, it shall be understood that it aims to cover all RNA molecules including, but not limited to, primary RNA transcripts or constructs at any stage of the modification process leading to a mature and functional RNA molecule e.g. with or without introns, exons, 5′cap, poly-A tail and/or any other conventional modifications, insofar as the RNA molecule contains a coding region or a precursor thereof allowing for a peptide of interest encoded by said coding region or precursor thereof to be expressed.

[0986] 5′ Capping: As used herein, unless indicated otherwise or contradictory in context, the term “5′ Capping” ou “5′ Cap” refers to a 5′ cap structure of a mRNA that is involved in nuclear export, increasing mRNA stability and binds the mRNA Cap Binding Protein (CBP), which is responsible for mRNA stability in the cell and translation competency through the association of CBP with poly(A) binding protein to form the mature cyclic mRNA species. The cap further assists the removal of 5′ proximal introns removal during mRNA splicing. Endogenous mRNA molecules may be 5′-end capped generating a 5′-ppp-5′-triphosphate linkage between a terminal guanosine cap residue and the 5′-terminal transcribed sense nucleotide of the mRNA molecule. This 5′-guanylate cap may then be methylated to generate an N7-methyl-guanylate residue.

[0987] Poly-A tails: During RNA processing, a long chain of adenine nucleotides (poly-A tail) may be added to a polynucleotide such as an mRNA molecules in order to increase stability. Immediately after transcription, the 3′ end of the transcript may be cleaved to free a 3′ hydroxyl. Then poly-A polymerase adds a chain of adenine nucleotides to the RNA. The process, called polyadenylation, adds a poly-A tail that can be between, for example, approximately 100 and 250 residues long.

[0988] Untranslated regions: As used herein, the term “Untranslated regions” or UTRs of a gene refers to regions that are transcribed but not translated. The 5′UTR starts at the transcription start site and continues to the start codon but does not include the start codon; whereas, the 3′UTR starts immediately following the stop codon and continues until the transcriptional termination signal. The regulatory features of a UTR can be incorporated into the polynucleotides, primary constructs and/or mRNA of the present disclosure to enhance the stability of the molecule.

[0989] 3′UTR: As used herein, unless indicated otherwise or contradictory in context, the term “3′UTR” or “three prime untranslated region” refers to the section of messenger RNA that immediately follows the translation termination codon. The 3′-UTR often contains regulatory regions that post-transcriptionally influence gene expression.

[0990] 5′UTR: As used herein, unless indicated otherwise or contradictory in context, the term “5′UTR” or “five prime untranslated region” refers to the section of mRNA that starts at the transcription start site and continues to the start codon but does not include the start codon. There is growing body of evidence about the regulatory roles played by the UTRs in terms of stability of the nucleic acid molecule and translation. Natural 5′UTRs bear features which play roles in for translation initiation. 5′UTR also have been known to form secondary structures which are involved in elongation factor binding.

[0991] Complementary DNA: As used herein, the term “complementary DNA” or “cDNA” refers to a DNA molecule containing an eukaryote gene which has been tailored or engineered to be expressed in a prokaryote host cell. cDNA is also called “intron-free” DNA as it lacks the gene regions encoding introns, its transcription yielding an intron-free mRNA molecule.

[0992] In one aspect, the present disclosure provides a vector comprising a polynucleotide encoding at least one peptide, variant or analog thereof, having growth factor receptor-binding capability or capabilities, as defined herein.

[0993] Vector: As used herein, unless indicated otherwise or contradictory in context, the term “vector” is used in its most general meaning and refers to any intermediary vehicle for a nucleic acid which enables said nucleic acid, for example, to be introduced into prokaryotic and/or eukaryotic cells and, where appropriate, to be integrated into a genome. Vectors of this kind are preferably replicated and/or expressed in the cells. Vectors may comprise plasmids, phagemids, bacteriophages or viral genomes.

[0994] Plasmid: As used herein, unless indicated otherwise or contradictory in context, the term “plasmid” refers to a double-stranded (which may be circular) DNA sequence that is capable of automatically replicating in a host cell.

[0995] In one aspect, the present disclosure provides a cultured cell (or transfected cell) comprising a polynucleotide encoding at least one peptide, variant or analog thereof, having growth factor receptor-binding capability or capabilities, as defined herein.

[0996] In one aspect, the present disclosure provides a medical composition comprising at least one of a polynucleotide encoding at least one peptide, variant or analog thereof, having growth factor receptor-binding capability or capabilities, as defined herein, a vector comprising such a polynucleotide, or a transfected cell comprising such a vector, and a medically acceptable carrier.

[0997] In one aspect, the present disclosure provides methods and uses for inducing cell differentiation, regenerating tissues and protecting a patient from cell-degeneration-related diseases, conditions, disorders or pathologies, using at least one of a polynucleotide encoding at least one peptide, variant or analog thereof, having growth factor receptor-binding capability or capabilities, as defined herein, a vector comprising such a polynucleotide, a transfected cell comprising such a vector, or a medical composition comprising them.

### XI. Pharmaceutical Compositions

[0998] The present disclosure provides cyclic GFR-binding compounds, modified cyclic GFR-binding compounds and functionalised bioactive carrier, which may be used for inducing stem cell differentiation and tissue regeneration.

[0999] In one aspect, the present disclosure provides a composition such as a pharmaceutical, prophylactic, surgical, diagnostic, or imaging composition (hereinafter shorten as pharmaceutical or medical composition) comprising at least one (modified) cyclic GFR-binding compound or a functionalised bioactive carrier as defined herein and further comprising at least one pharmaceutically acceptable excipient carriers and/or vehicles.

[1000] Formulations of the pharmaceutical compositions described herein may be prepared by any method known or hereafter developed in the art of pharmacology. Generally, such methods of preparation include the step of bringing the active ingredient(s) into association with an excipient and/or one or more other accessory ingredients, and then, if necessary and/or desirable, shaping and/or packaging the product into a desired single- or multi-dose unit.

[1001] For example, in certain embodiments, a pharmaceutical composition as defined herein may contain between 0.01% and 100% by weight (over the total weight of the pharmaceutical composition) of a (modified) cyclic GFR-binding compound or a functionalised bioactive carrier, both as defined herein, as a pharmaceutically effective amount. The pharmaceutical composition particularly comprises between 0.01% and 95%, between 0.01% and 90%, between 0.01% and 85%, between 0.01% and 80%, between 0.01% and 75%, between 0.01% and 70%, between 0.01% and 65%, between 0.01% and 60%, between 0.01% and 55%, between 0.01% and 50%, between 0.01% and 45%, between 0.01% and 40%, between 0.01% and 35%, between 0.01% and 30%, between 0.01% and 25%, between 0.01% and 20%, between 0.01% and 15%, between 0.01% and 10%, between 0.01% and 5%, between 0.1% and 100%, between 0.1% and 95%, between 0.1% and 90%, between 0.1% and 85%, between 0.1% and 80%, between 0.1% and 75%, between 0.1% and 70%, between 0.1% and 65%, between 0.1% and 60%, between 0.1% and 55%, between 0.1% and 50%, between 0.1% and 45%, between 0.1% and 40%, between 0.1% and 35%, between 0.1% and 30%, between 0.1% and 25%, between 0.1% and 20%, between 0.1% and 15%, between 0.1% and 10%, and between 0.1% and 5% by weight (over the total weight of the pharmaceutical composition) of any one of a (modified) cyclic GFR-binding compound or a functionalised bioactive carrier as defined herein.

[1002] Generally, the (modified) cyclic GFR-binding compounds or functionalised bioactive carriers as defined herein may thus be administered as such or as part of a formulation in association with one or more pharmaceutically acceptable excipients, carriers and/or vehicles so as to form what is generally referred to as a pharmaceutical composition or pharmaceutical formulation.

[1003] Pharmaceutical effective amount: As used herein, unless indicated otherwise or contradictory in context, the term “pharmaceutical effective amount” or “therapeutically effective amount” refers to an amount of an agent to be delivered (e.g., nucleic acid, protein, peptide, drug, therapeutic agent, diagnostic agent, prophylactic agent, etc.) that is sufficient, when administered to a subject suffering from or susceptible to an infection, disease, disorder, condition and/or pathology, to produce/provide a therapeutically effective outcome. Thus, a “pharmaceutical effective amount” depends upon the context in which it is being applied. A pharmaceutical effective amount of a composition is provided based, at least in part, on the target tissue, target cell type, means of administration, physical characteristics of the pharmaceutical association or composition (e.g., size, 3D shape, etc.), and other determinants. For example, in certain embodiments, in the context of providing an agent that induces tissue regeneration, a pharmaceutical effective amount of an agent is, for example, in certain embodiments, an amount sufficient to achieve tissue regeneration, as compared to the response obtained without provision of the agent. For example, in certain embodiments, a therapeutically effective amount as used herein is any of the herein disclosed weight or molar amounts, ratios or ranges of the (modified) cyclic GFR-binding compound or functionalised bioactive carrier.

[1004] Therapeutically effective outcome: As used herein, unless indicated otherwise or contradictory in context, the term “therapeutically effective outcome” refers to an outcome that is sufficient in a subject suffering from or susceptible to an infection, disease, disorder, condition and/or pathology, to treat, improve symptoms of, diagnose, prevent, and/or delay the onset of the infection, disease, disorder, condition and/or pathology.

[1005] Therapeutic Agent: As used herein, unless indicated otherwise or contradictory in context, the term “therapeutic agent” refers to any agent that, when administered to a subject/patient/individual, has a therapeutic, diagnostic, and/or prophylactic effect and/or elicits a desired biological and/or pharmacological effect.

[1006] Pharmaceutically acceptable: As used herein, unless indicated otherwise or contradictory in context, the term “pharmaceutically acceptable” refers to those compounds, materials, compositions, and/or dosage forms which are, within the ambit of sound medical judgment, suitable for use in contact with the tissues of human beings and animals without excessive toxicity, irritation, allergic response, or other problem or complication, commensurate with a reasonable benefit/risk ratio.

[1007] Pharmaceutically acceptable excipients: As used herein, unless indicated otherwise or contradictory in context, the term “pharmaceutically acceptable excipient” refers to any ingredient other than the compounds described herein (i.e. cyclic GFR-binding compounds, bioactive carriers as defined herein or any further active principles) and satisfying to the herein defined definition of pharmaceutically acceptable for a patient. Excipients may include, for example: inert diluents, dispersing and/or granulating agents, surface active agents and/or emulsifiers, disintegrating agents, binding agents, preservatives, buffering agents, lubricating agents, oils, printing inks, sweeteners, and/or waters of hydration. The choice of excipient(s) will largely depend on factors such as the particular mode of administration, the effect of the excipient(s) on solubility and stability, and the nature of the dosage form. In one embodiment, the pharmaceutically acceptable excipient is not a naturally occurring excipient.

[1008] Diluents: As used herein, unless indicated otherwise or contradictory in context, diluents include, but are not limited to, calcium carbonate, sodium carbonate, calcium phosphate, dicalcium phosphate, calcium sulfate, calcium hydrogen phosphate, sodium phosphate lactose, sucrose, cellulose, microcrystalline cellulose, kaolin, mannitol, sorbitol, inositol, sodium chloride, dry starch, powdered sugar and/or any combinations thereof.

[1009] Buffering agents: As used herein, unless indicated otherwise or contradictory in context, buffering agents include, but are not limited to, citrate buffer solutions, acetate buffer solutions, phosphate buffer solutions, ammonium chloride, potassium acetate, potassium chloride, monobasic potassium phosphate, calcium carbonate, calcium chloride, calcium citrate, calcium gluconate, calcium lactate, propanoic acid, calcium levulinate, pentanoic acid, phosphoric acid, calcium hydroxide phosphate, sodium acetate, sodium bicarbonate, sodium chloride, sodium citrate, sodium lactate, magnesium hydroxide, aluminum hydroxide, alginic acid, pyrogen-free water, isotonic saline, Ringer's solution, ethyl alcohol and any combinations thereof.

[1010] Granulating and/or dispersing agents: As used herein, unless indicated otherwise or contradictory in context, granulating and/or dispersing agents include, but are not limited to, potato starch, corn starch, tapioca starch, sodium starch glycolate, clays, alginic acid, guar gum, citrus pulp, agar, bentonite, cellulose and wood products, natural sponge, cation-exchange resins, calcium carbonate, silicates, sodium carbonate, cross-linked poly(vinyl-pyrrolidone), sodium carboxymethyl starch, carboxymethyl cellulose, cross-linked sodium carboxymethyl cellulose, methylcellulose, pregelatinized starch, microcrystalline starch, water insoluble starch, calcium carboxymethyl cellulose, magnesium aluminum silicate, sodium lauryl sulfate, quaternary ammonium compounds and/or any combinations thereof.

[1011] Surface active agents and/or emulsifiers: As used herein, unless indicated otherwise or contradictory in context, surface active agents and/or emulsifiers include, but are not limited to, colloidal clays (such as aluminum silicates and magnesium aluminum silicates), natural emulsifiers (such as acacia, agar, sodium alginate, cholesterol, xanthan, pectin, gelatin, egg yolk, casein, cholesterol, wax, and lecithin), long chain amino acid derivatives, high molecular weight alcohols (such as stearyl, cetyl and oleyl alcohols, triacetin monostearate, ethylene glycol distearate and glyceryl monostearate), carbomers (such as carboxy polymethylene, polyacrylic acid, acrylic acid polymer, and carboxyvinyl polymer), diethylene glycol monolaurate, triethanolamine oleate, sodium oleate, potassium oleate, ethyl oleate, oleic acid, ethyl laurate, sodium lauryl sulfate, cetrimonium bromide, cetylpyridinium chloride, benzalkonium chloride, docusate sodium, carrageenan, cellulosic derivatives (such as carboxymethylcellulose sodium, hydroxymethyl cellulose, hydroxypropyl methylcellulose and methylcellulose), sorbitan fatty acid esters (such as polyoxyethylene sorbitan monolaurate, polyoxyethylene sorbitan, polyoxyethylene sorbitan monooleate, sorbitan monopalmitate and glyceryl monooleate), polyoxyethylene esters, sucrose fatty acid esters, polyethylene glycol fatty acid esters, polyoxyethylene ethers, poly(vinyl-pyrrolidone), and any combinations thereof.

[1012] Binding agents: As used herein, unless indicated otherwise or contradictory in context, binding agents include, but are not limited to, natural and synthetic gums (such as acacia, sodium alginate, carboxymethylcellulose, methylcellulose, ethylcellulose, hydroxyethylcellulose, hydroxypropyl cellulose, hydroxypropyl methylcellulose, microcrystalline cellulose, cellulose acetate and poly(vinyl-pyrrolidone), gelatin, starch, sugars (such as sucrose, dextrose, glucose, dextrin, lactose, and mannitol), alignates, magnesium aluminum silicates, polyethylene glycol, polyethylene oxide, inorganic calcium salts, water, alcohol, silicic acid, waxes, and any combinations thereof.

[1013] Preservatives: As used herein, unless indicated otherwise or contradictory in context, preservatives include, but are not limited to, antioxidants, chelating agents, antifungal preservatives, antimicrobial preservatives, acidic preservatives, and alcohol preservatives.

[1014] Antioxidants: As used herein, unless indicated otherwise or contradictory in context, antioxidants include, but are not limited to, alpha tocopherol, ascorbic acid, acorbyl palmitate, butylated hydroxyanisole, propionic acid, potassium metabisulfite, propyl gallate, sodium metabisulfite, sodium ascorbate, and sodium sulfite.

[1015] Chelating agents: As used herein, unless indicated otherwise or contradictory in context, chelating agents include ethylenediaminetetraacetic acid (EDTA), fumaric acid, malic acid, phosphoric acid, citric acid monohydrate and tartaric acid.

[1016] Antimicrobial preservatives: As used herein, unless indicated otherwise or contradictory in context, antimicrobial preservatives include, but are not limited to, benzalkonium chloride, benzethonium chloride, chlorhexidine, chlorobutanol, chlorocresol, chloroxylenol, benzyl alcohol, bronopol, cetylpyridinium chloride, cresol, ethyl alcohol, glycerin, hexetidine, imidurea, phenoxyethanol, phenylmercuric nitrate, phenylethyl alcohol, phenol, and propylene glycol.

[1017] Antifungal preservatives: As used herein, unless indicated otherwise or contradictory in context, antifungal preservatives include, but are not limited to, benzoic acid, hydroxybenzoic acid, butyl paraben, methyl paraben, ethyl paraben, propyl paraben, potassium benzoate, sodium propionate, potassium sorbate, and/or sorbic acid.

[1018] Alcohol preservatives: As used herein, unless indicated otherwise or contradictory in context, alcohol preservatives include, but are not limited to, phenol, phenolic compounds, bisphenol, ethanol, polyethylene glycol, chlorobutanol and hydroxybenzoate.

[1019] Acidic preservatives: As used herein, unless indicated otherwise or contradictory in context, acidic preservatives include, but are not limited to, vitamin A, vitamin C, vitamin E, beta-carotene, acetic acid, citric acid, dehydroacetic acid, and sorbic acid.

[1020] Lubricating agents: As used herein, unless indicated otherwise or contradictory in context, lubricating agents include, but are not limited to, magnesium stearate, calcium stearate, stearic acid, sodium benzoate, sodium acetate, sodium chloride, silica, talc, malt, glyceryl behanate, hydrogenated vegetable oils, polyethylene glycol, magnesium lauryl sulphate and any combinations thereof.

[1021] Sweeteners: As used herein, unless indicated otherwise or contradictory in context, sweeteners include, but are not limited to, any natural or synthetic sugar substitutes. Natural sugar substitutes include, but are not limited to, brazzein, curculin, erythritol, glycyrrhizin, glycerol, hydrogenated starch hydrolysates, inulin, isomalt, lactitol, mogroside mix, mabinlin, maltitol, malto-oligosaccharide, mannitol, miraculin, monatin, monellin, osladin, pentadin, sorbitol, stevia, tagatose, thaumatin, and xylitol. Synthetic sugar substitutes include, but are not limited to, acesulfame potassium, advantame, alitame, aspartame, salt of aspartame-acesulfame, sodium cyclamate, dulcin, glucin, neohesperidin dihydrochalcone, neotame, P-4000, saccharin, Sucralose.

[1022] Exemplary excipients include, but are not limited to: butylated hydroxytoluene (BHT), calcium carbonate, calcium phosphate (dibasic), calcium stearate, croscarmellose, crosslinked polyvinyl pyrrolidone, citric acid, crospovidone, cysteine, ethylcellulose, gelatin, hydroxypropyl cellulose, hydroxypropyl methylcellulose, lactose, magnesium stearate, maltitol, mannitol, methionine, methylcellulose, methyl paraben, microcrystalline cellulose, polyethylene glycol, polyvinyl pyrrolidone, povidone, pregelatinized starch, propyl paraben, retinyl palmitate, shellac, silicon dioxide, sodium carboxymethyl cellulose, sodium citrate, sodium starch glycolate, sorbitol, starch, stearic acid, sucrose, talc, titanium dioxide, vitamin A, vitamin E, vitamin C, and xylitol. Suitable excipients for use in the present invention also include, but are not limited to, water, phosphate buffered saline (PBS), Ringer's solution, dextrose solution, serum-containing solutions, Hank's solution, other aqueous physiologically balanced solutions, oils, esters and glycols. Aqueous excipients can contain suitable auxiliary substances required to approximate the physiological conditions of the recipient, for example, in certain embodiments, by enhancing chemical stability and isotonicity.

[1023] Pharmaceutically acceptable carriers: As used herein, unless indicated otherwise or contradictory in context, the term “pharmaceutically acceptable carriers” or “carriers” refers to pharmaceutically acceptable excipients and/or delivery vehicles suitable for delivering a pharmaceutical or therapeutic composition useful in a therapeutic method and uses of the present invention to a suitable in-vivo or ex-vivo site. Preferred pharmaceutically acceptable carriers are capable of maintaining a composition containing an active combination or association of a (modified) cyclic GFR-binding compound and a bioactive carrier as defined herein, in a form that, upon arrival of the combination to a target cell, site or tissue, the active combination is capable of performing one or more biological functions thereof the protein at the cell or tissue site. One type of pharmaceutically acceptable carrier includes a controlled release formulation that is capable of slowly releasing a composition or combination into an animal. In one example, a controlled release formulation comprises an active combination or association as defined herein in a controlled release vehicle. Suitable controlled release vehicles include, but are not limited to, microparticles, biocompatible polymers, other polymeric matrices, capsules, microcapsules, osmotic pumps, bolus preparations, diffusion devices, liposomes, lipospheres, and transdermal delivery systems. Such suitable controlled release vehicle may be combined with at least one targeting moiety. In one embodiment, the pharmaceutically acceptable carrier is not a naturally occurring carrier. Targeting Moieties: In one example, the functionalised bioactive carrier disclosed herein includes at least one binding partner which functions to target the cell to a specific tissue space or to interact with a specific moiety, either in-vivo, ex-vivo or in-vitro. Suitable binding partners include antibodies and functional fragments thereof, scaffold proteins, or peptides.

[1024] In one example, said excipients, carriers or vehicles are compatible with the (modified) cyclic GFR-binding compounds or functionalised bioactive carriers defined herein so that they do not disrupt, tamper, modify, de-organise, de-combine or de-associate said the (modified) cyclic GFR-binding compounds or functionalised bioactive carriers. In contrast, said excipients, carriers or vehicles preserves, maintains or reinforces the stability of the (modified) cyclic GFR-binding compounds or functionalised bioactive carriers so as to preserve their biological activity.

[1025] In one example, the present pharmaceutical compositions also include pharmaceutically acceptable salts and/or solvates and/or prodrugs and/or isotopically-labelled derivatives of the substances and compounds described herein such as the (modified) cyclic GFR-binding compounds or any other active principles.

[1026] Pharmaceutically acceptable salts: As used herein, unless indicated otherwise or contradictory in context, the term “pharmaceutically acceptable salts” refers to derivatives of the disclosed substances and compounds wherein the parent substance or compound is modified by converting an existing acid or base moiety to its salt form (e.g., by reacting the free base group with a suitable organic acid). The degree of ionization in the salt may vary from completely ionized to almost non-ionized. Examples of pharmaceutically acceptable salts include, but are not limited to, mineral or organic acid salts of basic residues such as amines; alkali or organic salts of acidic residues such as carboxylic acids; and the like. Representative acid addition salts include acetate, adipate, alginate, ascorbate, aspartate, benzenesulfonate, benzoate, bisulfate, borate, butyrate, camphorate, camphorsulfonate, citrate, cyclopentanepropionate, digluconate, dodecylsulfate, ethanesulfonate, fumarate, glucoheptonate, glycerophosphate, hemisulfate, heptonate, hexanoate, hydrobromide, hydrochloride, hydroiodide, 2-hydroxy-ethanesulfonate, lactobionate, lactate, laurate, lauryl sulfate, malate, maleate, malonate, methanesulfonate, 2-naphthalenesulfonate, nicotinate, nitrate, oleate, oxalate, palmitate, pamoate, pectinate, persulfate, 3-phenylpropionate, phosphate, picrate, pivalate, propionate, stearate, succinate, sulfate, tartrate, thiocyanate, toluenesulfonate, undecanoate, valerate salts, and the like. Representative alkali or alkaline earth metal salts include sodium, lithium, potassium, calcium, magnesium, and the like, as well as nontoxic ammonium, quaternary ammonium, and amine cations, including, but not limited to ammonium, tetramethylammonium, tetraethylammonium, methylamine, dimethylamine, trimethylamine, triethylamine, ethylamine, and the like. The pharmaceutically acceptable salts of the present disclosure include the conventional non-toxic salts of the parent compound formed, for example, in certain embodiments, from non-toxic inorganic or organic acids. The pharmaceutically acceptable salts of the present disclosure can be synthesized from the parent compound which contains a basic or acidic moiety by conventional chemical methods. Generally, such salts can be prepared by reacting the free acid or base forms of these compounds with a stoichiometric amount of the appropriate base or acid in water or in an organic solvent, or in a mixture of the two; generally, non-aqueous media like ether, ethyl acetate, ethanol, isopropanol, or acetonitrile are preferred. Lists of suitable salts are generally found in Remington's Pharmaceutical Sciences, 17th ed., Mack Publishing Company, Easton, Pa., 1985, p. 1418 and in Pharmaceutical Salts: Properties, Selection, and Use, P. H. Stahl and C. G. Wermuth (eds.), Wiley-VCH, 2008, each of which being incorporated herein by reference in its entirety. In one embodiment, the pharmaceutically acceptable salt is not a naturally occurring salt.

[1027] Pharmaceutically acceptable solvate: As used herein, unless indicated otherwise or contradictory in context, the term “pharmaceutically acceptable solvate,” refers to a compound, substance, association or combination wherein molecules of a suitable solvent are incorporated in the crystal lattice. A suitable solvent is physiologically tolerable at the dosage administered. For example, in certain embodiments, solvates may be prepared by crystallization, recrystallization, or precipitation from a solution that includes organic solvents, water, or a mixture thereof. Examples of suitable solvents are ethanol, water (For example, in certain embodiments, mono-, di-, and tri-hydrates), N-methylpyrrolidinone (NMP), dimethyl sulfoxide (DMSO), dimethylformamide (DMF), [Nu],[Nu]′-dimethylacetamide (DMAC), 1,3-dimethyl-2-imidazolidinone (DMEU), 1,3-dimethyl-3,4,5,6-tetrahydro-2-(1H)-pyrimidinone (DMPU), acetonitrile (ACN), propylene glycol, ethyl acetate, benzyl alcohol, 2-pyrrolidone, benzyl benzoate, and the like. When water is the solvent, the solvate is referred to as a “hydrate”. In one embodiment, the pharmaceutically acceptable solvate is not a naturally occurring solvate.

[1028] Pharmaceutically acceptable isotopically-labelled compounds: In one example, the present invention also includes all pharmaceutically acceptable isotopically-labelled derivatives, which are identical to the compounds, substances, combinations or associations described herein but wherein one or more atoms are replaced by atoms having an atomic mass or mass number different from the atomic mass or mass number usually found in nature. Examples of isotopes that may be incorporated into cyclic GFR-binding compound(s) as defined herein include isotopes of hydrogen, carbon, chlorine, fluorine, iodine, nitrogen, oxygen, and sulfur, such as ²H, ³H, ¹¹C, ¹³C, ¹⁴C, ³⁶C, ¹⁸F, ¹²³I, ¹³N, ¹⁵N, ¹⁷O, ¹⁸O, and ³⁵S, respectively. It should be understood that compounds, substances, combinations, associations, prodrugs, and pharmaceutical acceptable salts thereof described herein which contain the aforementioned isotopes and/or other isotopes of other atoms are within the scope of the invention. Certain isotopically labeled of the compounds, substances, combinations, associations, prodrugs, and salts thereof such as, for example, in certain embodiments, those incorporating a radioactive isotope such as ³H and ¹⁴C, are useful in drug and/or substrate tissue distribution studies. Tritium, i.e. ³H, and carbon-14, i.e. ¹⁴C, are particularly preferred due to their ease of preparation and detection. Further, substitution with heavier isotopes such as deuterium, i.e. ²H, can afford certain therapeutic advantages resulting from greater metabolic stability, for example, in certain embodiments, increased in vivo half-life or reduced dosage requirements, and hence may be preferred in some circumstances. Isotopically labeled compounds, substances, combinations, associations, prodrugs, and salts thereof can generally be prepared by carrying out the procedures disclosed in the Schemes and/or in the Examples by substituting a readily available non-isotopically labeled reagent for an isotopically labeled reagent.

[1029] Prodrugs: As used herein, unless indicated otherwise or contradictory in context, the term “prodrug” refers to a compound, substance, combination or association that is transformed in vivo to yield a compound, substance, combination or association as defined herein or a pharmaceutically acceptable salt or solvate thereof. The transformation may occur by various mechanisms, such as via hydrolysis in blood. A prodrug of a compound, substance, combination or association defined herein may be formed in a conventional manner with one or more functional groups in the compound, such as an amino, hydroxyl or carboxyl group. For example, in certain embodiments, if a compound defined herein contains a carboxylic acid functional group, a prodrug can comprise: (1) an ester formed by the replacement of a hydrogen of the acid group with a group such as (C1-C6)alkyl or (C6-C10) aryl; (2) an activated ester formed by the replacement of the hydrogen of the acid group with groups such as —(CR²)COOR′, where CR² is a spacer and R can be groups such as H or methyl and R′ can be groups such as (C1-C6)alkyl or (C6-C10) aryl; and/or (3) a carbonate formed by the replacement of the hydrogen of the acid with groups such as CHROCOOR′ where R can be groups such as H or methyl and R′ can be groups such as (C1-C6)alkyl or (C6-C10)aryl. Similarly, if a compound defined herein contains an alcohol functional group, a prodrug can be formed via the replacement of the hydrogen of the alcohol with groups such as (C1-C6)alkanoyloxymethyl or (C1-C6)alkanoyloxyaryl or by forming an ester via condensation with, for example, in certain embodiments, an amino acid. Where a compound defined herein contains a primary or secondary amino group, a prodrug may comprise, for example, in certain embodiments, an amide formed by the replacement of one or both of the hydrogen atoms of the amino group with (C1-C10)alkanoyl or (C6-C10)aroyl. Other prodrugs of amines are well known to those skilled in the art. Alternatively, certain compounds defined herein may themselves act as prodrugs of other compounds defined herein. Discussions regarding prodrugs and their use can be found in, for example, in certain embodiments, “Prodrugs as Novel Delivery Systems,” T. Higuchi and W. Stella, Vol. 14 of the ACS Symposium Series, and Bioreversible Carriers in Drug Design, Pergamon Press, 1987 (ed. E B Roche, American Pharmaceutical Association). Examples of other prodrug types may be found in the aforementioned reference which is hereby incorporated by reference.

### XII. Administration Routes and Procedures

[1030] (Modified) cyclic GFR-binding compounds, substances, functionalised bioactive carrier to be delivered and/or pharmaceutical, dermatological, prophylactic, diagnostic, or imaging compositions or formulations thereof in accordance with the present disclosure may be administered by any route of administration effective for preventing, treating, diagnosing, or imaging a disease, disorder, or condition and/or treating or alleviating at least one symptoms thereof and/or inducing tissue formation/regeneration and/or reducing or preventing tissue degeneration.

[1031] Suitable administration protocols include any in-vitro, in-vivo or ex-vivo administration protocol. The preferred types and routes of administration will be apparent to those of skill in the art, depending on the type of condition or disease to be prevented or treated or the nature of tissue to regenerate; whether the composition is nucleic acid based, protein based, cell based or combinations or mixtures thereof; and/or the target cell/tissue.

[1032] Ex-vivo and in-vitro administration: As used herein, unless indicated otherwise or contradictory in context, the term “ex-vivo administration” refers to performing the regulatory step outside of the subject/patient, such as administering a (modified) cyclic GFR-binding compounds, functionalised bioactive carrier or medical compositions as defined herein to a population of cells (e.g., mesenchymal stem cells) removed from a subject/patient for e.g. diagnostic, analysis and/or academic purposes.

[1033] Cells, tissues or organs can be contacted ex vivo or in vitro with a (modified) cyclic GFR-binding compound or a functionalised bioactive carrier by any suitable method, including mixing or the use of a delivery vehicle. Effective in vitro or ex vivo culture conditions include, but are not limited to, effective media, bioreactor, temperature, pH and oxygen conditions that permit cell culture. An effective medium refers to any medium in which a given host cell or tissue is typically cultured. Such medium typically comprises an aqueous medium having assimilable carbon, nitrogen and phosphate sources, and appropriate salts, minerals, metals and other nutrients, such as vitamins. Cells can be cultured in conventional fermentation bioreactors, shake flasks, test tubes, microtiter dishes, and petri plates. Culturing can be carried out at a temperature, pH and oxygen content appropriate for a cell or tissue. Such culturing conditions are within the expertise of one of ordinary skill in the art.

[1034] In one aspect, the present disclosure thus also provides a method for inducing tissue formation, in-vitro or ex-vivo, said method comprising the administration to a cell (e.g. a non-fully differentiated cell) of an effective amount of a cyclic GFR-binding compound, a functionalised bioactive carrier or a composition thereof as defined herein.

[1035] In-vivo administration: In one example, (modified) cyclic GFR-binding compounds, functionalised bioactive carriers or pharmaceutical, prophylactic, diagnostic, or imaging compositions are administered by one or more of a variety of routes, including oral, intravenous, intramuscular, intra-arterial, intramedullary, rectal, intravaginal, intrathecal, subcutaneous, intraventricular, transdermal, intradermal, intraperitoneal, topical (e.g. by ointments, creams, powders, lotions, gels, and/or drops), buccal, enteral, mucosal, nasal, vitreal, sublingual, by intra-tracheal instillation, bronchial instillation, and/or inhalation, as an oral spray, nasal spray, and/or aerosol, and/or through a portal vein catheter. In one example, (modified) cyclic GFR-binding compounds, functionalised bioactive carrier or pharmaceutical, prophylactic, diagnostic, or imaging compositions are administered by systemic intravenous injection. In one example, (modified) cyclic GFR-binding compounds, functionalised bioactive carrier or pharmaceutical, prophylactic, diagnostic, or imaging compositions may be administered in a way which allows them to cross the blood-brain barrier, vascular barrier, or other epithelial barrier.

[1036] Delivery: As used herein, unless indicated otherwise or contradictory in context, the term “delivery” refers to the act or manner of delivering a compound, substance, composition, entity, moiety, cargo or payload.

[1037] Delivery Agent: As used herein, unless indicated otherwise or contradictory in context, the term “delivery agent” refers to any substance which facilitates, at least in part, the in vivo delivery of a (modified) cyclic GFR-binding compounds, functionalised bioactive carriers or pharmaceutical, prophylactic, diagnostic, or imaging compositions defined herein to targeted cells.

[1038] Forms suitable for oral administration: A (modified) cyclic GFR-binding compound, functionalised bioactive carrier or pharmaceutical, prophylactic, diagnostic, or imaging compositions of the invention, for example, in certain embodiments, includes forms suitable for oral administration as a tablet, capsule, pill, powder, sustained release formulations, solution, suspension, or for parenteral injection as a sterile solution, suspension or emulsion. Pharmaceutical compositions suitable for the delivery of (modified) cyclic GFR-binding compounds, functionalised bioactive carrier or pharmaceutical, prophylactic, diagnostic, or imaging compositions defined herein and methods for their preparation will be readily apparent to those skilled in the art. Such compositions and methods for their preparation may be found, for example, in certain embodiments, in ‘Remington's Pharmaceutical Sciences’, 19th Edition (Mack Publishing Company, 1995), which is hereby incorporated by reference in its entirety. Oral administration may involve swallowing, so that the compounds or associations enters the gastrointestinal tract, or buccal or sublingual administration may be employed by which the compound enters the blood stream directly from the mouth. Formulations suitable for oral administration include solid formulations, such as tablets, capsules containing particulates, liquids, or powders; lozenges (including liquid-filled), chews; multi- and nano-particulates; gels, solid solution, liposome, films (including muco-adhesive), ovules, sprays and liquid formulations. Liquid formulations include suspensions, solutions, syrups and elixirs. Such formulations may be employed as fillers in soft or hard capsules and typically comprise a carrier, for example, in certain embodiments, water, ethanol, polyethylene glycol, propylene glycol, methylcellulose, or a suitable oil, and one or more emulsifying agents and/or suspending agents. Liquid formulations may also be prepared by the reconstitution of a solid, for example, in certain embodiments, from a sachet. The pharmaceutical associations or compositions defined herein may also be used in fast-dissolving, fast-disintegrating dosage forms such as those described in the art.

[1039] Forms suitable for parenteral administration: In one example, (modified) cyclic GFR-binding compounds, functionalised bioactive carriers or pharmaceutical, prophylactic, diagnostic, or imaging compositions of the invention may be administered by parenteral injection. Exemplary parenteral administration forms include sterile solutions, suspensions or emulsions of the pharmaceutical association defined herein in sterile aqueous media, for example, in certain embodiments, aqueous propylene glycol or dextrose. In another embodiment, the parenteral administration form is a solution. Such parenteral dosage forms can be suitably buffered, if desired. Preferred sterile solutions include sodium chloride, 0.9%, UPS solution. Injectable formulations can be sterilized, for example, in certain embodiments, by filtration through a bacterial-retaining filter, and/or by incorporating sterilizing agents in the form of sterile solid compositions which can be dissolved or dispersed in sterile water or other sterile injectable medium prior to use.

[1040] Forms suitable for rectal and vaginal administration: Compositions for rectal or vaginal administration are typically suppositories which can be prepared by mixing compositions with suitable non-irritating excipients such as cocoa butter, polyethylene glycol or a suppository wax which are solid at ambient temperature but liquid at body temperature and therefore melt in the rectum or vaginal cavity and release the active ingredient.

[1041] Forms suitable for topical and/or transdermal administration: Dosage forms for topical and/or transdermal administration of a composition may include ointments, pastes, creams, lotions, gels, powders, solutions, sprays, inhalants and/or patches. Generally, an active ingredient is admixed under sterile conditions with a pharmaceutically acceptable excipient and/or any needed preservatives and/or buffers as may be required.

[1042] Forms suitable for pulmonary administration: Dosage forms for pulmonary administration via the buccal cavity may comprise dry particles which comprise the active ingredient (e.g. the pharmaceutical association defined herein) and which have a diameter in the range from about 0.5 nm to about 7 nm. Such compositions are conveniently in the form of dry powders for administration using a device comprising a dry powder reservoir to which a stream of propellant may be directed to disperse the powder and/or using a self-propelling solvent/powder dispensing container such as a device comprising the active ingredient dissolved and/or suspended in a low-boiling propellant in a sealed container. Pharmaceutical compositions formulated for pulmonary delivery may provide an active ingredient in the form of droplets of a solution and/or suspension. Such formulations may be prepared, packaged, and/or sold as aqueous and/or dilute alcoholic solutions and/or suspensions, optionally sterile, comprising active ingredient, and may conveniently be administered using any nebulization and/or atomization device. Such formulations may further comprise one or more additional ingredients including, but not limited to, a flavoring agent such as saccharin sodium, a volatile oil, a buffering agent, a surface active agent, and/or a preservative such as methylhydroxybenzoate.

[1043] Forms suitable for nasal administration: Formulations described herein as being useful for pulmonary delivery are also useful for intranasal delivery of a pharmaceutical composition. Formulations suitable for nasal administration may, for example, in certain embodiments, comprise from about as little as 0.1% (w/w) and as much as 100% (w/w) of active ingredient (e.g. the pharmaceutical association defined herein), and may comprise one or more of the additional ingredients described herein. A pharmaceutical composition may be prepared, packaged, and/or sold in a formulation suitable for buccal administration. Such formulations may, for example, in certain embodiments, be in the form of tablets and/or lozenges made using conventional methods, and may, for example, in certain embodiments, 0.1% to 20% (w/w) active ingredient, the balance comprising an orally dissolvable and/or degradable composition and, optionally, one or more of the additional ingredients described herein. Alternately, formulations suitable for buccal administration may comprise a powder and/or an aerosolized and/or atomized solution and/or suspension comprising active ingredient. Such powdered, aerosolized, and/or aerosolized formulations, when dispersed, may have an average particle and/or droplet size in the range from about 0.1 nm to about 200 nm, and may further comprise one or more of any additional ingredients described herein. Forms suitable for ophthalmic administration: Dosage forms for ophthalmic administration include, for example, in certain embodiments, eye drops including, for example, in certain embodiments, a 0.1/1.0% (w/w) solution and/or suspension of the active ingredient (e.g. the pharmaceutical association defined herein) in an aqueous or oily liquid excipient. Such drops may further comprise buffering agents, salts, and/or one or more other of any additional ingredients described herein. Other opthalmically-administrable formulations which are useful include those which comprise the active ingredient in microcrystalline form and/or in a liposomal preparation. Ear drops and/or eye drops are contemplated as being within the scope of this present disclosure.

[1044] Direct injection: One preferred administration method for delivering (modified) cyclic GFR-binding compounds, functionalised bioactive carriers or pharmaceutical, prophylactic, diagnostic, or imaging compositions as defined herein is by local administration, in particular, by direct injection. Direct injection techniques are particularly useful for administering a composition to a cell or tissue that is accessible by surgery, and particularly, on or near the surface of the body. Administration of a composition locally within the area of a target cell refers to injecting the composition centimeters and preferably, millimeters from the target cell or tissue.

[1045] Dosage regimens: The dosage regimen of the (modified) cyclic GFR-binding compounds, functionalised bioactive carriers or pharmaceutical, prophylactic, diagnostic, or imaging compositions as defined herein may be adjusted to provide the optimum desired response. For example, in certain embodiments, a single bolus may be administered, several divided doses may be administered over time or the dose may be proportionally reduced or increased as indicated by the exigencies of the therapeutic situation. The appropriate dosing regimen, the amount of each dose administered and/or the intervals between doses will depend upon the pharmaceutical association being used, the type of pharmaceutical composition, the characteristics of the subject in need of treatment and the severity of the condition being treated. Thus, the skilled artisan would appreciate, based upon the disclosure provided herein, that the dose and dosing regimen is adjusted in accordance with methods well-known in the therapeutic arts. That is, the maximum tolerable dose can be readily established, and the effective amount providing a detectable therapeutic benefit to a patient may also be determined, as can the temporal requirements for administering each agent to provide a detectable therapeutic benefit to the patient. Accordingly, while certain dose and administration regimens are exemplified herein, these examples in no way limit the dose and administration regimen that may be provided to a patient in practicing the present invention. In general, pharmaceutical compositions in accordance with the present disclosure may be administered at dosage levels sufficient to deliver from about 0.0001 mg/kg to about 100 mg/kg, from about 0.01 mg/kg to about 50 mg/kg, from about 0.1 mg/kg to about 40 mg/kg, from about 0.5 mg/kg to about 30 mg/kg, from about 0.01 mg/kg to about 10 mg/kg, from about 0.1 mg/kg to about 10 mg/kg, or from about 1 mg/kg to about 25 mg/kg, of subject body weight per day, one or more times a day, to obtain the desired therapeutic, diagnostic, prophylactic, or imaging effect. The desired dosage may be delivered three times a day, two times a day, once a day, every other day, every third day, every week, every two weeks, every three weeks, or every four weeks. In certain embodiments, the desired dosage may be delivered using multiple administrations (e.g., two, three, four, five, six, seven, eight, nine, ten, eleven, twelve, thirteen, fourteen, or more administrations). It is to be further understood that for any particular subject, specific dosage regimens should be adjusted over time according to the individual need and the professional judgment of the person administering or supervising the administration of the compositions, and that dosage ranges set forth herein are exemplary only and are not intended to limit the scope or practice of the present invention. For example, in certain embodiments, doses may be adjusted based on pharmacokinetic or pharmacodynamic parameters, which may include clinical effects such as toxic effects and/or laboratory values. Thus, the present invention encompasses intra-patient dose-escalation as determined by the skilled artisan. Determining appropriate dosages and regiments for administration of the chemotherapeutic agent are well-known in the relevant art and would be understood to be encompassed by the skilled artisan once provided the teachings disclosed herein.

[1046] Effective dose parameters: The dosage regimen of the (modified) cyclic GFR-binding compounds or functionalised bioactive carriers and/or pharmaceutical compositions as defined herein may be adjusted to obtain effective dose parameters. Effective dose parameters can be determined using methods standard in the art for a particular disease or condition. In particular, the effectiveness of dose parameters of a therapeutic composition as defined herein can be determined by assessing response rates. Such response rates refer to the percentage of treated patients in a population of patients that respond with either partial or complete remission.

[1047] A pharmaceutical composition as defined herein may be prepared, packaged, or sold in bulk, as a single unit dose, or as a plurality of single unit doses.

[1048] Unit dose: As used herein, unless indicated otherwise or contradictory in context, the term “unit dose” refers to a discrete amount of the pharmaceutical composition comprising a predetermined amount of the active ingredient. The amount of the active ingredient is generally equal to the dosage of the active ingredient which would be administered to a subject or a convenient fraction of such a dosage such as, for example, in certain embodiments, one-half or one-third of such a dosage.

[1049] Single unit dose: As used herein, unless indicated otherwise or contradictory in context, the term “single unit dose” refers to a dose of any therapeutic association or composition administered in one dose/at one time/single route/single point of contact, i.e., single administration event.

[1050] Split dose: As used herein, unless indicated otherwise or contradictory in context, the term “split dose” refers to the division of single unit dose or total daily dose into two or more doses.

[1051] Total daily dose: As used herein, unless indicated otherwise or contradictory in context, the term “total daily dose” refers to an amount given or prescribed in 24 hr period. It may be administered as a single unit dose.

[1052] The relative amounts of the active ingredient(s), the pharmaceutically acceptable excipients, carriers or vehicles, and any additional ingredients in a pharmaceutical composition defined herein will vary, depending upon the identity, size, and condition of the subject treated and further depending upon the route by which the composition is to be administered. In addition to the active ingredient, a pharmaceutical composition of the invention may further comprise one or more additional pharmaceutically active agents.

[1053] Combination therapy: Compounds, associations, compositions or formulations defined herein may be used in combination with one or more other therapeutic, prophylactic, diagnostic, or imaging agents. As used herein, the term “in combination with” is not intended to imply that the agents must be administered at the same time and/or formulated for delivery together, although these methods of delivery are within the scope of the present disclosure. Compositions can be administered concurrently with, prior to, or subsequent to, one or more other desired therapeutics or medical procedures. In some embodiments, they are administered within about 90, 60, 30, 15, 10, 5, or 1 minute of one another. In some embodiments, the administrations of the agents are spaced sufficiently closely together such that a combinatorial (e.g., a synergistic) effect is achieved. In general, each agent will be administered at a dose and/or on a time schedule determined for that agent. In one example, the present disclosure encompasses the delivery of pharmaceutical, prophylactic, diagnostic, or imaging compositions in combination with agents that improve their bioavailability, reduce and/or modify their metabolism, inhibit their excretion, and/or modify their distribution within the body. It will further be appreciated that therapeutically, prophylactically, diagnostically, or imaging active agents used in combination may be administered together in a single composition or administered separately in different compositions. In general, it is expected that agents used in combination with be used at levels that do not exceed the levels at which they are used individually. In one example, the levels used in combination will be lower than those utilized individually. The particular combination of therapies to employ in a combination regimen will take into account compatibility of the desired therapeutics and/or procedures and the desired therapeutic effect to be achieved. It will also be appreciated that the therapies employed may achieve a desired effect for the same disorder, or they may achieve different effects (e.g., control of any adverse effects).

[1054] Although the descriptions of pharmaceutical compositions provided herein are principally directed to pharmaceutical compositions which are suitable for administration to mammals, in particular humans, it will be understood by the skilled artisan that such compositions are generally suitable for administration to animals of all sorts, in particular to any member of the Vertebrate class. Modification of pharmaceutical compositions suitable for administration to humans in order to render the compositions suitable for administration to various animals is well understood, and the ordinarily skilled veterinary pharmacologist can design and/or perform such modification with merely ordinary, if any, experimentation. Subjects to which administration of the pharmaceutical compositions is contemplated include, but are not limited to, humans and/or other primates; mammals, including commercially relevant mammals such as cattle, pigs, horses, sheep, cats, dogs, mice, and/or rats; and/or birds, including commercially relevant birds such as chickens, ducks, geese, and/or turkeys.

### XIII. Dermatological Applications

[1055] When the cell or tissue to be regenerated, repaired or treated is a skin cell or tissue (mainly from the fibroblast lineage), the pharmaceutical composition defined herein may be a dermatological composition comprising at least one (modified) cyclic GFR-binding compound or at least one functionalised bioactive carrier, as all defined herein, and at least one dermatologically acceptable excipient.

[1056] For example, in certain embodiments, a dermatological composition for the uses of the invention may contain between 0.01% and 100% by weight (over the total weight of the dermatological composition) of a cyclic GFR-binding compound or functionalised bioactive carrier, both as defined herein, as a dermatological effective amount. The dermatological composition particularly comprises between 0.01% and 95%, between 0.01% and 90%, between 0.01% and 85%, between 0.01% and 80%, between 0.01% and 75%, between 0.01% and 70%, between 0.01% and 65%, between 0.01% and 60%, between 0.01% and 55%, between 0.01% and 50%, between 0.01% and 45%, between 0.01% and 40%, between 0.01% and 35%, between 0.01% and 30%, between 0.01% and 25%, between 0.01% and 20%, between 0.01% and 15%, between 0.01% and 10%, between 0.01% and 5%, between 0.1% and 100%, between 0.1% and 95%, between 0.1% and 90%, between 0.1% and 85%, between 0.1% and 80%, between 0.1% and 75%, between 0.1% and 70%, between 0.1% and 65%, between 0.1% and 60%, between 0.1% and 55%, between 0.1% and 50%, between 0.1% and 45%, between 0.1% and 40%, between 0.1% and 35%, between 0.1% and 30%, between 0.1% and 25%, between 0.1% and 20%, between 0.1% and 15%, between 0.1% and 10%, and between 0.1% and 5% by weight (over the total weight of the dermatological composition) of any one of a cyclic GFR-binding compound or a functionalised bioactive carrier.

[1057] Dermatologically acceptable: As used herein, unless indicated otherwise or contradictory in context, the term “dermatologically acceptable” means that the compound(s) or pharmaceutical association(s) used are adapted for use in contact with human skin without undue toxicity, incompatibility, instability, allergic response, or their equivalents.

[1058] Dermatological formulations: Suitable formulation for implementing dermatological embodiments of the invention include an aqueous or oil-based solution, a water-based cream or gel or an oily gel, usually in a jar or a tube, particularly a shower gel, shampoo, milk, emulsion, microemulsion or nanoemulsion, particularly oil-in-water or water-in-oil or multiple of silicone-based; a lotion, particularly in a glass or plastic bottle of a spray or aerosol bottle, a blister-pack, liquid soap, a dermatological bar of soap, a pomade, mousse, an anhydrous product, preferably liquid, cream or solid, for example in the form of a stick, particularly in the form of lipstick, a cataplasm or a patch.

[1059] Preferred administration routes include, but are not limited to, oral, topical or intradermal as already defined herein.

[1060] Dermatologically acceptable excipients: Suitable dermatologically acceptable excipients for implementing embodiments of the invention include, but are not limited to, preservatives, emollients, emulsifiers, surfactants, moisturizers, thickeners, conditioners, mattifying agents, stabilizers, antioxidants, texturizing agents, shine agents, filmogenic agents, solubilizers, pigments, colorants, perfumes, and solar filters. These excipients are preferably chosen from among the group consisting of amino acids and their derivatives, polyglycerols, esters, polymers and cellulose derivatives, lanoline derivatives, phospholipids, lactoferrins, lactoperoxidases, sucrose-based stabilizers, vitamin E and its derivatives, natural and synthetic waxes, vegetable oils, triglycerides, insaponifiables, phytosterols, plant esters, silicones and their derivatives, protein hydrolysates, jojoba oil and its derivatives, lipo/hydrosoluble esters, betaines, aminoxides, saccharose ester plant extracts, titanium dioxides, glycines, parabens, and even more preferably from among the group consisting of butylene glycol, glycol-15 stearyl ether, cetearyl alcohol, phenoxyethanol, methylparaben, propylparaben, butylparaben, butylenes glycol, natural tocopherols, glycerine, dihydroxycetyl sodium phosphate, isopropyl hydroxycetyl ether, le glycol stearate, triisononanoin, octyl cocoate, polyacrylamide, isoparaffin, laureth-7, carbomer, propylene glycol, glycerol, bisabolol, dimethicone, sodium hydroxide, PEG 30-dipolyhydroxysterate, capric/caprylic triglycerides, cetearyl octanoate, dibutyl adipate, grapeseed oil, jojoba oil, magnesium sulfate, EDTA, cyclomethicone, xanthan gum, citric acid, sodium lauryl sulfate, mineral waxes and oils, isostearyl isostearate, dipelargonate of propylene glycol, isostearate of propylene glycol, PEG 8, beeswax, glyceride of hydrogenated palm kernel oil, lanolin oil, sesame oil, cetyl lactate, lanolin alcohol, titanium dioxide, lactose, saccharose, low-density polyethylene, and isotonic salt solution.

[1061] In one example, the dermatological composition as defined herein may contain at least one other active agents and/or excipients and/or additives of pharmaceutical, especially dermatological, interest such as agents with the following properties:
[1062] wound-healing properties; such as panthenol and derivatives thereof, for example ethyl panthenol, aloe vera, pantothenic acid and derivatives thereof, allantoin, bisabolol, and dipotassium glycyrrhizinate;
[1063] anti-inflammatory properties: such as steroidal and non-steroidal antiinflammatories, in particular Inhibitors of the production of cytokines and chemokines, of cyclooxygenase, of nitric oxide (NO) and nitric oxide synthase (NOS). As an example of anti-inflammatory products, mention may be made of extracts of Ginkgo biloba, trilactone terpenes such as ginkgolides, especially ginkgolide B and bilobalide known for their platelet-activating factor (PAF) antagonist properties.

[1064] The CTFA Cosmetic Ingredient Handbook, Second Edition (1992), which is hereby incorporated by reference in its entirety, describes different cosmetic and pharmaceutical ingredients currently used in the cosmetic and pharmaceutical industry that are particularly adapted to topical use and which may be used in a dermatological composition of the invention. Examples of these types of ingredients include but are not limited to the following compounds: abrasives, absorbent compounds, compounds with aesthetic purposes such as perfumes, pigments, colorants, essential oils, astringents, etc. (for example: clove oil, menthol, camphor, eucalyptus oil, eugenol, menthyl lactate, and hamelis distillate), anti-acne agents, anti-flocculant agents, anti-foaming agents, anti-microbial agents (for example iodopropyl butylcarbamate), les antioxidants, bonding agents, biological additives, tampon agents, swelling agents, chelatants, additives, biocidal agents, denaturants, external analgesics, film-forming materials, polymers, opacifying agents, pH adjusters, reducing agents, depigmenting or lightening agents (for example: hydroquinone, kojic acid, ascorbic acid, magnesium ascorbyl phosphate, ascorbyl glucosamine), conditioning agents (for example: humectants), calming agents for the skin and/or scarring agents (for example: panthenol and its derivatives, for example ethyl panthenol), aloe vera, pantothenic acid and its derivatives, allantoin, bisabolol and dipotassium glycyrrhizinate), thickeners, vitamins, and the derivatives or equivalents of these.

[1065] In one aspect, the present disclosure provides a (modified) cyclic GFR-binding compound, a functionalised bioactive carrier, or a dermatological composition, all as defined herein, for use in preventing and/or treating scars and/or inflammations such as gingivitis.

[1066] In one particular example, the dermatological composition is intended for treating skin in which the dermis is at least partially damaged, especially in subjects who have undergone a surgical operation, or who have been burned and/or injured. This treatment makes it possible to stimulate the proliferation and/or the activity of fibroblasts, in order to stimulate tissue repair and/or dermal reconstruction.

[1067] In one aspect, the present disclosure provides a (modified) cyclic GFR-binding compound, a functionalised bioactive carrier, or a dermatological composition, all as defined herein, for use in preventing and/or treating at least one of acne, alopecia areata, bowen's disease, congenital erythropoietic porphyria, contact dermatitis, darier's disease, eczema (atopic eczema), epidermolysis bullosa simplex, erythropoietic protoporphyria, fungal infections of nails, hailey-hailey disease, herpes simplex, hidradenitis suppurativa, hirsutism, hyperhidrosis, ichthyosis, impetigo, keloids, keratosis pilaris, lichen planus, lichen sclerosus, melasma, pemphigus vulgaris, plantar warts (verrucas), pityriasis lichenoides, polymorphic light eruption, psoriasis, pyoderma gangrenosum, rosacea, scabies, shingles and vitiligo.

[1068] In one aspect, the present disclosure also provides a dermatological care or treatment method for a subject having need thereof, said method comprising the topical application, intradermal injection or oral administration, preferably the topical application or the intradermal injection, of a (suitable amount of) at least one (modified) cyclic GFR-binding compound, functionalised bioactive carrier, or dermatological composition, all as defined herein.

[1069] Such a dermatological care or treatment method includes the applications cited herein.

[1070] Suitable as amounts of (modified) cyclic GFR-binding compounds or functionalised bioactive carrier for implementing embodiments of the invention in the dermatological field include the group consisting of between about 0.0001 μg/day to about 5000 mg/day, between about 0.0001 μg/day to about 1000 mg/day, between about 0.0001 μg/day to about 10 mg/day, between about 0.0001 μg/day to about 1 mg/day, or between about 0.0001 μg/day to about 100 μg/day, all being preferred for implementing embodiments of the invention.

[1071] Advantageously, the subject who has need thereof is a subject chosen from a population having an average age of more than 30 years old or who has had sunlight over-exposure, has a family history of skin conditions.

### XIV. Ophthalmic Applications

[1072] Preferable dosage forms for the (modified) cyclic GFR-binding compound functionalised bioactive carrier or pharmaceutical composition, all as defined herein, for treating eye retina diseases, disorders or conditions include, for example, in certain embodiments, eye drops and eye ointments. These can be prepared using conventional techniques. For instance, eye drops may be prepared, using isotonic agents such as sodium chloride, buffers such as sodium phosphate, and preservatives such as benzalkonium chloride. A suitable pH is within an ophthalmologically acceptable range. Preferred pH is within pH 4 to 8.

[1073] Particularly preferred administration routes include vitreal and intraocular.

[1074] A suitable dose of (modified) cyclic GFR-binding compound, functionalised bioactive carrier, or pharmaceutical composition for treating eye disorders is appropriately selected, depending on the symptoms, age of patients, dosage form and the like. For eye drops, suitable concentration may be 0.0001 to 10 w/v %, preferably 0.0001 to 0.01 w/v % for administration into eyes once or several times a day.

### XV. Surgical Treatments

[1075] The (modified) cyclic GFR-binding compounds, functionalised bioactive carriers, and pharmaceutical compositions, all as defined herein, may be used in surgical methods suitable for protecting (e.g. treating or preventing) a patient or subject from a disease, condition, disorder or pathology to whom a surgical intervention would be beneficial.

[1076] For example, in certain embodiments, said surgical method may be selected from the group consisting of bone-repair surgery, cartilage-repair surgery, heart surgery, kidneys or lung surgery, eye surgery, muscle-repair surgery, and tendon/ligament-repair surgery.

[1077] In one aspect, the present invention thus discloses a surgical method for surgical treatment comprising the contacting of at least one (modified) cyclic GFR-binding compound, at least one functionalised bioactive carrier, a pharmaceutical, prophylactic, diagnostic or imaging composition thereof, or medical device, all as defined herein, with a body part of a patient to be treated, wherein said contacting induces stem cell differentiation and tissue formation.

[1078] In one example, said surgical method comprises the placement or implantation of an implantable medical device comprising a (modified) cyclic GFR-binding compound, a functionalised bioactive carrier, or a pharmaceutical, prophylactic, diagnostic or imaging composition thereof, all as defined herein, inside a patient or subject in need of such a surgical treatment.

[1079] For example, in certain embodiments, the surgical treatment of the invention may include the use of a placement, insertion or depositing device for contacting said cyclic GFR-binding compound, said functionalised bioactive carrier, or a pharmaceutical, prophylactic, diagnostic or imaging composition thereof with a body part of a patient or subject in need of such a treatment. In one example, said placement, insertion or depositing device comprises an injection device such as a syringe.

[1080] In certain embodiments, said surgical method comprises the positioning of a cyclic GFR-binding compound, a functionalised bioactive carrier, or a pharmaceutical, prophylactic, diagnostic or imaging composition thereof, all as defined herein, inside said injection device for injection into a patient or into a body part of a patient.

[1081] In one example, said medical device comprises titanium and/or PEEK and/or PET and/or hydrogel and/or ceramic. In one particular example, said medical device replaces part of or all of a body part of a patient or subject. In one example, said body part is a malfunctioning or damaged body part such as, for instance, a bone, the skin, the hair scalp, an eye, etc.

### XVI. Pharmaceutical Applications, Uses and Methods

[1082] Some growth factors interact with type I and II growth factor receptors belonging to the serine threonine kinase family. Conventionally, to mediate signaling pathways, growth factors interact with these receptors by forming specific dimeric or oligomeric structures. The type-II receptor, which is constitutively active, phosphorylates the type-I receptor, which then activates the transduction pathway Smad1/5/8. Receptors of both types are thus conventionally needed to form a functional complex in order to initiate further signaling events. Phosphorylated Smads then dissociate from the receptors and bind Smad4, a common mediator, leading to nuclear translocation, regulation of specific genes, and eventually may induce tissue regeneration.

[1083] Prior in-vitro and in-vivo scientific studies have reported that influencing the natural/conventional biology of human mesenchymal stem cells using exogenous entity or molecules such as recombinant growth factor proteins or peptide fragments thereof, may have an effect on cell differentiation and tissue regeneration. A (modified) cyclic GFR-binding compound or a functionalised bioactive carrier of the present disclosure may be one such exogenous entity or molecule.

[1084] For example, in certain embodiments, medical treatments may demonstrate the effect of the influence of an exogenous entity or molecule on human mesenchymal stem cells using a medical device onto or into which such an exogenous entity or molecule has been reversibly or irreversibly incorporated or deposited, both being equally preferred, and placed into a patient in need thereof.

[1085] In one example, medical treatments may provide the effect of the influence of an exogenous entity or molecule on human mesenchymal stem cells using a pharmaceutical composition containing such an exogenous entity or molecule and a pharmaceutically acceptable excipient or carrier, administered, for instance, orally, enterically, intravenously, peritoneally, subcutaneously, transdermally, parenterally, or rectally, to a patient in need of such a treatment.

[1086] As already stated herein, for in-vivo administration, compounds or compositions of the present invention may be injected at a target site so that they can be delivered in close proximity to the cells to be treated via, e.g. a PTD or cell-permeable peptide. Alternately, an implant (or medical device or implantable medical device) comprising a PTD/cyclic GFR-binding compound complex may be used.

[1087] The present invention generally provides for uses and methods of inducing mesenchymal stem cell or progenitor cell (at any stage of differentiation) differentiation and/or inducing, promoting, enhancing, controlling or regulating tissue regeneration/formation in-vitro, ex-vivo and in-vivo.

[1088] Conveniently, such a tissue formation process is generally achieved within less than 7 days. In particular, such a tissue formation process is generally achieved within less than 6 days. In particular, such a tissue formation process is generally achieved within less than 5 days. In particular, such a tissue formation process is generally achieved within less than 4 days. In particular, such a tissue formation process is generally achieved within less than 3 days. In particular, such a tissue formation process is generally achieved within less than 2 days. In particular, such a tissue formation process is generally achieved within less than 24 hours. In particular, such a tissue formation process is generally achieved within less than 18 hours.

[1089] In one aspect, the present disclosure provides a pharmaceutical (therapeutic, dermatologic, ophthalmologic, diagnostic, etc.) composition as defined herein for use in a method of non-mutagenically inducing tissue formation i.e. without modifying or altering the genome of the treated cells, in-vitro, ex-vivo or in-vivo. Also provided is a method of inducing tissue formation i.e. without modifying or altering the genome of the treated cells, comprising the in-vitro, ex-vivo or in-vivo administration of an effective amount of a (modified) cyclic GFR-binding compound, a functionalised bioactive carrier, or a pharmaceutical (therapeutic, dermatologic, ophthalmologic, diagnostic, etc.) composition as defined herein.

[1090] In one aspect, the present disclosure provides a pharmaceutical (therapeutic, dermatologic, ophthalmologic, diagnostic, etc.) composition as defined herein for use in a method of extracellular induction of tissue formation. Also provided is a method of extracellular tissue formation induction, comprising the in-vitro, ex-vivo or in-vivo administration of an effective amount of a (modified) cyclic GFR-binding compound, a functionalised bioactive carrier, or a pharmaceutical (therapeutic, dermatologic, ophthalmologic, diagnostic, etc.) composition as defined herein.

[1091] An extracellular treatment as used herein implies a biological action/effect to be provided or to occur outside the cell to be treated (i.e. a mesenchymal stem cell). In other words, the biologically active agent (e.g. the cyclic GFR-binding compound or the pharmaceutical composition as defined herein) delivers/provides its biological/pharmaceutical effect to the outside of the cell (e.g. on the cell's surface) without the need to penetrate through the cell membrane, inside the cell to be treated. Once the extracellular action/effect has been administered/delivered to the cell to be treated, said active agent may be, for instance, excreted from the host organism with or without being metabolised, and/or tagged to be destroyed through apoptotic routes, and/or internalised by nearby cells, etc. . . . .

[1092] In one aspect, the present disclosure provides a method of producing a physiologically functional and healthy cell, comprising the administration in-vitro, ex-vivo or in-vivo to a mesenchymal stem cell or progenitor cell (at any stage of differentiation) of an effective amount of a (modified) cyclic GFR-binding compound, a functionalised bioactive carrier, or a pharmaceutical (therapeutic, dermatologic, ophthalmologic, diagnostic, etc.) composition as defined herein and wherein said physiologically functional and healthy cell is selected from the group consisting of an osteoblast, osteocyte, chondroblast, chondrocyte, neuroblast, neurocyte, Sertoli cells, Leydig cell, Germ cell, Myoblast, Myocyte, keratinocyte, endothelial cells, angioblast, fibroblast, fibrocyte, podocyte, areolar connective cells, adipocytes, pre-adipocytes/lipoblasts, epithelial cells, erythrocytes, alveolar cells, hematopoietic stem cells (HSC), myeloid progenitors, lymphoid progenitors, mast cells, myeloblasts, monocytes, macrophages, neutrophils, basophils, eosinophils, erythrocytes, megakaryocytes, thrombocytes, dendritic cells, small lymphocytes, T-lymphocytes (T-cells), B-lymphocytes (B-cells), and natural killer (NK)-cells.

[1093] In one aspect, the present disclosure provides methods to activate a growth factor receptor present on the surface of a mesenchymal stem cell or progenitor cell (at any stage of differentiation), said method comprising administering to said mesenchymal stem cell or progenitor cell (at any stage of differentiation) an effective amount of a (modified) cyclic GFR-binding compound, a functionalised bioactive carrier, or a pharmaceutical (therapeutic, dermatologic, ophthalmologic, diagnostic, etc.) composition as defined herein, wherein administering said cyclic GFR-binding compound, a functionalised bioactive carrier, or a pharmaceutical (therapeutic, dermatologic, ophthalmologic, diagnostic, etc.) composition as defined herein activates the growth factor receptor present on the surface of the mesenchymal stem cell or progenitor cell (at any stage of differentiation).

[1094] In one aspect, the present disclosure provides methods of delivering a (modified) cyclic GFR-binding compound, a functionalised bioactive carrier, or a pharmaceutical (therapeutic, dermatologic, ophthalmologic, diagnostic, etc.) composition, all as defined herein, in-vitro, ex-vivo or in-vivo to a mesenchymal stem cell or progenitor cell (at any stage of differentiation), comprising the contacting of said mesenchymal stem cell or progenitor cell (at any stage of differentiation) with said (modified) cyclic GFR-binding compound, a functionalised bioactive carrier, or a pharmaceutical (therapeutic, dermatologic, ophthalmologic, diagnostic, etc.) composition.

[1095] In one aspect, the present disclosure provides methods of administering a (modified) cyclic GFR-binding compound, a functionalised bioactive carrier, or a pharmaceutical (therapeutic, dermatologic, ophthalmologic, diagnostic, etc.) composition, all as defined herein, to a patient or subject comprising the contacting of at least one body part of said patient or subject with said (modified) cyclic GFR-binding compound, a functionalised bioactive carrier, or a pharmaceutical (therapeutic, dermatologic, ophthalmologic, diagnostic, etc.) composition.

[1096] In one example, the (modified) cyclic GFR-binding compound, functionalised bioactive carrier, or pharmaceutical (therapeutic, dermatologic, ophthalmologic, diagnostic, etc.) composition, all as defined herein, may be a mammal (preferably a human) tissue-inductive compound, bioactive carrier or composition, which has demonstrated the ability to induce tissue formation in vitro and/or in vivo.

[1097] In one aspect, the present disclosure provides an effective amount of at least one (modified) cyclic GFR-binding compound, at least one functionalised bioactive carrier, or at least one pharmaceutical (therapeutic, dermatologic, ophthalmologic, diagnostic, etc.) composition, all as defined herein, for use in a medical method such as in therapy, surgery or in diagnostic methods.

[1098] In one aspect, the present disclosure provides a method of inducing or promoting or enhancing mesenchymal stem cell or progenitor cell (at any stage of differentiation) differentiation, the method comprising administering to the cell an effective amount of at least one (modified) cyclic GFR-binding compound, at least one functionalised bioactive carrier, or at least one pharmaceutical (therapeutic, dermatologic, ophthalmologic, diagnostic, etc.) composition, all as defined herein. In one aspect, the present invention discloses an effective amount of at least one (modified) cyclic GFR-binding compound, at least one functionalised bioactive carrier, or at least one pharmaceutical (therapeutic, dermatologic, ophthalmologic, diagnostic, etc.) composition, all as defined herein, for use in a method of inducing or promoting or enhancing mesenchymal stem cell or progenitor cell (at any stage of differentiation) differentiation

[1099] In one aspect, the present disclosure provides a method of inducing or promoting or enhancing or controlling or regulating tissue regeneration/formation, the method comprising administering to a mesenchymal stem cell or to a progenitor cell at any stage of differentiation or to a mature cell an effective amount of at least one (modified) cyclic GFR-binding compound, at least one functionalised bioactive carrier, or at least one pharmaceutical (therapeutic, dermatologic, ophthalmologic, diagnostic, etc.) composition, all as defined herein. In one aspect, the present invention discloses an effective amount of at least one (modified) cyclic GFR-binding compound, at least one functionalised bioactive carrier, or at least one pharmaceutical (therapeutic, dermatologic, ophthalmologic, diagnostic, etc.) composition, all as defined herein, for use in a method of inducing or promoting or enhancing or controlling or regulating tissue regeneration/formation.

[1100] In one aspect, the present disclosure provides a method of inducing and/or promoting and/or enhancing cell motility or single/collective cell migration, the method comprising administering to a mesenchymal stem cell or to a progenitor cell at any stage of differentiation or to a mature cell an effective amount of at least one (modified) cyclic GFR-binding compound, at least one functionalised bioactive carrier, or at least one pharmaceutical (therapeutic, dermatologic, ophthalmologic, diagnostic, etc.) composition, all as defined herein. In one aspect, the present invention discloses an effective amount of at least one (modified) cyclic GFR-binding compound, at least one functionalised bioactive carrier, or at least one pharmaceutical (therapeutic, dermatologic, ophthalmologic, diagnostic, etc.) composition, all as defined herein, for use in a method of inducing and/or promoting and/or enhancing cell motility or single/collective cell migration.

[1101] In one aspect, the present invention discloses a method of inducing and/or promoting and/or enhancing cell maturation, the method comprising administering to a differentiated cell or to a mature cell an effective amount of at least one (modified) cyclic GFR-binding compound, at least one functionalised bioactive carrier, or at least one pharmaceutical (therapeutic, dermatologic, ophthalmologic, diagnostic, etc.) composition, all as defined herein. In one aspect, the present invention discloses an effective amount of at least one (modified) cyclic GFR-binding compound, at least one functionalised bioactive carrier, or at least one pharmaceutical (therapeutic, dermatologic, ophthalmologic, diagnostic, etc.) composition, all as defined herein, for use in a method of inducing and/or promoting and/or enhancing cell maturation.

[1102] In one example, the (modified) cyclic GFR-binding compound, functionalised bioactive carrier, or pharmaceutical (therapeutic, dermatologic, ophthalmologic, diagnostic, etc.) composition, all as defined herein, may be combined/mixed with adult stem cells and/or multipotent progenitor cells prior to be administered or implanted into a mammal (preferably a human) to promote tissue regeneration.

[1103] In one example, the (modified) cyclic GFR-binding compound, functionalised bioactive carrier, or pharmaceutical (therapeutic, dermatologic, ophthalmologic, diagnostic, etc.) composition, all as defined herein, may be administered as such and may be combined/mixed with adult stem cells and/or multipotent progenitor cells prior to administration to a mammal (preferably a human) to promote tissue regeneration.

[1104] In particular, medical applications which may result from the mediation of type I and II growth factor receptors by a (modified) cyclic GFR-binding compound, functionalised bioactive carrier, or pharmaceutical (therapeutic, dermatologic, ophthalmologic, diagnostic, etc.) composition, all as defined herein, include, but are not limited to, enhancing of osteogenesis, inducing bone formation, inducing osteocyte maturation, and/or treating and/or preventing osteoporosis.

[1105] In one example, a (modified) cyclic GFR-binding compound, functionalised bioactive carrier, or pharmaceutical (therapeutic, dermatologic, ophthalmologic, diagnostic, etc.) composition, all as defined herein, may thus be an osteoinductive compound, bioactive carrier or composition which has demonstrated an ability to induce bone formation in vitro and/or ex-vivo and/or in vivo.

[1106] In one aspect, the present disclosure thus provides:
[1107] a method of inducing or promoting or enhancing mesenchymal stem cell, progenitor osteoblast (at any stage of differentiation of the Osteoblast cell lineage) differentiation, the method comprising administering to the cell an effective amount of at least one (modified) cyclic GFR-binding compound, at least one functionalised bioactive carrier, or at least one pharmaceutical composition, all as defined herein;
[1108] a method of inducing or promoting or enhancing or controlling or regulating bone tissue regeneration/formation, the method comprising administering to a mesenchymal stem cell or to a progenitor osteoblast at any stage of differentiation of the osteoblast cell lineage or to a mature osteoblast, an effective amount of at least one (modified) cyclic GFR-binding compound, at least one functionalised bioactive carrier, or at least one pharmaceutical composition, all as defined herein;
[1109] a method of inducing and/or promoting and/or enhancing osteocyte maturation, the method comprising administering to a differentiated osteoblast or to a mature osteoblast (e.g. an osteocyte) an effective amount of at least one (modified) cyclic GFR-binding compound, at least one functionalised bioactive carrier, or at least one pharmaceutical composition, all as defined herein;
[1110] an effective amount of at least one (modified) cyclic GFR-binding compound, at least one functionalised bioactive carrier, or at least one pharmaceutical composition, all as defined herein for use in a method of inducing or promoting or enhancing mesenchymal stem cell or progenitor osteoblast (at any stage of differentiation of the osteoblast cell lineage) differentiation;
[1111] an effective amount of at least one (modified) cyclic GFR-binding compound, at least one functionalised bioactive carrier, or at least one pharmaceutical composition, all as defined herein for use in a method of inducing or promoting or enhancing or controlling or regulating bone tissue regeneration/formation;
[1112] an effective amount of at least one (modified) cyclic GFR-binding compound, at least one functionalised bioactive carrier, or at least one pharmaceutical composition, all as defined herein for use in a method of inducing and/or promoting and/or enhancing osteoblast maturation.

[1113] In particular, medical applications which may result from the mediation of type I and II growth factor receptors by a (modified) cyclic GFR-binding compound, functionalised bioactive carrier, or pharmaceutical (therapeutic, dermatologic, ophthalmologic, diagnostic, etc.) composition, all as defined herein, include, but are not limited to, enhancing of chondrogenesis and/or inducing cartilage formation, and/or inducing chondrocyte maturation and/or treating and/or preventing at least one of osteoarthritis, costochondritis, Herniation, achondroplasia or relapsing polychondritis.

[1114] In one example, a (modified) cyclic GFR-binding compound, functionalised bioactive carrier, or pharmaceutical (therapeutic, dermatologic, ophthalmologic, diagnostic, etc.) composition, all as defined herein, may be a chondroinductive compound, bioactive carrier or composition which has demonstrated the ability to induce cartilage formation in vitro and/or ex-vivo and/or in vivo.

[1115] In one aspect, the present disclosure thus provides:
[1116] a method of inducing or promoting or enhancing mesenchymal stem cell, progenitor chondroblast (at any stage of differentiation of the chondrocytic cell lineage) differentiation, the method comprising administering to the cell an effective amount of at least one (modified) cyclic GFR-binding compound, at least one functionalised bioactive carrier, or at least one pharmaceutical composition, all as defined herein;
[1117] a method of inducing or promoting or enhancing or controlling or regulating cartilage tissue regeneration/formation, the method comprising administering to a mesenchymal stem cell or to a progenitor chondroblast (at any stage of differentiation of the chondrocytic cell lineage) or to a mature chondroblast, an effective amount of at least one (modified) cyclic GFR-binding compound, at least one functionalised bioactive carrier, or at least one pharmaceutical composition, all as defined herein;
[1118] a method of inducing and/or promoting and/or enhancing chondrocyte maturation, the method comprising administering to a differentiated chondroblast or to a mature osteoblast (e.g. a chondrocyte) an effective amount of at least one cyclic GFR-binding compound, at least one functionalised bioactive carrier, or at least one pharmaceutical composition, all as defined herein;
[1119] an effective amount of at least one (modified) cyclic GFR-binding compound, at least one functionalised bioactive carrier, or at least one pharmaceutical composition, all as defined herein for use in a method of inducing or promoting or enhancing mesenchymal stem cell or progenitor chondroblast (at any stage of differentiation of the chondrocytic cell lineage) differentiation;
[1120] an effective amount of at least one (modified) cyclic GFR-binding compound, at least one functionalised bioactive carrier, or at least one pharmaceutical composition, all as defined herein for use in a method of inducing or promoting or enhancing or controlling or regulating cartilage tissue regeneration/formation;
[1121] an effective amount of at least one (modified) cyclic GFR-binding compound, at least one functionalised bioactive carrier, or at least one pharmaceutical composition, all as defined herein for use in a method of inducing and/or promoting and/or enhancing chondroblast maturation.

[1122] In particular, medical applications which may result from the mediation of type I and II growth factor receptors by a cyclic GFR-binding compound, functionalised bioactive carrier, or pharmaceutical (therapeutic, dermatologic, ophthalmologic, diagnostic, etc.) composition, all as defined herein, include, but are not limited to, enhancing of endothelization and/or vascularization/angiogenesis and/or treating and/or preventing at least one of coronary artery disease (also known as coronary heart disease and ischemic heart disease), cardiomyopathy, hypertensive heart disease, heart failure, cor pulmonale, cardiac dysrhythmias, inflammatory heart disease, endocarditis, inflammatory cardiomegaly, myocarditis, valvular heart disease, cerebrovascular disease, peripheral arterial disease, congenital heart disease, or rheumatic heart disease.

[1123] In one example, a cyclic GFR-binding compound, functionalised bioactive carrier, or pharmaceutical (therapeutic, dermatologic, ophthalmologic, diagnostic, etc.) composition, all as defined herein, may be an endothelization/vascularization/angiogenesis-promoting compound, bioactive carrier or composition which has demonstrated the ability to induce vascular tissue formation in vitro and/or ex-vivo and/or in vivo.

[1124] In one aspect, the present disclosure thus provides:
[1125] a method of inducing or promoting or enhancing mesenchymal stem cell, progenitor endothelial cell (at any stage of differentiation of the vascular cell lineage) differentiation, the method comprising administering to the cell an effective amount of at least one (modified) cyclic GFR-binding compound, at least one functionalised bioactive carrier, or at least one pharmaceutical composition, all as defined herein;
[1126] a method of inducing or promoting or enhancing or controlling or regulating vascular tissue regeneration/formation and/or tubular formation, the method comprising administering to a mesenchymal stem cell or to a progenitor endothelial cell at any stage of differentiation of the vascular cell lineage or to a mature endothelial cell, an effective amount of at least one (modified) cyclic GFR-binding compound, at least one functionalised bioactive carrier, or at least one pharmaceutical composition, all as defined herein;
[1127] a method of inducing and/or promoting and/or enhancing cell motility or single/collective endothelial cell migration and/or angiogenesis, the method comprising administering to a mesenchymal stem cell or to a progenitor endothelial cell at any stage of differentiation of the vascular cell lineage or to a mature endothelial cell an effective amount of at least one (modified) cyclic GFR-binding compound, at least one functionalised bioactive carrier, or at least one pharmaceutical composition, all as defined herein.
[1128] a method of inducing and/or promoting and/or enhancing endothelial cell maturation, the method comprising administering to a differentiated endothelial cell or to a mature endothelial cell an effective amount of at least one (modified) cyclic GFR-binding compound, at least one functionalised bioactive carrier, or at least one pharmaceutical composition, all as defined herein;
[1129] an effective amount of at least one (modified) cyclic GFR-binding compound, at least one functionalised bioactive carrier, or at least one pharmaceutical composition, all as defined herein for use in a method of inducing or promoting or enhancing mesenchymal stem cell, progenitor endothelial cell (at any stage of differentiation of the vascular cell lineage) differentiation;
[1130] an effective amount of at least one (modified) cyclic GFR-binding compound, at least one functionalised bioactive carrier, or at least one pharmaceutical composition, all as defined herein for use in a method of inducing or promoting or enhancing or controlling or regulating vascular tissue regeneration/formation and/or tubular formation;
[1131] an effective amount of at least one (modified) cyclic GFR-binding compound, at least one functionalised bioactive carrier, or at least one pharmaceutical composition, all as defined herein for use in a method of inducing and/or promoting and/or enhancing cell motility or single/collective endothelial cell migration and/or angiogenesis,
[1132] an effective amount of at least one (modified) cyclic GFR-binding compound, at least one functionalised bioactive carrier, or at least one pharmaceutical composition, all as defined herein for use in a method of inducing and/or promoting and/or enhancing endothelial cell maturation.

[1133] In particular, medical applications which may result from the mediation of type I and II growth factor receptors by a cyclic GFR-binding compound, functionalised bioactive carrier, or pharmaceutical (therapeutic, dermatologic, ophthalmologic, diagnostic, etc.) composition, all as defined herein, include, but are not limited to, enhancing axonal dendritic neuron growth thus promoting neuron-regeneration and/or treating and/or preventing and/or decreasing or suppressing neuron degeneration-related conditions and diseases.

[1134] In the present description and unless otherwise indicated, the term “neuron-regeneration” or “neuroregeneration” means the regrowth or repair of nervous tissues, cells or cell products involving the participation of stem cells. Such mechanisms may include generation of new neurons, glia, axons, myelin, or synapses. Neurological disorders in which the present invention may thus be useful include, but are not limited to, ALS, Agraphia Alzheimer's disease, Amyotrophic lateral sclerosis, Angle man syndrome, Aphasia Apraxia, Arachnoiditis, Ataxia Telangiectasia, Attention deficit hyperactivity disorder, Auditory processing disorder, Autism, Alcoholism, asperger's syndrome, Bipolar disorder, Bell's palsy, Brachial plexus injury, Brain damage, Brain injury, Canavan disease, Capgras delusion, Causalgia, Central pain syndrome, Central pontine myelinolysis, Centronuclear myopathy, Cephalic disorder, Cerebral aneurysm, Cerebral arteriosclerosis, Cerebral atrophy, Cerebral gigantism, Cerebral palsy, Cerebral vasculitis, Cervical spinal stenosis, Charcot-Marie-Tooth disease, Chiari malformation, Chorea, Chronic fatigue syndrome, Chronic inflammatory demyelinating polyneuropathy (CIDP), Chronic pain, Coffin-Lowry syndrome, Coma, Complex regional pain syndrome, Compression neuropathy, Congenital facial diplegia, Corticobasal degeneration, Cranial arteritis, Craniosynostosis, Creutzfeldt-Jakob disease, Cumulative trauma disorders, Cushing's syndrome, Cytomegalic inclusion body disease (CIBD), Cytomegalovirus Infection, Dandy-Walker syndrome, Dawson disease, De Morsier's syndrome, Dejerine-Klumpke palsy, Dejerine-Sottas disease, Delayed sleep phase syndrome, Dementia, Dermatomyositis, Developmental coordination disorder, Diabetic neuropathy, Diffuse sclerosis, Downs syndrome, Dravet syndrome, Dysautonomia, Dyscalculia, Dysgraphia, Dyslexia, Dystonia, Empty sella syndrome, Encephalitis, Encephalocele, Encephalotrigeminal angiomatosis, Encopresis, Epilepsy, Erb's palsy, Erythromelalgia, Essential tremor, Fabry's disease, Fahr's syndrome, Fainting, Familial spastic paralysis, Febrile seizures, Fisher syndrome, Friedreich's ataxia, Fibromyalgia, Foville's syndrome, Fetal alcohol syndrome, Fragile X Tremor Ataxia Syndrome, Gaucher's disease, Gerstmann's syndrome, Giant cell arteritis, Giant cell inclusion disease, Globoid Cell Leukodystrophy, Gray matter heterotopia, Guillain-Barre syndrome, HTLV-1 associated myelopathy, Hallervorden-Spatz disease, Head injury, Headache, Hemifacial Spasm, Hereditary Spastic Paraplegia, Heredopathia atactica polyneuritiformis, Herpes zoster oticus, Herpes zoster, Hirayama syndrome, Holoprosencephaly, Huntington's disease, Hydranencephaly, Hydrocephalus, Hypercortisolism, Hypoxia, Immune-Mediated encephalomyelitis, Inclusion body myositis, Incontinentia pigmenti, Infantile Refsum disease, Infantile spasms, Inflammatory myopathy, Intracranial cyst, Intracranial hypertension, Joubert syndrome, Karak syndrome, Kearns-Sayre syndrome, Kennedy disease, Kinsbourne syndrome, Kleine-Levin Syndrome, Klippel Feil syndrome, Krabbe disease, Kugelberg-Welander disease, Lafora disease, Lambert-Eaton myasthenic syndrome, Landau-Kleffner syndrome, Lateral medullary (Wallenberg) syndrome, Learning disabilities, Leigh's disease, Lennox-Gastaut syndrome, Lesch-Nyhan syndrome, Leukodystrophy, Lewy body dementia, Lissencephaly, Locked-In syndrome, Lou Gehrig's disease (See amyotrophic lateral sclerosis), Lumbar disc disease, Lumbar spinal stenosis, Lyme disease—Neurological Sequelae, Machado-Joseph disease (Spinocerebellar ataxia type 3), Macrencephaly, Macropsia, Megalencephaly, Melkersson-Rosenthal syndrome, Menieres disease, Meningitis, Menkes disease, Metachromatic leukodystrophy, Microcephaly, Micropsia, Migraine, Miller Fisher syndrome, Mini-stroke (transient ischemic attack), Misophonia, Mitochondrial myopathy, Mobius syndrome, Monomelic amyotrophy, Motor Neurone Disease—see amyotrophic lateral sclerosis, Motor skills disorder, Moyamoya disease, Mucopolysaccharidoses, Multi-infarct dementia, Multifocal motor neuropathy, Multiple sclerosis, Multiple system atrophy, Muscular dystrophy, Myalgic encephalomyelitis, Myasthenia gravis, Myelinoclastic diffuse sclerosis, Myoclonic Encephalopathy of infants, Myoclonus, Myopathy, Myotubular myopathy, Myotonia congenital, Narcolepsy, Neuro-Behget's disease, Neurofibromatosis, Neuroleptic malignant syndrome, Neurological manifestations of AIDS, Neurological sequelae of lupus, Neuromyotonia, Neuronal ceroid lipofuscinosis, Neuronal migration disorders, Neuropathy, Neurosis, Niemann-Pick disease, Non-24-hour sleep-wake disorder, Nonverbal learning disorder, O'Sullivan-McLeod syndrome, Occipital Neuralgia, Occult Spinal Dysraphism Sequence, Ohtahara syndrome, Olivopontocerebellar atrophy, Opsoclonus myoclonus syndrome, Optic neuritis, Orthostatic Hypotension, Otosclerosis, Overuse syndrome, Palinopsia, Paresthesia, Parkinson's disease, Paramyotonia Congenita, Paroxysmal attacks, Parry-Romberg syndrome, Pelizaeus-Merzbacher disease, Periodic Paralyses, Peripheral neuropathy, Pervasive developmental disorders, Photic sneeze reflex, Phytanic acid storage disease, Pick's disease, Pinched nerve, PMG, Polyneuropathy, Polio, Polymicrogyria, Polymyositis, Porencephaly, Post-Polio syndrome, Postherpetic Neuralgia (PHN), Postural Hypotension, Prader-Willi syndrome, Primary Lateral Sclerosis, Prion diseases, Progressive hemifacial atrophy, Progressive multifocal leukoencephalopathy, Progressive Supranuclear Palsy, Quadriplegia, Rabies, Ramsay Hunt syndrome type I, Ramsay Hunt syndrome type II, Ramsay Hunt syndrome type III, Rasmussen's encephalitis, Reflex neurovascular dystrophy, Refsum disease, Repetitive stress injury, Restless legs syndrome, Retrovirus-associated myelopathy, Rett syndrome, Reye's syndrome, Rhythmic Movement Disorder, Romberg syndrome, Saint Vitus dance, Sandhoff disease, Schizencephaly, Sensory processing disorder, Septo-optic dysplasia, Shaken baby syndrome, Shingles, Shy-Drager syndrome, Sjögren's syndrome, Sleep apnea, Sleeping sickness, Snatiation, Sotos syndrome, Spasticity, Spina bifida, Spinal cord injury, Spinal muscular atrophy, Spinocerebellar ataxia, Split-brain, Steele-Richardson-Olszewski syndrome, Stiff-person syndrome, Stroke, Sturge-Weber syndrome, Subacute sclerosing panencephalitis, Subcortical arteriosclerotic encephalopathy, Superficial siderosis, Sydenham's chorea, Syncope, Synesthesia, Syringomyelia, Tarsal tunnel syndrome, Tardive dyskinesia, Tardive dysphrenia, Tarlov cyst, Tay-Sachs disease, Temporal arteritis, Tetanus, Tethered spinal cord syndrome, Thomsen disease, Thoracic outlet syndrome, Tic Douloureux, Todd's paralysis, Tourette syndrome, Toxic encephalopathy, Transient ischemic attack, Transmissible spongiform encephalopathies, Transverse myelitis, Traumatic brain injury, Tremor, Trigeminal neuralgia, Tropical spastic paraparesis, Trypanosomiasis, Tuberous sclerosis, Ubisiosis, Von Hippel-Lindau disease (VHL), Viliuisk Encephalomyelitis (VE), Wallenberg's syndrome, Werdnig-Hoffman disease, West syndrome, Whiplash, Williams syndrome, Wilson's disease and Zellweger syndrome.

[1135] In one example, a cyclic GFR-binding compound, functionalised bioactive carrier, or pharmaceutical (therapeutic, dermatologic, ophthalmologic, diagnostic, etc.) composition, all as defined herein, may be a neuroregenerative or neurodegeneration regulator/modulator/inhibitor compound, bioactive carrier or composition which has demonstrated the ability to induce neuroregeneration and/or prevention, decrease or suppression of neuron degeneration in vitro and/or ex-vivo and/or in vivo.

[1136] In one aspect, the present disclosure thus provides:
[1137] a method of inducing or promoting or enhancing mesenchymal stem cell, progenitor neuronal cell (at any stage of differentiation of the neuronal cell lineage) differentiation, the method comprising administering to the cell an effective amount of at least one (modified) cyclic GFR-binding compound, at least one functionalised bioactive carrier, or at least one pharmaceutical composition, all as defined herein;
[1138] a method of inducing or promoting or enhancing or controlling or regulating neuron regeneration/formation, the method comprising administering to a mesenchymal stem cell or to a progenitor neuronal cell at any stage of differentiation of the neuronal cell lineage or to a mature neuron, an effective amount of at least one (modified) cyclic GFR-binding compound, at least one functionalised bioactive carrier, or at least one pharmaceutical composition, all as defined herein;
[1139] a method of inducing and/or promoting and/or enhancing neuronal cell maturation, the method comprising administering to a differentiated neuronal cell or to a mature neuronal cell an effective amount of at least one (modified) cyclic GFR-binding compound, at least one functionalised bioactive carrier, or at least one pharmaceutical composition, all as defined herein;
[1140] an effective amount of at least one (modified) cyclic GFR-binding compound, at least one functionalised bioactive carrier, or at least one pharmaceutical composition, all as defined herein for use in a method of inducing or promoting or enhancing mesenchymal stem cell or progenitor neuronal cell (at any stage of differentiation of the neuronal cell lineage) differentiation;
[1141] an effective amount of at least one (modified) cyclic GFR-binding compound, at least one functionalised bioactive carrier, or at least one pharmaceutical composition, all as defined herein for use in a method of inducing or promoting or enhancing or controlling or regulating neuron regeneration/formation;
[1142] an effective amount of at least one (modified) cyclic GFR-binding compound, at least one functionalised bioactive carrier, or at least one pharmaceutical composition, all as defined herein for use in a method of inducing and/or promoting and/or enhancing neuronal cell maturation.

[1143] In particular, medical applications which may result from the mediation of type I and II growth factor receptors by a cyclic GFR-binding compound, functionalised bioactive carrier, or pharmaceutical (therapeutic, dermatologic, ophthalmologic, diagnostic, etc.) composition, all as defined herein, include, but are not limited to, enhancing/promoting eye retina cell regeneration and/or treating and/or preventing and/or decreasing or suppressing eye retina cell degeneration-related conditions or diseases.

[1144] Eye-related diseases or disorders in which the present invention may thus be useful include, but are not limited to, Focal chorioretinal inflammation Focal such chorioretinitis, choroiditis, retinitis and retinochoroiditis, Disseminated chorioretinal inflammation, Posterior cyclitis, Harada's disease, Chorioretinal scars such as Macula scars of posterior pole and Solar retinopathy, Choroidal degeneration such as Atrophy and Sclerosis, Hereditary choroidal dystrophy such as Choroideremia, Gyrate atrophy, Choroidal haemorrhage, Choroidal detachment, Chorioretinitis, Retinal detachment, Retinoschisis, Retinal vascular occlusions, Hypertensive retinopathy, Diabetic retinopathy, Retinopathy, Retinopathy of prematurity, Age-related macular degeneration, Macular degeneration, Epiretinal membrane, Peripheral retinal degeneration, Hereditary retinal dystrophy, Retinitis pigmentosa, Retinal haemorrhage, Central serous retinopathy, Retinal detachment and Macular edema.

[1145] In one example, a cyclic GFR-binding compound, functionalised bioactive carrier, or pharmaceutical (therapeutic, dermatologic, ophthalmologic, diagnostic, etc.) composition, all as defined herein, may be an eye tissue-regenerative or eye tissue-degeneration regulator/modulator/inhibitor compound, bioactive carrier or composition which has demonstrated the ability to induce eye retina cell regeneration and/or prevent and/or decrease or suppress eye retina cell degeneration in vitro and/or ex-vivo and/or in vivo.

[1146] In one aspect, the present disclosure thus provides:
[1147] a method of inducing or promoting or enhancing mesenchymal stem cell, progenitor eye retina cell (at any stage of differentiation of the retinal cell lineage) differentiation, the method comprising administering to the cell an effective amount of at least one (modified) cyclic GFR-binding compound, at least one functionalised bioactive carrier, or at least one pharmaceutical composition, all as defined herein;
[1148] a method of inducing or promoting or enhancing or controlling or regulating eye retina cell regeneration/formation, the method comprising administering to a mesenchymal stem cell or to a progenitor eye retina cell at any stage of differentiation of the retinal cell lineage or to a mature eye retina cell, an effective amount of at least one (modified) cyclic GFR-binding compound, at least one functionalised bioactive carrier, or at least one pharmaceutical composition, all as defined herein;
[1149] a method of inducing and/or promoting and/or enhancing eye retina cell maturation, the method comprising administering to a differentiated eye retina cell or to a mature eye retina cell an effective amount of at least one (modified) cyclic GFR-binding compound, at least one functionalised bioactive carrier, or at least one pharmaceutical composition, all as defined herein;
[1150] an effective amount of at least one (modified) cyclic GFR-binding compound, at least one functionalised bioactive carrier, or at least one pharmaceutical composition, all as defined herein for use in a method of inducing or promoting or enhancing mesenchymal stem cell or progenitor eye retina cell (at any stage of differentiation of the retinal cell lineage) differentiation;
[1151] an effective amount of at least one (modified) cyclic GFR-binding compound, at least one functionalised bioactive carrier, or at least one pharmaceutical composition, all as defined herein for use in a method of inducing or promoting or enhancing or controlling or regulating eye retina cell regeneration/formation;
[1152] an effective amount of at least one (modified) cyclic GFR-binding compound, at least one functionalised bioactive carrier, or at least one pharmaceutical composition, all as defined herein for use in a method of inducing and/or promoting and/or enhancing eye retina cell maturation.

[1153] In particular, medical applications which may result from the mediation of type I and II growth factor receptors by a cyclic GFR-binding compound, functionalised bioactive carrier, or pharmaceutical (therapeutic, dermatologic, ophthalmologic, diagnostic, etc.) composition, all as defined herein, include, but are not limited to, enhancing/promoting renal functions such as enhancing/improving waste removal, body's fluid balance control and electrolytes balance control and/or preventing/treating kidneys failure and/or chronic kidney disease (CKD) and/or renal fibrosis.

[1154] In one example, a cyclic GFR-binding compound, functionalised bioactive carrier, or pharmaceutical (therapeutic, dermatologic, ophthalmologic, diagnostic, etc.) composition, all as defined herein, may be a kidneys-function enhancing compound, bioactive carrier or composition which has demonstrated the ability to promote/improve kidneys functions and/or preventing/treating kidneys failure and/or chronic kidney disease (CKD) and/or renal fibrosis in vitro and/or ex-vivo and/or in vivo.

[1155] In one aspect, the present disclosure thus provides:
[1156] a method of inducing or promoting or enhancing mesenchymal stem cell, progenitor renal cell (at any stage of differentiation of the renal cell lineage) differentiation, the method comprising administering to the cell an effective amount of at least one (modified) cyclic GFR-binding compound, at least one functionalised bioactive carrier, or at least one pharmaceutical composition, all as defined herein;
[1157] a method of inducing or promoting or enhancing or controlling or regulating renal cell regeneration/formation, the method comprising administering to a mesenchymal stem cell or to a progenitor renal cell at any stage of differentiation of the renal cell lineage or to a mature renal cell, an effective amount of at least one (modified) cyclic GFR-binding compound, at least one functionalised bioactive carrier, or at least one pharmaceutical composition, all as defined herein;
[1158] a method of inducing and/or promoting and/or enhancing renal cell maturation, the method comprising administering to a differentiated renal cell or to a mature renal cell an effective amount of at least one (modified) cyclic GFR-binding compound, at least one functionalised bioactive carrier, or at least one pharmaceutical composition, all as defined herein;
[1159] an effective amount of at least one (modified) cyclic GFR-binding compound, at least one functionalised bioactive carrier, or at least one pharmaceutical composition, all as defined herein for use in a method of inducing or promoting or enhancing mesenchymal stem cell or progenitor renal cell (at any stage of differentiation of the renal cell lineage) differentiation;
[1160] an effective amount of at least one (modified) cyclic GFR-binding compound, at least one functionalised bioactive carrier, or at least one pharmaceutical composition, all as defined herein for use in a method of inducing or promoting or enhancing or controlling or regulating renal cell regeneration/formation;
[1161] an effective amount of at least one (modified) cyclic GFR-binding compound, at least one functionalised bioactive carrier, or at least one pharmaceutical composition, all as defined herein for use in a method of inducing and/or promoting and/or enhancing renal cell maturation.

[1162] In particular, medical applications which may result from the mediation of type I and II growth factor receptors by a cyclic GFR-binding compound, functionalised bioactive carrier, or pharmaceutical (therapeutic, dermatologic, ophthalmologic, diagnostic, etc.) composition, all as defined herein, include, but are not limited to, enhancing/promoting fibrous tissue formation and tendon and ligament regeneration and/or preventing and/or decreasing or suppressing tendon/ligament cell degeneration.

[1163] In one example, a cyclic GFR-binding compound, functionalised bioactive carrier, or pharmaceutical (therapeutic, dermatologic, ophthalmologic, diagnostic, etc.) composition, all as defined herein, may be a fibrous tissue formation promoting compound, bioactive carrier or composition which has demonstrated the ability to induce fibrous tissue formation in vitro and/or ex-vivo and/or in vivo.

[1164] In one aspect, the present disclosure thus provides:
[1165] a method of inducing or promoting or enhancing mesenchymal stem cell, progenitor tendon/ligament cell (at any stage of differentiation of the T/L cell lineage) differentiation, the method comprising administering to the cell an effective amount of at least one (modified) cyclic GFR-binding compound, at least one functionalised bioactive carrier, or at least one pharmaceutical composition, all as defined herein;
[1166] a method of inducing or promoting or enhancing or controlling or regulating tendon/ligament cell regeneration/formation, the method comprising administering to a mesenchymal stem cell or to a progenitor tendon/ligament cell at any stage of differentiation of the T/L cell lineage or to a mature tendon/ligament cell, an effective amount of at least one (modified) cyclic GFR-binding compound, at least one functionalised bioactive carrier, or at least one pharmaceutical composition, all as defined herein;
[1167] a method of inducing and/or promoting and/or enhancing tendon/ligament cell maturation, the method comprising administering to a differentiated tendon/ligament cell or to a mature tendon/ligament cell an effective amount of at least one (modified) cyclic GFR-binding compound, at least one functionalised bioactive carrier, or at least one pharmaceutical composition, all as defined herein;
[1168] an effective amount of at least one (modified) cyclic GFR-binding compound, at least one functionalised bioactive carrier, or at least one pharmaceutical composition, all as defined herein for use in a method of inducing or promoting or enhancing mesenchymal stem cell or progenitor tendon/ligament cell (at any stage of differentiation of the T/L cell lineage) differentiation;
[1169] an effective amount of at least one (modified) cyclic GFR-binding compound, at least one functionalised bioactive carrier, or at least one pharmaceutical composition, all as defined herein for use in a method of inducing or promoting or enhancing or controlling or regulating tendon/ligament cell regeneration/formation;
[1170] an effective amount of at least one (modified) cyclic GFR-binding compound, at least one functionalised bioactive carrier, or at least one pharmaceutical composition, all as defined herein for use in a method of inducing and/or promoting and/or enhancing tendon/ligament cell maturation.

[1171] In particular, medical applications which may result from the mediation of type I and II growth factor receptors by a cyclic GFR-binding compound, functionalised bioactive carrier, or pharmaceutical (therapeutic, dermatologic, ophthalmologic, diagnostic, etc.) composition, all as defined herein, include, but are not limited to, hair follicle tissue regeneration and formation (hair growth), hair follicle stem cell activation (loss of quiescence state) and/or preventing/treating alopecia areata, alopecia totalis, alopecia universalis, androgenic alopecia (male pattern baldness), telogen effluvium, anagen effluvium or chemotherapy-induced alopecia.

[1172] In one example, a cyclic GFR-binding compound, functionalised bioactive carrier, or pharmaceutical (therapeutic, dermatologic, ophthalmologic, diagnostic, etc.) composition, all as defined herein, may be a hair follicle growth activation promoting compound, bioactive carrier or composition which has demonstrated the ability to induce hair follicle formation and/or hair follicle stem cell activation in vitro and/or ex-vivo and/or in vivo.

[1173] In one aspect, the present disclosure thus provides:
[1174] a method of inducing or promoting or enhancing mesenchymal stem cell, progenitor hair follicle cell (at any stage of differentiation of the hair follicle cell lineage) differentiation, the method comprising administering to the cell an effective amount of at least one (modified) cyclic GFR-binding compound, at least one functionalised bioactive carrier, or at least one pharmaceutical composition, all as defined herein;
[1175] a method of inducing or promoting or enhancing or controlling or regulating hair follicle cell regeneration/formation, the method comprising administering to a mesenchymal stem cell or to a progenitor hair follicle cell at any stage of differentiation of the hair follicle cell lineage or to a mature hair follicle cell, an effective amount of at least one (modified) cyclic GFR-binding compound, at least one functionalised bioactive carrier, or at least one pharmaceutical composition, all as defined herein;
[1176] a method of inducing and/or promoting and/or enhancing hair follicle cell maturation, the method comprising administering to a differentiated hair follicle cell or to a mature hair follicle cell an effective amount of at least one (modified) cyclic GFR-binding compound, at least one functionalised bioactive carrier, or at least one pharmaceutical composition, all as defined herein;
[1177] a method of activating hair follicle stem cells, the method comprising administering to a quiescent hair follicle stem cell an effective amount of at least one (modified) cyclic GFR-binding compound, at least one functionalised bioactive carrier, or at least one pharmaceutical composition, all as defined herein;
[1178] an effective amount of at least one (modified) cyclic GFR-binding compound, at least one functionalised bioactive carrier, or at least one pharmaceutical composition, all as defined herein for use in a method of inducing or promoting or enhancing mesenchymal stem cell or progenitor hair follicle cell (at any stage of differentiation of the hair follicle cell lineage) differentiation;
[1179] an effective amount of at least one (modified) cyclic GFR-binding compound, at least one functionalised bioactive carrier, or at least one pharmaceutical composition, all as defined herein for use in a method of inducing or promoting or enhancing or controlling or regulating hair follicle cell regeneration/formation;
[1180] an effective amount of at least one (modified) cyclic GFR-binding compound, at least one functionalised bioactive carrier, or at least one pharmaceutical composition, all as defined herein for use in a method of inducing and/or promoting and/or enhancing tendon/ligament cell maturation;
[1181] an effective amount of at least one (modified) cyclic GFR-binding compound, at least one functionalised bioactive carrier, or at least one pharmaceutical composition, all as defined herein for use in a method of activating hair follicle stem cells.

[1182] In particular, medical applications which may result from the mediation of type I and II growth factor receptors by a cyclic GFR-binding compound, functionalised bioactive carrier, or pharmaceutical (therapeutic, dermatologic, ophthalmologic, diagnostic, etc.) composition, all as defined herein, include, but are not limited to, enhancing tissue closure.

[1183] In one example, a cyclic GFR-binding compound, functionalised bioactive carrier, or pharmaceutical (therapeutic, dermatologic, ophthalmologic, diagnostic, etc.) composition, all as defined herein, may be a tissue-closure-promoting compound or biomaterial which has demonstrated the ability to induce tissue closure in vitro and/or ex-vivo and/or in vivo.

[1184] In one aspect, the present disclosure thus provides:
[1185] a method of inducing or promoting or enhancing tissue closure, the method comprising administering to an incised/opened tissue an effective amount of at least one (modified) cyclic GFR-binding compound, at least one functionalised bioactive carrier, or at least one pharmaceutical composition, all as defined herein;
[1186] an effective amount of at least one (modified) cyclic GFR-binding compound, at least one functionalised bioactive carrier, or at least one pharmaceutical composition, all as defined herein for use in a method of inducing or promoting or enhancing tissue closure.

[1187] In particular, medical applications which may result from the mediation of type I and II growth factor receptors by a cyclic GFR-binding compound, functionalised bioactive carrier, or pharmaceutical (therapeutic, dermatologic, ophthalmologic, diagnostic, etc.) composition, all as defined herein, include, but are not limited to, enhancing/promoting female fertility and/or preventing and/or decreasing or suppressing female infertility.

[1188] In one example, a cyclic GFR-binding compound, functionalised bioactive carrier, or pharmaceutical (therapeutic, dermatologic, ophthalmologic, diagnostic, etc.) composition, all as defined herein, may be a female fertility enhancing or a female infertility regulator/modulator/inhibitor compound, bioactive carrier or composition which has demonstrated the ability to enhance/promote female fertility and/or prevent and/or decrease or suppress female infertility in vitro and/or ex-vivo and/or in vivo.

[1189] In one aspect, the present disclosure thus provides:
[1190] a method of inducing or promoting or enhancing mesenchymal stem cell, progenitor ovarian cell (at any stage of differentiation of the reproduction system lineage) differentiation, the method comprising administering to the cell an effective amount of at least one (modified) cyclic GFR-binding compound, at least one functionalised bioactive carrier, or at least one pharmaceutical composition, all as defined herein;
[1191] a method of inducing or promoting or enhancing or controlling or regulating ovarian cell regeneration/formation, the method comprising administering to a mesenchymal stem cell or to a progenitor ovarian cell at any stage of differentiation of the reproduction system lineage or to a mature ovarian cell, an effective amount of at least one (modified) cyclic GFR-binding compound, at least one functionalised bioactive carrier, or at least one pharmaceutical composition, all as defined herein;
[1192] a method of inducing and/or promoting and/or enhancing ovarian cell maturation, the method comprising administering to a differentiated ovarian cell or to a mature ovarian cell an effective amount of at least one (modified) cyclic GFR-binding compound, at least one functionalised bioactive carrier, or at least one pharmaceutical composition, all as defined herein;
[1193] an effective amount of at least one (modified) cyclic GFR-binding compound, at least one functionalised bioactive carrier, or at least one pharmaceutical composition, all as defined herein for use in a method of inducing or promoting or enhancing mesenchymal stem cell or progenitor ovarian cell (at any stage of differentiation of the reproduction system lineage) differentiation;
[1194] an effective amount of at least one (modified) cyclic GFR-binding compound, at least one functionalised bioactive carrier, or at least one pharmaceutical composition, all as defined herein for use in a method of inducing or promoting or enhancing or controlling or regulating ovarian cell regeneration/formation;
[1195] an effective amount of at least one (modified) cyclic GFR-binding compound, at least one functionalised bioactive carrier, or at least one pharmaceutical composition, all as defined herein for use in a method of inducing and/or promoting and/or enhancing ovarian cell maturation.

[1196] In particular, medical applications which may result from the mediation of type I and II growth factor receptors by a (modified) cyclic GFR-binding compound, functionalised bioactive carrier, or pharmaceutical (therapeutic, dermatologic, ophthalmologic, diagnostic, etc.) composition, all as defined herein, include, but are not limited to, enhancing of myogenesis, inducing muscle tissue formation, reinforcing muscle tissues, inducing myocyte maturation, repairing damaged muscles, preventing muscle tissue degeneration or damages, and/or protecting a subject from one or more muscle tissue-related diseases, disorders, conditions or pathologies.

[1197] In one example, a (modified) cyclic GFR-binding compound, functionalised bioactive carrier, or pharmaceutical (therapeutic, dermatologic, ophthalmologic, diagnostic, etc.) composition, all as defined herein, may thus be an myoinductive compound, bioactive carrier or composition which has demonstrated an ability to induce muscle tissue formation in vitro and/or ex-vivo and/or in vivo.

[1198] In one aspect, the present disclosure thus provides:
[1199] a method of inducing or promoting or enhancing mesenchymal stem cell, progenitor myoblast (at any stage of differentiation of the muscle cell lineage) differentiation, the method comprising administering to the cell an effective amount of at least one (modified) cyclic GFR-binding compound, at least one functionalised bioactive carrier, or at least one pharmaceutical composition, all as defined herein;
[1200] a method of inducing or promoting or enhancing or controlling or regulating muscle tissue regeneration/formation, the method comprising administering to a mesenchymal stem cell or to a progenitor myoblast at any stage of differentiation of the muscle cell lineage or to a mature myoblast, an effective amount of at least one (modified) cyclic GFR-binding compound, at least one functionalised bioactive carrier, or at least one pharmaceutical composition, all as defined herein;
[1201] a method of inducing and/or promoting and/or enhancing myocyte maturation, the method comprising administering to a differentiated myoblast or to a mature myoblast (e.g. an myocyte) an effective amount of at least one (modified) cyclic GFR-binding compound, at least one functionalised bioactive carrier, or at least one pharmaceutical composition, all as defined herein;
[1202] an effective amount of at least one (modified) cyclic GFR-binding compound, at least one functionalised bioactive carrier, or at least one pharmaceutical composition, all as defined herein for use in a method of inducing or promoting or enhancing mesenchymal stem cell or progenitor myoblast (at any stage of differentiation of the muscle cell lineage) differentiation;
[1203] an effective amount of at least one (modified) cyclic GFR-binding compound, at least one functionalised bioactive carrier, or at least one pharmaceutical composition, all as defined herein for use in a method of inducing or promoting or enhancing or controlling or regulating muscle tissue regeneration/formation;
[1204] an effective amount of at least one (modified) cyclic GFR-binding compound, at least one functionalised bioactive carrier, or at least one pharmaceutical composition, all as defined herein for use in a method of inducing and/or promoting and/or enhancing myoblast maturation.

[1205] In particular, medical applications which may result from the mediation of type I and II growth factor receptors by a (modified) cyclic GFR-binding compound, functionalised bioactive carrier, or pharmaceutical (therapeutic, dermatologic, ophthalmologic, diagnostic, etc.) composition, all as defined herein, include, but are not limited to, enhancing blood tissue regeneration, inducing blood cell differentiation, or protecting a patient from a blood cell degeneration-related disease, condition, disorder, or pathology.

[1206] In one example, a (modified) cyclic GFR-binding compound, functionalised bioactive carrier, or pharmaceutical (therapeutic, dermatologic, ophthalmologic, diagnostic, etc.) composition, all as defined herein, may thus be a blood cell degeneration inhibitor, bioactive carrier or composition which has demonstrated an ability to induce blood cell formation in vitro and/or ex-vivo and/or in vivo.

[1207] In one aspect, the present disclosure thus provides:
[1208] a method of inducing or promoting or enhancing mesenchymal stem cell, progenitor blood cell (at any stage of differentiation of the Osteoblast cell lineage) differentiation, the method comprising administering to the cell an effective amount of at least one (modified) cyclic GFR-binding compound, at least one functionalised bioactive carrier, or at least one pharmaceutical composition, all as defined herein;
[1209] a method of inducing or promoting or enhancing or controlling or regulating blood cell regeneration/formation, the method comprising administering to a mesenchymal stem cell or to a progenitor blood cell at any stage of differentiation of the blood cell lineage or to a mature blood cell, an effective amount of at least one (modified) cyclic GFR-binding compound, at least one functionalised bioactive carrier, or at least one pharmaceutical composition, all as defined herein;
[1210] a method of inducing and/or promoting and/or enhancing blood cell maturation, the method comprising administering to a differentiated blood cell or to a mature blood cell (e.g. a mature red blood cell) an effective amount of at least one (modified) cyclic GFR-binding compound, at least one functionalised bioactive carrier, or at least one pharmaceutical composition, all as defined herein;
[1211] an effective amount of at least one (modified) cyclic GFR-binding compound, at least one functionalised bioactive carrier, or at least one pharmaceutical composition, all as defined herein for use in a method of inducing or promoting or enhancing mesenchymal stem cell or progenitor blood cell (at any stage of differentiation of the blood cell lineage) differentiation;
[1212] an effective amount of at least one (modified) cyclic GFR-binding compound, at least one functionalised bioactive carrier, or at least one pharmaceutical composition, all as defined herein for use in a method of inducing or promoting or enhancing or controlling or regulating blood cell regeneration/formation;
[1213] an effective amount of at least one (modified) cyclic GFR-binding compound, at least one functionalised bioactive carrier, or at least one pharmaceutical composition, all as defined herein for use in a method of inducing and/or promoting and/or enhancing blood cell maturation.

[1214] In particular, medical applications which may result from the mediation of type I and II growth factor receptors by a (modified) cyclic GFR-binding compound, functionalised bioactive carrier, or pharmaceutical (therapeutic, dermatologic, ophthalmologic, diagnostic, etc.) composition, all as defined herein, include, but are not limited to, enhancing of lung tissue regeneration, inducing lung cell differentiation, or protecting a patient from a lung cell degeneration-related disease, condition, disorder, or pathology.

[1215] In one example, a (modified) cyclic GFR-binding compound, functionalised bioactive carrier, or pharmaceutical (therapeutic, dermatologic, ophthalmologic, diagnostic, etc.) composition, all as defined herein, may thus be a lung cell degeneration inhibitor, bioactive carrier or composition which has demonstrated an ability to induce lung cell formation in vitro and/or ex-vivo and/or in vivo.

[1216] In one aspect, the present disclosure thus provides:
[1217] a method of inducing or promoting or enhancing mesenchymal stem cell, progenitor lung cell (at any stage of differentiation of the Osteoblast cell lineage) differentiation, the method comprising administering to the cell an effective amount of at least one (modified) cyclic GFR-binding compound, at least one functionalised bioactive carrier, or at least one pharmaceutical composition, all as defined herein;
[1218] a method of inducing or promoting or enhancing or controlling or regulating lung cell regeneration/formation, the method comprising administering to a mesenchymal stem cell or to a progenitor lung cell at any stage of differentiation of the lung cell lineage or to a mature lung cell, an effective amount of at least one (modified) cyclic GFR-binding compound, at least one functionalised bioactive carrier, or at least one pharmaceutical composition, all as defined herein;
[1219] a method of inducing and/or promoting and/or enhancing lung cell maturation, the method comprising administering to a differentiated lung cell or to a mature lung cell an effective amount of at least one (modified) cyclic GFR-binding compound, at least one functionalised bioactive carrier, or at least one pharmaceutical composition, all as defined herein;
[1220] an effective amount of at least one (modified) cyclic GFR-binding compound, at least one functionalised bioactive carrier, or at least one pharmaceutical composition, all as defined herein for use in a method of inducing or promoting or enhancing mesenchymal stem cell or progenitor lung cell (at any stage of differentiation of the lung cell lineage) differentiation;
[1221] an effective amount of at least one (modified) cyclic GFR-binding compound, at least one functionalised bioactive carrier, or at least one pharmaceutical composition, all as defined herein for use in a method of inducing or promoting or enhancing or controlling or regulating lung cell regeneration/formation;
[1222] an effective amount of at least one (modified) cyclic GFR-binding compound, at least one functionalised bioactive carrier, or at least one pharmaceutical composition, all as defined herein for use in a method of inducing and/or promoting and/or enhancing lung cell maturation.

[1223] In particular, medical applications which may result from the mediation of type I and II growth factor receptors by a (modified) cyclic GFR-binding compound, functionalised bioactive carrier, or pharmaceutical (therapeutic, dermatologic, ophthalmologic, diagnostic, etc.) composition, all as defined herein, include, but are not limited to, enhancing adipose tissue regeneration, inducing adipocyte differentiation, or protecting a patient from a adipose tissue degeneration-related disease, condition, disorder, or pathology.

[1224] In one example, a (modified) cyclic GFR-binding compound, functionalised bioactive carrier, or pharmaceutical (therapeutic, dermatologic, ophthalmologic, diagnostic, etc.) composition, all as defined herein, may thus be an adipose tissue degeneration inhibitor, bioactive carrier or composition which has demonstrated an ability to induce adipose tissue formation in vitro and/or ex-vivo and/or in vivo.

[1225] In one aspect, the present disclosure thus provides:
[1226] a method of inducing or promoting or enhancing mesenchymal stem cell, progenitor adipocyte (at any stage of differentiation of the Osteoblast cell lineage) differentiation, the method comprising administering to the cell an effective amount of at least one (modified) cyclic GFR-binding compound, at least one functionalised bioactive carrier, or at least one pharmaceutical composition, all as defined herein;
[1227] a method of inducing or promoting or enhancing or controlling or regulating adipose tissue regeneration/formation, the method comprising administering to a mesenchymal stem cell or to a progenitor adipocyte at any stage of differentiation of the adipocyte lineage or to a mature adipocyte, an effective amount of at least one (modified) cyclic GFR-binding compound, at least one functionalised bioactive carrier, or at least one pharmaceutical composition, all as defined herein;
[1228] a method of inducing and/or promoting and/or enhancing adipocyte maturation, the method comprising administering to a differentiated adipocyte or to a mature adipocyte an effective amount of at least one (modified) cyclic GFR-binding compound, at least one functionalised bioactive carrier, or at least one pharmaceutical composition, all as defined herein;
[1229] an effective amount of at least one (modified) cyclic GFR-binding compound, at least one functionalised bioactive carrier, or at least one pharmaceutical composition, all as defined herein for use in a method of inducing or promoting or enhancing mesenchymal stem cell or progenitor adipocyte (at any stage of differentiation of the adipocyte lineage) differentiation; an effective amount of at least one (modified) cyclic GFR-binding compound, at least one functionalised bioactive carrier, or at least one pharmaceutical composition, all as defined herein for use in a method of inducing or promoting or enhancing or controlling or regulating adipose tissue regeneration/formation;
[1230] an effective amount of at least one (modified) cyclic GFR-binding compound, at least one functionalised bioactive carrier, or at least one pharmaceutical composition, all as defined herein for use in a method of inducing and/or promoting and/or enhancing adipocyte maturation.

[1231] Protected from a disease, condition, disorder or pathology refers to the treatment of the underlying cause of the disease, condition, disorder or pathology as well as reducing the symptoms of the disease, condition, disorder or pathology; and/or reducing the occurrence of the disease, condition, disorder or pathology; and/or reducing the severity of the disease, condition, disorder or pathology. Protecting a patient can refer to the ability of a therapeutic composition of the present invention, when administered to a patient, to prevent a disease, condition, disorder or pathology from occurring and/or to cure or to alleviate disease, condition, disorder or pathology symptoms, signs or causes. As such, to protect a patient from a disease, condition, disorder or pathology includes both preventing disease, condition, disorder or pathology occurrence (prophylactic treatment) and treating a patient that has a disease, condition, disorder or pathology or that is experiencing initial symptoms or later stage symptoms of a disease, condition, disorder or pathology (therapeutic treatment).

[1232] Treating: As used herein, unless indicated otherwise or contradictory in context, the term “treating” or “treatment” refers to partially or completely alleviating, ameliorating, improving, relieving, delaying onset of, inhibiting progression of, reducing severity of, and/or reducing incidence of one or more symptoms or features of a particular disease, disorder, pathology and/or condition. Treatment may be administered to a subject who does not exhibit signs of a disease, disorder, and/or condition and/or to a subject who exhibits only early signs of a disease, disorder, pathology and/or condition for the purpose of decreasing the risk of developing pathology associated with the disease, disorder, and/or condition.

[1233] Preventing: As used herein, unless indicated otherwise or contradictory in context, the term “preventing” refers to partially or completely delaying onset of an infection, disease, disorder and/or condition; partially or completely delaying onset of one or more symptoms, features, or clinical manifestations of a particular infection, disease, disorder, and/or condition; partially or completely delaying onset of one or more symptoms, features, or manifestations of a particular infection, disease, disorder, and/or condition; partially or completely delaying progression from an infection, a particular disease, disorder and/or condition; and/or decreasing the risk of developing pathology associated with the infection, the disease, disorder, and/or condition.

[1234] Disease: As used herein, unless indicated otherwise or contradictory in context, the term “disease” refers to any deviation from the normal health of a patient and includes a state when disease symptoms are present, as well as conditions in which a deviation has occurred, but symptoms are not yet manifested. The same applies to “condition”, “disorder” and “pathology”.

[1235] In one aspect, the present disclosure provides methods of determining the effectiveness of a (modified) cyclic GFR-binding compound, a functionalised bioactive carrier or a pharmaceutical composition as defined herein for inducing cell differentiation, or inducing, promoting, enhancing, controlling or regulating tissue regeneration/formation in-vitro, ex-vivo and in-vivo comprising the administration of said (modified) cyclic GFR-binding compound, a functionalised bioactive carrier or a pharmaceutical composition to a cell; the measurement of the expression of specific differentiation markers as defined herein in the cell; the comparison of the expression of said specific differentiation markers in the cell to the expression of said specific differentiation markers in a cell treated with a reference (or control) functionalised bioactive carrier, compound or solvent; and determining the effectiveness of the (modified) cyclic GFR-binding compound, a functionalised bioactive carrier or a pharmaceutical composition relative to the reference pharmaceutical association or compound.

[1236] In one aspect, the present disclosure provides methods to activate, promote, support, improve, or increase the activity of a growth factor receptor present in, on the surface of a mesenchymal stem cell or progenitor cell (at any stage of differentiation thereof) such that said cell may undergo efficient cell differentiation.

[1237] In one aspect, the present disclosure provides methods of identifying, diagnosing, and optionally classifying subjects on these bases, which may include clinical diagnosis, biomarker levels, and other methods known in the art.

### XVII. Wound Healing Applications

[1238] Specific applications of the invention in dermatology relate to wound healing and skin repair.

[1239] Thus, dermatological applications which may result from the mediation of type I and II growth factor receptors by a compound, functionalised bioactive carrier, or composition of the invention include, but are not limited to, enhancing wound healing, skin repair and cellular migration.

[1240] Skin repair: In the present description and unless otherwise indicated, the term “skin repair” means dermal and epidermal cells regeneration, collagen and other skin protein synthesis by epithelial cells.

[1241] Cellular migration: In the present description and unless otherwise indicated, the term “cellular migration” means a central process in the development and maintenance of multicellular organisms. Tissue formation during embryonic development, wound healing and immune responses all require the orchestrated movement of cells in particular directions to specific locations. The cells involved in cellular migration include the cells of the epithelial and dermal cell lineages forming the connective tissue i.e. the fibroblasts, fibrocytes, myofibroblasts, adipocytes, synoviocytes, macrophages, histiocytes, granulocytes, plasmocytes and mastocytes.

[1242] In one example, a (modified) cyclic GFR-binding compound, functionalised bioactive carrier, or pharmaceutical (therapeutic, dermatologic, ophthalmologic, diagnostic, etc.) composition, all as defined herein, may be a wound-healing-promoting compound, bioactive carrier, or composition which has demonstrated the ability to induce wound healing, skin repair and/or cellular migration in vitro, ex-vivo and/or in vivo.

[1243] In one aspect, the present disclosure thus provides:
[1244] a method of inducing or promoting or enhancing mesenchymal stem cell, progenitor epithelial cell (at any stage of differentiation of the epithelial and dermal cell lineage) differentiation, the method comprising administering to the cell an effective amount of at least one (modified) cyclic GFR-binding compound, at least one functionalised bioactive carrier, or at least one pharmaceutical composition of the invention;
[1245] a method of inducing or promoting or enhancing or controlling or regulating skin tissue regeneration/formation and/or tubular formation, the method comprising administering to a mesenchymal stem cell or to a progenitor epithelial cell at any stage of differentiation of the epithelial and dermal cell lineage or to a mature epithelial cell, an effective amount of at least one (modified) cyclic GFR-binding compound, at least one functionalised bioactive carrier, or at least one pharmaceutical composition of the invention;
[1246] a method of inducing and/or promoting and/or enhancing cell motility or single/collective epithelial cell migration, the method comprising administering to a mesenchymal stem cell or to a progenitor epithelial cell at any stage of differentiation of the epithelial and dermal cell lineage or to a mature epithelial cell an effective amount of at least one (modified) cyclic GFR-binding compound, at least one functionalised bioactive carrier, or at least one pharmaceutical composition of the invention;
[1247] a method of inducing and/or promoting and/or enhancing epithelial cell maturation, the method comprising administering to a differentiated epithelial cell or to a mature epithelial cell an effective amount of at least one (modified) cyclic GFR-binding compound, at least one functionalised bioactive carrier, or at least one pharmaceutical composition of the invention;
[1248] an effective amount of at least one (modified) cyclic GFR-binding compound, at least one functionalised bioactive carrier, or at least one pharmaceutical composition of the invention for use in a method of inducing or promoting or enhancing mesenchymal stem cell, progenitor epithelial cell (at any stage of differentiation of the epithelial and dermal cell lineage) differentiation;
[1249] an effective amount of at least one (modified) cyclic GFR-binding compound, at least one functionalised bioactive carrier, or at least one pharmaceutical composition of the invention for use in a method of inducing or promoting or enhancing or controlling or regulating skin tissue regeneration/formation;
[1250] an effective amount of at least one (modified) cyclic GFR-binding compound, at least one functionalised bioactive carrier, or at least one pharmaceutical composition of the invention for use in a method of inducing and/or promoting and/or enhancing cell motility or single/collective epithelial cell migration,
[1251] an effective amount of at least one (modified) cyclic GFR-binding compound, at least one functionalised bioactive carrier, or at least one pharmaceutical composition of the invention for use in a method of inducing and/or promoting and/or enhancing epithelial cell maturation.

### XVIII. Cosmetic Applications

[1252] Skin ageing is typically associated with a deregulation of the metabolism of cutaneous cells characterized by a diminishing of the proliferation of keratinocytes, a deregulation of the differentiation of keratinocytes, an accumulation of dead cells, and a diminishing of the innervation of the skin.

[1253] Cosmetic, non-therapeutic, applications which may result from the mediation of type I and II growth factor receptors by a cyclic GFR-binding compound, functionalised bioactive carrier, or compositions thereof, all as defined herein, include, but are not limited to, enhancing/promoting skin regeneration, preventing and/or attenuating and/or masking and/or removing wrinkles, firming the skin, preventing and/or decreasing or suppressing skin pigmentation.

[1254] In one example, a cyclic GFR-binding compound, functionalised bioactive carrier, or compositions thereof, all as defined herein, may be an anti-wrinkle/ageing and/or skin-firming and/or skin regeneration-promoting compound, bioactive carrier or composition which has demonstrated the ability to enhance/promote skin cosmetic regeneration, prevent and/or attenuate and/or mask and/or remove wrinkles, firm the skin, prevent and/or decrease or suppress skin pigmentation in vitro and/or in vivo.

[1255] In one aspect, the present disclosure provides a cosmetic or functional food composition comprising at least one cyclic GFR-binding compound or at least one functionalised bioactive carrier, all as defined herein, in combination with at least one suitable cosmetic carrier, preferably suitable for topical application.

[1256] Suitable cosmetic carrier: The terms “suitable cosmetic carrier” used here, mean that the composition or the components of the latter are suitable for use in contact with human skin without undue toxicity, incompatibility, instability, allergic response or their equivalents.

[1257] In one aspect, the present disclosure provides a use of a cyclic GFR-binding compound, or functionalised bioactive carrier, all as defined herein, in cosmetics or as a functional food.

[1258] In one aspect, the present disclosure provides a use of a cyclic GFR-binding compound, functionalised bioactive carrier, or composition thereof, all as defined herein, or a cosmetic or functional food composition as defined herein as an anti-wrinkle/ageing agent. For example, in certain embodiments, the cyclic GFR-binding compound, functionalised bioactive carrier, or composition thereof, all as defined herein, is used as active ingredient to prevent or treat skin-ageing in a cosmetic composition or a functional food composition.

[1259] In one aspect, the present disclosure provides a use of a cyclic GFR-binding compound or functionalised bioactive carrier, all as defined herein, or a cosmetic composition thereof as defined herein in a method of cosmetic care, wherein said method of cosmetic care comprises the administration or the application of between about 0.0001 □g/day to about 5000 mg/day, between about 0.0001 □g/day to about 1000 mg/day, between about 0.0001 □g/day to about 10 mg/day, between about 0.0001 □g/day to about 1 mg/day, or between about 0.0001 □g/day to about 100 □g/day of said compound, bioactive carrier or composition, all being preferred and specifically contemplated for implementing embodiments of the invention.

[1260] In one example, the administration comprises the oral administration of a tablet, capsule, pill, powder, sustained release formulations, solution or suspension containing said cyclic GFR-binding compound or functionalised bioactive carrier, all as defined herein, or cosmetic or functional food compositions thereof as defined herein.

[1261] In one preferred example, said use comprises the topical application of a cyclic GFR-binding compound or functionalised bioactive carrier, all as defined herein, or cosmetic composition thereof as defined herein.

[1262] Suitable formulations for use in cosmetic care treatment include, for instance, the ones described in U.S. Pat. No. 8,497,241 B2, which is hereby incorporated by reference.

[1263] In one example, said cosmetic use of the invention is a non-therapeutic cosmetic use.

[1264] In one aspect, the present disclosure provides a cosmetic care or treatment method in which the cyclic GFR-binding compound, the functionalised bioactive carrier, or the cosmetic composition, all as defined herein, is used via topical application to stimulate the proliferation and/or activity of the fibroblasts.

[1265] For example, in certain embodiments, said cosmetic care method of the invention include treatment of skin ageing, especially unaesthetic and/or uncomfortable manifestations of skin ageing, such as slackness of the tissues, loss of firmness of the tissues, the appearance of wrinkles, fine lines, and grooves, and/or for the cosmetic treatment and/or care of stretch marks and/or scars.

[1266] In one example, the cosmetic care method of the invention is preferably for protecting the skin against skin ageing.

[1267] Topical application: In the present description and unless otherwise indicated, the term “topical application” means to apply or spray the composition of the present invention onto the surface of the skin.

[1268] Cosmetic compositions of the invention may comprise other active agents of cosmetic interest especially the conventional agents for anti-ageing compositions especially those chosen from hyaluronic acid, ascorbic acid, retinol, alpha-hydroxy acids (AHAs) and/or ursolic acid.

[1269] In one example, the cosmetic composition of the invention may contain at least one of the following agents:
[1270] an agent that stimulates the fibronectin synthesis, in particular a maize extract;
[1271] an agent that stimulates the laminin synthesis, in particular an extract of malt;
[1272] an agent that stimulates the expression and/or the activity of hyaluronan synthase 2 (HAS2);
[1273] an agent that stimulates the synthesis of lysyl oxidase-like (LOXL);
[1274] an agent that stimulates the synthesis of intracellular ATP;
[1275] an agent that protects the degradation of FGF2.

[1276] cyclic GFR-binding compounds, or functionalised bioactive carrier in their cosmetic applications, optionally in the form of cosmetic compositions, are particularly suitable for protecting the skin against skin ageing that is natural and/or caused by climatic and environmental factors, especially the wind, pollution, UV rays, cigarette smoke and/or physiological factors, especially stress.

[1277] In one aspect, the present disclosure provides a cosmetic care or treatment method, for a subject having need thereof, said method comprising the application, preferably topical application, or administration of a cosmetic composition as defined herein.

[1278] In one example, the subject who has need of the cosmetic care of the invention is a subject chosen from a population having an average age of more than 30 years old, preferably of more than 40 years old, more preferably of more than 50 years old.

### XIX. Hair Treatment Applications

[1279] Hair is subjected to a wide variety of severe stress, for example as a result of environmental influences, such as UV irradiation or weathering, mechanical stresses, such as combing, or various hair treatments, such as washing, drying with hot air, bleaching, coloring, perming, etc., which can lead to hair damage. Said damage includes e.g. dryness, reduced elasticity, brittleness, split ends, dullness, matt appearance, reduced fullness, rough surface and reduced mechanical strength. This leads to impaired combability, reduced shine, increased electrostatic charging, tendency to break and may go as far as hair loss in some cases. The hair wearer feels uneasy. Hair loss may be due to aging as through time, hair naturally tends to gradually thin. Other causes of hair loss include hormonal factors, medical conditions and medications. The most common cause of hair loss is a hereditary condition called male-pattern baldness or female-pattern baldness. In genetically susceptible people, certain sex hormones trigger a particular pattern of permanent hair loss. Most common in men, this type of hair thinning can begin as early as puberty. Hormonal changes and imbalances can also cause temporary hair loss. This could be due to pregnancy, childbirth, discontinuation of birth control pills or the onset of menopause. A variety of medical conditions may also cause hair loss, including, but not limited to, thyroid problems, alopecia areata, and scalp infections. Hair loss may further be caused by drugs used to treat Arthritis, depression, heart problems, high blood pressure, etc.

[1280] Medical or cosmetic applications which may result from the mediation of type I and II growth factor receptors by a (modified) cyclic GFR-binding compound, functionalised bioactive carrier or composition of the invention also include enhancing/promoting hair growth and/or preventing and/or decreasing or suppressing hair loss. Without wishing to be bound to any specific theories, this effect is thought to be achieved through activation of dormant (or quiescent) hair follicle stem cells by displacement of natural binding ligands such as BMP-6, strongly bound to their growth factor receptors.

[1281] In one example, a (modified) cyclic GFR-binding compound, or functionalised bioactive carrier as defined herein may be a hair growth-promoting or a hair loss-regulator/modulator/inhibitor compound or functionalised bioactive carrier which has demonstrated the ability to enhance/promote hair growth and/or prevent and/or decrease or suppress hair loss in vitro, ex-vivo and/or in vivo.

[1282] In one aspect, the present disclosure provides a hair cosmetic or functional food composition comprising at least one (modified) cyclic GFR-binding compound, or at least one functionalised bioactive carrier, all as defined herein, in combination with at least one suitable hair-cosmetic carrier, preferably suitable for topical application.

[1283] Topical applications may be performed by any end-user by, for instance, applying and optionally rubbing the hair scalp with a hair cosmetic composition of the invention e.g. formulated as a shampoo or conditioner.

[1284] In one aspect, the present disclosure provides a hair medical (pharmaceutical, prophylactic, diagnostic, imaging, etc.) composition comprising at least one (modified) cyclic GFR-binding compound, or at least one functionalised bioactive carrier, all as defined herein, in combination with at least one suitable hair-medical carrier, preferably suitable for scalp injection application.

[1285] Scalp injection applications may preferably be performed by experienced end-users such as dermatologists and/or surgeons, preferably in clinical/medical settings in clean or sterile environment. Several subcutaneous injections may be carried out under the scalp where needed and renewed every few weeks, preferably months if required.

[1286] In one aspect, the present invention discloses a use of a (modified) cyclic GFR-binding compound, or a functionalised bioactive carrier as defined herein, in hair cosmetics or as a functional food. In one aspect, the present invention discloses a (modified) cyclic GFR-binding compound, or a functionalised bioactive carrier as defined herein, for use in a hair medical method.

[1287] In one aspect, the present disclosure provides a use of a (modified) cyclic GFR-binding compound, a functionalised bioactive carrier, or a hair cosmetic or functional food composition, all as defined herein, as a hair growth-promoting agent or hair-loss-preventing agent. For example, in certain embodiments, the (modified) cyclic GFR-binding compound, or functionalised bioactive carrier as defined herein, is used as active ingredient to promote (enhance, regulate, modulate, improve) hair growth and/or prevent or treat hair-loss and/or embellish hair in a hair cosmetic composition or a functional food composition. In one aspect, the present disclosure provides a (modified) cyclic GFR-binding compound, a functionalised bioactive carrier, or a hair medical composition, all as defined herein, as a hair growth-promoting agent or hair-loss-preventing agent. For example, in certain embodiments, the (modified) cyclic GFR-binding compound, or functionalised bioactive carrier as defined herein, is used as active ingredient to promote (enhance, regulate, modulate, improve) hair growth and/or prevent or treat hair-loss and/or embellish hair in a hair medical composition.

[1288] In one aspect, the present disclosure provides a use of a (modified) cyclic GFR-binding compound, a functionalised bioactive carrier, or a hair cosmetic composition, all as defined herein, in a method of hair cosmetic care, wherein said method of hair cosmetic care comprises the administration or the application of between about 0.0001 to about 100 □g per day, more specifically between about 0.001 to about 10 □g per day or between about 0.0001 to about 100 □g per day of said compound, bioactive carrier or composition.

[1289] In one example, a (modified) cyclic GFR-binding compound, functionalised bioactive carrier, or hair-cosmetic composition, all as defined herein, may be combined/mixed with mesenchymal stem cells and/or follicle progenitor cells prior to be administered to, contacted with, or implanted into a mammal (preferably a human) to promote hair growth and/or prevent and/or decrease or suppress hair-loss. In one example, the administration comprises the oral administration of a tablet, capsule, pill, powder, sustained release formulations, solution or suspension containing said (modified) cyclic GFR-binding compound, functionalised bioactive carrier, or hair-cosmetic composition, all as defined herein.

[1290] Suitable as forms of hair cosmetic compositions for implementing embodiments of the invention include hair rinse, hair mask, shampoo, conditioner, hair spray, hair foam, hair mousse, hair gel, hair tonic, hair setting composition, end fluid, neutralizer for permanent waves, hair colorant and bleach or hot-oil treatment.

[1291] Suitable formulations for use in hair treatment include, for instance, the ones described in US patent application No. 2011/0312884 A1, which is hereby incorporated by reference.

[1292] In one example, said hair cosmetic use of the invention is a non-therapeutic hair cosmetic use.

[1293] Hair cosmetic compositions of the invention may comprise at least one other active agent of hair cosmetic interest especially the conventional agents for hair treatment compositions especially at least one of the following agents:
[1294] anionic surfactants such as soaps, alkylsulfonates, alkylbenzenesulfonates, olefinsulfonates, alkyl ether sulfonates, glycerol ether sulfonates, methyl ester sulfonates, sulfo fatty acids, alkyl sulfates, fatty alcohol ether sulfates, glycerol ether sulfates, fatty acid ether sulfates, hydroxyl mixed ether sulfates, monoglyceride (ether) sulfates, fatty acid amide (ether) sulfates, mono- and dialkyl sulfosuccinates, mono- and dialkyl sulfosuccinamates, sulfotriglycerides, amide soaps, ethercarboxylic acids and salts thereof, fatty acid isethionates, fatty acid sarcosinates, fatty acid taurides, N-acylaminoacids, such as, for example, acyl lactylates, acyl tartrates, acyl glutamates and acyl aspartates, alkyl oligoglucosidesulfat. Suitable soaps are e.g. alkali metal, alkaline earth metal and ammonium salts of fatty acids, such as potassium stearate. Suitable olefinsulfonates may be present as alkali metal, alkaline earth metal, ammonium, alkylammonium, alkanolammonium or glucammonium salts. Preferably, the olefinsulfonates are present as sodium salts. The hydrolyzed alpha-olefinsulfonation product, i.e. the alpha-olefinsulfonates, are composed of ca. 60% by weight of alkanesulfonates and ca. 40% by weight of hydroxyalkanesulfonat.es; of these, about 80 to 85% by weight are monosulfonates and 15 to 20% by weight are disulfonates. Preferred methyl ester sulfonates (MES) are obtained by sulfonation of the fatty acid methyl esters of plant or animal fats or oils. Preference is given to methyl ester sulfonates from plant fats and oils, e.g. from rapeseed oil, sunflower oil, soya oil, palm oil, coconut fat, etc. Preferred sarcosinates are sodium lauroyl sarcosinate or sodium stearoyl sarcosinate. Preferred protein fatty acid condensates are plant products based on wheat. Preferred alkyl phosphates are mono- and diphosphoric acid alkyl esters.
[1295] Fatty alcohols having preferably 8 to 30 carbon atoms, particularly preferably 10 to 22 carbon atoms, in particular 12 to 20 carbon atoms. The hydrocarbon radical of the fatty alcohols can in principle be linear or branched, saturated or unsaturated. Typical examples of fatty alcohols are caproic alcohol, caprylic alcohol, 2-ethylhexyl alcohol, capric alcohol, lauryl alcohol, isotridecyl alcohol, myristyl alcohol, cetyl alcohol, palmoleyl alcohol, stearyl alcohol, isostearyl alcohol, oleyl alcohol, elaidyl alcohol, petroselinyl alcohol, linolyl alcohol, linolenyl alcohol, elaeostearyl alcohol and mixtures thereof. Preferred mixtures of the fatty alcohols are based on technical-grade alcohol mixtures which are produced e.g. during the high-pressure hydrogenation of technical-grade methyl esters based on fats and oils or during the hydrogenation of aldehydes from the oxo synthesis or during the dimerization of unsaturated fatty alcohols.
[1296] phospholipids, nonionic surfactants, amphoteric surfactants, cationic surfactants and mixtures thereof. Phospholipids are phosphorus-containing amphiphilic lipids such as phosphatidylserines, sphingomyelins and plasmalogens. Also suitable are the so-called lysophospholipids in which a fatty acid radical has been separated off from the phospholipid molecule to give an OH group, e.g. with the help of a phospholipase. The nonionic surfactants include, for example: fatty alcohol polyoxyalkylene esters, for example lauryl alcohol polyoxyethylene acetate, alkyl polyoxyalkylene ethers which are derived from low molecular weight C1-C6-alkohols or from C7-C30-fatty alcohols. Here, the ether component can be derived from ethylene oxide units, propylene oxide units, 1,2-butylene oxide units, 1,4-butylene oxide units and random copolymers and block copolymers thereof. These include specifically fatty alcohol alkoxylates and oxo alcohol alkoxylates such as isotridecyl alcohol and oleyl alcohol polyoxyethylene ethers, alkylaryl alcohol polyoxyethylene ethers, e.g. octylphenol polyoxyethylene ethers, alkoxylated animal and/or plant fats and/or oils, for example corn oil ethoxylates, castor oil ethoxylates, tallow fat ethoxylates, glycerol esters, such as, for example, glycerol monostearate, alkylphenol alkoxylates, such as, for example, ethoxylated isooctyl-, octyl- or nonylphenol, tributylphenol polyoxyethylene ether, fatty amine alkoxylates, fatty acid amide and fatty acid diethanolamide alkoxylates, in particular ethoxylates thereof, sugar surfactants, sorbitol esters, such as, for example, sorbitan fatty acid esters (sorbitan monooleate, sorbitan tristearate), polyoxyethylene sorbitan fatty acid esters, alkyl polyglycosides, N-alkylgluconamides, alkyl methyl sulfoxides, alkyl dimethyl phosphine oxides, such as, for example, tetradecyl dimethyl phosphine oxide. Suitable amphoteric surfactants are e.g. alkylbetaines, alkylamidopropylbetaines, alkylsulfobetaines, alkyl glycinates, alkyl carboxyglycinates, alkyl amphoacetates or propionates, alkyl amphodiacetates or dipropionates. For example, it is possible to use cocodimethylsulfopropylbetaine, laurylbetaine, cocamidopropylbetaine, sodium cocamphopropionate or tetradecyldimethylamine oxide. The cationic surfactants include, for example, quaternized ammonium compounds, in particular alkyltrimethylammonium and dialkyldimethylammonium halides and alkyl sulfates, and pyridine and imidazoline derivatives, in particular alkylpyridinium halides. For example, behenyl or cetyltrimethylammonium chloride may suitably be used.
[1297] an antidandruff active ingredient. Suitable antidandruff active ingredients are piroctone olamine (1-hydroxy-4-methyl-6-(2,4,4-trimethylpentyl)-2-(1H)-pyridinonemonoethanolamine salt), crinipan AD (climbazole), ketoconazole, elubiol, selenium disulfide, sulfur colloidal, sulfur polyethylene glycol sorbitan monooleate, sulfur ricinol polyethoxylate, sulfur tar distillates, salicylic acid (or in combination with hexachlorophene), undecylenic acid monoethanolamide sulfosuccinate Na salt, lamepon UD (protein-undecylenic acid condensate), zinc pyrithione, aluminum pyrithione and magnesium pyrithione/dipyrithione magnesium sulfate.
[1298] proteins and protein derivatives, cosmetically active polymers, hair pigmentation agents, bleaches, keratin-hardening substances, antimicrobial active ingredients, light filter active ingredients, repellent active ingredients, hyperemic substances, antiphlogistics, keratinizing substances, antioxidative active ingredient and/or free radical active ingredients, sebostatic active ingredients, plant extracts, antierythematous or antiallergic active ingredients and mixtures thereof.
[1299] a cosmetically acceptable auxiliary such as oil bodies, fats, waxes, pearlescent waxes, propellants, consistency regulators, thickeners, superfatting agents, stabilizers, polymers, silicone compounds, UV stabilizers, antioxidants, film formers, swelling agents, hydrotropes, solubilizers, preservatives, perfume oils, dyes, etc. and mixtures thereof.

[1300] In one aspect, the invention discloses a hair cosmetic care or treatment method, for a subject having need thereof, said method comprising the application, preferably topical or scalp injection applications, or administration of a hair cosmetic composition according to the present invention.

[1301] In one aspect, the present invention discloses a hair cosmetic care or treatment method in which the (modified) cyclic GFR-binding compound, functionalised bioactive carrier, or hair cosmetic composition, all as defined herein, is used to stimulate/activate hair follicle stem cells.

[1302] In one example, the subject who has need of the hair cosmetic care of the invention is a subject chosen from a population having an average age of more than 30 years old, preferably of more than 40 years old, more preferably of more than 50 years old.

### XX. Diagnostic Methods

[1303] In one aspect, the present disclosure provides a (modified) cyclic GFR-binding compound, a functionalised bioactive carrier or a medical or cosmetic composition as defined herein for use in a diagnostic method of a disease or condition which may require mesenchymal stem cells or progenitor cells (at any stage of differentiation thereof) to be differentiated.

[1304] In one aspect, the present disclosure provides a diagnostic method for diagnosing of a disease or condition which may require mesenchymal stem cells or progenitor cells (at any stage of differentiation thereof) to be differentiated comprising the provision of a (modified) cyclic GFR-binding compound or a pharmaceutical association, combination or composition as defined herein, and the contacting or administration of said cyclic GFR-binding compound or pharmaceutical association, combination or composition with a body part of a subject to be diagnosed.

[1305] A method for the diagnosis of a disease or condition which may require mesenchymal stem cells or progenitor cells (at any stage of differentiation thereof) to be differentiated in a patient, comprising obtaining a biological sample from a patient and apply fluorescent and/or radiolabeled (modified) GFR binding compounds, wherein high localisation of these compounds indicates a disease or condition which may require mesenchymal stem cells or progenitor cells (at any stage of differentiation thereof) to be differentiated in the patient.

### XXI. Kits

[1306] The present disclosure provides a variety of kits for conveniently and/or effectively carrying out methods and uses of the present invention. Typically, kits will comprise sufficient amounts and/or numbers of components to allow a user to perform multiple treatments of a subject(s) and/or to perform multiple experiments.

[1307] In one aspect, the present disclosure provides kits for pharmaceutical, dermatological, prophylactic, diagnostic, imaging or cosmetic functional association, combination or composition production, comprising at least one (modified) cyclic GFR-binding compound as defined herein, at least one bioactive carrier (such as a biomaterial or medical device) as defined herein, optionally a pharmaceutically, dermatologically, prophylactically, diagnostically, imaging or cosmetically acceptable excipient, carrier, vehicle or solvent, each and every one of them provided in an amount effective to produce a pharmaceutical, dermatological, prophylactic, diagnostic, imaging or cosmetic association to induce cell differentiation, promote tissue regeneration or protect a subject from a disease, disorder or condition as defined herein, when administered in-vitro, ex-vivo or in-vivo to a mesenchymal stem cell, progenitor cell (at any stage of differentiation thereof) or to a subject carrying such a cell, and packaging and instructions.

[1308] Suitable as solvents for use in kits of the invention include physiologically acceptable solvents, PBS, filtered and deionised water such as Milli-Q® water, alpha-MEM, DMEM and/or IMDM. All physiologically acceptable solvents suitable for implementing embodiments of the present invention are preferably deoxygenated before use.

[1309] In one example, said kit further comprises an administration device. In one example, said administration device is a dispensing device such as a syringe.

[1310] In one example, said kit comprises a first container containing a (modified) cyclic GFR-binding compound as defined herein and a second container containing a bioactive carrier such as a biomaterial or a medical device and a third container containing stem cells, preferably MSCs.

[1311] In one preferred example, a kit of the invention comprises (i) a first, preferably suitable, sterile, individual, container containing a (modified) cyclic GFR-binding compound as defined herein preferably in lyophilised form, (ii) a second, preferably suitable, sterile, individual, container containing a physiologically acceptable, sterile liquid (e.g. a solvent), (iii) a third, preferably suitable, sterile, individual, container containing a conventional biomaterial/medical device such as an orthopaedic or dental implant and, (iv) optionally, a fourth, preferably suitable, sterile, individual, container containing suitable stem cells, in particular adult stem cells or mesenchymal stem cells. In practice, said kit may be provided to an end-user (e.g. a surgeon). Said end-user may firstly pour the content of the second container into the first container, optionally provide a form of agitation to solubilise or suspend the (modified) cyclic GFR-binding compound of the invention in the physiologically acceptable, sterile liquid, then pour (or immerse) the resulting solution or suspension in the third container containing the conventional biomaterial/medical device (optionally with prior activation of said biomaterial/medical device if required), optionally followed by the contacting of the resulting functionalised biomaterial/medical device with the content of the fourth container containing the stem cells prior to placement onto or into a patient's body, preferably at a defect site.

[1312] Alternatively, a kit of the invention may comprise a first, preferably suitable, sterile, individual, container containing an already functionalised biomaterial/medical device e.g. a biomaterial/medical device functionalised with a (modified) cyclic GFR-binding compound as defined herein, optionally in a physiologically acceptable liquid, and a second, preferably suitable, sterile, individual, container containing suitable stem cells, in particular adult stem cells or mesenchymal stem cells. In practice, an end-user such as a surgeon may apply the stem cells onto the coated biomaterial by pouring the content of the second container into the first containing (and optionally apply a form of agitation) prior to placement onto or into a patient's body, preferably at a defect site.

[1313] In one particular example, said kits of the invention may suitably be provided in the form of a sterile packaging.

[1314] For example, in certain embodiments, said kits of the invention comprises more than 2, between 2 and 25, between 2 and 15, or between 2 and 10 of (modified) cyclic GFR-binding compound as defined herein, and more than 2, between 2 and 25, between 2 and 15, or between 2 and 10 (modified) cyclic GFR-binding compound as defined herein.

[1315] In one example, each (modified) cyclic GFR-binding compound and each conventional or functionalised bioactive carrier is conditioned in distinct and separated compartments, in lyophilised form, in solution or in suspension in a pharmaceutically dermatologically, prophylactically, diagnostically, imaging or cosmetically acceptable excipient, carrier or vehicle.

[1316] In one aspect, the invention discloses kit-of-parts comprising a bioactive carrier and a (modified) cyclic GFR-binding compound both as defined herein for uses and methods as defined herein.

### XXII. Sequence Listing

[1317] Examples of (modified) cyclic GFR-binding compounds as defined herein are listed in the appended sequence listing which forms an integral part of the present application. (Modified) cyclic GFR-binding compounds of the present disclosure may be represented in non-cyclic, linear, form solely for the purpose of ease of representation but nevertheless remains cyclic compounds wherein the first and the last functional group (e.g. an amino acid) of the linearly represented compound are covalently connected to each other thereby forming a cyclic structure.

[1318] (Modified) cyclic GFR-binding compounds, functionalised bioactive carriers and compositions, all as defined in the present disclosure, has been found to lead to multiple and distinct advantages in terms of cell differentiation induction and tissue regeneration.

[1319] As supported by the examples of the present application, (modified) cyclic GFR-binding compounds, functionalised bioactive carriers or compositions thereof, all as defined herein, display advantages over (modified) cyclic GFR-binding compounds, functionalised bioactive carrier or compositions that do not contain it, such as:
[1320] Enhanced and/or more practical and/or more efficient and/or more cost-effective and/or more adapted to the end-user needs and/or tissue regeneration in mammals, preferably humans;
[1321] Modifying and/or enhancing and/or modulating and/or promoting and/or activating bone and/or cartilage and/or vascular and/or muscle and/or neuronal and/or blood and/or retinal and/or organs such as kidneys and lung and/or ligament/tendon and/or hair follicle and/or skin and/or adipose, tissue regeneration;
[1322] Modifying and/or enhancing and/or modulating and/or promoting and/or activating embryonic patterning;
[1323] Modifying and/or enhancing and/or modulating and/or promoting and/or activating cellular migration and wound healing;
[1324] Modifying and/or enhancing and/or modulating and/or promoting and/or activating the closure of any type of living tissue;
[1325] Modifying and/or enhancing and/or modulating and/or promoting and/or activating female fertility;
[1326] Preventing and/or suppressing or avoiding or reducing tissue degeneration in mammals, preferably humans;
[1327] Preventing and/or suppressing or avoiding or reducing bone and/or cartilage and/or vascular and/or muscle and/or neuronal and/or blood and/or retinal and/or organs such as kidneys or lungs and/or ligament/tendon and/or hair follicle and/or skin and/or adipose, tissue degeneration;
[1328] Preventing and/or suppressing or avoiding or reducing embryonic mispatterning;
[1329] Preventing and/or suppressing or avoiding or reducing cellular immobilisation and wound formation and/or progression;
[1330] Preventing and/or suppressing or avoiding or reducing the misclosure of any type of living tissue;
[1331] Preventing and/or suppressing or avoiding or reducing female infertility;
[1332] Preventing and/or suppressing or avoiding or reducing hair-loss;
[1333] Preventing/treating alopecia areata, alopecia totalis, alopecia universalis, androgenic alopecia (male pattern baldness), telogen effluvium, anagen effluvium or chemotherapy-induced alopecia;
[1334] Modifying and/or enhancing and/or modulating and/or promoting and/or activating the osteogenicity, and/or the chondrogenecity, and/or the myogenecity, and/or the endothelization and vascularization ability, and/or hair growth ability, and/or the wound healing ability, and/or the skin repair ability, and/or the tissue defect closure ability, and/or lung tissue regeneration ability, and/or renal tissue regeneration ability, and/or the neuroregeneration ability, and/or the ligament/tendon regeneration ability, and/or the female fertility ability, of a biomaterial which may be useful in the manufacturing of medical devices;
[1335] Modifying and/or enhancing and/or activating anti-ageing/anti-wrinkle effects/properties in cosmetic products;
[1336] Modifying and/or enhancing and/or activating hair growth effects/properties in pharmaceutical or cosmetic products;
[1337] Modifying and/or enhancing and/or modulating and/or promoting and/or inducing and/or activating stem cells, preferably adult stem cells, more preferably mesenchymal stem cells, commitment and/or differentiation in a specific lineage of cells;
[1338] Modifying and/or enhancing and/or modulating and/or promoting and/or inducing and/or activating progenitor cells differentiation and/or maturation.
[1339] Obtaining/producing functional differentiated cells;
[1340] Obtaining/producing differentiated cells with modified and/or improved functionality and/or physiological activity.

[1341] For example, in certain embodiments, (modified) cyclic GFR-binding compounds, functionalised bioactive carriers, or compositions according to the present disclosure in which PEP1 is a peptide selected from the group consisting of SAIS, NAIS, SATS and SPIS, in which PEP2 is a peptide selected from the group consisting of LKNYQ, LKKYR, LRKHR and LKYHY, have been found to lead to unexpectedly fast and qualitatively and quantitatively important osteoinduction, producing highly functional differentiated cells.

[1342] For example, in certain embodiments, (modified) cyclic GFR-binding compounds, functionalised bioactive carriers, or compositions according to the present disclosure in which PEP1 is a peptide selected from the group consisting of SAIS, NAIS, SPIS, EPLP, and EPLT, in which PEP2 is a peptide selected from the group consisting of LKNYQ, LKKYR, YKQYE and EQLSN, have been found to lead to unexpectedly fast and qualitatively and quantitatively important chondroinduction, producing highly functional differentiated cells.

[1343] For example, in certain embodiments, (modified) cyclic GFR-binding compounds, functionalised bioactive carriers, or compositions according to the present disclosure in which PEP1 is a peptide selected from the group consisting of SNIT, RPVQ and RSVK, in which PEP2 is a peptide selected from the group consisting of IGEMS, LGEMS, KEVQV and KKATV, have been found to lead to unexpectedly fast and qualitatively and quantitatively important vascular tissue induction, producing highly functional differentiated cells.

[1344] For example, in certain embodiments, (modified) cyclic GFR-binding compounds, functionalised bioactive carriers, or compositions according to the present disclosure in which PEP1 is selected from the group consisting of NAIS, SPIS and EPIS, wherein PEP2 is selected from the group consisting of LKKYR, LKYHY, YKQYE and KFKYE, have been found to lead to unexpectedly fast and qualitatively and quantitatively important neuronal induction, producing highly functional differentiated cells.

[1345] For example, in certain embodiments, (modified) cyclic GFR-binding compounds, functionalised bioactive carriers, or compositions according to the present disclosure in which PEP1 is SPIN, in which PEP2 is YGKIP, have been found to lead to unexpectedly fast and qualitatively and quantitatively important eye-retina cells induction, producing highly functional differentiated cells.

[1346] For example, in certain embodiments, (modified) cyclic GFR-binding compounds, functionalised bioactive carriers, or compositions according to the present disclosure in which PEP1 is SPIN, and in which PEP2 is YGKIP, have been found to lead to unexpectedly fast and qualitatively and quantitatively important renal cells induction, producing highly functional differentiated cells.

[1347] For example, in certain embodiments, (modified) cyclic GFR-binding compounds, functionalised bioactive carriers, or compositions according to the present disclosure in which PEP1 is a peptide selected from the group consisting of NAIS, SPIS, EPLP and EPLT, in which PEP2 is selected from the group consisting of LKKYR, YKQYE and EQLSN, have been found to lead to unexpectedly fast and qualitatively and quantitatively important tenocytes and/or fibrous cells induction, producing highly functional differentiated cells.

[1348] For example, in certain embodiments, (modified) cyclic GFR-binding compounds, functionalised bioactive carriers, or compositions according to the present disclosure in which PEP1 is selected from the group consisting of SNIT, RPVQ and RSVK, wherein PEP2 is selected from the group consisting of IGEMS, LGEMS, KEVQV and KKATV, have been found to lead to unexpectedly fast and qualitatively and quantitatively important wound healing induction, producing highly functional differentiated cells.

[1349] For example, in certain embodiments, (modified) cyclic GFR-binding compounds, functionalised bioactive carriers, or compositions according to the present disclosure in which PEP1 is a peptide selected from the group consisting of EPLP, EPLT, RSVK and RPVQ, in which PEP2 is a peptide selected from the group consisting of EQLSN, IGEMS, KEVQV and KKATV, have been found to lead to unexpectedly fast and qualitatively and quantitatively important skin cells induction, producing highly functional differentiated cells.

[1350] For example, in certain embodiments, (modified) cyclic GFR-binding compounds, functionalised bioactive carriers, or compositions according to the present disclosure in which PEP1 is SSLS, in which PEP2 is LKVYP, have been found to lead to unexpectedly fast and qualitatively and quantitatively important hair follicle cells induction, producing highly functional differentiated cells.

[1351] For example, in certain embodiments, (modified) cyclic GFR-binding compounds, functionalised bioactive carriers, or compositions according to the present disclosure in which PEP1 is NAIS, in which PEP2 is LKKYR, have been found to lead to unexpectedly fast and qualitatively and quantitatively important ovarian cells induction, producing highly functional differentiated cells.

[1352] For example, in certain embodiments, (modified) cyclic GFR-binding compounds, functionalised bioactive carriers, or compositions according to the present disclosure in which PEP1 is selected from the group consisting of NAIS, SATS, SPIS, EPIS and SPIN, in which PEP2 is selected from the group consisting of LKKYR, LRKHR, LKYHY, KFKYE and YGKIP, have been found to lead to unexpectedly fast and qualitatively and quantitatively important lung cells induction, producing highly functional differentiated cells.

[1353] For example, in certain embodiments, (modified) cyclic GFR-binding compounds, functionalised bioactive carriers, or compositions according to the present disclosure in which PEP1 is selected from the group consisting of RSVK or RPVQ, in which PEP2 is selected from the group consisting of KEVQV or KKATV, have been found to lead to unexpectedly fast and qualitatively and quantitatively important muscle cells induction, producing highly functional differentiated cells.

[1354] For example, in certain embodiments, (modified) cyclic GFR-binding compounds, functionalised bioactive carriers, or compositions according to the present disclosure in which PEP1 is SNIT, in which PEP2 is IGEMS or LGEMS, have been found to lead to unexpectedly fast and qualitatively and quantitatively important blood cells induction, producing highly functional differentiated cells.

[1355] For example, in certain embodiments, (modified) cyclic GFR-binding compounds, functionalised bioactive carriers, or compositions according to the present disclosure in which PEP1 is SAIS or NAIS, in which PEP2 is LKNYQ or LKKYR, have been found to lead to unexpectedly fast and qualitatively and quantitatively important adipocytes induction, producing highly functional differentiated cells.

[1356] For example, in certain embodiments, microenvironments comprising a plurality of structurally distinct/different (modified) cyclic GFR-binding compounds, functionalised bioactive carriers, or compositions according to the present disclosure in which each PEP1 is a peptide which may be selected from the group consisting of SAIS, SSLS, NAIS, SATS, SPIS, EPIS, SPIN, KPLS, EPLP, EPLT, SNIT, RSVK and RPVQ, and wherein PEP2 is a peptide selected from the group consisting of LKNYQ, LKVYP, LKKYR, LRKHR, LKYHY, KFKYE, YGKIP, YKQYE, DHHKD, EQLSN, IGEMS, LGEMS, KEVQV and KKATV, have been found to lead to unexpectedly fast and qualitatively and quantitatively important tissue closure induction, producing highly functional differentiated cells.

[1357] Accordingly, it is possible to achieve tissue (bone, cartilage, vascular, endothelial, blood, neuronal, eye-retina, kidneys, lung, adipose, ligament, tendon, hair follicle, skin, ovary, etc.) regeneration using e.g. orthopedic, dental implants, matrix injections or administrable compositions, efficiently and rapidly thus reducing the costs associated with such treatments, improving and accelerating tissue healing and patient recovery.

[1358] In addition, it has been found that using the compounds, bioactive carrier and compositions of the present disclosure also permits a quasi-complete or complete control over the final chemical structure of the compounds, bioactive carrier and compositions of the present disclosure, thereby avoiding any unwanted (e.g. post-translational) modifications and unpredicted short half-life and quick metabolization.

[1359] Remarkably, it has also been found that using the compounds, bioactive carrier and compositions of the present disclosure allows for reduction (in most cases, important reduction) of the administered doses to provide a beneficial treatment to a patient in comparison with known technologies, thus decreasing or eliminating the risks of immune responses and reduce or eliminate drug/treatment toxicity.

[1360] It is another aspect of the present invention to solve the technical problem of providing a tissue regeneration environment/system being completely or at least partially devoid of one or more, preferably a plurality of the disadvantages of known treatments.

[1361] All combinations of any of the above-mentioned features described in all above part of the present description are specifically contemplated by the Applicant to be within the scope of the present invention unless contradictory in context. Examples of such combinations are detailed throughout the present description.

[1362] Further embodiments and advantages will become apparent to a skilled reader in light of the examples provided below.

### EXAMPLES

[1363] Disclosed and described, it is to be understood that this invention is not limited to the particular examples, process steps, and materials disclosed herein as such process steps and materials may vary somewhat. It is also to be understood that the terminology used herein is used for the purpose of describing particular embodiments only and not intended to be limiting since the scope of the present invention will be limited only by the appended claims and equivalents thereof.

[1364] The following Examples are representative of techniques employed by the inventor in carrying out aspects of the present invention. It should be appreciated that while these techniques are exemplary of preferred embodiments for the practice of the invention, those of skill in the art, in light of the present disclosure, will recognize that numerous modifications can be made without departing from the spirit and intended scope of the invention.

[1365] The following starting materials and reagents were used:
[1366] Apatite ceramics (also called apatite or ceramic in the present invention) were synthetized as described in Mater Res. 2004; 7(4): 625-630.
[1367] Titanium was obtained from Goodfellow®.
[1368] Hydrogel (poly(acrylamide-co-acrylic acid) gel) was synthetized as described in Langmuir 2011; 27(22):13635-42.
[1369] PEEK was obtained from Goodfellow®.
[1370] PET (Poly(ethylene terephthtalate) was obtained from Goodfellow@.
[1371] Type-I collagen sponge was obtained from Sigma®.
[1372] Hexane was obtained from Sigma®.
[1373] 3-succinimidyl-3-maleimidopropionate (SMP) was obtained from Sigma®.
[1374] DMF was obtained from Sigma®.
[1375] PBS 1× was obtained from Gibco®.
[1376] 3-(ethoxydimethylsilyl)propylamine was obtained from Sigma®.
[1377] Ammonium persulfate was obtained from Biorad®.
[1378] N,N,N′,N′-tetramethylethylenediamine was obtained from Aldrich®.
[1379] Acrylamid was obtained from Merck®.
[1380] Acrylic acid was obtained from Merck®.
[1381] N,N-methylene-bis-acrylamide was obtained from Merck®.
[1382] NaOH was obtained from Aldrich®.
[1383] N,N,N′,N′-tetramethylethylenediamine was obtained from Aldrich®.
[1384] Dimethylaminopropyl-3-ethylcarbodiimide hydrochloride was obtained from Aldrich®.
[1385] N-hydroxysuccinimide was obtained from Aldrich®.
[1386] 2-(N-morpholino)-ethane sulfonic acid was obtained from Aldrich®.
[1387] MilliQ water: is water characterised in terms of resistivity (typically 18.2 MΩ·cm at 25° C.).
[1388] Low glucose Dulbecco's Modified Eagle Medium (DMEM) was obtained from Invitrogen®
[1389] Minimum Essential Medium Eagle without ascorbic acid (αMEM) was obtained from Invitrogen®.
[1390] All of the cell culture experiments were carried out without any serum in the medium for the first 8 hours of culture.
[1391] Osteoblast progenitors or precursor osteoblasts: MC3T3-E1 cells were obtained from ATCC®. These cells were cultured in Alpha-MEM medium supplemented with 10% fetal calf serum (FCS) and 1% penicillin/streptomycin. All cells were used at a low passage number (passage 7), were subconfluently cultured and were seeded at 10⁴ cells/cm² for the purpose of the experiments.
[1392] Human bone marrow Mesenchymal Stem Cells (hMSCs) were obtained from Lonza®. These cells were cultured in Alpha-MEM supplemented with 10% (v/v) FBS and 1% penicillin/streptomycin and incubated in a humidified atmosphere containing 5% (v/v) CO₂ at 37° C. All cells were used at a low passage number (passage 2 to 4), were subconfluently cultured and were seeded at 10⁴ cells/cm² for the purpose of the experiments.
[1393] Human adipose Mesenchymal Stem Cells (haMSCs) were obtained from Lonza®. These cells were cultured in Alpha-MEM supplemented with 10% (v/v) FBS and 1% penicillin/streptomycin and incubated in a humidified atmosphere containing 5% (v/v) CO₂ at 37° C. All cells were used at a low passage number (passage 3 to 4), were subconfluently cultured and were seeded at 10⁴ cells/cm² for the purpose of the experiments.
[1394] Mouse Hair Follicle Stem Cells were isolated and cultured as described in Methods Mol Biol. 2010; 585:401-20.
[1395] Neuron cells are Neuronal Schwann Cells obtained from ATCC®. These cells were cultured in Dulbecco's Modified Eagle's Medium supplemented with 10% (v/v) FBS and 1% penicillin/streptomycin and incubated in a humidified atmosphere containing 5% (v/v) CO₂ at 37° C. All cells were used at a low passage number (passage 6-8), were subconfluently cultured and were seeded at 10⁴ cells/cm² for the purpose of the experiments.
[1396] Human umbilical-vein endothelial cells (HUVECs) were purchased from Promocell®. HUVECs were isolated and grown on gelatin coated culture flasks in a complete HUVEC culture medium (IMDM (Invitrogen, France) supplemented with 20% (v/v) fetal bovine serum (FBS) (PAA, France) and 0.4% (v/v) EC growth supplement/heparin kit (Promocell, France)). Cells were subcultured by using trypsin/EDTA (Invitrogen, France) and maintained in a humidified atmosphere containing 5% CO₂ at 37° C. These cells were used at a passage number 3 to 5 for the purpose of the experiments. HUVECs were seeded on each surface at a density of 50 000 cells/cm².
[1397] Human Mammary Epithelial Cells (HMEC) were obtained from Lonza®. These cells were cultured in Clonetics™ MEGM™ Mammary Epithelial Cell Growth Medium.
[1398] Hematopoietic stem (Bone marrow CD-34+ cells, Lonza). These cells were cultured on HPGM™ Hematopoietic Growth Medium in serum-free culturing.
[1399] CMFDA is a Cell Tracker Green obtained from Invitrogen®.
[1400] DAPI was obtained from Sigma®.
[1401] Fetal bovine serum (FBS) was obtained from Gibco®.
[1402] Penicillin/streptomycin was obtained from Invitrogen®.
[1403] The AlamarBlue™ assay was obtained from Molecular Probes®.
[1404] Runx2 antibody was obtained from Abcam®.
[1405] Osterix antibody was obtained from Santa Cruz Biotechnology®.
[1406] Osteopontin antibody was obtained from Abcam®,
[1407] Stro-1 antibody was obtained from Abcam®,
[1408] Sox2 antibody was obtained from Santa Cruz Biotechnology®.
[1409] Sox9 antibody was obtained from Santa Cruz Biotechnology®.
[1410] BMP-6 antibody was obtained from Abcam®,
[1411] CD31 (PECAM-1) antibody was obtained from Invitrogen®,
[1412] Primers for GAP 43: 5′-AAGCTACCACTGATAACTCGCC-3′ (Forward) and 5′-CTTCTTTACCCTCATCCTGTCG-3′ (Reverse) were obtained from Invitrogen®.
[1413] Primers for Aggrecan: 5′-CACTGTTACCGCCACTTCCC-3′ (Forward) and 5′-ACCAGCGGAAGTCCCCTTCG-3′ (Reverse) were obtained from Invitrogen®.
[1414] Primers for COMP: 5′-GCTCTGTGGCATACAGGAGA-3′ (Forward) and 5′-CATAGAATCGCACCCTGATG-3′ were obtained from Invitrogen®.
[1415] Primers for Runx2: 5′-GACGTGCCCAGGCGTATTTC-3′ (Forward) and 5′-AAGTCTGGGGTCCGTCAAGG-3′ (Reverse) were obtained from Invitrogen®.
[1416] Primers for HPRT: 5′-GCAGTACAGCCCCAAAATGG-3′ (Forward) and 5′-ACAAAGTCCGGCCTGTATCCAA-3′ (Reverse) were obtained from Invitrogen®.
[1417] All peptides were synthetized using conventional solution and/or solid phase peptide synthesis methods.
[1418] All experiments were carried out with a concentration of compounds of the invention of 400 ng/mL. When cell culture duration extended beyond 24 h, a further 400 ng/mL solution of compounds of the invention was added every 24 h.

[1419] The following general methods were used:

[1420] X-Ray Photoelectron Spectroscopy:

[1421] For X-ray photoelectron spectroscopy, AVG Scientific ESCALAB photoelectron spectrometer was used for the surface analysis with a non-monochromatized MgK 1253.6 eV source of 100 W. The area of the analytical X-ray spot on the sample surface was about 200 μm². A 45° insert angle that corresponds to about 5 nm of analyzed depth was used. A flood gun was used for charge compensation. Acquisition of high resolution spectra was performed at constant pass energy of 20 eV.

[1422] Optical Profilometry Probing:

[1423] The surface profiler system is a non-contact optical profiler that measures a wide range of surface heights. The vertical scanning interferometry mode allows for the measurement of rough surfaces and steps of up to several micrometers. This mode was used in order to measure the thickness of the extracellular matrix produced by the cells. First, after 24 h of culture, the cells were fixed with paraformaldehyde in PBS (4%) for 30 minutes at 4° C. and the samples were dehydrated in increasing concentrations of ethanol (30, 70, 80, 90, 95 and 100%) and critical-point dried. To evaluate the extent of the newly synthesized extracellular matrix, a spatula was used to scratch the surface of the materials. The samples were then metallized for 10 sec with gold or titanium before being analyzed. This procedure did not affect the cell shape and dimensions.

[1424] Immunostaining:

[1425] The cells were first fixed for 20 min with 4% paraformaldehyde/PBS at 4° C. After fixation, the cells were permeabilized in PBS containing 1% Triton X-100 for 15 min. Runx2, Osterix, Stro-1, Vinculin, Phalloidin, Osteopontin, Sox2, Sox9 antibodies were visualized by treating the cells with 1% (v/v) specific monoclonal antibodies for 1 hour at 37° C. Then the samples were incubated with Alexa Fluor® 568 or 647 (F(ab′)2 fragment of IgG(H+L)) during 30 min at room temperature. The cell nuclei were counterstained in 20 ng/mL DAPI for 10 min at room temperature.

[1426] Quantification of Positive Contact Numbers and Areas:

[1427] For this type of quantification the freeware image analysis ImageJ® software was used. The raw image was first converted to an 8-bit file, and then the unsharp mask feature was used (settings 1:0.2) to remove the image background (rolling ball radius 10). After smoothing, the resulting image, which appears similar to the original photomicrograph but with minimal background, was then converted to a binary image by setting a threshold. Threshold values were determined empirically by selecting a setting, which gave the most accurate binary image for a subset of randomly selected photomicrographs. The cell area was determined by manual delineation on raw fluorescent images. Total contact area and mean contact area per cell were calculated by “analyse particles” in ImageJ®. A minimum of 30 cells per condition were analyzed. Stro-1, CD-34+, and CD-105 expressions were determined using this procedure.

[1428] Quantitative Real Time Polymerase Chain Reaction (Q-PCR):

[1429] Total RNA was extracted by using the RNeasy total RNA kit (Qiagen®) according to the manufacturer's instructions. Purified total RNA was used as a template in order to make cDNA by a reverse transcription reaction (Gibco Brl®) with random primers (Invitrogen®). The cDNA was then used as a template for a real-time PCR amplification in the presence of SYBR green reagents (Bio-Rad®) by using a thermocycler (iCycler, Biorad®). Data were analyzed with the iCycler IQ™® software and compared by the ΔΔCt method. Briefly, the mean Ct value of the target gene was normalized to its averaged Ct values of the housekeeping gene (HPRT) to give a ΔCt value, which was then normalized to a control sample to obtain a ΔΔCt value. The results were obtained from two series of experiments performed in a triplicate.

[1430] Semi-Quantitative RT-PCR:

[1431] Total RNA was extracted by using the RNeasy Mini Kit (Qiagen) and 1 mg RNA was used for cDNA synthesis with AMV kit (Invitrogen®) according to the manufacturer′ instructions. Semi-quantitative reverse transcriptase-polymerase chain reaction (RT-PCR) was performed with Taq DNA Polymerase (Invitrogen®) in a thermocycler (Bio-Rad®). The cDNA input was normalized to glyceraldehyde-3-phosphate dehydrogenase (HPRT). The PCR products were analyzed on 2% agarose gels. For the Aggrecan gene, the PCR bands were densitometrically quantified by using the BioCapt software (Vilber). Values were normalized to HPRT, and results were reported as relative gene expression.

### Example 1: Osteoinductive Activity of GFR-Binding Compounds as Defined Herein

[1432] On control condition, human bone marrow mesenchymal stem cells were observed to have organized F-actin cytoskeleton fibers and few focal adhesions complexes (FIG. 1). In contrast, cells cultured in the presence of GFR-binding compounds as defined herein (concentration of 400 ng/mL) for 24 hours were well spread with prominent, highly organized F-actin cytoskeleton stress fibers and large increasing focal adhesions complexes (FIG. 1).

### Example 2: Osteogenic Differentiation of Human Mesenchymal Stem Cells

[1433] Human Mesenchymal Stem Cells (hMSCs) were obtained from Lonza®, Inc. Cells were then cultured in low glucose Dulbecco's Modified Eagle Medium (DMEM, Invitrogen®) supplemented with 10% (v/v) fetal bovine serum (FBS), 1% penicillin/streptomycin and incubated in a humidified atmosphere containing 5% (v/v) CO₂ at 37° C. All of the cell culture experiments were carried out without any serum in the medium for the first 8 hours of culture. All the cells were used at a low passage number (≤passage 3), were subconfluently cultured and were seeded at 10 000 cells/cm² for the purpose of the experiments. Stem cell phenotype was analyzed after 62 hours of cell culture with and without GFR-binding compounds as defined herein (SEQ: ID NO: 3 to 8).

[1434] To probe this lineage specification, immunostaining for Runx2 and Osterix was performed after cell fixation as described in the Methods section. The quantification of Runx2 and Osterix positive contact numbers and areas was performed as described in the Methods section.

[1435] As shown in FIG. 2, when cultured with and without GFR-binding compounds as defined herein, the vast majority of the human bone marrow mesenchymal stem cells adheres, spreads, and differentiates into osteoblast-like cells, which was confirmed by increase in the Runx2 and Osterix protein expression (FIG. 2).

### Example 3: Non-Covalent Depositing of GFR-Binding Compounds as Defined Herein

[1436] Non-covalent modifications of the materials were performed in Air Atmosphere at room temperature. The non-covalent coating strategy consisted in using a mixture of compound of the invention (SEQ ID NO: 9; concentration of 1×10⁻³M) with an apatite ceramics implant or a mixture of compound of the invention (SEQ ID NO: 10; concentration of 1×10⁻³M) with a type-I collagen sponge. The non-covalently coated conventional materials were characterized by using fluorescent peptides (Here SEQ ID NO: 9 and 10 covalently bound to fluorescein isothiocyanate (FITC), FIG. 3). The results shown here in FIG. 3 were obtained from experiments performed with apatite ceramics and a type-I collagen sponge. It can be seen that the interaction between these peptides and the apatite ceramics or the type-I collagen is stable as no significant release of peptides was observed over time. Indeed, after 3, 7 or 10 days, the osteogenic peptides were still coupled to the ceramics or the type-I collagen (FIG. 4). The biomaterial surface was characterized by X-ray photoelectron spectroscopy (Table 1). The X-ray photoelectron spectroscopy was performed as described in the Methods section.

[1437] The results presented in Table 1 were obtained for an apatite ceramics non-covalently modified with SEQ ID NO: 2.

TABLE 1

| Name | At. % C1s | At. % N1s |
|---|---|---|
| Apatite | 19.39 | no detection |
| Apatite non-covalently grafted | 21.06 | 4.64 |
| with SEQ ID NO: 2 | | |

### Example 4: Proliferation of Progenitor Bone Cells

[1438] The effect of the GFR-binding compounds as defined herein (SEQ ID NO: 11 to 14) of the present invention on the proliferation of osteoblast progenitors was investigated. MC3T3-E1 cells were cultured in Alpha-MEM medium supplemented with 10% fetal calf serum (FCS) and 1% penicillin/streptomycin. All the cells were used at a low passage number (passage 4), were subconfluently cultured and were plated at 10 000 cells/cm² for the purpose of the experiments. The stimulatory effect of the osteogenic peptides, coated to apatite ceramics or to type-I collagen on osteoblast progenitor cells, was compared to the effect of native apatite ceramics or of native type-I collagen sponge, which are already being used as bone graft/LT-Cage® lumbar tapered fusion devices designed to aid in the treatment of the degenerative disc disease (DDD) in humans. The AlamarBlue® assay was used to compare cell proliferation on the different biomaterials based on detection of metabolic activity. Analysis of these data showed that the cell proliferation proceeded more significantly on apatite ceramics and type-I collagen sponge when coupled to osteogenic peptides as compared to native apatite ceramics and native type-I collagen sponge (FIG. 5).

### Example 5: Osteogenic Differentiation of Human Mesenchymal Stem Cells

[1439] GFR-binding compounds as defined herein were non-covalently deposited on apatite ceramics or type-I collagen onto apatite ceramics or onto type-I collagen sponge. Human Mesenchymal Stem Cells (hMSCs) were obtained from Lonza®, Inc. Cells were then cultured in low glucose Dulbecco's Modified Eagle Medium (DMEM, Invitrogen®) supplemented with 10% (v/v) fetal bovine serum (FBS), 1% penicillin/streptomycin and incubated in a humidified atmosphere containing 5% (v/v) CO₂ at 37° C. All cell culture experiments were carried out without any serum in the medium for the first 8 hours of culture. All cells were used at a low passage number (≤passage 3), were subconfluently cultured and were seeded at 10 000 cells/cm² for the purpose of the experiments.

[1440] The cell phenotype was analyzed after 96 hours of cell culture on apatite ceramics coated with osteogenic peptides or on a type-I collagen sponge coated with osteogenic peptides (SEQ: ID NO: 15 to 18). On GFR-binding compounds as defined herein-coated apatite ceramics and type-I collagen sponge, the vast majority of the human bone marrow mesenchymal stem cells adhere, spread, and differentiate into osteoblast-like cells as confirmed by analysis of Runx2 and Osterix expression (FIG. 6). To probe this lineage specification, immunostaining for Runx2 and Osterix was performed after cell fixation as described in the Methods section. The quantification of Runx2 and Osterix positive contact numbers and areas was performed as described in the Methods section.

### Example 6: Osteogenic Differentiation of Osteoblast Progenitors

[1441] Mature osteoblasts are the cells responsible for bone formation and are derived from precursor osteoblasts. Mature osteoblasts were obtained and characterized by the expression of osteoblastic markers such as Runx2 and the synthesis of extracellular matrix proteins.

[1442] The effect of the GFR-binding compounds as defined herein (SEQ ID NO: 19 and 20) on the differentiation of osteoblast progenitors was evaluated. These osteoblast progenitors were deposited onto the apatite ceramics or on type-I collagen sponge that were both coated with GFR-binding compounds as defined herein. The cells were differentiated into mature osteoblasts after 48 hours of culture on these non-covalently coated materials. The differentiated osteoblast progenitors produced extensive amounts of extracellular matrix proteins such as Osteopontin (OPN) as compared to the osteoblast precursors cultured on a native type-I collagen sponge or on a native apatite ceramics. This was seen from Osteopentin immunofluorescence staining after cell fixation as described in the Methods section (FIG. 7).

[1443] Finally, it was verified that the osteoblast progenitors were differentiated into mature osteoblasts by analyzing the expression of the osteogenic biomarker Runx2. An increase in the Runx2 gene expression after 24 hours of culture (FIG. 8a) was observed by using Quantitative Real Time Polymerase Chain Reaction as described in the Methods section.

[1444] Finally, it was verified that the hMSCs were differentiated into mature osteoblasts by analyzing the activity of the osteogenic biomarker ALP (Alkaline Phosphatase Activity). We observed an increase in the ALP activity after 1 week of culture on type-I collagen sponge coupled with GFR-binding compounds as defined herein (SEQ ID NO: 19) (FIG. 8b).

### Example 7:GFR-Binding Compounds as Defined Herein Inducing Cartilage Regeneration

[1445] hMSCs were cultured with and without GFR-binding compounds as defined herein (SEQ ID NO: 23 and 24). The expression of the Sox9 protein was observed after 96 hours of culture suggesting that hMSCs have committed towards chondrocyte like cell differentiation (FIG. 9a).

[1446] It was then verified that these hMSCs cultured with and without GFR-binding compounds as defined herein were differentiated into chondrocyte cells by analyzing the expression of the chondrocyte gene biomarker: Aggrecan. The increased expression of this gene was observed after 96 hours of culture (FIG. 9b). For that a semi-quantitative RT-PCR was performed as described in the Methods section for the Aggrecan gene and a Quantitative Real Time PCR for Sox9.

### Example 8:GFR-Binding Compounds as Defined Herein Inducing Endothelialization

[1447] Human umbilical-vein endothelial cells were cultured with and without endothelialization GFR-binding compounds as defined herein (SEQ ID NO: 26). An increase in the area of the adherent junctions (CD31) was observed after 36 hours of culture with GFR-binding compounds as defined herein (FIG. 10). The results observed showed that the GFR-binding compounds as defined herein have the ability to rapidly induce stent endothelialization.

### Example 9:GFR-Binding Compounds as Defined Herein Inducing Angiogenesis

[1448] Human umbilical-vein endothelial cells were cultured with and without vascular peptides (SEQ ID NO: 27). The formation of tube-like structures was observed after 18 hours of culture with vascular peptide (FIG. 11). The results observed showed that the GFR-binding compounds as defined herein have the ability to rapidly induce angiogenesis.

### Example 10: Wound Healing/Increase of Collective Cell Migration

[1449] Human epithelial cells were cultured with or without GFR-binding compounds as defined herein (SEQ ID NO: 28). A usual scratch test was applied (Nat Protoc 2: 329-333) on a monolayer of these epithelial cells in culture (FIG. 12a). An increase in the cell migration velocity for cells cultured with peptides was observed after 18 hours of culture. The cells migrated collectively and the communication between cells was maintained (FIG. 12b). In fact, the injury has been closed rapidly for the cells cultured with GFR-binding compounds as defined herein. The results observed showed that the GFR-binding compounds as defined herein have the ability to rapidly induce tissue closure such as in wound healing.

### Example 11: Loss of Quiescence and Activation of Hair Follicle Stem Cells

[1450] Isolated Hair Follicle Stem Cells were cultured with and without GFR-binding compounds as defined herein (SEQ ID NO: 29 and 30). Very interestingly an increase in the Sox2 protein expression was observed illustrating the activation of these stem cells (FIG. 13a). In parallel, a decrease in the BMP-6 release in the cell culture medium was observed (FIG. 13b). In fact, it has been very well described that an increase in the BMP-6 release in the microenvironment is inducing the quiescence status of the hair follicle stem cells. In our conditions, the decrease in the BMP-6 release is indicating that the hair follicle stem cells were activated and that the hair growth process has been induced.

### Example 12: Muscle Differentiation of Human Mesenchymal Stem Cells

[1451] hMSCs were cultured with and without GFR-binding compounds as defined herein (SEQ ID NO: 31 to 36). We observed an increase in the cell area of the cells cultured with musculogenic peptides after 62 hours of culture suggesting that hMSCs have committed towards muscle differentiation (FIG. 14a). It was then verified that these hMSCs cultured treated with GFR-binding compounds as defined herein were differentiated into muscle cells by analyzing the expression of the musculogenic biomarker COMP (Cartilage Oligomeric Matrix Protein). An increased expression of this gene was observed after 96 hours of culture (FIG. 14b). For that a Quantitative Real Time PCR was performed as described in the Methods section.

### Example 13: Neuron Growth

[1452] Neurons were cultured with and without GFR-binding compounds as defined herein (SEQ ID NO: 38). A rapid establishment of cell-cell contacts via dendrite growth was observed after 6 hours of culture with neurogenic peptide. To further confirm this, the expression of the Growth Associated Protein 43 (GAP43) gene was verified for neuron cells cultured with GFR-binding compounds as defined herein (SEQ ID NO: 38). A high level of expression of this gene was observed after 48 hours of culture with this compound of the invention by using Quantitative Real Time Polymerase Chain Reaction as described in the Methods section (FIG. 15).

### Example 14: Loss of Stemness

[1453] hMSCs were cultured on conventional cell culture plastic plates with and without the presence in the cell culture media of different GFR-binding compounds as defined hereins (SEQ ID NO: 39 to 45) in solution. A rapid (48 hours) loss of the stemness marker STRO-1 was observed for the cells cultured in the presence of GFR-binding compounds as defined herein in the cell media solution (FIG. 19). This was probed by Stro-1 immunostaining after cell fixation as described in the Methods section. The quantification of Stro-1 positive contact numbers and areas was performed as described in the Methods section. A minimum of 30 cells per condition were analyzed. One should note that it is commonly admitted that the expression of STRO-1 in a cell is indicative of a cell that is in a substantially non-differentiated state and the decrease of its expression of at least about 20% is indicative of a cell that has started a processes of differentiation but which may not result in the differentiation of the cell. A decrease of more than 50% would be indicative of the presence of a significant shift towards a differentiated state. A decrease of more than 70% would be indicative of the presence of a very important shift towards a differentiated state. A sustained decrease (e.g. for at least 96 h) of more than 50% or 70% would be indicative of the presence of an even more important shift towards a differentiated state.

[1454] Likewise, hMSCs were cultured on conventional cell culture plastic plates with and without the presence in the cell culture media of different GFR-binding compounds as defined hereins (SEQ ID NO: 713 to 738) in solution. A rapid (48 hours) loss of the stemness marker STRO-1 was observed for the cells cultured in the presence of GFR-binding compounds as defined herein in the cell media solution. This strong decrease was also confirmed after 96 h.

TABLE 2

| | | STRO-1 | STRO-1 |
|---|---|---|---|
| SEQ | | Expression | Expression |
| ID | | (%) after | (%) |
| NO: | Sequences | 48 h | after 96 h |
| 713 | VPTAASAISILYLDAANNVVLKNYQAAVVEDKGVVTY | 29 | 23 |
| 714 | VPEAASSLSMLFFEIVRKKPIFLKVYPAATVEDKGVVTY | 28 | 18 |
| 715 | VPTVVSAISTLYLRIKPHQGQHLKNYQVVVVENDKQQII | 31 | 24 |
| 716 | APTLLNAISMLYFNDKQQIILKKYRLLVVRNDKQQII | 30 | 20 |
| 717 | APTGGSATSMLYYDKGVVTYLRKHRGGVVKDKGVVTY | 28 | 17 |
| 718 | VPTSSSPISTLYIDKGVVTYLKYHYSSVAEDEYDKVV | 26 | 19 |
| 719 | VPTAAEPISMLYLDEYDKVVKFKYEAAAVSNDKQQII | 26 | 16 |
| 720 | TPTSSSPINTLYFDDMGVPTYGKIPSSVVDDEYDKVV | 21 | 14 |
| 721 | VPTVVSPISMLYIDDMGVPTYKQYEVVVVEDDMGVPT | 29 | 16 |
| 722 | APVAAKPLSMLYVDKGVVTYDHHKDAAVEEDEYDKVV | 31 | 18 |
| 723 | VPQAAEPLPMLYYDKGVVTYEQLSNAAVRSDKGVVTY | 34 | 20 |
| 724 | VPQQQEPLTTLYYDEYDKVVEQLSNQQVKSNDKQQII | 29 | 16 |
| 725 | VPTMMSNITTQIMRIKPHQGQHIGEMSMMQHNDEYDKVV | 35 | 20 |
| 726 | SRVAARSVKMAKVGGGGGGGKEVQVAAEEHGGGGGG | 39 | 21 |
| 727 | VPTDDSATSTLYYDKGVVTYLRKHRDDEHSDKGVVTY | 26 | 13 |
| 728 | VPTGGEPLTTLYYNDKQQIIEQLSNGGEHSDDMGVPT | 32 | 17 |
| 729 | SRVLLRPVQMRKIDKGVVTYKKATVLLEEHDKGVVTY | 37 | 14 |
| 730 | TQVAARPVQTRKIDDMGVPTKKATVAAEDHDKGVVTY | 36 | 21 |
| 731 | VPQRLEPLTILYYDAANNVVEQLSNDMVKSDENEKV | 31 | |
| 732 | NDEGLESVPTGQSPISILYIRIKPHQGQHYKQYELEEHSQSESRDENEKV | 27 | |
| 733 | HVTKPTSVPTKLSPISILFIDDSSNVIYKQYENMVVESSGSHIGKTPKID | 23 | |
| 734 | ASASPSSAPVDLKPLSMLYVIGKTPKIDHHKDMIVEESKSIGKTPKID | 33 | |
| 735 | KIPKASSVPQELEPLPIVYYDENEKVVEQLSNDMVRSGSGSRDENEKV | 26 | |
| 736 | AVPKASSVPQKLEPLTILYYDSSNNVIEQLSNNMVKSIGKTPKID | 37 | |
| 737 | RVPSTSSAPVKTSNITMQIMDNGRVLLLGEMSMIVEESGSLIGKTPKID | 28 | |
| 738 | ASASPSSVSQDLRSVKVAKVIGKTPKIKEVQVMIVKSSKIGKTPKID | 31 | |

### Example 15: Differentiation of Human Hematopoietic Stem Cells

[1455] hMSCs were cultured on conventional cell culture plastic plates with or without the presence in the cell culture media of different cyclic GFR-binding peptides as described herein (SEQ ID NO: 713 to 721) in solution. A rapid (48 hours) loss of the stemness marker CD-34+ was observed for the cells cultured in the presence of GFR-binding peptides as described herein in the cell media solution. This was probed by CD-34+ immunostaining after cell fixation as described in the Methods section. The quantification of CD-34+ positive contact numbers and areas was performed as described in the Methods section. A minimum of 30 cells per condition were analyzed. CD-34+ positive marrow cells are multipotential and capable of differentiating into all the various blood cell types.

TABLE 3

| | | CD34+ |
|---|---|---|
| | | Expression |
| SEQ ID NO: | Sequences | (%) |
| 739 | IPKASSAPVGQRPVQMRKIDKGVVTYKKATVSSVEESGSLDKGVVTY | 35 |
| 740 | KASSVPQEERPVQMRKIGGGGGGGKKATVMIVRSSKSSDDMGVPT | 31 |
| 741 | VSQAARPVQTRKIDDMGVPTKKATVAAVKSDDMGVPT | 26 |
| 742 | PTSSAPTDLRSVKMAKVEIVRKKPIFKEVQVDMVVKASGDKGVVTY | 33 |
| 743 | KASSSRVKMSNITVQ1MRIKPHOGQHIGEMSVVEEHASGSHDKGVVTY | 42 |
| 744 | VPTAAEPLTMLYYEIVRKKPIFEQLSNMVEHSDDMGVPT | 38 |
| 745 | EPSSSRVRLEPLTTLYYGGGGGGGEQLSNVVEEHSKDKGVVTY | 37 |
| 746 | APVKMEPLPTVYYDDMGVPTEQLSNDMVEESGSLDDMGVPT | 37 |
| 747 | EPSSVSQAAEPLPIVYYRIKPHOGQHEQLSNMIVKSSKSSDDMGVPT | 38 |

The application's sequence listing, which the Patent Office published only in electronic form, follows.

SEQUENCE LISTING (130958 sequences)

SEQ ID NO: 1 - protein, 27 aa, Artificial Sequence
  Cyclic GFR-binding peptide
QLSAISTLYLDEYDKVVLKNYQDEYDK

SEQ ID NO: 2 - protein, 25 aa, Artificial Sequence
  Cyclic GFR-binding peptide
GTPGPSAISTLYLDDMGVPTLKNYQ

SEQ ID NO: 3 - protein, 20 aa, Artificial Sequence
  Cyclic GFR-binding peptide
SAISTLYLIGKTPKILKNYQ

SEQ ID NO: 4 - protein, 21 aa, Artificial Sequence
  Cyclic GFR-binding peptide
NAISVLYFDENEKVILKKYEL

SEQ ID NO: 5 - protein, 20 aa, Artificial Sequence
  Cyclic GFR-binding peptide
SATSVLYYDSSNNVVLRKHR

SEQ ID NO: 6 - protein, 27 aa, Artificial Sequence
  Cyclic GFR-binding peptide
SAISTLYLEIVRKKPLKNYQEIVRKKP

SEQ ID NO: 7 - protein, 20 aa, Artificial Sequence
  Cyclic GFR-binding peptide
NAISVLYFGGGLKKYELGGG

SEQ ID NO: 8 - protein, 19 aa, Artificial Sequence
  Cyclic GFR-binding peptide
SATSVLYYGGGLRKHRGGG

SEQ ID NO: 9 - protein, 25 aa, Artificial Sequence
  Cyclic GFR-binding peptide
WWFWGSAISTLYLIGKTPKILKNYQ

SEQ ID NO: 10 - protein, 25 aa, Artificial Sequence
  Cyclic GFR-binding peptide
GTPGPSAISTLYLIGKTPKILKNYQ

SEQ ID NO: 11 - protein, 26 aa, Artificial Sequence
  Cyclic GFR-binding peptide
GTPGPNAISVLYFDENEKVILKKYEL

SEQ ID NO: 12 - protein, 21 aa, Artificial Sequence
  Cyclic GFR-binding peptide
GTPGPSAISMLYLGGGLKNYQ

SEQ ID NO: 13 - protein, 25 aa, Artificial Sequence
  Cyclic GFR-binding peptide
GTPGPSPISTLYKDENEKVVLKYHY

SEQ ID NO: 14 - protein, 25 aa, Artificial Sequence
  Cyclic GFR-binding peptide
GTPGPNAISMLYFVGRKPKVLKKYR

SEQ ID NO: 15 - protein, 25 aa, Artificial Sequence
  Cyclic GFR-binding peptide
GTPGPNAISTLYLDENEKVVLKKYR

SEQ ID NO: 16 - protein, 25 aa, Artificial Sequence
  Cyclic GFR-binding peptide
GTPGPSAISTLYLDDSSNVILKNYQ

SEQ ID NO: 17 - protein, 25 aa, Artificial Sequence
  Cyclic GFR-binding peptide
GTPGPNAISTLYLDDSSNVILKNYQ

SEQ ID NO: 18 - protein, 25 aa, Artificial Sequence
  Cyclic GFR-binding peptide
GTPGPSAISTLYLDDYDKVILKKYR

SEQ ID NO: 19 - protein, 25 aa, Artificial Sequence
  Cyclic GFR-binding peptide
WWFWGSAISTLYLDEYDKVVLKNYQ

SEQ ID NO: 20 - protein, 22 aa, Artificial Sequence
  Cyclic GFR-binding peptide
GTPGPSAISTLYLGGGGLKNYQ

SEQ ID NO: 21 - protein, 25 aa, Artificial Sequence
  Cyclic GFR-binding peptide
GTPGPSATSVLYYDDSSNVILRKHR

SEQ ID NO: 22 - protein, 21 aa, Artificial Sequence
  Cyclic GFR-binding peptide
GTPGPSAISMLYLGGGLKNYQ

SEQ ID NO: 23 - protein, 24 aa, Artificial Sequence
  Cyclic GFR-binding peptide
ELEPLPIVYYVGRKPKVEQLSNGG

SEQ ID NO: 24 - protein, 22 aa, Artificial Sequence
  Cyclic GFR-binding peptide
EPLPIVYYVGRTPKVEQLSNGG

SEQ ID NO: 25 - protein, 25 aa, Artificial Sequence
  Cyclic GFR-binding peptide
GTPGPSATSVLYYDENKNVVLRKHR

SEQ ID NO: 26 - protein, 24 aa, Artificial Sequence
  Cyclic GFR-binding peptide
RSVKVAKVRIKPHQGQHKEVQVGG

SEQ ID NO: 27 - protein, 24 aa, Artificial Sequence
  Cyclic GFR-binding peptide
SNITMQIMRIKPHQGQHIGEMSGG

SEQ ID NO: 28 - protein, 29 aa, Artificial Sequence
  Cyclic GFR-binding peptide
RPTQVQLRPVQVRKIEYVRKKPKLKKATV

SEQ ID NO: 29 - protein, 25 aa, Artificial Sequence
  Cyclic GFR-binding peptide
DENKNSSLSILFFDENKNVVLKVYP

SEQ ID NO: 30 - protein, 25 aa, Artificial Sequence
  Cyclic GFR-binding peptide
DENEKSSLSILFFDENEKVVLKVYP

SEQ ID NO: 31 - protein, 22 aa, Artificial Sequence
  Cyclic GFR-binding peptide
SPISILYIDAANNVVYKQYEGG

SEQ ID NO: 32 - protein, 25 aa, Artificial Sequence
  Cyclic GFR-binding peptide
SPISILYIDAANNVVYKQYEDAANN

SEQ ID NO: 33 - protein, 22 aa, Artificial Sequence
  Cyclic GFR-binding peptide
SPISLLYIDAANNVVYKQYEGG

SEQ ID NO: 34 - protein, 19 aa, Artificial Sequence
  Cyclic GFR-binding peptide
SPISILYIAAYKQYEAAGG

SEQ ID NO: 35 - protein, 22 aa, Artificial Sequence
  Cyclic GFR-binding peptide
EPLPIVYYVGRKPKVEQLSNGG

SEQ ID NO: 36 - protein, 25 aa, Artificial Sequence
  Cyclic GFR-binding peptide
EPLPIVYYDDSSNVIEQLSNDDSSN

SEQ ID NO: 37 - protein, 23 aa, Artificial Sequence
  Cyclic GFR-binding peptide
EPLPIVYYDDSSNEQLSNDDSSN

SEQ ID NO: 38 - protein, 24 aa, Artificial Sequence
  Cyclic GFR-binding peptide
SPISILYIDAANNVVYKQYEDAAN

SEQ ID NO: 39 - protein, 22 aa, Artificial Sequence
  Cyclic GFR-binding peptide
NAISTLYFDDSSNVILKKYRGG

SEQ ID NO: 40 - protein, 24 aa, Artificial Sequence
  Cyclic GFR-binding peptide
KLSAISTLYLEIVRKKPLKNYQGG

SEQ ID NO: 41 - protein, 22 aa, Artificial Sequence
  Cyclic GFR-binding peptide
SPINMLYFNEKNQIIYGKIPGG

SEQ ID NO: 42 - protein, 22 aa, Artificial Sequence
  Cyclic GFR-binding peptide
EPLEIVYYDDSSNVIEQLSNGG

SEQ ID NO: 43 - protein, 19 aa, Artificial Sequence
  Cyclic GFR-binding peptide
SAISMLYLGGGLKNYQGGG

SEQ ID NO: 44 - protein, 25 aa, Artificial Sequence
  Cyclic GFR-binding peptide
SPINILFFDENKNVVLKVYPDENKN

SEQ ID NO: 45 - protein, 27 aa, Artificial Sequence
  Cyclic GFR-binding peptide
SNITMQIMIGKTPKIEQLSNIGKTPKI

SEQ ID NO: 46 - protein, 27 aa, Artificial Sequence
  Cyclic GFR-binding peptide
KDYEDQYNKLVVKDYEDLYLTSIASLQ

SEQ ID NO: 47 - protein, 25 aa, Artificial Sequence
  Cyclic GFR-binding peptide
QYNKLTPVGMDDLYLTSIASPGPTG

SEQ ID NO: 48 - protein, 21 aa, Artificial Sequence
  Cyclic GFR-binding peptide
LEYKKLIVKENEDFYLVSIAN

SEQ ID NO: 49 - protein, 20 aa, Artificial Sequence
  Cyclic GFR-binding peptide
RHKRLVVNNSSDYYLVSTAS

SEQ ID NO: 50 - protein, 27 aa, Artificial Sequence
  Cyclic GFR-binding peptide
PKKRVIEQYNKLPKKRVIELYLTSIAS

SEQ ID NO: 51 - protein, 20 aa, Artificial Sequence
  Cyclic GFR-binding peptide
GGGLEYKKLGGGFYLVSIAN

SEQ ID NO: 52 - protein, 19 aa, Artificial Sequence
  Cyclic GFR-binding peptide
GGGRHKRLGGGYYLVSTAS

SEQ ID NO: 53 - protein, 26 aa, Artificial Sequence
  Cyclic GFR-binding peptide
LEYKKLIVKENEDFYLVSIANPGPTG

SEQ ID NO: 54 - protein, 21 aa, Artificial Sequence
  Cyclic GFR-binding peptide
QYNKLGGGLYLMSIASPGPTG

SEQ ID NO: 55 - protein, 25 aa, Artificial Sequence
  Cyclic GFR-binding peptide
YHYKLVVKENEDKYLTSIPSPGPTG

SEQ ID NO: 56 - protein, 25 aa, Artificial Sequence
  Cyclic GFR-binding peptide
RYKKLVKPKRGVFYLMSIANPGPTG

SEQ ID NO: 57 - protein, 25 aa, Artificial Sequence
  Cyclic GFR-binding peptide
RYKKLVVKENEDLYLTSIANPGPTG

SEQ ID NO: 58 - protein, 25 aa, Artificial Sequence
  Cyclic GFR-binding peptide
QYNKLIVNSSDDLYLTSIASPGPTG

SEQ ID NO: 59 - protein, 25 aa, Artificial Sequence
  Cyclic GFR-binding peptide
QYNKLIVNSSDDLYLTSIANPGPTG

SEQ ID NO: 60 - protein, 25 aa, Artificial Sequence
  Cyclic GFR-binding peptide
RYKKLIVKDYDDLYLTSIASPGPTG

SEQ ID NO: 61 - protein, 25 aa, Artificial Sequence
  Cyclic GFR-binding peptide
QYNKLVVKDYEDLYLTSIASGWFWW

SEQ ID NO: 62 - protein, 22 aa, Artificial Sequence
  Cyclic GFR-binding peptide
QYNKLGGGGLYLTSIASPGPTG

SEQ ID NO: 63 - protein, 25 aa, Artificial Sequence
  Cyclic GFR-binding peptide
RHKRLIVNSSDDYYLVSTASPGPTG

SEQ ID NO: 64 - protein, 24 aa, Artificial Sequence
  Cyclic GFR-binding peptide
GGNSLQEVKPKRGVYYVIPLPELE

SEQ ID NO: 65 - protein, 22 aa, Artificial Sequence
  Cyclic GFR-binding peptide
GGNSLQEVKPTRGVYYVIPLPE

SEQ ID NO: 66 - protein, 24 aa, Artificial Sequence
  Cyclic GFR-binding peptide
GGVQVEKHQGQHPKIRVKAVKVSR

SEQ ID NO: 67 - protein, 24 aa, Artificial Sequence
  Cyclic GFR-binding peptide
GGSMEGIHQGQHPKIRMIQMTINS

SEQ ID NO: 68 - protein, 29 aa, Artificial Sequence
  Cyclic GFR-binding peptide
VTAKKLKPKKRVYEIKRVQVPRLQVQTPR

SEQ ID NO: 69 - protein, 25 aa, Artificial Sequence
  Cyclic GFR-binding peptide
PYVKLVVNKNEDFFLISLSSNKNED

SEQ ID NO: 70 - protein, 25 aa, Artificial Sequence
  Cyclic GFR-binding peptide
PYVKLVVKENEDFFLISLSSKENED

SEQ ID NO: 71 - protein, 22 aa, Artificial Sequence
  Cyclic GFR-binding peptide
GGEYQKYVVNNAADIYLISIPS

SEQ ID NO: 72 - protein, 25 aa, Artificial Sequence
  Cyclic GFR-binding peptide
NNAADEYQKYVVNNAADIYLISIPS

SEQ ID NO: 73 - protein, 22 aa, Artificial Sequence
  Cyclic GFR-binding peptide
GGEYQKYVVNNAADIYLLSIPS

SEQ ID NO: 74 - protein, 19 aa, Artificial Sequence
  Cyclic GFR-binding peptide
GGAAEYQKYAAIYLISIPS

SEQ ID NO: 75 - protein, 22 aa, Artificial Sequence
  Cyclic GFR-binding peptide
GGNSLQEVKPKRGVYYVIPLPE

SEQ ID NO: 76 - protein, 25 aa, Artificial Sequence
  Cyclic GFR-binding peptide
NSSDDNSLQEIVNSSDDYYVIPLPE

SEQ ID NO: 77 - protein, 23 aa, Artificial Sequence
  Cyclic GFR-binding peptide
NSSDDNSLQENSSDDYYVIPLPE

SEQ ID NO: 78 - protein, 24 aa, Artificial Sequence
  Cyclic GFR-binding peptide
NAADEYQKYVVNNAADIYLISIPS

SEQ ID NO: 79 - protein, 22 aa, Artificial Sequence
  Cyclic GFR-binding peptide
GGRYKKLIVNSSDDFYLTSIAN

SEQ ID NO: 80 - protein, 24 aa, Artificial Sequence
  Cyclic GFR-binding peptide
GGQYNKLPKKRVIELYLTSIASLK

SEQ ID NO: 81 - protein, 22 aa, Artificial Sequence
  Cyclic GFR-binding peptide
GGPIKGYIIQNKENFYLMNIPS

SEQ ID NO: 82 - protein, 22 aa, Artificial Sequence
  Cyclic GFR-binding peptide
GGNSLQEIVNSSDDYYVIELPE

SEQ ID NO: 83 - protein, 19 aa, Artificial Sequence
  Cyclic GFR-binding peptide
GGGQYNKLGGGLYLMSIAS

SEQ ID NO: 84 - protein, 25 aa, Artificial Sequence
  Cyclic GFR-binding peptide
NKNEDPYVKLVVNKNEDFFLINIPS

SEQ ID NO: 85 - protein, 27 aa, Artificial Sequence
  Cyclic GFR-binding peptide
IKPTKGINSLQEIKPTKGIMIQMTINS

SEQ ID NO: 86 - protein, 25 aa, Artificial Sequence
  Cyclic GFR-binding peptide
GTPGPSAISMLYLDENKNVVLKNYQ

SEQ ID NO: 87 - protein, 25 aa, Artificial Sequence
  Cyclic GFR-binding peptide
GTPGPSAISMLYLDDSSNVILKNYQ

SEQ ID NO: 88 - protein, 25 aa, Artificial Sequence
  Cyclic GFR-binding peptide
GTPGPSAISMLYLDSSNNVILKNYQ

SEQ ID NO: 89 - protein, 25 aa, Artificial Sequence
  Cyclic GFR-binding peptide
GTPGPSAISMLYLDDMGVPTLKNYQ

SEQ ID NO: 90 - protein, 25 aa, Artificial Sequence
  Cyclic GFR-binding peptide
GTPGPSAISMLYLDKGVVTYLKNYQ

SEQ ID NO: 91 - protein, 25 aa, Artificial Sequence
  Cyclic GFR-binding peptide
GTPGPSAISMLYLNDKQQIILKNYQ

SEQ ID NO: 92 - protein, 25 aa, Artificial Sequence
  Cyclic GFR-binding peptide
GTPGPSAISMLYLDAANNVVLKNYQ

SEQ ID NO: 93 - protein, 25 aa, Artificial Sequence
  Cyclic GFR-binding peptide
WWFWGSAISMLYLDSANNVVLKNYQ

SEQ ID NO: 94 - protein, 25 aa, Artificial Sequence
  Cyclic GFR-binding peptide
WWFWGSAISMLYLDNGRVLLLKNYQ

SEQ ID NO: 95 - protein, 25 aa, Artificial Sequence
  Cyclic GFR-binding peptide
WWFWGSAISMLYLVGRKPKVLKNYQ

SEQ ID NO: 96 - protein, 25 aa, Artificial Sequence
  Cyclic GFR-binding peptide
WWFWGSAISMLYLIGKTPKILKNYQ

SEQ ID NO: 97 - protein, 25 aa, Artificial Sequence
  Cyclic GFR-binding peptide
WWFWGSAISMLYLVGRTPKVLKNYQ

SEQ ID NO: 98 - protein, 25 aa, Artificial Sequence
  Cyclic GFR-binding peptide
WWFWGSAISMLYLDENKNVVLKNYQ

SEQ ID NO: 99 - protein, 25 aa, Artificial Sequence
  Cyclic GFR-binding peptide
WWFWGSAISMLYLDDSSNVILKNYQ

SEQ ID NO: 100 - protein, 21 aa, Artificial Sequence
  Cyclic GFR-binding peptide
GTPGPSAISMLYLGGGLKNYQ

SEQ ID NO: 101 - protein, 22 aa, Artificial Sequence
  Cyclic GFR-binding peptide
GTPGPSAISMLYLGGGGLKNYQ

SEQ ID NO: 102 - protein, 19 aa, Artificial Sequence
  Cyclic GFR-binding peptide
SAISMLYLGGGLKNYQGGG

SEQ ID NO: 103 - protein, 27 aa, Artificial Sequence
  Cyclic GFR-binding peptide
SAISMLYLRIKPHQGQHLKNYQRIKPH

SEQ ID NO: 104 - protein, 27 aa, Artificial Sequence
  Cyclic GFR-binding peptide
SAISMLYLEYVRKKPKLLKNYQEYVRK

SEQ ID NO: 105 - protein, 27 aa, Artificial Sequence
  Cyclic GFR-binding peptide
SAISMLYLEIVRKKPIFLKNYQEIVRK

SEQ ID NO: 106 - protein, 25 aa, Artificial Sequence
  Cyclic GFR-binding peptide
GTPGPSSLSILFFDENEKVVLKVYP

SEQ ID NO: 107 - protein, 25 aa, Artificial Sequence
  Cyclic GFR-binding peptide
GTPGPSSLSILFFDEYDKVVLKVYP

SEQ ID NO: 108 - protein, 25 aa, Artificial Sequence
  Cyclic GFR-binding peptide
GTPGPSSLSILFFDDSSNVILKVYP

SEQ ID NO: 109 - protein, 25 aa, Artificial Sequence
  Cyclic GFR-binding peptide
GTPGPSSLSILFFDSSNNVILKVYP

SEQ ID NO: 110 - protein, 25 aa, Artificial Sequence
  Cyclic GFR-binding peptide
GTPGPSSLSILFFDDMGVPTLKVYP

SEQ ID NO: 111 - protein, 25 aa, Artificial Sequence
  Cyclic GFR-binding peptide
GTPGPSSLSILFFDKGVVTYLKVYP

SEQ ID NO: 112 - protein, 25 aa, Artificial Sequence
  Cyclic GFR-binding peptide
GTPGPSSLSILFFNDKQQIILKVYP

SEQ ID NO: 113 - protein, 25 aa, Artificial Sequence
  Cyclic GFR-binding peptide
WWFWGSSLSILFFDAANNVVLKVYP

SEQ ID NO: 114 - protein, 25 aa, Artificial Sequence
  Cyclic GFR-binding peptide
WWFWGSSLSILFFDSANNVVLKVYP

SEQ ID NO: 115 - protein, 25 aa, Artificial Sequence
  Cyclic GFR-binding peptide
WWFWGSSLSILFFDNGRVLLLKVYP

SEQ ID NO: 116 - protein, 25 aa, Artificial Sequence
  Cyclic GFR-binding peptide
WWFWGSSLSILFFVGRKPKVLKVYP

SEQ ID NO: 117 - protein, 25 aa, Artificial Sequence
  Cyclic GFR-binding peptide
WWFWGSSLSILFFIGKTPKILKVYP

SEQ ID NO: 118 - protein, 25 aa, Artificial Sequence
  Cyclic GFR-binding peptide
WWFWGSSLSILFFVGRTPKVLKVYP

SEQ ID NO: 119 - protein, 25 aa, Artificial Sequence
  Cyclic GFR-binding peptide
WWFWGSSLSILFFDENEKVVLKVYP

SEQ ID NO: 120 - protein, 21 aa, Artificial Sequence
  Cyclic GFR-binding peptide
GTPGPSSLSILFFGGGLKVYP

SEQ ID NO: 121 - protein, 22 aa, Artificial Sequence
  Cyclic GFR-binding peptide
GTPGPSSLSILFFGGGGLKVYP

SEQ ID NO: 122 - protein, 19 aa, Artificial Sequence
  Cyclic GFR-binding peptide
SSLSILFFGGGLKVYPGGG

SEQ ID NO: 123 - protein, 27 aa, Artificial Sequence
  Cyclic GFR-binding peptide
SSLSILFFEYVRKKPKLLKVYPEYVRK

SEQ ID NO: 124 - protein, 27 aa, Artificial Sequence
  Cyclic GFR-binding peptide
SSLSILFFEIVRKKPIFLKVYPEIVRK

SEQ ID NO: 125 - protein, 25 aa, Artificial Sequence
  Cyclic GFR-binding peptide
GTPGPNAISVLYFDENEKVVLKKYR

SEQ ID NO: 126 - protein, 25 aa, Artificial Sequence
  Cyclic GFR-binding peptide
GTPGPNAISVLYFDENKNVVLKKYR

SEQ ID NO: 127 - protein, 25 aa, Artificial Sequence
  Cyclic GFR-binding peptide
GTPGPNAISVLYFDEYDKVVLKKYR

SEQ ID NO: 128 - protein, 25 aa, Artificial Sequence
  Cyclic GFR-binding peptide
GTPGPNAISVLYFDSSNNVILKKYR

SEQ ID NO: 129 - protein, 25 aa, Artificial Sequence
  Cyclic GFR-binding peptide
GTPGPNAISVLYFDDMGVPTLKKYR

SEQ ID NO: 130 - protein, 25 aa, Artificial Sequence
  Cyclic GFR-binding peptide
GTPGPNAISVLYFDKGVVTYLKKYR

SEQ ID NO: 131 - protein, 25 aa, Artificial Sequence
  Cyclic GFR-binding peptide
GTPGPNAISVLYFNDKQQIILKKYR

SEQ ID NO: 132 - protein, 25 aa, Artificial Sequence
  Cyclic GFR-binding peptide
GTPGPNAISVLYFDAANNVVLKKYR

SEQ ID NO: 133 - protein, 25 aa, Artificial Sequence
  Cyclic GFR-binding peptide
WWFWGNAISVLYFDSANNVVLKKYR

SEQ ID NO: 134 - protein, 25 aa, Artificial Sequence
  Cyclic GFR-binding peptide
WWFWGNAISVLYFDNGRVLLLKKYR

SEQ ID NO: 135 - protein, 25 aa, Artificial Sequence
  Cyclic GFR-binding peptide
WWFWGNAISVLYFVGRKPKVLKKYR

SEQ ID NO: 136 - protein, 25 aa, Artificial Sequence
  Cyclic GFR-binding peptide
WWFWGNAISVLYFIGKTPKILKKYR

SEQ ID NO: 137 - protein, 25 aa, Artificial Sequence
  Cyclic GFR-binding peptide
WWFWGNAISVLYFVGRTPKVLKKYR

SEQ ID NO: 138 - protein, 25 aa, Artificial Sequence
  Cyclic GFR-binding peptide
WWFWGNAISVLYFDENEKVVLKKYR

SEQ ID NO: 139 - protein, 25 aa, Artificial Sequence
  Cyclic GFR-binding peptide
WWFWGNAISVLYFDENKNVVLKKYR

SEQ ID NO: 140 - protein, 20 aa, Artificial Sequence
  Cyclic GFR-binding peptide
GTPGPNAISVLYGGGLKKYR

SEQ ID NO: 141 - protein, 21 aa, Artificial Sequence
  Cyclic GFR-binding peptide
GTPGPNAISVLYGGGGLKKYR

SEQ ID NO: 142 - protein, 18 aa, Artificial Sequence
  Cyclic GFR-binding peptide
NAISVLYGGGLKKYRGGG

SEQ ID NO: 143 - protein, 27 aa, Artificial Sequence
  Cyclic GFR-binding peptide
NAISVLYFRIKPHQGQHLKKYRRIKPH

SEQ ID NO: 144 - protein, 27 aa, Artificial Sequence
  Cyclic GFR-binding peptide
NAISVLYFEYVRKKPKLLKKYREYVRK

SEQ ID NO: 145 - protein, 27 aa, Artificial Sequence
  Cyclic GFR-binding peptide
NAISVLYFEIVRKKPIFLKKYREIVRK

SEQ ID NO: 146 - protein, 25 aa, Artificial Sequence
  Cyclic GFR-binding peptide
GTPGPSATSVLYYDENEKVVLRKHR

SEQ ID NO: 147 - protein, 25 aa, Artificial Sequence
  Cyclic GFR-binding peptide
GTPGPSATSVLYYDEYDKVVLRKHR

SEQ ID NO: 148 - protein, 25 aa, Artificial Sequence
  Cyclic GFR-binding peptide
GTPGPSATSVLYYDDSSNVILRKHR

SEQ ID NO: 149 - protein, 25 aa, Artificial Sequence
  Cyclic GFR-binding peptide
GTPGPSATSVLYYDDMGVPTLRKHR

SEQ ID NO: 150 - protein, 25 aa, Artificial Sequence
  Cyclic GFR-binding peptide
GTPGPSATSVLYYDKGVVTYLRKHR

SEQ ID NO: 151 - protein, 25 aa, Artificial Sequence
  Cyclic GFR-binding peptide
GTPGPSATSVLYYNDKQQIILRKHR

SEQ ID NO: 152 - protein, 25 aa, Artificial Sequence
  Cyclic GFR-binding peptide
WWFWGSATSVLYYDAANNVVLRKHR

SEQ ID NO: 153 - protein, 25 aa, Artificial Sequence
  Cyclic GFR-binding peptide
WWFWGSATSVLYYDSANNVVLRKHR

SEQ ID NO: 154 - protein, 25 aa, Artificial Sequence
  Cyclic GFR-binding peptide
WWFWGSATSVLYYDNGRVLLLRKHR

SEQ ID NO: 155 - protein, 25 aa, Artificial Sequence
  Cyclic GFR-binding peptide
WWFWGSATSVLYYVGRKPKVLRKHR

SEQ ID NO: 156 - protein, 25 aa, Artificial Sequence
  Cyclic GFR-binding peptide
WWFWGSATSVLYYIGKTPKILRKHR

SEQ ID NO: 157 - protein, 25 aa, Artificial Sequence
  Cyclic GFR-binding peptide
WWFWGSATSVLYYVGRTPKVLRKHR

SEQ ID NO: 158 - protein, 25 aa, Artificial Sequence
  Cyclic GFR-binding peptide
WWFWGSATSVLYYDENEKVVLRKHR

SEQ ID NO: 159 - protein, 21 aa, Artificial Sequence
  Cyclic GFR-binding peptide
GTPGPSATSVLYYGGGLRKHR

SEQ ID NO: 160 - protein, 22 aa, Artificial Sequence
  Cyclic GFR-binding peptide
GTPGPSATSVLYYGGGGLRKHR

SEQ ID NO: 161 - protein, 19 aa, Artificial Sequence
  Cyclic GFR-binding peptide
SATSVLYYGGGLRKHRGGG

SEQ ID NO: 162 - protein, 25 aa, Artificial Sequence
  Cyclic GFR-binding peptide
SATSVLYYVGRTPKVLRKHRVGRTP

SEQ ID NO: 163 - protein, 27 aa, Artificial Sequence
  Cyclic GFR-binding peptide
SATSVLYYRIKPHQGQHLRKHRRIKPH

SEQ ID NO: 164 - protein, 27 aa, Artificial Sequence
  Cyclic GFR-binding peptide
SATSVLYYEYVRKKPKLLRKHREYVRK

SEQ ID NO: 165 - protein, 27 aa, Artificial Sequence
  Cyclic GFR-binding peptide
SATSVLYYEIVRKKPIFLRKHREIVRK

SEQ ID NO: 166 - protein, 25 aa, Artificial Sequence
  Cyclic GFR-binding peptide
GTPGPSPISVLYKDENEKVVLKYHY

SEQ ID NO: 167 - protein, 25 aa, Artificial Sequence
  Cyclic GFR-binding peptide
GTPGPSPISVLYKDENKNVVLKYHY

SEQ ID NO: 168 - protein, 25 aa, Artificial Sequence
  Cyclic GFR-binding peptide
GTPGPSPISVLYKDEYDKVVLKYHY

SEQ ID NO: 169 - protein, 25 aa, Artificial Sequence
  Cyclic GFR-binding peptide
GTPGPSPISVLYKDDSSNVILKYHY

SEQ ID NO: 170 - protein, 25 aa, Artificial Sequence
  Cyclic GFR-binding peptide
GTPGPSPISVLYKDSSNNVILKYHY

SEQ ID NO: 171 - protein, 25 aa, Artificial Sequence
  Cyclic GFR-binding peptide
GTPGPSPISVLYKDKGVVTYLKYHY

SEQ ID NO: 172 - protein, 25 aa, Artificial Sequence
  Cyclic GFR-binding peptide
GTPGPSPISVLYKNDKQQIILKYHY

SEQ ID NO: 173 - protein, 25 aa, Artificial Sequence
  Cyclic GFR-binding peptide
WWFWGSPISVLYKDAANNVVLKYHY

SEQ ID NO: 174 - protein, 25 aa, Artificial Sequence
  Cyclic GFR-binding peptide
WWFWGSPISVLYKDSANNVVLKYHY

SEQ ID NO: 175 - protein, 25 aa, Artificial Sequence
  Cyclic GFR-binding peptide
WWFWGSPISVLYKDNGRVLLLKYHY

SEQ ID NO: 176 - protein, 25 aa, Artificial Sequence
  Cyclic GFR-binding peptide
WWFWGSPISVLYKVGRKPKVLKYHY

SEQ ID NO: 177 - protein, 25 aa, Artificial Sequence
  Cyclic GFR-binding peptide
WWFWGSPISVLYKIGKTPKILKYHY

SEQ ID NO: 178 - protein, 25 aa, Artificial Sequence
  Cyclic GFR-binding peptide
WWFWGSPISVLYKVGRTPKVLKYHY

SEQ ID NO: 179 - protein, 25 aa, Artificial Sequence
  Cyclic GFR-binding peptide
WWFWGSPISVLYKDENEKVVLKYHY

SEQ ID NO: 180 - protein, 20 aa, Artificial Sequence
  Cyclic GFR-binding peptide
GTPGPSPISVLYGGGLKYHY

SEQ ID NO: 181 - protein, 21 aa, Artificial Sequence
  Cyclic GFR-binding peptide
GTPGPSPISVLYGGGGLKYHY

SEQ ID NO: 182 - protein, 18 aa, Artificial Sequence
  Cyclic GFR-binding peptide
SPISVLYGGGLKYHYGGG

SEQ ID NO: 183 - protein, 25 aa, Artificial Sequence
  Cyclic GFR-binding peptide
SPISVLYKVGRTPKVLKYHYVGRTP

SEQ ID NO: 184 - protein, 27 aa, Artificial Sequence
  Cyclic GFR-binding peptide
SPISVLYKRIKPHQGQHLKYHYRIKPH

SEQ ID NO: 185 - protein, 27 aa, Artificial Sequence
  Cyclic GFR-binding peptide
SPISVLYKEYVRKKPKLLKYHYEYVRK

SEQ ID NO: 186 - protein, 27 aa, Artificial Sequence
  Cyclic GFR-binding peptide
SPISVLYKEIVRKKPIFLKYHYEIVRK

SEQ ID NO: 187 - protein, 25 aa, Artificial Sequence
  Cyclic GFR-binding peptide
GTPGPEPISILYLDENEKVVKFKYE

SEQ ID NO: 188 - protein, 25 aa, Artificial Sequence
  Cyclic GFR-binding peptide
GTPGPEPISILYLDENKNVVKFKYE

SEQ ID NO: 189 - protein, 25 aa, Artificial Sequence
  Cyclic GFR-binding peptide
GTPGPEPISILYLDEYDKVVKFKYE

SEQ ID NO: 190 - protein, 25 aa, Artificial Sequence
  Cyclic GFR-binding peptide
GTPGPEPISILYLDDSSNVIKFKYE

SEQ ID NO: 191 - protein, 25 aa, Artificial Sequence
  Cyclic GFR-binding peptide
GTPGPEPISILYLDSSNNVIKFKYE

SEQ ID NO: 192 - protein, 25 aa, Artificial Sequence
  Cyclic GFR-binding peptide
GTPGPEPISILYLDDMGVPTKFKYE

SEQ ID NO: 193 - protein, 25 aa, Artificial Sequence
  Cyclic GFR-binding peptide
GTPGPEPISILYLNDKQQIIKFKYE

SEQ ID NO: 194 - protein, 25 aa, Artificial Sequence
  Cyclic GFR-binding peptide
WWFWGEPISILYLDAANNVVKFKYE

SEQ ID NO: 195 - protein, 25 aa, Artificial Sequence
  Cyclic GFR-binding peptide
WWFWGEPISILYLDSANNVVKFKYE

SEQ ID NO: 196 - protein, 25 aa, Artificial Sequence
  Cyclic GFR-binding peptide
WWFWGEPISILYLDNGRVLLKFKYE

SEQ ID NO: 197 - protein, 25 aa, Artificial Sequence
  Cyclic GFR-binding peptide
WWFWGEPISILYLVGRKPKVKFKYE

SEQ ID NO: 198 - protein, 25 aa, Artificial Sequence
  Cyclic GFR-binding peptide
WWFWGEPISILYLIGKTPKIKFKYE

SEQ ID NO: 199 - protein, 25 aa, Artificial Sequence
  Cyclic GFR-binding peptide
WWFWGEPISILYLVGRTPKVKFKYE

SEQ ID NO: 200 - protein, 25 aa, Artificial Sequence
  Cyclic GFR-binding peptide
WWFWGEPISILYLDENEKVVKFKYE

SEQ ID NO: 201 - protein, 19 aa, Artificial Sequence
  Cyclic GFR-binding peptide
EPISILYLGGGKFKYEGGG

SEQ ID NO: 202 - protein, 25 aa, Artificial Sequence
  Cyclic GFR-binding peptide
EPISILYLVGRTPKVKFKYEVGRTP

SEQ ID NO: 203 - protein, 27 aa, Artificial Sequence
  Cyclic GFR-binding peptide
EPISILYLRIKPHQGQHKFKYERIKPH

SEQ ID NO: 204 - protein, 27 aa, Artificial Sequence
  Cyclic GFR-binding peptide
EPISILYLEYVRKKPKLKFKYEEYVRK

SEQ ID NO: 205 - protein, 27 aa, Artificial Sequence
  Cyclic GFR-binding peptide
EPISILYLEIVRKKPIFKFKYEEIVRK

SEQ ID NO: 206 - protein, 25 aa, Artificial Sequence
  Cyclic GFR-binding peptide
GTPGPSPINMLYFDENEKVVYGKIP

SEQ ID NO: 207 - protein, 25 aa, Artificial Sequence
  Cyclic GFR-binding peptide
GTPGPSPINMLYFDENKNVVYGKIP

SEQ ID NO: 208 - protein, 25 aa, Artificial Sequence
  Cyclic GFR-binding peptide
GTPGPSPINMLYFDEYDKVVYGKIP

SEQ ID NO: 209 - protein, 25 aa, Artificial Sequence
  Cyclic GFR-binding peptide
GTPGPSPINMLYFDDSSNVIYGKIP

SEQ ID NO: 210 - protein, 25 aa, Artificial Sequence
  Cyclic GFR-binding peptide
GTPGPSPINMLYFDSSNNVIYGKIP

SEQ ID NO: 211 - protein, 25 aa, Artificial Sequence
  Cyclic GFR-binding peptide
GTPGPSPINMLYFDDMGVPTYGKIP

SEQ ID NO: 212 - protein, 25 aa, Artificial Sequence
  Cyclic GFR-binding peptide
GTPGPSPINMLYFDKGVVTYYGKIP

SEQ ID NO: 213 - protein, 25 aa, Artificial Sequence
  Cyclic GFR-binding peptide
WWFWGSPINMLYFDAANNVVYGKIP

SEQ ID NO: 214 - protein, 25 aa, Artificial Sequence
  Cyclic GFR-binding peptide
WWFWGSPINMLYFDSANNVVYGKIP

SEQ ID NO: 215 - protein, 25 aa, Artificial Sequence
  Cyclic GFR-binding peptide
WWFWGSPINMLYFDNGRVLLYGKIP

SEQ ID NO: 216 - protein, 25 aa, Artificial Sequence
  Cyclic GFR-binding peptide
WWFWGSPINMLYFVGRKPKVYGKIP

SEQ ID NO: 217 - protein, 25 aa, Artificial Sequence
  Cyclic GFR-binding peptide
WWFWGSPINMLYFIGKTPKIYGKIP

SEQ ID NO: 218 - protein, 25 aa, Artificial Sequence
  Cyclic GFR-binding peptide
WWFWGSPINMLYFVGRTPKVYGKIP

SEQ ID NO: 219 - protein, 25 aa, Artificial Sequence
  Cyclic GFR-binding peptide
WWFWGSPINMLYFDENEKVVYGKIP

SEQ ID NO: 220 - protein, 21 aa, Artificial Sequence
  Cyclic GFR-binding peptide
GTPGPSPINMLYFGGGYGKIP

SEQ ID NO: 221 - protein, 22 aa, Artificial Sequence
  Cyclic GFR-binding peptide
GTPGPSPINMLYFGGGGYGKIP

SEQ ID NO: 222 - protein, 19 aa, Artificial Sequence
  Cyclic GFR-binding peptide
SPINMLYFGGGYGKIPGGG

SEQ ID NO: 223 - protein, 25 aa, Artificial Sequence
  Cyclic GFR-binding peptide
SPINMLYFIGKTPKIYGKIPIGKTP

SEQ ID NO: 224 - protein, 25 aa, Artificial Sequence
  Cyclic GFR-binding peptide
SPINMLYFVGRTPKVYGKIPVGRTP

SEQ ID NO: 225 - protein, 27 aa, Artificial Sequence
  Cyclic GFR-binding peptide
SPINMLYFRIKPHQGQHYGKIPRIKPH

SEQ ID NO: 226 - protein, 27 aa, Artificial Sequence
  Cyclic GFR-binding peptide
SPINMLYFEYVRKKPKLYGKIPEYVRK

SEQ ID NO: 227 - protein, 27 aa, Artificial Sequence
  Cyclic GFR-binding peptide
SPINMLYFEIVRKKPIFYGKIPEIVRK

SEQ ID NO: 228 - protein, 25 aa, Artificial Sequence
  Cyclic GFR-binding peptide
GTPGPSPISILYIDENEKVVYKQYE

SEQ ID NO: 229 - protein, 25 aa, Artificial Sequence
  Cyclic GFR-binding peptide
GTPGPSPISILYIDENKNVVYKQYE

SEQ ID NO: 230 - protein, 25 aa, Artificial Sequence
  Cyclic GFR-binding peptide
GTPGPSPISILYIDEYDKVVYKQYE

SEQ ID NO: 231 - protein, 25 aa, Artificial Sequence
  Cyclic GFR-binding peptide
GTPGPSPISILYIDDSSNVIYKQYE

SEQ ID NO: 232 - protein, 25 aa, Artificial Sequence
  Cyclic GFR-binding peptide
GTPGPSPISILYIDSSNNVIYKQYE

SEQ ID NO: 233 - protein, 25 aa, Artificial Sequence
  Cyclic GFR-binding peptide
GTPGPSPISILYIDDMGVPTYKQYE

SEQ ID NO: 234 - protein, 25 aa, Artificial Sequence
  Cyclic GFR-binding peptide
GTPGPSPISILYIDKGVVTYYKQYE

SEQ ID NO: 235 - protein, 25 aa, Artificial Sequence
  Cyclic GFR-binding peptide
WWFWGSPISILYINDKQQIIYKQYE

SEQ ID NO: 236 - protein, 25 aa, Artificial Sequence
  Cyclic GFR-binding peptide
WWFWGSPISILYIDSANNVVYKQYE

SEQ ID NO: 237 - protein, 25 aa, Artificial Sequence
  Cyclic GFR-binding peptide
WWFWGSPISILYIDNGRVLLYKQYE

SEQ ID NO: 238 - protein, 25 aa, Artificial Sequence
  Cyclic GFR-binding peptide
WWFWGSPISILYIVGRKPKVYKQYE

SEQ ID NO: 239 - protein, 25 aa, Artificial Sequence
  Cyclic GFR-binding peptide
WWFWGSPISILYIIGKTPKIYKQYE

SEQ ID NO: 240 - protein, 25 aa, Artificial Sequence
  Cyclic GFR-binding peptide
WWFWGSPISILYIVGRTPKVYKQYE

SEQ ID NO: 241 - protein, 25 aa, Artificial Sequence
  Cyclic GFR-binding peptide
WWFWGSPISILYIDENEKVVYKQYE

SEQ ID NO: 242 - protein, 21 aa, Artificial Sequence
  Cyclic GFR-binding peptide
GTPGPSPISILYIGGGYKQYE

SEQ ID NO: 243 - protein, 22 aa, Artificial Sequence
  Cyclic GFR-binding peptide
GTPGPSPISILYIGGGGYKQYE

SEQ ID NO: 244 - protein, 25 aa, Artificial Sequence
  Cyclic GFR-binding peptide
SPISILYIDKGVVTYYKQYEDKGVV

SEQ ID NO: 245 - protein, 25 aa, Artificial Sequence
  Cyclic GFR-binding peptide
SPISILYINDKQQIIYKQYENDKQQ

SEQ ID NO: 246 - protein, 25 aa, Artificial Sequence
  Cyclic GFR-binding peptide
SPISILYIDSANNVVYKQYEDSANN

SEQ ID NO: 247 - protein, 25 aa, Artificial Sequence
  Cyclic GFR-binding peptide
SPISILYIDNGRVLLYKQYEDNGRV

SEQ ID NO: 248 - protein, 25 aa, Artificial Sequence
  Cyclic GFR-binding peptide
SPISILYIVGRKPKVYKQYEVGRKP

SEQ ID NO: 249 - protein, 25 aa, Artificial Sequence
  Cyclic GFR-binding peptide
SPISILYIIGKTPKIYKQYEIGKTP

SEQ ID NO: 250 - protein, 25 aa, Artificial Sequence
  Cyclic GFR-binding peptide
SPISILYIVGRTPKVYKQYEVGRTP

SEQ ID NO: 251 - protein, 27 aa, Artificial Sequence
  Cyclic GFR-binding peptide
SPISILYIRIKPHQGQHYKQYERIKPH

SEQ ID NO: 252 - protein, 19 aa, Artificial Sequence
  Cyclic GFR-binding peptide
SPISILYIGGGYKQYEGGG

SEQ ID NO: 253 - protein, 19 aa, Artificial Sequence
  Cyclic GFR-binding peptide
SPISILFIGGGYKQYEGGG

SEQ ID NO: 254 - protein, 22 aa, Artificial Sequence
  Cyclic GFR-binding peptide
GTPGPSPISILFIGGGGYKQYE

SEQ ID NO: 255 - protein, 22 aa, Artificial Sequence
  Cyclic GFR-binding peptide
WWFWGSPISILFIGGGGYKQYE

SEQ ID NO: 256 - protein, 21 aa, Artificial Sequence
  Cyclic GFR-binding peptide
WWFWGSPISILFIGGGYKQYE

SEQ ID NO: 257 - protein, 21 aa, Artificial Sequence
  Cyclic GFR-binding peptide
GTPGPSPISILFIGGGYKQYE

SEQ ID NO: 258 - protein, 25 aa, Artificial Sequence
  Cyclic GFR-binding peptide
GTPGPSPISILFIDNGRVLLYKQYE

SEQ ID NO: 259 - protein, 25 aa, Artificial Sequence
  Cyclic GFR-binding peptide
GTPGPSPISILFIVGRKPKVYKQYE

SEQ ID NO: 260 - protein, 25 aa, Artificial Sequence
  Cyclic GFR-binding peptide
WWFWGSPISILFIIGKTPKIYKQYE

SEQ ID NO: 261 - protein, 25 aa, Artificial Sequence
  Cyclic GFR-binding peptide
WWFWGSPISILFIVGRTPKVYKQYE

SEQ ID NO: 262 - protein, 25 aa, Artificial Sequence
  Cyclic GFR-binding peptide
GTPGPSPISILFIDENKNVVYKQYE

SEQ ID NO: 263 - protein, 25 aa, Artificial Sequence
  Cyclic GFR-binding peptide
GTPGPSPISILFIDDSSNVIYKQYE

SEQ ID NO: 264 - protein, 25 aa, Artificial Sequence
  Cyclic GFR-binding peptide
GTPGPSPISILFIDSSNNVIYKQYE

SEQ ID NO: 265 - protein, 25 aa, Artificial Sequence
  Cyclic GFR-binding peptide
WWFWGSPISILFIDDMGVPTYKQYE

SEQ ID NO: 266 - protein, 25 aa, Artificial Sequence
  Cyclic GFR-binding peptide
WWFWGSPISILFIDKGVVTYYKQYE

SEQ ID NO: 267 - protein, 25 aa, Artificial Sequence
  Cyclic GFR-binding peptide
GTPGPSPISILFINDKQQIIYKQYE

SEQ ID NO: 268 - protein, 25 aa, Artificial Sequence
  Cyclic GFR-binding peptide
GTPGPSPISILFIDAANNVVYKQYE

SEQ ID NO: 269 - protein, 25 aa, Artificial Sequence
  Cyclic GFR-binding peptide
SPISILFIDNGRVLLYKQYEDNGRV

SEQ ID NO: 270 - protein, 25 aa, Artificial Sequence
  Cyclic GFR-binding peptide
SPISILFIVGRKPKVYKQYEVGRKP

SEQ ID NO: 271 - protein, 25 aa, Artificial Sequence
  Cyclic GFR-binding peptide
SPISILFIIGKTPKIYKQYEIGKTP

SEQ ID NO: 272 - protein, 25 aa, Artificial Sequence
  Cyclic GFR-binding peptide
SPISILFIVGRTPKVYKQYEVGRTP

SEQ ID NO: 273 - protein, 27 aa, Artificial Sequence
  Cyclic GFR-binding peptide
SPISILFIRIKPHQGQHYKQYERIKPH

SEQ ID NO: 274 - protein, 27 aa, Artificial Sequence
  Cyclic GFR-binding peptide
SPISILFIEYVRKKPKLYKQYEEYVRK

SEQ ID NO: 275 - protein, 27 aa, Artificial Sequence
  Cyclic GFR-binding peptide
SPISILFIEIVRKKPIFYKQYEEIVRK

SEQ ID NO: 276 - protein, 25 aa, Artificial Sequence
  Cyclic GFR-binding peptide
GTPGPKPLSMLYVDENEKVVDHHKD

SEQ ID NO: 277 - protein, 25 aa, Artificial Sequence
  Cyclic GFR-binding peptide
GTPGPKPLSMLYVDENKNVVDHHKD

SEQ ID NO: 278 - protein, 25 aa, Artificial Sequence
  Cyclic GFR-binding peptide
GTPGPKPLSMLYVDEYDKVVDHHKD

SEQ ID NO: 279 - protein, 25 aa, Artificial Sequence
  Cyclic GFR-binding peptide
GTPGPKPLSMLYVDDSSNVIDHHKD

SEQ ID NO: 280 - protein, 25 aa, Artificial Sequence
  Cyclic GFR-binding peptide
GTPGPKPLSMLYVDSSNNVIDHHKD

SEQ ID NO: 281 - protein, 21 aa, Artificial Sequence
  Cyclic GFR-binding peptide
GTPGPKPLSMLYVGGGDHHKD

SEQ ID NO: 282 - protein, 22 aa, Artificial Sequence
  Cyclic GFR-binding peptide
GTPGPKPLSMLYVGGGGDHHKD

SEQ ID NO: 283 - protein, 25 aa, Artificial Sequence
  Cyclic GFR-binding peptide
WWFWGKPLSMLYVNDKQQIIDHHKD

SEQ ID NO: 284 - protein, 25 aa, Artificial Sequence
  Cyclic GFR-binding peptide
WWFWGKPLSMLYVDAANNVVDHHKD

SEQ ID NO: 285 - protein, 25 aa, Artificial Sequence
  Cyclic GFR-binding peptide
WWFWGKPLSMLYVDSANNVVDHHKD

SEQ ID NO: 286 - protein, 21 aa, Artificial Sequence
  Cyclic GFR-binding peptide
WWFWGKPLSMLYVGGGDHHKD

SEQ ID NO: 287 - protein, 22 aa, Artificial Sequence
  Cyclic GFR-binding peptide
WWFWGKPLSMLYVGGGGDHHKD

SEQ ID NO: 288 - protein, 25 aa, Artificial Sequence
  Cyclic GFR-binding peptide
WWFWGKPLSMLYVVGRTPKVDHHKD

SEQ ID NO: 289 - protein, 25 aa, Artificial Sequence
  Cyclic GFR-binding peptide
WWFWGKPLSMLYVDENEKVVDHHKD

SEQ ID NO: 290 - protein, 19 aa, Artificial Sequence
  Cyclic GFR-binding peptide
KPLSMLYVGGGDHHKDGGG

SEQ ID NO: 291 - protein, 25 aa, Artificial Sequence
  Cyclic GFR-binding peptide
KPLSMLYVVGRTPKVDHHKDVGRTP

SEQ ID NO: 292 - protein, 27 aa, Artificial Sequence
  Cyclic GFR-binding peptide
KPLSMLYVRIKPHQGQHDHHKDRIKPH

SEQ ID NO: 293 - protein, 27 aa, Artificial Sequence
  Cyclic GFR-binding peptide
KPLSMLYVEYVRKKPKLDHHKDEYVRK

SEQ ID NO: 294 - protein, 27 aa, Artificial Sequence
  Cyclic GFR-binding peptide
KPLSMLYVEIVRKKPIFDHHKDEIVRK

SEQ ID NO: 295 - protein, 25 aa, Artificial Sequence
  Cyclic GFR-binding peptide
GTPGPEPLPIVYYDENEKVVEQLSN

SEQ ID NO: 296 - protein, 25 aa, Artificial Sequence
  Cyclic GFR-binding peptide
GTPGPEPLPIVYYDENKNVVEQLSN

SEQ ID NO: 297 - protein, 21 aa, Artificial Sequence
  Cyclic GFR-binding peptide
GTPGPEPLPIVYYGGGEQLSN

SEQ ID NO: 298 - protein, 22 aa, Artificial Sequence
  Cyclic GFR-binding peptide
GTPGPEPLPIVYYGGGGEQLSN

SEQ ID NO: 299 - protein, 25 aa, Artificial Sequence
  Cyclic GFR-binding peptide
GTPGPEPLPIVYYDDSSNVIEQLSN

SEQ ID NO: 300 - protein, 25 aa, Artificial Sequence
  Cyclic GFR-binding peptide
GTPGPEPLPIVYYDSSNNVIEQLSN

SEQ ID NO: 301 - protein, 25 aa, Artificial Sequence
  Cyclic GFR-binding peptide
GTPGPEPLPIVYYDDMGVPTEQLSN

SEQ ID NO: 302 - protein, 25 aa, Artificial Sequence
  Cyclic GFR-binding peptide
GTPGPEPLPIVYYDKGVVTYEQLSN

SEQ ID NO: 303 - protein, 25 aa, Artificial Sequence
  Cyclic GFR-binding peptide
WWFWGEPLPIVYYNDKQQIIEQLSN

SEQ ID NO: 304 - protein, 25 aa, Artificial Sequence
  Cyclic GFR-binding peptide
WWFWGEPLPIVYYDAANNVVEQLSN

SEQ ID NO: 305 - protein, 21 aa, Artificial Sequence
  Cyclic GFR-binding peptide
WWFWGEPLPIVYYGGGEQLSN

SEQ ID NO: 306 - protein, 22 aa, Artificial Sequence
  Cyclic GFR-binding peptide
WWFWGEPLPIVYYGGGGEQLSN

SEQ ID NO: 307 - protein, 25 aa, Artificial Sequence
  Cyclic GFR-binding peptide
WWFWGEPLPIVYYIGKTPKIEQLSN

SEQ ID NO: 308 - protein, 25 aa, Artificial Sequence
  Cyclic GFR-binding peptide
WWFWGEPLPIVYYVGRTPKVEQLSN

SEQ ID NO: 309 - protein, 25 aa, Artificial Sequence
  Cyclic GFR-binding peptide
WWFWGEPLPIVYYDENEKVVEQLSN

SEQ ID NO: 310 - protein, 25 aa, Artificial Sequence
  Cyclic GFR-binding peptide
GTPGPEPLPIVYYDEYDKVVEQLSN

SEQ ID NO: 311 - protein, 25 aa, Artificial Sequence
  Cyclic GFR-binding peptide
EPLPIVYYDKGVVTYEQLSNDKGVV

SEQ ID NO: 312 - protein, 25 aa, Artificial Sequence
  Cyclic GFR-binding peptide
EPLPIVYYNDKQQIIEQLSNNDKQQ

SEQ ID NO: 313 - protein, 25 aa, Artificial Sequence
  Cyclic GFR-binding peptide
EPLPIVYYDAANNVVEQLSNDAANN

SEQ ID NO: 314 - protein, 25 aa, Artificial Sequence
  Cyclic GFR-binding peptide
EPLPIVYYDSANNVVEQLSNDSANN

SEQ ID NO: 315 - protein, 19 aa, Artificial Sequence
  Cyclic GFR-binding peptide
EPLPIVYYGGGEQLSNGGG

SEQ ID NO: 316 - protein, 25 aa, Artificial Sequence
  Cyclic GFR-binding peptide
GTPGPEPLTILYYDENEKVVEQLSN

SEQ ID NO: 317 - protein, 25 aa, Artificial Sequence
  Cyclic GFR-binding peptide
GTPGPEPLTILYYDENKNVVEQLSN

SEQ ID NO: 318 - protein, 25 aa, Artificial Sequence
  Cyclic GFR-binding peptide
GTPGPEPLTILYYDEYDKVVEQLSN

SEQ ID NO: 319 - protein, 21 aa, Artificial Sequence
  Cyclic GFR-binding peptide
GTPGPEPLTILYYGGGEQLSN

SEQ ID NO: 320 - protein, 22 aa, Artificial Sequence
  Cyclic GFR-binding peptide
GTPGPEPLTILYYGGGGEQLSN

SEQ ID NO: 321 - protein, 25 aa, Artificial Sequence
  Cyclic GFR-binding peptide
GTPGPEPLTILYYDSSNNVIEQLSN

SEQ ID NO: 322 - protein, 25 aa, Artificial Sequence
  Cyclic GFR-binding peptide
GTPGPEPLTILYYDDMGVPTEQLSN

SEQ ID NO: 323 - protein, 25 aa, Artificial Sequence
  Cyclic GFR-binding peptide
GTPGPEPLTILYYDKGVVTYEQLSN

SEQ ID NO: 324 - protein, 25 aa, Artificial Sequence
  Cyclic GFR-binding peptide
WWFWGEPLTILYYNDKQQIIEQLSN

SEQ ID NO: 325 - protein, 25 aa, Artificial Sequence
  Cyclic GFR-binding peptide
WWFWGEPLTILYYDAANNVVEQLSN

SEQ ID NO: 326 - protein, 25 aa, Artificial Sequence
  Cyclic GFR-binding peptide
WWFWGEPLTILYYDSANNVVEQLSN

SEQ ID NO: 327 - protein, 21 aa, Artificial Sequence
  Cyclic GFR-binding peptide
WWFWGEPLTILYYGGGEQLSN

SEQ ID NO: 328 - protein, 22 aa, Artificial Sequence
  Cyclic GFR-binding peptide
WWFWGEPLTILYYGGGGEQLSN

SEQ ID NO: 329 - protein, 25 aa, Artificial Sequence
  Cyclic GFR-binding peptide
WWFWGEPLTILYYVGRTPKVEQLSN

SEQ ID NO: 330 - protein, 25 aa, Artificial Sequence
  Cyclic GFR-binding peptide
WWFWGEPLTILYYDENEKVVEQLSN

SEQ ID NO: 331 - protein, 25 aa, Artificial Sequence
  Cyclic GFR-binding peptide
GTPGPEPLTILYYDDSSNVIEQLSN

SEQ ID NO: 332 - protein, 25 aa, Artificial Sequence
  Cyclic GFR-binding peptide
EPLTILYYDKGVVTYEQLSNDKGVV

SEQ ID NO: 333 - protein, 25 aa, Artificial Sequence
  Cyclic GFR-binding peptide
EPLTILYYNDKQQIIEQLSNNDKQQ

SEQ ID NO: 334 - protein, 25 aa, Artificial Sequence
  Cyclic GFR-binding peptide
EPLTILYYDAANNVVEQLSNDAANN

SEQ ID NO: 335 - protein, 25 aa, Artificial Sequence
  Cyclic GFR-binding peptide
EPLTILYYDSANNVVEQLSNDSANN

SEQ ID NO: 336 - protein, 25 aa, Artificial Sequence
  Cyclic GFR-binding peptide
EPLTILYYDNGRVLLEQLSNDNGRV

SEQ ID NO: 337 - protein, 19 aa, Artificial Sequence
  Cyclic GFR-binding peptide
EPLTILYYGGGEQLSNGGG

SEQ ID NO: 338 - protein, 25 aa, Artificial Sequence
  Cyclic GFR-binding peptide
GTPGPEPLTILYYNDKQQIIEQLSN

SEQ ID NO: 339 - protein, 25 aa, Artificial Sequence
  Cyclic GFR-binding peptide
WWFWGEPLTILYYIGKTPKIEQLSN

SEQ ID NO: 340 - protein, 25 aa, Artificial Sequence
  Cyclic GFR-binding peptide
WWFWGEPLTILYYDENKNVVEQLSN

SEQ ID NO: 341 - protein, 27 aa, Artificial Sequence
  Cyclic GFR-binding peptide
EPLTILYYRIKPHQGQHEQLSNRIKPH

SEQ ID NO: 342 - protein, 27 aa, Artificial Sequence
  Cyclic GFR-binding peptide
EPLTILYYEYVRKKPKLEQLSNEYVRK

SEQ ID NO: 343 - protein, 27 aa, Artificial Sequence
  Cyclic GFR-binding peptide
EPLTILYYEIVRKKPIFEQLSNEIVRK

SEQ ID NO: 344 - protein, 27 aa, Artificial Sequence
  Cyclic GFR-binding peptide
GTPGPSNITMQIMRIKPHQGQHIGEMS

SEQ ID NO: 345 - protein, 25 aa, Artificial Sequence
  Cyclic GFR-binding peptide
GTPGPSNITMQIMDENEKVVIGEMS

SEQ ID NO: 346 - protein, 20 aa, Artificial Sequence
  Cyclic GFR-binding peptide
GTPGPSNITMQIGGGIGEMS

SEQ ID NO: 347 - protein, 21 aa, Artificial Sequence
  Cyclic GFR-binding peptide
GTPGPSNITMQIGGGGIGEMS

SEQ ID NO: 348 - protein, 25 aa, Artificial Sequence
  Cyclic GFR-binding peptide
GTPGPSNITMQIMDDSSNVIIGEMS

SEQ ID NO: 349 - protein, 25 aa, Artificial Sequence
  Cyclic GFR-binding peptide
GTPGPSNITMQIMDSSNNVIIGEMS

SEQ ID NO: 350 - protein, 25 aa, Artificial Sequence
  Cyclic GFR-binding peptide
GTPGPSNITMQIMDDMGVPTIGEMS

SEQ ID NO: 351 - protein, 20 aa, Artificial Sequence
  Cyclic GFR-binding peptide
WWFWGSNITMQIGGGIGEMS

SEQ ID NO: 352 - protein, 21 aa, Artificial Sequence
  Cyclic GFR-binding peptide
WWFWGSNITMQIGGGGIGEMS

SEQ ID NO: 353 - protein, 25 aa, Artificial Sequence
  Cyclic GFR-binding peptide
WWFWGSNITMQIMDAANNVVIGEMS

SEQ ID NO: 354 - protein, 25 aa, Artificial Sequence
  Cyclic GFR-binding peptide
WWFWGSNITMQIMDSANNVVIGEMS

SEQ ID NO: 355 - protein, 25 aa, Artificial Sequence
  Cyclic GFR-binding peptide
WWFWGSNITMQIMDNGRVLLIGEMS

SEQ ID NO: 356 - protein, 25 aa, Artificial Sequence
  Cyclic GFR-binding peptide
WWFWGSNITMQIMVGRKPKVIGEMS

SEQ ID NO: 357 - protein, 25 aa, Artificial Sequence
  Cyclic GFR-binding peptide
WWFWGSNITMQIMIGKTPKIIGEMS

SEQ ID NO: 358 - protein, 25 aa, Artificial Sequence
  Cyclic GFR-binding peptide
GTPGPSNITMQIMVGRTPKVIGEMS

SEQ ID NO: 359 - protein, 27 aa, Artificial Sequence
  Cyclic GFR-binding peptide
GTPGPSNITMQIMEYVRKKPKLIGEMS

SEQ ID NO: 360 - protein, 27 aa, Artificial Sequence
  Cyclic GFR-binding peptide
GTPGPSNITMQIMEIVRKKPIFIGEMS

SEQ ID NO: 361 - protein, 21 aa, Artificial Sequence
  Cyclic GFR-binding peptide
GTPGPSNITMQIMGGGLGEMS

SEQ ID NO: 362 - protein, 22 aa, Artificial Sequence
  Cyclic GFR-binding peptide
GTPGPSNITMQIMGGGGLGEMS

SEQ ID NO: 363 - protein, 25 aa, Artificial Sequence
  Cyclic GFR-binding peptide
SNITMQIMDENKNVVLGEMSDENKN

SEQ ID NO: 364 - protein, 25 aa, Artificial Sequence
  Cyclic GFR-binding peptide
SNITMQIMDEYDKVVLGEMSDEYDK

SEQ ID NO: 365 - protein, 25 aa, Artificial Sequence
  Cyclic GFR-binding peptide
SNITMQIMDDSSNVILGEMSDDSSN

SEQ ID NO: 366 - protein, 25 aa, Artificial Sequence
  Cyclic GFR-binding peptide
SNITMQIMDSSNNVILGEMSDSSNN

SEQ ID NO: 367 - protein, 25 aa, Artificial Sequence
  Cyclic GFR-binding peptide
SNITMQIMDDMGVPTLGEMSDDMGV

SEQ ID NO: 368 - protein, 25 aa, Artificial Sequence
  Cyclic GFR-binding peptide
SNITMQIMDKGVVTYLGEMSDKGVV

SEQ ID NO: 369 - protein, 25 aa, Artificial Sequence
  Cyclic GFR-binding peptide
SNITMQIMNDKQQIILGEMSNDKQQ

SEQ ID NO: 370 - protein, 19 aa, Artificial Sequence
  Cyclic GFR-binding peptide
SNITMQIMGGGLGEMSGGG

SEQ ID NO: 371 - protein, 27 aa, Artificial Sequence
  Cyclic GFR-binding peptide
GTPGPRSVKVAKVEIVRKKPIFKEVQV

SEQ ID NO: 372 - protein, 21 aa, Artificial Sequence
  Cyclic GFR-binding peptide
GTPGPRSVKVAKVGGGKEVQV

SEQ ID NO: 373 - protein, 25 aa, Artificial Sequence
  Cyclic GFR-binding peptide
GTPGPRSVKVAKVDENKNVVKEVQV

SEQ ID NO: 374 - protein, 25 aa, Artificial Sequence
  Cyclic GFR-binding peptide
GTPGPRSVKVAKVDEYDKVVKEVQV

SEQ ID NO: 375 - protein, 25 aa, Artificial Sequence
  Cyclic GFR-binding peptide
WWFWGRSVKVAKVDDSSNVIKEVQV

SEQ ID NO: 376 - protein, 22 aa, Artificial Sequence
  Cyclic GFR-binding peptide
WWFWGRSVKVAKVGGGGKEVQV

SEQ ID NO: 377 - protein, 25 aa, Artificial Sequence
  Cyclic GFR-binding peptide
WWFWGRSVKVAKVDSSNNVIKEVQV

SEQ ID NO: 378 - protein, 25 aa, Artificial Sequence
  Cyclic GFR-binding peptide
WWFWGRSVKVAKVDDMGVPTKEVQV

SEQ ID NO: 379 - protein, 25 aa, Artificial Sequence
  Cyclic GFR-binding peptide
GTPGPRSVKVAKVNDKQQIIKEVQV

SEQ ID NO: 380 - protein, 25 aa, Artificial Sequence
  Cyclic GFR-binding peptide
GTPGPRSVKVAKVDAANNVVKEVQV

SEQ ID NO: 381 - protein, 19 aa, Artificial Sequence
  Cyclic GFR-binding peptide
RSVKVAKVGGGKEVQVGGG

SEQ ID NO: 382 - protein, 25 aa, Artificial Sequence
  Cyclic GFR-binding peptide
RSVKVAKVVGRTPKVKEVQVVGRTP

SEQ ID NO: 383 - protein, 27 aa, Artificial Sequence
  Cyclic GFR-binding peptide
RSVKVAKVRIKPHQGQHKEVQVRIKPH

SEQ ID NO: 384 - protein, 27 aa, Artificial Sequence
  Cyclic GFR-binding peptide
RSVKVAKVEIVRKKPIFKEVQVEIVRK

SEQ ID NO: 385 - protein, 27 aa, Artificial Sequence
  Cyclic GFR-binding peptide
GTPGPRPVQVRKIEYVRKKPKLKKATV

SEQ ID NO: 386 - protein, 25 aa, Artificial Sequence
  Cyclic GFR-binding peptide
GTPGPRPVQVRKIDENEKVVKKATV

SEQ ID NO: 387 - protein, 25 aa, Artificial Sequence
  Cyclic GFR-binding peptide
GTPGPRPVQVRKIDENKNVVKKATV

SEQ ID NO: 388 - protein, 25 aa, Artificial Sequence
  Cyclic GFR-binding peptide
GTPGPRPVQVRKIDEYDKVVKKATV

SEQ ID NO: 389 - protein, 25 aa, Artificial Sequence
  Cyclic GFR-binding peptide
WWFWGRPVQVRKIDDSSNVIKKATV

SEQ ID NO: 390 - protein, 21 aa, Artificial Sequence
  Cyclic GFR-binding peptide
WWFWGRPVQVRKIGGGKKATV

SEQ ID NO: 391 - protein, 22 aa, Artificial Sequence
  Cyclic GFR-binding peptide
WWFWGRPVQVRKIGGGGKKATV

SEQ ID NO: 392 - protein, 25 aa, Artificial Sequence
  Cyclic GFR-binding peptide
WWFWGRPVQVRKIDDMGVPTKKATV

SEQ ID NO: 393 - protein, 25 aa, Artificial Sequence
  Cyclic GFR-binding peptide
GTPGPRPVQVRKIDKGVVTYKKATV

SEQ ID NO: 394 - protein, 21 aa, Artificial Sequence
  Cyclic GFR-binding peptide
GTPGPRPVQVRKIGGGKKATV

SEQ ID NO: 395 - protein, 22 aa, Artificial Sequence
  Cyclic GFR-binding peptide
GTPGPRPVQVRKIGGGGKKATV

SEQ ID NO: 396 - protein, 25 aa, Artificial Sequence
  Cyclic GFR-binding peptide
RPVQVRKIDSANNVVKKATVDSANN

SEQ ID NO: 397 - protein, 25 aa, Artificial Sequence
  Cyclic GFR-binding peptide
RPVQVRKIDNGRVLLKKATVDNGRV

SEQ ID NO: 398 - protein, 25 aa, Artificial Sequence
  Cyclic GFR-binding peptide
RPVQVRKIVGRKPKVKKATVVGRKP

SEQ ID NO: 399 - protein, 25 aa, Artificial Sequence
  Cyclic GFR-binding peptide
RPVQVRKIIGKTPKIKKATVIGKTP

SEQ ID NO: 400 - protein, 19 aa, Artificial Sequence
  Cyclic GFR-binding peptide
RPVQVRKIGGGKKATVGGG

SEQ ID NO: 401 - protein, 25 aa, Artificial Sequence
  Cyclic GFR-binding peptide
QYNKLVVNKNEDLYLMSIASPGPTG

SEQ ID NO: 402 - protein, 25 aa, Artificial Sequence
  Cyclic GFR-binding peptide
QYNKLIVNSSDDLYLMSIASPGPTG

SEQ ID NO: 403 - protein, 25 aa, Artificial Sequence
  Cyclic GFR-binding peptide
QYNKLIVNNSSDLYLMSIASPGPTG

SEQ ID NO: 404 - protein, 25 aa, Artificial Sequence
  Cyclic GFR-binding peptide
QYNKLTPVGMDDLYLMSIASPGPTG

SEQ ID NO: 405 - protein, 25 aa, Artificial Sequence
  Cyclic GFR-binding peptide
QYNKLYTVVGKDLYLMSIASPGPTG

SEQ ID NO: 406 - protein, 25 aa, Artificial Sequence
  Cyclic GFR-binding peptide
QYNKLIIQQKDNLYLMSIASPGPTG

SEQ ID NO: 407 - protein, 25 aa, Artificial Sequence
  Cyclic GFR-binding peptide
QYNKLVVNNAADLYLMSIASPGPTG

SEQ ID NO: 408 - protein, 25 aa, Artificial Sequence
  Cyclic GFR-binding peptide
QYNKLVVNNASDLYLMSIASGWFWW

SEQ ID NO: 409 - protein, 25 aa, Artificial Sequence
  Cyclic GFR-binding peptide
QYNKLLLVRGNDLYLMSIASGWFWW

SEQ ID NO: 410 - protein, 25 aa, Artificial Sequence
  Cyclic GFR-binding peptide
QYNKLVKPKRGVLYLMSIASGWFWW

SEQ ID NO: 411 - protein, 25 aa, Artificial Sequence
  Cyclic GFR-binding peptide
QYNKLIKPTKGILYLMSIASGWFWW

SEQ ID NO: 412 - protein, 25 aa, Artificial Sequence
  Cyclic GFR-binding peptide
QYNKLVKPTRGVLYLMSIASGWFWW

SEQ ID NO: 413 - protein, 25 aa, Artificial Sequence
  Cyclic GFR-binding peptide
QYNKLVVNKNEDLYLMSIASGWFWW

SEQ ID NO: 414 - protein, 25 aa, Artificial Sequence
  Cyclic GFR-binding peptide
QYNKLIVNSSDDLYLMSIASGWFWW

SEQ ID NO: 415 - protein, 22 aa, Artificial Sequence
  Cyclic GFR-binding peptide
QYNKLGGGGLYLMSIASPGPTG

SEQ ID NO: 416 - protein, 27 aa, Artificial Sequence
  Cyclic GFR-binding peptide
HPKIRQYNKLHQGQHPKIRLYLMSIAS

SEQ ID NO: 417 - protein, 27 aa, Artificial Sequence
  Cyclic GFR-binding peptide
KRVYEQYNKLLKPKKRVYELYLMSIAS

SEQ ID NO: 418 - protein, 27 aa, Artificial Sequence
  Cyclic GFR-binding peptide
KRVIEQYNKLFIPKKRVIELYLMSIAS

SEQ ID NO: 419 - protein, 25 aa, Artificial Sequence
  Cyclic GFR-binding peptide
PYVKLVVKENEDFFLISLSSPGPTG

SEQ ID NO: 420 - protein, 25 aa, Artificial Sequence
  Cyclic GFR-binding peptide
PYVKLVVKDYEDFFLISLSSPGPTG

SEQ ID NO: 421 - protein, 25 aa, Artificial Sequence
  Cyclic GFR-binding peptide
PYVKLIVNSSDDFFLISLSSPGPTG

SEQ ID NO: 422 - protein, 25 aa, Artificial Sequence
  Cyclic GFR-binding peptide
PYVKLIVNNSSDFFLISLSSPGPTG

SEQ ID NO: 423 - protein, 25 aa, Artificial Sequence
  Cyclic GFR-binding peptide
PYVKLTPVGMDDFFLISLSSPGPTG

SEQ ID NO: 424 - protein, 25 aa, Artificial Sequence
  Cyclic GFR-binding peptide
PYVKLYTVVGKDFFLISLSSPGPTG

SEQ ID NO: 425 - protein, 25 aa, Artificial Sequence
  Cyclic GFR-binding peptide
PYVKLIIQQKDNFFLISLSSPGPTG

SEQ ID NO: 426 - protein, 25 aa, Artificial Sequence
  Cyclic GFR-binding peptide
PYVKLVVNNAADFFLISLSSGWFWW

SEQ ID NO: 427 - protein, 25 aa, Artificial Sequence
  Cyclic GFR-binding peptide
PYVKLVVNNASDFFLISLSSGWFWW

SEQ ID NO: 428 - protein, 25 aa, Artificial Sequence
  Cyclic GFR-binding peptide
PYVKLLLVRGNDFFLISLSSGWFWW

SEQ ID NO: 429 - protein, 25 aa, Artificial Sequence
  Cyclic GFR-binding peptide
PYVKLVKPKRGVFFLISLSSGWFWW

SEQ ID NO: 430 - protein, 25 aa, Artificial Sequence
  Cyclic GFR-binding peptide
PYVKLIKPTKGIFFLISLSSGWFWW

SEQ ID NO: 431 - protein, 25 aa, Artificial Sequence
  Cyclic GFR-binding peptide
PYVKLVKPTRGVFFLISLSSGWFWW

SEQ ID NO: 432 - protein, 25 aa, Artificial Sequence
  Cyclic GFR-binding peptide
PYVKLVVKENEDFFLISLSSGWFWW

SEQ ID NO: 433 - protein, 21 aa, Artificial Sequence
  Cyclic GFR-binding peptide
PYVKLGGGFFLISLSSPGPTG

SEQ ID NO: 434 - protein, 22 aa, Artificial Sequence
  Cyclic GFR-binding peptide
PYVKLGGGGFFLISLSSPGPTG

SEQ ID NO: 435 - protein, 19 aa, Artificial Sequence
  Cyclic GFR-binding peptide
GGGPYVKLGGGFFLISLSS

SEQ ID NO: 436 - protein, 27 aa, Artificial Sequence
  Cyclic GFR-binding peptide
KRVYEPYVKLLKPKKRVYEFFLISLSS

SEQ ID NO: 437 - protein, 27 aa, Artificial Sequence
  Cyclic GFR-binding peptide
KRVIEPYVKLFIPKKRVIEFFLISLSS

SEQ ID NO: 438 - protein, 25 aa, Artificial Sequence
  Cyclic GFR-binding peptide
RYKKLVVKENEDFYLVSIANPGPTG

SEQ ID NO: 439 - protein, 25 aa, Artificial Sequence
  Cyclic GFR-binding peptide
RYKKLVVNKNEDFYLVSIANPGPTG

SEQ ID NO: 440 - protein, 25 aa, Artificial Sequence
  Cyclic GFR-binding peptide
RYKKLVVKDYEDFYLVSIANPGPTG

SEQ ID NO: 441 - protein, 25 aa, Artificial Sequence
  Cyclic GFR-binding peptide
RYKKLIVNNSSDFYLVSIANPGPTG

SEQ ID NO: 442 - protein, 25 aa, Artificial Sequence
  Cyclic GFR-binding peptide
RYKKLTPVGMDDFYLVSIANPGPTG

SEQ ID NO: 443 - protein, 25 aa, Artificial Sequence
  Cyclic GFR-binding peptide
RYKKLYTVVGKDFYLVSIANPGPTG

SEQ ID NO: 444 - protein, 25 aa, Artificial Sequence
  Cyclic GFR-binding peptide
RYKKLIIQQKDNFYLVSIANPGPTG

SEQ ID NO: 445 - protein, 25 aa, Artificial Sequence
  Cyclic GFR-binding peptide
RYKKLVVNNAADFYLVSIANPGPTG

SEQ ID NO: 446 - protein, 25 aa, Artificial Sequence
  Cyclic GFR-binding peptide
RYKKLVVNNASDFYLVSIANGWFWW

SEQ ID NO: 447 - protein, 25 aa, Artificial Sequence
  Cyclic GFR-binding peptide
RYKKLLLVRGNDFYLVSIANGWFWW

SEQ ID NO: 448 - protein, 25 aa, Artificial Sequence
  Cyclic GFR-binding peptide
RYKKLVKPKRGVFYLVSIANGWFWW

SEQ ID NO: 449 - protein, 25 aa, Artificial Sequence
  Cyclic GFR-binding peptide
RYKKLIKPTKGIFYLVSIANGWFWW

SEQ ID NO: 450 - protein, 25 aa, Artificial Sequence
  Cyclic GFR-binding peptide
RYKKLVKPTRGVFYLVSIANGWFWW

SEQ ID NO: 451 - protein, 25 aa, Artificial Sequence
  Cyclic GFR-binding peptide
RYKKLVVKENEDFYLVSIANGWFWW

SEQ ID NO: 452 - protein, 25 aa, Artificial Sequence
  Cyclic GFR-binding peptide
RYKKLVVNKNEDFYLVSIANGWFWW

SEQ ID NO: 453 - protein, 20 aa, Artificial Sequence
  Cyclic GFR-binding peptide
RYKKLGGGYLVSIANPGPTG

SEQ ID NO: 454 - protein, 21 aa, Artificial Sequence
  Cyclic GFR-binding peptide
RYKKLGGGGYLVSIANPGPTG

SEQ ID NO: 455 - protein, 18 aa, Artificial Sequence
  Cyclic GFR-binding peptide
GGGRYKKLGGGYLVSIAN

SEQ ID NO: 456 - protein, 27 aa, Artificial Sequence
  Cyclic GFR-binding peptide
HPKIRRYKKLHQGQHPKIRFYLVSIAN

SEQ ID NO: 457 - protein, 27 aa, Artificial Sequence
  Cyclic GFR-binding peptide
KRVYERYKKLLKPKKRVYEFYLVSIAN

SEQ ID NO: 458 - protein, 27 aa, Artificial Sequence
  Cyclic GFR-binding peptide
KRVIERYKKLFIPKKRVIEFYLVSIAN

SEQ ID NO: 459 - protein, 25 aa, Artificial Sequence
  Cyclic GFR-binding peptide
RHKRLVVKENEDYYLVSTASPGPTG

SEQ ID NO: 460 - protein, 25 aa, Artificial Sequence
  Cyclic GFR-binding peptide
RHKRLVVNKNEDYYLVSTASPGPTG

SEQ ID NO: 461 - protein, 25 aa, Artificial Sequence
  Cyclic GFR-binding peptide
RHKRLVVKDYEDYYLVSTASPGPTG

SEQ ID NO: 462 - protein, 25 aa, Artificial Sequence
  Cyclic GFR-binding peptide
RHKRLTPVGMDDYYLVSTASPGPTG

SEQ ID NO: 463 - protein, 25 aa, Artificial Sequence
  Cyclic GFR-binding peptide
RHKRLYTVVGKDYYLVSTASPGPTG

SEQ ID NO: 464 - protein, 25 aa, Artificial Sequence
  Cyclic GFR-binding peptide
RHKRLIIQQKDNYYLVSTASPGPTG

SEQ ID NO: 465 - protein, 25 aa, Artificial Sequence
  Cyclic GFR-binding peptide
RHKRLVVNNAADYYLVSTASGWFWW

SEQ ID NO: 466 - protein, 25 aa, Artificial Sequence
  Cyclic GFR-binding peptide
RHKRLVVNNASDYYLVSTASGWFWW

SEQ ID NO: 467 - protein, 25 aa, Artificial Sequence
  Cyclic GFR-binding peptide
RHKRLLLVRGNDYYLVSTASGWFWW

SEQ ID NO: 468 - protein, 25 aa, Artificial Sequence
  Cyclic GFR-binding peptide
RHKRLVKPKRGVYYLVSTASGWFWW

SEQ ID NO: 469 - protein, 25 aa, Artificial Sequence
  Cyclic GFR-binding peptide
RHKRLIKPTKGIYYLVSTASGWFWW

SEQ ID NO: 470 - protein, 25 aa, Artificial Sequence
  Cyclic GFR-binding peptide
RHKRLVKPTRGVYYLVSTASGWFWW

SEQ ID NO: 471 - protein, 25 aa, Artificial Sequence
  Cyclic GFR-binding peptide
RHKRLVVKENEDYYLVSTASGWFWW

SEQ ID NO: 472 - protein, 21 aa, Artificial Sequence
  Cyclic GFR-binding peptide
RHKRLGGGYYLVSTASPGPTG

SEQ ID NO: 473 - protein, 22 aa, Artificial Sequence
  Cyclic GFR-binding peptide
RHKRLGGGGYYLVSTASPGPTG

SEQ ID NO: 474 - protein, 25 aa, Artificial Sequence
  Cyclic GFR-binding peptide
PTRGVRHKRLVKPTRGVYYLVSTAS

SEQ ID NO: 475 - protein, 27 aa, Artificial Sequence
  Cyclic GFR-binding peptide
HPKIRRHKRLHQGQHPKIRYYLVSTAS

SEQ ID NO: 476 - protein, 27 aa, Artificial Sequence
  Cyclic GFR-binding peptide
KRVYERHKRLLKPKKRVYEYYLVSTAS

SEQ ID NO: 477 - protein, 27 aa, Artificial Sequence
  Cyclic GFR-binding peptide
KRVIERHKRLFIPKKRVIEYYLVSTAS

SEQ ID NO: 478 - protein, 25 aa, Artificial Sequence
  Cyclic GFR-binding peptide
YHYKLVVKENEDKYLVSIPSPGPTG

SEQ ID NO: 479 - protein, 25 aa, Artificial Sequence
  Cyclic GFR-binding peptide
YHYKLVVNKNEDKYLVSIPSPGPTG

SEQ ID NO: 480 - protein, 25 aa, Artificial Sequence
  Cyclic GFR-binding peptide
YHYKLVVKDYEDKYLVSIPSPGPTG

SEQ ID NO: 481 - protein, 25 aa, Artificial Sequence
  Cyclic GFR-binding peptide
YHYKLIVNSSDDKYLVSIPSPGPTG

SEQ ID NO: 482 - protein, 25 aa, Artificial Sequence
  Cyclic GFR-binding peptide
YHYKLIVNNSSDKYLVSIPSPGPTG

SEQ ID NO: 483 - protein, 25 aa, Artificial Sequence
  Cyclic GFR-binding peptide
YHYKLYTVVGKDKYLVSIPSPGPTG

SEQ ID NO: 484 - protein, 25 aa, Artificial Sequence
  Cyclic GFR-binding peptide
YHYKLIIQQKDNKYLVSIPSPGPTG

SEQ ID NO: 485 - protein, 25 aa, Artificial Sequence
  Cyclic GFR-binding peptide
YHYKLVVNNAADKYLVSIPSGWFWW

SEQ ID NO: 486 - protein, 25 aa, Artificial Sequence
  Cyclic GFR-binding peptide
YHYKLVVNNASDKYLVSIPSGWFWW

SEQ ID NO: 487 - protein, 25 aa, Artificial Sequence
  Cyclic GFR-binding peptide
YHYKLLLVRGNDKYLVSIPSGWFWW

SEQ ID NO: 488 - protein, 25 aa, Artificial Sequence
  Cyclic GFR-binding peptide
YHYKLVKPKRGVKYLVSIPSGWFWW

SEQ ID NO: 489 - protein, 25 aa, Artificial Sequence
  Cyclic GFR-binding peptide
YHYKLIKPTKGIKYLVSIPSGWFWW

SEQ ID NO: 490 - protein, 25 aa, Artificial Sequence
  Cyclic GFR-binding peptide
YHYKLVKPTRGVKYLVSIPSGWFWW

SEQ ID NO: 491 - protein, 25 aa, Artificial Sequence
  Cyclic GFR-binding peptide
YHYKLVVKENEDKYLVSIPSGWFWW

SEQ ID NO: 492 - protein, 20 aa, Artificial Sequence
  Cyclic GFR-binding peptide
YHYKLGGGYLVSIPSPGPTG

SEQ ID NO: 493 - protein, 21 aa, Artificial Sequence
  Cyclic GFR-binding peptide
YHYKLGGGGYLVSIPSPGPTG

SEQ ID NO: 494 - protein, 18 aa, Artificial Sequence
  Cyclic GFR-binding peptide
GGGYHYKLGGGYLVSIPS

SEQ ID NO: 495 - protein, 25 aa, Artificial Sequence
  Cyclic GFR-binding peptide
PTRGVYHYKLVKPTRGVKYLVSIPS

SEQ ID NO: 496 - protein, 27 aa, Artificial Sequence
  Cyclic GFR-binding peptide
HPKIRYHYKLHQGQHPKIRKYLVSIPS

SEQ ID NO: 497 - protein, 27 aa, Artificial Sequence
  Cyclic GFR-binding peptide
KRVYEYHYKLLKPKKRVYEKYLVSIPS

SEQ ID NO: 498 - protein, 27 aa, Artificial Sequence
  Cyclic GFR-binding peptide
KRVIEYHYKLFIPKKRVIEKYLVSIPS

SEQ ID NO: 499 - protein, 25 aa, Artificial Sequence
  Cyclic GFR-binding peptide
EYKFKVVKENEDLYLISIPEPGPTG

SEQ ID NO: 500 - protein, 25 aa, Artificial Sequence
  Cyclic GFR-binding peptide
EYKFKVVNKNEDLYLISIPEPGPTG

SEQ ID NO: 501 - protein, 25 aa, Artificial Sequence
  Cyclic GFR-binding peptide
EYKFKVVKDYEDLYLISIPEPGPTG

SEQ ID NO: 502 - protein, 25 aa, Artificial Sequence
  Cyclic GFR-binding peptide
EYKFKIVNSSDDLYLISIPEPGPTG

SEQ ID NO: 503 - protein, 25 aa, Artificial Sequence
  Cyclic GFR-binding peptide
EYKFKIVNNSSDLYLISIPEPGPTG

SEQ ID NO: 504 - protein, 25 aa, Artificial Sequence
  Cyclic GFR-binding peptide
EYKFKTPVGMDDLYLISIPEPGPTG

SEQ ID NO: 505 - protein, 25 aa, Artificial Sequence
  Cyclic GFR-binding peptide
EYKFKIIQQKDNLYLISIPEPGPTG

SEQ ID NO: 506 - protein, 25 aa, Artificial Sequence
  Cyclic GFR-binding peptide
EYKFKVVNNAADLYLISIPEGWFWW

SEQ ID NO: 507 - protein, 25 aa, Artificial Sequence
  Cyclic GFR-binding peptide
EYKFKVVNNASDLYLISIPEGWFWW

SEQ ID NO: 508 - protein, 25 aa, Artificial Sequence
  Cyclic GFR-binding peptide
EYKFKLLVRGNDLYLISIPEGWFWW

SEQ ID NO: 509 - protein, 25 aa, Artificial Sequence
  Cyclic GFR-binding peptide
EYKFKVKPKRGVLYLISIPEGWFWW

SEQ ID NO: 510 - protein, 25 aa, Artificial Sequence
  Cyclic GFR-binding peptide
EYKFKIKPTKGILYLISIPEGWFWW

SEQ ID NO: 511 - protein, 25 aa, Artificial Sequence
  Cyclic GFR-binding peptide
EYKFKVKPTRGVLYLISIPEGWFWW

SEQ ID NO: 512 - protein, 25 aa, Artificial Sequence
  Cyclic GFR-binding peptide
EYKFKVVKENEDLYLISIPEGWFWW

SEQ ID NO: 513 - protein, 19 aa, Artificial Sequence
  Cyclic GFR-binding peptide
GGGEYKFKGGGLYLISIPE

SEQ ID NO: 514 - protein, 25 aa, Artificial Sequence
  Cyclic GFR-binding peptide
PTRGVEYKFKVKPTRGVLYLISIPE

SEQ ID NO: 515 - protein, 27 aa, Artificial Sequence
  Cyclic GFR-binding peptide
HPKIREYKFKHQGQHPKIRLYLISIPE

SEQ ID NO: 516 - protein, 27 aa, Artificial Sequence
  Cyclic GFR-binding peptide
KRVYEEYKFKLKPKKRVYELYLISIPE

SEQ ID NO: 517 - protein, 27 aa, Artificial Sequence
  Cyclic GFR-binding peptide
KRVIEEYKFKFIPKKRVIELYLISIPE

SEQ ID NO: 518 - protein, 25 aa, Artificial Sequence
  Cyclic GFR-binding peptide
PIKGYVVKENEDFYLMNIPSPGPTG

SEQ ID NO: 519 - protein, 25 aa, Artificial Sequence
  Cyclic GFR-binding peptide
PIKGYVVNKNEDFYLMNIPSPGPTG

SEQ ID NO: 520 - protein, 25 aa, Artificial Sequence
  Cyclic GFR-binding peptide
PIKGYVVKDYEDFYLMNIPSPGPTG

SEQ ID NO: 521 - protein, 25 aa, Artificial Sequence
  Cyclic GFR-binding peptide
PIKGYIVNSSDDFYLMNIPSPGPTG

SEQ ID NO: 522 - protein, 25 aa, Artificial Sequence
  Cyclic GFR-binding peptide
PIKGYIVNNSSDFYLMNIPSPGPTG

SEQ ID NO: 523 - protein, 25 aa, Artificial Sequence
  Cyclic GFR-binding peptide
PIKGYTPVGMDDFYLMNIPSPGPTG

SEQ ID NO: 524 - protein, 25 aa, Artificial Sequence
  Cyclic GFR-binding peptide
PIKGYYTVVGKDFYLMNIPSPGPTG

SEQ ID NO: 525 - protein, 25 aa, Artificial Sequence
  Cyclic GFR-binding peptide
PIKGYVVNNAADFYLMNIPSGWFWW

SEQ ID NO: 526 - protein, 25 aa, Artificial Sequence
  Cyclic GFR-binding peptide
PIKGYVVNNASDFYLMNIPSGWFWW

SEQ ID NO: 527 - protein, 25 aa, Artificial Sequence
  Cyclic GFR-binding peptide
PIKGYLLVRGNDFYLMNIPSGWFWW

SEQ ID NO: 528 - protein, 25 aa, Artificial Sequence
  Cyclic GFR-binding peptide
PIKGYVKPKRGVFYLMNIPSGWFWW

SEQ ID NO: 529 - protein, 25 aa, Artificial Sequence
  Cyclic GFR-binding peptide
PIKGYIKPTKGIFYLMNIPSGWFWW

SEQ ID NO: 530 - protein, 25 aa, Artificial Sequence
  Cyclic GFR-binding peptide
PIKGYVKPTRGVFYLMNIPSGWFWW

SEQ ID NO: 531 - protein, 25 aa, Artificial Sequence
  Cyclic GFR-binding peptide
PIKGYVVKENEDFYLMNIPSGWFWW

SEQ ID NO: 532 - protein, 21 aa, Artificial Sequence
  Cyclic GFR-binding peptide
PIKGYGGGFYLMNIPSPGPTG

SEQ ID NO: 533 - protein, 22 aa, Artificial Sequence
  Cyclic GFR-binding peptide
PIKGYGGGGFYLMNIPSPGPTG

SEQ ID NO: 534 - protein, 19 aa, Artificial Sequence
  Cyclic GFR-binding peptide
GGGPIKGYGGGFYLMNIPS

SEQ ID NO: 535 - protein, 25 aa, Artificial Sequence
  Cyclic GFR-binding peptide
PTKGIPIKGYIKPTKGIFYLMNIPS

SEQ ID NO: 536 - protein, 25 aa, Artificial Sequence
  Cyclic GFR-binding peptide
PTRGVPIKGYVKPTRGVFYLMNIPS

SEQ ID NO: 537 - protein, 27 aa, Artificial Sequence
  Cyclic GFR-binding peptide
HPKIRPIKGYHQGQHPKIRFYLMNIPS

SEQ ID NO: 538 - protein, 27 aa, Artificial Sequence
  Cyclic GFR-binding peptide
KRVYEPIKGYLKPKKRVYEFYLMNIPS

SEQ ID NO: 539 - protein, 27 aa, Artificial Sequence
  Cyclic GFR-binding peptide
KRVIEPIKGYFIPKKRVIEFYLMNIPS

SEQ ID NO: 540 - protein, 25 aa, Artificial Sequence
  Cyclic GFR-binding peptide
EYQKYVVKENEDIYLISIPSPGPTG

SEQ ID NO: 541 - protein, 25 aa, Artificial Sequence
  Cyclic GFR-binding peptide
EYQKYVVNKNEDIYLISIPSPGPTG

SEQ ID NO: 542 - protein, 25 aa, Artificial Sequence
  Cyclic GFR-binding peptide
EYQKYVVKDYEDIYLISIPSPGPTG

SEQ ID NO: 543 - protein, 25 aa, Artificial Sequence
  Cyclic GFR-binding peptide
EYQKYIVNSSDDIYLISIPSPGPTG

SEQ ID NO: 544 - protein, 25 aa, Artificial Sequence
  Cyclic GFR-binding peptide
EYQKYIVNNSSDIYLISIPSPGPTG

SEQ ID NO: 545 - protein, 25 aa, Artificial Sequence
  Cyclic GFR-binding peptide
EYQKYTPVGMDDIYLISIPSPGPTG

SEQ ID NO: 546 - protein, 25 aa, Artificial Sequence
  Cyclic GFR-binding peptide
EYQKYYTVVGKDIYLISIPSPGPTG

SEQ ID NO: 547 - protein, 25 aa, Artificial Sequence
  Cyclic GFR-binding peptide
EYQKYIIQQKDNIYLISIPSGWFWW

SEQ ID NO: 548 - protein, 25 aa, Artificial Sequence
  Cyclic GFR-binding peptide
EYQKYVVNNASDIYLISIPSGWFWW

SEQ ID NO: 549 - protein, 25 aa, Artificial Sequence
  Cyclic GFR-binding peptide
EYQKYLLVRGNDIYLISIPSGWFWW

SEQ ID NO: 550 - protein, 25 aa, Artificial Sequence
  Cyclic GFR-binding peptide
EYQKYVKPKRGVIYLISIPSGWFWW

SEQ ID NO: 551 - protein, 25 aa, Artificial Sequence
  Cyclic GFR-binding peptide
EYQKYIKPTKGIIYLISIPSGWFWW

SEQ ID NO: 552 - protein, 25 aa, Artificial Sequence
  Cyclic GFR-binding peptide
EYQKYVKPTRGVIYLISIPSGWFWW

SEQ ID NO: 553 - protein, 25 aa, Artificial Sequence
  Cyclic GFR-binding peptide
EYQKYVVKENEDIYLISIPSGWFWW

SEQ ID NO: 554 - protein, 21 aa, Artificial Sequence
  Cyclic GFR-binding peptide
EYQKYGGGIYLISIPSPGPTG

SEQ ID NO: 555 - protein, 22 aa, Artificial Sequence
  Cyclic GFR-binding peptide
EYQKYGGGGIYLISIPSPGPTG

SEQ ID NO: 556 - protein, 25 aa, Artificial Sequence
  Cyclic GFR-binding peptide
VVGKDEYQKYYTVVGKDIYLISIPS

SEQ ID NO: 557 - protein, 25 aa, Artificial Sequence
  Cyclic GFR-binding peptide
QQKDNEYQKYIIQQKDNIYLISIPS

SEQ ID NO: 558 - protein, 25 aa, Artificial Sequence
  Cyclic GFR-binding peptide
NNASDEYQKYVVNNASDIYLISIPS

SEQ ID NO: 559 - protein, 25 aa, Artificial Sequence
  Cyclic GFR-binding peptide
VRGNDEYQKYLLVRGNDIYLISIPS

SEQ ID NO: 560 - protein, 25 aa, Artificial Sequence
  Cyclic GFR-binding peptide
PKRGVEYQKYVKPKRGVIYLISIPS

SEQ ID NO: 561 - protein, 25 aa, Artificial Sequence
  Cyclic GFR-binding peptide
PTKGIEYQKYIKPTKGIIYLISIPS

SEQ ID NO: 562 - protein, 25 aa, Artificial Sequence
  Cyclic GFR-binding peptide
PTRGVEYQKYVKPTRGVIYLISIPS

SEQ ID NO: 563 - protein, 27 aa, Artificial Sequence
  Cyclic GFR-binding peptide
HPKIREYQKYHQGQHPKIRIYLISIPS

SEQ ID NO: 564 - protein, 19 aa, Artificial Sequence
  Cyclic GFR-binding peptide
GGGEYQKYGGGIYLISIPS

SEQ ID NO: 565 - protein, 19 aa, Artificial Sequence
  Cyclic GFR-binding peptide
GGGEYQKYGGGIFLISIPS

SEQ ID NO: 566 - protein, 22 aa, Artificial Sequence
  Cyclic GFR-binding peptide
EYQKYGGGGIFLISIPSPGPTG

SEQ ID NO: 567 - protein, 22 aa, Artificial Sequence
  Cyclic GFR-binding peptide
EYQKYGGGGIFLISIPSGWFWW

SEQ ID NO: 568 - protein, 21 aa, Artificial Sequence
  Cyclic GFR-binding peptide
EYQKYGGGIFLISIPSGWFWW

SEQ ID NO: 569 - protein, 21 aa, Artificial Sequence
  Cyclic GFR-binding peptide
EYQKYGGGIFLISIPSPGPTG

SEQ ID NO: 570 - protein, 25 aa, Artificial Sequence
  Cyclic GFR-binding peptide
EYQKYLLVRGNDIFLISIPSPGPTG

SEQ ID NO: 571 - protein, 25 aa, Artificial Sequence
  Cyclic GFR-binding peptide
EYQKYVKPKRGVIFLISIPSPGPTG

SEQ ID NO: 572 - protein, 25 aa, Artificial Sequence
  Cyclic GFR-binding peptide
EYQKYIKPTKGIIFLISIPSGWFWW

SEQ ID NO: 573 - protein, 25 aa, Artificial Sequence
  Cyclic GFR-binding peptide
EYQKYVKPTRGVIFLISIPSGWFWW

SEQ ID NO: 574 - protein, 25 aa, Artificial Sequence
  Cyclic GFR-binding peptide
EYQKYVVNKNEDIFLISIPSPGPTG

SEQ ID NO: 575 - protein, 25 aa, Artificial Sequence
  Cyclic GFR-binding peptide
EYQKYIVNSSDDIFLISIPSPGPTG

SEQ ID NO: 576 - protein, 25 aa, Artificial Sequence
  Cyclic GFR-binding peptide
EYQKYIVNNSSDIFLISIPSPGPTG

SEQ ID NO: 577 - protein, 25 aa, Artificial Sequence
  Cyclic GFR-binding peptide
EYQKYTPVGMDDIFLISIPSGWFWW

SEQ ID NO: 578 - protein, 25 aa, Artificial Sequence
  Cyclic GFR-binding peptide
EYQKYYTVVGKDIFLISIPSGWFWW

SEQ ID NO: 579 - protein, 25 aa, Artificial Sequence
  Cyclic GFR-binding peptide
EYQKYIIQQKDNIFLISIPSPGPTG

SEQ ID NO: 580 - protein, 25 aa, Artificial Sequence
  Cyclic GFR-binding peptide
EYQKYVVNNAADIFLISIPSPGPTG

SEQ ID NO: 581 - protein, 25 aa, Artificial Sequence
  Cyclic GFR-binding peptide
VRGNDEYQKYLLVRGNDIFLISIPS

SEQ ID NO: 582 - protein, 25 aa, Artificial Sequence
  Cyclic GFR-binding peptide
PKRGVEYQKYVKPKRGVIFLISIPS

SEQ ID NO: 583 - protein, 25 aa, Artificial Sequence
  Cyclic GFR-binding peptide
PTKGIEYQKYIKPTKGIIFLISIPS

SEQ ID NO: 584 - protein, 25 aa, Artificial Sequence
  Cyclic GFR-binding peptide
PTRGVEYQKYVKPTRGVIFLISIPS

SEQ ID NO: 585 - protein, 27 aa, Artificial Sequence
  Cyclic GFR-binding peptide
HPKIREYQKYHQGQHPKIRIFLISIPS

SEQ ID NO: 586 - protein, 27 aa, Artificial Sequence
  Cyclic GFR-binding peptide
KRVYEEYQKYLKPKKRVYEIFLISIPS

SEQ ID NO: 587 - protein, 27 aa, Artificial Sequence
  Cyclic GFR-binding peptide
KRVIEEYQKYFIPKKRVIEIFLISIPS

SEQ ID NO: 588 - protein, 25 aa, Artificial Sequence
  Cyclic GFR-binding peptide
DKHHDVVKENEDVYLMSLPKPGPTG

SEQ ID NO: 589 - protein, 25 aa, Artificial Sequence
  Cyclic GFR-binding peptide
DKHHDVVNKNEDVYLMSLPKPGPTG

SEQ ID NO: 590 - protein, 25 aa, Artificial Sequence
  Cyclic GFR-binding peptide
DKHHDVVKDYEDVYLMSLPKPGPTG

SEQ ID NO: 591 - protein, 25 aa, Artificial Sequence
  Cyclic GFR-binding peptide
DKHHDIVNSSDDVYLMSLPKPGPTG

SEQ ID NO: 592 - protein, 25 aa, Artificial Sequence
  Cyclic GFR-binding peptide
DKHHDIVNNSSDVYLMSLPKPGPTG

SEQ ID NO: 593 - protein, 21 aa, Artificial Sequence
  Cyclic GFR-binding peptide
DKHHDGGGVYLMSLPKPGPTG

SEQ ID NO: 594 - protein, 22 aa, Artificial Sequence
  Cyclic GFR-binding peptide
DKHHDGGGGVYLMSLPKPGPTG

SEQ ID NO: 595 - protein, 25 aa, Artificial Sequence
  Cyclic GFR-binding peptide
DKHHDIIQQKDNVYLMSLPKGWFWW

SEQ ID NO: 596 - protein, 25 aa, Artificial Sequence
  Cyclic GFR-binding peptide
DKHHDVVNNAADVYLMSLPKGWFWW

SEQ ID NO: 597 - protein, 25 aa, Artificial Sequence
  Cyclic GFR-binding peptide
DKHHDVVNNASDVYLMSLPKGWFWW

SEQ ID NO: 598 - protein, 21 aa, Artificial Sequence
  Cyclic GFR-binding peptide
DKHHDGGGVYLMSLPKGWFWW

SEQ ID NO: 599 - protein, 22 aa, Artificial Sequence
  Cyclic GFR-binding peptide
DKHHDGGGGVYLMSLPKGWFWW

SEQ ID NO: 600 - protein, 25 aa, Artificial Sequence
  Cyclic GFR-binding peptide
DKHHDVKPTRGVVYLMSLPKGWFWW

SEQ ID NO: 601 - protein, 25 aa, Artificial Sequence
  Cyclic GFR-binding peptide
DKHHDVVKENEDVYLMSLPKGWFWW

SEQ ID NO: 602 - protein, 19 aa, Artificial Sequence
  Cyclic GFR-binding peptide
GGGDKHHDGGGVYLMSLPK

SEQ ID NO: 603 - protein, 25 aa, Artificial Sequence
  Cyclic GFR-binding peptide
PTRGVDKHHDVKPTRGVVYLMSLPK

SEQ ID NO: 604 - protein, 27 aa, Artificial Sequence
  Cyclic GFR-binding peptide
HPKIRDKHHDHQGQHPKIRVYLMSLPK

SEQ ID NO: 605 - protein, 27 aa, Artificial Sequence
  Cyclic GFR-binding peptide
KRVYEDKHHDLKPKKRVYEVYLMSLPK

SEQ ID NO: 606 - protein, 27 aa, Artificial Sequence
  Cyclic GFR-binding peptide
KRVIEDKHHDFIPKKRVIEVYLMSLPK

SEQ ID NO: 607 - protein, 25 aa, Artificial Sequence
  Cyclic GFR-binding peptide
NSLQEVVKENEDYYVIPLPEPGPTG

SEQ ID NO: 608 - protein, 25 aa, Artificial Sequence
  Cyclic GFR-binding peptide
NSLQEVVNKNEDYYVIPLPEPGPTG

SEQ ID NO: 609 - protein, 21 aa, Artificial Sequence
  Cyclic GFR-binding peptide
NSLQEGGGYYVIPLPEPGPTG

SEQ ID NO: 610 - protein, 22 aa, Artificial Sequence
  Cyclic GFR-binding peptide
NSLQEGGGGYYVIPLPEPGPTG

SEQ ID NO: 611 - protein, 25 aa, Artificial Sequence
  Cyclic GFR-binding peptide
NSLQEIVNSSDDYYVIPLPEPGPTG

SEQ ID NO: 612 - protein, 25 aa, Artificial Sequence
  Cyclic GFR-binding peptide
NSLQEIVNNSSDYYVIPLPEPGPTG

SEQ ID NO: 613 - protein, 25 aa, Artificial Sequence
  Cyclic GFR-binding peptide
NSLQETPVGMDDYYVIPLPEPGPTG

SEQ ID NO: 614 - protein, 25 aa, Artificial Sequence
  Cyclic GFR-binding peptide
NSLQEYTVVGKDYYVIPLPEPGPTG

SEQ ID NO: 615 - protein, 25 aa, Artificial Sequence
  Cyclic GFR-binding peptide
NSLQEIIQQKDNYYVIPLPEGWFWW

SEQ ID NO: 616 - protein, 25 aa, Artificial Sequence
  Cyclic GFR-binding peptide
NSLQEVVNNAADYYVIPLPEGWFWW

SEQ ID NO: 617 - protein, 21 aa, Artificial Sequence
  Cyclic GFR-binding peptide
NSLQEGGGYYVIPLPEGWFWW

SEQ ID NO: 618 - protein, 22 aa, Artificial Sequence
  Cyclic GFR-binding peptide
NSLQEGGGGYYVIPLPEGWFWW

SEQ ID NO: 619 - protein, 25 aa, Artificial Sequence
  Cyclic GFR-binding peptide
NSLQEIKPTKGIYYVIPLPEGWFWW

SEQ ID NO: 620 - protein, 25 aa, Artificial Sequence
  Cyclic GFR-binding peptide
NSLQEVKPTRGVYYVIPLPEGWFWW

SEQ ID NO: 621 - protein, 25 aa, Artificial Sequence
  Cyclic GFR-binding peptide
NSLQEVVKENEDYYVIPLPEGWFWW

SEQ ID NO: 622 - protein, 25 aa, Artificial Sequence
  Cyclic GFR-binding peptide
NSLQEVVKDYEDYYVIPLPEPGPTG

SEQ ID NO: 623 - protein, 25 aa, Artificial Sequence
  Cyclic GFR-binding peptide
VVGKDNSLQEYTVVGKDYYVIPLPE

SEQ ID NO: 624 - protein, 25 aa, Artificial Sequence
  Cyclic GFR-binding peptide
QQKDNNSLQEIIQQKDNYYVIPLPE

SEQ ID NO: 625 - protein, 25 aa, Artificial Sequence
  Cyclic GFR-binding peptide
NNAADNSLQEVVNNAADYYVIPLPE

SEQ ID NO: 626 - protein, 25 aa, Artificial Sequence
  Cyclic GFR-binding peptide
NNASDNSLQEVVNNASDYYVIPLPE

SEQ ID NO: 627 - protein, 19 aa, Artificial Sequence
  Cyclic GFR-binding peptide
GGGNSLQEGGGYYVIPLPE

SEQ ID NO: 628 - protein, 25 aa, Artificial Sequence
  Cyclic GFR-binding peptide
NSLQEVVKENEDYYLITLPEPGPTG

SEQ ID NO: 629 - protein, 25 aa, Artificial Sequence
  Cyclic GFR-binding peptide
NSLQEVVNKNEDYYLITLPEPGPTG

SEQ ID NO: 630 - protein, 25 aa, Artificial Sequence
  Cyclic GFR-binding peptide
NSLQEVVKDYEDYYLITLPEPGPTG

SEQ ID NO: 631 - protein, 21 aa, Artificial Sequence
  Cyclic GFR-binding peptide
NSLQEGGGYYLITLPEPGPTG

SEQ ID NO: 632 - protein, 22 aa, Artificial Sequence
  Cyclic GFR-binding peptide
NSLQEGGGGYYLITLPEPGPTG

SEQ ID NO: 633 - protein, 25 aa, Artificial Sequence
  Cyclic GFR-binding peptide
NSLQEIVNNSSDYYLITLPEPGPTG

SEQ ID NO: 634 - protein, 25 aa, Artificial Sequence
  Cyclic GFR-binding peptide
NSLQETPVGMDDYYLITLPEPGPTG

SEQ ID NO: 635 - protein, 25 aa, Artificial Sequence
  Cyclic GFR-binding peptide
NSLQEYTVVGKDYYLITLPEPGPTG

SEQ ID NO: 636 - protein, 25 aa, Artificial Sequence
  Cyclic GFR-binding peptide
NSLQEIIQQKDNYYLITLPEGWFWW

SEQ ID NO: 637 - protein, 25 aa, Artificial Sequence
  Cyclic GFR-binding peptide
NSLQEVVNNAADYYLITLPEGWFWW

SEQ ID NO: 638 - protein, 25 aa, Artificial Sequence
  Cyclic GFR-binding peptide
NSLQEVVNNASDYYLITLPEGWFWW

SEQ ID NO: 639 - protein, 21 aa, Artificial Sequence
  Cyclic GFR-binding peptide
NSLQEGGGYYLITLPEGWFWW

SEQ ID NO: 640 - protein, 22 aa, Artificial Sequence
  Cyclic GFR-binding peptide
NSLQEGGGGYYLITLPEGWFWW

SEQ ID NO: 641 - protein, 25 aa, Artificial Sequence
  Cyclic GFR-binding peptide
NSLQEVKPTRGVYYLITLPEGWFWW

SEQ ID NO: 642 - protein, 25 aa, Artificial Sequence
  Cyclic GFR-binding peptide
NSLQEVVKENEDYYLITLPEGWFWW

SEQ ID NO: 643 - protein, 25 aa, Artificial Sequence
  Cyclic GFR-binding peptide
NSLQEIVNSSDDYYLITLPEPGPTG

SEQ ID NO: 644 - protein, 25 aa, Artificial Sequence
  Cyclic GFR-binding peptide
VVGKDNSLQEYTVVGKDYYLITLPE

SEQ ID NO: 645 - protein, 25 aa, Artificial Sequence
  Cyclic GFR-binding peptide
QQKDNNSLQEIIQQKDNYYLITLPE

SEQ ID NO: 646 - protein, 25 aa, Artificial Sequence
  Cyclic GFR-binding peptide
NNAADNSLQEVVNNAADYYLITLPE

SEQ ID NO: 647 - protein, 25 aa, Artificial Sequence
  Cyclic GFR-binding peptide
NNASDNSLQEVVNNASDYYLITLPE

SEQ ID NO: 648 - protein, 25 aa, Artificial Sequence
  Cyclic GFR-binding peptide
VRGNDNSLQELLVRGNDYYLITLPE

SEQ ID NO: 649 - protein, 19 aa, Artificial Sequence
  Cyclic GFR-binding peptide
GGGNSLQEGGGYYLITLPE

SEQ ID NO: 650 - protein, 25 aa, Artificial Sequence
  Cyclic GFR-binding peptide
NSLQEIIQQKDNYYLITLPEPGPTG

SEQ ID NO: 651 - protein, 25 aa, Artificial Sequence
  Cyclic GFR-binding peptide
NSLQEIKPTKGIYYLITLPEGWFWW

SEQ ID NO: 652 - protein, 25 aa, Artificial Sequence
  Cyclic GFR-binding peptide
NSLQEVVNKNEDYYLITLPEGWFWW

SEQ ID NO: 653 - protein, 27 aa, Artificial Sequence
  Cyclic GFR-binding peptide
HPKIRNSLQEHQGQHPKIRYYLITLPE

SEQ ID NO: 654 - protein, 27 aa, Artificial Sequence
  Cyclic GFR-binding peptide
KRVYENSLQELKPKKRVYEYYLITLPE

SEQ ID NO: 655 - protein, 27 aa, Artificial Sequence
  Cyclic GFR-binding peptide
KRVIENSLQEFIPKKRVIEYYLITLPE

SEQ ID NO: 656 - protein, 27 aa, Artificial Sequence
  Cyclic GFR-binding peptide
SMEGIHQGQHPKIRMIQMTINSPGPTG

SEQ ID NO: 657 - protein, 25 aa, Artificial Sequence
  Cyclic GFR-binding peptide
SMEGIVVKENEDMIQMTINSPGPTG

SEQ ID NO: 658 - protein, 20 aa, Artificial Sequence
  Cyclic GFR-binding peptide
SMEGIGGGIQMTINSPGPTG

SEQ ID NO: 659 - protein, 21 aa, Artificial Sequence
  Cyclic GFR-binding peptide
SMEGIGGGGIQMTINSPGPTG

SEQ ID NO: 660 - protein, 25 aa, Artificial Sequence
  Cyclic GFR-binding peptide
SMEGIIVNSSDDMIQMTINSPGPTG

SEQ ID NO: 661 - protein, 25 aa, Artificial Sequence
  Cyclic GFR-binding peptide
SMEGIIVNNSSDMIQMTINSPGPTG

SEQ ID NO: 662 - protein, 25 aa, Artificial Sequence
  Cyclic GFR-binding peptide
SMEGITPVGMDDMIQMTINSPGPTG

SEQ ID NO: 663 - protein, 20 aa, Artificial Sequence
  Cyclic GFR-binding peptide
SMEGIGGGIQMTINSGWFWW

SEQ ID NO: 664 - protein, 21 aa, Artificial Sequence
  Cyclic GFR-binding peptide
SMEGIGGGGIQMTINSGWFWW

SEQ ID NO: 665 - protein, 25 aa, Artificial Sequence
  Cyclic GFR-binding peptide
SMEGIVVNNAADMIQMTINSGWFWW

SEQ ID NO: 666 - protein, 25 aa, Artificial Sequence
  Cyclic GFR-binding peptide
SMEGIVVNNASDMIQMTINSGWFWW

SEQ ID NO: 667 - protein, 25 aa, Artificial Sequence
  Cyclic GFR-binding peptide
SMEGILLVRGNDMIQMTINSGWFWW

SEQ ID NO: 668 - protein, 25 aa, Artificial Sequence
  Cyclic GFR-binding peptide
SMEGIVKPKRGVMIQMTINSGWFWW

SEQ ID NO: 669 - protein, 25 aa, Artificial Sequence
  Cyclic GFR-binding peptide
SMEGIIKPTKGIMIQMTINSGWFWW

SEQ ID NO: 670 - protein, 25 aa, Artificial Sequence
  Cyclic GFR-binding peptide
SMEGIVKPTRGVMIQMTINSPGPTG

SEQ ID NO: 671 - protein, 27 aa, Artificial Sequence
  Cyclic GFR-binding peptide
SMEGILKPKKRVYEMIQMTINSPGPTG

SEQ ID NO: 672 - protein, 27 aa, Artificial Sequence
  Cyclic GFR-binding peptide
SMEGIFIPKKRVIEMIQMTINSPGPTG

SEQ ID NO: 673 - protein, 21 aa, Artificial Sequence
  Cyclic GFR-binding peptide
SMEGLGGGMIQMTINSPGPTG

SEQ ID NO: 674 - protein, 22 aa, Artificial Sequence
  Cyclic GFR-binding peptide
SMEGLGGGGMIQMTINSPGPTG

SEQ ID NO: 675 - protein, 25 aa, Artificial Sequence
  Cyclic GFR-binding peptide
NKNEDSMEGLVVNKNEDMIQMTINS

SEQ ID NO: 676 - protein, 25 aa, Artificial Sequence
  Cyclic GFR-binding peptide
KDYEDSMEGLVVKDYEDMIQMTINS

SEQ ID NO: 677 - protein, 25 aa, Artificial Sequence
  Cyclic GFR-binding peptide
NSSDDSMEGLIVNSSDDMIQMTINS

SEQ ID NO: 678 - protein, 25 aa, Artificial Sequence
  Cyclic GFR-binding peptide
NNSSDSMEGLIVNNSSDMIQMTINS

SEQ ID NO: 679 - protein, 25 aa, Artificial Sequence
  Cyclic GFR-binding peptide
VGMDDSMEGLTPVGMDDMIQMTINS

SEQ ID NO: 680 - protein, 25 aa, Artificial Sequence
  Cyclic GFR-binding peptide
VVGKDSMEGLYTVVGKDMIQMTINS

SEQ ID NO: 681 - protein, 25 aa, Artificial Sequence
  Cyclic GFR-binding peptide
QQKDNSMEGLIIQQKDNMIQMTINS

SEQ ID NO: 682 - protein, 19 aa, Artificial Sequence
  Cyclic GFR-binding peptide
GGGSMEGLGGGMIQMTINS

SEQ ID NO: 683 - protein, 27 aa, Artificial Sequence
  Cyclic GFR-binding peptide
VQVEKFIPKKRVIEVKAVKVSRPGPTG

SEQ ID NO: 684 - protein, 21 aa, Artificial Sequence
  Cyclic GFR-binding peptide
VQVEKGGGVKAVKVSRPGPTG

SEQ ID NO: 685 - protein, 25 aa, Artificial Sequence
  Cyclic GFR-binding peptide
VQVEKVVNKNEDVKAVKVSRPGPTG

SEQ ID NO: 686 - protein, 25 aa, Artificial Sequence
  Cyclic GFR-binding peptide
VQVEKVVKDYEDVKAVKVSRPGPTG

SEQ ID NO: 687 - protein, 25 aa, Artificial Sequence
  Cyclic GFR-binding peptide
VQVEKIVNSSDDVKAVKVSRGWFWW

SEQ ID NO: 688 - protein, 22 aa, Artificial Sequence
  Cyclic GFR-binding peptide
VQVEKGGGGVKAVKVSRGWFWW

SEQ ID NO: 689 - protein, 25 aa, Artificial Sequence
  Cyclic GFR-binding peptide
VQVEKIVNNSSDVKAVKVSRGWFWW

SEQ ID NO: 690 - protein, 25 aa, Artificial Sequence
  Cyclic GFR-binding peptide
VQVEKTPVGMDDVKAVKVSRGWFWW

SEQ ID NO: 691 - protein, 25 aa, Artificial Sequence
  Cyclic GFR-binding peptide
VQVEKIIQQKDNVKAVKVSRPGPTG

SEQ ID NO: 692 - protein, 25 aa, Artificial Sequence
  Cyclic GFR-binding peptide
VQVEKVVNNAADVKAVKVSRPGPTG

SEQ ID NO: 693 - protein, 19 aa, Artificial Sequence
  Cyclic GFR-binding peptide
GGGVQVEKGGGVKAVKVSR

SEQ ID NO: 694 - protein, 25 aa, Artificial Sequence
  Cyclic GFR-binding peptide
PTRGVVQVEKVKPTRGVVKAVKVSR

SEQ ID NO: 695 - protein, 27 aa, Artificial Sequence
  Cyclic GFR-binding peptide
HPKIRVQVEKHQGQHPKIRVKAVKVSR

SEQ ID NO: 696 - protein, 27 aa, Artificial Sequence
  Cyclic GFR-binding peptide
KRVIEVQVEKFIPKKRVIEVKAVKVSR

SEQ ID NO: 697 - protein, 27 aa, Artificial Sequence
  Cyclic GFR-binding peptide
VTAKKLKPKKRVYEIKRVQVPRPGPTG

SEQ ID NO: 698 - protein, 25 aa, Artificial Sequence
  Cyclic GFR-binding peptide
VTAKKVVKENEDIKRVQVPRPGPTG

SEQ ID NO: 699 - protein, 25 aa, Artificial Sequence
  Cyclic GFR-binding peptide
VTAKKVVNKNEDIKRVQVPRPGPTG

SEQ ID NO: 700 - protein, 25 aa, Artificial Sequence
  Cyclic GFR-binding peptide
VTAKKVVKDYEDIKRVQVPRPGPTG

SEQ ID NO: 701 - protein, 25 aa, Artificial Sequence
  Cyclic GFR-binding peptide
VTAKKIVNSSDDIKRVQVPRGWFWW

SEQ ID NO: 702 - protein, 21 aa, Artificial Sequence
  Cyclic GFR-binding peptide
VTAKKGGGIKRVQVPRGWFWW

SEQ ID NO: 703 - protein, 22 aa, Artificial Sequence
  Cyclic GFR-binding peptide
VTAKKGGGGIKRVQVPRGWFWW

SEQ ID NO: 704 - protein, 25 aa, Artificial Sequence
  Cyclic GFR-binding peptide
VTAKKTPVGMDDIKRVQVPRGWFWW

SEQ ID NO: 705 - protein, 25 aa, Artificial Sequence
  Cyclic GFR-binding peptide
VTAKKYTVVGKDIKRVQVPRPGPTG

SEQ ID NO: 706 - protein, 21 aa, Artificial Sequence
  Cyclic GFR-binding peptide
VTAKKGGGIKRVQVPRPGPTG

SEQ ID NO: 707 - protein, 22 aa, Artificial Sequence
  Cyclic GFR-binding peptide
VTAKKGGGGIKRVQVPRPGPTG

SEQ ID NO: 708 - protein, 25 aa, Artificial Sequence
  Cyclic GFR-binding peptide
NNASDVTAKKVVNNASDIKRVQVPR

SEQ ID NO: 709 - protein, 25 aa, Artificial Sequence
  Cyclic GFR-binding peptide
VRGNDVTAKKLLVRGNDIKRVQVPR

SEQ ID NO: 710 - protein, 25 aa, Artificial Sequence
  Cyclic GFR-binding peptide
PKRGVVTAKKVKPKRGVIKRVQVPR

SEQ ID NO: 711 - protein, 25 aa, Artificial Sequence
  Cyclic GFR-binding peptide
PTKGIVTAKKIKPTKGIIKRVQVPR

SEQ ID NO: 712 - protein, 19 aa, Artificial Sequence
  Cyclic GFR-binding peptide
GGGVTAKKGGGIKRVQVPR

SEQ ID NO: 713 - protein, 37 aa, Artificial Sequence
  Cyclic GFR-binding peptide
VPTAASAISILYLDAANNVVLKNYQAAVVEDKGVVTY

SEQ ID NO: 714 - protein, 39 aa, Artificial Sequence
  Cyclic GFR-binding peptide
VPEAASSLSMLFFEIVRKKPIFLKVYPAATVEDKGVVTY

SEQ ID NO: 715 - protein, 39 aa, Artificial Sequence
  Cyclic GFR-binding peptide
VPTVVSAISTLYLRIKPHQGQHLKNYQVVVVENDKQQII

SEQ ID NO: 716 - protein, 37 aa, Artificial Sequence
  Cyclic GFR-binding peptide
APTLLNAISMLYFNDKQQIILKKYRLLVVRNDKQQII

SEQ ID NO: 717 - protein, 37 aa, Artificial Sequence
  Cyclic GFR-binding peptide
APTGGSATSMLYYDKGVVTYLRKHRGGVVKDKGVVTY

SEQ ID NO: 718 - protein, 37 aa, Artificial Sequence
  Cyclic GFR-binding peptide
VPTSSSPISTLYIDKGVVTYLKYHYSSVAEDEYDKVV

SEQ ID NO: 719 - protein, 37 aa, Artificial Sequence
  Cyclic GFR-binding peptide
VPTAAEPISMLYLDEYDKVVKFKYEAAAVSNDKQQII

SEQ ID NO: 720 - protein, 37 aa, Artificial Sequence
  Cyclic GFR-binding peptide
TPTSSSPINTLYFDDMGVPTYGKIPSSVVDDEYDKVV

SEQ ID NO: 721 - protein, 37 aa, Artificial Sequence
  Cyclic GFR-binding peptide
VPTVVSPISMLYIDDMGVPTYKQYEVVVVEDDMGVPT

SEQ ID NO: 722 - protein, 37 aa, Artificial Sequence
  Cyclic GFR-binding peptide
APVAAKPLSMLYVDKGVVTYDHHKDAAVEEDEYDKVV

SEQ ID NO: 723 - protein, 37 aa, Artificial Sequence
  Cyclic GFR-binding peptide
VPQAAEPLPMLYYDKGVVTYEQLSNAAVRSDKGVVTY

SEQ ID NO: 724 - protein, 37 aa, Artificial Sequence
  Cyclic GFR-binding peptide
VPQQQEPLTTLYYDEYDKVVEQLSNQQVKSNDKQQII

SEQ ID NO: 725 - protein, 39 aa, Artificial Sequence
  Cyclic GFR-binding peptide
VPTMMSNITTQIMRIKPHQGQHIGEMSMMQHNDEYDKVV

SEQ ID NO: 726 - protein, 36 aa, Artificial Sequence
  Cyclic GFR-binding peptide
SRVAARSVKMAKVGGGGGGGKEVQVAAEEHGGGGGG

SEQ ID NO: 727 - protein, 37 aa, Artificial Sequence
  Cyclic GFR-binding peptide
VPTDDSATSTLYYDKGVVTYLRKHRDDEHSDKGVVTY

SEQ ID NO: 728 - protein, 37 aa, Artificial Sequence
  Cyclic GFR-binding peptide
VPTGGEPLTTLYYNDKQQIIEQLSNGGEHSDDMGVPT

SEQ ID NO: 729 - protein, 37 aa, Artificial Sequence
  Cyclic GFR-binding peptide
SRVLLRPVQMRKIDKGVVTYKKATVLLEEHDKGVVTY

SEQ ID NO: 730 - protein, 37 aa, Artificial Sequence
  Cyclic GFR-binding peptide
TQVAARPVQTRKIDDMGVPTKKATVAAEDHDKGVVTY

SEQ ID NO: 731 - protein, 36 aa, Artificial Sequence
  Cyclic GFR-binding peptide
VPQRLEPLTILYYDAANNVVEQLSNDMVKSDENEKV

SEQ ID NO: 732 - protein, 50 aa, Artificial Sequence
  Cyclic GFR-binding peptide
NDEGLESVPTGQSPISILYIRIKPHQGQHYKQYELEEHSQSESRDENEKV

SEQ ID NO: 733 - protein, 50 aa, Artificial Sequence
  Cyclic GFR-binding peptide
HVTKPTSVPTKLSPISILFIDDSSNVIYKQYENMVVESSGSHIGKTPKID

SEQ ID NO: 734 - protein, 48 aa, Artificial Sequence
  Cyclic GFR-binding peptide
ASASPSSAPVDLKPLSMLYVIGKTPKIDHHKDMIVEESKSIGKTPKID

SEQ ID NO: 735 - protein, 48 aa, Artificial Sequence
  Cyclic GFR-binding peptide
KIPKASSVPQELEPLPIVYYDENEKVVEQLSNDMVRSGSGSRDENEKV

SEQ ID NO: 736 - protein, 45 aa, Artificial Sequence
  Cyclic GFR-binding peptide
AVPKASSVPQKLEPLTILYYDSSNNVIEQLSNNMVKSIGKTPKID

SEQ ID NO: 737 - protein, 49 aa, Artificial Sequence
  Cyclic GFR-binding peptide
RVPSTSSAPVKTSNITMQIMDNGRVLLLGEMSMIVEESGSLIGKTPKID

SEQ ID NO: 738 - protein, 47 aa, Artificial Sequence
  Cyclic GFR-binding peptide
ASASPSSVSQDLRSVKVAKVIGKTPKIKEVQVMIVKSSKIGKTPKID

SEQ ID NO: 739 - protein, 47 aa, Artificial Sequence
  Cyclic GFR-binding peptide
IPKASSAPVGQRPVQMRKIDKGVVTYKKATVSSVEESGSLDKGVVTY

SEQ ID NO: 740 - protein, 45 aa, Artificial Sequence
  Cyclic GFR-binding peptide
KASSVPQEERPVQMRKIGGGGGGGKKATVMIVRSSKSSDDMGVPT

SEQ ID NO: 741 - protein, 37 aa, Artificial Sequence
  Cyclic GFR-binding peptide
VSQAARPVQTRKIDDMGVPTKKATVAAVKSDDMGVPT

SEQ ID NO: 742 - protein, 46 aa, Artificial Sequence
  Cyclic GFR-binding peptide
PTSSAPTDLRSVKMAKVEIVRKKPIFKEVQVDMVVKASGDKGVVTY

SEQ ID NO: 743 - protein, 48 aa, Artificial Sequence
  Cyclic GFR-binding peptide
KASSSRVKMSNITVQIMRIKPHQGQHIGEMSVVEEHASGSHDKGVVTY

SEQ ID NO: 744 - protein, 39 aa, Artificial Sequence
  Cyclic GFR-binding peptide
VPTAAEPLTMLYYEIVRKKPIFEQLSNMVEHSDDMGVPT

SEQ ID NO: 745 - protein, 43 aa, Artificial Sequence
  Cyclic GFR-binding peptide
EPSSSRVRLEPLTTLYYGGGGGGGEQLSNVVEEHSKDKGVVTY

SEQ ID NO: 746 - protein, 41 aa, Artificial Sequence
  Cyclic GFR-binding peptide
APVKMEPLPTVYYDDMGVPTEQLSNDMVEESGSLDDMGVPT

SEQ ID NO: 747 - protein, 47 aa, Artificial Sequence
  Cyclic GFR-binding peptide
EPSSVSQAAEPLPIVYYRIKPHQGQHEQLSNMIVKSSKSSDDMGVPT

SEQ ID NO: 748 - protein, 28 aa, Artificial Sequence
  Cyclic GFR-binding peptide
  MOD_RES (1)..(1): Xaa is C or S
XSRVVMNQYNKLIVNSSDDLYLVSIASL

SEQ ID NO: 749 - protein, 38 aa, Artificial Sequence
  Cyclic GFR-binding peptide
  MOD_RES (32)..(33): Xaa is C or S
GEVVMDRYKKLVVKENEDFYLMSIANLETPVXXAKPIK

SEQ ID NO: 750 - protein, 35 aa, Artificial Sequence
  Cyclic GFR-binding peptide
  MOD_RES (2)..(4): Xaa is C or S
RXGXEAVSMGERHKRLTPVGMDDYYLVSTASLKTP

SEQ ID NO: 751 - protein, 27 aa, Artificial Sequence
  Cyclic GFR-binding peptide
VMNYHYKLIVNSSDDKYLVSIPSLKTP

SEQ ID NO: 752 - protein, 35 aa, Artificial Sequence
  Cyclic GFR-binding peptide
  MOD_RES (2)..(4): Xaa is C or S
HXGXARVVMNQYNKLIVNSSDDLYLVSIASLQTPA

SEQ ID NO: 753 - protein, 29 aa, Artificial Sequence
  Cyclic GFR-binding peptide
  MOD_RES (26)..(27): Xaa is C or S
RHKRLVVKDYEDYYLMSTASLETPVXXAK

SEQ ID NO: 754 - protein, 24 aa, Artificial Sequence
  Cyclic GFR-binding peptide
MRYKKLIKPTKGIFYLISIANLDQ

SEQ ID NO: 755 - protein, 29 aa, Artificial Sequence
  Cyclic GFR-binding peptide
  MOD_RES (1)..(1): Xaa is C or S
XSKVVMRYKKLVKPTRGVFYLISIANLDQ

SEQ ID NO: 756 - protein, 31 aa, Artificial Sequence
  Cyclic GFR-binding peptide
  MOD_RES (2)..(2): Xaa is C or S
GXGEVVMEYHYKLVVKDYEDKYLMSIPSLET

SEQ ID NO: 757 - protein, 30 aa, Artificial Sequence
  Cyclic GFR-binding peptide
  MOD_RES (1)..(1): Xaa is C or S
XSRVIMRYKKLVKPKRGVFYLISIANLAQP

SEQ ID NO: 758 - protein, 25 aa, Artificial Sequence
  Cyclic GFR-binding peptide
QYNKLIKPTKGILYLISIASLDQSV

SEQ ID NO: 759 - protein, 38 aa, Artificial Sequence
  Cyclic GFR-binding peptide
  MOD_RES (32)..(32): Xaa is C or S
SRVVMNRHKRLIVNSSDDYYLVSTASLKTPAXTPKTVH

SEQ ID NO: 760 - protein, 33 aa, Artificial Sequence
  Cyclic GFR-binding peptide
  MOD_RES (2)..(2): Xaa is C or S
GXGEVVMDRYKKLVVKENEDFYLMSIANLETPV

SEQ ID NO: 761 - protein, 28 aa, Artificial Sequence
  Cyclic GFR-binding peptide
RVIMRYKKLVKPKRGVFYLISIANLAQP

SEQ ID NO: 762 - protein, 26 aa, Artificial Sequence
  Cyclic GFR-binding peptide
SKVIMQYNKLIKPTKGILYLISIASL

SEQ ID NO: 763 - protein, 25 aa, Artificial Sequence
  Cyclic GFR-binding peptide
VVMDRYKKLVVKENEDFYLMSIANL

SEQ ID NO: 764 - protein, 33 aa, Artificial Sequence
  Cyclic GFR-binding peptide
  MOD_RES (2)..(4): Xaa is C or S
HXGXARVVMNQYNKLIVNSSDDLYLVSIASLQT

SEQ ID NO: 765 - protein, 36 aa, Artificial Sequence
  Cyclic GFR-binding peptide
  MOD_RES (1)..(33)..(34): Xaa is C or S
XSRVVMNYHYKLIVNSSDDKYLVSIPSLKTPAXXPK

SEQ ID NO: 766 - protein, 25 aa, Artificial Sequence
  Cyclic GFR-binding peptide
VMNRHKRLIVNSSDDYYLVSTASLK

SEQ ID NO: 767 - protein, 32 aa, Artificial Sequence
  Cyclic GFR-binding peptide
  MOD_RES (1)..(32): Xaa is C or S
XSKVVMYHYKLVKPTRGVKYLISIPSLDQPVX

SEQ ID NO: 768 - protein, 27 aa, Artificial Sequence
  Cyclic GFR-binding peptide
  MOD_RES (27)..(27): Xaa is C or S
NRYKKLIVNNSSDFYLVSIANLKTPAX

SEQ ID NO: 769 - protein, 28 aa, Artificial Sequence
  Cyclic GFR-binding peptide
  MOD_RES (28)..(28): Xaa is C or S
MNRYKKLIVNSSDDFYLVSIANLQTPAX

SEQ ID NO: 770 - protein, 38 aa, Artificial Sequence
  Cyclic GFR-binding peptide
  MOD_RES (1)..(3)..(34)..(35): Xaa is C or S
XKXSRVIMQYNKLVKPKRGVLYLISIASLAQPVXXPAA

SEQ ID NO: 771 - protein, 24 aa, Artificial Sequence
  Cyclic GFR-binding peptide
RHKRLFIPKKRVIEYYLVSTASLQ

SEQ ID NO: 772 - protein, 27 aa, Artificial Sequence
  Cyclic GFR-binding peptide
IVNNSSDQYNKLIVNNSSDLYLVSIAS

SEQ ID NO: 773 - protein, 38 aa, Artificial Sequence
  Cyclic GFR-binding peptide
  MOD_RES (32)..(33): Xaa is C or S
SRVVMNRHKRLIVNSSDDYYLVSTASLKTPAXXPKPVY

SEQ ID NO: 774 - protein, 22 aa, Artificial Sequence
  Cyclic GFR-binding peptide
MRYKKLVKPKRGVFYLISIANL

SEQ ID NO: 775 - protein, 35 aa, Artificial Sequence
  Cyclic GFR-binding peptide
  MOD_RES (31)..(32): Xaa is C or S
SKVIMRYKKLIKPTKGIFYLISIANLDQSVXXPSA

SEQ ID NO: 776 - protein, 34 aa, Artificial Sequence
  Cyclic GFR-binding peptide
  MOD_RES (1)..(3): Xaa is C or S
XGXEAVSMGERYKKLTPVGMDDFYLVSIANLKTP

SEQ ID NO: 777 - protein, 42 aa, Artificial Sequence
  Cyclic GFR-binding peptide
  MOD_RES (2)..(4)..(36)..(37): Xaa is C or S
HXGXSRVVMNRYKKLIVNSSDDFYLVSIANLKTPAXXPKPVY

SEQ ID NO: 778 - protein, 30 aa, Artificial Sequence
  Cyclic GFR-binding peptide
EVVMEQYNKLVVKDYEDLYLMSIASLETPV

SEQ ID NO: 779 - protein, 29 aa, Artificial Sequence
  Cyclic GFR-binding peptide
  MOD_RES (28)..(29): Xaa is C or S
MNRYKKLIVNNSSDFYLVSIANLKTPAXX

SEQ ID NO: 780 - protein, 23 aa, Artificial Sequence
  Cyclic GFR-binding peptide
MNRYKKLIVNSSDDFYLVSIANL

SEQ ID NO: 781 - protein, 32 aa, Artificial Sequence
  Cyclic GFR-binding peptide
  MOD_RES (30)..(31): Xaa is C or S
VVMNRHKRLIVNSSDDYYLVSTASLQTPAXXP

SEQ ID NO: 782 - protein, 27 aa, Artificial Sequence
  Cyclic GFR-binding peptide
  MOD_RES (26)..(27): Xaa is C or S
RHKRLTPVGMDDYYLVSTASLKTPVXX

SEQ ID NO: 783 - protein, 35 aa, Artificial Sequence
  Cyclic GFR-binding peptide
  MOD_RES (30)..(31): Xaa is C or S
VVMNRYKKLIVNNSSDFYLVSIANLKTPAXXAKPV

SEQ ID NO: 784 - protein, 39 aa, Artificial Sequence
  Cyclic GFR-binding peptide
  MOD_RES (1)..(3)..(35)..(36): Xaa is C or S
XGXGEVVMDRYKKLVVKENEDFYLMSIANLETPVXXAKP

SEQ ID NO: 785 - protein, 38 aa, Artificial Sequence
  Cyclic GFR-binding peptide
  MOD_RES (1)..(33): Xaa is C or S
XSRVVMNRYKKLIVNSSDDFYLVSIANLKTPAXTPKTV

SEQ ID NO: 786 - protein, 35 aa, Artificial Sequence
  Cyclic GFR-binding peptide
  MOD_RES (1)..(32)..(33): Xaa is C or S
XSKVIMQYNKLIKPTKGILYLISIASLDQSVXXPS

SEQ ID NO: 787 - protein, 24 aa, Artificial Sequence
  Cyclic GFR-binding peptide
MDQYNKLVVKENEDLYLMSIASLE

SEQ ID NO: 788 - protein, 23 aa, Artificial Sequence
  Cyclic GFR-binding peptide
RHKRLVKPTRGVYYLISTASLDQ

SEQ ID NO: 789 - protein, 32 aa, Artificial Sequence
  Cyclic GFR-binding peptide
  MOD_RES (31)..(32): Xaa is C or S
SKVIMYHYKLIKPTKGIKYLISIPSLDQSVXX

SEQ ID NO: 790 - protein, 31 aa, Artificial Sequence
  Cyclic GFR-binding peptide
  MOD_RES (28)..(29): Xaa is C or S
MNYHYKLIVNSSDDKYLVSIPSLQTPAXXPK

SEQ ID NO: 791 - protein, 34 aa, Artificial Sequence
  Cyclic GFR-binding peptide
  MOD_RES (32)..(33): Xaa is C or S
GEVVMDRHKRLVVKENEDYYLMSTASLETPVXXA

SEQ ID NO: 792 - protein, 28 aa, Artificial Sequence
  Cyclic GFR-binding peptide
  MOD_RES (27)..(28): Xaa is C or S
MRHKRLVKPTRGVYYLISTASLDQPVXX

SEQ ID NO: 793 - protein, 33 aa, Artificial Sequence
  Cyclic GFR-binding peptide
  MOD_RES (2)..(4): Xaa is C or S
SXKXSKVVMRHKRLVKPTRGVYYLISTASLDQP

SEQ ID NO: 794 - protein, 31 aa, Artificial Sequence
  Cyclic GFR-binding peptide
  MOD_RES (26)..(27): Xaa is C or S
QYNKLVVKENEDLYLMSIASLETPVXXAKPI

SEQ ID NO: 795 - protein, 30 aa, Artificial Sequence
  Cyclic GFR-binding peptide
EVVMEYHYKLVVKDYEDKYLMSIPSLETPV

SEQ ID NO: 796 - protein, 37 aa, Artificial Sequence
  Cyclic GFR-binding peptide
  MOD_RES (31)..(32): Xaa is C or S
RVVMNQYNKLIVNSSDDLYLVSIASLQTPAXXPKPVT

SEQ ID NO: 797 - protein, 32 aa, Artificial Sequence
  Cyclic GFR-binding peptide
  MOD_RES (32)..(32): Xaa is C or S
GEVVMEYHYKLVVKDYEDKYLMSIPSLETPVX

SEQ ID NO: 798 - protein, 35 aa, Artificial Sequence
  Cyclic GFR-binding peptide
  MOD_RES (1)..(33)..(34): Xaa is C or S
XGEVVMERHKRLVVKDYEDYYLMSTASLETPVXXA

SEQ ID NO: 799 - protein, 32 aa, Artificial Sequence
  Cyclic GFR-binding peptide
  MOD_RES (30)..(31): Xaa is C or S
KVIMRHKRLIKPTKGIYYLISTASLDQSVXXP

SEQ ID NO: 800 - protein, 29 aa, Artificial Sequence
  Cyclic GFR-binding peptide
SRVIMRYKKLVKPKRGVFYLISIANLAQP

SEQ ID NO: 801 - protein, 35 aa, Artificial Sequence
  Cyclic GFR-binding peptide
  MOD_RES (2)..(35): Xaa is C or S
GXEAVSMGERHKRLTPVGMDDYYLVSTASLKTPVX

SEQ ID NO: 802 - protein, 36 aa, Artificial Sequence
  Cyclic GFR-binding peptide
  MOD_RES (35)..(35): Xaa is C or S
HDELTRHKRLFIPKKRVIEYYLVSTASLQVQTPRXQ

SEQ ID NO: 803 - protein, 29 aa, Artificial Sequence
  Cyclic GFR-binding peptide
HDELTYHYKLFIPKKRVIEKYLVSIPSLQ

SEQ ID NO: 804 - protein, 38 aa, Artificial Sequence
  Cyclic GFR-binding peptide
  MOD_RES (32)..(32): Xaa is C or S
SRVVMNQYNKLIVNSSDDLYLVSIASLKTPAXTPKTVH

SEQ ID NO: 805 - protein, 35 aa, Artificial Sequence
  Cyclic GFR-binding peptide
  MOD_RES (30)..(31): Xaa is C or S
RVIMRHKRLVKPKRGVYYLISTASLAQPVXXPAAS

SEQ ID NO: 806 - protein, 36 aa, Artificial Sequence
  Cyclic GFR-binding peptide
  MOD_RES (1)..(3): Xaa is C or S
XKXALHDELTQYNKLFIPKKRVIELYLVSIASLQVQ

SEQ ID NO: 807 - protein, 30 aa, Artificial Sequence
  Cyclic GFR-binding peptide
  MOD_RES (27)..(28): Xaa is C or S
ERYKKLTPVGMDDFYLVSIANLKTPVXXAK

SEQ ID NO: 808 - protein, 30 aa, Artificial Sequence
  Cyclic GFR-binding peptide
  MOD_RES (2)..(2): Xaa is C or S
KXSKVVMRYKKLVKPTRGVFYLISIANLDQ

SEQ ID NO: 809 - protein, 35 aa, Artificial Sequence
  Cyclic GFR-binding peptide
  MOD_RES (29)..(30): Xaa is C or S
VMNYHYKLIVNNSSDKYLVSIPSLKTPAXXAKPVA

SEQ ID NO: 810 - protein, 32 aa, Artificial Sequence
  Cyclic GFR-binding peptide
  MOD_RES (1)..(1): Xaa is C or S
XGEVVMEYHYKLVVKDYEDKYLMSIPSLETPV

SEQ ID NO: 811 - protein, 40 aa, Artificial Sequence
  Cyclic GFR-binding peptide
  MOD_RES (2)..(35)..(36): Xaa is C or S
GXEAVSMGEQYNKLTPVGMDDLYLVSIASLKTPVXXAKGV

SEQ ID NO: 812 - protein, 34 aa, Artificial Sequence
  Cyclic GFR-binding peptide
  MOD_RES (30)..(31): Xaa is C or S
VVMDRHKRLVVKENEDYYLMSTASLETPVXXAKP

SEQ ID NO: 813 - protein, 33 aa, Artificial Sequence
  Cyclic GFR-binding peptide
  MOD_RES (30)..(31): Xaa is C or S
VVMDRYKKLVVKENEDFYLMSIANLETPVXXAK

SEQ ID NO: 814 - protein, 38 aa, Artificial Sequence
  Cyclic GFR-binding peptide
  MOD_RES (2)..(34)..(35): Xaa is C or S
GXGEVVMERHKRLVVKDYEDYYLMSTASLETPVXXAKP

SEQ ID NO: 815 - protein, 25 aa, Artificial Sequence
  Cyclic GFR-binding peptide
NRYKKLIVNNSSDFYLVSIANLKTP

SEQ ID NO: 816 - protein, 22 aa, Artificial Sequence
  Cyclic GFR-binding peptide
MQYNKLIKPTKGILYLISIASL

SEQ ID NO: 817 - protein, 32 aa, Artificial Sequence
  Cyclic GFR-binding peptide
  MOD_RES (31)..(32): Xaa is C or S
RVVMNRYKKLIVNSSDDFYLVSIANLQTPAXX

SEQ ID NO: 818 - protein, 33 aa, Artificial Sequence
  Cyclic GFR-binding peptide
  MOD_RES (29)..(30): Xaa is C or S
VMNRYKKLIVNNSSDFYLVSIANLKTPAXXAKP

SEQ ID NO: 819 - protein, 35 aa, Artificial Sequence
  Cyclic GFR-binding peptide
  MOD_RES (2)..(4)..(35): Xaa is C or S
SXKXSKVIMQYNKLIKPTKGILYLISIASLDQSVX

SEQ ID NO: 820 - protein, 26 aa, Artificial Sequence
  Cyclic GFR-binding peptide
  MOD_RES (26)..(26): Xaa is C or S
RYKKLVVKDYEDFYLMSIANLETPVX

SEQ ID NO: 821 - protein, 26 aa, Artificial Sequence
  Cyclic GFR-binding peptide
VMNRHKRLIVNSSDDYYLVSTASLQT

SEQ ID NO: 822 - protein, 31 aa, Artificial Sequence
  Cyclic GFR-binding peptide
  MOD_RES (28)..(29): Xaa is C or S
MNRHKRLIVNSSDDYYLVSTASLQTPAXXPK

SEQ ID NO: 823 - protein, 40 aa, Artificial Sequence
  Cyclic GFR-binding peptide
  MOD_RES (1)..(3)..(36)..(37): Xaa is C or S
XGXEAVSMGERYKKLTPVGMDDFYLVSIANLKTPVXXAKG

SEQ ID NO: 824 - protein, 40 aa, Artificial Sequence
  Cyclic GFR-binding peptide
  MOD_RES (1)..(3)..(35): Xaa is C or S
XGXSRVVMNRYKKLIVNSSDDFYLVSIANLKTPAXTPKTV

SEQ ID NO: 825 - protein, 32 aa, Artificial Sequence
  Cyclic GFR-binding peptide
  MOD_RES (28)..(29): Xaa is C or S
IMQYNKLIKPTKGILYLISIASLDQSVXXPSA

SEQ ID NO: 826 - protein, 33 aa, Artificial Sequence
  Cyclic GFR-binding peptide
  MOD_RES (1)..(3): Xaa is C or S
XGXARVVMNRYKKLIVNSSDDFYLVSIANLQTP

SEQ ID NO: 827 - protein, 20 aa, Artificial Sequence
  Cyclic GFR-binding peptide
RHKRLVKPTRGVYYLISTAS

SEQ ID NO: 828 - protein, 34 aa, Artificial Sequence
  Cyclic GFR-binding peptide
  MOD_RES (1)..(1): Xaa is C or S
XALHDELTRYKKLFIPKKRVIEFYLVSIANLQVQ

SEQ ID NO: 829 - protein, 28 aa, Artificial Sequence
  Cyclic GFR-binding peptide
  MOD_RES (2)..(2): Xaa is C or S
GXSRVVMNQYNKLIVNSSDDLYLVSIAS

SEQ ID NO: 830 - protein, 37 aa, Artificial Sequence
  Cyclic GFR-binding peptide
  MOD_RES (1)..(3)..(35)..(36): Xaa is C or S
XGXAKVVMNQYNKLIVNNSSDLYLVSIASLKTPAXXA

SEQ ID NO: 831 - protein, 25 aa, Artificial Sequence
  Cyclic GFR-binding peptide
IMRYKKLIKPTKGIFYLISIANLDQ

SEQ ID NO: 832 - protein, 30 aa, Artificial Sequence
  Cyclic GFR-binding peptide
  MOD_RES (1)..(1): Xaa is C or S
XALHDELTQYNKLFIPKKRVIELYLVSIAS

SEQ ID NO: 833 - protein, 31 aa, Artificial Sequence
  Cyclic GFR-binding peptide
  MOD_RES (1)..(3): Xaa is C or S
XGXSRVVMNRHKRLIVNSSDDYYLVSTASLK

SEQ ID NO: 834 - protein, 27 aa, Artificial Sequence
  Cyclic GFR-binding peptide
IVNSSDDQYNKLIVNSSDDLYLVSIAS

SEQ ID NO: 835 - protein, 38 aa, Artificial Sequence
  Cyclic GFR-binding peptide
  MOD_RES (1)..(38): Xaa is C or S
XALHDELTRHKRLFIPKKRVIEYYLVSTASLQVQTPRX

SEQ ID NO: 836 - protein, 37 aa, Artificial Sequence
  Cyclic GFR-binding peptide
  MOD_RES (1)..(33)..(34): Xaa is C or S
XARVVMNQYNKLIVNSSDDLYLVSIASLQTPAXXPKP

SEQ ID NO: 837 - protein, 26 aa, Artificial Sequence
  Cyclic GFR-binding peptide
  MOD_RES (26)..(26): Xaa is C or S
YHYKLVVKENEDKYLMSIPSLETPVX

SEQ ID NO: 838 - protein, 30 aa, Artificial Sequence
  Cyclic GFR-binding peptide
SRVIMRHKRLVKPKRGVYYLISTASLAQPV

SEQ ID NO: 839 - protein, 33 aa, Artificial Sequence
  Cyclic GFR-binding peptide
  MOD_RES (2)..(4): Xaa is C or S
SXKXSRVIMRYKKLVKPKRGVFYLISIANLAQP

SEQ ID NO: 840 - protein, 26 aa, Artificial Sequence
  Cyclic GFR-binding peptide
SRVIMQYNKLVKPKRGVLYLISIASL

SEQ ID NO: 841 - protein, 35 aa, Artificial Sequence
  Cyclic GFR-binding peptide
  MOD_RES (29)..(30): Xaa is C or S
VMNQYNKLIVNSSDDLYLVSIASLKTPAXXPKPVY

SEQ ID NO: 842 - protein, 30 aa, Artificial Sequence
  Cyclic GFR-binding peptide
  MOD_RES (2)..(2): Xaa is C or S
GXEAVSMGERHKRLTPVGMDDYYLVSTASL

SEQ ID NO: 843 - protein, 34 aa, Artificial Sequence
  Cyclic GFR-binding peptide
  MOD_RES (31)..(32): Xaa is C or S
SKVIMQYNKLIKPTKGILYLISIASLDQSVXXPS

SEQ ID NO: 844 - protein, 28 aa, Artificial Sequence
  Cyclic GFR-binding peptide
VVMDYHYKLVVKENEDKYLMSIPSLETP

SEQ ID NO: 845 - protein, 32 aa, Artificial Sequence
  Cyclic GFR-binding peptide
  MOD_RES (2)..(4): Xaa is C or S
RXGXGEVVMERYKKLVVKDYEDFYLMSIANLE

SEQ ID NO: 846 - protein, 39 aa, Artificial Sequence
  Cyclic GFR-binding peptide
  MOD_RES (2)..(4)..(36)..(37): Xaa is C or S
RXGXGEVVMDQYNKLVVKENEDLYLMSIASLETPVXXAK

SEQ ID NO: 847 - protein, 33 aa, Artificial Sequence
  Cyclic GFR-binding peptide
  MOD_RES (2)..(33): Xaa is C or S
KXSKVIMYHYKLIKPTKGIKYLISIPSLDQSVX

SEQ ID NO: 848 - protein, 38 aa, Artificial Sequence
  Cyclic GFR-binding peptide
  MOD_RES (1)..(3)..(35)..(36): Xaa is C or S
XGXARVVMNRYKKLIVNSSDDFYLVSIANLQTPAXXPK

SEQ ID NO: 849 - protein, 27 aa, Artificial Sequence
  Cyclic GFR-binding peptide
RVVMNRHKRLIVNSSDDYYLVSTASLQ

SEQ ID NO: 850 - protein, 36 aa, Artificial Sequence
  Cyclic GFR-binding peptide
  MOD_RES (36)..(36): Xaa is C or S
LHDELTYHYKLFIPKKRVIEKYLVSIPSLQVQTPRX

SEQ ID NO: 851 - protein, 30 aa, Artificial Sequence
  Cyclic GFR-binding peptide
  MOD_RES (29)..(30): Xaa is C or S
VMDRYKKLVVKENEDFYLMSIANLETPVXX

SEQ ID NO: 852 - protein, 27 aa, Artificial Sequence
  Cyclic GFR-binding peptide
GEVVMERYKKLVVKDYEDFYLMSIANL

SEQ ID NO: 853 - protein, 28 aa, Artificial Sequence
  Cyclic GFR-binding peptide
VVMEQYNKLVVKDYEDLYLMSIASLETP

SEQ ID NO: 854 - protein, 21 aa, Artificial Sequence
  Cyclic GFR-binding peptide
DRHKRLVVKENEDYYLMSTAS

SEQ ID NO: 855 - protein, 31 aa, Artificial Sequence
  Cyclic GFR-binding peptide
  MOD_RES (29)..(30): Xaa is C or S
VIMQYNKLIKPTKGILYLISIASLDQSVXXP

SEQ ID NO: 856 - protein, 27 aa, Artificial Sequence
  Cyclic GFR-binding peptide
  MOD_RES (2)..(2): Xaa is C or S
KXSKVIMRYKKLIKPTKGIFYLISIAN

SEQ ID NO: 857 - protein, 21 aa, Artificial Sequence
  Cyclic GFR-binding peptide
MQYNKLVKPKRGVLYLISIAS

SEQ ID NO: 858 - protein, 28 aa, Artificial Sequence
  Cyclic GFR-binding peptide
RYKKLFIPKKRVIEFYLVSIANLQVQTP

SEQ ID NO: 859 - protein, 32 aa, Artificial Sequence
  Cyclic GFR-binding peptide
  MOD_RES (2)..(2): Xaa is C or S
GXSRVVMNRYKKLIVNSSDDFYLVSIANLKTP

SEQ ID NO: 860 - protein, 31 aa, Artificial Sequence
  Cyclic GFR-binding peptide
  MOD_RES (2)..(4): Xaa is C or S
SXKXSKVVMRHKRLVKPTRGVYYLISTASLD

SEQ ID NO: 861 - protein, 34 aa, Artificial Sequence
  Cyclic GFR-binding peptide
  MOD_RES (1)..(33)..(34): Xaa is C or S
XSRVVMNQYNKLIVNSSDDLYLVSIASLKTPAXX

SEQ ID NO: 862 - protein, 29 aa, Artificial Sequence
  Cyclic GFR-binding peptide
VSMGERHKRLTPVGMDDYYLVSTASLKTP

SEQ ID NO: 863 - protein, 42 aa, Artificial Sequence
  Cyclic GFR-binding peptide
  MOD_RES (1)..(3)..(40): Xaa is C or S
XKXALHDELTRYKKLFIPKKRVIEFYLVSIANLQVQTPRXQV

SEQ ID NO: 864 - protein, 30 aa, Artificial Sequence
  Cyclic GFR-binding peptide
  MOD_RES (29)..(30): Xaa is C or S
VIMQYNKLVKPKRGVLYLISIASLAQPVXX

SEQ ID NO: 865 - protein, 33 aa, Artificial Sequence
  Cyclic GFR-binding peptide
HDELTRHKRLFIPKKRVIEYYLVSTASLQVQTP

SEQ ID NO: 866 - protein, 34 aa, Artificial Sequence
  Cyclic GFR-binding peptide
  MOD_RES (32)..(33): Xaa is C or S
GEVVMDQYNKLVVKENEDLYLMSIASLETPVXXA

SEQ ID NO: 867 - protein, 30 aa, Artificial Sequence
  Cyclic GFR-binding peptide
  MOD_RES (30)..(30): Xaa is C or S
SMGERYKKLTPVGMDDFYLVSIANLKTPVX

SEQ ID NO: 868 - protein, 31 aa, Artificial Sequence
  Cyclic GFR-binding peptide
EAVSMGERYKKLTPVGMDDFYLVSIANLKTP

SEQ ID NO: 869 - protein, 33 aa, Artificial Sequence
  Cyclic GFR-binding peptide
  MOD_RES (2)..(2): Xaa is C or S
GXARVVMNRHKRLIVNSSDDYYLVSTASLQTPA

SEQ ID NO: 870 - protein, 26 aa, Artificial Sequence
  Cyclic GFR-binding peptide
VVMNYHYKLIVNNSSDKYLVSIPSLK

SEQ ID NO: 871 - protein, 37 aa, Artificial Sequence
  Cyclic GFR-binding peptide
  MOD_RES (32)..(33): Xaa is C or S
GEVVMEYHYKLVVKDYEDKYLMSIPSLETPVXXAKPI

SEQ ID NO: 872 - protein, 34 aa, Artificial Sequence
  Cyclic GFR-binding peptide
  MOD_RES (28)..(29): Xaa is C or S
VMQYNKLVKPTRGVLYLISIASLDQPVXXPSASA

SEQ ID NO: 873 - protein, 34 aa, Artificial Sequence
  Cyclic GFR-binding peptide
  MOD_RES (30)..(30): Xaa is C or S
VVMNQYNKLIVNSSDDLYLVSIASLKTPAXTPKT

SEQ ID NO: 874 - protein, 34 aa, Artificial Sequence
  Cyclic GFR-binding peptide
HDELTRYKKLFIPKKRVIEFYLVSIANLQVQTPR

SEQ ID NO: 875 - protein, 29 aa, Artificial Sequence
  Cyclic GFR-binding peptide
  MOD_RES (2)..(2): Xaa is C or S
GXSRVVMNQYNKLIVNSSDDLYLVSIASL

SEQ ID NO: 876 - protein, 38 aa, Artificial Sequence
  Cyclic GFR-binding peptide
  MOD_RES (1)..(33)..(34): Xaa is C or S
XAKVVMNYHYKLIVNNSSDKYLVSIPSLKTPAXXAKPV

SEQ ID NO: 877 - protein, 31 aa, Artificial Sequence
  Cyclic GFR-binding peptide
  MOD_RES (27)..(28): Xaa is C or S
MRYKKLVKPTRGVFYLISIANLDQPVXXPSA

SEQ ID NO: 878 - protein, 31 aa, Artificial Sequence
  Cyclic GFR-binding peptide
  MOD_RES (28)..(29): Xaa is C or S
GEQYNKLTPVGMDDLYLVSIASLKTPVXXAK

SEQ ID NO: 879 - protein, 39 aa, Artificial Sequence
  Cyclic GFR-binding peptide
  MOD_RES (2)..(34)..(35): Xaa is C or S
GXSRVVMNRHKRLIVNSSDDYYLVSTASLKTPAXXPKPV

SEQ ID NO: 880 - protein, 37 aa, Artificial Sequence
  Cyclic GFR-binding peptide
  MOD_RES (1)..(33)..(34): Xaa is C or S
XGEVVMEQYNKLVVKDYEDLYLMSIASLETPVXXAKP

SEQ ID NO: 881 - protein, 37 aa, Artificial Sequence
  Cyclic GFR-binding peptide
  MOD_RES (2)..(4)..(37): Xaa is C or S
RXGXEAVSMGERHKRLTPVGMDDYYLVSTASLKTPVX

SEQ ID NO: 882 - protein, 28 aa, Artificial Sequence
  Cyclic GFR-binding peptide
  MOD_RES (26)..(27): Xaa is C or S
YHYKLVKPKRGVKYLISIPSLAQPVXXP

SEQ ID NO: 883 - protein, 28 aa, Artificial Sequence
  Cyclic GFR-binding peptide
  MOD_RES (26)..(27): Xaa is C or S
RYKKLIVNSSDDFYLVSIANLKTPAXXP

SEQ ID NO: 884 - protein, 36 aa, Artificial Sequence
  Cyclic GFR-binding peptide
  MOD_RES (30)..(31): Xaa is C or S
VVMERHKRLVVKDYEDYYLMSTASLETPVXXAKPIS

SEQ ID NO: 885 - protein, 26 aa, Artificial Sequence
  Cyclic GFR-binding peptide
KVVMYHYKLVKPTRGVKYLISIPSLD

SEQ ID NO: 886 - protein, 30 aa, Artificial Sequence
  Cyclic GFR-binding peptide
  MOD_RES (28)..(29): Xaa is C or S
GERYKKLTPVGMDDFYLVSIANLKTPVXXA

SEQ ID NO: 887 - protein, 37 aa, Artificial Sequence
  Cyclic GFR-binding peptide
  MOD_RES (31)..(32): Xaa is C or S
RVVMNYHYKLIVNSSDDKYLVSIPSLQTPAXXPKPVT

SEQ ID NO: 888 - protein, 36 aa, Artificial Sequence
  Cyclic GFR-binding peptide
  MOD_RES (1)..(3)..(34)..(35): Xaa is C or S
XKXSKVVMYHYKLVKPTRGVKYLISIPSLDQPVXXP

SEQ ID NO: 889 - protein, 23 aa, Artificial Sequence
  Cyclic GFR-binding peptide
QYNKLTPVGMDDLYLVSIASLKT

SEQ ID NO: 890 - protein, 29 aa, Artificial Sequence
  Cyclic GFR-binding peptide
  MOD_RES (26)..(27): Xaa is C or S
QYNKLVVKENEDLYLMSIASLETPVXXAK

SEQ ID NO: 891 - protein, 28 aa, Artificial Sequence
  Cyclic GFR-binding peptide
SRVIMRYKKLVKPKRGVFYLISIANLAQ

SEQ ID NO: 892 - protein, 27 aa, Artificial Sequence
  Cyclic GFR-binding peptide
  MOD_RES (1)..(1): Xaa is C or S
XAKVVMNRYKKLIVNNSSDFYLVSIAN

SEQ ID NO: 893 - protein, 30 aa, Artificial Sequence
  Cyclic GFR-binding peptide
  MOD_RES (2)..(2): Xaa is C or S
GXARVVMNYHYKLIVNSSDDKYLVSIPSLQ

SEQ ID NO: 894 - protein, 28 aa, Artificial Sequence
  Cyclic GFR-binding peptide
VVMNYHYKLIVNSSDDKYLVSIPSLKTP

SEQ ID NO: 895 - protein, 26 aa, Artificial Sequence
  Cyclic GFR-binding peptide
VSMGEQYNKLTPVGMDDLYLVSIASL

SEQ ID NO: 896 - protein, 30 aa, Artificial Sequence
  Cyclic GFR-binding peptide
  MOD_RES (27)..(28): Xaa is C or S
NRYKKLIVNSSDDFYLVSIANLQTPAXXPK

SEQ ID NO: 897 - protein, 35 aa, Artificial Sequence
  Cyclic GFR-binding peptide
  MOD_RES (1)..(32)..(33): Xaa is C or S
XSKVIMRYKKLIKPTKGIFYLISIANLDQSVXXPS

SEQ ID NO: 898 - protein, 27 aa, Artificial Sequence
  Cyclic GFR-binding peptide
VVMNRYKKLIVNSSDDFYLVSIANLQT

SEQ ID NO: 899 - protein, 40 aa, Artificial Sequence
  Cyclic GFR-binding peptide
  MOD_RES (36)..(36): Xaa is C or S
LHDELTYHYKLFIPKKRVIEKYLVSIPSLQVQTPRXQVNR

SEQ ID NO: 900 - protein, 35 aa, Artificial Sequence
  Cyclic GFR-binding peptide
  MOD_RES (1)..(3)..(35): Xaa is C or S
XGXGEVVMDYHYKLVVKENEDKYLMSIPSLETPVX

SEQ ID NO: 901 - protein, 31 aa, Artificial Sequence
  Cyclic GFR-binding peptide
  MOD_RES (26)..(27): Xaa is C or S
RHKRLVVKDYEDYYLMSTASLETPVXXAKPI

SEQ ID NO: 902 - protein, 31 aa, Artificial Sequence
  Cyclic GFR-binding peptide
EAVSMGEQYNKLTPVGMDDLYLVSIASLKTP

SEQ ID NO: 903 - protein, 23 aa, Artificial Sequence
  Cyclic GFR-binding peptide
EYHYKLVVKDYEDKYLMSIPSLE

SEQ ID NO: 904 - protein, 32 aa, Artificial Sequence
  Cyclic GFR-binding peptide
  MOD_RES (2)..(2): Xaa is C or S
GXGEVVMERYKKLVVKDYEDFYLMSIANLETP

SEQ ID NO: 905 - protein, 38 aa, Artificial Sequence
  Cyclic GFR-binding peptide
  MOD_RES (37)..(37): Xaa is C or S
ALHDELTRYKKLFIPKKRVIEFYLVSIANLQVQTPRXQ

SEQ ID NO: 906 - protein, 27 aa, Artificial Sequence
  Cyclic GFR-binding peptide
VMNYHYKLIVNNSSDKYLVSIPSLKTP

SEQ ID NO: 907 - protein, 34 aa, Artificial Sequence
  Cyclic GFR-binding peptide
  MOD_RES (1)..(32)..(33): Xaa is C or S
XSKVIMRHKRLIKPTKGIYYLISTASLDQSVXXP

SEQ ID NO: 908 - protein, 25 aa, Artificial Sequence
  Cyclic GFR-binding peptide
VMNQYNKLIVNSSDDLYLVSIASLK

SEQ ID NO: 909 - protein, 30 aa, Artificial Sequence
  Cyclic GFR-binding peptide
RVVMNRHKRLIVNSSDDYYLVSTASLKTPA

SEQ ID NO: 910 - protein, 41 aa, Artificial Sequence
  Cyclic GFR-binding peptide
  MOD_RES (1)..(3)..(35)..(36): Xaa is C or S
XGXARVVMNYHYKLIVNSSDDKYLVSIPSLQTPAXXPKPVT

SEQ ID NO: 911 - protein, 38 aa, Artificial Sequence
  Cyclic GFR-binding peptide
  MOD_RES (2)..(4)..(36)..(37): Xaa is C or S
HXGXAKVVMNRYKKLIVNNSSDFYLVSIANLKTPAXXA

SEQ ID NO: 912 - protein, 22 aa, Artificial Sequence
  Cyclic GFR-binding peptide
MRHKRLVKPKRGVYYLISTASL

SEQ ID NO: 913 - protein, 25 aa, Artificial Sequence
  Cyclic GFR-binding peptide
MNRHKRLIVNSSDDYYLVSTASLQT

SEQ ID NO: 914 - protein, 25 aa, Artificial Sequence
  Cyclic GFR-binding peptide
RVIMYHYKLVKPKRGVKYLISIPSL

SEQ ID NO: 915 - protein, 27 aa, Artificial Sequence
  Cyclic GFR-binding peptide
VVMNQYNKLIVNNSSDLYLVSIASLKT

SEQ ID NO: 916 - protein, 36 aa, Artificial Sequence
  Cyclic GFR-binding peptide
  MOD_RES (2)..(34)..(35): Xaa is C or S
GXARVVMNRHKRLIVNSSDDYYLVSTASLQTPAXXP

SEQ ID NO: 917 - protein, 23 aa, Artificial Sequence
  Cyclic GFR-binding peptide
MDRYKKLVVKENEDFYLMSIANL

SEQ ID NO: 918 - protein, 40 aa, Artificial Sequence
  Cyclic GFR-binding peptide
  MOD_RES (2)..(4)..(36)..(37): Xaa is C or S
HXGXARVVMNYHYKLIVNSSDDKYLVSIPSLQTPAXXPKP

SEQ ID NO: 919 - protein, 32 aa, Artificial Sequence
  Cyclic GFR-binding peptide
  MOD_RES (30)..(31): Xaa is C or S
VVMNQYNKLIVNNSSDLYLVSIASLKTPAXXA

SEQ ID NO: 920 - protein, 28 aa, Artificial Sequence
  Cyclic GFR-binding peptide
EAVSMGERHKRLTPVGMDDYYLVSTASL

SEQ ID NO: 921 - protein, 29 aa, Artificial Sequence
  Cyclic GFR-binding peptide
KVVMRYKKLVKPTRGVFYLISIANLDQPV

SEQ ID NO: 922 - protein, 25 aa, Artificial Sequence
  Cyclic GFR-binding peptide
SKVIMYHYKLIKPTKGIKYLISIPS

SEQ ID NO: 923 - protein, 29 aa, Artificial Sequence
  Cyclic GFR-binding peptide
  MOD_RES (2)..(2): Xaa is C or S
KXSRVIMQYNKLVKPKRGVLYLISIASLA

SEQ ID NO: 924 - protein, 32 aa, Artificial Sequence
  Cyclic GFR-binding peptide
  MOD_RES (31)..(31): Xaa is C or S
RVVMNQYNKLIVNSSDDLYLVSIASLKTPAXT

SEQ ID NO: 925 - protein, 41 aa, Artificial Sequence
  Cyclic GFR-binding peptide
  MOD_RES (1)..(3)..(35)..(36): Xaa is C or S
XGXGEVVMEQYNKLVVKDYEDLYLMSIASLETPVXXAKPIS

SEQ ID NO: 926 - protein, 34 aa, Artificial Sequence
  Cyclic GFR-binding peptide
  MOD_RES (31)..(32): Xaa is C or S
SKVIMYHYKLIKPTKGIKYLISIPSLDQSVXXPS

SEQ ID NO: 927 - protein, 38 aa, Artificial Sequence
  Cyclic GFR-binding peptide
  MOD_RES (2)..(4)..(36)..(37): Xaa is C or S
RXGXGEVVMDYHYKLVVKENEDKYLMSIPSLETPVXXA

SEQ ID NO: 928 - protein, 30 aa, Artificial Sequence
  Cyclic GFR-binding peptide
  MOD_RES (1)..(3): Xaa is C or S
XGXGEVVMEQYNKLVVKDYEDLYLMSIASL

SEQ ID NO: 929 - protein, 32 aa, Artificial Sequence
  Cyclic GFR-binding peptide
DELTYHYKLFIPKKRVIEKYLVSIPSLQVQTP

SEQ ID NO: 930 - protein, 29 aa, Artificial Sequence
  Cyclic GFR-binding peptide
SRVVMNRYKKLIVNSSDDFYLVSIANLKT

SEQ ID NO: 931 - protein, 41 aa, Artificial Sequence
  Cyclic GFR-binding peptide
  MOD_RES (37)..(37): Xaa is C or S
ALHDELTRHKRLFIPKKRVIEYYLVSTASLQVQTPRXQVNR

SEQ ID NO: 932 - protein, 36 aa, Artificial Sequence
  Cyclic GFR-binding peptide
  MOD_RES (35)..(35): Xaa is C or S
HDELTYHYKLFIPKKRVIEKYLVSIPSLQVQTPRXQ

SEQ ID NO: 933 - protein, 39 aa, Artificial Sequence
  Cyclic GFR-binding peptide
  MOD_RES (1)..(3)..(35)..(36): Xaa is C or S
XGXARVVMNYHYKLIVNSSDDKYLVSIPSLQTPAXXPKP

SEQ ID NO: 934 - protein, 29 aa, Artificial Sequence
  Cyclic GFR-binding peptide
  MOD_RES (1)..(3): Xaa is C or S
XGXSRVVMNQYNKLIVNSSDDLYLVSIAS

SEQ ID NO: 935 - protein, 32 aa, Artificial Sequence
  Cyclic GFR-binding peptide
  MOD_RES (31)..(32): Xaa is C or S
VSMGERYKKLTPVGMDDFYLVSIANLKTPVXX

SEQ ID NO: 936 - protein, 38 aa, Artificial Sequence
  Cyclic GFR-binding peptide
  MOD_RES (1)..(33)..(34): Xaa is C or S
XARVVMNYHYKLIVNSSDDKYLVSIPSLQTPAXXPKPV

SEQ ID NO: 937 - protein, 32 aa, Artificial Sequence
  Cyclic GFR-binding peptide
  MOD_RES (29)..(30): Xaa is C or S
VMNYHYKLIVNNSSDKYLVSIPSLKTPAXXAK

SEQ ID NO: 938 - protein, 36 aa, Artificial Sequence
  Cyclic GFR-binding peptide
  MOD_RES (1)..(32)..(33): Xaa is C or S
XSKVIMRYKKLIKPTKGIFYLISIANLDQSVXXPSA

SEQ ID NO: 939 - protein, 26 aa, Artificial Sequence
  Cyclic GFR-binding peptide
MDRYKKLVVKENEDFYLMSIANLETP

SEQ ID NO: 940 - protein, 37 aa, Artificial Sequence
  Cyclic GFR-binding peptide
  MOD_RES (1)..(3)..(34)..(35): Xaa is C or S
XKXSKVVMRHKRLVKPTRGVYYLISTASLDQPVXXPS

SEQ ID NO: 941 - protein, 40 aa, Artificial Sequence
  Cyclic GFR-binding peptide
  MOD_RES (2)..(4)..(36)..(37): Xaa is C or S
RXGXGEVVMEYHYKLVVKDYEDKYLMSIPSLETPVXXAKP

SEQ ID NO: 942 - protein, 29 aa, Artificial Sequence
  Cyclic GFR-binding peptide
ARVVMNRHKRLIVNSSDDYYLVSTASLQT

SEQ ID NO: 943 - protein, 41 aa, Artificial Sequence
  Cyclic GFR-binding peptide
  MOD_RES (1)..(38): Xaa is C or S
XALHDELTRYKKLFIPKKRVIEFYLVSIANLQVQTPRXQVN

SEQ ID NO: 944 - protein, 35 aa, Artificial Sequence
  Cyclic GFR-binding peptide
  MOD_RES (29)..(30): Xaa is C or S
VMDRYKKLVVKENEDFYLMSIANLETPVXXAKPIK

SEQ ID NO: 945 - protein, 29 aa, Artificial Sequence
  Cyclic GFR-binding peptide
ARVVMNQYNKLIVNSSDDLYLVSIASLQT

SEQ ID NO: 946 - protein, 34 aa, Artificial Sequence
  Cyclic GFR-binding peptide
  MOD_RES (29)..(30): Xaa is C or S
VVMRHKRLVKPTRGVYYLISTASLDQPVXXPSAS

SEQ ID NO: 947 - protein, 24 aa, Artificial Sequence
  Cyclic GFR-binding peptide
SMGEQYNKLTPVGMDDLYLVSIAS

SEQ ID NO: 948 - protein, 28 aa, Artificial Sequence
  Cyclic GFR-binding peptide
  MOD_RES (26)..(27): Xaa is C or S
YHYKLIVNSSDDKYLVSIPSLKTPAXXP

SEQ ID NO: 949 - protein, 33 aa, Artificial Sequence
  Cyclic GFR-binding peptide
  MOD_RES (29)..(30): Xaa is C or S
VMNYHYKLIVNSSDDKYLVSIPSLQTPAXXPKP

SEQ ID NO: 950 - protein, 36 aa, Artificial Sequence
  Cyclic GFR-binding peptide
  MOD_RES (1)..(33)..(34): Xaa is C or S
XGEVVMEYHYKLVVKDYEDKYLMSIPSLETPVXXAK

SEQ ID NO: 951 - protein, 32 aa, Artificial Sequence
  Cyclic GFR-binding peptide
  MOD_RES (1)..(3): Xaa is C or S
XGXSRVVMNRYKKLIVNSSDDFYLVSIANLKT

SEQ ID NO: 952 - protein, 32 aa, Artificial Sequence
  Cyclic GFR-binding peptide
  MOD_RES (32)..(32): Xaa is C or S
AKVVMNYHYKLIVNNSSDKYLVSIPSLKTPAX

SEQ ID NO: 953 - protein, 37 aa, Artificial Sequence
  Cyclic GFR-binding peptide
  MOD_RES (2)..(4)..(36)..(37): Xaa is C or S
RXGXGEVVMERHKRLVVKDYEDYYLMSTASLETPVXX

SEQ ID NO: 954 - protein, 41 aa, Artificial Sequence
  Cyclic GFR-binding peptide
  MOD_RES (37)..(37): Xaa is C or S
ALHDELTQYNKLFIPKKRVIELYLVSIASLQVQTPRXQVNR

SEQ ID NO: 955 - protein, 25 aa, Artificial Sequence
  Cyclic GFR-binding peptide
VIMQYNKLIKPTKGILYLISIASLD

SEQ ID NO: 956 - protein, 26 aa, Artificial Sequence
  Cyclic GFR-binding peptide
  MOD_RES (26)..(26): Xaa is C or S
RHKRLVVKENEDYYLMSTASLETPVX

SEQ ID NO: 957 - protein, 27 aa, Artificial Sequence
  Cyclic GFR-binding peptide
  MOD_RES (26)..(27): Xaa is C or S
RYKKLVKPTRGVFYLISIANLDQPVXX

SEQ ID NO: 958 - protein, 35 aa, Artificial Sequence
  Cyclic GFR-binding peptide
  MOD_RES (1)..(33)..(34): Xaa is C or S
XARVVMNRHKRLIVNSSDDYYLVSTASLQTPAXXP

SEQ ID NO: 959 - protein, 32 aa, Artificial Sequence
  Cyclic GFR-binding peptide
  MOD_RES (31)..(31): Xaa is C or S
TRHKRLFIPKKRVIEYYLVSTASLQVQTPRXQ

SEQ ID NO: 960 - protein, 23 aa, Artificial Sequence
  Cyclic GFR-binding peptide
NRYKKLIVNSSDDFYLVSIANLK

SEQ ID NO: 961 - protein, 31 aa, Artificial Sequence
  Cyclic GFR-binding peptide
  MOD_RES (26)..(27): Xaa is C or S
YHYKLVVKDYEDKYLMSIPSLETPVXXAKPI

SEQ ID NO: 962 - protein, 25 aa, Artificial Sequence
  Cyclic GFR-binding peptide
SRVIMQYNKLVKPKRGVLYLISIAS

SEQ ID NO: 963 - protein, 34 aa, Artificial Sequence
  Cyclic GFR-binding peptide
  MOD_RES (1)..(3): Xaa is C or S
XKXALHDELTRYKKLFIPKKRVIEFYLVSIANLQ

SEQ ID NO: 964 - protein, 27 aa, Artificial Sequence
  Cyclic GFR-binding peptide
VMYHYKLVKPTRGVKYLISIPSLDQPV

SEQ ID NO: 965 - protein, 32 aa, Artificial Sequence
  Cyclic GFR-binding peptide
  MOD_RES (30)..(30): Xaa is C or S
RHKRLFIPKKRVIEYYLVSTASLQVQTPRXQV

SEQ ID NO: 966 - protein, 31 aa, Artificial Sequence
  Cyclic GFR-binding peptide
  MOD_RES (2)..(4): Xaa is C or S
SXKXSKVVMQYNKLVKPTRGVLYLISIASLD

SEQ ID NO: 967 - protein, 33 aa, Artificial Sequence
  Cyclic GFR-binding peptide
  MOD_RES (31)..(32): Xaa is C or S
EVVMDRYKKLVVKENEDFYLMSIANLETPVXXA

SEQ ID NO: 968 - protein, 29 aa, Artificial Sequence
  Cyclic GFR-binding peptide
LTRYKKLFIPKKRVIEFYLVSIANLQVQT

SEQ ID NO: 969 - protein, 34 aa, Artificial Sequence
  Cyclic GFR-binding peptide
  MOD_RES (1)..(3)..(34): Xaa is C or S
XKXSRVIMQYNKLVKPKRGVLYLISIASLAQPVX

SEQ ID NO: 970 - protein, 35 aa, Artificial Sequence
  Cyclic GFR-binding peptide
  MOD_RES (29)..(30): Xaa is C or S
VMNQYNKLIVNNSSDLYLVSIASLKTPAXXAKPVA

SEQ ID NO: 971 - protein, 31 aa, Artificial Sequence
  Cyclic GFR-binding peptide
  MOD_RES (30)..(30): Xaa is C or S
YHYKLFIPKKRVIEKYLVSIPSLQVQTPRXQ

SEQ ID NO: 972 - protein, 36 aa, Artificial Sequence
  Cyclic GFR-binding peptide
  MOD_RES (33)..(34): Xaa is C or S
EAVSMGERHKRLTPVGMDDYYLVSTASLKTPVXXAK

SEQ ID NO: 973 - protein, 34 aa, Artificial Sequence
  Cyclic GFR-binding peptide
  MOD_RES (29)..(30): Xaa is C or S
VMEYHYKLVVKDYEDKYLMSIPSLETPVXXAKPI

SEQ ID NO: 974 - protein, 29 aa, Artificial Sequence
  Cyclic GFR-binding peptide
KVIMQYNKLIKPTKGILYLISIASLDQSV

SEQ ID NO: 975 - protein, 30 aa, Artificial Sequence
  Cyclic GFR-binding peptide
  MOD_RES (2)..(2): Xaa is C or S
KXSKVIMQYNKLIKPTKGILYLISIASLDQ

SEQ ID NO: 976 - protein, 25 aa, Artificial Sequence
  Cyclic GFR-binding peptide
SKVIMQYNKLIKPTKGILYLISIAS

SEQ ID NO: 977 - protein, 35 aa, Artificial Sequence
  Cyclic GFR-binding peptide
  MOD_RES (31)..(32): Xaa is C or S
EVVMERHKRLVVKDYEDYYLMSTASLETPVXXAKP

SEQ ID NO: 978 - protein, 37 aa, Artificial Sequence
  Cyclic GFR-binding peptide
  MOD_RES (2)..(2): Xaa is C or S
KXALHDELTRHKRLFIPKKRVIEYYLVSTASLQVQTP

SEQ ID NO: 979 - protein, 26 aa, Artificial Sequence
  Cyclic GFR-binding peptide
NYHYKLIVNSSDDKYLVSIPSLQTPA

SEQ ID NO: 980 - protein, 25 aa, Artificial Sequence
  Cyclic GFR-binding peptide
VVMNQYNKLIVNNSSDLYLVSIASL

SEQ ID NO: 981 - protein, 28 aa, Artificial Sequence
  Cyclic GFR-binding peptide
  MOD_RES (28)..(28): Xaa is C or S
GERYKKLTPVGMDDFYLVSIANLKTPVX

SEQ ID NO: 982 - protein, 35 aa, Artificial Sequence
  Cyclic GFR-binding peptide
  MOD_RES (2)..(2): Xaa is C or S
KXALHDELTYHYKLFIPKKRVIEKYLVSIPSLQVQ

SEQ ID NO: 983 - protein, 29 aa, Artificial Sequence
  Cyclic GFR-binding peptide
TQYNKLFIPKKRVIELYLVSIASLQVQTP

SEQ ID NO: 984 - protein, 25 aa, Artificial Sequence
  Cyclic GFR-binding peptide
VSMGEQYNKLTPVGMDDLYLVSIAS

SEQ ID NO: 985 - protein, 41 aa, Artificial Sequence
  Cyclic GFR-binding peptide
  MOD_RES (1)..(3)..(40): Xaa is C or S
XKXALHDELTYHYKLFIPKKRVIEKYLVSIPSLQVQTPRXQ

SEQ ID NO: 986 - protein, 31 aa, Artificial Sequence
  Cyclic GFR-binding peptide
  MOD_RES (31)..(31): Xaa is C or S
EVVMDRYKKLVVKENEDFYLMSIANLETPVX

SEQ ID NO: 987 - protein, 26 aa, Artificial Sequence
  Cyclic GFR-binding peptide
MQYNKLIKPTKGILYLISIASLDQSV

SEQ ID NO: 988 - protein, 31 aa, Artificial Sequence
  Cyclic GFR-binding peptide
  MOD_RES (27)..(28): Xaa is C or S
DRYKKLVVKENEDFYLMSIANLETPVXXAKP

SEQ ID NO: 989 - protein, 28 aa, Artificial Sequence
  Cyclic GFR-binding peptide
  MOD_RES (27)..(28): Xaa is C or S
MRHKRLIKPTKGIYYLISTASLDQSVXX

SEQ ID NO: 990 - protein, 27 aa, Artificial Sequence
  Cyclic GFR-binding peptide
RVVMNRYKKLIVNSSDDFYLVSIANLK

SEQ ID NO: 991 - protein, 34 aa, Artificial Sequence
  Cyclic GFR-binding peptide
  MOD_RES (31)..(32): Xaa is C or S
VSMGEQYNKLTPVGMDDLYLVSIASLKTPVXXAK

SEQ ID NO: 992 - protein, 33 aa, Artificial Sequence
  Cyclic GFR-binding peptide
  MOD_RES (32)..(32): Xaa is C or S
SRVVMNRHKRLIVNSSDDYYLVSTASLKTPAXT

SEQ ID NO: 993 - protein, 40 aa, Artificial Sequence
  Cyclic GFR-binding peptide
  MOD_RES (2)..(4)..(36)..(37): Xaa is C or S
RXGXGEVVMDRYKKLVVKENEDFYLMSIANLETPVXXAKP

SEQ ID NO: 994 - protein, 34 aa, Artificial Sequence
  Cyclic GFR-binding peptide
  MOD_RES (1)..(3): Xaa is C or S
XGXSRVVMNRHKRLIVNSSDDYYLVSTASLKTPA

SEQ ID NO: 995 - protein, 24 aa, Artificial Sequence
  Cyclic GFR-binding peptide
IMQYNKLIKPTKGILYLISIASLD

SEQ ID NO: 996 - protein, 28 aa, Artificial Sequence
  Cyclic GFR-binding peptide
  MOD_RES (28)..(28): Xaa is C or S
IMRYKKLVKPKRGVFYLISIANLAQPVX

SEQ ID NO: 997 - protein, 32 aa, Artificial Sequence
  Cyclic GFR-binding peptide
  MOD_RES (29)..(30): Xaa is C or S
VMNRHKRLIVNSSDDYYLVSTASLKTPAXXPK

SEQ ID NO: 998 - protein, 33 aa, Artificial Sequence
  Cyclic GFR-binding peptide
  MOD_RES (29)..(30): Xaa is C or S
VIMRYKKLVKPKRGVFYLISIANLAQPVXXPAA

SEQ ID NO: 999 - protein, 34 aa, Artificial Sequence
  Cyclic GFR-binding peptide
  MOD_RES (28)..(29): Xaa is C or S
IMQYNKLIKPTKGILYLISIASLDQSVXXPSASA

SEQ ID NO: 1000 - protein, 32 aa, Artificial Sequence
  Cyclic GFR-binding peptide
  MOD_RES (31)..(32): Xaa is C or S
SKVIMQYNKLIKPTKGILYLISIASLDQSVXX

SEQ ID NO: 1001 - protein, 30 aa, Artificial Sequence
  Cyclic GFR-binding peptide
  MOD_RES (26)..(27): Xaa is C or S
RYKKLVVKENEDFYLMSIANLETPVXXAKP

SEQ ID NO: 1002 - protein, 42 aa, Artificial Sequence
  Cyclic GFR-binding peptide
  MOD_RES (1)..(38): Xaa is C or S
XALHDELTYHYKLFIPKKRVIEKYLVSIPSLQVQTPRXQVNR

SEQ ID NO: 1003 - protein, 25 aa, Artificial Sequence
  Cyclic GFR-binding peptide
VMNQYNKLIVNNSSDLYLVSIASLK

SEQ ID NO: 1004 - protein, 27 aa, Artificial Sequence
  Cyclic GFR-binding peptide
VVMERHKRLVVKDYEDYYLMSTASLET

SEQ ID NO: 1005 - protein, 38 aa, Artificial Sequence
  Cyclic GFR-binding peptide
  MOD_RES (1)..(32)..(33): Xaa is C or S
XSRVIMQYNKLVKPKRGVLYLISIASLAQPVXXPAASA

SEQ ID NO: 1006 - protein, 27 aa, Artificial Sequence
  Cyclic GFR-binding peptide
VMDQYNKLVVKENEDLYLMSIASLETP

SEQ ID NO: 1007 - protein, 26 aa, Artificial Sequence
  Cyclic GFR-binding peptide
RVIMRHKRLVKPKRGVYYLISTASLA

SEQ ID NO: 1008 - protein, 34 aa, Artificial Sequence
  Cyclic GFR-binding peptide
  MOD_RES (30)..(31): Xaa is C or S
VVMNRYKKLIVNSSDDFYLVSIANLQTPAXXPKP

SEQ ID NO: 1009 - protein, 26 aa, Artificial Sequence
  Cyclic GFR-binding peptide
LTQYNKLFIPKKRVIELYLVSIASLQ

SEQ ID NO: 1010 - protein, 35 aa, Artificial Sequence
  Cyclic GFR-binding peptide
  MOD_RES (31)..(31): Xaa is C or S
TRHKRLFIPKKRVIEYYLVSTASLQVQTPRXQVNR

SEQ ID NO: 1011 - protein, 27 aa, Artificial Sequence
  Cyclic GFR-binding peptide
  MOD_RES (26)..(27): Xaa is C or S
YHYKLVKPTRGVKYLISIPSLDQPVXX

SEQ ID NO: 1012 - protein, 32 aa, Artificial Sequence
  Cyclic GFR-binding peptide
  MOD_RES (1)..(32): Xaa is C or S
XSRVIMQYNKLVKPKRGVLYLISIASLAQPVX

SEQ ID NO: 1013 - protein, 31 aa, Artificial Sequence
  Cyclic GFR-binding peptide
  MOD_RES (26)..(27): Xaa is C or S
YHYKLIKPTKGIKYLISIPSLDQSVXXPSAS

SEQ ID NO: 1014 - protein, 26 aa, Artificial Sequence
  Cyclic GFR-binding peptide
TRYKKLFIPKKRVIEFYLVSIANLQV

SEQ ID NO: 1015 - protein, 27 aa, Artificial Sequence
  Cyclic GFR-binding peptide
VMNQYNKLIVNSSDDLYLVSIASLKTP

SEQ ID NO: 1016 - protein, 37 aa, Artificial Sequence
  Cyclic GFR-binding peptide
  MOD_RES (32)..(33): Xaa is C or S
SRVVMNYHYKLIVNSSDDKYLVSIPSLKTPAXXPKPV

SEQ ID NO: 1017 - protein, 30 aa, Artificial Sequence
  Cyclic GFR-binding peptide
  MOD_RES (1)..(1): Xaa is C or S
XSKVIMQYNKLIKPTKGILYLISIASLDQS

SEQ ID NO: 1018 - protein, 31 aa, Artificial Sequence
  Cyclic GFR-binding peptide
  MOD_RES (1)..(1): Xaa is C or S
XSKVVMQYNKLVKPTRGVLYLISIASLDQPV

SEQ ID NO: 1019 - protein, 33 aa, Artificial Sequence
  Cyclic GFR-binding peptide
  MOD_RES (27)..(28): Xaa is C or S
ERHKRLVVKDYEDYYLMSTASLETPVXXAKPIS

SEQ ID NO: 1020 - protein, 40 aa, Artificial Sequence
  Cyclic GFR-binding peptide
  MOD_RES (1)..(3)..(34)..(35): Xaa is C or S
XKXSRVIMYHYKLVKPKRGVKYLISIPSLAQPVXXPAASA

SEQ ID NO: 1021 - protein, 35 aa, Artificial Sequence
  Cyclic GFR-binding peptide
  MOD_RES (31)..(32): Xaa is C or S
EVVMEYHYKLVVKDYEDKYLMSIPSLETPVXXAKP

SEQ ID NO: 1022 - protein, 40 aa, Artificial Sequence
  Cyclic GFR-binding peptide
  MOD_RES (2)..(34)..(35): Xaa is C or S
GXGEVVMDQYNKLVVKENEDLYLMSIASLETPVXXAKPIK

SEQ ID NO: 1023 - protein, 33 aa, Artificial Sequence
  Cyclic GFR-binding peptide
  MOD_RES (29)..(30): Xaa is C or S
VMNRHKRLIVNSSDDYYLVSTASLQTPAXXPKP

SEQ ID NO: 1024 - protein, 37 aa, Artificial Sequence
  Cyclic GFR-binding peptide
  MOD_RES (1)..(3)..(35)..(36): Xaa is C or S
XGXARVVMNYHYKLIVNSSDDKYLVSIPSLQTPAXXP

SEQ ID NO: 1025 - protein, 25 aa, Artificial Sequence
  Cyclic GFR-binding peptide
KVIMRYKKLIKPTKGIFYLISIANL

SEQ ID NO: 1026 - protein, 41 aa, Artificial Sequence
  Cyclic GFR-binding peptide
  MOD_RES (2)..(4)..(36)..(37): Xaa is C or S
HXGXSRVVMNRYKKLIVNSSDDFYLVSIANLKTPAXXPKPV

SEQ ID NO: 1027 - protein, 38 aa, Artificial Sequence
  Cyclic GFR-binding peptide
  MOD_RES (32)..(33): Xaa is C or S
SRVVMNQYNKLIVNSSDDLYLVSIASLKTPAXXPKPVY

SEQ ID NO: 1028 - protein, 33 aa, Artificial Sequence
  Cyclic GFR-binding peptide
  MOD_RES (1)..(33): Xaa is C or S
XSRVVMNRYKKLIVNSSDDFYLVSIANLKTPAX

SEQ ID NO: 1029 - protein, 39 aa, Artificial Sequence
  Cyclic GFR-binding peptide
  MOD_RES (2)..(4)..(35)..(36): Xaa is C or S
SXKXSKVVMRYKKLVKPTRGVFYLISIANLDQPVXXPSA

SEQ ID NO: 1030 - protein, 22 aa, Artificial Sequence
  Cyclic GFR-binding peptide
IMRHKRLIKPTKGIYYLISTAS

SEQ ID NO: 1031 - protein, 31 aa, Artificial Sequence
  Cyclic GFR-binding peptide
  MOD_RES (27)..(28): Xaa is C or S
ERHKRLTPVGMDDYYLVSTASLKTPVXXAKG

SEQ ID NO: 1032 - protein, 32 aa, Artificial Sequence
  Cyclic GFR-binding peptide
ALHDELTYHYKLFIPKKRVIEKYLVSIPSLQV

SEQ ID NO: 1033 - protein, 23 aa, Artificial Sequence
  Cyclic GFR-binding peptide
IMYHYKLVKPKRGVKYLISIPSL

SEQ ID NO: 1034 - protein, 40 aa, Artificial Sequence
  Cyclic GFR-binding peptide
  MOD_RES (2)..(4)..(35)..(36): Xaa is C or S
SXKXSKVVMYHYKLVKPTRGVKYLISIPSLDQPVXXPSAS

SEQ ID NO: 1035 - protein, 31 aa, Artificial Sequence
  Cyclic GFR-binding peptide
  MOD_RES (1)..(3): Xaa is C or S
XKXSKVVMQYNKLVKPTRGVLYLISIASLDQ

SEQ ID NO: 1036 - protein, 28 aa, Artificial Sequence
  Cyclic GFR-binding peptide
SMGERYKKLTPVGMDDFYLVSIANLKTP

SEQ ID NO: 1037 - protein, 40 aa, Artificial Sequence
  Cyclic GFR-binding peptide
  MOD_RES (2)..(34): Xaa is C or S
GXSRVVMNQYNKLIVNSSDDLYLVSIASLKTPAXTPKTVH

SEQ ID NO: 1038 - protein, 33 aa, Artificial Sequence
  Cyclic GFR-binding peptide
LHDELTQYNKLFIPKKRVIELYLVSIASLQVQT

SEQ ID NO: 1039 - protein, 34 aa, Artificial Sequence
  Cyclic GFR-binding peptide
  MOD_RES (1)..(32)..(33): Xaa is C or S
XSRVIMRHKRLVKPKRGVYYLISTASLAQPVXXP

SEQ ID NO: 1040 - protein, 29 aa, Artificial Sequence
  Cyclic GFR-binding peptide
LTRHKRLFIPKKRVIEYYLVSTASLQVQT

SEQ ID NO: 1041 - protein, 38 aa, Artificial Sequence
  Cyclic GFR-binding peptide
  MOD_RES (2)..(34)..(35): Xaa is C or S
GXGEVVMDYHYKLVVKENEDKYLMSIPSLETPVXXAKP

SEQ ID NO: 1042 - protein, 34 aa, Artificial Sequence
  Cyclic GFR-binding peptide
  MOD_RES (1)..(3): Xaa is C or S
XGXSRVVMNQYNKLIVNSSDDLYLVSIASLKTPA

SEQ ID NO: 1043 - protein, 33 aa, Artificial Sequence
  Cyclic GFR-binding peptide
HDELTYHYKLFIPKKRVIEKYLVSIPSLQVQTP

SEQ ID NO: 1044 - protein, 38 aa, Artificial Sequence
  Cyclic GFR-binding peptide
  MOD_RES (2)..(4)..(35)..(36): Xaa is C or S
SXKXSKVVMQYNKLVKPTRGVLYLISIASLDQPVXXPS

SEQ ID NO: 1045 - protein, 20 aa, Artificial Sequence
  Cyclic GFR-binding peptide
YHYKLVKPTRGVKYLISIPS

SEQ ID NO: 1046 - protein, 34 aa, Artificial Sequence
  Cyclic GFR-binding peptide
  MOD_RES (2)..(4): Xaa is C or S
SXKXSKVIMYHYKLIKPTKGIKYLISIPSLDQSV

SEQ ID NO: 1047 - protein, 29 aa, Artificial Sequence
  Cyclic GFR-binding peptide
  MOD_RES (2)..(2): Xaa is C or S
KXSKVVMRHKRLVKPTRGVYYLISTASLD

SEQ ID NO: 1048 - protein, 36 aa, Artificial Sequence
  Cyclic GFR-binding peptide
  MOD_RES (31)..(32): Xaa is C or S
VSMGEQYNKLTPVGMDDLYLVSIASLKTPVXXAKGV

SEQ ID NO: 1049 - protein, 30 aa, Artificial Sequence
  Cyclic GFR-binding peptide
  MOD_RES (26)..(26): Xaa is C or S
YHYKLIVNSSDDKYLVSIPSLKTPAXTPKT

SEQ ID NO: 1050 - protein, 32 aa, Artificial Sequence
  Cyclic GFR-binding peptide
  MOD_RES (31)..(31): Xaa is C or S
RVVMNYHYKLIVNSSDDKYLVSIPSLKTPAXT

SEQ ID NO: 1051 - protein, 29 aa, Artificial Sequence
  Cyclic GFR-binding peptide
  MOD_RES (1)..(1): Xaa is C or S
XSRVVMNYHYKLIVNSSDDKYLVSIPSLK

SEQ ID NO: 1052 - protein, 32 aa, Artificial Sequence
  Cyclic GFR-binding peptide
  MOD_RES (29)..(29): Xaa is C or S
VMNRYKKLIVNSSDDFYLVSIANLKTPAXTPK

SEQ ID NO: 1053 - protein, 31 aa, Artificial Sequence
  Cyclic GFR-binding peptide
  MOD_RES (2)..(2): Xaa is C or S
GXEAVSMGEQYNKLTPVGMDDLYLVSIASLK

SEQ ID NO: 1054 - protein, 25 aa, Artificial Sequence
  Cyclic GFR-binding peptide
VMDRYKKLVVKENEDFYLMSIANLE

SEQ ID NO: 1055 - protein, 29 aa, Artificial Sequence
  Cyclic GFR-binding peptide
DELTQYNKLFIPKKRVIELYLVSIASLQV

SEQ ID NO: 1056 - protein, 35 aa, Artificial Sequence
  Cyclic GFR-binding peptide
  MOD_RES (29)..(30): Xaa is C or S
VIMRYKKLIKPTKGIFYLISIANLDQSVXXPSASA

SEQ ID NO: 1057 - protein, 38 aa, Artificial Sequence
  Cyclic GFR-binding peptide
  MOD_RES (2)..(35)..(36): Xaa is C or S
GXEAVSMGEQYNKLTPVGMDDLYLVSIASLKTPVXXAK

SEQ ID NO: 1058 - protein, 39 aa, Artificial Sequence
  Cyclic GFR-binding peptide
  MOD_RES (1)..(33)..(34): Xaa is C or S
XARVVMNYHYKLIVNSSDDKYLVSIPSLQTPAXXPKPVT

SEQ ID NO: 1059 - protein, 29 aa, Artificial Sequence
  Cyclic GFR-binding peptide
RHKRLFIPKKRVIEYYLVSTASLQVQTPR

SEQ ID NO: 1060 - protein, 32 aa, Artificial Sequence
  Cyclic GFR-binding peptide
  MOD_RES (1)..(3): Xaa is C or S
XGXARVVMNYHYKLIVNSSDDKYLVSIPSLQT

SEQ ID NO: 1061 - protein, 35 aa, Artificial Sequence
  Cyclic GFR-binding peptide
  MOD_RES (30)..(31): Xaa is C or S
KVVMYHYKLVKPTRGVKYLISIPSLDQPVXXPSAS

SEQ ID NO: 1062 - protein, 32 aa, Artificial Sequence
  Cyclic GFR-binding peptide
  MOD_RES (28)..(29): Xaa is C or S
MNRHKRLIVNSSDDYYLVSTASLKTPAXXPKP

SEQ ID NO: 1063 - protein, 31 aa, Artificial Sequence
  Cyclic GFR-binding peptide
  MOD_RES (2)..(2): Xaa is C or S
GXSRVVMNYHYKLIVNSSDDKYLVSIPSLKT

SEQ ID NO: 1064 - protein, 23 aa, Artificial Sequence
  Cyclic GFR-binding peptide
IMRHKRLVKPKRGVYYLISTASL

SEQ ID NO: 1065 - protein, 38 aa, Artificial Sequence
  Cyclic GFR-binding peptide
  MOD_RES (1)..(3)..(35)..(36): Xaa is C or S
XGXGEVVMEYHYKLVVKDYEDKYLMSIPSLETPVXXAK

SEQ ID NO: 1066 - protein, 28 aa, Artificial Sequence
  Cyclic GFR-binding peptide
GEVVMEYHYKLVVKDYEDKYLMSIPSLE

SEQ ID NO: 1067 - protein, 33 aa, Artificial Sequence
  Cyclic GFR-binding peptide
  MOD_RES (32)..(32): Xaa is C or S
SRVVMNQYNKLIVNSSDDLYLVSIASLKTPAXT

SEQ ID NO: 1068 - protein, 23 aa, Artificial Sequence
  Cyclic GFR-binding peptide
TQYNKLFIPKKRVIELYLVSIAS

SEQ ID NO: 1069 - protein, 31 aa, Artificial Sequence
  Cyclic GFR-binding peptide
  MOD_RES (26)..(27): Xaa is C or S
QYNKLVKPTRGVLYLISIASLDQPVXXPSAS

SEQ ID NO: 1070 - protein, 24 aa, Artificial Sequence
  Cyclic GFR-binding peptide
MRHKRLIKPTKGIYYLISTASLDQ

SEQ ID NO: 1071 - protein, 22 aa, Artificial Sequence
  Cyclic GFR-binding peptide
IMYHYKLIKPTKGIKYLISIPS

SEQ ID NO: 1072 - protein, 31 aa, Artificial Sequence
  Cyclic GFR-binding peptide
  MOD_RES (26)..(27): Xaa is C or S
RHKRLVKPTRGVYYLISTASLDQPVXXPSAS

SEQ ID NO: 1073 - protein, 32 aa, Artificial Sequence
  Cyclic GFR-binding peptide
  MOD_RES (2)..(2): Xaa is C or S
KXSRVIMRHKRLVKPKRGVYYLISTASLAQPV

SEQ ID NO: 1074 - protein, 29 aa, Artificial Sequence
  Cyclic GFR-binding peptide
  MOD_RES (26)..(27): Xaa is C or S
RYKKLIVNNSSDFYLVSIANLKTPAXXAK

SEQ ID NO: 1075 - protein, 23 aa, Artificial Sequence
  Cyclic GFR-binding peptide
MQYNKLIKPTKGILYLISIASLD

SEQ ID NO: 1076 - protein, 25 aa, Artificial Sequence
  Cyclic GFR-binding peptide
MNYHYKLIVNSSDDKYLVSIPSLQT

SEQ ID NO: 1077 - protein, 39 aa, Artificial Sequence
  Cyclic GFR-binding peptide
  MOD_RES (1)..(3)..(34)..(35): Xaa is C or S
XKXSKVIMQYNKLIKPTKGILYLISIASLDQSVXXPSAS

SEQ ID NO: 1078 - protein, 30 aa, Artificial Sequence
  Cyclic GFR-binding peptide
  MOD_RES (1)..(3): Xaa is C or S
XGXAKVVMNYHYKLIVNNSSDKYLVSIPSL

SEQ ID NO: 1079 - protein, 32 aa, Artificial Sequence
  Cyclic GFR-binding peptide
  MOD_RES (26)..(27): Xaa is C or S
RYKKLVVKDYEDFYLMSIANLETPVXXAKPIS

SEQ ID NO: 1080 - protein, 27 aa, Artificial Sequence
  Cyclic GFR-binding peptide
  MOD_RES (1)..(1): Xaa is C or S
XSKVIMYHYKLIKPTKGIKYLISIPSL

SEQ ID NO: 1081 - protein, 28 aa, Artificial Sequence
  Cyclic GFR-binding peptide
MGERYKKLTPVGMDDFYLVSIANLKTPV

SEQ ID NO: 1082 - protein, 28 aa, Artificial Sequence
  Cyclic GFR-binding peptide
  MOD_RES (1)..(1): Xaa is C or S
XSKVVMRHKRLVKPTRGVYYLISTASLD

SEQ ID NO: 1083 - protein, 28 aa, Artificial Sequence
  Cyclic GFR-binding peptide
  MOD_RES (27)..(28): Xaa is C or S
MRYKKLIKPTKGIFYLISIANLDQSVXX

SEQ ID NO: 1084 - protein, 33 aa, Artificial Sequence
  Cyclic GFR-binding peptide
HDELTRYKKLFIPKKRVIEFYLVSIANLQVQTP

SEQ ID NO: 1085 - protein, 24 aa, Artificial Sequence
  Cyclic GFR-binding peptide
MNYHYKLIVNNSSDKYLVSIPSLK

SEQ ID NO: 1086 - protein, 35 aa, Artificial Sequence
  Cyclic GFR-binding peptide
  MOD_RES (2)..(34): Xaa is C or S
GXSRVVMNRHKRLIVNSSDDYYLVSTASLKTPAXT

SEQ ID NO: 1087 - protein, 30 aa, Artificial Sequence
  Cyclic GFR-binding peptide
AKVVMNRYKKLIVNNSSDFYLVSIANLKTP

SEQ ID NO: 1088 - protein, 36 aa, Artificial Sequence
  Cyclic GFR-binding peptide
  MOD_RES (1)..(33)..(34): Xaa is C or S
XARVVMNYHYKLIVNSSDDKYLVSIPSLQTPAXXPK

SEQ ID NO: 1089 - protein, 28 aa, Artificial Sequence
  Cyclic GFR-binding peptide
EVVMERYKKLVVKDYEDFYLMSIANLET

SEQ ID NO: 1090 - protein, 28 aa, Artificial Sequence
  Cyclic GFR-binding peptide
LHDELTRYKKLFIPKKRVIEFYLVSIAN

SEQ ID NO: 1091 - protein, 34 aa, Artificial Sequence
  Cyclic GFR-binding peptide
  MOD_RES (32)..(33): Xaa is C or S
GEVVMERHKRLVVKDYEDYYLMSTASLETPVXXA

SEQ ID NO: 1092 - protein, 34 aa, Artificial Sequence
  Cyclic GFR-binding peptide
  MOD_RES (29)..(30): Xaa is C or S
VMNQYNKLIVNSSDDLYLVSIASLQTPAXXPKPV

SEQ ID NO: 1093 - protein, 29 aa, Artificial Sequence
  Cyclic GFR-binding peptide
  MOD_RES (1)..(1): Xaa is C or S
XGEVVMDYHYKLVVKENEDKYLMSIPSLE

SEQ ID NO: 1094 - protein, 36 aa, Artificial Sequence
  Cyclic GFR-binding peptide
  MOD_RES (30)..(31): Xaa is C or S
VVMNYHYKLIVNSSDDKYLVSIPSLQTPAXXPKPVT

SEQ ID NO: 1095 - protein, 39 aa, Artificial Sequence
  Cyclic GFR-binding peptide
  MOD_RES (35)..(35): Xaa is C or S
HDELTYHYKLFIPKKRVIEKYLVSIPSLQVQTPRXQVNR

SEQ ID NO: 1096 - protein, 33 aa, Artificial Sequence
  Cyclic GFR-binding peptide
  MOD_RES (2)..(2): Xaa is C or S
GXAKVVMNRYKKLIVNNSSDFYLVSIANLKTPA

SEQ ID NO: 1097 - protein, 27 aa, Artificial Sequence
  Cyclic GFR-binding peptide
  MOD_RES (2)..(2): Xaa is C or S
KXSKVIMRHKRLIKPTKGIYYLISTAS

SEQ ID NO: 1098 - protein, 36 aa, Artificial Sequence
  Cyclic GFR-binding peptide
  MOD_RES (1)..(3)..(35)..(36): Xaa is C or S
XGXAKVVMNRYKKLIVNNSSDFYLVSIANLKTPAXX

SEQ ID NO: 1099 - protein, 30 aa, Artificial Sequence
  Cyclic GFR-binding peptide
  MOD_RES (2)..(4): Xaa is C or S
RXGXGEVVMERHKRLVVKDYEDYYLMSTAS

SEQ ID NO: 1100 - protein, 28 aa, Artificial Sequence
  Cyclic GFR-binding peptide
KVVMNYHYKLIVNNSSDKYLVSIPSLKT

SEQ ID NO: 1101 - protein, 37 aa, Artificial Sequence
  Cyclic GFR-binding peptide
  MOD_RES (2)..(33)..(34): Xaa is C or S
KXSKVIMRYKKLIKPTKGIFYLISIANLDQSVXXPSA

SEQ ID NO: 1102 - protein, 33 aa, Artificial Sequence
  Cyclic GFR-binding peptide
DELTQYNKLFIPKKRVIELYLVSIASLQVQTPR

SEQ ID NO: 1103 - protein, 40 aa, Artificial Sequence
  Cyclic GFR-binding peptide
  MOD_RES (1)..(3)..(35)..(36): Xaa is C or S
XGXGEVVMDQYNKLVVKENEDLYLMSIASLETPVXXAKPI

SEQ ID NO: 1104 - protein, 26 aa, Artificial Sequence
  Cyclic GFR-binding peptide
  MOD_RES (1)..(1): Xaa is C or S
XSKVVMRYKKLVKPTRGVFYLISIAN

SEQ ID NO: 1105 - protein, 41 aa, Artificial Sequence
  Cyclic GFR-binding peptide
  MOD_RES (2)..(4)..(36)..(37): Xaa is C or S
RXGXGEVVMDRYKKLVVKENEDFYLMSIANLETPVXXAKPI

SEQ ID NO: 1106 - protein, 28 aa, Artificial Sequence
  Cyclic GFR-binding peptide
VVMNYHYKLIVNNSSDKYLVSIPSLKTP

SEQ ID NO: 1107 - protein, 35 aa, Artificial Sequence
  Cyclic GFR-binding peptide
  MOD_RES (2)..(34)..(35): Xaa is C or S
GXGEVVMDRHKRLVVKENEDYYLMSTASLETPVXX

SEQ ID NO: 1108 - protein, 35 aa, Artificial Sequence
  Cyclic GFR-binding peptide
  MOD_RES (32)..(33): Xaa is C or S
ARVVMNRHKRLIVNSSDDYYLVSTASLQTPAXXPK

SEQ ID NO: 1109 - protein, 24 aa, Artificial Sequence
  Cyclic GFR-binding peptide
VIMRYKKLIKPTKGIFYLISIANL

SEQ ID NO: 1110 - protein, 25 aa, Artificial Sequence
  Cyclic GFR-binding peptide
VMNYHYKLIVNNSSDKYLVSIPSLK

SEQ ID NO: 1111 - protein, 34 aa, Artificial Sequence
  Cyclic GFR-binding peptide
  MOD_RES (1)..(33): Xaa is C or S
XSRVVMNQYNKLIVNSSDDLYLVSIASLKTPAXT

SEQ ID NO: 1112 - protein, 28 aa, Artificial Sequence
  Cyclic GFR-binding peptide
  MOD_RES (2)..(2): Xaa is C or S
KXSKVVMQYNKLVKPTRGVLYLISIASL

SEQ ID NO: 1113 - protein, 35 aa, Artificial Sequence
  Cyclic GFR-binding peptide
  MOD_RES (2)..(34)..(35): Xaa is C or S
GXSRVVMNYHYKLIVNSSDDKYLVSIPSLKTPAXX

SEQ ID NO: 1114 - protein, 30 aa, Artificial Sequence
  Cyclic GFR-binding peptide
  MOD_RES (30)..(30): Xaa is C or S
VVMEQYNKLVVKDYEDLYLMSIASLETPVX

SEQ ID NO: 1115 - protein, 28 aa, Artificial Sequence
  Cyclic GFR-binding peptide
  MOD_RES (27)..(28): Xaa is C or S
EQYNKLVVKDYEDLYLMSIASLETPVXX

SEQ ID NO: 1116 - protein, 33 aa, Artificial Sequence
  Cyclic GFR-binding peptide
  MOD_RES (31)..(32): Xaa is C or S
RVVMNYHYKLIVNSSDDKYLVSIPSLQTPAXXP

SEQ ID NO: 1117 - protein, 36 aa, Artificial Sequence
  Cyclic GFR-binding peptide
  MOD_RES (32)..(33): Xaa is C or S
GEVVMERYKKLVVKDYEDFYLMSIANLETPVXXAKP

SEQ ID NO: 1118 - protein, 23 aa, Artificial Sequence
  Cyclic GFR-binding peptide
RHKRLTPVGMDDYYLVSTASLKT

SEQ ID NO: 1119 - protein, 36 aa, Artificial Sequence
  Cyclic GFR-binding peptide
  MOD_RES (30)..(31): Xaa is C or S
VVMNRHKRLIVNSSDDYYLVSTASLQTPAXXPKPVT

SEQ ID NO: 1120 - protein, 27 aa, Artificial Sequence
  Cyclic GFR-binding peptide
GEQYNKLTPVGMDDLYLVSIASLKTPV

SEQ ID NO: 1121 - protein, 27 aa, Artificial Sequence
  Cyclic GFR-binding peptide
VIMYHYKLVKPKRGVKYLISIPSLAQP

SEQ ID NO: 1122 - protein, 34 aa, Artificial Sequence
  Cyclic GFR-binding peptide
  MOD_RES (2)..(4): Xaa is C or S
SXKXSRVIMRYKKLVKPKRGVFYLISIANLAQPV

SEQ ID NO: 1123 - protein, 38 aa, Artificial Sequence
  Cyclic GFR-binding peptide
  MOD_RES (33)..(34): Xaa is C or S
EAVSMGEQYNKLTPVGMDDLYLVSIASLKTPVXXAKGV

SEQ ID NO: 1124 - protein, 29 aa, Artificial Sequence
  Cyclic GFR-binding peptide
KVVMNQYNKLIVNNSSDLYLVSIASLKTP

SEQ ID NO: 1125 - protein, 28 aa, Artificial Sequence
  Cyclic GFR-binding peptide
  MOD_RES (2)..(2): Xaa is C or S
KXSRVIMYHYKLVKPKRGVKYLISIPSL

SEQ ID NO: 1126 - protein, 38 aa, Artificial Sequence
  Cyclic GFR-binding peptide
  MOD_RES (1)..(3)..(35)..(36): Xaa is C or S
XGXAKVVMNYHYKLIVNNSSDKYLVSIPSLKTPAXXAK

SEQ ID NO: 1127 - protein, 36 aa, Artificial Sequence
  Cyclic GFR-binding peptide
  MOD_RES (2)..(4)..(36): Xaa is C or S
RXGXGEVVMERHKRLVVKDYEDYYLMSTASLETPVX

SEQ ID NO: 1128 - protein, 40 aa, Artificial Sequence
  Cyclic GFR-binding peptide
  MOD_RES (1)..(3)..(35)..(36): Xaa is C or S
XGXARVVMNRYKKLIVNSSDDFYLVSIANLQTPAXXPKPV

SEQ ID NO: 1129 - protein, 31 aa, Artificial Sequence
  Cyclic GFR-binding peptide
  MOD_RES (1)..(3): Xaa is C or S
XGXEAVSMGEQYNKLTPVGMDDLYLVSIASL

SEQ ID NO: 1130 - protein, 33 aa, Artificial Sequence
  Cyclic GFR-binding peptide
  MOD_RES (27)..(28): Xaa is C or S
NYHYKLIVNSSDDKYLVSIPSLQTPAXXPKPVT

SEQ ID NO: 1131 - protein, 30 aa, Artificial Sequence
  Cyclic GFR-binding peptide
  MOD_RES (30)..(30): Xaa is C or S
VVMNRHKRLIVNSSDDYYLVSTASLKTPAX

SEQ ID NO: 1132 - protein, 32 aa, Artificial Sequence
  Cyclic GFR-binding peptide
  MOD_RES (28)..(29): Xaa is C or S
MNYHYKLIVNSSDDKYLVSIPSLKTPAXXPKP

SEQ ID NO: 1133 - protein, 25 aa, Artificial Sequence
  Cyclic GFR-binding peptide
RVVMNRYKKLIVNSSDDFYLVSIAN

SEQ ID NO: 1134 - protein, 40 aa, Artificial Sequence
  Cyclic GFR-binding peptide
  MOD_RES (1)..(3)..(35)..(36): Xaa is C or S
XGXGEVVMDYHYKLVVKENEDKYLMSIPSLETPVXXAKPI

SEQ ID NO: 1135 - protein, 26 aa, Artificial Sequence
  Cyclic GFR-binding peptide
MQYNKLVKPTRGVLYLISIASLDQPV

SEQ ID NO: 1136 - protein, 34 aa, Artificial Sequence
  Cyclic GFR-binding peptide
  MOD_RES (32)..(33): Xaa is C or S
ARVVMNYHYKLIVNSSDDKYLVSIPSLQTPAXXP

SEQ ID NO: 1137 - protein, 27 aa, Artificial Sequence
  Cyclic GFR-binding peptide
  MOD_RES (27)..(27): Xaa is C or S
MQYNKLIKPTKGILYLISIASLDQSVX

SEQ ID NO: 1138 - protein, 27 aa, Artificial Sequence
  Cyclic GFR-binding peptide
ELTYHYKLFIPKKRVIEKYLVSIPSLQ

SEQ ID NO: 1139 - protein, 27 aa, Artificial Sequence
  Cyclic GFR-binding peptide
  MOD_RES (1)..(1): Xaa is C or S
XARVVMNRHKRLIVNSSDDYYLVSTAS

SEQ ID NO: 1140 - protein, 39 aa, Artificial Sequence
  Cyclic GFR-binding peptide
  MOD_RES (2)..(35)..(36): Xaa is C or S
GXEAVSMGERHKRLTPVGMDDYYLVSTASLKTPVXXAKG

SEQ ID NO: 1141 - protein, 29 aa, Artificial Sequence
  Cyclic GFR-binding peptide
  MOD_RES (28)..(29): Xaa is C or S
IMRYKKLVKPKRGVFYLISIANLAQPVXX

SEQ ID NO: 1142 - protein, 35 aa, Artificial Sequence
  Cyclic GFR-binding peptide
  MOD_RES (1)..(33)..(34): Xaa is C or S
XGEVVMERYKKLVVKDYEDFYLMSIANLETPVXXA

SEQ ID NO: 1143 - protein, 27 aa, Artificial Sequence
  Cyclic GFR-binding peptide
KVIMRYKKLIKPTKGIFYLISIANLDQ

SEQ ID NO: 1144 - protein, 35 aa, Artificial Sequence
  Cyclic GFR-binding peptide
  MOD_RES (31)..(31): Xaa is C or S
RVVMNRYKKLIVNSSDDFYLVSIANLKTPAXTPKT

SEQ ID NO: 1145 - protein, 39 aa, Artificial Sequence
  Cyclic GFR-binding peptide
  MOD_RES (1)..(3)..(34)..(35): Xaa is C or S
XKXSKVVMQYNKLVKPTRGVLYLISIASLDQPVXXPSAS

SEQ ID NO: 1146 - protein, 25 aa, Artificial Sequence
  Cyclic GFR-binding peptide
VIMRHKRLIKPTKGIYYLISTASLD

SEQ ID NO: 1147 - protein, 32 aa, Artificial Sequence
  Cyclic GFR-binding peptide
  MOD_RES (27)..(27): Xaa is C or S
NRHKRLIVNSSDDYYLVSTASLKTPAXTPKTV

SEQ ID NO: 1148 - protein, 36 aa, Artificial Sequence
  Cyclic GFR-binding peptide
  MOD_RES (30)..(31): Xaa is C or S
VVMDRYKKLVVKENEDFYLMSIANLETPVXXAKPIK

SEQ ID NO: 1149 - protein, 31 aa, Artificial Sequence
  Cyclic GFR-binding peptide
  MOD_RES (1)..(1): Xaa is C or S
XGEVVMEYHYKLVVKDYEDKYLMSIPSLETP

SEQ ID NO: 1150 - protein, 31 aa, Artificial Sequence
  Cyclic GFR-binding peptide
  MOD_RES (30)..(31): Xaa is C or S
RVIMRHKRLVKPKRGVYYLISTASLAQPVXX

SEQ ID NO: 1151 - protein, 30 aa, Artificial Sequence
  Cyclic GFR-binding peptide
  MOD_RES (2)..(2): Xaa is C or S
KXSRVIMQYNKLVKPKRGVLYLISIASLAQ

SEQ ID NO: 1152 - protein, 23 aa, Artificial Sequence
  Cyclic GFR-binding peptide
DQYNKLVVKENEDLYLMSIASLE

SEQ ID NO: 1153 - protein, 34 aa, Artificial Sequence
  Cyclic GFR-binding peptide
LHDELTRYKKLFIPKKRVIEFYLVSIANLQVQTP

SEQ ID NO: 1154 - protein, 31 aa, Artificial Sequence
  Cyclic GFR-binding peptide
  MOD_RES (27)..(28): Xaa is C or S
MQYNKLVKPKRGVLYLISIASLAQPVXXPAA

SEQ ID NO: 1155 - protein, 36 aa, Artificial Sequence
  Cyclic GFR-binding peptide
  MOD_RES (1)..(32)..(33): Xaa is C or S
XSKVIMQYNKLIKPTKGILYLISIASLDQSVXXPSA

SEQ ID NO: 1156 - protein, 38 aa, Artificial Sequence
  Cyclic GFR-binding peptide
  MOD_RES (2)..(4)..(35)..(36): Xaa is C or S
SXKXSKVIMYHYKLIKPTKGIKYLISIPSLDQSVXXPS

SEQ ID NO: 1157 - protein, 43 aa, Artificial Sequence
  Cyclic GFR-binding peptide
  MOD_RES (2)..(39): Xaa is C or S
KXALHDELTRYKKLFIPKKRVIEFYLVSIANLQVQTPRXQVNR

SEQ ID NO: 1158 - protein, 30 aa, Artificial Sequence
  Cyclic GFR-binding peptide
  MOD_RES (27)..(28): Xaa is C or S
MRHKRLVKPKRGVYYLISTASLAQPVXXPA

SEQ ID NO: 1159 - protein, 33 aa, Artificial Sequence
  Cyclic GFR-binding peptide
  MOD_RES (31)..(32): Xaa is C or S
RVVMNQYNKLIVNSSDDLYLVSIASLQTPAXXP

SEQ ID NO: 1160 - protein, 33 aa, Artificial Sequence
  Cyclic GFR-binding peptide
  MOD_RES (27)..(28): Xaa is C or S
MRYKKLVKPKRGVFYLISIANLAQPVXXPAASA

SEQ ID NO: 1161 - protein, 29 aa, Artificial Sequence
  Cyclic GFR-binding peptide
AVSMGERHKRLTPVGMDDYYLVSTASLKT

SEQ ID NO: 1162 - protein, 30 aa, Artificial Sequence
  Cyclic GFR-binding peptide
  MOD_RES (2)..(4): Xaa is C or S
SXKXSKVVMRHKRLVKPTRGVYYLISTASL

SEQ ID NO: 1163 - protein, 42 aa, Artificial Sequence
  Cyclic GFR-binding peptide
  MOD_RES (2)..(4)..(36): Xaa is C or S
HXGXSRVVMNQYNKLIVNSSDDLYLVSIASLKTPAXTPKTVH

SEQ ID NO: 1164 - protein, 36 aa, Artificial Sequence
  Cyclic GFR-binding peptide
  MOD_RES (36)..(36): Xaa is C or S
LHDELTRHKRLFIPKKRVIEYYLVSTASLQVQTPRX

SEQ ID NO: 1165 - protein, 32 aa, Artificial Sequence
  Cyclic GFR-binding peptide
  MOD_RES (1)..(3): Xaa is C or S
XGXGEVVMERYKKLVVKDYEDFYLMSIANLET

SEQ ID NO: 1166 - protein, 32 aa, Artificial Sequence
  Cyclic GFR-binding peptide
  MOD_RES (30)..(31): Xaa is C or S
RVIMQYNKLVKPKRGVLYLISIASLAQPVXXP

SEQ ID NO: 1167 - protein, 32 aa, Artificial Sequence
  Cyclic GFR-binding peptide
  MOD_RES (30)..(31): Xaa is C or S
VVMDQYNKLVVKENEDLYLMSIASLETPVXXA

SEQ ID NO: 1168 - protein, 27 aa, Artificial Sequence
  Cyclic GFR-binding peptide
IMQYNKLVKPKRGVLYLISIASLAQPV

SEQ ID NO: 1169 - protein, 30 aa, Artificial Sequence
  Cyclic GFR-binding peptide
  MOD_RES (27)..(28): Xaa is C or S
NQYNKLIVNSSDDLYLVSIASLKTPAXXPK

SEQ ID NO: 1170 - protein, 39 aa, Artificial Sequence
  Cyclic GFR-binding peptide
  MOD_RES (1)..(38): Xaa is C or S
XALHDELTRYKKLFIPKKRVIEFYLVSIANLQVQTPRXQ

SEQ ID NO: 1171 - protein, 34 aa, Artificial Sequence
  Cyclic GFR-binding peptide
  MOD_RES (29)..(30): Xaa is C or S
VVMQYNKLVKPTRGVLYLISIASLDQPVXXPSAS

SEQ ID NO: 1172 - protein, 25 aa, Artificial Sequence
  Cyclic GFR-binding peptide
QYNKLFIPKKRVIELYLVSIASLQV

SEQ ID NO: 1173 - protein, 29 aa, Artificial Sequence
  Cyclic GFR-binding peptide
  MOD_RES (1)..(1): Xaa is C or S
XEAVSMGERYKKLTPVGMDDFYLVSIANL

SEQ ID NO: 1174 - protein, 34 aa, Artificial Sequence
  Cyclic GFR-binding peptide
  MOD_RES (2)..(4): Xaa is C or S
SXKXSKVVMRHKRLVKPTRGVYYLISTASLDQPV

SEQ ID NO: 1175 - protein, 29 aa, Artificial Sequence
  Cyclic GFR-binding peptide
VVMNQYNKLIVNSSDDLYLVSIASLQTPA

SEQ ID NO: 1176 - protein, 32 aa, Artificial Sequence
  Cyclic GFR-binding peptide
  MOD_RES (27)..(28): Xaa is C or S
MQYNKLVKPKRGVLYLISIASLAQPVXXPAAS

SEQ ID NO: 1177 - protein, 27 aa, Artificial Sequence
  Cyclic GFR-binding peptide
GEVVMDRYKKLVVKENEDFYLMSIANL

SEQ ID NO: 1178 - protein, 26 aa, Artificial Sequence
  Cyclic GFR-binding peptide
VVMNRHKRLIVNSSDDYYLVSTASLK

SEQ ID NO: 1179 - protein, 34 aa, Artificial Sequence
  Cyclic GFR-binding peptide
  MOD_RES (1)..(33)..(34): Xaa is C or S
XARVVMNQYNKLIVNSSDDLYLVSIASLQTPAXX

SEQ ID NO: 1180 - protein, 27 aa, Artificial Sequence
  Cyclic GFR-binding peptide
  MOD_RES (27)..(27): Xaa is C or S
DRYKKLVVKENEDFYLMSIANLETPVX

SEQ ID NO: 1181 - protein, 30 aa, Artificial Sequence
  Cyclic GFR-binding peptide
  MOD_RES (30)..(30): Xaa is C or S
YHYKLFIPKKRVIEKYLVSIPSLQVQTPRX

SEQ ID NO: 1182 - protein, 36 aa, Artificial Sequence
  Cyclic GFR-binding peptide
  MOD_RES (32)..(33): Xaa is C or S
SRVVMNRHKRLIVNSSDDYYLVSTASLKTPAXXPKP

SEQ ID NO: 1183 - protein, 35 aa, Artificial Sequence
  Cyclic GFR-binding peptide
  MOD_RES (31)..(32): Xaa is C or S
VSMGERYKKLTPVGMDDFYLVSIANLKTPVXXAKG

SEQ ID NO: 1184 - protein, 36 aa, Artificial Sequence
  Cyclic GFR-binding peptide
  MOD_RES (1)..(3): Xaa is C or S
XKXALHDELTYHYKLFIPKKRVIEKYLVSIPSLQVQ

SEQ ID NO: 1185 - protein, 31 aa, Artificial Sequence
  Cyclic GFR-binding peptide
  MOD_RES (1)..(1): Xaa is C or S
XGEVVMDYHYKLVVKENEDKYLMSIPSLETP

SEQ ID NO: 1186 - protein, 29 aa, Artificial Sequence
  Cyclic GFR-binding peptide
  MOD_RES (26)..(27): Xaa is C or S
YHYKLVVKDYEDKYLMSIPSLETPVXXAK

SEQ ID NO: 1187 - protein, 27 aa, Artificial Sequence
  Cyclic GFR-binding peptide
ELTRYKKLFIPKKRVIEFYLVSIANLQ

SEQ ID NO: 1188 - protein, 29 aa, Artificial Sequence
  Cyclic GFR-binding peptide
ELTQYNKLFIPKKRVIELYLVSIASLQVQ

SEQ ID NO: 1189 - protein, 27 aa, Artificial Sequence
  Cyclic GFR-binding peptide
VMRHKRLVKPTRGVYYLISTASLDQPV

SEQ ID NO: 1190 - protein, 28 aa, Artificial Sequence
  Cyclic GFR-binding peptide
  MOD_RES (28)..(28): Xaa is C or S
MNRYKKLIVNNSSDFYLVSIANLKTPAX

SEQ ID NO: 1191 - protein, 27 aa, Artificial Sequence
  Cyclic GFR-binding peptide
VMNQYNKLIVNNSSDLYLVSIASLKTP

SEQ ID NO: 1192 - protein, 30 aa, Artificial Sequence
  Cyclic GFR-binding peptide
  MOD_RES (1)..(1): Xaa is C or S
XAKVVMNRYKKLIVNNSSDFYLVSIANLKT

SEQ ID NO: 1193 - protein, 29 aa, Artificial Sequence
  Cyclic GFR-binding peptide
  MOD_RES (28)..(29): Xaa is C or S
GERYKKLTPVGMDDFYLVSIANLKTPVXX

SEQ ID NO: 1194 - protein, 29 aa, Artificial Sequence
  Cyclic GFR-binding peptide
EAVSMGERYKKLTPVGMDDFYLVSIANLK

SEQ ID NO: 1195 - protein, 29 aa, Artificial Sequence
  Cyclic GFR-binding peptide
  MOD_RES (26)..(27): Xaa is C or S
RHKRLVVKENEDYYLMSTASLETPVXXAK

SEQ ID NO: 1196 - protein, 27 aa, Artificial Sequence
  Cyclic GFR-binding peptide
  MOD_RES (1)..(1): Xaa is C or S
XSKVVMYHYKLVKPTRGVKYLISIPSL

SEQ ID NO: 1197 - protein, 37 aa, Artificial Sequence
  Cyclic GFR-binding peptide
  MOD_RES (1)..(3)..(35)..(36): Xaa is C or S
XGXSRVVMNRYKKLIVNSSDDFYLVSIANLKTPAXXP

SEQ ID NO: 1198 - protein, 26 aa, Artificial Sequence
  Cyclic GFR-binding peptide
SMGERYKKLTPVGMDDFYLVSIANLK

SEQ ID NO: 1199 - protein, 32 aa, Artificial Sequence
  Cyclic GFR-binding peptide
  MOD_RES (2)..(4): Xaa is C or S
SXKXSRVIMYHYKLVKPKRGVKYLISIPSLAQ

SEQ ID NO: 1200 - protein, 28 aa, Artificial Sequence
  Cyclic GFR-binding peptide
LTYHYKLFIPKKRVIEKYLVSIPSLQVQ

SEQ ID NO: 1201 - protein, 28 aa, Artificial Sequence
  Cyclic GFR-binding peptide
  MOD_RES (2)..(2): Xaa is C or S
GXGEVVMDRYKKLVVKENEDFYLMSIAN

SEQ ID NO: 1202 - protein, 20 aa, Artificial Sequence
  Cyclic GFR-binding peptide
RYKKLTPVGMDDFYLVSIAN

SEQ ID NO: 1203 - protein, 35 aa, Artificial Sequence
  Cyclic GFR-binding peptide
  MOD_RES (2)..(4)..(35): Xaa is C or S
SXKXSKVVMRHKRLVKPTRGVYYLISTASLDQPVX

SEQ ID NO: 1204 - protein, 36 aa, Artificial Sequence
  Cyclic GFR-binding peptide
  MOD_RES (2)..(34): Xaa is C or S
GXSRVVMNYHYKLIVNSSDDKYLVSIPSLKTPAXTP

SEQ ID NO: 1205 - protein, 29 aa, Artificial Sequence
  Cyclic GFR-binding peptide
  MOD_RES (2)..(2): Xaa is C or S
GXEAVSMGERHKRLTPVGMDDYYLVSTAS

SEQ ID NO: 1206 - protein, 30 aa, Artificial Sequence
  Cyclic GFR-binding peptide
  MOD_RES (28)..(29): Xaa is C or S
MNQYNKLIVNSSDDLYLVSIASLKTPAXXP

SEQ ID NO: 1207 - protein, 38 aa, Artificial Sequence
  Cyclic GFR-binding peptide
  MOD_RES (2)..(2): Xaa is C or S
KXALHDELTRYKKLFIPKKRVIEFYLVSIANLQVQTPR

SEQ ID NO: 1208 - protein, 38 aa, Artificial Sequence
  Cyclic GFR-binding peptide
  MOD_RES (35)..(35): Xaa is C or S
HDELTYHYKLFIPKKRVIEKYLVSIPSLQVQTPRXQVN

SEQ ID NO: 1209 - protein, 37 aa, Artificial Sequence
  Cyclic GFR-binding peptide
  MOD_RES (1)..(1): Xaa is C or S
XALHDELTYHYKLFIPKKRVIEKYLVSIPSLQVQTPR

SEQ ID NO: 1210 - protein, 31 aa, Artificial Sequence
  Cyclic GFR-binding peptide
  MOD_RES (27)..(28): Xaa is C or S
DRHKRLVVKENEDYYLMSTASLETPVXXAKP

SEQ ID NO: 1211 - protein, 32 aa, Artificial Sequence
  Cyclic GFR-binding peptide
  MOD_RES (2)..(2): Xaa is C or S
GXARVVMNQYNKLIVNSSDDLYLVSIASLQTP

SEQ ID NO: 1212 - protein, 40 aa, Artificial Sequence
  Cyclic GFR-binding peptide
  MOD_RES (2)..(4)..(35)..(36): Xaa is C or S
SXKXSKVVMQYNKLVKPTRGVLYLISIASLDQPVXXPSAS

SEQ ID NO: 1213 - protein, 39 aa, Artificial Sequence
  Cyclic GFR-binding peptide
  MOD_RES (1)..(3)..(35)..(36): Xaa is C or S
XGXGEVVMERHKRLVVKDYEDYYLMSTASLETPVXXAKP

SEQ ID NO: 1214 - protein, 25 aa, Artificial Sequence
  Cyclic GFR-binding peptide
NYHYKLIVNSSDDKYLVSIPSLKTP

SEQ ID NO: 1215 - protein, 30 aa, Artificial Sequence
  Cyclic GFR-binding peptide
  MOD_RES (26)..(26): Xaa is C or S
RYKKLIVNSSDDFYLVSIANLKTPAXTPKT

SEQ ID NO: 1216 - protein, 31 aa, Artificial Sequence
  Cyclic GFR-binding peptide
  MOD_RES (1)..(3): Xaa is C or S
XGXGEVVMEQYNKLVVKDYEDLYLMSIASLE

SEQ ID NO: 1217 - protein, 34 aa, Artificial Sequence
  Cyclic GFR-binding peptide
  MOD_RES (31)..(32): Xaa is C or S
RVVMNRYKKLIVNSSDDFYLVSIANLQTPAXXPK

SEQ ID NO: 1218 - protein, 31 aa, Artificial Sequence
  Cyclic GFR-binding peptide
  MOD_RES (30)..(31): Xaa is C or S
RVIMYHYKLVKPKRGVKYLISIPSLAQPVXX

SEQ ID NO: 1219 - protein, 41 aa, Artificial Sequence
  Cyclic GFR-binding peptide
  MOD_RES (1)..(3)..(35)..(36): Xaa is C or S
XGXARVVMNQYNKLIVNSSDDLYLVSIASLQTPAXXPKPVT

SEQ ID NO: 1220 - protein, 30 aa, Artificial Sequence
  Cyclic GFR-binding peptide
  MOD_RES (30)..(30): Xaa is C or S
RVIMRYKKLVKPKRGVFYLISIANLAQPVX

SEQ ID NO: 1221 - protein, 28 aa, Artificial Sequence
  Cyclic GFR-binding peptide
  MOD_RES (27)..(28): Xaa is C or S
NQYNKLIVNSSDDLYLVSIASLKTPAXX

SEQ ID NO: 1222 - protein, 29 aa, Artificial Sequence
  Cyclic GFR-binding peptide
  MOD_RES (2)..(2): Xaa is C or S
GXARVVMNYHYKLIVNSSDDKYLVSIPSL

SEQ ID NO: 1223 - protein, 33 aa, Artificial Sequence
  Cyclic GFR-binding peptide
  MOD_RES (1)..(33): Xaa is C or S
XARVVMNQYNKLIVNSSDDLYLVSIASLQTPAX

SEQ ID NO: 1224 - protein, 33 aa, Artificial Sequence
  Cyclic GFR-binding peptide
  MOD_RES (31)..(32): Xaa is C or S
SKVVMRHKRLVKPTRGVYYLISTASLDQPVXXP

SEQ ID NO: 1225 - protein, 31 aa, Artificial Sequence
  Cyclic GFR-binding peptide
  MOD_RES (26)..(27): Xaa is C or S
QYNKLVVKDYEDLYLMSIASLETPVXXAKPI

SEQ ID NO: 1226 - protein, 33 aa, Artificial Sequence
  Cyclic GFR-binding peptide
  MOD_RES (30)..(31): Xaa is C or S
KVIMRYKKLIKPTKGIFYLISIANLDQSVXXPS

SEQ ID NO: 1227 - protein, 23 aa, Artificial Sequence
  Cyclic GFR-binding peptide
QYNKLVKPTRGVLYLISIASLDQ

SEQ ID NO: 1228 - protein, 41 aa, Artificial Sequence
  Cyclic GFR-binding peptide
  MOD_RES (2)..(4)..(35)..(36): Xaa is C or S
SXKXSKVIMYHYKLIKPTKGIKYLISIPSLDQSVXXPSASA

SEQ ID NO: 1229 - protein, 37 aa, Artificial Sequence
  Cyclic GFR-binding peptide
  MOD_RES (32)..(32): Xaa is C or S
SRVVMNQYNKLIVNSSDDLYLVSIASLKTPAXTPKTV

SEQ ID NO: 1230 - protein, 30 aa, Artificial Sequence
  Cyclic GFR-binding peptide
  MOD_RES (1)..(3): Xaa is C or S
XGXGEVVMERHKRLVVKDYEDYYLMSTASL

SEQ ID NO: 1231 - protein, 31 aa, Artificial Sequence
  Cyclic GFR-binding peptide
  MOD_RES (31)..(31): Xaa is C or S
EVVMERYKKLVVKDYEDFYLMSIANLETPVX

SEQ ID NO: 1232 - protein, 34 aa, Artificial Sequence
  Cyclic GFR-binding peptide
  MOD_RES (29)..(30): Xaa is C or S
VMNRHKRLIVNSSDDYYLVSTASLQTPAXXPKPV

SEQ ID NO: 1233 - protein, 41 aa, Artificial Sequence
  Cyclic GFR-binding peptide
  MOD_RES (2)..(4)..(36)..(37): Xaa is C or S
RXGXGEVVMDQYNKLVVKENEDLYLMSIASLETPVXXAKPI

SEQ ID NO: 1234 - protein, 35 aa, Artificial Sequence
  Cyclic GFR-binding peptide
ALHDELTQYNKLFIPKKRVIELYLVSIASLQVQTP

SEQ ID NO: 1235 - protein, 37 aa, Artificial Sequence
  Cyclic GFR-binding peptide
  MOD_RES (2)..(2): Xaa is C or S
KXALHDELTQYNKLFIPKKRVIELYLVSIASLQVQTP

SEQ ID NO: 1236 - protein, 26 aa, Artificial Sequence
  Cyclic GFR-binding peptide
KVIMQYNKLIKPTKGILYLISIASLD

SEQ ID NO: 1237 - protein, 37 aa, Artificial Sequence
  Cyclic GFR-binding peptide
  MOD_RES (1)..(33)..(34): Xaa is C or S
XSRVVMNQYNKLIVNSSDDLYLVSIASLKTPAXXPKP

SEQ ID NO: 1238 - protein, 37 aa, Artificial Sequence
  Cyclic GFR-binding peptide
  MOD_RES (32)..(33): Xaa is C or S
GEVVMDYHYKLVVKENEDKYLMSIPSLETPVXXAKPI

SEQ ID NO: 1239 - protein, 32 aa, Artificial Sequence
  Cyclic GFR-binding peptide
  MOD_RES (1)..(3): Xaa is C or S
XGXEAVSMGERHKRLTPVGMDDYYLVSTASLK

SEQ ID NO: 1240 - protein, 30 aa, Artificial Sequence
  Cyclic GFR-binding peptide
  MOD_RES (30)..(30): Xaa is C or S
RHKRLFIPKKRVIEYYLVSTASLQVQTPRX

SEQ ID NO: 1241 - protein, 32 aa, Artificial Sequence
  Cyclic GFR-binding peptide
  MOD_RES (2)..(2): Xaa is C or S
GXSRVVMNQYNKLIVNSSDDLYLVSIASLKTP

SEQ ID NO: 1242 - protein, 33 aa, Artificial Sequence
  Cyclic GFR-binding peptide
  MOD_RES (28)..(29): Xaa is C or S
MNQYNKLIVNSSDDLYLVSIASLKTPAXXPKPV

SEQ ID NO: 1243 - protein, 37 aa, Artificial Sequence
  Cyclic GFR-binding peptide
  MOD_RES (31)..(32): Xaa is C or S
EVVMDRYKKLVVKENEDFYLMSIANLETPVXXAKPIK

SEQ ID NO: 1244 - protein, 34 aa, Artificial Sequence
  Cyclic GFR-binding peptide
  MOD_RES (2)..(4): Xaa is C or S
HXGXARVVMNRHKRLIVNSSDDYYLVSTASLQTP

SEQ ID NO: 1245 - protein, 35 aa, Artificial Sequence
  Cyclic GFR-binding peptide
ALHDELTRHKRLFIPKKRVIEYYLVSTASLQVQTP

SEQ ID NO: 1246 - protein, 32 aa, Artificial Sequence
  Cyclic GFR-binding peptide
  MOD_RES (1)..(1): Xaa is C or S
XSRVVMNQYNKLIVNSSDDLYLVSIASLKTPA

SEQ ID NO: 1247 - protein, 37 aa, Artificial Sequence
  Cyclic GFR-binding peptide
  MOD_RES (1)..(33): Xaa is C or S
XSRVVMNQYNKLIVNSSDDLYLVSIASLKTPAXTPKT

SEQ ID NO: 1248 - protein, 39 aa, Artificial Sequence
  Cyclic GFR-binding peptide
  MOD_RES (2)..(34)..(35): Xaa is C or S
GXARVVMNYHYKLIVNSSDDKYLVSIPSLQTPAXXPKPV

SEQ ID NO: 1249 - protein, 28 aa, Artificial Sequence
  Cyclic GFR-binding peptide
SRVVMNYHYKLIVNSSDDKYLVSIPSLK

SEQ ID NO: 1250 - protein, 31 aa, Artificial Sequence
  Cyclic GFR-binding peptide
  MOD_RES (28)..(29): Xaa is C or S
MNQYNKLIVNNSSDLYLVSIASLKTPAXXAK

SEQ ID NO: 1251 - protein, 39 aa, Artificial Sequence
  Cyclic GFR-binding peptide
  MOD_RES (2)..(4)..(35)..(36): Xaa is C or S
SXKXSRVIMQYNKLVKPKRGVLYLISIASLAQPVXXPAA

SEQ ID NO: 1252 - protein, 33 aa, Artificial Sequence
  Cyclic GFR-binding peptide
  MOD_RES (27)..(28): Xaa is C or S
NQYNKLIVNNSSDLYLVSIASLKTPAXXAKPVA

SEQ ID NO: 1253 - protein, 27 aa, Artificial Sequence
  Cyclic GFR-binding peptide
IMRHKRLIKPTKGIYYLISTASLDQSV

SEQ ID NO: 1254 - protein, 29 aa, Artificial Sequence
  Cyclic GFR-binding peptide
RVIMYHYKLVKPKRGVKYLISIPSLAQPV

SEQ ID NO: 1255 - protein, 31 aa, Artificial Sequence
  Cyclic GFR-binding peptide
  MOD_RES (2)..(4): Xaa is C or S
HXGXARVVMNQYNKLIVNSSDDLYLVSIASL

SEQ ID NO: 1256 - protein, 24 aa, Artificial Sequence
  Cyclic GFR-binding peptide
RVIMYHYKLVKPKRGVKYLISIPS

SEQ ID NO: 1257 - protein, 22 aa, Artificial Sequence
  Cyclic GFR-binding peptide
RHKRLIVNSSDDYYLVSTASLK

SEQ ID NO: 1258 - protein, 35 aa, Artificial Sequence
  Cyclic GFR-binding peptide
  MOD_RES (2)..(4)..(35): Xaa is C or S
SXKXSRVIMRYKKLVKPKRGVFYLISIANLAQPVX

SEQ ID NO: 1259 - protein, 35 aa, Artificial Sequence
  Cyclic GFR-binding peptide
  MOD_RES (1)..(3)..(34)..(35): Xaa is C or S
XKXSRVIMQYNKLVKPKRGVLYLISIASLAQPVXX

SEQ ID NO: 1260 - protein, 28 aa, Artificial Sequence
  Cyclic GFR-binding peptide
  MOD_RES (27)..(28): Xaa is C or S
MRYKKLVKPTRGVFYLISIANLDQPVXX

SEQ ID NO: 1261 - protein, 37 aa, Artificial Sequence
  Cyclic GFR-binding peptide
  MOD_RES (2)..(33)..(34): Xaa is C or S
KXSKVIMQYNKLIKPTKGILYLISIASLDQSVXXPSA

SEQ ID NO: 1262 - protein, 32 aa, Artificial Sequence
  Cyclic GFR-binding peptide
  MOD_RES (2)..(4): Xaa is C or S
RXGXGEVVMDYHYKLVVKENEDKYLMSIPSLE

SEQ ID NO: 1263 - protein, 28 aa, Artificial Sequence
  Cyclic GFR-binding peptide
VIMQYNKLIKPTKGILYLISIASLDQSV

SEQ ID NO: 1264 - protein, 37 aa, Artificial Sequence
  Cyclic GFR-binding peptide
  MOD_RES (32)..(33): Xaa is C or S
AVSMGERYKKLTPVGMDDFYLVSIANLKTPVXXAKGV

SEQ ID NO: 1265 - protein, 28 aa, Artificial Sequence
  Cyclic GFR-binding peptide
  MOD_RES (27)..(28): Xaa is C or S
MYHYKLVKPKRGVKYLISIPSLAQPVXX

SEQ ID NO: 1266 - protein, 38 aa, Artificial Sequence
  Cyclic GFR-binding peptide
  MOD_RES (1)..(38): Xaa is C or S
XALHDELTRYKKLFIPKKRVIEFYLVSIANLQVQTPRX

SEQ ID NO: 1267 - protein, 29 aa, Artificial Sequence
  Cyclic GFR-binding peptide
  MOD_RES (2)..(4): Xaa is C or S
SXKXSRVIMRHKRLVKPKRGVYYLISTAS

SEQ ID NO: 1268 - protein, 24 aa, Artificial Sequence
  Cyclic GFR-binding peptide
VVMNQYNKLIVNNSSDLYLVSIAS

SEQ ID NO: 1269 - protein, 23 aa, Artificial Sequence
  Cyclic GFR-binding peptide
RYKKLFIPKKRVIEFYLVSIANL

SEQ ID NO: 1270 - protein, 34 aa, Artificial Sequence
  Cyclic GFR-binding peptide
  MOD_RES (31)..(31): Xaa is C or S
RVVMNQYNKLIVNSSDDLYLVSIASLKTPAXTPK

SEQ ID NO: 1271 - protein, 31 aa, Artificial Sequence
  Cyclic GFR-binding peptide
  MOD_RES (31)..(31): Xaa is C or S
KVVMNYHYKLIVNNSSDKYLVSIPSLKTPAX

SEQ ID NO: 1272 - protein, 24 aa, Artificial Sequence
  Cyclic GFR-binding peptide
MQYNKLVKPKRGVLYLISIASLAQ

SEQ ID NO: 1273 - protein, 39 aa, Artificial Sequence
  Cyclic GFR-binding peptide
  MOD_RES (1)..(33)..(34): Xaa is C or S
XGEVVMEQYNKLVVKDYEDLYLMSIASLETPVXXAKPIS

SEQ ID NO: 1274 - protein, 35 aa, Artificial Sequence
  Cyclic GFR-binding peptide
  MOD_RES (29)..(30): Xaa is C or S
VIMRHKRLIKPTKGIYYLISTASLDQSVXXPSASA

SEQ ID NO: 1275 - protein, 26 aa, Artificial Sequence
  Cyclic GFR-binding peptide
SKVIMRHKRLIKPTKGIYYLISTASL

SEQ ID NO: 1276 - protein, 35 aa, Artificial Sequence
  Cyclic GFR-binding peptide
  MOD_RES (30)..(31): Xaa is C or S
VVMNRHKRLIVNSSDDYYLVSTASLKTPAXXPKPV

SEQ ID NO: 1277 - protein, 32 aa, Artificial Sequence
  Cyclic GFR-binding peptide
  MOD_RES (2)..(2): Xaa is C or S
GXGEVVMEQYNKLVVKDYEDLYLMSIASLETP

SEQ ID NO: 1278 - protein, 24 aa, Artificial Sequence
  Cyclic GFR-binding peptide
MNQYNKLIVNNSSDLYLVSIASLK

SEQ ID NO: 1279 - protein, 32 aa, Artificial Sequence
  Cyclic GFR-binding peptide
  MOD_RES (1)..(3): Xaa is C or S
XGXGEVVMDQYNKLVVKENEDLYLMSIASLET

SEQ ID NO: 1280 - protein, 30 aa, Artificial Sequence
  Cyclic GFR-binding peptide
  MOD_RES (30)..(30): Xaa is C or S
VVMNQYNKLIVNSSDDLYLVSIASLQTPAX

SEQ ID NO: 1281 - protein, 34 aa, Artificial Sequence
  Cyclic GFR-binding peptide
  MOD_RES (28)..(29): Xaa is C or S
MNQYNKLIVNNSSDLYLVSIASLKTPAXXAKPVA

SEQ ID NO: 1282 - protein, 34 aa, Artificial Sequence
  Cyclic GFR-binding peptide
  MOD_RES (29)..(30): Xaa is C or S
VMNRYKKLIVNNSSDFYLVSIANLKTPAXXAKPV

SEQ ID NO: 1283 - protein, 37 aa, Artificial Sequence
  Cyclic GFR-binding peptide
  MOD_RES (31)..(32): Xaa is C or S
RVVMNRHKRLIVNSSDDYYLVSTASLQTPAXXPKPVT

SEQ ID NO: 1284 - protein, 30 aa, Artificial Sequence
  Cyclic GFR-binding peptide
  MOD_RES (1)..(1): Xaa is C or S
XSRVIMQYNKLVKPKRGVLYLISIASLAQP

SEQ ID NO: 1285 - protein, 28 aa, Artificial Sequence
  Cyclic GFR-binding peptide
  MOD_RES (1)..(1): Xaa is C or S
XSRVIMQYNKLVKPKRGVLYLISIASLA

SEQ ID NO: 1286 - protein, 29 aa, Artificial Sequence
  Cyclic GFR-binding peptide
  MOD_RES (1)..(1): Xaa is C or S
XSKVVMQYNKLVKPTRGVLYLISIASLDQ

SEQ ID NO: 1287 - protein, 29 aa, Artificial Sequence
  Cyclic GFR-binding peptide
  MOD_RES (27)..(27): Xaa is C or S
NQYNKLIVNSSDDLYLVSIASLKTPAXTP

SEQ ID NO: 1288 - protein, 24 aa, Artificial Sequence
  Cyclic GFR-binding peptide
RVIMRHKRLVKPKRGVYYLISTAS

SEQ ID NO: 1289 - protein, 33 aa, Artificial Sequence
  Cyclic GFR-binding peptide
  MOD_RES (30)..(31): Xaa is C or S
RVIMRHKRLVKPKRGVYYLISTASLAQPVXXPA

SEQ ID NO: 1290 - protein, 35 aa, Artificial Sequence
  Cyclic GFR-binding peptide
  MOD_RES (34)..(34): Xaa is C or S
DELTYHYKLFIPKKRVIEKYLVSIPSLQVQTPRXQ

SEQ ID NO: 1291 - protein, 26 aa, Artificial Sequence
  Cyclic GFR-binding peptide
TYHYKLFIPKKRVIEKYLVSIPSLQV

SEQ ID NO: 1292 - protein, 35 aa, Artificial Sequence
  Cyclic GFR-binding peptide
  MOD_RES (1)..(3)..(35): Xaa is C or S
XGXGEVVMDQYNKLVVKENEDLYLMSIASLETPVX

SEQ ID NO: 1293 - protein, 31 aa, Artificial Sequence
  Cyclic GFR-binding peptide
  MOD_RES (26)..(27): Xaa is C or S
RHKRLIKPTKGIYYLISTASLDQSVXXPSAS

SEQ ID NO: 1294 - protein, 36 aa, Artificial Sequence
  Cyclic GFR-binding peptide
  MOD_RES (32)..(33): Xaa is C or S
GEVVMDQYNKLVVKENEDLYLMSIASLETPVXXAKP

SEQ ID NO: 1295 - protein, 35 aa, Artificial Sequence
  Cyclic GFR-binding peptide
  MOD_RES (33)..(33): Xaa is C or S
ELTRHKRLFIPKKRVIEYYLVSTASLQVQTPRXQV

SEQ ID NO: 1296 - protein, 29 aa, Artificial Sequence
  Cyclic GFR-binding peptide
  MOD_RES (28)..(29): Xaa is C or S
MNRHKRLIVNSSDDYYLVSTASLQTPAXX

SEQ ID NO: 1297 - protein, 35 aa, Artificial Sequence
  Cyclic GFR-binding peptide
  MOD_RES (1)..(33)..(34): Xaa is C or S
XGEVVMDRHKRLVVKENEDYYLMSTASLETPVXXA

SEQ ID NO: 1298 - protein, 29 aa, Artificial Sequence
  Cyclic GFR-binding peptide
  MOD_RES (2)..(2): Xaa is C or S
GXGEVVMDRYKKLVVKENEDFYLMSIANL

SEQ ID NO: 1299 - protein, 30 aa, Artificial Sequence
  Cyclic GFR-binding peptide
ARVVMNYHYKLIVNSSDDKYLVSIPSLQTP

SEQ ID NO: 1300 - protein, 32 aa, Artificial Sequence
  Cyclic GFR-binding peptide
  MOD_RES (29)..(30): Xaa is C or S
MGERYKKLTPVGMDDFYLVSIANLKTPVXXAK

SEQ ID NO: 1301 - protein, 36 aa, Artificial Sequence
  Cyclic GFR-binding peptide
  MOD_RES (30)..(31): Xaa is C or S
VVMNYHYKLIVNSSDDKYLVSIPSLKTPAXXPKPVY

SEQ ID NO: 1302 - protein, 24 aa, Artificial Sequence
  Cyclic GFR-binding peptide
RHKRLTPVGMDDYYLVSTASLKTP

SEQ ID NO: 1303 - protein, 26 aa, Artificial Sequence
  Cyclic GFR-binding peptide
  MOD_RES (1)..(1): Xaa is C or S
XSRVIMQYNKLVKPKRGVLYLISIAS

SEQ ID NO: 1304 - protein, 35 aa, Artificial Sequence
  Cyclic GFR-binding peptide
  MOD_RES (32)..(32): Xaa is C or S
SRVVMNQYNKLIVNSSDDLYLVSIASLKTPAXTPK

SEQ ID NO: 1305 - protein, 29 aa, Artificial Sequence
  Cyclic GFR-binding peptide
  MOD_RES (27)..(28): Xaa is C or S
NYHYKLIVNSSDDKYLVSIPSLQTPAXXP

SEQ ID NO: 1306 - protein, 33 aa, Artificial Sequence
  Cyclic GFR-binding peptide
  MOD_RES (31)..(31): Xaa is C or S
TQYNKLFIPKKRVIELYLVSIASLQVQTPRXQV

SEQ ID NO: 1307 - protein, 36 aa, Artificial Sequence
  Cyclic GFR-binding peptide
  MOD_RES (30)..(31): Xaa is C or S
KVVMQYNKLVKPTRGVLYLISIASLDQPVXXPSASA

SEQ ID NO: 1308 - protein, 36 aa, Artificial Sequence
  Cyclic GFR-binding peptide
  MOD_RES (1)..(3)..(35): Xaa is C or S
XGXSRVVMNYHYKLIVNSSDDKYLVSIPSLKTPAXT

SEQ ID NO: 1309 - protein, 36 aa, Artificial Sequence
  Cyclic GFR-binding peptide
  MOD_RES (1)..(1): Xaa is C or S
XALHDELTYHYKLFIPKKRVIEKYLVSIPSLQVQTP

SEQ ID NO: 1310 - protein, 40 aa, Artificial Sequence
  Cyclic GFR-binding peptide
  MOD_RES (2)..(34): Xaa is C or S
GXSRVVMNRYKKLIVNSSDDFYLVSIANLKTPAXTPKTVH

SEQ ID NO: 1311 - protein, 38 aa, Artificial Sequence
  Cyclic GFR-binding peptide
  MOD_RES (1)..(33)..(34): Xaa is C or S
XSRVVMNYHYKLIVNSSDDKYLVSIPSLKTPAXXPKPV

SEQ ID NO: 1312 - protein, 21 aa, Artificial Sequence
  Cyclic GFR-binding peptide
DRYKKLVVKENEDFYLMSIAN

SEQ ID NO: 1313 - protein, 37 aa, Artificial Sequence
  Cyclic GFR-binding peptide
  MOD_RES (2)..(4)..(36)..(37): Xaa is C or S
HXGXSRVVMNRYKKLIVNSSDDFYLVSIANLKTPAXX

SEQ ID NO: 1314 - protein, 30 aa, Artificial Sequence
  Cyclic GFR-binding peptide
  MOD_RES (1)..(3): Xaa is C or S
XGXARVVMNRYKKLIVNSSDDFYLVSIANL

SEQ ID NO: 1315 - protein, 30 aa, Artificial Sequence
  Cyclic GFR-binding peptide
  MOD_RES (1)..(3): Xaa is C or S
XGXGEVVMEYHYKLVVKDYEDKYLMSIPSL

SEQ ID NO: 1316 - protein, 36 aa, Artificial Sequence
  Cyclic GFR-binding peptide
  MOD_RES (2)..(4): Xaa is C or S
EXKXALHDELTQYNKLFIPKKRVIELYLVSIASLQV

SEQ ID NO: 1317 - protein, 32 aa, Artificial Sequence
  Cyclic GFR-binding peptide
  MOD_RES (31)..(32): Xaa is C or S
EVVMDYHYKLVVKENEDKYLMSIPSLETPVXX

SEQ ID NO: 1318 - protein, 28 aa, Artificial Sequence
  Cyclic GFR-binding peptide
  MOD_RES (26)..(27): Xaa is C or S
RHKRLIVNSSDDYYLVSTASLKTPAXXP

SEQ ID NO: 1319 - protein, 36 aa, Artificial Sequence
  Cyclic GFR-binding peptide
  MOD_RES (32)..(33): Xaa is C or S
AKVVMNRYKKLIVNNSSDFYLVSIANLKTPAXXAKP

SEQ ID NO: 1320 - protein, 30 aa, Artificial Sequence
  Cyclic GFR-binding peptide
  MOD_RES (27)..(28): Xaa is C or S
ERYKKLVVKDYEDFYLMSIANLETPVXXAK

SEQ ID NO: 1321 - protein, 29 aa, Artificial Sequence
  Cyclic GFR-binding peptide
  MOD_RES (27)..(28): Xaa is C or S
MQYNKLVKPTRGVLYLISIASLDQPVXXP

SEQ ID NO: 1322 - protein, 28 aa, Artificial Sequence
  Cyclic GFR-binding peptide
MGERHKRLTPVGMDDYYLVSTASLKTPV

SEQ ID NO: 1323 - protein, 36 aa, Artificial Sequence
  Cyclic GFR-binding peptide
  MOD_RES (30)..(31): Xaa is C or S
VVMNRHKRLIVNSSDDYYLVSTASLKTPAXXPKPVY

SEQ ID NO: 1324 - protein, 27 aa, Artificial Sequence
  Cyclic GFR-binding peptide
MNQYNKLIVNNSSDLYLVSIASLKTPA

SEQ ID NO: 1325 - protein, 29 aa, Artificial Sequence
  Cyclic GFR-binding peptide
HDELTRHKRLFIPKKRVIEYYLVSTASLQ

SEQ ID NO: 1326 - protein, 24 aa, Artificial Sequence
  Cyclic GFR-binding peptide
MERYKKLVVKDYEDFYLMSIANLE

SEQ ID NO: 1327 - protein, 34 aa, Artificial Sequence
  Cyclic GFR-binding peptide
  MOD_RES (2)..(4): Xaa is C or S
SXKXSKVVMQYNKLVKPTRGVLYLISIASLDQPV

SEQ ID NO: 1328 - protein, 33 aa, Artificial Sequence
  Cyclic GFR-binding peptide
  MOD_RES (32)..(33): Xaa is C or S
AVSMGERYKKLTPVGMDDFYLVSIANLKTPVXX

SEQ ID NO: 1329 - protein, 28 aa, Artificial Sequence
  Cyclic GFR-binding peptide
  MOD_RES (1)..(1): Xaa is C or S
XGEVVMEQYNKLVVKDYEDLYLMSIASL

SEQ ID NO: 1330 - protein, 34 aa, Artificial Sequence
  Cyclic GFR-binding peptide
  MOD_RES (2)..(33)..(34): Xaa is C or S
KXSKVIMYHYKLIKPTKGIKYLISIPSLDQSVXX

SEQ ID NO: 1331 - protein, 28 aa, Artificial Sequence
  Cyclic GFR-binding peptide
  MOD_RES (26)..(27): Xaa is C or S
QYNKLVKPKRGVLYLISIASLAQPVXXP

SEQ ID NO: 1332 - protein, 29 aa, Artificial Sequence
  Cyclic GFR-binding peptide
KVVMNYHYKLIVNNSSDKYLVSIPSLKTP

SEQ ID NO: 1333 - protein, 28 aa, Artificial Sequence
  Cyclic GFR-binding peptide
  MOD_RES (1)..(1): Xaa is C or S
XGEVVMDRYKKLVVKENEDFYLMSIANL

SEQ ID NO: 1334 - protein, 30 aa, Artificial Sequence
  Cyclic GFR-binding peptide
SKVVMRYKKLVKPTRGVFYLISIANLDQPV

SEQ ID NO: 1335 - protein, 25 aa, Artificial Sequence
  Cyclic GFR-binding peptide
MDRHKRLVVKENEDYYLMSTASLET

SEQ ID NO: 1336 - protein, 35 aa, Artificial Sequence
  Cyclic GFR-binding peptide
  MOD_RES (2)..(34)..(35): Xaa is C or S
GXGEVVMEQYNKLVVKDYEDLYLMSIASLETPVXX

SEQ ID NO: 1337 - protein, 21 aa, Artificial Sequence
  Cyclic GFR-binding peptide
MYHYKLIKPTKGIKYLISIPS

SEQ ID NO: 1338 - protein, 30 aa, Artificial Sequence
  Cyclic GFR-binding peptide
  MOD_RES (29)..(30): Xaa is C or S
VMNYHYKLIVNSSDDKYLVSIPSLQTPAXX

SEQ ID NO: 1339 - protein, 28 aa, Artificial Sequence
  Cyclic GFR-binding peptide
  MOD_RES (2)..(2): Xaa is C or S
GXARVVMNYHYKLIVNSSDDKYLVSIPS

SEQ ID NO: 1340 - protein, 28 aa, Artificial Sequence
  Cyclic GFR-binding peptide
VSMGERHKRLTPVGMDDYYLVSTASLKT

SEQ ID NO: 1341 - protein, 25 aa, Artificial Sequence
  Cyclic GFR-binding peptide
VIMYHYKLIKPTKGIKYLISIPSLD

SEQ ID NO: 1342 - protein, 30 aa, Artificial Sequence
  Cyclic GFR-binding peptide
  MOD_RES (26)..(26): Xaa is C or S
QYNKLIVNSSDDLYLVSIASLKTPAXTPKT

SEQ ID NO: 1343 - protein, 34 aa, Artificial Sequence
  Cyclic GFR-binding peptide
  MOD_RES (30)..(31): Xaa is C or S
SMGERYKKLTPVGMDDFYLVSIANLKTPVXXAKG

SEQ ID NO: 1344 - protein, 30 aa, Artificial Sequence
  Cyclic GFR-binding peptide
RVVMNYHYKLIVNSSDDKYLVSIPSLKTPA

SEQ ID NO: 1345 - protein, 25 aa, Artificial Sequence
  Cyclic GFR-binding peptide
RYKKLVVKENEDFYLMSIANLETPV

SEQ ID NO: 1346 - protein, 39 aa, Artificial Sequence
  Cyclic GFR-binding peptide
  MOD_RES (1)..(3)..(35)..(36): Xaa is C or S
XGXGEVVMEQYNKLVVKDYEDLYLMSIASLETPVXXAKP

SEQ ID NO: 1347 - protein, 23 aa, Artificial Sequence
  Cyclic GFR-binding peptide
MYHYKLVKPKRGVKYLISIPSLA

SEQ ID NO: 1348 - protein, 31 aa, Artificial Sequence
  Cyclic GFR-binding peptide
  MOD_RES (27)..(28): Xaa is C or S
MRHKRLIKPTKGIYYLISTASLDQSVXXPSA

SEQ ID NO: 1349 - protein, 30 aa, Artificial Sequence
  Cyclic GFR-binding peptide
  MOD_RES (29)..(30): Xaa is C or S
VVMRYKKLVKPTRGVFYLISIANLDQPVXX

SEQ ID NO: 1350 - protein, 27 aa, Artificial Sequence
  Cyclic GFR-binding peptide
VVMNQYNKLIVNSSDDLYLVSIASLKT

SEQ ID NO: 1351 - protein, 34 aa, Artificial Sequence
  Cyclic GFR-binding peptide
  MOD_RES (1)..(34): Xaa is C or S
XEAVSMGEQYNKLTPVGMDDLYLVSIASLKTPVX

SEQ ID NO: 1352 - protein, 24 aa, Artificial Sequence
  Cyclic GFR-binding peptide
NYHYKLIVNSSDDKYLVSIPSLKT

SEQ ID NO: 1353 - protein, 33 aa, Artificial Sequence
  Cyclic GFR-binding peptide
  MOD_RES (30)..(31): Xaa is C or S
VVMNYHYKLIVNNSSDKYLVSIPSLKTPAXXAK

SEQ ID NO: 1354 - protein, 34 aa, Artificial Sequence
  Cyclic GFR-binding peptide
  MOD_RES (31)..(31): Xaa is C or S
RVVMNYHYKLIVNSSDDKYLVSIPSLKTPAXTPK

SEQ ID NO: 1355 - protein, 31 aa, Artificial Sequence
  Cyclic GFR-binding peptide
  MOD_RES (2)..(4): Xaa is C or S
HXGXAKVVMNRHKRLIVNNSSDYYLVSTASL

SEQ ID NO: 1356 - protein, 32 aa, Artificial Sequence
  Cyclic GFR-binding peptide
  MOD_RES (27)..(28): Xaa is C or S
MQYNKLIKPTKGILYLISIASLDQSVXXPSAS

SEQ ID NO: 1357 - protein, 29 aa, Artificial Sequence
  Cyclic GFR-binding peptide
LHDELTRHKRLFIPKKRVIEYYLVSTASL

SEQ ID NO: 1358 - protein, 25 aa, Artificial Sequence
  Cyclic GFR-binding peptide
EVVMDRYKKLVVKENEDFYLMSIAN

SEQ ID NO: 1359 - protein, 33 aa, Artificial Sequence
  Cyclic GFR-binding peptide
  MOD_RES (2)..(4): Xaa is C or S
HXGXAKVVMNRHKRLIVNNSSDYYLVSTASLKT

SEQ ID NO: 1360 - protein, 22 aa, Artificial Sequence
  Cyclic GFR-binding peptide
ERHKRLVVKDYEDYYLMSTASL

SEQ ID NO: 1361 - protein, 25 aa, Artificial Sequence
  Cyclic GFR-binding peptide
MDYHYKLVVKENEDKYLMSIPSLET

SEQ ID NO: 1362 - protein, 28 aa, Artificial Sequence
  Cyclic GFR-binding peptide
VIMRYKKLIKPTKGIFYLISIANLDQSV

SEQ ID NO: 1363 - protein, 34 aa, Artificial Sequence
  Cyclic GFR-binding peptide
  MOD_RES (30)..(31): Xaa is C or S
KVIMRHKRLIKPTKGIYYLISTASLDQSVXXPSA

SEQ ID NO: 1364 - protein, 32 aa, Artificial Sequence
  Cyclic GFR-binding peptide
  MOD_RES (1)..(3): Xaa is C or S
XGXGEVVMDRHKRLVVKENEDYYLMSTASLET

SEQ ID NO: 1365 - protein, 33 aa, Artificial Sequence
  Cyclic GFR-binding peptide
  MOD_RES (32)..(33): Xaa is C or S
SRVVMNRYKKLIVNSSDDFYLVSIANLKTPAXX

SEQ ID NO: 1366 - protein, 35 aa, Artificial Sequence
  Cyclic GFR-binding peptide
  MOD_RES (30)..(30): Xaa is C or S
VVMNQYNKLIVNSSDDLYLVSIASLKTPAXTPKTV

SEQ ID NO: 1367 - protein, 44 aa, Artificial Sequence
  Cyclic GFR-binding peptide
  MOD_RES (1)..(3)..(40): Xaa is C or S
XKXALHDELTRYKKLFIPKKRVIEFYLVSIANLQVQTPRXQVNR

SEQ ID NO: 1368 - protein, 29 aa, Artificial Sequence
  Cyclic GFR-binding peptide
  MOD_RES (2)..(2): Xaa is C or S
KXSKVIMQYNKLIKPTKGILYLISIASLD

SEQ ID NO: 1369 - protein, 41 aa, Artificial Sequence
  Cyclic GFR-binding peptide
  MOD_RES (1)..(38): Xaa is C or S
XALHDELTRHKRLFIPKKRVIEYYLVSTASLQVQTPRXQVN

SEQ ID NO: 1370 - protein, 39 aa, Artificial Sequence
  Cyclic GFR-binding peptide
  MOD_RES (1)..(3)..(35): Xaa is C or S
XGXSRVVMNRHKRLIVNSSDDYYLVSTASLKTPAXTPKT

SEQ ID NO: 1371 - protein, 34 aa, Artificial Sequence
  Cyclic GFR-binding peptide
  MOD_RES (30)..(31): Xaa is C or S
RVIMQYNKLVKPKRGVLYLISIASLAQPVXXPAA

SEQ ID NO: 1372 - protein, 36 aa, Artificial Sequence
  Cyclic GFR-binding peptide
  MOD_RES (1)..(3)..(35)..(36): Xaa is C or S
XGXARVVMNYHYKLIVNSSDDKYLVSIPSLQTPAXX

SEQ ID NO: 1373 - protein, 31 aa, Artificial Sequence
  Cyclic GFR-binding peptide
  MOD_RES (1)..(1): Xaa is C or S
XSRVVMNYHYKLIVNSSDDKYLVSIPSLKTP

SEQ ID NO: 1374 - protein, 28 aa, Artificial Sequence
  Cyclic GFR-binding peptide
  MOD_RES (27)..(27): Xaa is C or S
NRHKRLIVNSSDDYYLVSTASLKTPAXT

SEQ ID NO: 1375 - protein, 36 aa, Artificial Sequence
  Cyclic GFR-binding peptide
  MOD_RES (2)..(34)..(35): Xaa is C or S
GXGEVVMEQYNKLVVKDYEDLYLMSIASLETPVXXA

SEQ ID NO: 1376 - protein, 26 aa, Artificial Sequence
  Cyclic GFR-binding peptide
VMNQYNKLIVNSSDDLYLVSIASLQT

SEQ ID NO: 1377 - protein, 34 aa, Artificial Sequence
  Cyclic GFR-binding peptide
  MOD_RES (30)..(30): Xaa is C or S
QYNKLFIPKKRVIELYLVSIASLQVQTPRXQVNR

SEQ ID NO: 1378 - protein, 36 aa, Artificial Sequence
  Cyclic GFR-binding peptide
  MOD_RES (2)..(34)..(35): Xaa is C or S
GXSRVVMNQYNKLIVNSSDDLYLVSIASLKTPAXXP

SEQ ID NO: 1379 - protein, 32 aa, Artificial Sequence
  Cyclic GFR-binding peptide
  MOD_RES (31)..(32): Xaa is C or S
EVVMDQYNKLVVKENEDLYLMSIASLETPVXX

SEQ ID NO: 1380 - protein, 32 aa, Artificial Sequence
  Cyclic GFR-binding peptide
  MOD_RES (27)..(28): Xaa is C or S
DRYKKLVVKENEDFYLMSIANLETPVXXAKPI

SEQ ID NO: 1381 - protein, 39 aa, Artificial Sequence
  Cyclic GFR-binding peptide
  MOD_RES (2)..(4)..(35)..(36): Xaa is C or S
SXKXSRVIMRHKRLVKPKRGVYYLISTASLAQPVXXPAA

SEQ ID NO: 1382 - protein, 30 aa, Artificial Sequence
  Cyclic GFR-binding peptide
RVVMNQYNKLIVNSSDDLYLVSIASLKTPA

SEQ ID NO: 1383 - protein, 40 aa, Artificial Sequence
  Cyclic GFR-binding peptide
  MOD_RES (2)..(4)..(36)..(37): Xaa is C or S
RXGXGEVVMDQYNKLVVKENEDLYLMSIASLETPVXXAKP

SEQ ID NO: 1384 - protein, 33 aa, Artificial Sequence
  Cyclic GFR-binding peptide
  MOD_RES (32)..(33): Xaa is C or S
ARVVMNQYNKLIVNSSDDLYLVSIASLQTPAXX

SEQ ID NO: 1385 - protein, 33 aa, Artificial Sequence
  Cyclic GFR-binding peptide
  MOD_RES (30)..(31): Xaa is C or S
VVMNQYNKLIVNSSDDLYLVSIASLQTPAXXPK

SEQ ID NO: 1386 - protein, 33 aa, Artificial Sequence
  Cyclic GFR-binding peptide
  MOD_RES (1)..(33): Xaa is C or S
XGEVVMDQYNKLVVKENEDLYLMSIASLETPVX

SEQ ID NO: 1387 - protein, 38 aa, Artificial Sequence
  Cyclic GFR-binding peptide
  MOD_RES (1)..(33)..(34): Xaa is C or S
XGEVVMERHKRLVVKDYEDYYLMSTASLETPVXXAKPI

SEQ ID NO: 1388 - protein, 32 aa, Artificial Sequence
  Cyclic GFR-binding peptide
  MOD_RES (30)..(31): Xaa is C or S
VVMEYHYKLVVKDYEDKYLMSIPSLETPVXXA

SEQ ID NO: 1389 - protein, 41 aa, Artificial Sequence
  Cyclic GFR-binding peptide
  MOD_RES (1)..(3)..(36)..(37): Xaa is C or S
XGXEAVSMGERHKRLTPVGMDDYYLVSTASLKTPVXXAKGV

SEQ ID NO: 1390 - protein, 31 aa, Artificial Sequence
  Cyclic GFR-binding peptide
  MOD_RES (31)..(31): Xaa is C or S
KVVMNQYNKLIVNNSSDLYLVSIASLKTPAX

SEQ ID NO: 1391 - protein, 36 aa, Artificial Sequence
  Cyclic GFR-binding peptide
  MOD_RES (34)..(34): Xaa is C or S
DELTRHKRLFIPKKRVIEYYLVSTASLQVQTPRXQV

SEQ ID NO: 1392 - protein, 29 aa, Artificial Sequence
  Cyclic GFR-binding peptide
YHYKLFIPKKRVIEKYLVSIPSLQVQTPR

SEQ ID NO: 1393 - protein, 35 aa, Artificial Sequence
  Cyclic GFR-binding peptide
  MOD_RES (1)..(33)..(34): Xaa is C or S
XAKVVMNRYKKLIVNNSSDFYLVSIANLKTPAXXA

SEQ ID NO: 1394 - protein, 31 aa, Artificial Sequence
  Cyclic GFR-binding peptide
  MOD_RES (1)..(1): Xaa is C or S
XSKVVMRYKKLVKPTRGVFYLISIANLDQPV

SEQ ID NO: 1395 - protein, 28 aa, Artificial Sequence
  Cyclic GFR-binding peptide
  MOD_RES (26)..(27): Xaa is C or S
RYKKLVKPKRGVFYLISIANLAQPVXXP

SEQ ID NO: 1396 - protein, 21 aa, Artificial Sequence
  Cyclic GFR-binding peptide
NRYKKLIVNSSDDFYLVSIAN

SEQ ID NO: 1397 - protein, 29 aa, Artificial Sequence
  Cyclic GFR-binding peptide
  MOD_RES (27)..(28): Xaa is C or S
EYHYKLVVKDYEDKYLMSIPSLETPVXXA

SEQ ID NO: 1398 - protein, 29 aa, Artificial Sequence
  Cyclic GFR-binding peptide
  MOD_RES (1)..(1): Xaa is C or S
XGEVVMEYHYKLVVKDYEDKYLMSIPSLE

SEQ ID NO: 1399 - protein, 34 aa, Artificial Sequence
  Cyclic GFR-binding peptide
  MOD_RES (30)..(31): Xaa is C or S
KVIMYHYKLIKPTKGIKYLISIPSLDQSVXXPSA

SEQ ID NO: 1400 - protein, 28 aa, Artificial Sequence
  Cyclic GFR-binding peptide
SKVIMYHYKLIKPTKGIKYLISIPSLDQ

SEQ ID NO: 1401 - protein, 36 aa, Artificial Sequence
  Cyclic GFR-binding peptide
  MOD_RES (1)..(3)..(34)..(35): Xaa is C or S
XKXSRVIMRHKRLVKPKRGVYYLISTASLAQPVXXP

SEQ ID NO: 1402 - protein, 26 aa, Artificial Sequence
  Cyclic GFR-binding peptide
SRVVMNRHKRLIVNSSDDYYLVSTAS

SEQ ID NO: 1403 - protein, 39 aa, Artificial Sequence
  Cyclic GFR-binding peptide
  MOD_RES (33)..(34): Xaa is C or S
EAVSMGERHKRLTPVGMDDYYLVSTASLKTPVXXAKGVK

SEQ ID NO: 1404 - protein, 39 aa, Artificial Sequence
  Cyclic GFR-binding peptide
  MOD_RES (2)..(4)..(35)..(36): Xaa is C or S
SXKXSRVIMYHYKLVKPKRGVKYLISIPSLAQPVXXPAA

SEQ ID NO: 1405 - protein, 36 aa, Artificial Sequence
  Cyclic GFR-binding peptide
  MOD_RES (2)..(4): Xaa is C or S
RXGXEAVSMGEQYNKLTPVGMDDLYLVSIASLKTPV

SEQ ID NO: 1406 - protein, 36 aa, Artificial Sequence
  Cyclic GFR-binding peptide
  MOD_RES (32)..(32): Xaa is C or S
LTQYNKLFIPKKRVIELYLVSIASLQVQTPRXQVNR

SEQ ID NO: 1407 - protein, 33 aa, Artificial Sequence
  Cyclic GFR-binding peptide
  MOD_RES (1)..(3): Xaa is C or S
XGXGEVVMDYHYKLVVKENEDKYLMSIPSLETP

SEQ ID NO: 1408 - protein, 37 aa, Artificial Sequence
  Cyclic GFR-binding peptide
  MOD_RES (1)..(33)..(34): Xaa is C or S
XSRVVMNRYKKLIVNSSDDFYLVSIANLKTPAXXPKP

SEQ ID NO: 1409 - protein, 37 aa, Artificial Sequence
  Cyclic GFR-binding peptide
  MOD_RES (2)..(35)..(36): Xaa is C or S
GXEAVSMGERYKKLTPVGMDDFYLVSIANLKTPVXXA

SEQ ID NO: 1410 - protein, 33 aa, Artificial Sequence
  Cyclic GFR-binding peptide
  MOD_RES (1)..(33): Xaa is C or S
XARVVMNRYKKLIVNSSDDFYLVSIANLQTPAX

SEQ ID NO: 1411 - protein, 26 aa, Artificial Sequence
  Cyclic GFR-binding peptide
ARVVMNRHKRLIVNSSDDYYLVSTAS

SEQ ID NO: 1412 - protein, 33 aa, Artificial Sequence
  Cyclic GFR-binding peptide
  MOD_RES (2)..(4): Xaa is C or S
RXGXEAVSMGEQYNKLTPVGMDDLYLVSIASLK

SEQ ID NO: 1413 - protein, 27 aa, Artificial Sequence
  Cyclic GFR-binding peptide
  MOD_RES (27)..(27): Xaa is C or S
NYHYKLIVNSSDDKYLVSIPSLKTPAX

SEQ ID NO: 1414 - protein, 27 aa, Artificial Sequence
  Cyclic GFR-binding peptide
SRVIMRYKKLVKPKRGVFYLISIANLA

SEQ ID NO: 1415 - protein, 28 aa, Artificial Sequence
  Cyclic GFR-binding peptide
RVVMNYHYKLIVNSSDDKYLVSIPSLKT

SEQ ID NO: 1416 - protein, 24 aa, Artificial Sequence
  Cyclic GFR-binding peptide
RYKKLVKPTRGVFYLISIANLDQP

SEQ ID NO: 1417 - protein, 33 aa, Artificial Sequence
  Cyclic GFR-binding peptide
  MOD_RES (31)..(32): Xaa is C or S
RVVMNRYKKLIVNSSDDFYLVSIANLKTPAXXP

SEQ ID NO: 1418 - protein, 29 aa, Artificial Sequence
  Cyclic GFR-binding peptide
  MOD_RES (29)..(29): Xaa is C or S
VMNRYKKLIVNSSDDFYLVSIANLQTPAX

SEQ ID NO: 1419 - protein, 37 aa, Artificial Sequence
  Cyclic GFR-binding peptide
  MOD_RES (34)..(34): Xaa is C or S
DELTYHYKLFIPKKRVIEKYLVSIPSLQVQTPRXQVN

SEQ ID NO: 1420 - protein, 29 aa, Artificial Sequence
  Cyclic GFR-binding peptide
  MOD_RES (1)..(1): Xaa is C or S
XARVVMNYHYKLIVNSSDDKYLVSIPSLQ

SEQ ID NO: 1421 - protein, 31 aa, Artificial Sequence
  Cyclic GFR-binding peptide
  MOD_RES (1)..(3): Xaa is C or S
XGXGEVVMEYHYKLVVKDYEDKYLMSIPSLE

SEQ ID NO: 1422 - protein, 28 aa, Artificial Sequence
  Cyclic GFR-binding peptide
  MOD_RES (27)..(28): Xaa is C or S
EQYNKLTPVGMDDLYLVSIASLKTPVXX

SEQ ID NO: 1423 - protein, 24 aa, Artificial Sequence
  Cyclic GFR-binding peptide
ERHKRLVVKDYEDYYLMSTASLET

SEQ ID NO: 1424 - protein, 29 aa, Artificial Sequence
  Cyclic GFR-binding peptide
  MOD_RES (28)..(29): Xaa is C or S
MNYHYKLIVNSSDDKYLVSIPSLQTPAXX

SEQ ID NO: 1425 - protein, 33 aa, Artificial Sequence
  Cyclic GFR-binding peptide
  MOD_RES (1)..(3): Xaa is C or S
XKXALHDELTQYNKLFIPKKRVIELYLVSIASL

SEQ ID NO: 1426 - protein, 22 aa, Artificial Sequence
  Cyclic GFR-binding peptide
RHKRLVKPTRGVYYLISTASLD

SEQ ID NO: 1427 - protein, 41 aa, Artificial Sequence
  Cyclic GFR-binding peptide
  MOD_RES (1)..(3)..(35)..(36): Xaa is C or S
XGXAKVVMNYHYKLIVNNSSDKYLVSIPSLKTPAXXAKPVA

SEQ ID NO: 1428 - protein, 25 aa, Artificial Sequence
  Cyclic GFR-binding peptide
VSMGERHKRLTPVGMDDYYLVSTAS

SEQ ID NO: 1429 - protein, 36 aa, Artificial Sequence
  Cyclic GFR-binding peptide
  MOD_RES (1)..(1): Xaa is C or S
XALHDELTQYNKLFIPKKRVIELYLVSIASLQVQTP

SEQ ID NO: 1430 - protein, 33 aa, Artificial Sequence
  Cyclic GFR-binding peptide
  MOD_RES (1)..(33): Xaa is C or S
XGEVVMEQYNKLVVKDYEDLYLMSIASLETPVX

SEQ ID NO: 1431 - protein, 37 aa, Artificial Sequence
  Cyclic GFR-binding peptide
  MOD_RES (1)..(33)..(34): Xaa is C or S
XGEVVMDRHKRLVVKENEDYYLMSTASLETPVXXAKP

SEQ ID NO: 1432 - protein, 30 aa, Artificial Sequence
  Cyclic GFR-binding peptide
  MOD_RES (26)..(27): Xaa is C or S
RHKRLTPVGMDDYYLVSTASLKTPVXXAKG

SEQ ID NO: 1433 - protein, 33 aa, Artificial Sequence
  Cyclic GFR-binding peptide
  MOD_RES (1)..(3): Xaa is C or S
XKXSKVIMRHKRLIKPTKGIYYLISTASLDQSV

SEQ ID NO: 1434 - protein, 40 aa, Artificial Sequence
  Cyclic GFR-binding peptide
  MOD_RES (2)..(4)..(35)..(36): Xaa is C or S
SXKXSKVVMRHKRLVKPTRGVYYLISTASLDQPVXXPSAS

SEQ ID NO: 1435 - protein, 30 aa, Artificial Sequence
  Cyclic GFR-binding peptide
  MOD_RES (2)..(4): Xaa is C or S
RXGXGEVVMDQYNKLVVKENEDLYLMSIAS

SEQ ID NO: 1436 - protein, 30 aa, Artificial Sequence
  Cyclic GFR-binding peptide
ELTYHYKLFIPKKRVIEKYLVSIPSLQVQT

SEQ ID NO: 1437 - protein, 34 aa, Artificial Sequence
  Cyclic GFR-binding peptide
  MOD_RES (2)..(4): Xaa is C or S
HXGXSRVVMNYHYKLIVNSSDDKYLVSIPSLKTP

SEQ ID NO: 1438 - protein, 25 aa, Artificial Sequence
  Cyclic GFR-binding peptide
MQYNKLVKPKRGVLYLISIASLAQP

SEQ ID NO: 1439 - protein, 32 aa, Artificial Sequence
  Cyclic GFR-binding peptide
  MOD_RES (30)..(31): Xaa is C or S
VVMNYHYKLIVNSSDDKYLVSIPSLQTPAXXP

SEQ ID NO: 1440 - protein, 34 aa, Artificial Sequence
  Cyclic GFR-binding peptide
  MOD_RES (2)..(33)..(34): Xaa is C or S
KXSKVVMYHYKLVKPTRGVKYLISIPSLDQPVXX

SEQ ID NO: 1441 - protein, 26 aa, Artificial Sequence
  Cyclic GFR-binding peptide
VMERHKRLVVKDYEDYYLMSTASLET

SEQ ID NO: 1442 - protein, 32 aa, Artificial Sequence
  Cyclic GFR-binding peptide
  MOD_RES (32)..(32): Xaa is C or S
ARVVMNRYKKLIVNSSDDFYLVSIANLQTPAX

SEQ ID NO: 1443 - protein, 39 aa, Artificial Sequence
  Cyclic GFR-binding peptide
  MOD_RES (1)..(38): Xaa is C or S
XALHDELTRHKRLFIPKKRVIEYYLVSTASLQVQTPRXQ

SEQ ID NO: 1444 - protein, 35 aa, Artificial Sequence
  Cyclic GFR-binding peptide
  MOD_RES (2)..(4): Xaa is C or S
HXGXSRVVMNRYKKLIVNSSDDFYLVSIANLKTPA

SEQ ID NO: 1445 - protein, 24 aa, Artificial Sequence
  Cyclic GFR-binding peptide
MGERHKRLTPVGMDDYYLVSTASL

SEQ ID NO: 1446 - protein, 28 aa, Artificial Sequence
  Cyclic GFR-binding peptide
DELTQYNKLFIPKKRVIELYLVSIASLQ

SEQ ID NO: 1447 - protein, 33 aa, Artificial Sequence
  Cyclic GFR-binding peptide
  MOD_RES (32)..(33): Xaa is C or S
SRVVMNRHKRLIVNSSDDYYLVSTASLKTPAXX

SEQ ID NO: 1448 - protein, 41 aa, Artificial Sequence
  Cyclic GFR-binding peptide
  MOD_RES (37)..(37): Xaa is C or S
ALHDELTYHYKLFIPKKRVIEKYLVSIPSLQVQTPRXQVNR

SEQ ID NO: 1449 - protein, 23 aa, Artificial Sequence
  Cyclic GFR-binding peptide
IMQYNKLIKPTKGILYLISIASL

SEQ ID NO: 1450 - protein, 35 aa, Artificial Sequence
  Cyclic GFR-binding peptide
  MOD_RES (32)..(33): Xaa is C or S
AVSMGERHKRLTPVGMDDYYLVSTASLKTPVXXAK

SEQ ID NO: 1451 - protein, 35 aa, Artificial Sequence
  Cyclic GFR-binding peptide
  MOD_RES (2)..(4)..(35): Xaa is C or S
SXKXSKVIMYHYKLIKPTKGIKYLISIPSLDQSVX

SEQ ID NO: 1452 - protein, 32 aa, Artificial Sequence
  Cyclic GFR-binding peptide
  MOD_RES (26)..(27): Xaa is C or S
RHKRLVKPKRGVYYLISTASLAQPVXXPAASA

SEQ ID NO: 1453 - protein, 32 aa, Artificial Sequence
  Cyclic GFR-binding peptide
  MOD_RES (2)..(4): Xaa is C or S
HXGXSRVVMNQYNKLIVNSSDDLYLVSIASLK

SEQ ID NO: 1454 - protein, 29 aa, Artificial Sequence
  Cyclic GFR-binding peptide
  MOD_RES (2)..(2): Xaa is C or S
GXGEVVMEYHYKLVVKDYEDKYLMSIPSL

SEQ ID NO: 1455 - protein, 28 aa, Artificial Sequence
  Cyclic GFR-binding peptide
  MOD_RES (1)..(1): Xaa is C or S
XGEVVMDQYNKLVVKENEDLYLMSIASL

SEQ ID NO: 1456 - protein, 37 aa, Artificial Sequence
  Cyclic GFR-binding peptide
  MOD_RES (1)..(3)..(34)..(35): Xaa is C or S
XKXSRVIMQYNKLVKPKRGVLYLISIASLAQPVXXPA

SEQ ID NO: 1457 - protein, 36 aa, Artificial Sequence
  Cyclic GFR-binding peptide
  MOD_RES (32)..(33): Xaa is C or S
GEVVMDRYKKLVVKENEDFYLMSIANLETPVXXAKP

SEQ ID NO: 1458 - protein, 32 aa, Artificial Sequence
  Cyclic GFR-binding peptide
  MOD_RES (31)..(32): Xaa is C or S
SKVVMQYNKLVKPTRGVLYLISIASLDQPVXX

SEQ ID NO: 1459 - protein, 21 aa, Artificial Sequence
  Cyclic GFR-binding peptide
NYHYKLIVNNSSDKYLVSIPS

SEQ ID NO: 1460 - protein, 30 aa, Artificial Sequence
  Cyclic GFR-binding peptide
  MOD_RES (2)..(4): Xaa is C or S
SXKXSKVVMQYNKLVKPTRGVLYLISIASL

SEQ ID NO: 1461 - protein, 34 aa, Artificial Sequence
  Cyclic GFR-binding peptide
  MOD_RES (31)..(32): Xaa is C or S
RVVMNRHKRLIVNSSDDYYLVSTASLKTPAXXPK

SEQ ID NO: 1462 - protein, 29 aa, Artificial Sequence
  Cyclic GFR-binding peptide
  MOD_RES (1)..(3): Xaa is C or S
XKXSKVIMRHKRLIKPTKGIYYLISTASL

SEQ ID NO: 1463 - protein, 33 aa, Artificial Sequence
  Cyclic GFR-binding peptide
  MOD_RES (1)..(33): Xaa is C or S
XSRVVMNRHKRLIVNSSDDYYLVSTASLKTPAX

SEQ ID NO: 1464 - protein, 39 aa, Artificial Sequence
  Cyclic GFR-binding peptide
  MOD_RES (1)..(33)..(34): Xaa is C or S
XAKVVMNYHYKLIVNNSSDKYLVSIPSLKTPAXXAKPVA

SEQ ID NO: 1465 - protein, 26 aa, Artificial Sequence
  Cyclic GFR-binding peptide
VMQYNKLVKPTRGVLYLISIASLDQP

SEQ ID NO: 1466 - protein, 26 aa, Artificial Sequence
  Cyclic GFR-binding peptide
KVVMRHKRLVKPTRGVYYLISTASLD

SEQ ID NO: 1467 - protein, 34 aa, Artificial Sequence
  Cyclic GFR-binding peptide
  MOD_RES (2)..(34): Xaa is C or S
GXARVVMNRYKKLIVNSSDDFYLVSIANLQTPAX

SEQ ID NO: 1468 - protein, 37 aa, Artificial Sequence
  Cyclic GFR-binding peptide
  MOD_RES (33)..(34): Xaa is C or S
EAVSMGERYKKLTPVGMDDFYLVSIANLKTPVXXAKG

SEQ ID NO: 1469 - protein, 33 aa, Artificial Sequence
  Cyclic GFR-binding peptide
  MOD_RES (29)..(30): Xaa is C or S
VMDYHYKLVVKENEDKYLMSIPSLETPVXXAKP

SEQ ID NO: 1470 - protein, 34 aa, Artificial Sequence
  Cyclic GFR-binding peptide
  MOD_RES (1)..(33)..(34): Xaa is C or S
XAKVVMNYHYKLIVNNSSDKYLVSIPSLKTPAXX

SEQ ID NO: 1471 - protein, 30 aa, Artificial Sequence
  Cyclic GFR-binding peptide
TRHKRLFIPKKRVIEYYLVSTASLQVQTPR

SEQ ID NO: 1472 - protein, 36 aa, Artificial Sequence
  Cyclic GFR-binding peptide
  MOD_RES (2)..(33)..(34): Xaa is C or S
KXSKVIMYHYKLIKPTKGIKYLISIPSLDQSVXXPS

SEQ ID NO: 1473 - protein, 28 aa, Artificial Sequence
  Cyclic GFR-binding peptide
  MOD_RES (28)..(28): Xaa is C or S
MNRHKRLIVNSSDDYYLVSTASLQTPAX

SEQ ID NO: 1474 - protein, 32 aa, Artificial Sequence
  Cyclic GFR-binding peptide
  MOD_RES (26)..(27): Xaa is C or S
QYNKLIVNSSDDLYLVSIASLQTPAXXPKPVT

SEQ ID NO: 1475 - protein, 35 aa, Artificial Sequence
  Cyclic GFR-binding peptide
  MOD_RES (29)..(30): Xaa is C or S
VIMQYNKLIKPTKGILYLISIASLDQSVXXPSASA

SEQ ID NO: 1476 - protein, 36 aa, Artificial Sequence
  Cyclic GFR-binding peptide
  MOD_RES (1)..(33): Xaa is C or S
XSRVVMNYHYKLIVNSSDDKYLVSIPSLKTPAXTPK

SEQ ID NO: 1477 - protein, 31 aa, Artificial Sequence
  Cyclic GFR-binding peptide
  MOD_RES (27)..(27): Xaa is C or S
NRHKRLIVNSSDDYYLVSTASLKTPAXTPKT

SEQ ID NO: 1478 - protein, 29 aa, Artificial Sequence
  Cyclic GFR-binding peptide
  MOD_RES (1)..(3): Xaa is C or S
XKXSKVVMRHKRLVKPTRGVYYLISTASL

SEQ ID NO: 1479 - protein, 32 aa, Artificial Sequence
  Cyclic GFR-binding peptide
  MOD_RES (29)..(30): Xaa is C or S
VIMRHKRLIKPTKGIYYLISTASLDQSVXXPS

SEQ ID NO: 1480 - protein, 25 aa, Artificial Sequence
  Cyclic GFR-binding peptide
VVMEQYNKLVVKDYEDLYLMSIASL

SEQ ID NO: 1481 - protein, 25 aa, Artificial Sequence
  Cyclic GFR-binding peptide
IMRHKRLIKPTKGIYYLISTASLDQ

SEQ ID NO: 1482 - protein, 29 aa, Artificial Sequence
  Cyclic GFR-binding peptide
  MOD_RES (1)..(3): Xaa is C or S
XGXAKVVMNQYNKLIVNNSSDLYLVSIAS

SEQ ID NO: 1483 - protein, 35 aa, Artificial Sequence
  Cyclic GFR-binding peptide
  MOD_RES (32)..(33): Xaa is C or S
GEVVMDRYKKLVVKENEDFYLMSIANLETPVXXAK

SEQ ID NO: 1484 - protein, 32 aa, Artificial Sequence
  Cyclic GFR-binding peptide
  MOD_RES (2)..(4): Xaa is C or S
HXGXAKVVMNQYNKLIVNNSSDLYLVSIASLK

SEQ ID NO: 1485 - protein, 26 aa, Artificial Sequence
  Cyclic GFR-binding peptide
GEVVMERHKRLVVKDYEDYYLMSTAS

SEQ ID NO: 1486 - protein, 29 aa, Artificial Sequence
  Cyclic GFR-binding peptide
GEVVMDQYNKLVVKENEDLYLMSIASLET

SEQ ID NO: 1487 - protein, 27 aa, Artificial Sequence
  Cyclic GFR-binding peptide
VMQYNKLVKPTRGVLYLISIASLDQPV

SEQ ID NO: 1488 - protein, 30 aa, Artificial Sequence
  Cyclic GFR-binding peptide
  MOD_RES (27)..(27): Xaa is C or S
NYHYKLIVNSSDDKYLVSIPSLKTPAXTPK

SEQ ID NO: 1489 - protein, 32 aa, Artificial Sequence
  Cyclic GFR-binding peptide
  MOD_RES (28)..(29): Xaa is C or S
VMRHKRLVKPTRGVYYLISTASLDQPVXXPSA

SEQ ID NO: 1490 - protein, 32 aa, Artificial Sequence
  Cyclic GFR-binding peptide
  MOD_RES (29)..(30): Xaa is C or S
VMDYHYKLVVKENEDKYLMSIPSLETPVXXAK

SEQ ID NO: 1491 - protein, 25 aa, Artificial Sequence
  Cyclic GFR-binding peptide
KVIMYHYKLIKPTKGIKYLISIPSL

SEQ ID NO: 1492 - protein, 34 aa, Artificial Sequence
  Cyclic GFR-binding peptide
  MOD_RES (1)..(3)..(34): Xaa is C or S
XKXSKVVMRHKRLVKPTRGVYYLISTASLDQPVX

SEQ ID NO: 1493 - protein, 24 aa, Artificial Sequence
  Cyclic GFR-binding peptide
NQYNKLIVNSSDDLYLVSIASLQT

SEQ ID NO: 1494 - protein, 26 aa, Artificial Sequence
  Cyclic GFR-binding peptide
MGERHKRLTPVGMDDYYLVSTASLKT

SEQ ID NO: 1495 - protein, 36 aa, Artificial Sequence
  Cyclic GFR-binding peptide
  MOD_RES (2)..(4)..(36): Xaa is C or S
HXGXSRVVMNRHKRLIVNSSDDYYLVSTASLKTPAX

SEQ ID NO: 1496 - protein, 33 aa, Artificial Sequence
  Cyclic GFR-binding peptide
  MOD_RES (32)..(33): Xaa is C or S
GEVVMDRYKKLVVKENEDFYLMSIANLETPVXX

SEQ ID NO: 1497 - protein, 24 aa, Artificial Sequence
  Cyclic GFR-binding peptide
MERHKRLVVKDYEDYYLMSTASLE

SEQ ID NO: 1498 - protein, 26 aa, Artificial Sequence
  Cyclic GFR-binding peptide
  MOD_RES (1)..(1): Xaa is C or S
XSRVIMRYKKLVKPKRGVFYLISIAN

SEQ ID NO: 1499 - protein, 28 aa, Artificial Sequence
  Cyclic GFR-binding peptide
VVMNRHKRLIVNSSDDYYLVSTASLKTP

SEQ ID NO: 1500 - protein, 34 aa, Artificial Sequence
  Cyclic GFR-binding peptide
  MOD_RES (2)..(4): Xaa is C or S
HXGXAKVVMNYHYKLIVNNSSDKYLVSIPSLKTP

SEQ ID NO: 1501 - protein, 36 aa, Artificial Sequence
  Cyclic GFR-binding peptide
  MOD_RES (1)..(3)..(34)..(35): Xaa is C or S
XKXSKVIMYHYKLIKPTKGIKYLISIPSLDQSVXXP

SEQ ID NO: 1502 - protein, 24 aa, Artificial Sequence
  Cyclic GFR-binding peptide
LTRYKKLFIPKKRVIEFYLVSIAN

SEQ ID NO: 1503 - protein, 30 aa, Artificial Sequence
  Cyclic GFR-binding peptide
  MOD_RES (30)..(30): Xaa is C or S
VVMDRHKRLVVKENEDYYLMSTASLETPVX

SEQ ID NO: 1504 - protein, 25 aa, Artificial Sequence
  Cyclic GFR-binding peptide
KVVMNRYKKLIVNNSSDFYLVSIAN

SEQ ID NO: 1505 - protein, 33 aa, Artificial Sequence
  Cyclic GFR-binding peptide
  MOD_RES (31)..(32): Xaa is C or S
SKVVMYHYKLVKPTRGVKYLISIPSLDQPVXXP

SEQ ID NO: 1506 - protein, 34 aa, Artificial Sequence
  Cyclic GFR-binding peptide
  MOD_RES (28)..(29): Xaa is C or S
VMYHYKLVKPTRGVKYLISIPSLDQPVXXPSASA

SEQ ID NO: 1507 - protein, 32 aa, Artificial Sequence
  Cyclic GFR-binding peptide
  MOD_RES (1)..(32): Xaa is C or S
XSKVIMRHKRLIKPTKGIYYLISTASLDQSVX

SEQ ID NO: 1508 - protein, 32 aa, Artificial Sequence
  Cyclic GFR-binding peptide
  MOD_RES (31)..(32): Xaa is C or S
SKVVMYHYKLVKPTRGVKYLISIPSLDQPVXX

SEQ ID NO: 1509 - protein, 29 aa, Artificial Sequence
  Cyclic GFR-binding peptide
VSMGEQYNKLTPVGMDDLYLVSIASLKTP

SEQ ID NO: 1510 - protein, 39 aa, Artificial Sequence
  Cyclic GFR-binding peptide
  MOD_RES (1)..(3)..(34)..(35): Xaa is C or S
XKXSRVIMRHKRLVKPKRGVYYLISTASLAQPVXXPAAS

SEQ ID NO: 1511 - protein, 39 aa, Artificial Sequence
  Cyclic GFR-binding peptide
  MOD_RES (2)..(4)..(36)..(37): Xaa is C or S
HXGXSRVVMNYHYKLIVNSSDDKYLVSIPSLKTPAXXPK

SEQ ID NO: 1512 - protein, 27 aa, Artificial Sequence
  Cyclic GFR-binding peptide
AKVVMNYHYKLIVNNSSDKYLVSIPSL

SEQ ID NO: 1513 - protein, 33 aa, Artificial Sequence
  Cyclic GFR-binding peptide
LHDELTRHKRLFIPKKRVIEYYLVSTASLQVQT

SEQ ID NO: 1514 - protein, 35 aa, Artificial Sequence
  Cyclic GFR-binding peptide
  MOD_RES (29)..(30): Xaa is C or S
VMDRHKRLVVKENEDYYLMSTASLETPVXXAKPIK

SEQ ID NO: 1515 - protein, 33 aa, Artificial Sequence
  Cyclic GFR-binding peptide
  MOD_RES (30)..(31): Xaa is C or S
VVMNRHKRLIVNSSDDYYLVSTASLKTPAXXPK

SEQ ID NO: 1516 - protein, 28 aa, Artificial Sequence
  Cyclic GFR-binding peptide
KVVMRYKKLVKPTRGVFYLISIANLDQP

SEQ ID NO: 1517 - protein, 33 aa, Artificial Sequence
  Cyclic GFR-binding peptide
ALHDELTRYKKLFIPKKRVIEFYLVSIANLQVQ

SEQ ID NO: 1518 - protein, 34 aa, Artificial Sequence
  Cyclic GFR-binding peptide
  MOD_RES (29)..(30): Xaa is C or S
VMNYHYKLIVNSSDDKYLVSIPSLQTPAXXPKPV

SEQ ID NO: 1519 - protein, 30 aa, Artificial Sequence
  Cyclic GFR-binding peptide
  MOD_RES (26)..(27): Xaa is C or S
RYKKLVVKDYEDFYLMSIANLETPVXXAKP

SEQ ID NO: 1520 - protein, 39 aa, Artificial Sequence
  Cyclic GFR-binding peptide
  MOD_RES (1)..(3)..(34)..(35): Xaa is C or S
XKXSRVIMYHYKLVKPKRGVKYLISIPSLAQPVXXPAAS

SEQ ID NO: 1521 - protein, 30 aa, Artificial Sequence
  Cyclic GFR-binding peptide
VSMGERYKKLTPVGMDDFYLVSIANLKTPV

SEQ ID NO: 1522 - protein, 38 aa, Artificial Sequence
  Cyclic GFR-binding peptide
  MOD_RES (2)..(4)..(36): Xaa is C or S
HXGXSRVVMNYHYKLIVNSSDDKYLVSIPSLKTPAXTP

SEQ ID NO: 1523 - protein, 37 aa, Artificial Sequence
  Cyclic GFR-binding peptide
  MOD_RES (1)..(32)..(33): Xaa is C or S
XSKVVMRHKRLVKPTRGVYYLISTASLDQPVXXPSAS

SEQ ID NO: 1524 - protein, 22 aa, Artificial Sequence
  Cyclic GFR-binding peptide
MRHKRLVKPTRGVYYLISTASL

SEQ ID NO: 1525 - protein, 32 aa, Artificial Sequence
  Cyclic GFR-binding peptide
  MOD_RES (2)..(2): Xaa is C or S
GXAKVVMNYHYKLIVNNSSDKYLVSIPSLKTP

SEQ ID NO: 1526 - protein, 33 aa, Artificial Sequence
  Cyclic GFR-binding peptide
  MOD_RES (1)..(3): Xaa is C or S
XKXSRVIMQYNKLVKPKRGVLYLISIASLAQPV

SEQ ID NO: 1527 - protein, 32 aa, Artificial Sequence
  Cyclic GFR-binding peptide
  MOD_RES (27)..(28): Xaa is C or S
MRYKKLIKPTKGIFYLISIANLDQSVXXPSAS

SEQ ID NO: 1528 - protein, 31 aa, Artificial Sequence
  Cyclic GFR-binding peptide
  MOD_RES (2)..(2): Xaa is C or S
KXSRVIMQYNKLVKPKRGVLYLISIASLAQP

SEQ ID NO: 1529 - protein, 28 aa, Artificial Sequence
  Cyclic GFR-binding peptide
  MOD_RES (1)..(1): Xaa is C or S
XGEVVMERYKKLVVKDYEDFYLMSIANL

SEQ ID NO: 1530 - protein, 34 aa, Artificial Sequence
  Cyclic GFR-binding peptide
  MOD_RES (28)..(29): Xaa is C or S
MNRYKKLIVNSSDDFYLVSIANLQTPAXXPKPVT

SEQ ID NO: 1531 - protein, 38 aa, Artificial Sequence
  Cyclic GFR-binding peptide
  MOD_RES (32)..(33): Xaa is C or S
GEVVMERHKRLVVKDYEDYYLMSTASLETPVXXAKPIS

SEQ ID NO: 1532 - protein, 32 aa, Artificial Sequence
  Cyclic GFR-binding peptide
  MOD_RES (30)..(31): Xaa is C or S
VVMERHKRLVVKDYEDYYLMSTASLETPVXXA

SEQ ID NO: 1533 - protein, 24 aa, Artificial Sequence
  Cyclic GFR-binding peptide
VVMDYHYKLVVKENEDKYLMSIPS

SEQ ID NO: 1534 - protein, 24 aa, Artificial Sequence
  Cyclic GFR-binding peptide
YHYKLVKPTRGVKYLISIPSLDQP

SEQ ID NO: 1535 - protein, 32 aa, Artificial Sequence
  Cyclic GFR-binding peptide
  MOD_RES (28)..(29): Xaa is C or S
MNQYNKLIVNSSDDLYLVSIASLKTPAXXPKP

SEQ ID NO: 1536 - protein, 34 aa, Artificial Sequence
  Cyclic GFR-binding peptide
  MOD_RES (28)..(29): Xaa is C or S
GEQYNKLTPVGMDDLYLVSIASLKTPVXXAKGVK

SEQ ID NO: 1537 - protein, 33 aa, Artificial Sequence
  Cyclic GFR-binding peptide
  MOD_RES (2)..(4): Xaa is C or S
HXGXSRVVMNRHKRLIVNSSDDYYLVSTASLKT

SEQ ID NO: 1538 - protein, 32 aa, Artificial Sequence
  Cyclic GFR-binding peptide
  MOD_RES (2)..(4): Xaa is C or S
SXKXSKVIMRYKKLIKPTKGIFYLISIANLDQ

SEQ ID NO: 1539 - protein, 36 aa, Artificial Sequence
  Cyclic GFR-binding peptide
  MOD_RES (31)..(32): Xaa is C or S
VSMGERHKRLTPVGMDDYYLVSTASLKTPVXXAKGV

SEQ ID NO: 1540 - protein, 37 aa, Artificial Sequence
  Cyclic GFR-binding peptide
  MOD_RES (1)..(3): Xaa is C or S
XKXALHDELTRYKKLFIPKKRVIEFYLVSIANLQVQT

SEQ ID NO: 1541 - protein, 30 aa, Artificial Sequence
  Cyclic GFR-binding peptide
  MOD_RES (1)..(1): Xaa is C or S
XEAVSMGERHKRLTPVGMDDYYLVSTASLK

SEQ ID NO: 1542 - protein, 38 aa, Artificial Sequence
  Cyclic GFR-binding peptide
  MOD_RES (2)..(4)..(36)..(37): Xaa is C or S
RXGXGEVVMERYKKLVVKDYEDFYLMSIANLETPVXXA

SEQ ID NO: 1543 - protein, 35 aa, Artificial Sequence
  Cyclic GFR-binding peptide
  MOD_RES (1)..(3)..(35): Xaa is C or S
XGXGEVVMDRHKRLVVKENEDYYLMSTASLETPVX

SEQ ID NO: 1544 - protein, 28 aa, Artificial Sequence
  Cyclic GFR-binding peptide
  MOD_RES (26)..(27): Xaa is C or S
RHKRLIVNSSDDYYLVSTASLQTPAXXP

SEQ ID NO: 1545 - protein, 26 aa, Artificial Sequence
  Cyclic GFR-binding peptide
SRVIMRHKRLVKPKRGVYYLISTASL

SEQ ID NO: 1546 - protein, 36 aa, Artificial Sequence
  Cyclic GFR-binding peptide
  MOD_RES (30)..(31): Xaa is C or S
VVMEYHYKLVVKDYEDKYLMSIPSLETPVXXAKPIS

SEQ ID NO: 1547 - protein, 29 aa, Artificial Sequence
  Cyclic GFR-binding peptide
  MOD_RES (27)..(28): Xaa is C or S
DRHKRLVVKENEDYYLMSTASLETPVXXA

SEQ ID NO: 1548 - protein, 24 aa, Artificial Sequence
  Cyclic GFR-binding peptide
MRHKRLVKPTRGVYYLISTASLDQ

SEQ ID NO: 1549 - protein, 21 aa, Artificial Sequence
  Cyclic GFR-binding peptide
QYNKLIVNSSDDLYLVSIASL

SEQ ID NO: 1550 - protein, 29 aa, Artificial Sequence
  Cyclic GFR-binding peptide
  MOD_RES (1)..(3): Xaa is C or S
XGXGEVVMDYHYKLVVKENEDKYLMSIPS

SEQ ID NO: 1551 - protein, 38 aa, Artificial Sequence
  Cyclic GFR-binding peptide
  MOD_RES (1)..(3)..(35)..(36): Xaa is C or S
XGXGEVVMEQYNKLVVKDYEDLYLMSIASLETPVXXAK

SEQ ID NO: 1552 - protein, 28 aa, Artificial Sequence
  Cyclic GFR-binding peptide
RVVMNQYNKLIVNSSDDLYLVSIASLKT

SEQ ID NO: 1553 - protein, 37 aa, Artificial Sequence
  Cyclic GFR-binding peptide
  MOD_RES (1)..(33)..(34): Xaa is C or S
XGEVVMDQYNKLVVKENEDLYLMSIASLETPVXXAKP

SEQ ID NO: 1554 - protein, 33 aa, Artificial Sequence
  Cyclic GFR-binding peptide
  MOD_RES (28)..(29): Xaa is C or S
MNYHYKLIVNSSDDKYLVSIPSLKTPAXXPKPV

SEQ ID NO: 1555 - protein, 27 aa, Artificial Sequence
  Cyclic GFR-binding peptide
  MOD_RES (1)..(1): Xaa is C or S
XSKVIMRHKRLIKPTKGIYYLISTASL

SEQ ID NO: 1556 - protein, 24 aa, Artificial Sequence
  Cyclic GFR-binding peptide
ERHKRLTPVGMDDYYLVSTASLKT

SEQ ID NO: 1557 - protein, 35 aa, Artificial Sequence
  Cyclic GFR-binding peptide
  MOD_RES (2)..(4)..(35): Xaa is C or S
SXKXSKVVMQYNKLVKPTRGVLYLISIASLDQPVX

SEQ ID NO: 1558 - protein, 29 aa, Artificial Sequence
  Cyclic GFR-binding peptide
  MOD_RES (2)..(2): Xaa is C or S
GXSRVVMNRYKKLIVNSSDDFYLVSIANL

SEQ ID NO: 1559 - protein, 30 aa, Artificial Sequence
  Cyclic GFR-binding peptide
  MOD_RES (29)..(30): Xaa is C or S
VMDRHKRLVVKENEDYYLMSTASLETPVXX

SEQ ID NO: 1560 - protein, 24 aa, Artificial Sequence
  Cyclic GFR-binding peptide
YHYKLFIPKKRVIEKYLVSIPSLQ

SEQ ID NO: 1561 - protein, 25 aa, Artificial Sequence
  Cyclic GFR-binding peptide
ERYKKLTPVGMDDFYLVSIANLKTP

SEQ ID NO: 1562 - protein, 34 aa, Artificial Sequence
  Cyclic GFR-binding peptide
  MOD_RES (1)..(32)..(33): Xaa is C or S
XSKVVMYHYKLVKPTRGVKYLISIPSLDQPVXXP

SEQ ID NO: 1563 - protein, 33 aa, Artificial Sequence
  Cyclic GFR-binding peptide
  MOD_RES (27)..(27): Xaa is C or S
NYHYKLIVNSSDDKYLVSIPSLKTPAXTPKTVH

SEQ ID NO: 1564 - protein, 34 aa, Artificial Sequence
  Cyclic GFR-binding peptide
  MOD_RES (32)..(33): Xaa is C or S
AKVVMNRYKKLIVNNSSDFYLVSIANLKTPAXXA

SEQ ID NO: 1565 - protein, 33 aa, Artificial Sequence
  Cyclic GFR-binding peptide
  MOD_RES (32)..(33): Xaa is C or S
SRVVMNQYNKLIVNSSDDLYLVSIASLKTPAXX

SEQ ID NO: 1566 - protein, 33 aa, Artificial Sequence
  Cyclic GFR-binding peptide
  MOD_RES (2)..(2): Xaa is C or S
GXSRVVMNRHKRLIVNSSDDYYLVSTASLKTPA

SEQ ID NO: 1567 - protein, 36 aa, Artificial Sequence
  Cyclic GFR-binding peptide
  MOD_RES (34)..(34): Xaa is C or S
DELTRYKKLFIPKKRVIEFYLVSIANLQVQTPRXQV

SEQ ID NO: 1568 - protein, 33 aa, Artificial Sequence
  Cyclic GFR-binding peptide
  MOD_RES (1)..(33): Xaa is C or S
XSRVVMNQYNKLIVNSSDDLYLVSIASLKTPAX

SEQ ID NO: 1569 - protein, 24 aa, Artificial Sequence
  Cyclic GFR-binding peptide
MGEQYNKLTPVGMDDLYLVSIASL

SEQ ID NO: 1570 - protein, 31 aa, Artificial Sequence
  Cyclic GFR-binding peptide
GEVVMERHKRLVVKDYEDYYLMSTASLETPV

SEQ ID NO: 1571 - protein, 37 aa, Artificial Sequence
  Cyclic GFR-binding peptide
  MOD_RES (2)..(33)..(34): Xaa is C or S
KXSRVIMYHYKLVKPKRGVKYLISIPSLAQPVXXPAA

SEQ ID NO: 1572 - protein, 29 aa, Artificial Sequence
  Cyclic GFR-binding peptide
  MOD_RES (28)..(29): Xaa is C or S
VMRYKKLVKPTRGVFYLISIANLDQPVXX

SEQ ID NO: 1573 - protein, 29 aa, Artificial Sequence
  Cyclic GFR-binding peptide
  MOD_RES (26)..(27): Xaa is C or S
RYKKLIVNSSDDFYLVSIANLQTPAXXPK

SEQ ID NO: 1574 - protein, 29 aa, Artificial Sequence
  Cyclic GFR-binding peptide
  MOD_RES (2)..(2): Xaa is C or S
KXSKVIMRYKKLIKPTKGIFYLISIANLD

SEQ ID NO: 1575 - protein, 25 aa, Artificial Sequence
  Cyclic GFR-binding peptide
SRVIMRHKRLVKPKRGVYYLISTAS

SEQ ID NO: 1576 - protein, 38 aa, Artificial Sequence
  Cyclic GFR-binding peptide
  MOD_RES (32)..(33): Xaa is C or S
AVSMGEQYNKLTPVGMDDLYLVSIASLKTPVXXAKGVK

SEQ ID NO: 1577 - protein, 32 aa, Artificial Sequence
  Cyclic GFR-binding peptide
  MOD_RES (30)..(31): Xaa is C or S
VVMNYHYKLIVNSSDDKYLVSIPSLKTPAXXP

SEQ ID NO: 1578 - protein, 36 aa, Artificial Sequence
  Cyclic GFR-binding peptide
  MOD_RES (1)..(3)..(35)..(36): Xaa is C or S
XGXSRVVMNRYKKLIVNSSDDFYLVSIANLKTPAXX

SEQ ID NO: 1579 - protein, 32 aa, Artificial Sequence
  Cyclic GFR-binding peptide
  MOD_RES (1)..(3): Xaa is C or S
XGXARVVMNQYNKLIVNSSDDLYLVSIASLQT

SEQ ID NO: 1580 - protein, 34 aa, Artificial Sequence
  Cyclic GFR-binding peptide
  MOD_RES (1)..(3): Xaa is C or S
XGXGEVVMDYHYKLVVKENEDKYLMSIPSLETPV

SEQ ID NO: 1581 - protein, 36 aa, Artificial Sequence
  Cyclic GFR-binding peptide
  MOD_RES (1)..(3)..(35): Xaa is C or S
XGXSRVVMNRYKKLIVNSSDDFYLVSIANLKTPAXT

SEQ ID NO: 1582 - protein, 32 aa, Artificial Sequence
  Cyclic GFR-binding peptide
  MOD_RES (2)..(4): Xaa is C or S
SXKXSRVIMRHKRLVKPKRGVYYLISTASLAQ

SEQ ID NO: 1583 - protein, 23 aa, Artificial Sequence
  Cyclic GFR-binding peptide
MNRHKRLIVNSSDDYYLVSTASL

SEQ ID NO: 1584 - protein, 31 aa, Artificial Sequence
  Cyclic GFR-binding peptide
  MOD_RES (28)..(29): Xaa is C or S
MNQYNKLIVNSSDDLYLVSIASLQTPAXXPK

SEQ ID NO: 1585 - protein, 34 aa, Artificial Sequence
  Cyclic GFR-binding peptide
  MOD_RES (30)..(31): Xaa is C or S
VVMDYHYKLVVKENEDKYLMSIPSLETPVXXAKP

SEQ ID NO: 1586 - protein, 31 aa, Artificial Sequence
  Cyclic GFR-binding peptide
  MOD_RES (30)..(30): Xaa is C or S
QYNKLFIPKKRVIELYLVSIASLQVQTPRXQ

SEQ ID NO: 1587 - protein, 33 aa, Artificial Sequence
  Cyclic GFR-binding peptide
  MOD_RES (2)..(4): Xaa is C or S
SXKXSKVIMRHKRLIKPTKGIYYLISTASLDQS

SEQ ID NO: 1588 - protein, 33 aa, Artificial Sequence
  Cyclic GFR-binding peptide
  MOD_RES (2)..(4): Xaa is C or S
RXGXGEVVMEYHYKLVVKDYEDKYLMSIPSLET

SEQ ID NO: 1589 - protein, 30 aa, Artificial Sequence
  Cyclic GFR-binding peptide
  MOD_RES (28)..(29): Xaa is C or S
GERHKRLTPVGMDDYYLVSTASLKTPVXXA

SEQ ID NO: 1590 - protein, 31 aa, Artificial Sequence
  Cyclic GFR-binding peptide
  MOD_RES (26)..(27): Xaa is C or S
RYKKLVKPTRGVFYLISIANLDQPVXXPSAS

SEQ ID NO: 1591 - protein, 32 aa, Artificial Sequence
  Cyclic GFR-binding peptide
  MOD_RES (2)..(2): Xaa is C or S
GXGEVVMDQYNKLVVKENEDLYLMSIASLETP

SEQ ID NO: 1592 - protein, 24 aa, Artificial Sequence
  Cyclic GFR-binding peptide
VMDYHYKLVVKENEDKYLMSIPSL

SEQ ID NO: 1593 - protein, 30 aa, Artificial Sequence
  Cyclic GFR-binding peptide
  MOD_RES (2)..(4): Xaa is C or S
HXGXAKVVMNYHYKLIVNNSSDKYLVSIPS

SEQ ID NO: 1594 - protein, 33 aa, Artificial Sequence
  Cyclic GFR-binding peptide
  MOD_RES (27)..(28): Xaa is C or S
EQYNKLTPVGMDDLYLVSIASLKTPVXXAKGVK

SEQ ID NO: 1595 - protein, 37 aa, Artificial Sequence
  Cyclic GFR-binding peptide
  MOD_RES (2)..(4)..(35)..(36): Xaa is C or S
SXKXSKVVMRYKKLVKPTRGVFYLISIANLDQPVXXP

SEQ ID NO: 1596 - protein, 29 aa, Artificial Sequence
  Cyclic GFR-binding peptide
  MOD_RES (1)..(3): Xaa is C or S
XGXSRVVMNYHYKLIVNSSDDKYLVSIPS

SEQ ID NO: 1597 - protein, 31 aa, Artificial Sequence
  Cyclic GFR-binding peptide
  MOD_RES (2)..(2): Xaa is C or S
KXALHDELTRYKKLFIPKKRVIEFYLVSIAN

SEQ ID NO: 1598 - protein, 32 aa, Artificial Sequence
  Cyclic GFR-binding peptide
  MOD_RES (27)..(27): Xaa is C or S
NRYKKLIVNSSDDFYLVSIANLKTPAXTPKTV

SEQ ID NO: 1599 - protein, 25 aa, Artificial Sequence
  Cyclic GFR-binding peptide
ERHKRLTPVGMDDYYLVSTASLKTP

SEQ ID NO: 1600 - protein, 41 aa, Artificial Sequence
  Cyclic GFR-binding peptide
  MOD_RES (2)..(4)..(36): Xaa is C or S
HXGXSRVVMNRYKKLIVNSSDDFYLVSIANLKTPAXTPKTV

SEQ ID NO: 1601 - protein, 27 aa, Artificial Sequence
  Cyclic GFR-binding peptide
IMYHYKLIKPTKGIKYLISIPSLDQSV

SEQ ID NO: 1602 - protein, 30 aa, Artificial Sequence
  Cyclic GFR-binding peptide
GEVVMERHKRLVVKDYEDYYLMSTASLETP

SEQ ID NO: 1603 - protein, 27 aa, Artificial Sequence
  Cyclic GFR-binding peptide
GEVVMDRHKRLVVKENEDYYLMSTASL

SEQ ID NO: 1604 - protein, 30 aa, Artificial Sequence
  Cyclic GFR-binding peptide
KVVMNYHYKLIVNNSSDKYLVSIPSLKTPA

SEQ ID NO: 1605 - protein, 32 aa, Artificial Sequence
  Cyclic GFR-binding peptide
  MOD_RES (2)..(4): Xaa is C or S
RXGXGEVVMEQYNKLVVKDYEDLYLMSIASLE

SEQ ID NO: 1606 - protein, 31 aa, Artificial Sequence
  Cyclic GFR-binding peptide
LHDELTQYNKLFIPKKRVIELYLVSIASLQV

SEQ ID NO: 1607 - protein, 24 aa, Artificial Sequence
  Cyclic GFR-binding peptide
RYKKLIKPTKGIFYLISIANLDQS

SEQ ID NO: 1608 - protein, 28 aa, Artificial Sequence
  Cyclic GFR-binding peptide
AKVVMNQYNKLIVNNSSDLYLVSIASLK

SEQ ID NO: 1609 - protein, 26 aa, Artificial Sequence
  Cyclic GFR-binding peptide
RVVMNRYKKLIVNSSDDFYLVSIANL

SEQ ID NO: 1610 - protein, 32 aa, Artificial Sequence
  Cyclic GFR-binding peptide
  MOD_RES (32)..(32): Xaa is C or S
ARVVMNQYNKLIVNSSDDLYLVSIASLQTPAX

SEQ ID NO: 1611 - protein, 32 aa, Artificial Sequence
  Cyclic GFR-binding peptide
  MOD_RES (32)..(32): Xaa is C or S
SRVVMNRYKKLIVNSSDDFYLVSIANLKTPAX

SEQ ID NO: 1612 - protein, 25 aa, Artificial Sequence
  Cyclic GFR-binding peptide
TQYNKLFIPKKRVIELYLVSIASLQ

SEQ ID NO: 1613 - protein, 31 aa, Artificial Sequence
  Cyclic GFR-binding peptide
  MOD_RES (29)..(30): Xaa is C or S
VMEYHYKLVVKDYEDKYLMSIPSLETPVXXA

SEQ ID NO: 1614 - protein, 29 aa, Artificial Sequence
  Cyclic GFR-binding peptide
  MOD_RES (29)..(29): Xaa is C or S
VMEQYNKLVVKDYEDLYLMSIASLETPVX

SEQ ID NO: 1615 - protein, 35 aa, Artificial Sequence
  Cyclic GFR-binding peptide
  MOD_RES (30)..(31): Xaa is C or S
KVVMRHKRLVKPTRGVYYLISTASLDQPVXXPSAS

SEQ ID NO: 1616 - protein, 23 aa, Artificial Sequence
  Cyclic GFR-binding peptide
RYKKLIVNNSSDFYLVSIANLKT

SEQ ID NO: 1617 - protein, 25 aa, Artificial Sequence
  Cyclic GFR-binding peptide
YHYKLVVKDYEDKYLMSIPSLETPV

SEQ ID NO: 1618 - protein, 38 aa, Artificial Sequence
  Cyclic GFR-binding peptide
  MOD_RES (34)..(34): Xaa is C or S
DELTRYKKLFIPKKRVIEFYLVSIANLQVQTPRXQVNR

SEQ ID NO: 1619 - protein, 31 aa, Artificial Sequence
  Cyclic GFR-binding peptide
  MOD_RES (31)..(31): Xaa is C or S
RVVMNYHYKLIVNSSDDKYLVSIPSLKTPAX

SEQ ID NO: 1620 - protein, 26 aa, Artificial Sequence
  Cyclic GFR-binding peptide
  MOD_RES (26)..(26): Xaa is C or S
QYNKLIKPTKGILYLISIASLDQSVX

SEQ ID NO: 1621 - protein, 38 aa, Artificial Sequence
  Cyclic GFR-binding peptide
  MOD_RES (2)..(4)..(36)..(37): Xaa is C or S
HXGXSRVVMNYHYKLIVNSSDDKYLVSIPSLKTPAXXP

SEQ ID NO: 1622 - protein, 35 aa, Artificial Sequence
  Cyclic GFR-binding peptide
  MOD_RES (31)..(32): Xaa is C or S
RVVMNQYNKLIVNSSDDLYLVSIASLKTPAXXPKP

SEQ ID NO: 1623 - protein, 23 aa, Artificial Sequence
  Cyclic GFR-binding peptide
MGEQYNKLTPVGMDDLYLVSIAS

SEQ ID NO: 1624 - protein, 27 aa, Artificial Sequence
  Cyclic GFR-binding peptide
  MOD_RES (26)..(27): Xaa is C or S
RYKKLTPVGMDDFYLVSIANLKTPVXX

SEQ ID NO: 1625 - protein, 30 aa, Artificial Sequence
  Cyclic GFR-binding peptide
  MOD_RES (29)..(30): Xaa is C or S
VMNQYNKLIVNSSDDLYLVSIASLQTPAXX

SEQ ID NO: 1626 - protein, 40 aa, Artificial Sequence
  Cyclic GFR-binding peptide
  MOD_RES (1)..(3)..(36)..(37): Xaa is C or S
XGXEAVSMGEQYNKLTPVGMDDLYLVSIASLKTPVXXAKG

SEQ ID NO: 1627 - protein, 33 aa, Artificial Sequence
  Cyclic GFR-binding peptide
  MOD_RES (33)..(33): Xaa is C or S
EAVSMGERYKKLTPVGMDDFYLVSIANLKTPVX

SEQ ID NO: 1628 - protein, 31 aa, Artificial Sequence
  Cyclic GFR-binding peptide
  MOD_RES (26)..(27): Xaa is C or S
RYKKLVVKDYEDFYLMSIANLETPVXXAKPI

SEQ ID NO: 1629 - protein, 31 aa, Artificial Sequence
  Cyclic GFR-binding peptide
  MOD_RES (1)..(3): Xaa is C or S
XGXEAVSMGERYKKLTPVGMDDFYLVSIANL

SEQ ID NO: 1630 - protein, 37 aa, Artificial Sequence
  Cyclic GFR-binding peptide
  MOD_RES (32)..(33): Xaa is C or S
ARVVMNRYKKLIVNSSDDFYLVSIANLQTPAXXPKPV

SEQ ID NO: 1631 - protein, 34 aa, Artificial Sequence
  Cyclic GFR-binding peptide
  MOD_RES (34)..(34): Xaa is C or S
DELTRHKRLFIPKKRVIEYYLVSTASLQVQTPRX

SEQ ID NO: 1632 - protein, 24 aa, Artificial Sequence
  Cyclic GFR-binding peptide
KVVMQYNKLVKPTRGVLYLISIAS

SEQ ID NO: 1633 - protein, 41 aa, Artificial Sequence
  Cyclic GFR-binding peptide
  MOD_RES (2)..(35)..(36): Xaa is C or S
GXEAVSMGEQYNKLTPVGMDDLYLVSIASLKTPVXXAKGVK

SEQ ID NO: 1634 - protein, 28 aa, Artificial Sequence
  Cyclic GFR-binding peptide
VVMNRHKRLIVNSSDDYYLVSTASLQTP

SEQ ID NO: 1635 - protein, 27 aa, Artificial Sequence
  Cyclic GFR-binding peptide
  MOD_RES (27)..(27): Xaa is C or S
MYHYKLVKPKRGVKYLISIPSLAQPVX

SEQ ID NO: 1636 - protein, 32 aa, Artificial Sequence
  Cyclic GFR-binding peptide
  MOD_RES (30)..(31): Xaa is C or S
VVMERYKKLVVKDYEDFYLMSIANLETPVXXA

SEQ ID NO: 1637 - protein, 30 aa, Artificial Sequence
  Cyclic GFR-binding peptide
  MOD_RES (2)..(2): Xaa is C or S
KXSKVVMQYNKLVKPTRGVLYLISIASLDQ

SEQ ID NO: 1638 - protein, 31 aa, Artificial Sequence
  Cyclic GFR-binding peptide
LTRYKKLFIPKKRVIEFYLVSIANLQVQTPR

SEQ ID NO: 1639 - protein, 36 aa, Artificial Sequence
  Cyclic GFR-binding peptide
  MOD_RES (30)..(31): Xaa is C or S
SMGEQYNKLTPVGMDDLYLVSIASLKTPVXXAKGVK

SEQ ID NO: 1640 - protein, 27 aa, Artificial Sequence
  Cyclic GFR-binding peptide
KVIMYHYKLIKPTKGIKYLISIPSLDQ

SEQ ID NO: 1641 - protein, 40 aa, Artificial Sequence
  Cyclic GFR-binding peptide
  MOD_RES (2)..(4)..(35)..(36): Xaa is C or S
SXKXSKVIMYHYKLIKPTKGIKYLISIPSLDQSVXXPSAS

SEQ ID NO: 1642 - protein, 40 aa, Artificial Sequence
  Cyclic GFR-binding peptide
  MOD_RES (1)..(3)..(34)..(35): Xaa is C or S
XKXSKVVMQYNKLVKPTRGVLYLISIASLDQPVXXPSASA

SEQ ID NO: 1643 - protein, 34 aa, Artificial Sequence
  Cyclic GFR-binding peptide
  MOD_RES (1)..(3): Xaa is C or S
XGXEAVSMGEQYNKLTPVGMDDLYLVSIASLKTP

SEQ ID NO: 1644 - protein, 35 aa, Artificial Sequence
  Cyclic GFR-binding peptide
  MOD_RES (1)..(34)..(35): Xaa is C or S
XEAVSMGEQYNKLTPVGMDDLYLVSIASLKTPVXX

SEQ ID NO: 1645 - protein, 32 aa, Artificial Sequence
  Cyclic GFR-binding peptide
  MOD_RES (28)..(29): Xaa is C or S
MEQYNKLVVKDYEDLYLMSIASLETPVXXAKP

SEQ ID NO: 1646 - protein, 32 aa, Artificial Sequence
  Cyclic GFR-binding peptide
  MOD_RES (32)..(32): Xaa is C or S
LTRHKRLFIPKKRVIEYYLVSTASLQVQTPRX

SEQ ID NO: 1647 - protein, 36 aa, Artificial Sequence
  Cyclic GFR-binding peptide
  MOD_RES (2)..(2): Xaa is C or S
KXALHDELTRYKKLFIPKKRVIEFYLVSIANLQVQT

SEQ ID NO: 1648 - protein, 38 aa, Artificial Sequence
  Cyclic GFR-binding peptide
  MOD_RES (2)..(34)..(35): Xaa is C or S
GXSRVVMNRHKRLIVNSSDDYYLVSTASLKTPAXXPKP

SEQ ID NO: 1649 - protein, 30 aa, Artificial Sequence
  Cyclic GFR-binding peptide
  MOD_RES (2)..(2): Xaa is C or S
GXGEVVMEYHYKLVVKDYEDKYLMSIPSLE

SEQ ID NO: 1650 - protein, 41 aa, Artificial Sequence
  Cyclic GFR-binding peptide
  MOD_RES (1)..(3)..(35)..(36): Xaa is C or S
XGXGEVVMERHKRLVVKDYEDYYLMSTASLETPVXXAKPIS

SEQ ID NO: 1651 - protein, 30 aa, Artificial Sequence
  Cyclic GFR-binding peptide
  MOD_RES (2)..(4): Xaa is C or S
HXGXSRVVMNQYNKLIVNSSDDLYLVSIAS

SEQ ID NO: 1652 - protein, 37 aa, Artificial Sequence
  Cyclic GFR-binding peptide
  MOD_RES (1)..(33)..(34): Xaa is C or S
XAKVVMNRYKKLIVNNSSDFYLVSIANLKTPAXXAKP

SEQ ID NO: 1653 - protein, 35 aa, Artificial Sequence
  Cyclic GFR-binding peptide
  MOD_RES (1)..(3)..(34)..(35): Xaa is C or S
XKXSKVVMRHKRLVKPTRGVYYLISTASLDQPVXX

SEQ ID NO: 1654 - protein, 32 aa, Artificial Sequence
  Cyclic GFR-binding peptide
  MOD_RES (28)..(29): Xaa is C or S
IMQYNKLVKPKRGVLYLISIASLAQPVXXPAA

SEQ ID NO: 1655 - protein, 38 aa, Artificial Sequence
  Cyclic GFR-binding peptide
  MOD_RES (2)..(34)..(35): Xaa is C or S
GXAKVVMNYHYKLIVNNSSDKYLVSIPSLKTPAXXAKP

SEQ ID NO: 1656 - protein, 29 aa, Artificial Sequence
  Cyclic GFR-binding peptide
VVMNRHKRLIVNSSDDYYLVSTASLKTPA

SEQ ID NO: 1657 - protein, 35 aa, Artificial Sequence
  Cyclic GFR-binding peptide
  MOD_RES (32)..(33): Xaa is C or S
SRVVMNQYNKLIVNSSDDLYLVSIASLKTPAXXPK

SEQ ID NO: 1658 - protein, 38 aa, Artificial Sequence
  Cyclic GFR-binding peptide
  MOD_RES (32)..(33): Xaa is C or S
AVSMGERHKRLTPVGMDDYYLVSTASLKTPVXXAKGVK

SEQ ID NO: 1659 - protein, 23 aa, Artificial Sequence
  Cyclic GFR-binding peptide
MDYHYKLVVKENEDKYLMSIPSL

SEQ ID NO: 1660 - protein, 37 aa, Artificial Sequence
  Cyclic GFR-binding peptide
  MOD_RES (2)..(4)..(36)..(37): Xaa is C or S
RXGXGEVVMDQYNKLVVKENEDLYLMSIASLETPVXX

SEQ ID NO: 1661 - protein, 29 aa, Artificial Sequence
  Cyclic GFR-binding peptide
HDELTRYKKLFIPKKRVIEFYLVSIANLQ

SEQ ID NO: 1662 - protein, 30 aa, Artificial Sequence
  Cyclic GFR-binding peptide
  MOD_RES (28)..(28): Xaa is C or S
MNQYNKLIVNSSDDLYLVSIASLKTPAXTP

SEQ ID NO: 1663 - protein, 34 aa, Artificial Sequence
  Cyclic GFR-binding peptide
  MOD_RES (2)..(4): Xaa is C or S
SXKXSKVVMYHYKLVKPTRGVKYLISIPSLDQPV

SEQ ID NO: 1664 - protein, 27 aa, Artificial Sequence
  Cyclic GFR-binding peptide
SMGEQYNKLTPVGMDDLYLVSIASLKT

SEQ ID NO: 1665 - protein, 38 aa, Artificial Sequence
  Cyclic GFR-binding peptide
  MOD_RES (2)..(4)..(35)..(36): Xaa is C or S
SXKXSKVVMRHKRLVKPTRGVYYLISTASLDQPVXXPS

SEQ ID NO: 1666 - protein, 29 aa, Artificial Sequence
  Cyclic GFR-binding peptide
  MOD_RES (1)..(3): Xaa is C or S
XKXSKVIMYHYKLIKPTKGIKYLISIPSL

SEQ ID NO: 1667 - protein, 21 aa, Artificial Sequence
  Cyclic GFR-binding peptide
EQYNKLVVKDYEDLYLMSIAS

SEQ ID NO: 1668 - protein, 32 aa, Artificial Sequence
  Cyclic GFR-binding peptide
  MOD_RES (29)..(30): Xaa is C or S
VMNYHYKLIVNSSDDKYLVSIPSLKTPAXXPK

SEQ ID NO: 1669 - protein, 35 aa, Artificial Sequence
  Cyclic GFR-binding peptide
  MOD_RES (1)..(33)..(34): Xaa is C or S
XSRVVMNRYKKLIVNSSDDFYLVSIANLKTPAXXP

SEQ ID NO: 1670 - protein, 22 aa, Artificial Sequence
  Cyclic GFR-binding peptide
DYHYKLVVKENEDKYLMSIPSL

SEQ ID NO: 1671 - protein, 41 aa, Artificial Sequence
  Cyclic GFR-binding peptide
  MOD_RES (1)..(3)..(35): Xaa is C or S
XGXSRVVMNRHKRLIVNSSDDYYLVSTASLKTPAXTPKTVH

SEQ ID NO: 1672 - protein, 31 aa, Artificial Sequence
  Cyclic GFR-binding peptide
  MOD_RES (31)..(31): Xaa is C or S
SRVIMQYNKLVKPKRGVLYLISIASLAQPVX

SEQ ID NO: 1673 - protein, 32 aa, Artificial Sequence
  Cyclic GFR-binding peptide
  MOD_RES (26)..(27): Xaa is C or S
YHYKLVVKDYEDKYLMSIPSLETPVXXAKPIS

SEQ ID NO: 1674 - protein, 41 aa, Artificial Sequence
  Cyclic GFR-binding peptide
  MOD_RES (1)..(3)..(35)..(36): Xaa is C or S
XGXARVVMNRHKRLIVNSSDDYYLVSTASLQTPAXXPKPVT

SEQ ID NO: 1675 - protein, 34 aa, Artificial Sequence
  Cyclic GFR-binding peptide
  MOD_RES (29)..(30): Xaa is C or S
VIMQYNKLVKPKRGVLYLISIASLAQPVXXPAAS

SEQ ID NO: 1676 - protein, 25 aa, Artificial Sequence
  Cyclic GFR-binding peptide
EVVMERYKKLVVKDYEDFYLMSIAN

SEQ ID NO: 1677 - protein, 23 aa, Artificial Sequence
  Cyclic GFR-binding peptide
RYKKLIVNSSDDFYLVSIANLQT

SEQ ID NO: 1678 - protein, 39 aa, Artificial Sequence
  Cyclic GFR-binding peptide
  MOD_RES (2)..(34): Xaa is C or S
GXSRVVMNRHKRLIVNSSDDYYLVSTASLKTPAXTPKTV

SEQ ID NO: 1679 - protein, 28 aa, Artificial Sequence
  Cyclic GFR-binding peptide
MGEQYNKLTPVGMDDLYLVSIASLKTPV

SEQ ID NO: 1680 - protein, 31 aa, Artificial Sequence
  Cyclic GFR-binding peptide
  MOD_RES (31)..(31): Xaa is C or S
RVVMNQYNKLIVNSSDDLYLVSIASLKTPAX

SEQ ID NO: 1681 - protein, 41 aa, Artificial Sequence
  Cyclic GFR-binding peptide
  MOD_RES (2)..(4)..(36): Xaa is C or S
HXGXSRVVMNRHKRLIVNSSDDYYLVSTASLKTPAXTPKTV

SEQ ID NO: 1682 - protein, 24 aa, Artificial Sequence
  Cyclic GFR-binding peptide
MNRHKRLIVNSSDDYYLVSTASLQ

SEQ ID NO: 1683 - protein, 25 aa, Artificial Sequence
  Cyclic GFR-binding peptide
MNYHYKLIVNNSSDKYLVSIPSLKT

SEQ ID NO: 1684 - protein, 35 aa, Artificial Sequence
  Cyclic GFR-binding peptide
  MOD_RES (31)..(32): Xaa is C or S
RVVMNYHYKLIVNSSDDKYLVSIPSLKTPAXXPKP

SEQ ID NO: 1685 - protein, 32 aa, Artificial Sequence
  Cyclic GFR-binding peptide
  MOD_RES (31)..(31): Xaa is C or S
TQYNKLFIPKKRVIELYLVSIASLQVQTPRXQ

SEQ ID NO: 1686 - protein, 35 aa, Artificial Sequence
  Cyclic GFR-binding peptide
  MOD_RES (2)..(4): Xaa is C or S
HXGXSRVVMNRHKRLIVNSSDDYYLVSTASLKTPA

SEQ ID NO: 1687 - protein, 34 aa, Artificial Sequence
  Cyclic GFR-binding peptide
  MOD_RES (32)..(33): Xaa is C or S
AKVVMNQYNKLIVNNSSDLYLVSIASLKTPAXXA

SEQ ID NO: 1688 - protein, 32 aa, Artificial Sequence
  Cyclic GFR-binding peptide
  MOD_RES (1)..(3): Xaa is C or S
XGXAKVVMNQYNKLIVNNSSDLYLVSIASLKT

SEQ ID NO: 1689 - protein, 31 aa, Artificial Sequence
  Cyclic GFR-binding peptide
  MOD_RES (2)..(2): Xaa is C or S
GXARVVMNYHYKLIVNSSDDKYLVSIPSLQT

SEQ ID NO: 1690 - protein, 22 aa, Artificial Sequence
  Cyclic GFR-binding peptide
RYKKLFIPKKRVIEFYLVSIAN

SEQ ID NO: 1691 - protein, 41 aa, Artificial Sequence
  Cyclic GFR-binding peptide
  MOD_RES (2)..(4)..(36)..(37): Xaa is C or S
HXGXARVVMNQYNKLIVNSSDDLYLVSIASLQTPAXXPKPV

SEQ ID NO: 1692 - protein, 29 aa, Artificial Sequence
  Cyclic GFR-binding peptide
  MOD_RES (29)..(29): Xaa is C or S
MGERHKRLTPVGMDDYYLVSTASLKTPVX

SEQ ID NO: 1693 - protein, 33 aa, Artificial Sequence
  Cyclic GFR-binding peptide
  MOD_RES (30)..(30): Xaa is C or S
YHYKLFIPKKRVIEKYLVSIPSLQVQTPRXQVN

SEQ ID NO: 1694 - protein, 22 aa, Artificial Sequence
  Cyclic GFR-binding peptide
RHKRLVVKDYEDYYLMSTASLE

SEQ ID NO: 1695 - protein, 37 aa, Artificial Sequence
  Cyclic GFR-binding peptide
  MOD_RES (1)..(34)..(35): Xaa is C or S
XEAVSMGERHKRLTPVGMDDYYLVSTASLKTPVXXAK

SEQ ID NO: 1696 - protein, 30 aa, Artificial Sequence
  Cyclic GFR-binding peptide
GEVVMDYHYKLVVKENEDKYLMSIPSLETP

SEQ ID NO: 1697 - protein, 23 aa, Artificial Sequence
  Cyclic GFR-binding peptide
VVMRYKKLVKPTRGVFYLISIAN

SEQ ID NO: 1698 - protein, 32 aa, Artificial Sequence
  Cyclic GFR-binding peptide
  MOD_RES (31)..(32): Xaa is C or S
EVVMEYHYKLVVKDYEDKYLMSIPSLETPVXX

SEQ ID NO: 1699 - protein, 29 aa, Artificial Sequence
  Cyclic GFR-binding peptide
LHDELTQYNKLFIPKKRVIELYLVSIASL

SEQ ID NO: 1700 - protein, 21 aa, Artificial Sequence
  Cyclic GFR-binding peptide
YHYKLVKPTRGVKYLISIPSL

SEQ ID NO: 1701 - protein, 26 aa, Artificial Sequence
  Cyclic GFR-binding peptide
VVMDYHYKLVVKENEDKYLMSIPSLE

SEQ ID NO: 1702 - protein, 40 aa, Artificial Sequence
  Cyclic GFR-binding peptide
  MOD_RES (2)..(34)..(35): Xaa is C or S
GXARVVMNYHYKLIVNSSDDKYLVSIPSLQTPAXXPKPVT

SEQ ID NO: 1703 - protein, 29 aa, Artificial Sequence
  Cyclic GFR-binding peptide
RVVMNRHKRLIVNSSDDYYLVSTASLQTP

SEQ ID NO: 1704 - protein, 29 aa, Artificial Sequence
  Cyclic GFR-binding peptide
  MOD_RES (26)..(27): Xaa is C or S
RYKKLVVKENEDFYLMSIANLETPVXXAK

SEQ ID NO: 1705 - protein, 31 aa, Artificial Sequence
  Cyclic GFR-binding peptide
  MOD_RES (26)..(27): Xaa is C or S
YHYKLVVKENEDKYLMSIPSLETPVXXAKPI

SEQ ID NO: 1706 - protein, 26 aa, Artificial Sequence
  Cyclic GFR-binding peptide
VIMRYKKLVKPKRGVFYLISIANLAQ

SEQ ID NO: 1707 - protein, 40 aa, Artificial Sequence
  Cyclic GFR-binding peptide
  MOD_RES (1)..(3)..(34)..(35): Xaa is C or S
XKXSRVIMRYKKLVKPKRGVFYLISIANLAQPVXXPAASA

SEQ ID NO: 1708 - protein, 28 aa, Artificial Sequence
  Cyclic GFR-binding peptide
KVIMQYNKLIKPTKGILYLISIASLDQS

SEQ ID NO: 1709 - protein, 23 aa, Artificial Sequence
  Cyclic GFR-binding peptide
NRYKKLIVNSSDDFYLVSIANLQ

SEQ ID NO: 1710 - protein, 23 aa, Artificial Sequence
  Cyclic GFR-binding peptide
MRHKRLVKPTRGVYYLISTASLD

SEQ ID NO: 1711 - protein, 30 aa, Artificial Sequence
  Cyclic GFR-binding peptide
RVVMNRYKKLIVNSSDDFYLVSIANLQTPA

SEQ ID NO: 1712 - protein, 26 aa, Artificial Sequence
  Cyclic GFR-binding peptide
MDYHYKLVVKENEDKYLMSIPSLETP

SEQ ID NO: 1713 - protein, 23 aa, Artificial Sequence
  Cyclic GFR-binding peptide
RYKKLVKPTRGVFYLISIANLDQ

SEQ ID NO: 1714 - protein, 28 aa, Artificial Sequence
  Cyclic GFR-binding peptide
ARVVMNRYKKLIVNSSDDFYLVSIANLQ

SEQ ID NO: 1715 - protein, 34 aa, Artificial Sequence
  Cyclic GFR-binding peptide
  MOD_RES (30)..(31): Xaa is C or S
VVMERYKKLVVKDYEDFYLMSIANLETPVXXAKP

SEQ ID NO: 1716 - protein, 28 aa, Artificial Sequence
  Cyclic GFR-binding peptide
  MOD_RES (1)..(1): Xaa is C or S
XSRVIMRYKKLVKPKRGVFYLISIANLA

SEQ ID NO: 1717 - protein, 36 aa, Artificial Sequence
  Cyclic GFR-binding peptide
  MOD_RES (1)..(32)..(33): Xaa is C or S
XSRVIMYHYKLVKPKRGVKYLISIPSLAQPVXXPAA

SEQ ID NO: 1718 - protein, 29 aa, Artificial Sequence
  Cyclic GFR-binding peptide
AKVVMNYHYKLIVNNSSDKYLVSIPSLKT

SEQ ID NO: 1719 - protein, 28 aa, Artificial Sequence
  Cyclic GFR-binding peptide
VSMGEQYNKLTPVGMDDLYLVSIASLKT

SEQ ID NO: 1720 - protein, 24 aa, Artificial Sequence
  Cyclic GFR-binding peptide
VMDRHKRLVVKENEDYYLMSTASL

SEQ ID NO: 1721 - protein, 27 aa, Artificial Sequence
  Cyclic GFR-binding peptide
SKVIMRYKKLIKPTKGIFYLISIANLD

SEQ ID NO: 1722 - protein, 20 aa, Artificial Sequence
  Cyclic GFR-binding peptide
RHKRLTPVGMDDYYLVSTAS

SEQ ID NO: 1723 - protein, 26 aa, Artificial Sequence
  Cyclic GFR-binding peptide
VVMNYHYKLIVNSSDDKYLVSIPSLK

SEQ ID NO: 1724 - protein, 30 aa, Artificial Sequence
  Cyclic GFR-binding peptide
  MOD_RES (1)..(3): Xaa is C or S
XGXSRVVMNRYKKLIVNSSDDFYLVSIANL

SEQ ID NO: 1725 - protein, 33 aa, Artificial Sequence
  Cyclic GFR-binding peptide
  MOD_RES (33)..(33): Xaa is C or S
ELTQYNKLFIPKKRVIELYLVSIASLQVQTPRX

SEQ ID NO: 1726 - protein, 27 aa, Artificial Sequence
  Cyclic GFR-binding peptide
VVMRYKKLVKPTRGVFYLISIANLDQP

SEQ ID NO: 1727 - protein, 27 aa, Artificial Sequence
  Cyclic GFR-binding peptide
MNYHYKLIVNNSSDKYLVSIPSLKTPA

SEQ ID NO: 1728 - protein, 41 aa, Artificial Sequence
  Cyclic GFR-binding peptide
  MOD_RES (1)..(3)..(40): Xaa is C or S
XKXALHDELTQYNKLFIPKKRVIELYLVSIASLQVQTPRXQ

SEQ ID NO: 1729 - protein, 26 aa, Artificial Sequence
  Cyclic GFR-binding peptide
RYKKLFIPKKRVIEFYLVSIANLQVQ

SEQ ID NO: 1730 - protein, 32 aa, Artificial Sequence
  Cyclic GFR-binding peptide
  MOD_RES (32)..(32): Xaa is C or S
ARVVMNRHKRLIVNSSDDYYLVSTASLQTPAX

SEQ ID NO: 1731 - protein, 22 aa, Artificial Sequence
  Cyclic GFR-binding peptide
YHYKLIVNSSDDKYLVSIPSLK

SEQ ID NO: 1732 - protein, 33 aa, Artificial Sequence
  Cyclic GFR-binding peptide
  MOD_RES (1)..(32)..(33): Xaa is C or S
XSKVVMRYKKLVKPTRGVFYLISIANLDQPVXX

SEQ ID NO: 1733 - protein, 26 aa, Artificial Sequence
  Cyclic GFR-binding peptide
  MOD_RES (26)..(26): Xaa is C or S
QYNKLVVKDYEDLYLMSIASLETPVX

SEQ ID NO: 1734 - protein, 37 aa, Artificial Sequence
  Cyclic GFR-binding peptide
  MOD_RES (36)..(36): Xaa is C or S
LHDELTRHKRLFIPKKRVIEYYLVSTASLQVQTPRXQ

SEQ ID NO: 1735 - protein, 30 aa, Artificial Sequence
  Cyclic GFR-binding peptide
LHDELTQYNKLFIPKKRVIELYLVSIASLQ

SEQ ID NO: 1736 - protein, 27 aa, Artificial Sequence
  Cyclic GFR-binding peptide
GEVVMDQYNKLVVKENEDLYLMSIASL

SEQ ID NO: 1737 - protein, 30 aa, Artificial Sequence
  Cyclic GFR-binding peptide
KVVMNQYNKLIVNNSSDLYLVSIASLKTPA

SEQ ID NO: 1738 - protein, 37 aa, Artificial Sequence
  Cyclic GFR-binding peptide
  MOD_RES (2)..(4)..(35)..(36): Xaa is C or S
SXKXSRVIMRHKRLVKPKRGVYYLISTASLAQPVXXP

SEQ ID NO: 1739 - protein, 25 aa, Artificial Sequence
  Cyclic GFR-binding peptide
YHYKLIKPTKGIKYLISIPSLDQSV

SEQ ID NO: 1740 - protein, 39 aa, Artificial Sequence
  Cyclic GFR-binding peptide
  MOD_RES (2)..(34)..(35): Xaa is C or S
GXGEVVMEYHYKLVVKDYEDKYLMSIPSLETPVXXAKPI

SEQ ID NO: 1741 - protein, 37 aa, Artificial Sequence
  Cyclic GFR-binding peptide
  MOD_RES (2)..(34)..(35): Xaa is C or S
GXGEVVMEYHYKLVVKDYEDKYLMSIPSLETPVXXAK

SEQ ID NO: 1742 - protein, 28 aa, Artificial Sequence
  Cyclic GFR-binding peptide
  MOD_RES (28)..(28): Xaa is C or S
IMYHYKLVKPKRGVKYLISIPSLAQPVX

SEQ ID NO: 1743 - protein, 26 aa, Artificial Sequence
  Cyclic GFR-binding peptide
EVVMDRYKKLVVKENEDFYLMSIANL

SEQ ID NO: 1744 - protein, 27 aa, Artificial Sequence
  Cyclic GFR-binding peptide
  MOD_RES (1)..(1): Xaa is C or S
XAKVVMNQYNKLIVNNSSDLYLVSIAS

SEQ ID NO: 1745 - protein, 27 aa, Artificial Sequence
  Cyclic GFR-binding peptide
RVIMQYNKLVKPKRGVLYLISIASLAQ

SEQ ID NO: 1746 - protein, 25 aa, Artificial Sequence
  Cyclic GFR-binding peptide
MDQYNKLVVKENEDLYLMSIASLET

SEQ ID NO: 1747 - protein, 36 aa, Artificial Sequence
  Cyclic GFR-binding peptide
  MOD_RES (2)..(4)..(36): Xaa is C or S
RXGXGEVVMDYHYKLVVKENEDKYLMSIPSLETPVX

SEQ ID NO: 1748 - protein, 39 aa, Artificial Sequence
  Cyclic GFR-binding peptide
  MOD_RES (1)..(3)..(35)..(36): Xaa is C or S
XGXARVVMNRHKRLIVNSSDDYYLVSTASLQTPAXXPKP

SEQ ID NO: 1749 - protein, 27 aa, Artificial Sequence
  Cyclic GFR-binding peptide
VVMNYHYKLIVNSSDDKYLVSIPSLQT

SEQ ID NO: 1750 - protein, 32 aa, Artificial Sequence
  Cyclic GFR-binding peptide
  MOD_RES (29)..(30): Xaa is C or S
VMERYKKLVVKDYEDFYLMSIANLETPVXXAK

SEQ ID NO: 1751 - protein, 24 aa, Artificial Sequence
  Cyclic GFR-binding peptide
DYHYKLVVKENEDKYLMSIPSLET

SEQ ID NO: 1752 - protein, 34 aa, Artificial Sequence
  Cyclic GFR-binding peptide
  MOD_RES (2)..(2): Xaa is C or S
GXEAVSMGERHKRLTPVGMDDYYLVSTASLKTPV

SEQ ID NO: 1753 - protein, 30 aa, Artificial Sequence
  Cyclic GFR-binding peptide
  MOD_RES (26)..(27): Xaa is C or S
RHKRLVVKENEDYYLMSTASLETPVXXAKP

SEQ ID NO: 1754 - protein, 36 aa, Artificial Sequence
  Cyclic GFR-binding peptide
  MOD_RES (2)..(34)..(35): Xaa is C or S
GXGEVVMDQYNKLVVKENEDLYLMSIASLETPVXXA

SEQ ID NO: 1755 - protein, 26 aa, Artificial Sequence
  Cyclic GFR-binding peptide
RVIMYHYKLVKPKRGVKYLISIPSLA

SEQ ID NO: 1756 - protein, 31 aa, Artificial Sequence
  Cyclic GFR-binding peptide
  MOD_RES (30)..(31): Xaa is C or S
VVMDRHKRLVVKENEDYYLMSTASLETPVXX

SEQ ID NO: 1757 - protein, 26 aa, Artificial Sequence
  Cyclic GFR-binding peptide
DELTRHKRLFIPKKRVIEYYLVSTAS

SEQ ID NO: 1758 - protein, 27 aa, Artificial Sequence
  Cyclic GFR-binding peptide
  MOD_RES (2)..(2): Xaa is C or S
KXSKVIMQYNKLIKPTKGILYLISIAS

SEQ ID NO: 1759 - protein, 28 aa, Artificial Sequence
  Cyclic GFR-binding peptide
GEVVMDYHYKLVVKENEDKYLMSIPSLE

SEQ ID NO: 1760 - protein, 35 aa, Artificial Sequence
  Cyclic GFR-binding peptide
  MOD_RES (2)..(4): Xaa is C or S
EXKXALHDELTRHKRLFIPKKRVIEYYLVSTASLQ

SEQ ID NO: 1761 - protein, 33 aa, Artificial Sequence
  Cyclic GFR-binding peptide
  MOD_RES (2)..(2): Xaa is C or S
GXGEVVMERYKKLVVKDYEDFYLMSIANLETPV

SEQ ID NO: 1762 - protein, 24 aa, Artificial Sequence
  Cyclic GFR-binding peptide
KVIMYHYKLIKPTKGIKYLISIPS

SEQ ID NO: 1763 - protein, 36 aa, Artificial Sequence
  Cyclic GFR-binding peptide
ALHDELTRYKKLFIPKKRVIEFYLVSIANLQVQTPR

SEQ ID NO: 1764 - protein, 27 aa, Artificial Sequence
  Cyclic GFR-binding peptide
  MOD_RES (26)..(27): Xaa is C or S
RYKKLIKPTKGIFYLISIANLDQSVXX

SEQ ID NO: 1765 - protein, 27 aa, Artificial Sequence
  Cyclic GFR-binding peptide
  MOD_RES (26)..(27): Xaa is C or S
QYNKLTPVGMDDLYLVSIASLKTPVXX

SEQ ID NO: 1766 - protein, 31 aa, Artificial Sequence
  Cyclic GFR-binding peptide
  MOD_RES (27)..(28): Xaa is C or S
NYHYKLIVNSSDDKYLVSIPSLKTPAXXPKP

SEQ ID NO: 1767 - protein, 35 aa, Artificial Sequence
  Cyclic GFR-binding peptide
  MOD_RES (1)..(32)..(33): Xaa is C or S
XSRVIMYHYKLVKPKRGVKYLISIPSLAQPVXXPA

SEQ ID NO: 1768 - protein, 34 aa, Artificial Sequence
  Cyclic GFR-binding peptide
  MOD_RES (32)..(33): Xaa is C or S
SRVVMNRHKRLIVNSSDDYYLVSTASLKTPAXXP

SEQ ID NO: 1769 - protein, 29 aa, Artificial Sequence
  Cyclic GFR-binding peptide
  MOD_RES (2)..(2): Xaa is C or S
GXAKVVMNRYKKLIVNNSSDFYLVSIANL

SEQ ID NO: 1770 - protein, 26 aa, Artificial Sequence
  Cyclic GFR-binding peptide
KVVMNQYNKLIVNNSSDLYLVSIASL

SEQ ID NO: 1771 - protein, 32 aa, Artificial Sequence
  Cyclic GFR-binding peptide
  MOD_RES (2)..(2): Xaa is C or S
GXARVVMNRHKRLIVNSSDDYYLVSTASLQTP

SEQ ID NO: 1772 - protein, 33 aa, Artificial Sequence
  Cyclic GFR-binding peptide
  MOD_RES (1)..(1): Xaa is C or S
XALHDELTRYKKLFIPKKRVIEFYLVSIANLQV

SEQ ID NO: 1773 - protein, 33 aa, Artificial Sequence
  Cyclic GFR-binding peptide
  MOD_RES (31)..(32): Xaa is C or S
SKVIMRHKRLIKPTKGIYYLISTASLDQSVXXP

SEQ ID NO: 1774 - protein, 38 aa, Artificial Sequence
  Cyclic GFR-binding peptide
  MOD_RES (2)..(34): Xaa is C or S
GXSRVVMNRHKRLIVNSSDDYYLVSTASLKTPAXTPKT

SEQ ID NO: 1775 - protein, 33 aa, Artificial Sequence
  Cyclic GFR-binding peptide
  MOD_RES (29)..(30): Xaa is C or S
VMDRHKRLVVKENEDYYLMSTASLETPVXXAKP

SEQ ID NO: 1776 - protein, 24 aa, Artificial Sequence
  Cyclic GFR-binding peptide
VMNRYKKLIVNSSDDFYLVSIANL

SEQ ID NO: 1777 - protein, 37 aa, Artificial Sequence
  Cyclic GFR-binding peptide
  MOD_RES (32)..(32): Xaa is C or S
SRVVMNRHKRLIVNSSDDYYLVSTASLKTPAXTPKTV

SEQ ID NO: 1778 - protein, 29 aa, Artificial Sequence
  Cyclic GFR-binding peptide
SMGERYKKLTPVGMDDFYLVSIANLKTPV

SEQ ID NO: 1779 - protein, 35 aa, Artificial Sequence
  Cyclic GFR-binding peptide
  MOD_RES (1)..(3)..(35): Xaa is C or S
XGXSRVVMNQYNKLIVNSSDDLYLVSIASLKTPAX

SEQ ID NO: 1780 - protein, 28 aa, Artificial Sequence
  Cyclic GFR-binding peptide
VMNYHYKLIVNNSSDKYLVSIPSLKTPA

SEQ ID NO: 1781 - protein, 28 aa, Artificial Sequence
  Cyclic GFR-binding peptide
  MOD_RES (27)..(28): Xaa is C or S
DRYKKLVVKENEDFYLMSIANLETPVXX

SEQ ID NO: 1782 - protein, 34 aa, Artificial Sequence
  Cyclic GFR-binding peptide
  MOD_RES (30)..(31): Xaa is C or S
VVMNYHYKLIVNSSDDKYLVSIPSLQTPAXXPKP

SEQ ID NO: 1783 - protein, 30 aa, Artificial Sequence
  Cyclic GFR-binding peptide
  MOD_RES (27)..(28): Xaa is C or S
NRHKRLIVNSSDDYYLVSTASLQTPAXXPK

SEQ ID NO: 1784 - protein, 35 aa, Artificial Sequence
  Cyclic GFR-binding peptide
  MOD_RES (32)..(33): Xaa is C or S
ARVVMNQYNKLIVNSSDDLYLVSIASLQTPAXXPK

SEQ ID NO: 1785 - protein, 31 aa, Artificial Sequence
  Cyclic GFR-binding peptide
  MOD_RES (28)..(29): Xaa is C or S
MNYHYKLIVNNSSDKYLVSIPSLKTPAXXAK

SEQ ID NO: 1786 - protein, 33 aa, Artificial Sequence
  Cyclic GFR-binding peptide
  MOD_RES (27)..(28): Xaa is C or S
MYHYKLIKPTKGIKYLISIPSLDQSVXXPSASA

SEQ ID NO: 1787 - protein, 24 aa, Artificial Sequence
  Cyclic GFR-binding peptide
VMDRYKKLVVKENEDFYLMSIANL

SEQ ID NO: 1788 - protein, 31 aa, Artificial Sequence
  Cyclic GFR-binding peptide
  MOD_RES (27)..(28): Xaa is C or S
MRHKRLVKPTRGVYYLISTASLDQPVXXPSA

SEQ ID NO: 1789 - protein, 39 aa, Artificial Sequence
  Cyclic GFR-binding peptide
  MOD_RES (36)..(36): Xaa is C or S
LHDELTYHYKLFIPKKRVIEKYLVSIPSLQVQTPRXQVN

SEQ ID NO: 1790 - protein, 23 aa, Artificial Sequence
  Cyclic GFR-binding peptide
RYKKLVVKENEDFYLMSIANLET

SEQ ID NO: 1791 - protein, 25 aa, Artificial Sequence
  Cyclic GFR-binding peptide
MRHKRLVKPTRGVYYLISTASLDQP

SEQ ID NO: 1792 - protein, 26 aa, Artificial Sequence
  Cyclic GFR-binding peptide
GEVVMDRHKRLVVKENEDYYLMSTAS

SEQ ID NO: 1793 - protein, 25 aa, Artificial Sequence
  Cyclic GFR-binding peptide
MNRYKKLIVNNSSDFYLVSIANLKT

SEQ ID NO: 1794 - protein, 40 aa, Artificial Sequence
  Cyclic GFR-binding peptide
  MOD_RES (2)..(4)..(35)..(36): Xaa is C or S
SXKXSRVIMRHKRLVKPKRGVYYLISTASLAQPVXXPAAS

SEQ ID NO: 1795 - protein, 35 aa, Artificial Sequence
  Cyclic GFR-binding peptide
  MOD_RES (2)..(33)..(34): Xaa is C or S
KXSKVIMQYNKLIKPTKGILYLISIASLDQSVXXP

SEQ ID NO: 1796 - protein, 24 aa, Artificial Sequence
  Cyclic GFR-binding peptide
VVMQYNKLVKPTRGVLYLISIASL

SEQ ID NO: 1797 - protein, 27 aa, Artificial Sequence
  Cyclic GFR-binding peptide
  MOD_RES (1)..(1): Xaa is C or S
XSRVVMNRHKRLIVNSSDDYYLVSTAS

SEQ ID NO: 1798 - protein, 29 aa, Artificial Sequence
  Cyclic GFR-binding peptide
SKVVMRHKRLVKPTRGVYYLISTASLDQP

SEQ ID NO: 1799 - protein, 24 aa, Artificial Sequence
  Cyclic GFR-binding peptide
VVMDRYKKLVVKENEDFYLMSIAN

SEQ ID NO: 1800 - protein, 27 aa, Artificial Sequence
  Cyclic GFR-binding peptide
  MOD_RES (26)..(27): Xaa is C or S
RHKRLVKPTRGVYYLISTASLDQPVXX

SEQ ID NO: 1801 - protein, 31 aa, Artificial Sequence
  Cyclic GFR-binding peptide
  MOD_RES (26)..(27): Xaa is C or S
RHKRLVVKENEDYYLMSTASLETPVXXAKPI

SEQ ID NO: 1802 - protein, 45 aa, Artificial Sequence
  Cyclic GFR-binding peptide
  MOD_RES (2)..(4)..(41): Xaa is C or S
EXKXALHDELTRHKRLFIPKKRVIEYYLVSTASLQVQTPRXQVNR

SEQ ID NO: 1803 - protein, 26 aa, Artificial Sequence
  Cyclic GFR-binding peptide
VMEYHYKLVVKDYEDKYLMSIPSLET

SEQ ID NO: 1804 - protein, 30 aa, Artificial Sequence
  Cyclic GFR-binding peptide
  MOD_RES (29)..(30): Xaa is C or S
VIMRYKKLVKPKRGVFYLISIANLAQPVXX

SEQ ID NO: 1805 - protein, 29 aa, Artificial Sequence
  Cyclic GFR-binding peptide
VVMDYHYKLVVKENEDKYLMSIPSLETPV

SEQ ID NO: 1806 - protein, 41 aa, Artificial Sequence
  Cyclic GFR-binding peptide
  MOD_RES (2)..(4)..(36)..(37): Xaa is C or S
RXGXGEVVMEYHYKLVVKDYEDKYLMSIPSLETPVXXAKPI

SEQ ID NO: 1807 - protein, 42 aa, Artificial Sequence
  Cyclic GFR-binding peptide
  MOD_RES (2)..(4)..(36)..(37): Xaa is C or S
RXGXGEVVMDRHKRLVVKENEDYYLMSTASLETPVXXAKPIK

SEQ ID NO: 1808 - protein, 35 aa, Artificial Sequence
  Cyclic GFR-binding peptide
  MOD_RES (2)..(2): Xaa is C or S
KXALHDELTRHKRLFIPKKRVIEYYLVSTASLQVQ

SEQ ID NO: 1809 - protein, 29 aa, Artificial Sequence
  Cyclic GFR-binding peptide
  MOD_RES (1)..(3): Xaa is C or S
XGXARVVMNRHKRLIVNSSDDYYLVSTAS

SEQ ID NO: 1810 - protein, 40 aa, Artificial Sequence
  Cyclic GFR-binding peptide
  MOD_RES (2)..(39): Xaa is C or S
KXALHDELTYHYKLFIPKKRVIEKYLVSIPSLQVQTPRXQ

SEQ ID NO: 1811 - protein, 38 aa, Artificial Sequence
  Cyclic GFR-binding peptide
  MOD_RES (1)..(3)..(35): Xaa is C or S
XGXSRVVMNQYNKLIVNSSDDLYLVSIASLKTPAXTPK

SEQ ID NO: 1812 - protein, 35 aa, Artificial Sequence
  Cyclic GFR-binding peptide
  MOD_RES (32)..(33): Xaa is C or S
GEVVMERYKKLVVKDYEDFYLMSIANLETPVXXAK

SEQ ID NO: 1813 - protein, 29 aa, Artificial Sequence
  Cyclic GFR-binding peptide
  MOD_RES (26)..(27): Xaa is C or S
RHKRLIVNSSDDYYLVSTASLQTPAXXPK

SEQ ID NO: 1814 - protein, 37 aa, Artificial Sequence
  Cyclic GFR-binding peptide
  MOD_RES (2)..(2): Xaa is C or S
KXALHDELTYHYKLFIPKKRVIEKYLVSIPSLQVQTP

SEQ ID NO: 1815 - protein, 32 aa, Artificial Sequence
  Cyclic GFR-binding peptide
  MOD_RES (2)..(2): Xaa is C or S
GXGEVVMDRYKKLVVKENEDFYLMSIANLETP

SEQ ID NO: 1816 - protein, 37 aa, Artificial Sequence
  Cyclic GFR-binding peptide
  MOD_RES (2)..(33)..(34): Xaa is C or S
KXSKVVMRHKRLVKPTRGVYYLISTASLDQPVXXPSA

SEQ ID NO: 1817 - protein, 32 aa, Artificial Sequence
  Cyclic GFR-binding peptide
  MOD_RES (26)..(27): Xaa is C or S
RYKKLIVNSSDDFYLVSIANLKTPAXXPKPVY

SEQ ID NO: 1818 - protein, 33 aa, Artificial Sequence
  Cyclic GFR-binding peptide
  MOD_RES (1)..(3): Xaa is C or S
XKXALHDELTRHKRLFIPKKRVIEYYLVSTASL

SEQ ID NO: 1819 - protein, 28 aa, Artificial Sequence
  Cyclic GFR-binding peptide
  MOD_RES (26)..(27): Xaa is C or S
YHYKLIVNSSDDKYLVSIPSLQTPAXXP

SEQ ID NO: 1820 - protein, 33 aa, Artificial Sequence
  Cyclic GFR-binding peptide
  MOD_RES (28)..(29): Xaa is C or S
MEYHYKLVVKDYEDKYLMSIPSLETPVXXAKPI

SEQ ID NO: 1821 - protein, 25 aa, Artificial Sequence
  Cyclic GFR-binding peptide
RHKRLIKPTKGIYYLISTASLDQSV

SEQ ID NO: 1822 - protein, 34 aa, Artificial Sequence
  Cyclic GFR-binding peptide
  MOD_RES (29)..(30): Xaa is C or S
VMEQYNKLVVKDYEDLYLMSIASLETPVXXAKPI

SEQ ID NO: 1823 - protein, 31 aa, Artificial Sequence
  Cyclic GFR-binding peptide
  MOD_RES (27)..(28): Xaa is C or S
NRYKKLIVNNSSDFYLVSIANLKTPAXXAKP

SEQ ID NO: 1824 - protein, 28 aa, Artificial Sequence
  Cyclic GFR-binding peptide
  MOD_RES (27)..(28): Xaa is C or S
ERYKKLVVKDYEDFYLMSIANLETPVXX

SEQ ID NO: 1825 - protein, 29 aa, Artificial Sequence
  Cyclic GFR-binding peptide
VVMDRHKRLVVKENEDYYLMSTASLETPV

SEQ ID NO: 1826 - protein, 37 aa, Artificial Sequence
  Cyclic GFR-binding peptide
  MOD_RES (2)..(33)..(34): Xaa is C or S
KXSKVVMQYNKLVKPTRGVLYLISIASLDQPVXXPSA

SEQ ID NO: 1827 - protein, 41 aa, Artificial Sequence
  Cyclic GFR-binding peptide
  MOD_RES (2)..(4)..(35)..(36): Xaa is C or S
SXKXSKVVMQYNKLVKPTRGVLYLISIASLDQPVXXPSASA

SEQ ID NO: 1828 - protein, 26 aa, Artificial Sequence
  Cyclic GFR-binding peptide
VVMNRHKRLIVNSSDDYYLVSTASLQ

SEQ ID NO: 1829 - protein, 27 aa, Artificial Sequence
  Cyclic GFR-binding peptide
IMQYNKLIKPTKGILYLISIASLDQSV

SEQ ID NO: 1830 - protein, 31 aa, Artificial Sequence
  Cyclic GFR-binding peptide
  MOD_RES (30)..(31): Xaa is C or S
VVMNQYNKLIVNNSSDLYLVSIASLKTPAXX

SEQ ID NO: 1831 - protein, 30 aa, Artificial Sequence
  Cyclic GFR-binding peptide
  MOD_RES (2)..(2): Xaa is C or S
KXSKVVMRHKRLVKPTRGVYYLISTASLDQ

SEQ ID NO: 1832 - protein, 27 aa, Artificial Sequence
  Cyclic GFR-binding peptide
RVVMNYHYKLIVNSSDDKYLVSIPSLQ

SEQ ID NO: 1833 - protein, 27 aa, Artificial Sequence
  Cyclic GFR-binding peptide
IKPTKGIQYNKLIKPTKGILYLISIAS

SEQ ID NO: 1834 - protein, 33 aa, Artificial Sequence
  Cyclic GFR-binding peptide
  MOD_RES (32)..(33): Xaa is C or S
AKVVMNYHYKLIVNNSSDKYLVSIPSLKTPAXX

SEQ ID NO: 1835 - protein, 27 aa, Artificial Sequence
  Cyclic GFR-binding peptide
VSMGEQYNKLTPVGMDDLYLVSIASLK

SEQ ID NO: 1836 - protein, 22 aa, Artificial Sequence
  Cyclic GFR-binding peptide
YHYKLVKPTRGVKYLISIPSLD

SEQ ID NO: 1837 - protein, 26 aa, Artificial Sequence
  Cyclic GFR-binding peptide
VVMDRHKRLVVKENEDYYLMSTASLE

SEQ ID NO: 1838 - protein, 26 aa, Artificial Sequence
  Cyclic GFR-binding peptide
VMNYHYKLIVNSSDDKYLVSIPSLQT

SEQ ID NO: 1839 - protein, 29 aa, Artificial Sequence
  Cyclic GFR-binding peptide
TRHKRLFIPKKRVIEYYLVSTASLQVQTP

SEQ ID NO: 1840 - protein, 27 aa, Artificial Sequence
  Cyclic GFR-binding peptide
KVVMNRYKKLIVNNSSDFYLVSIANLK

SEQ ID NO: 1841 - protein, 36 aa, Artificial Sequence
  Cyclic GFR-binding peptide
  MOD_RES (2)..(34): Xaa is C or S
GXSRVVMNRHKRLIVNSSDDYYLVSTASLKTPAXTP

SEQ ID NO: 1842 - protein, 35 aa, Artificial Sequence
  Cyclic GFR-binding peptide
  MOD_RES (32)..(33): Xaa is C or S
SRVVMNRYKKLIVNSSDDFYLVSIANLKTPAXXPK

SEQ ID NO: 1843 - protein, 40 aa, Artificial Sequence
  Cyclic GFR-binding peptide
  MOD_RES (2)..(34)..(35): Xaa is C or S
GXSRVVMNYHYKLIVNSSDDKYLVSIPSLKTPAXXPKPVY

SEQ ID NO: 1844 - protein, 39 aa, Artificial Sequence
  Cyclic GFR-binding peptide
  MOD_RES (2)..(33)..(34): Xaa is C or S
KXSKVVMYHYKLVKPTRGVKYLISIPSLDQPVXXPSASA

SEQ ID NO: 1845 - protein, 32 aa, Artificial Sequence
  Cyclic GFR-binding peptide
  MOD_RES (29)..(30): Xaa is C or S
VIMYHYKLIKPTKGIKYLISIPSLDQSVXXPS

SEQ ID NO: 1846 - protein, 32 aa, Artificial Sequence
  Cyclic GFR-binding peptide
  MOD_RES (26)..(27): Xaa is C or S
RYKKLVKPTRGVFYLISIANLDQPVXXPSASA

SEQ ID NO: 1847 - protein, 35 aa, Artificial Sequence
  Cyclic GFR-binding peptide
  MOD_RES (29)..(30): Xaa is C or S
VMDYHYKLVVKENEDKYLMSIPSLETPVXXAKPIK

SEQ ID NO: 1848 - protein, 36 aa, Artificial Sequence
  Cyclic GFR-binding peptide
  MOD_RES (30)..(31): Xaa is C or S
KVIMYHYKLIKPTKGIKYLISIPSLDQSVXXPSASA

SEQ ID NO: 1849 - protein, 36 aa, Artificial Sequence
  Cyclic GFR-binding peptide
  MOD_RES (2)..(34)..(35): Xaa is C or S
GXSRVVMNRYKKLIVNSSDDFYLVSIANLKTPAXXP

SEQ ID NO: 1850 - protein, 28 aa, Artificial Sequence
  Cyclic GFR-binding peptide
RVVMNRHKRLIVNSSDDYYLVSTASLKT

SEQ ID NO: 1851 - protein, 39 aa, Artificial Sequence
  Cyclic GFR-binding peptide
  MOD_RES (1)..(33)..(34): Xaa is C or S
XSRVVMNYHYKLIVNSSDDKYLVSIPSLKTPAXXPKPVY

SEQ ID NO: 1852 - protein, 31 aa, Artificial Sequence
  Cyclic GFR-binding peptide
  MOD_RES (31)..(31): Xaa is C or S
SKVIMRYKKLIKPTKGIFYLISIANLDQSVX

SEQ ID NO: 1853 - protein, 32 aa, Artificial Sequence
  Cyclic GFR-binding peptide
ELTYHYKLFIPKKRVIEKYLVSIPSLQVQTPR

SEQ ID NO: 1854 - protein, 29 aa, Artificial Sequence
  Cyclic GFR-binding peptide
  MOD_RES (2)..(2): Xaa is C or S
GXAKVVMNYHYKLIVNNSSDKYLVSIPSL

SEQ ID NO: 1855 - protein, 26 aa, Artificial Sequence
  Cyclic GFR-binding peptide
  MOD_RES (26)..(26): Xaa is C or S
RYKKLIVNSSDDFYLVSIANLQTPAX

SEQ ID NO: 1856 - protein, 32 aa, Artificial Sequence
  Cyclic GFR-binding peptide
  MOD_RES (31)..(32): Xaa is C or S
SKVIMRHKRLIKPTKGIYYLISTASLDQSVXX

SEQ ID NO: 1857 - protein, 26 aa, Artificial Sequence
  Cyclic GFR-binding peptide
VVMERYKKLVVKDYEDFYLMSIANLE

SEQ ID NO: 1858 - protein, 37 aa, Artificial Sequence
  Cyclic GFR-binding peptide
  MOD_RES (2)..(4): Xaa is C or S
EXKXALHDELTQYNKLFIPKKRVIELYLVSIASLQVQ

SEQ ID NO: 1859 - protein, 27 aa, Artificial Sequence
  Cyclic GFR-binding peptide
  MOD_RES (27)..(27): Xaa is C or S
NQYNKLIVNSSDDLYLVSIASLQTPAX

SEQ ID NO: 1860 - protein, 41 aa, Artificial Sequence
  Cyclic GFR-binding peptide
  MOD_RES (1)..(3)..(40): Xaa is C or S
XKXALHDELTRHKRLFIPKKRVIEYYLVSTASLQVQTPRXQ

SEQ ID NO: 1861 - protein, 35 aa, Artificial Sequence
  Cyclic GFR-binding peptide
  MOD_RES (30)..(31): Xaa is C or S
VVMDRYKKLVVKENEDFYLMSIANLETPVXXAKPI

SEQ ID NO: 1862 - protein, 29 aa, Artificial Sequence
  Cyclic GFR-binding peptide
  MOD_RES (28)..(29): Xaa is C or S
IMRYKKLIKPTKGIFYLISIANLDQSVXX

SEQ ID NO: 1863 - protein, 35 aa, Artificial Sequence
  Cyclic GFR-binding peptide
  MOD_RES (1)..(33)..(34): Xaa is C or S
XARVVMNQYNKLIVNSSDDLYLVSIASLQTPAXXP

SEQ ID NO: 1864 - protein, 32 aa, Artificial Sequence
  Cyclic GFR-binding peptide
  MOD_RES (27)..(28): Xaa is C or S
MQYNKLVKPTRGVLYLISIASLDQPVXXPSAS

SEQ ID NO: 1865 - protein, 22 aa, Artificial Sequence
  Cyclic GFR-binding peptide
MEQYNKLVVKDYEDLYLMSIAS

SEQ ID NO: 1866 - protein, 36 aa, Artificial Sequence
  Cyclic GFR-binding peptide
  MOD_RES (1)..(3): Xaa is C or S
XKXALHDELTRHKRLFIPKKRVIEYYLVSTASLQVQ

SEQ ID NO: 1867 - protein, 26 aa, Artificial Sequence
  Cyclic GFR-binding peptide
IMQYNKLIKPTKGILYLISIASLDQS

SEQ ID NO: 1868 - protein, 26 aa, Artificial Sequence
  Cyclic GFR-binding peptide
IMYHYKLIKPTKGIKYLISIPSLDQS

SEQ ID NO: 1869 - protein, 35 aa, Artificial Sequence
  Cyclic GFR-binding peptide
  MOD_RES (31)..(32): Xaa is C or S
EVVMDYHYKLVVKENEDKYLMSIPSLETPVXXAKP

SEQ ID NO: 1870 - protein, 30 aa, Artificial Sequence
  Cyclic GFR-binding peptide
  MOD_RES (26)..(27): Xaa is C or S
YHYKLVVKENEDKYLMSIPSLETPVXXAKP

SEQ ID NO: 1871 - protein, 25 aa, Artificial Sequence
  Cyclic GFR-binding peptide
VMQYNKLVKPTRGVLYLISIASLDQ

SEQ ID NO: 1872 - protein, 21 aa, Artificial Sequence
  Cyclic GFR-binding peptide
RHKRLIVNSSDDYYLVSTASL

SEQ ID NO: 1873 - protein, 34 aa, Artificial Sequence
  Cyclic GFR-binding peptide
  MOD_RES (1)..(3): Xaa is C or S
XGXARVVMNRHKRLIVNSSDDYYLVSTASLQTPA

SEQ ID NO: 1874 - protein, 34 aa, Artificial Sequence
  Cyclic GFR-binding peptide
  MOD_RES (1)..(32)..(33): Xaa is C or S
XSRVIMRYKKLVKPKRGVFYLISIANLAQPVXXP

SEQ ID NO: 1875 - protein, 30 aa, Artificial Sequence
  Cyclic GFR-binding peptide
  MOD_RES (27)..(28): Xaa is C or S
MRHKRLVKPTRGVYYLISTASLDQPVXXPS

SEQ ID NO: 1876 - protein, 28 aa, Artificial Sequence
  Cyclic GFR-binding peptide
KVVMNQYNKLIVNNSSDLYLVSIASLKT

SEQ ID NO: 1877 - protein, 31 aa, Artificial Sequence
  Cyclic GFR-binding peptide
  MOD_RES (2)..(2): Xaa is C or S
KXSKVIMRHKRLIKPTKGIYYLISTASLDQS

SEQ ID NO: 1878 - protein, 38 aa, Artificial Sequence
  Cyclic GFR-binding peptide
  MOD_RES (1)..(32)..(33): Xaa is C or S
XSRVIMRYKKLVKPKRGVFYLISIANLAQPVXXPAASA

SEQ ID NO: 1879 - protein, 26 aa, Artificial Sequence
  Cyclic GFR-binding peptide
MRHKRLVKPKRGVYYLISTASLAQPV

SEQ ID NO: 1880 - protein, 30 aa, Artificial Sequence
  Cyclic GFR-binding peptide
  MOD_RES (1)..(3): Xaa is C or S
XGXEAVSMGERHKRLTPVGMDDYYLVSTAS

SEQ ID NO: 1881 - protein, 39 aa, Artificial Sequence
  Cyclic GFR-binding peptide
  MOD_RES (2)..(4)..(36): Xaa is C or S
HXGXSRVVMNRYKKLIVNSSDDFYLVSIANLKTPAXTPK

SEQ ID NO: 1882 - protein, 32 aa, Artificial Sequence
  Cyclic GFR-binding peptide
  MOD_RES (27)..(28): Xaa is C or S
NYHYKLIVNNSSDKYLVSIPSLKTPAXXAKPV

SEQ ID NO: 1883 - protein, 28 aa, Artificial Sequence
  Cyclic GFR-binding peptide
  MOD_RES (1)..(1): Xaa is C or S
XSKVIMRHKRLIKPTKGIYYLISTASLD

SEQ ID NO: 1884 - protein, 37 aa, Artificial Sequence
  Cyclic GFR-binding peptide
  MOD_RES (31)..(31): Xaa is C or S
RVVMNRYKKLIVNSSDDFYLVSIANLKTPAXTPKTVH

SEQ ID NO: 1885 - protein, 41 aa, Artificial Sequence
  Cyclic GFR-binding peptide
  MOD_RES (2)..(39): Xaa is C or S
KXALHDELTRHKRLFIPKKRVIEYYLVSTASLQVQTPRXQV

SEQ ID NO: 1886 - protein, 29 aa, Artificial Sequence
  Cyclic GFR-binding peptide
EVVMERYKKLVVKDYEDFYLMSIANLETP

SEQ ID NO: 1887 - protein, 33 aa, Artificial Sequence
  Cyclic GFR-binding peptide
  MOD_RES (29)..(30): Xaa is C or S
VIMRHKRLVKPKRGVYYLISTASLAQPVXXPAA

SEQ ID NO: 1888 - protein, 28 aa, Artificial Sequence
  Cyclic GFR-binding peptide
RVIMYHYKLVKPKRGVKYLISIPSLAQP

SEQ ID NO: 1889 - protein, 37 aa, Artificial Sequence
  Cyclic GFR-binding peptide
  MOD_RES (1)..(3)..(35)..(36): Xaa is C or S
XGXGEVVMDRYKKLVVKENEDFYLMSIANLETPVXXA

SEQ ID NO: 1890 - protein, 22 aa, Artificial Sequence
  Cyclic GFR-binding peptide
NYHYKLIVNSSDDKYLVSIPSL

SEQ ID NO: 1891 - protein, 37 aa, Artificial Sequence
  Cyclic GFR-binding peptide
  MOD_RES (31)..(32): Xaa is C or S
RVVMNRYKKLIVNSSDDFYLVSIANLKTPAXXPKPVY

SEQ ID NO: 1892 - protein, 29 aa, Artificial Sequence
  Cyclic GFR-binding peptide
  MOD_RES (2)..(2): Xaa is C or S
KXSKVVMRYKKLVKPTRGVFYLISIANLD

SEQ ID NO: 1893 - protein, 36 aa, Artificial Sequence
  Cyclic GFR-binding peptide
  MOD_RES (1)..(3)..(35)..(36): Xaa is C or S
XGXGEVVMDRHKRLVVKENEDYYLMSTASLETPVXX

SEQ ID NO: 1894 - protein, 32 aa, Artificial Sequence
  Cyclic GFR-binding peptide
  MOD_RES (2)..(2): Xaa is C or S
GXEAVSMGEQYNKLTPVGMDDLYLVSIASLKT

SEQ ID NO: 1895 - protein, 40 aa, Artificial Sequence
  Cyclic GFR-binding peptide
  MOD_RES (1)..(3)..(34)..(35): Xaa is C or S
XKXSKVIMQYNKLIKPTKGILYLISIASLDQSVXXPSASA

SEQ ID NO: 1896 - protein, 27 aa, Artificial Sequence
  Cyclic GFR-binding peptide
  MOD_RES (27)..(27): Xaa is C or S
MRYKKLIKPTKGIFYLISIANLDQSVX

SEQ ID NO: 1897 - protein, 26 aa, Artificial Sequence
  Cyclic GFR-binding peptide
DQYNKLVVKENEDLYLMSIASLETPV

SEQ ID NO: 1898 - protein, 32 aa, Artificial Sequence
  Cyclic GFR-binding peptide
  MOD_RES (1)..(3): Xaa is C or S
XGXSRVVMNYHYKLIVNSSDDKYLVSIPSLKT

SEQ ID NO: 1899 - protein, 39 aa, Artificial Sequence
  Cyclic GFR-binding peptide
  MOD_RES (1)..(3)..(35)..(36): Xaa is C or S
XGXSRVVMNRYKKLIVNSSDDFYLVSIANLKTPAXXPKP

SEQ ID NO: 1900 - protein, 36 aa, Artificial Sequence
  Cyclic GFR-binding peptide
  MOD_RES (32)..(33): Xaa is C or S
ARVVMNYHYKLIVNSSDDKYLVSIPSLQTPAXXPKP

SEQ ID NO: 1901 - protein, 31 aa, Artificial Sequence
  Cyclic GFR-binding peptide
  MOD_RES (27)..(28): Xaa is C or S
MRYKKLVKPKRGVFYLISIANLAQPVXXPAA

SEQ ID NO: 1902 - protein, 35 aa, Artificial Sequence
  Cyclic GFR-binding peptide
  MOD_RES (33)..(34): Xaa is C or S
EAVSMGERHKRLTPVGMDDYYLVSTASLKTPVXXA

SEQ ID NO: 1903 - protein, 31 aa, Artificial Sequence
  Cyclic GFR-binding peptide
  MOD_RES (29)..(30): Xaa is C or S
VMERHKRLVVKDYEDYYLMSTASLETPVXXA

SEQ ID NO: 1904 - protein, 29 aa, Artificial Sequence
  Cyclic GFR-binding peptide
  MOD_RES (28)..(28): Xaa is C or S
MNRYKKLIVNSSDDFYLVSIANLKTPAXT

SEQ ID NO: 1905 - protein, 30 aa, Artificial Sequence
  Cyclic GFR-binding peptide
  MOD_RES (1)..(1): Xaa is C or S
XALHDELTYHYKLFIPKKRVIEKYLVSIPS

SEQ ID NO: 1906 - protein, 34 aa, Artificial Sequence
  Cyclic GFR-binding peptide
  MOD_RES (31)..(32): Xaa is C or S
RVVMNYHYKLIVNSSDDKYLVSIPSLKTPAXXPK

SEQ ID NO: 1907 - protein, 32 aa, Artificial Sequence
  Cyclic GFR-binding peptide
  MOD_RES (26)..(27): Xaa is C or S
QYNKLVKPTRGVLYLISIASLDQPVXXPSASA

SEQ ID NO: 1908 - protein, 34 aa, Artificial Sequence
  Cyclic GFR-binding peptide
  MOD_RES (32)..(32): Xaa is C or S
SRVVMNYHYKLIVNSSDDKYLVSIPSLKTPAXTP

SEQ ID NO: 1909 - protein, 33 aa, Artificial Sequence
  Cyclic GFR-binding peptide
  MOD_RES (2)..(2): Xaa is C or S
GXAKVVMNQYNKLIVNNSSDLYLVSIASLKTPA

SEQ ID NO: 1910 - protein, 34 aa, Artificial Sequence
  Cyclic GFR-binding peptide
  MOD_RES (30)..(30): Xaa is C or S
YHYKLFIPKKRVIEKYLVSIPSLQVQTPRXQVNR

SEQ ID NO: 1911 - protein, 33 aa, Artificial Sequence
  Cyclic GFR-binding peptide
  MOD_RES (28)..(28): Xaa is C or S
MNRYKKLIVNSSDDFYLVSIANLKTPAXTPKTV

SEQ ID NO: 1912 - protein, 28 aa, Artificial Sequence
  Cyclic GFR-binding peptide
  MOD_RES (28)..(28): Xaa is C or S
MNYHYKLIVNNSSDKYLVSIPSLKTPAX

SEQ ID NO: 1913 - protein, 32 aa, Artificial Sequence
  Cyclic GFR-binding peptide
  MOD_RES (1)..(1): Xaa is C or S
XEAVSMGERYKKLTPVGMDDFYLVSIANLKTP

SEQ ID NO: 1914 - protein, 29 aa, Artificial Sequence
  Cyclic GFR-binding peptide
  MOD_RES (1)..(3): Xaa is C or S
XGXGEVVMEQYNKLVVKDYEDLYLMSIAS

SEQ ID NO: 1915 - protein, 34 aa, Artificial Sequence
  Cyclic GFR-binding peptide
  MOD_RES (1)..(1): Xaa is C or S
XALHDELTRHKRLFIPKKRVIEYYLVSTASLQVQ

SEQ ID NO: 1916 - protein, 30 aa, Artificial Sequence
  Cyclic GFR-binding peptide
  MOD_RES (29)..(30): Xaa is C or S
VMNRYKKLIVNSSDDFYLVSIANLKTPAXX

SEQ ID NO: 1917 - protein, 27 aa, Artificial Sequence
  Cyclic GFR-binding peptide
VMRYKKLVKPTRGVFYLISIANLDQPV

SEQ ID NO: 1918 - protein, 32 aa, Artificial Sequence
  Cyclic GFR-binding peptide
  MOD_RES (1)..(3): Xaa is C or S
XGXAKVVMNYHYKLIVNNSSDKYLVSIPSLKT

SEQ ID NO: 1919 - protein, 26 aa, Artificial Sequence
  Cyclic GFR-binding peptide
KVVMNYHYKLIVNNSSDKYLVSIPSL

SEQ ID NO: 1920 - protein, 32 aa, Artificial Sequence
  Cyclic GFR-binding peptide
  MOD_RES (26)..(27): Xaa is C or S
QYNKLVKPKRGVLYLISIASLAQPVXXPAASA

SEQ ID NO: 1921 - protein, 29 aa, Artificial Sequence
  Cyclic GFR-binding peptide
  MOD_RES (28)..(29): Xaa is C or S
IMYHYKLVKPKRGVKYLISIPSLAQPVXX

SEQ ID NO: 1922 - protein, 27 aa, Artificial Sequence
  Cyclic GFR-binding peptide
KVVMRHKRLVKPTRGVYYLISTASLDQ

SEQ ID NO: 1923 - protein, 30 aa, Artificial Sequence
  Cyclic GFR-binding peptide
  MOD_RES (29)..(30): Xaa is C or S
VIMRHKRLVKPKRGVYYLISTASLAQPVXX

SEQ ID NO: 1924 - protein, 36 aa, Artificial Sequence
  Cyclic GFR-binding peptide
  MOD_RES (30)..(31): Xaa is C or S
RVIMQYNKLVKPKRGVLYLISIASLAQPVXXPAASA

SEQ ID NO: 1925 - protein, 37 aa, Artificial Sequence
  Cyclic GFR-binding peptide
  MOD_RES (2)..(34)..(35): Xaa is C or S
GXAKVVMNYHYKLIVNNSSDKYLVSIPSLKTPAXXAK

SEQ ID NO: 1926 - protein, 23 aa, Artificial Sequence
  Cyclic GFR-binding peptide
NRHKRLIVNSSDDYYLVSTASLK

SEQ ID NO: 1927 - protein, 36 aa, Artificial Sequence
  Cyclic GFR-binding peptide
  MOD_RES (30)..(31): Xaa is C or S
KVIMRHKRLIKPTKGIYYLISTASLDQSVXXPSASA

SEQ ID NO: 1928 - protein, 30 aa, Artificial Sequence
  Cyclic GFR-binding peptide
  MOD_RES (29)..(30): Xaa is C or S
VMDYHYKLVVKENEDKYLMSIPSLETPVXX

SEQ ID NO: 1929 - protein, 30 aa, Artificial Sequence
  Cyclic GFR-binding peptide
  MOD_RES (29)..(30): Xaa is C or S
VIMYHYKLVKPKRGVKYLISIPSLAQPVXX

SEQ ID NO: 1930 - protein, 27 aa, Artificial Sequence
  Cyclic GFR-binding peptide
  MOD_RES (27)..(27): Xaa is C or S
DQYNKLVVKENEDLYLMSIASLETPVX

SEQ ID NO: 1931 - protein, 29 aa, Artificial Sequence
  Cyclic GFR-binding peptide
  MOD_RES (26)..(27): Xaa is C or S
YHYKLIVNNSSDKYLVSIPSLKTPAXXAK

SEQ ID NO: 1932 - protein, 32 aa, Artificial Sequence
  Cyclic GFR-binding peptide
  MOD_RES (31)..(32): Xaa is C or S
EVVMDRHKRLVVKENEDYYLMSTASLETPVXX

SEQ ID NO: 1933 - protein, 31 aa, Artificial Sequence
  Cyclic GFR-binding peptide
  MOD_RES (2)..(4): Xaa is C or S
RXGXGEVVMERYKKLVVKDYEDFYLMSIANL

SEQ ID NO: 1934 - protein, 37 aa, Artificial Sequence
  Cyclic GFR-binding peptide
  MOD_RES (1)..(3)..(35)..(36): Xaa is C or S
XGXARVVMNQYNKLIVNSSDDLYLVSIASLQTPAXXP

SEQ ID NO: 1935 - protein, 30 aa, Artificial Sequence
  Cyclic GFR-binding peptide
  MOD_RES (27)..(28): Xaa is C or S
MRYKKLVKPKRGVFYLISIANLAQPVXXPA

SEQ ID NO: 1936 - protein, 38 aa, Artificial Sequence
  Cyclic GFR-binding peptide
  MOD_RES (2)..(33)..(34): Xaa is C or S
KXSKVVMYHYKLVKPTRGVKYLISIPSLDQPVXXPSAS

SEQ ID NO: 1937 - protein, 27 aa, Artificial Sequence
  Cyclic GFR-binding peptide
  MOD_RES (2)..(2): Xaa is C or S
KXSKVVMRYKKLVKPTRGVFYLISIAN

SEQ ID NO: 1938 - protein, 24 aa, Artificial Sequence
  Cyclic GFR-binding peptide
MDYHYKLVVKENEDKYLMSIPSLE

SEQ ID NO: 1939 - protein, 41 aa, Artificial Sequence
  Cyclic GFR-binding peptide
  MOD_RES (2)..(39): Xaa is C or S
KXALHDELTQYNKLFIPKKRVIELYLVSIASLQVQTPRXQV

SEQ ID NO: 1940 - protein, 24 aa, Artificial Sequence
  Cyclic GFR-binding peptide
QYNKLTPVGMDDLYLVSIASLKTP

SEQ ID NO: 1941 - protein, 32 aa, Artificial Sequence
  Cyclic GFR-binding peptide
  MOD_RES (1)..(32): Xaa is C or S
XSRVIMRHKRLVKPKRGVYYLISTASLAQPVX

SEQ ID NO: 1942 - protein, 32 aa, Artificial Sequence
  Cyclic GFR-binding peptide
  MOD_RES (31)..(32): Xaa is C or S
SRVIMRHKRLVKPKRGVYYLISTASLAQPVXX

SEQ ID NO: 1943 - protein, 25 aa, Artificial Sequence
  Cyclic GFR-binding peptide
VMDRHKRLVVKENEDYYLMSTASLE

SEQ ID NO: 1944 - protein, 34 aa, Artificial Sequence
  Cyclic GFR-binding peptide
  MOD_RES (31)..(32): Xaa is C or S
RVVMNQYNKLIVNSSDDLYLVSIASLKTPAXXPK

SEQ ID NO: 1945 - protein, 33 aa, Artificial Sequence
  Cyclic GFR-binding peptide
  MOD_RES (1)..(3): Xaa is C or S
XKXSKVVMRHKRLVKPTRGVYYLISTASLDQPV

SEQ ID NO: 1946 - protein, 31 aa, Artificial Sequence
  Cyclic GFR-binding peptide
  MOD_RES (2)..(2): Xaa is C or S
KXSRVIMRHKRLVKPKRGVYYLISTASLAQP

SEQ ID NO: 1947 - protein, 28 aa, Artificial Sequence
  Cyclic GFR-binding peptide
VVMDRYKKLVVKENEDFYLMSIANLETP

SEQ ID NO: 1948 - protein, 26 aa, Artificial Sequence
  Cyclic GFR-binding peptide
SRVIMYHYKLVKPKRGVKYLISIPSL

SEQ ID NO: 1949 - protein, 26 aa, Artificial Sequence
  Cyclic GFR-binding peptide
  MOD_RES (1)..(1): Xaa is C or S
XSKVIMQYNKLIKPTKGILYLISIAS

SEQ ID NO: 1950 - protein, 34 aa, Artificial Sequence
  Cyclic GFR-binding peptide
  MOD_RES (2)..(4): Xaa is C or S
RXGXGEVVMEYHYKLVVKDYEDKYLMSIPSLETP

SEQ ID NO: 1951 - protein, 31 aa, Artificial Sequence
  Cyclic GFR-binding peptide
  MOD_RES (31)..(31): Xaa is C or S
SRVIMRYKKLVKPKRGVFYLISIANLAQPVX

SEQ ID NO: 1952 - protein, 29 aa, Artificial Sequence
  Cyclic GFR-binding peptide
GEVVMDRYKKLVVKENEDFYLMSIANLET

SEQ ID NO: 1953 - protein, 33 aa, Artificial Sequence
  Cyclic GFR-binding peptide
  MOD_RES (27)..(28): Xaa is C or S
ERYKKLTPVGMDDFYLVSIANLKTPVXXAKGVK

SEQ ID NO: 1954 - protein, 31 aa, Artificial Sequence
  Cyclic GFR-binding peptide
  MOD_RES (27)..(27): Xaa is C or S
NRYKKLIVNSSDDFYLVSIANLKTPAXTPKT

SEQ ID NO: 1955 - protein, 25 aa, Artificial Sequence
  Cyclic GFR-binding peptide
EVVMEQYNKLVVKDYEDLYLMSIAS

SEQ ID NO: 1956 - protein, 30 aa, Artificial Sequence
  Cyclic GFR-binding peptide
  MOD_RES (26)..(26): Xaa is C or S
RHKRLIVNSSDDYYLVSTASLKTPAXTPKT

SEQ ID NO: 1957 - protein, 25 aa, Artificial Sequence
  Cyclic GFR-binding peptide
MDRYKKLVVKENEDFYLMSIANLET

SEQ ID NO: 1958 - protein, 32 aa, Artificial Sequence
  Cyclic GFR-binding peptide
  MOD_RES (29)..(30): Xaa is C or S
VIMRYKKLIKPTKGIFYLISIANLDQSVXXPS

SEQ ID NO: 1959 - protein, 36 aa, Artificial Sequence
  Cyclic GFR-binding peptide
  MOD_RES (2)..(4)..(35)..(36): Xaa is C or S
SXKXSRVIMRHKRLVKPKRGVYYLISTASLAQPVXX

SEQ ID NO: 1960 - protein, 24 aa, Artificial Sequence
  Cyclic GFR-binding peptide
VVMNQYNKLIVNSSDDLYLVSIAS

SEQ ID NO: 1961 - protein, 30 aa, Artificial Sequence
  Cyclic GFR-binding peptide
  MOD_RES (27)..(28): Xaa is C or S
ERHKRLTPVGMDDYYLVSTASLKTPVXXAK

SEQ ID NO: 1962 - protein, 32 aa, Artificial Sequence
  Cyclic GFR-binding peptide
  MOD_RES (26)..(27): Xaa is C or S
RHKRLVVKDYEDYYLMSTASLETPVXXAKPIS

SEQ ID NO: 1963 - protein, 25 aa, Artificial Sequence
  Cyclic GFR-binding peptide
SMGEQYNKLTPVGMDDLYLVSIASL

SEQ ID NO: 1964 - protein, 34 aa, Artificial Sequence
  Cyclic GFR-binding peptide
  MOD_RES (31)..(32): Xaa is C or S
EVVMDRHKRLVVKENEDYYLMSTASLETPVXXAK

SEQ ID NO: 1965 - protein, 38 aa, Artificial Sequence
  Cyclic GFR-binding peptide
  MOD_RES (2)..(34)..(35): Xaa is C or S
GXGEVVMEYHYKLVVKDYEDKYLMSIPSLETPVXXAKP

SEQ ID NO: 1966 - protein, 33 aa, Artificial Sequence
  Cyclic GFR-binding peptide
  MOD_RES (29)..(30): Xaa is C or S
VMNRYKKLIVNSSDDFYLVSIANLKTPAXXPKP

SEQ ID NO: 1967 - protein, 38 aa, Artificial Sequence
  Cyclic GFR-binding peptide
  MOD_RES (1)..(32)..(33): Xaa is C or S
XSKVIMYHYKLIKPTKGIKYLISIPSLDQSVXXPSASA

SEQ ID NO: 1968 - protein, 28 aa, Artificial Sequence
  Cyclic GFR-binding peptide
  MOD_RES (2)..(2): Xaa is C or S
KXSKVIMYHYKLIKPTKGIKYLISIPSL

SEQ ID NO: 1969 - protein, 32 aa, Artificial Sequence
  Cyclic GFR-binding peptide
  MOD_RES (1)..(1): Xaa is C or S
XALHDELTRHKRLFIPKKRVIEYYLVSTASLQ

SEQ ID NO: 1970 - protein, 29 aa, Artificial Sequence
  Cyclic GFR-binding peptide
  MOD_RES (27)..(28): Xaa is C or S
NRYKKLIVNNSSDFYLVSIANLKTPAXXA

SEQ ID NO: 1971 - protein, 31 aa, Artificial Sequence
  Cyclic GFR-binding peptide
  MOD_RES (30)..(30): Xaa is C or S
RHKRLFIPKKRVIEYYLVSTASLQVQTPRXQ

SEQ ID NO: 1972 - protein, 38 aa, Artificial Sequence
  Cyclic GFR-binding peptide
  MOD_RES (32)..(33): Xaa is C or S
ARVVMNQYNKLIVNSSDDLYLVSIASLQTPAXXPKPVT

SEQ ID NO: 1973 - protein, 28 aa, Artificial Sequence
  Cyclic GFR-binding peptide
  MOD_RES (27)..(28): Xaa is C or S
NQYNKLIVNSSDDLYLVSIASLQTPAXX

SEQ ID NO: 1974 - protein, 27 aa, Artificial Sequence
  Cyclic GFR-binding peptide
  MOD_RES (26)..(27): Xaa is C or S
QYNKLIKPTKGILYLISIASLDQSVXX

SEQ ID NO: 1975 - protein, 38 aa, Artificial Sequence
  Cyclic GFR-binding peptide
  MOD_RES (2)..(4): Xaa is C or S
EXKXALHDELTQYNKLFIPKKRVIELYLVSIASLQVQT

SEQ ID NO: 1976 - protein, 44 aa, Artificial Sequence
  Cyclic GFR-binding peptide
  MOD_RES (2)..(4)..(41): Xaa is C or S
EXKXALHDELTQYNKLFIPKKRVIELYLVSIASLQVQTPRXQVN

SEQ ID NO: 1977 - protein, 28 aa, Artificial Sequence
  Cyclic GFR-binding peptide
VMEQYNKLVVKDYEDLYLMSIASLETPV

SEQ ID NO: 1978 - protein, 38 aa, Artificial Sequence
  Cyclic GFR-binding peptide
  MOD_RES (2)..(4)..(36)..(37): Xaa is C or S
RXGXGEVVMERHKRLVVKDYEDYYLMSTASLETPVXXA

SEQ ID NO: 1979 - protein, 34 aa, Artificial Sequence
  Cyclic GFR-binding peptide
  MOD_RES (1)..(3)..(34): Xaa is C or S
XKXSKVIMRHKRLIKPTKGIYYLISTASLDQSVX

SEQ ID NO: 1980 - protein, 29 aa, Artificial Sequence
  Cyclic GFR-binding peptide
  MOD_RES (1)..(3): Xaa is C or S
XGXARVVMNRYKKLIVNSSDDFYLVSIAN

SEQ ID NO: 1981 - protein, 37 aa, Artificial Sequence
  Cyclic GFR-binding peptide
  MOD_RES (2)..(34)..(35): Xaa is C or S
GXSRVVMNRHKRLIVNSSDDYYLVSTASLKTPAXXPK

SEQ ID NO: 1982 - protein, 30 aa, Artificial Sequence
  Cyclic GFR-binding peptide
  MOD_RES (2)..(4): Xaa is C or S
SXKXSRVIMQYNKLVKPKRGVLYLISIASL

SEQ ID NO: 1983 - protein, 33 aa, Artificial Sequence
  Cyclic GFR-binding peptide
  MOD_RES (2)..(4): Xaa is C or S
RXGXGEVVMERHKRLVVKDYEDYYLMSTASLET

SEQ ID NO: 1984 - protein, 29 aa, Artificial Sequence
  Cyclic GFR-binding peptide
GEVVMERYKKLVVKDYEDFYLMSIANLET

SEQ ID NO: 1985 - protein, 30 aa, Artificial Sequence
  Cyclic GFR-binding peptide
  MOD_RES (1)..(1): Xaa is C or S
XSRVVMNYHYKLIVNSSDDKYLVSIPSLKT

SEQ ID NO: 1986 - protein, 28 aa, Artificial Sequence
  Cyclic GFR-binding peptide
  MOD_RES (28)..(28): Xaa is C or S
IMRYKKLIKPTKGIFYLISIANLDQSVX

SEQ ID NO: 1987 - protein, 37 aa, Artificial Sequence
  Cyclic GFR-binding peptide
  MOD_RES (2)..(4)..(36): Xaa is C or S
HXGXSRVVMNYHYKLIVNSSDDKYLVSIPSLKTPAXT

SEQ ID NO: 1988 - protein, 31 aa, Artificial Sequence
  Cyclic GFR-binding peptide
DELTRHKRLFIPKKRVIEYYLVSTASLQVQT

SEQ ID NO: 1989 - protein, 25 aa, Artificial Sequence
  Cyclic GFR-binding peptide
VMDYHYKLVVKENEDKYLMSIPSLE

SEQ ID NO: 1990 - protein, 36 aa, Artificial Sequence
  Cyclic GFR-binding peptide
  MOD_RES (2)..(4)..(35)..(36): Xaa is C or S
SXKXSKVVMRYKKLVKPTRGVFYLISIANLDQPVXX

SEQ ID NO: 1991 - protein, 40 aa, Artificial Sequence
  Cyclic GFR-binding peptide
  MOD_RES (2)..(4)..(37)..(38): Xaa is C or S
RXGXEAVSMGERYKKLTPVGMDDFYLVSIANLKTPVXXAK

SEQ ID NO: 1992 - protein, 28 aa, Artificial Sequence
  Cyclic GFR-binding peptide
  MOD_RES (1)..(1): Xaa is C or S
XAKVVMNYHYKLIVNNSSDKYLVSIPSL

SEQ ID NO: 1993 - protein, 22 aa, Artificial Sequence
  Cyclic GFR-binding peptide
YHYKLVVKDYEDKYLMSIPSLE

SEQ ID NO: 1994 - protein, 33 aa, Artificial Sequence
  Cyclic GFR-binding peptide
  MOD_RES (2)..(33): Xaa is C or S
KXSKVVMYHYKLVKPTRGVKYLISIPSLDQPVX

SEQ ID NO: 1995 - protein, 34 aa, Artificial Sequence
  Cyclic GFR-binding peptide
  MOD_RES (1)..(32)..(33): Xaa is C or S
XSRVIMQYNKLVKPKRGVLYLISIASLAQPVXXP

SEQ ID NO: 1996 - protein, 27 aa, Artificial Sequence
  Cyclic GFR-binding peptide
IMRYKKLIKPTKGIFYLISIANLDQSV

SEQ ID NO: 1997 - protein, 38 aa, Artificial Sequence
  Cyclic GFR-binding peptide
  MOD_RES (2)..(4)..(35)..(36): Xaa is C or S
SXKXSRVIMRHKRLVKPKRGVYYLISTASLAQPVXXPA

SEQ ID NO: 1998 - protein, 34 aa, Artificial Sequence
  Cyclic GFR-binding peptide
  MOD_RES (2)..(34): Xaa is C or S
GXGEVVMDRHKRLVVKENEDYYLMSTASLETPVX

SEQ ID NO: 1999 - protein, 25 aa, Artificial Sequence
  Cyclic GFR-binding peptide
RVIMRHKRLVKPKRGVYYLISTASL

SEQ ID NO: 2000 - protein, 22 aa, Artificial Sequence
  Cyclic GFR-binding peptide
NQYNKLIVNNSSDLYLVSIASL

SEQ ID NO: 2001 - protein, 34 aa, Artificial Sequence
  Cyclic GFR-binding peptide
  MOD_RES (2)..(34): Xaa is C or S
GXSRVVMNYHYKLIVNSSDDKYLVSIPSLKTPAX

SEQ ID NO: 2002 - protein, 37 aa, Artificial Sequence
  Cyclic GFR-binding peptide
  MOD_RES (2)..(4)..(36)..(37): Xaa is C or S
HXGXAKVVMNRYKKLIVNNSSDFYLVSIANLKTPAXX

SEQ ID NO: 2003 - protein, 36 aa, Artificial Sequence
  Cyclic GFR-binding peptide
  MOD_RES (1)..(34)..(35): Xaa is C or S
XEAVSMGERYKKLTPVGMDDFYLVSIANLKTPVXXA

SEQ ID NO: 2004 - protein, 32 aa, Artificial Sequence
  Cyclic GFR-binding peptide
  MOD_RES (30)..(30): Xaa is C or S
YHYKLFIPKKRVIEKYLVSIPSLQVQTPRXQV

SEQ ID NO: 2005 - protein, 20 aa, Artificial Sequence
  Cyclic GFR-binding peptide
RYKKLVVKENEDFYLMSIAN

SEQ ID NO: 2006 - protein, 26 aa, Artificial Sequence
  Cyclic GFR-binding peptide
VMYHYKLVKPTRGVKYLISIPSLDQP

SEQ ID NO: 2007 - protein, 28 aa, Artificial Sequence
  Cyclic GFR-binding peptide
  MOD_RES (26)..(27): Xaa is C or S
RYKKLTPVGMDDFYLVSIANLKTPVXXA

SEQ ID NO: 2008 - protein, 31 aa, Artificial Sequence
  Cyclic GFR-binding peptide
  MOD_RES (30)..(31): Xaa is C or S
KVVMRHKRLVKPTRGVYYLISTASLDQPVXX

SEQ ID NO: 2009 - protein, 33 aa, Artificial Sequence
  Cyclic GFR-binding peptide
  MOD_RES (28)..(29): Xaa is C or S
MEQYNKLVVKDYEDLYLMSIASLETPVXXAKPI

SEQ ID NO: 2010 - protein, 27 aa, Artificial Sequence
  Cyclic GFR-binding peptide
  MOD_RES (27)..(27): Xaa is C or S
MQYNKLVKPTRGVLYLISIASLDQPVX

SEQ ID NO: 2011 - protein, 22 aa, Artificial Sequence
  Cyclic GFR-binding peptide
RYKKLIKPTKGIFYLISIANLD

SEQ ID NO: 2012 - protein, 24 aa, Artificial Sequence
  Cyclic GFR-binding peptide
RHKRLVKPTRGVYYLISTASLDQP

SEQ ID NO: 2013 - protein, 36 aa, Artificial Sequence
  Cyclic GFR-binding peptide
  MOD_RES (1)..(3)..(35)..(36): Xaa is C or S
XGXGEVVMERYKKLVVKDYEDFYLMSIANLETPVXX

SEQ ID NO: 2014 - protein, 27 aa, Artificial Sequence
  Cyclic GFR-binding peptide
VVMYHYKLVKPTRGVKYLISIPSLDQP

SEQ ID NO: 2015 - protein, 27 aa, Artificial Sequence
  Cyclic GFR-binding peptide
VVMRHKRLVKPTRGVYYLISTASLDQP

SEQ ID NO: 2016 - protein, 33 aa, Artificial Sequence
  Cyclic GFR-binding peptide
  MOD_RES (2)..(4): Xaa is C or S
RXGXGEVVMDQYNKLVVKENEDLYLMSIASLET

SEQ ID NO: 2017 - protein, 35 aa, Artificial Sequence
  Cyclic GFR-binding peptide
ALHDELTYHYKLFIPKKRVIEKYLVSIPSLQVQTP

SEQ ID NO: 2018 - protein, 32 aa, Artificial Sequence
  Cyclic GFR-binding peptide
  MOD_RES (27)..(28): Xaa is C or S
EQYNKLVVKDYEDLYLMSIASLETPVXXAKPI

SEQ ID NO: 2019 - protein, 31 aa, Artificial Sequence
  Cyclic GFR-binding peptide
EAVSMGERHKRLTPVGMDDYYLVSTASLKTP

SEQ ID NO: 2020 - protein, 31 aa, Artificial Sequence
  Cyclic GFR-binding peptide
  MOD_RES (2)..(4): Xaa is C or S
SXKXSKVVMYHYKLVKPTRGVKYLISIPSLD

SEQ ID NO: 2021 - protein, 37 aa, Artificial Sequence
  Cyclic GFR-binding peptide
  MOD_RES (1)..(3)..(35)..(36): Xaa is C or S
XGXGEVVMERHKRLVVKDYEDYYLMSTASLETPVXXA

SEQ ID NO: 2022 - protein, 30 aa, Artificial Sequence
  Cyclic GFR-binding peptide
  MOD_RES (1)..(3): Xaa is C or S
XKXSKVIMQYNKLIKPTKGILYLISIASLD

SEQ ID NO: 2023 - protein, 31 aa, Artificial Sequence
  Cyclic GFR-binding peptide
  MOD_RES (28)..(29): Xaa is C or S
MDRYKKLVVKENEDFYLMSIANLETPVXXAK

SEQ ID NO: 2024 - protein, 38 aa, Artificial Sequence
  Cyclic GFR-binding peptide
  MOD_RES (33)..(34): Xaa is C or S
EAVSMGERYKKLTPVGMDDFYLVSIANLKTPVXXAKGV

SEQ ID NO: 2025 - protein, 36 aa, Artificial Sequence
  Cyclic GFR-binding peptide
  MOD_RES (2)..(33)..(34): Xaa is C or S
KXSKVVMYHYKLVKPTRGVKYLISIPSLDQPVXXPS

SEQ ID NO: 2026 - protein, 33 aa, Artificial Sequence
  Cyclic GFR-binding peptide
LHDELTYHYKLFIPKKRVIEKYLVSIPSLQVQT

SEQ ID NO: 2027 - protein, 23 aa, Artificial Sequence
  Cyclic GFR-binding peptide
VIMQYNKLVKPKRGVLYLISIAS

SEQ ID NO: 2028 - protein, 36 aa, Artificial Sequence
  Cyclic GFR-binding peptide
  MOD_RES (30)..(30): Xaa is C or S
VVMNQYNKLIVNSSDDLYLVSIASLKTPAXTPKTVH

SEQ ID NO: 2029 - protein, 40 aa, Artificial Sequence
  Cyclic GFR-binding peptide
  MOD_RES (2)..(4)..(36)..(37): Xaa is C or S
HXGXAKVVMNYHYKLIVNNSSDKYLVSIPSLKTPAXXAKP

SEQ ID NO: 2030 - protein, 27 aa, Artificial Sequence
  Cyclic GFR-binding peptide
MDRYKKLVVKENEDFYLMSIANLETPV

SEQ ID NO: 2031 - protein, 33 aa, Artificial Sequence
  Cyclic GFR-binding peptide
  MOD_RES (2)..(33): Xaa is C or S
KXSRVIMRHKRLVKPKRGVYYLISTASLAQPVX

SEQ ID NO: 2032 - protein, 29 aa, Artificial Sequence
  Cyclic GFR-binding peptide
GEVVMEQYNKLVVKDYEDLYLMSIASLET

SEQ ID NO: 2033 - protein, 33 aa, Artificial Sequence
  Cyclic GFR-binding peptide
  MOD_RES (30)..(30): Xaa is C or S
RHKRLFIPKKRVIEYYLVSTASLQVQTPRXQVN

SEQ ID NO: 2034 - protein, 40 aa, Artificial Sequence
  Cyclic GFR-binding peptide
  MOD_RES (2)..(4)..(36)..(37): Xaa is C or S
HXGXSRVVMNQYNKLIVNSSDDLYLVSIASLKTPAXXPKP

SEQ ID NO: 2035 - protein, 35 aa, Artificial Sequence
  Cyclic GFR-binding peptide
  MOD_RES (2)..(2): Xaa is C or S
KXALHDELTQYNKLFIPKKRVIELYLVSIASLQVQ

SEQ ID NO: 2036 - protein, 27 aa, Artificial Sequence
  Cyclic GFR-binding peptide
  MOD_RES (1)..(1): Xaa is C or S
XGEVVMERHKRLVVKDYEDYYLMSTAS

SEQ ID NO: 2037 - protein, 30 aa, Artificial Sequence
  Cyclic GFR-binding peptide
  MOD_RES (2)..(4): Xaa is C or S
SXKXSRVIMYHYKLVKPKRGVKYLISIPSL

SEQ ID NO: 2038 - protein, 33 aa, Artificial Sequence
  Cyclic GFR-binding peptide
  MOD_RES (27)..(28): Xaa is C or S
MRHKRLIKPTKGIYYLISTASLDQSVXXPSASA

SEQ ID NO: 2039 - protein, 31 aa, Artificial Sequence
  Cyclic GFR-binding peptide
  MOD_RES (30)..(31): Xaa is C or S
VVMERYKKLVVKDYEDFYLMSIANLETPVXX

SEQ ID NO: 2040 - protein, 38 aa, Artificial Sequence
  Cyclic GFR-binding peptide
  MOD_RES (34)..(34): Xaa is C or S
DELTQYNKLFIPKKRVIELYLVSIASLQVQTPRXQVNR

SEQ ID NO: 2041 - protein, 35 aa, Artificial Sequence
  Cyclic GFR-binding peptide
  MOD_RES (1)..(34)..(35): Xaa is C or S
XEAVSMGERYKKLTPVGMDDFYLVSIANLKTPVXX

SEQ ID NO: 2042 - protein, 40 aa, Artificial Sequence
  Cyclic GFR-binding peptide
  MOD_RES (1)..(3)..(35)..(36): Xaa is C or S
XGXAKVVMNRYKKLIVNNSSDFYLVSIANLKTPAXXAKPV

SEQ ID NO: 2043 - protein, 25 aa, Artificial Sequence
  Cyclic GFR-binding peptide
EVVMEYHYKLVVKDYEDKYLMSIPS

SEQ ID NO: 2044 - protein, 32 aa, Artificial Sequence
  Cyclic GFR-binding peptide
  MOD_RES (28)..(29): Xaa is C or S
MEYHYKLVVKDYEDKYLMSIPSLETPVXXAKP

SEQ ID NO: 2045 - protein, 33 aa, Artificial Sequence
  Cyclic GFR-binding peptide
  MOD_RES (32)..(32): Xaa is C or S
LTRYKKLFIPKKRVIEFYLVSIANLQVQTPRXQ

SEQ ID NO: 2046 - protein, 37 aa, Artificial Sequence
  Cyclic GFR-binding peptide
  MOD_RES (2)..(4)..(36)..(37): Xaa is C or S
HXGXARVVMNRYKKLIVNSSDDFYLVSIANLQTPAXX

SEQ ID NO: 2047 - protein, 30 aa, Artificial Sequence
  Cyclic GFR-binding peptide
  MOD_RES (30)..(30): Xaa is C or S
VVMDYHYKLVVKENEDKYLMSIPSLETPVX

SEQ ID NO: 2048 - protein, 35 aa, Artificial Sequence
  Cyclic GFR-binding peptide
LHDELTYHYKLFIPKKRVIEKYLVSIPSLQVQTPR

SEQ ID NO: 2049 - protein, 36 aa, Artificial Sequence
  Cyclic GFR-binding peptide
  MOD_RES (33)..(33): Xaa is C or S
ELTQYNKLFIPKKRVIELYLVSIASLQVQTPRXQVN

SEQ ID NO: 2050 - protein, 26 aa, Artificial Sequence
  Cyclic GFR-binding peptide
AKVVMNRYKKLIVNNSSDFYLVSIAN

SEQ ID NO: 2051 - protein, 29 aa, Artificial Sequence
  Cyclic GFR-binding peptide
SRVVMNRHKRLIVNSSDDYYLVSTASLKT

SEQ ID NO: 2052 - protein, 31 aa, Artificial Sequence
  Cyclic GFR-binding peptide
  MOD_RES (28)..(29): Xaa is C or S
MNRYKKLIVNSSDDFYLVSIANLQTPAXXPK

SEQ ID NO: 2053 - protein, 41 aa, Artificial Sequence
  Cyclic GFR-binding peptide
  MOD_RES (2)..(4)..(35)..(36): Xaa is C or S
SXKXSKVVMYHYKLVKPTRGVKYLISIPSLDQPVXXPSASA

SEQ ID NO: 2054 - protein, 22 aa, Artificial Sequence
  Cyclic GFR-binding peptide
MRYKKLVKPTRGVFYLISIANL

SEQ ID NO: 2055 - protein, 34 aa, Artificial Sequence
  Cyclic GFR-binding peptide
  MOD_RES (2)..(4): Xaa is C or S
HXGXSRVVMNRHKRLIVNSSDDYYLVSTASLKTP

SEQ ID NO: 2056 - protein, 26 aa, Artificial Sequence
  Cyclic GFR-binding peptide
RVVMNQYNKLIVNSSDDLYLVSIASL

SEQ ID NO: 2057 - protein, 36 aa, Artificial Sequence
  Cyclic GFR-binding peptide
  MOD_RES (2)..(35)..(36): Xaa is C or S
GXEAVSMGERHKRLTPVGMDDYYLVSTASLKTPVXX

SEQ ID NO: 2058 - protein, 35 aa, Artificial Sequence
  Cyclic GFR-binding peptide
  MOD_RES (32)..(32): Xaa is C or S
LTRYKKLFIPKKRVIEFYLVSIANLQVQTPRXQVN

SEQ ID NO: 2059 - protein, 32 aa, Artificial Sequence
  Cyclic GFR-binding peptide
  MOD_RES (29)..(30): Xaa is C or S
VMNRYKKLIVNSSDDFYLVSIANLKTPAXXPK

SEQ ID NO: 2060 - protein, 36 aa, Artificial Sequence
  Cyclic GFR-binding peptide
  MOD_RES (31)..(32): Xaa is C or S
EVVMERHKRLVVKDYEDYYLMSTASLETPVXXAKPI

SEQ ID NO: 2061 - protein, 42 aa, Artificial Sequence
  Cyclic GFR-binding peptide
  MOD_RES (2)..(4)..(36)..(37): Xaa is C or S
RXGXGEVVMDRYKKLVVKENEDFYLMSIANLETPVXXAKPIK

SEQ ID NO: 2062 - protein, 39 aa, Artificial Sequence
  Cyclic GFR-binding peptide
  MOD_RES (1)..(33)..(34): Xaa is C or S
XGEVVMDYHYKLVVKENEDKYLMSIPSLETPVXXAKPIK

SEQ ID NO: 2063 - protein, 24 aa, Artificial Sequence
  Cyclic GFR-binding peptide
ERYKKLTPVGMDDFYLVSIANLKT

SEQ ID NO: 2064 - protein, 33 aa, Artificial Sequence
  Cyclic GFR-binding peptide
  MOD_RES (27)..(28): Xaa is C or S
DQYNKLVVKENEDLYLMSIASLETPVXXAKPIK

SEQ ID NO: 2065 - protein, 25 aa, Artificial Sequence
  Cyclic GFR-binding peptide
NQYNKLIVNSSDDLYLVSIASLQTP

SEQ ID NO: 2066 - protein, 33 aa, Artificial Sequence
  Cyclic GFR-binding peptide
  MOD_RES (32)..(33): Xaa is C or S
ARVVMNRHKRLIVNSSDDYYLVSTASLQTPAXX

SEQ ID NO: 2067 - protein, 33 aa, Artificial Sequence
  Cyclic GFR-binding peptide
  MOD_RES (1)..(32)..(33): Xaa is C or S
XSKVVMQYNKLVKPTRGVLYLISIASLDQPVXX

SEQ ID NO: 2068 - protein, 29 aa, Artificial Sequence
  Cyclic GFR-binding peptide
  MOD_RES (28)..(29): Xaa is C or S
MNYHYKLIVNNSSDKYLVSIPSLKTPAXX

SEQ ID NO: 2069 - protein, 28 aa, Artificial Sequence
  Cyclic GFR-binding peptide
  MOD_RES (26)..(27): Xaa is C or S
QYNKLIVNSSDDLYLVSIASLKTPAXXP

SEQ ID NO: 2070 - protein, 28 aa, Artificial Sequence
  Cyclic GFR-binding peptide
SKVVMRHKRLVKPTRGVYYLISTASLDQ

SEQ ID NO: 2071 - protein, 31 aa, Artificial Sequence
  Cyclic GFR-binding peptide
  MOD_RES (1)..(1): Xaa is C or S
XSRVIMYHYKLVKPKRGVKYLISIPSLAQPV

SEQ ID NO: 2072 - protein, 38 aa, Artificial Sequence
  Cyclic GFR-binding peptide
  MOD_RES (1)..(32)..(33): Xaa is C or S
XSKVIMRHKRLIKPTKGIYYLISTASLDQSVXXPSASA

SEQ ID NO: 2073 - protein, 25 aa, Artificial Sequence
  Cyclic GFR-binding peptide
RHKRLVVKDYEDYYLMSTASLETPV

SEQ ID NO: 2074 - protein, 27 aa, Artificial Sequence
  Cyclic GFR-binding peptide
RVVMNQYNKLIVNSSDDLYLVSIASLQ

SEQ ID NO: 2075 - protein, 33 aa, Artificial Sequence
  Cyclic GFR-binding peptide
  MOD_RES (29)..(30): Xaa is C or S
VMNQYNKLIVNSSDDLYLVSIASLQTPAXXPKP

SEQ ID NO: 2076 - protein, 28 aa, Artificial Sequence
  Cyclic GFR-binding peptide
  MOD_RES (1)..(1): Xaa is C or S
XARVVMNYHYKLIVNSSDDKYLVSIPSL

SEQ ID NO: 2077 - protein, 22 aa, Artificial Sequence
  Cyclic GFR-binding peptide
IMRYKKLVKPKRGVFYLISIAN

SEQ ID NO: 2078 - protein, 33 aa, Artificial Sequence
  Cyclic GFR-binding peptide
  MOD_RES (33)..(33): Xaa is C or S
EAVSMGEQYNKLTPVGMDDLYLVSIASLKTPVX

SEQ ID NO: 2079 - protein, 36 aa, Artificial Sequence
  Cyclic GFR-binding peptide
  MOD_RES (1)..(3)..(34)..(35): Xaa is C or S
XKXSKVIMRHKRLIKPTKGIYYLISTASLDQSVXXP

SEQ ID NO: 2080 - protein, 30 aa, Artificial Sequence
  Cyclic GFR-binding peptide
  MOD_RES (1)..(1): Xaa is C or S
XSKVIMRYKKLIKPTKGIFYLISIANLDQS

SEQ ID NO: 2081 - protein, 32 aa, Artificial Sequence
  Cyclic GFR-binding peptide
  MOD_RES (30)..(30): Xaa is C or S
VVMNRYKKLIVNSSDDFYLVSIANLKTPAXTP

SEQ ID NO: 2082 - protein, 27 aa, Artificial Sequence
  Cyclic GFR-binding peptide
  MOD_RES (2)..(2): Xaa is C or S
KXSRVIMRYKKLVKPKRGVFYLISIAN

SEQ ID NO: 2083 - protein, 34 aa, Artificial Sequence
  Cyclic GFR-binding peptide
  MOD_RES (2)..(33)..(34): Xaa is C or S
KXSRVIMRHKRLVKPKRGVYYLISTASLAQPVXX

SEQ ID NO: 2084 - protein, 33 aa, Artificial Sequence
  Cyclic GFR-binding peptide
  MOD_RES (31)..(32): Xaa is C or S
SKVVMQYNKLVKPTRGVLYLISIASLDQPVXXP

SEQ ID NO: 2085 - protein, 28 aa, Artificial Sequence
  Cyclic GFR-binding peptide
TRHKRLFIPKKRVIEYYLVSTASLQVQT

SEQ ID NO: 2086 - protein, 33 aa, Artificial Sequence
  Cyclic GFR-binding peptide
  MOD_RES (31)..(32): Xaa is C or S
SRVIMRYKKLVKPKRGVFYLISIANLAQPVXXP

SEQ ID NO: 2087 - protein, 27 aa, Artificial Sequence
  Cyclic GFR-binding peptide
VIMQYNKLVKPKRGVLYLISIASLAQP

SEQ ID NO: 2088 - protein, 31 aa, Artificial Sequence
  Cyclic GFR-binding peptide
  MOD_RES (1)..(3): Xaa is C or S
XKXSKVIMRHKRLIKPTKGIYYLISTASLDQ

SEQ ID NO: 2089 - protein, 32 aa, Artificial Sequence
  Cyclic GFR-binding peptide
  MOD_RES (1)..(1): Xaa is C or S
XAKVVMNYHYKLIVNNSSDKYLVSIPSLKTPA

SEQ ID NO: 2090 - protein, 35 aa, Artificial Sequence
  Cyclic GFR-binding peptide
  MOD_RES (31)..(32): Xaa is C or S
EVVMDQYNKLVVKENEDLYLMSIASLETPVXXAKP

SEQ ID NO: 2091 - protein, 32 aa, Artificial Sequence
  Cyclic GFR-binding peptide
  MOD_RES (2)..(2): Xaa is C or S
KXSRVIMQYNKLVKPKRGVLYLISIASLAQPV

SEQ ID NO: 2092 - protein, 30 aa, Artificial Sequence
  Cyclic GFR-binding peptide
  MOD_RES (28)..(29): Xaa is C or S
IMRYKKLVKPKRGVFYLISIANLAQPVXXP

SEQ ID NO: 2093 - protein, 27 aa, Artificial Sequence
  Cyclic GFR-binding peptide
LTQYNKLFIPKKRVIELYLVSIASLQV

SEQ ID NO: 2094 - protein, 33 aa, Artificial Sequence
  Cyclic GFR-binding peptide
  MOD_RES (29)..(30): Xaa is C or S
VMDRYKKLVVKENEDFYLMSIANLETPVXXAKP

SEQ ID NO: 2095 - protein, 33 aa, Artificial Sequence
  Cyclic GFR-binding peptide
  MOD_RES (2)..(4): Xaa is C or S
HXGXSRVVMNRYKKLIVNSSDDFYLVSIANLKT

SEQ ID NO: 2096 - protein, 38 aa, Artificial Sequence
  Cyclic GFR-binding peptide
  MOD_RES (1)..(3)..(35)..(36): Xaa is C or S
XGXSRVVMNRYKKLIVNSSDDFYLVSIANLKTPAXXPK

SEQ ID NO: 2097 - protein, 34 aa, Artificial Sequence
  Cyclic GFR-binding peptide
  MOD_RES (30)..(31): Xaa is C or S
VVMNQYNKLIVNSSDDLYLVSIASLKTPAXXPKP

SEQ ID NO: 2098 - protein, 36 aa, Artificial Sequence
  Cyclic GFR-binding peptide
  MOD_RES (2)..(4)..(36): Xaa is C or S
HXGXARVVMNQYNKLIVNSSDDLYLVSIASLQTPAX

SEQ ID NO: 2099 - protein, 28 aa, Artificial Sequence
  Cyclic GFR-binding peptide
AVSMGERYKKLTPVGMDDFYLVSIANLK

SEQ ID NO: 2100 - protein, 24 aa, Artificial Sequence
  Cyclic GFR-binding peptide
RYKKLTPVGMDDFYLVSIANLKTP

SEQ ID NO: 2101 - protein, 32 aa, Artificial Sequence
  Cyclic GFR-binding peptide
  MOD_RES (2)..(2): Xaa is C or S
KXSKVIMRHKRLIKPTKGIYYLISTASLDQSV

SEQ ID NO: 2102 - protein, 36 aa, Artificial Sequence
  Cyclic GFR-binding peptide
  MOD_RES (1)..(33)..(34): Xaa is C or S
XAKVVMNYHYKLIVNNSSDKYLVSIPSLKTPAXXAK

SEQ ID NO: 2103 - protein, 33 aa, Artificial Sequence
  Cyclic GFR-binding peptide
  MOD_RES (29)..(30): Xaa is C or S
VMNQYNKLIVNNSSDLYLVSIASLKTPAXXAKP

SEQ ID NO: 2104 - protein, 30 aa, Artificial Sequence
  Cyclic GFR-binding peptide
  MOD_RES (27)..(28): Xaa is C or S
NYHYKLIVNNSSDKYLVSIPSLKTPAXXAK

SEQ ID NO: 2105 - protein, 32 aa, Artificial Sequence
  Cyclic GFR-binding peptide
  MOD_RES (29)..(30): Xaa is C or S
VMNQYNKLIVNNSSDLYLVSIASLKTPAXXAK

SEQ ID NO: 2106 - protein, 30 aa, Artificial Sequence
  Cyclic GFR-binding peptide
ALHDELTRYKKLFIPKKRVIEFYLVSIANL

SEQ ID NO: 2107 - protein, 30 aa, Artificial Sequence
  Cyclic GFR-binding peptide
EVVMERHKRLVVKDYEDYYLMSTASLETPV

SEQ ID NO: 2108 - protein, 42 aa, Artificial Sequence
  Cyclic GFR-binding peptide
  MOD_RES (2)..(4)..(36)..(37): Xaa is C or S
HXGXSRVVMNQYNKLIVNSSDDLYLVSIASLKTPAXXPKPVY

SEQ ID NO: 2109 - protein, 28 aa, Artificial Sequence
  Cyclic GFR-binding peptide
  MOD_RES (28)..(28): Xaa is C or S
VMRYKKLVKPTRGVFYLISIANLDQPVX

SEQ ID NO: 2110 - protein, 35 aa, Artificial Sequence
  Cyclic GFR-binding peptide
  MOD_RES (2)..(4): Xaa is C or S
RXGXGEVVMDYHYKLVVKENEDKYLMSIPSLETPV

SEQ ID NO: 2111 - protein, 29 aa, Artificial Sequence
  Cyclic GFR-binding peptide
  MOD_RES (27)..(28): Xaa is C or S
NYHYKLIVNSSDDKYLVSIPSLKTPAXXP

SEQ ID NO: 2112 - protein, 27 aa, Artificial Sequence
  Cyclic GFR-binding peptide
VMNRHKRLIVNSSDDYYLVSTASLKTP

SEQ ID NO: 2113 - protein, 32 aa, Artificial Sequence
  Cyclic GFR-binding peptide
  MOD_RES (30)..(31): Xaa is C or S
KVVMQYNKLVKPTRGVLYLISIASLDQPVXXP

SEQ ID NO: 2114 - protein, 42 aa, Artificial Sequence
  Cyclic GFR-binding peptide
  MOD_RES (2)..(4)..(36)..(37): Xaa is C or S
RXGXGEVVMERYKKLVVKDYEDFYLMSIANLETPVXXAKPIS

SEQ ID NO: 2115 - protein, 31 aa, Artificial Sequence
  Cyclic GFR-binding peptide
  MOD_RES (30)..(31): Xaa is C or S
KVVMYHYKLVKPTRGVKYLISIPSLDQPVXX

SEQ ID NO: 2116 - protein, 32 aa, Artificial Sequence
  Cyclic GFR-binding peptide
  MOD_RES (2)..(2): Xaa is C or S
KXALHDELTYHYKLFIPKKRVIEKYLVSIPSL

SEQ ID NO: 2117 - protein, 32 aa, Artificial Sequence
  Cyclic GFR-binding peptide
  MOD_RES (28)..(29): Xaa is C or S
IMYHYKLVKPKRGVKYLISIPSLAQPVXXPAA

SEQ ID NO: 2118 - protein, 32 aa, Artificial Sequence
  Cyclic GFR-binding peptide
  MOD_RES (26)..(27): Xaa is C or S
RHKRLIKPTKGIYYLISTASLDQSVXXPSASA

SEQ ID NO: 2119 - protein, 30 aa, Artificial Sequence
  Cyclic GFR-binding peptide
  MOD_RES (2)..(4): Xaa is C or S
SXKXSKVVMYHYKLVKPTRGVKYLISIPSL

SEQ ID NO: 2120 - protein, 39 aa, Artificial Sequence
  Cyclic GFR-binding peptide
  MOD_RES (1)..(33)..(34): Xaa is C or S
XGEVVMEYHYKLVVKDYEDKYLMSIPSLETPVXXAKPIS

SEQ ID NO: 2121 - protein, 41 aa, Artificial Sequence
  Cyclic GFR-binding peptide
  MOD_RES (2)..(35)..(36): Xaa is C or S
GXEAVSMGERYKKLTPVGMDDFYLVSIANLKTPVXXAKGVK

SEQ ID NO: 2122 - protein, 30 aa, Artificial Sequence
  Cyclic GFR-binding peptide
  MOD_RES (2)..(2): Xaa is C or S
GXGEVVMDRHKRLVVKENEDYYLMSTASLE

SEQ ID NO: 2123 - protein, 31 aa, Artificial Sequence
  Cyclic GFR-binding peptide
  MOD_RES (2)..(2): Xaa is C or S
KXALHDELTYHYKLFIPKKRVIEKYLVSIPS

SEQ ID NO: 2124 - protein, 32 aa, Artificial Sequence
  Cyclic GFR-binding peptide
  MOD_RES (1)..(1): Xaa is C or S
XSRVVMNRYKKLIVNSSDDFYLVSIANLKTPA

SEQ ID NO: 2125 - protein, 34 aa, Artificial Sequence
  Cyclic GFR-binding peptide
  MOD_RES (28)..(29): Xaa is C or S
MNYHYKLIVNSSDDKYLVSIPSLQTPAXXPKPVT

SEQ ID NO: 2126 - protein, 33 aa, Artificial Sequence
  Cyclic GFR-binding peptide
  MOD_RES (2)..(33): Xaa is C or S
KXSRVIMRYKKLVKPKRGVFYLISIANLAQPVX

SEQ ID NO: 2127 - protein, 31 aa, Artificial Sequence
  Cyclic GFR-binding peptide
  MOD_RES (2)..(2): Xaa is C or S
KXSKVIMRYKKLIKPTKGIFYLISIANLDQS

SEQ ID NO: 2128 - protein, 30 aa, Artificial Sequence
  Cyclic GFR-binding peptide
  MOD_RES (29)..(30): Xaa is C or S
VMNQYNKLIVNNSSDLYLVSIASLKTPAXX

SEQ ID NO: 2129 - protein, 32 aa, Artificial Sequence
  Cyclic GFR-binding peptide
  MOD_RES (27)..(28): Xaa is C or S
ERHKRLTPVGMDDYYLVSTASLKTPVXXAKGV

SEQ ID NO: 2130 - protein, 29 aa, Artificial Sequence
  Cyclic GFR-binding peptide
  MOD_RES (26)..(26): Xaa is C or S
RHKRLIVNSSDDYYLVSTASLKTPAXTPK

SEQ ID NO: 2131 - protein, 32 aa, Artificial Sequence
  Cyclic GFR-binding peptide
  MOD_RES (30)..(31): Xaa is C or S
SMGEQYNKLTPVGMDDLYLVSIASLKTPVXXA

SEQ ID NO: 2132 - protein, 22 aa, Artificial Sequence
  Cyclic GFR-binding peptide
RHKRLVVKENEDYYLMSTASLE

SEQ ID NO: 2133 - protein, 34 aa, Artificial Sequence
  Cyclic GFR-binding peptide
  MOD_RES (31)..(32): Xaa is C or S
SKVVMRHKRLVKPTRGVYYLISTASLDQPVXXPS

SEQ ID NO: 2134 - protein, 31 aa, Artificial Sequence
  Cyclic GFR-binding peptide
  MOD_RES (2)..(4): Xaa is C or S
SXKXSRVIMYHYKLVKPKRGVKYLISIPSLA

SEQ ID NO: 2135 - protein, 29 aa, Artificial Sequence
  Cyclic GFR-binding peptide
  MOD_RES (26)..(27): Xaa is C or S
QYNKLIVNSSDDLYLVSIASLQTPAXXPK

SEQ ID NO: 2136 - protein, 35 aa, Artificial Sequence
  Cyclic GFR-binding peptide
  MOD_RES (1)..(3)..(34)..(35): Xaa is C or S
XKXSRVIMYHYKLVKPKRGVKYLISIPSLAQPVXX

SEQ ID NO: 2137 - protein, 34 aa, Artificial Sequence
  Cyclic GFR-binding peptide
  MOD_RES (30)..(31): Xaa is C or S
VVMNRYKKLIVNSSDDFYLVSIANLKTPAXXPKP

SEQ ID NO: 2138 - protein, 36 aa, Artificial Sequence
  Cyclic GFR-binding peptide
  MOD_RES (2)..(4)..(36): Xaa is C or S
HXGXSRVVMNQYNKLIVNSSDDLYLVSIASLKTPAX

SEQ ID NO: 2139 - protein, 35 aa, Artificial Sequence
  Cyclic GFR-binding peptide
  MOD_RES (29)..(29): Xaa is C or S
VMNRHKRLIVNSSDDYYLVSTASLKTPAXTPKTVH

SEQ ID NO: 2140 - protein, 25 aa, Artificial Sequence
  Cyclic GFR-binding peptide
VVMERHKRLVVKDYEDYYLMSTASL

SEQ ID NO: 2141 - protein, 26 aa, Artificial Sequence
  Cyclic GFR-binding peptide
  MOD_RES (26)..(26): Xaa is C or S
RYKKLVKPKRGVFYLISIANLAQPVX

SEQ ID NO: 2142 - protein, 37 aa, Artificial Sequence
  Cyclic GFR-binding peptide
  MOD_RES (1)..(33)..(34): Xaa is C or S
XARVVMNRHKRLIVNSSDDYYLVSTASLQTPAXXPKP

SEQ ID NO: 2143 - protein, 23 aa, Artificial Sequence
  Cyclic GFR-binding peptide
GERHKRLTPVGMDDYYLVSTASL

SEQ ID NO: 2144 - protein, 26 aa, Artificial Sequence
  Cyclic GFR-binding peptide
KVIMRYKKLIKPTKGIFYLISIANLD

SEQ ID NO: 2145 - protein, 29 aa, Artificial Sequence
  Cyclic GFR-binding peptide
  MOD_RES (27)..(28): Xaa is C or S
MYHYKLIKPTKGIKYLISIPSLDQSVXXP

SEQ ID NO: 2146 - protein, 32 aa, Artificial Sequence
  Cyclic GFR-binding peptide
  MOD_RES (1)..(1): Xaa is C or S
XSRVVMNYHYKLIVNSSDDKYLVSIPSLKTPA

SEQ ID NO: 2147 - protein, 23 aa, Artificial Sequence
  Cyclic GFR-binding peptide
VVMQYNKLVKPTRGVLYLISIAS

SEQ ID NO: 2148 - protein, 34 aa, Artificial Sequence
  Cyclic GFR-binding peptide
  MOD_RES (2)..(2): Xaa is C or S
KXALHDELTRHKRLFIPKKRVIEYYLVSTASLQV

SEQ ID NO: 2149 - protein, 33 aa, Artificial Sequence
  Cyclic GFR-binding peptide
  MOD_RES (2)..(33): Xaa is C or S
KXSRVIMYHYKLVKPKRGVKYLISIPSLAQPVX

SEQ ID NO: 2150 - protein, 35 aa, Artificial Sequence
  Cyclic GFR-binding peptide
  MOD_RES (1)..(1): Xaa is C or S
XALHDELTQYNKLFIPKKRVIELYLVSIASLQVQT

SEQ ID NO: 2151 - protein, 31 aa, Artificial Sequence
  Cyclic GFR-binding peptide
  MOD_RES (29)..(30): Xaa is C or S
VMDRYKKLVVKENEDFYLMSIANLETPVXXA

SEQ ID NO: 2152 - protein, 29 aa, Artificial Sequence
  Cyclic GFR-binding peptide
SMGERHKRLTPVGMDDYYLVSTASLKTPV

SEQ ID NO: 2153 - protein, 28 aa, Artificial Sequence
  Cyclic GFR-binding peptide
  MOD_RES (28)..(28): Xaa is C or S
GEQYNKLTPVGMDDLYLVSIASLKTPVX

SEQ ID NO: 2154 - protein, 26 aa, Artificial Sequence
  Cyclic GFR-binding peptide
VVMDRYKKLVVKENEDFYLMSIANLE

SEQ ID NO: 2155 - protein, 29 aa, Artificial Sequence
  Cyclic GFR-binding peptide
  MOD_RES (28)..(29): Xaa is C or S
MNQYNKLIVNSSDDLYLVSIASLQTPAXX

SEQ ID NO: 2156 - protein, 22 aa, Artificial Sequence
  Cyclic GFR-binding peptide
DRHKRLVVKENEDYYLMSTASL

SEQ ID NO: 2157 - protein, 31 aa, Artificial Sequence
  Cyclic GFR-binding peptide
  MOD_RES (1)..(1): Xaa is C or S
XALHDELTRHKRLFIPKKRVIEYYLVSTASL

SEQ ID NO: 2158 - protein, 30 aa, Artificial Sequence
  Cyclic GFR-binding peptide
  MOD_RES (1)..(1): Xaa is C or S
XGEVVMERYKKLVVKDYEDFYLMSIANLET

SEQ ID NO: 2159 - protein, 33 aa, Artificial Sequence
  Cyclic GFR-binding peptide
  MOD_RES (29)..(30): Xaa is C or S
VIMYHYKLVKPKRGVKYLISIPSLAQPVXXPAA

SEQ ID NO: 2160 - protein, 31 aa, Artificial Sequence
  Cyclic GFR-binding peptide
  MOD_RES (30)..(31): Xaa is C or S
RVIMRYKKLVKPKRGVFYLISIANLAQPVXX

SEQ ID NO: 2161 - protein, 29 aa, Artificial Sequence
  Cyclic GFR-binding peptide
SKVIMRYKKLIKPTKGIFYLISIANLDQS

SEQ ID NO: 2162 - protein, 28 aa, Artificial Sequence
  Cyclic GFR-binding peptide
DELTYHYKLFIPKKRVIEKYLVSIPSLQ

SEQ ID NO: 2163 - protein, 27 aa, Artificial Sequence
  Cyclic GFR-binding peptide
  MOD_RES (1)..(1): Xaa is C or S
XSRVVMNYHYKLIVNSSDDKYLVSIPS

SEQ ID NO: 2164 - protein, 36 aa, Artificial Sequence
  Cyclic GFR-binding peptide
  MOD_RES (2)..(34)..(35): Xaa is C or S
GXARVVMNQYNKLIVNSSDDLYLVSIASLQTPAXXP

SEQ ID NO: 2165 - protein, 28 aa, Artificial Sequence
  Cyclic GFR-binding peptide
  MOD_RES (28)..(28): Xaa is C or S
MNQYNKLIVNSSDDLYLVSIASLKTPAX

SEQ ID NO: 2166 - protein, 34 aa, Artificial Sequence
  Cyclic GFR-binding peptide
  MOD_RES (28)..(29): Xaa is C or S
MNYHYKLIVNNSSDKYLVSIPSLKTPAXXAKPVA

SEQ ID NO: 2167 - protein, 37 aa, Artificial Sequence
  Cyclic GFR-binding peptide
  MOD_RES (31)..(31): Xaa is C or S
RVVMNQYNKLIVNSSDDLYLVSIASLKTPAXTPKTVH

SEQ ID NO: 2168 - protein, 43 aa, Artificial Sequence
  Cyclic GFR-binding peptide
  MOD_RES (2)..(39): Xaa is C or S
KXALHDELTQYNKLFIPKKRVIELYLVSIASLQVQTPRXQVNR

SEQ ID NO: 2169 - protein, 30 aa, Artificial Sequence
  Cyclic GFR-binding peptide
  MOD_RES (2)..(4): Xaa is C or S
RXGXGEVVMEYHYKLVVKDYEDKYLMSIPS

SEQ ID NO: 2170 - protein, 28 aa, Artificial Sequence
  Cyclic GFR-binding peptide
  MOD_RES (27)..(28): Xaa is C or S
NRYKKLIVNNSSDFYLVSIANLKTPAXX

SEQ ID NO: 2171 - protein, 31 aa, Artificial Sequence
  Cyclic GFR-binding peptide
  MOD_RES (31)..(31): Xaa is C or S
EVVMEYHYKLVVKDYEDKYLMSIPSLETPVX

SEQ ID NO: 2172 - protein, 36 aa, Artificial Sequence
  Cyclic GFR-binding peptide
  MOD_RES (1)..(3)..(34)..(35): Xaa is C or S
XKXSKVVMRHKRLVKPTRGVYYLISTASLDQPVXXP

SEQ ID NO: 2173 - protein, 29 aa, Artificial Sequence
  Cyclic GFR-binding peptide
RVVMNYHYKLIVNSSDDKYLVSIPSLQTP

SEQ ID NO: 2174 - protein, 34 aa, Artificial Sequence
  Cyclic GFR-binding peptide
  MOD_RES (1)..(34): Xaa is C or S
XEAVSMGERHKRLTPVGMDDYYLVSTASLKTPVX

SEQ ID NO: 2175 - protein, 31 aa, Artificial Sequence
  Cyclic GFR-binding peptide
  MOD_RES (27)..(28): Xaa is C or S
MQYNKLIKPTKGILYLISIASLDQSVXXPSA

SEQ ID NO: 2176 - protein, 38 aa, Artificial Sequence
  Cyclic GFR-binding peptide
  MOD_RES (1)..(3): Xaa is C or S
XKXALHDELTRHKRLFIPKKRVIEYYLVSTASLQVQTP

SEQ ID NO: 2177 - protein, 24 aa, Artificial Sequence
  Cyclic GFR-binding peptide
DRHKRLVVKENEDYYLMSTASLET

SEQ ID NO: 2178 - protein, 37 aa, Artificial Sequence
  Cyclic GFR-binding peptide
  MOD_RES (31)..(32): Xaa is C or S
RVVMNRHKRLIVNSSDDYYLVSTASLKTPAXXPKPVY

SEQ ID NO: 2179 - protein, 26 aa, Artificial Sequence
  Cyclic GFR-binding peptide
MNYHYKLIVNNSSDKYLVSIPSLKTP

SEQ ID NO: 2180 - protein, 38 aa, Artificial Sequence
  Cyclic GFR-binding peptide
  MOD_RES (2)..(4): Xaa is C or S
EXKXALHDELTRYKKLFIPKKRVIEFYLVSIANLQVQT

SEQ ID NO: 2181 - protein, 29 aa, Artificial Sequence
  Cyclic GFR-binding peptide
KVVMNRYKKLIVNNSSDFYLVSIANLKTP

SEQ ID NO: 2182 - protein, 30 aa, Artificial Sequence
  Cyclic GFR-binding peptide
  MOD_RES (30)..(30): Xaa is C or S
KVVMYHYKLVKPTRGVKYLISIPSLDQPVX

SEQ ID NO: 2183 - protein, 30 aa, Artificial Sequence
  Cyclic GFR-binding peptide
  MOD_RES (27)..(28): Xaa is C or S
NRHKRLIVNSSDDYYLVSTASLKTPAXXPK

SEQ ID NO: 2184 - protein, 31 aa, Artificial Sequence
  Cyclic GFR-binding peptide
  MOD_RES (2)..(2): Xaa is C or S
KXSKVIMYHYKLIKPTKGIKYLISIPSLDQS

SEQ ID NO: 2185 - protein, 37 aa, Artificial Sequence
  Cyclic GFR-binding peptide
  MOD_RES (32)..(33): Xaa is C or S
AKVVMNYHYKLIVNNSSDKYLVSIPSLKTPAXXAKPV

SEQ ID NO: 2186 - protein, 29 aa, Artificial Sequence
  Cyclic GFR-binding peptide
  MOD_RES (1)..(1): Xaa is C or S
XAKVVMNYHYKLIVNNSSDKYLVSIPSLK

SEQ ID NO: 2187 - protein, 34 aa, Artificial Sequence
  Cyclic GFR-binding peptide
  MOD_RES (2)..(2): Xaa is C or S
GXEAVSMGERYKKLTPVGMDDFYLVSIANLKTPV

SEQ ID NO: 2188 - protein, 42 aa, Artificial Sequence
  Cyclic GFR-binding peptide
  MOD_RES (2)..(4)..(36): Xaa is C or S
HXGXSRVVMNYHYKLIVNSSDDKYLVSIPSLKTPAXTPKTVH

SEQ ID NO: 2189 - protein, 33 aa, Artificial Sequence
  Cyclic GFR-binding peptide
  MOD_RES (1)..(1): Xaa is C or S
XEAVSMGERHKRLTPVGMDDYYLVSTASLKTPV

SEQ ID NO: 2190 - protein, 30 aa, Artificial Sequence
  Cyclic GFR-binding peptide
  MOD_RES (28)..(29): Xaa is C or S
MNYHYKLIVNNSSDKYLVSIPSLKTPAXXA

SEQ ID NO: 2191 - protein, 21 aa, Artificial Sequence
  Cyclic GFR-binding peptide
MQYNKLIKPTKGILYLISIAS

SEQ ID NO: 2192 - protein, 27 aa, Artificial Sequence
  Cyclic GFR-binding peptide
KVVMNQYNKLIVNNSSDLYLVSIASLK

SEQ ID NO: 2193 - protein, 30 aa, Artificial Sequence
  Cyclic GFR-binding peptide
SKVIMRHKRLIKPTKGIYYLISTASLDQSV

SEQ ID NO: 2194 - protein, 32 aa, Artificial Sequence
  Cyclic GFR-binding peptide
  MOD_RES (2)..(4): Xaa is C or S
HXGXSRVVMNRYKKLIVNSSDDFYLVSIANLK

SEQ ID NO: 2195 - protein, 22 aa, Artificial Sequence
  Cyclic GFR-binding peptide
MQYNKLVKPKRGVLYLISIASL

SEQ ID NO: 2196 - protein, 29 aa, Artificial Sequence
  Cyclic GFR-binding peptide
  MOD_RES (1)..(3): Xaa is C or S
XKXSRVIMQYNKLVKPKRGVLYLISIASL

SEQ ID NO: 2197 - protein, 36 aa, Artificial Sequence
  Cyclic GFR-binding peptide
  MOD_RES (30)..(31): Xaa is C or S
VVMDYHYKLVVKENEDKYLMSIPSLETPVXXAKPIK

SEQ ID NO: 2198 - protein, 36 aa, Artificial Sequence
  Cyclic GFR-binding peptide
  MOD_RES (2)..(4)..(36): Xaa is C or S
HXGXAKVVMNQYNKLIVNNSSDLYLVSIASLKTPAX

SEQ ID NO: 2199 - protein, 27 aa, Artificial Sequence
  Cyclic GFR-binding peptide
  MOD_RES (27)..(27): Xaa is C or S
MRHKRLVKPKRGVYYLISTASLAQPVX

SEQ ID NO: 2200 - protein, 32 aa, Artificial Sequence
  Cyclic GFR-binding peptide
  MOD_RES (29)..(30): Xaa is C or S
VMEQYNKLVVKDYEDLYLMSIASLETPVXXAK

SEQ ID NO: 2201 - protein, 40 aa, Artificial Sequence
  Cyclic GFR-binding peptide
  MOD_RES (1)..(38): Xaa is C or S
XALHDELTQYNKLFIPKKRVIELYLVSIASLQVQTPRXQV

SEQ ID NO: 2202 - protein, 39 aa, Artificial Sequence
  Cyclic GFR-binding peptide
  MOD_RES (33)..(34): Xaa is C or S
EAVSMGEQYNKLTPVGMDDLYLVSIASLKTPVXXAKGVK

SEQ ID NO: 2203 - protein, 23 aa, Artificial Sequence
  Cyclic GFR-binding peptide
MRYKKLIKPTKGIFYLISIANLD

SEQ ID NO: 2204 - protein, 35 aa, Artificial Sequence
  Cyclic GFR-binding peptide
  MOD_RES (2)..(4): Xaa is C or S
RXGXGEVVMEYHYKLVVKDYEDKYLMSIPSLETPV

SEQ ID NO: 2205 - protein, 39 aa, Artificial Sequence
  Cyclic GFR-binding peptide
  MOD_RES (1)..(33)..(34): Xaa is C or S
XGEVVMERYKKLVVKDYEDFYLMSIANLETPVXXAKPIS

SEQ ID NO: 2206 - protein, 31 aa, Artificial Sequence
  Cyclic GFR-binding peptide
LHDELTRHKRLFIPKKRVIEYYLVSTASLQV

SEQ ID NO: 2207 - protein, 25 aa, Artificial Sequence
  Cyclic GFR-binding peptide
RYKKLVKPTRGVFYLISIANLDQPV

SEQ ID NO: 2208 - protein, 34 aa, Artificial Sequence
  Cyclic GFR-binding peptide
  MOD_RES (1)..(3): Xaa is C or S
XKXALHDELTRHKRLFIPKKRVIEYYLVSTASLQ

SEQ ID NO: 2209 - protein, 41 aa, Artificial Sequence
  Cyclic GFR-binding peptide
  MOD_RES (2)..(4)..(35)..(36): Xaa is C or S
SXKXSKVIMRHKRLIKPTKGIYYLISTASLDQSVXXPSASA

SEQ ID NO: 2210 - protein, 39 aa, Artificial Sequence
  Cyclic GFR-binding peptide
  MOD_RES (2)..(33)..(34): Xaa is C or S
KXSRVIMRHKRLVKPKRGVYYLISTASLAQPVXXPAASA

SEQ ID NO: 2211 - protein, 34 aa, Artificial Sequence
  Cyclic GFR-binding peptide
  MOD_RES (31)..(31): Xaa is C or S
TYHYKLFIPKKRVIEKYLVSIPSLQVQTPRXQVN

SEQ ID NO: 2212 - protein, 32 aa, Artificial Sequence
  Cyclic GFR-binding peptide
  MOD_RES (1)..(3): Xaa is C or S
XGXARVVMNRYKKLIVNSSDDFYLVSIANLQT

SEQ ID NO: 2213 - protein, 32 aa, Artificial Sequence
  Cyclic GFR-binding peptide
  MOD_RES (27)..(28): Xaa is C or S
NRYKKLIVNNSSDFYLVSIANLKTPAXXAKPV

SEQ ID NO: 2214 - protein, 30 aa, Artificial Sequence
  Cyclic GFR-binding peptide
  MOD_RES (28)..(29): Xaa is C or S
MNYHYKLIVNSSDDKYLVSIPSLKTPAXXP

SEQ ID NO: 2215 - protein, 29 aa, Artificial Sequence
  Cyclic GFR-binding peptide
  MOD_RES (26)..(27): Xaa is C or S
QYNKLIKPTKGILYLISIASLDQSVXXPS

SEQ ID NO: 2216 - protein, 23 aa, Artificial Sequence
  Cyclic GFR-binding peptide
VIMRYKKLIKPTKGIFYLISIAN

SEQ ID NO: 2217 - protein, 32 aa, Artificial Sequence
  Cyclic GFR-binding peptide
  MOD_RES (29)..(30): Xaa is C or S
VMNRYKKLIVNNSSDFYLVSIANLKTPAXXAK

SEQ ID NO: 2218 - protein, 37 aa, Artificial Sequence
  Cyclic GFR-binding peptide
  MOD_RES (1)..(32)..(33): Xaa is C or S
XSKVIMQYNKLIKPTKGILYLISIASLDQSVXXPSAS

SEQ ID NO: 2219 - protein, 28 aa, Artificial Sequence
  Cyclic GFR-binding peptide
  MOD_RES (2)..(2): Xaa is C or S
GXSRVVMNRHKRLIVNSSDDYYLVSTAS

SEQ ID NO: 2220 - protein, 33 aa, Artificial Sequence
  Cyclic GFR-binding peptide
  MOD_RES (31)..(31): Xaa is C or S
TRHKRLFIPKKRVIEYYLVSTASLQVQTPRXQV

SEQ ID NO: 2221 - protein, 37 aa, Artificial Sequence
  Cyclic GFR-binding peptide
  MOD_RES (1)..(32)..(33): Xaa is C or S
XSKVIMRYKKLIKPTKGIFYLISIANLDQSVXXPSAS

SEQ ID NO: 2222 - protein, 29 aa, Artificial Sequence
  Cyclic GFR-binding peptide
  MOD_RES (27)..(28): Xaa is C or S
NRHKRLIVNSSDDYYLVSTASLKTPAXXP

SEQ ID NO: 2223 - protein, 24 aa, Artificial Sequence
  Cyclic GFR-binding peptide
KVVMRHKRLVKPTRGVYYLISTAS

SEQ ID NO: 2224 - protein, 40 aa, Artificial Sequence
  Cyclic GFR-binding peptide
  MOD_RES (2)..(4)..(36)..(37): Xaa is C or S
RXGXGEVVMDRHKRLVVKENEDYYLMSTASLETPVXXAKP

SEQ ID NO: 2225 - protein, 30 aa, Artificial Sequence
  Cyclic GFR-binding peptide
  MOD_RES (29)..(30): Xaa is C or S
VMNRHKRLIVNSSDDYYLVSTASLKTPAXX

SEQ ID NO: 2226 - protein, 34 aa, Artificial Sequence
  Cyclic GFR-binding peptide
  MOD_RES (32)..(33): Xaa is C or S
AVSMGEQYNKLTPVGMDDLYLVSIASLKTPVXXA

SEQ ID NO: 2227 - protein, 28 aa, Artificial Sequence
  Cyclic GFR-binding peptide
VVMNYHYKLIVNSSDDKYLVSIPSLQTP

SEQ ID NO: 2228 - protein, 28 aa, Artificial Sequence
  Cyclic GFR-binding peptide
  MOD_RES (28)..(28): Xaa is C or S
MERHKRLVVKDYEDYYLMSTASLETPVX

SEQ ID NO: 2229 - protein, 35 aa, Artificial Sequence
  Cyclic GFR-binding peptide
  MOD_RES (29)..(30): Xaa is C or S
MGERHKRLTPVGMDDYYLVSTASLKTPVXXAKGVK

SEQ ID NO: 2230 - protein, 28 aa, Artificial Sequence
  Cyclic GFR-binding peptide
VVMYHYKLVKPTRGVKYLISIPSLDQPV

SEQ ID NO: 2231 - protein, 30 aa, Artificial Sequence
  Cyclic GFR-binding peptide
  MOD_RES (2)..(4): Xaa is C or S
RXGXGEVVMDRYKKLVVKENEDFYLMSIAN

SEQ ID NO: 2232 - protein, 40 aa, Artificial Sequence
  Cyclic GFR-binding peptide
  MOD_RES (1)..(38): Xaa is C or S
XALHDELTRHKRLFIPKKRVIEYYLVSTASLQVQTPRXQV

SEQ ID NO: 2233 - protein, 36 aa, Artificial Sequence
  Cyclic GFR-binding peptide
  MOD_RES (30)..(31): Xaa is C or S
VVMNRYKKLIVNSSDDFYLVSIANLQTPAXXPKPVT

SEQ ID NO: 2234 - protein, 35 aa, Artificial Sequence
  Cyclic GFR-binding peptide
  MOD_RES (1)..(3)..(34)..(35): Xaa is C or S
XKXSKVIMRHKRLIKPTKGIYYLISTASLDQSVXX

SEQ ID NO: 2235 - protein, 33 aa, Artificial Sequence
  Cyclic GFR-binding peptide
  MOD_RES (33)..(33): Xaa is C or S
ELTRYKKLFIPKKRVIEFYLVSIANLQVQTPRX

SEQ ID NO: 2236 - protein, 34 aa, Artificial Sequence
  Cyclic GFR-binding peptide
  MOD_RES (29)..(30): Xaa is C or S
VMNRYKKLIVNSSDDFYLVSIANLKTPAXXPKPV

SEQ ID NO: 2237 - protein, 24 aa, Artificial Sequence
  Cyclic GFR-binding peptide
RVIMRYKKLVKPKRGVFYLISIAN

SEQ ID NO: 2238 - protein, 27 aa, Artificial Sequence
  Cyclic GFR-binding peptide
VVKENEDQYNKLVVKENEDLYLMSIAS

SEQ ID NO: 2239 - protein, 36 aa, Artificial Sequence
  Cyclic GFR-binding peptide
  MOD_RES (2)..(34)..(35): Xaa is C or S
GXARVVMNYHYKLIVNSSDDKYLVSIPSLQTPAXXP

SEQ ID NO: 2240 - protein, 28 aa, Artificial Sequence
  Cyclic GFR-binding peptide
VMNQYNKLIVNNSSDLYLVSIASLKTPA

SEQ ID NO: 2241 - protein, 35 aa, Artificial Sequence
  Cyclic GFR-binding peptide
  MOD_RES (2)..(4): Xaa is C or S
HXGXAKVVMNQYNKLIVNNSSDLYLVSIASLKTPA

SEQ ID NO: 2242 - protein, 31 aa, Artificial Sequence
  Cyclic GFR-binding peptide
  MOD_RES (31)..(31): Xaa is C or S
SRVIMRHKRLVKPKRGVYYLISTASLAQPVX

SEQ ID NO: 2243 - protein, 36 aa, Artificial Sequence
  Cyclic GFR-binding peptide
  MOD_RES (30)..(31): Xaa is C or S
SMGERHKRLTPVGMDDYYLVSTASLKTPVXXAKGVK

SEQ ID NO: 2244 - protein, 30 aa, Artificial Sequence
  Cyclic GFR-binding peptide
  MOD_RES (29)..(29): Xaa is C or S
VMNRHKRLIVNSSDDYYLVSTASLKTPAXT

SEQ ID NO: 2245 - protein, 26 aa, Artificial Sequence
  Cyclic GFR-binding peptide
SMGERHKRLTPVGMDDYYLVSTASLK

SEQ ID NO: 2246 - protein, 30 aa, Artificial Sequence
  Cyclic GFR-binding peptide
  MOD_RES (27)..(28): Xaa is C or S
EQYNKLVVKDYEDLYLMSIASLETPVXXAK

SEQ ID NO: 2247 - protein, 34 aa, Artificial Sequence
  Cyclic GFR-binding peptide
  MOD_RES (1)..(32)..(33): Xaa is C or S
XSRVIMYHYKLVKPKRGVKYLISIPSLAQPVXXP

SEQ ID NO: 2248 - protein, 23 aa, Artificial Sequence
  Cyclic GFR-binding peptide
YHYKLVVKENEDKYLMSIPSLET

SEQ ID NO: 2249 - protein, 22 aa, Artificial Sequence
  Cyclic GFR-binding peptide
MNRYKKLIVNSSDDFYLVSIAN

SEQ ID NO: 2250 - protein, 31 aa, Artificial Sequence
  Cyclic GFR-binding peptide
AKVVMNYHYKLIVNNSSDKYLVSIPSLKTPA

SEQ ID NO: 2251 - protein, 33 aa, Artificial Sequence
  Cyclic GFR-binding peptide
  MOD_RES (31)..(32): Xaa is C or S
KVVMNRYKKLIVNNSSDFYLVSIANLKTPAXXA

SEQ ID NO: 2252 - protein, 24 aa, Artificial Sequence
  Cyclic GFR-binding peptide
VIMQYNKLIKPTKGILYLISIASL

SEQ ID NO: 2253 - protein, 32 aa, Artificial Sequence
  Cyclic GFR-binding peptide
  MOD_RES (26)..(27): Xaa is C or S
RYKKLVVKENEDFYLMSIANLETPVXXAKPIK

SEQ ID NO: 2254 - protein, 33 aa, Artificial Sequence
  Cyclic GFR-binding peptide
HDELTQYNKLFIPKKRVIELYLVSIASLQVQTP

SEQ ID NO: 2255 - protein, 36 aa, Artificial Sequence
  Cyclic GFR-binding peptide
  MOD_RES (1)..(3)..(35)..(36): Xaa is C or S
XGXGEVVMDQYNKLVVKENEDLYLMSIASLETPVXX

SEQ ID NO: 2256 - protein, 29 aa, Artificial Sequence
  Cyclic GFR-binding peptide
  MOD_RES (1)..(1): Xaa is C or S
XSKVVMRHKRLVKPTRGVYYLISTASLDQ

SEQ ID NO: 2257 - protein, 29 aa, Artificial Sequence
  Cyclic GFR-binding peptide
  MOD_RES (2)..(4): Xaa is C or S
SXKXSKVVMRYKKLVKPTRGVFYLISIAN

SEQ ID NO: 2258 - protein, 37 aa, Artificial Sequence
  Cyclic GFR-binding peptide
  MOD_RES (2)..(4)..(36)..(37): Xaa is C or S
RXGXGEVVMERYKKLVVKDYEDFYLMSIANLETPVXX

SEQ ID NO: 2259 - protein, 37 aa, Artificial Sequence
  Cyclic GFR-binding peptide
  MOD_RES (2)..(4)..(36)..(37): Xaa is C or S
HXGXARVVMNYHYKLIVNSSDDKYLVSIPSLQTPAXX

SEQ ID NO: 2260 - protein, 35 aa, Artificial Sequence
  Cyclic GFR-binding peptide
  MOD_RES (29)..(30): Xaa is C or S
VVMQYNKLVKPTRGVLYLISIASLDQPVXXPSASA

SEQ ID NO: 2261 - protein, 35 aa, Artificial Sequence
  Cyclic GFR-binding peptide
  MOD_RES (2)..(4): Xaa is C or S
EXKXALHDELTQYNKLFIPKKRVIELYLVSIASLQ

SEQ ID NO: 2262 - protein, 31 aa, Artificial Sequence
  Cyclic GFR-binding peptide
  MOD_RES (2)..(4): Xaa is C or S
HXGXARVVMNRYKKLIVNSSDDFYLVSIANL

SEQ ID NO: 2263 - protein, 32 aa, Artificial Sequence
  Cyclic GFR-binding peptide
  MOD_RES (2)..(4): Xaa is C or S
RXGXEAVSMGEYHYKLTPVGMDDKYLVSIPSL

SEQ ID NO: 2264 - protein, 32 aa, Artificial Sequence
  Cyclic GFR-binding peptide
  MOD_RES (30)..(30): Xaa is C or S
VVMNYHYKLIVNSSDDKYLVSIPSLKTPAXTP

SEQ ID NO: 2265 - protein, 37 aa, Artificial Sequence
  Cyclic GFR-binding peptide
  MOD_RES (1)..(3)..(34)..(35): Xaa is C or S
XKXSRVIMRYKKLVKPKRGVFYLISIANLAQPVXXPA

SEQ ID NO: 2266 - protein, 32 aa, Artificial Sequence
  Cyclic GFR-binding peptide
  MOD_RES (27)..(28): Xaa is C or S
DQYNKLVVKENEDLYLMSIASLETPVXXAKPI

SEQ ID NO: 2267 - protein, 38 aa, Artificial Sequence
  Cyclic GFR-binding peptide
  MOD_RES (32)..(33): Xaa is C or S
GEVVMDQYNKLVVKENEDLYLMSIASLETPVXXAKPIK

SEQ ID NO: 2268 - protein, 33 aa, Artificial Sequence
  Cyclic GFR-binding peptide
  MOD_RES (2)..(4): Xaa is C or S
SXKXSRVIMYHYKLVKPKRGVKYLISIPSLAQP

SEQ ID NO: 2269 - protein, 36 aa, Artificial Sequence
  Cyclic GFR-binding peptide
  MOD_RES (2)..(33)..(34): Xaa is C or S
KXSKVVMQYNKLVKPTRGVLYLISIASLDQPVXXPS

SEQ ID NO: 2270 - protein, 34 aa, Artificial Sequence
  Cyclic GFR-binding peptide
  MOD_RES (29)..(30): Xaa is C or S
VMERYKKLVVKDYEDFYLMSIANLETPVXXAKPI

SEQ ID NO: 2271 - protein, 34 aa, Artificial Sequence
  Cyclic GFR-binding peptide
  MOD_RES (1)..(3): Xaa is C or S
XGXEAVSMGERHKRLTPVGMDDYYLVSTASLKTP

SEQ ID NO: 2272 - protein, 40 aa, Artificial Sequence
  Cyclic GFR-binding peptide
  MOD_RES (2)..(34)..(35): Xaa is C or S
GXGEVVMEYHYKLVVKDYEDKYLMSIPSLETPVXXAKPIS

SEQ ID NO: 2273 - protein, 37 aa, Artificial Sequence
  Cyclic GFR-binding peptide
  MOD_RES (1)..(33)..(34): Xaa is C or S
XGEVVMERHKRLVVKDYEDYYLMSTASLETPVXXAKP

SEQ ID NO: 2274 - protein, 26 aa, Artificial Sequence
  Cyclic GFR-binding peptide
NQYNKLIVNSSDDLYLVSIASLQTPA

SEQ ID NO: 2275 - protein, 26 aa, Artificial Sequence
  Cyclic GFR-binding peptide
EVVMDYHYKLVVKENEDKYLMSIPSL

SEQ ID NO: 2276 - protein, 36 aa, Artificial Sequence
  Cyclic GFR-binding peptide
  MOD_RES (1)..(3)..(34)..(35): Xaa is C or S
XKXSKVVMQYNKLVKPTRGVLYLISIASLDQPVXXP

SEQ ID NO: 2277 - protein, 28 aa, Artificial Sequence
  Cyclic GFR-binding peptide
  MOD_RES (27)..(28): Xaa is C or S
ERHKRLTPVGMDDYYLVSTASLKTPVXX

SEQ ID NO: 2278 - protein, 25 aa, Artificial Sequence
  Cyclic GFR-binding peptide
RYKKLIVNNSSDFYLVSIANLKTPA

SEQ ID NO: 2279 - protein, 30 aa, Artificial Sequence
  Cyclic GFR-binding peptide
  MOD_RES (30)..(30): Xaa is C or S
VVMERYKKLVVKDYEDFYLMSIANLETPVX

SEQ ID NO: 2280 - protein, 25 aa, Artificial Sequence
  Cyclic GFR-binding peptide
RHKRLIVNSSDDYYLVSTASLQTPA

SEQ ID NO: 2281 - protein, 32 aa, Artificial Sequence
  Cyclic GFR-binding peptide
  MOD_RES (29)..(30): Xaa is C or S
VVMQYNKLVKPTRGVLYLISIASLDQPVXXPS

SEQ ID NO: 2282 - protein, 40 aa, Artificial Sequence
  Cyclic GFR-binding peptide
  MOD_RES (1)..(3)..(40): Xaa is C or S
XKXALHDELTRHKRLFIPKKRVIEYYLVSTASLQVQTPRX

SEQ ID NO: 2283 - protein, 37 aa, Artificial Sequence
  Cyclic GFR-binding peptide
  MOD_RES (31)..(32): Xaa is C or S
SRVIMRHKRLVKPKRGVYYLISTASLAQPVXXPAASA

SEQ ID NO: 2284 - protein, 30 aa, Artificial Sequence
  Cyclic GFR-binding peptide
  MOD_RES (27)..(28): Xaa is C or S
MRYKKLVKPTRGVFYLISIANLDQPVXXPS

SEQ ID NO: 2285 - protein, 36 aa, Artificial Sequence
  Cyclic GFR-binding peptide
  MOD_RES (2)..(4)..(36): Xaa is C or S
RXGXGEVVMDRYKKLVVKENEDFYLMSIANLETPVX

SEQ ID NO: 2286 - protein, 32 aa, Artificial Sequence
  Cyclic GFR-binding peptide
  MOD_RES (29)..(30): Xaa is C or S
VVMRHKRLVKPTRGVYYLISTASLDQPVXXPS

SEQ ID NO: 2287 - protein, 31 aa, Artificial Sequence
  Cyclic GFR-binding peptide
  MOD_RES (31)..(31): Xaa is C or S
TRYKKLFIPKKRVIEFYLVSIANLQVQTPRX

SEQ ID NO: 2288 - protein, 24 aa, Artificial Sequence
  Cyclic GFR-binding peptide
VVMDRHKRLVVKENEDYYLMSTAS

SEQ ID NO: 2289 - protein, 28 aa, Artificial Sequence
  Cyclic GFR-binding peptide
  MOD_RES (2)..(2): Xaa is C or S
KXSKVVMRYKKLVKPTRGVFYLISIANL

SEQ ID NO: 2290 - protein, 31 aa, Artificial Sequence
  Cyclic GFR-binding peptide
  MOD_RES (1)..(1): Xaa is C or S
XALHDELTQYNKLFIPKKRVIELYLVSIASL

SEQ ID NO: 2291 - protein, 27 aa, Artificial Sequence
  Cyclic GFR-binding peptide
  MOD_RES (1)..(1): Xaa is C or S
XSRVVMNRYKKLIVNSSDDFYLVSIAN

SEQ ID NO: 2292 - protein, 28 aa, Artificial Sequence
  Cyclic GFR-binding peptide
  MOD_RES (28)..(28): Xaa is C or S
MEYHYKLVVKDYEDKYLMSIPSLETPVX

SEQ ID NO: 2293 - protein, 28 aa, Artificial Sequence
  Cyclic GFR-binding peptide
ELTRHKRLFIPKKRVIEYYLVSTASLQV

SEQ ID NO: 2294 - protein, 23 aa, Artificial Sequence
  Cyclic GFR-binding peptide
QYNKLIVNSSDDLYLVSIASLQT

SEQ ID NO: 2295 - protein, 33 aa, Artificial Sequence
  Cyclic GFR-binding peptide
  MOD_RES (33)..(33): Xaa is C or S
ELTRHKRLFIPKKRVIEYYLVSTASLQVQTPRX

SEQ ID NO: 2296 - protein, 36 aa, Artificial Sequence
  Cyclic GFR-binding peptide
  MOD_RES (31)..(32): Xaa is C or S
SKVVMRHKRLVKPTRGVYYLISTASLDQPVXXPSAS

SEQ ID NO: 2297 - protein, 29 aa, Artificial Sequence
  Cyclic GFR-binding peptide
  MOD_RES (1)..(1): Xaa is C or S
XAKVVMNRYKKLIVNNSSDFYLVSIANLK

SEQ ID NO: 2298 - protein, 31 aa, Artificial Sequence
  Cyclic GFR-binding peptide
  MOD_RES (26)..(27): Xaa is C or S
QYNKLIVNSSDDLYLVSIASLKTPAXXPKPV

SEQ ID NO: 2299 - protein, 35 aa, Artificial Sequence
  Cyclic GFR-binding peptide
LHDELTQYNKLFIPKKRVIELYLVSIASLQVQTPR

SEQ ID NO: 2300 - protein, 31 aa, Artificial Sequence
  Cyclic GFR-binding peptide
  MOD_RES (31)..(31): Xaa is C or S
EVVMEQYNKLVVKDYEDLYLMSIASLETPVX

SEQ ID NO: 2301 - protein, 29 aa, Artificial Sequence
  Cyclic GFR-binding peptide
RVVMNQYNKLIVNSSDDLYLVSIASLQTP

SEQ ID NO: 2302 - protein, 36 aa, Artificial Sequence
  Cyclic GFR-binding peptide
  MOD_RES (33)..(34): Xaa is C or S
EAVSMGEQYNKLTPVGMDDLYLVSIASLKTPVXXAK

SEQ ID NO: 2303 - protein, 30 aa, Artificial Sequence
  Cyclic GFR-binding peptide
  MOD_RES (30)..(30): Xaa is C or S
KVVMQYNKLVKPTRGVLYLISIASLDQPVX

SEQ ID NO: 2304 - protein, 25 aa, Artificial Sequence
  Cyclic GFR-binding peptide
SKVVMRYKKLVKPTRGVFYLISIAN

SEQ ID NO: 2305 - protein, 24 aa, Artificial Sequence
  Cyclic GFR-binding peptide
MNRYKKLIVNSSDDFYLVSIANLK

SEQ ID NO: 2306 - protein, 34 aa, Artificial Sequence
  Cyclic GFR-binding peptide
  MOD_RES (1)..(33)..(34): Xaa is C or S
XSRVVMNRHKRLIVNSSDDYYLVSTASLKTPAXX

SEQ ID NO: 2307 - protein, 29 aa, Artificial Sequence
  Cyclic GFR-binding peptide
  MOD_RES (29)..(29): Xaa is C or S
VIMQYNKLVKPKRGVLYLISIASLAQPVX

SEQ ID NO: 2308 - protein, 34 aa, Artificial Sequence
  Cyclic GFR-binding peptide
  MOD_RES (1)..(33)..(34): Xaa is C or S
XAKVVMNQYNKLIVNNSSDLYLVSIASLKTPAXX

SEQ ID NO: 2309 - protein, 28 aa, Artificial Sequence
  Cyclic GFR-binding peptide
SKVIMRYKKLIKPTKGIFYLISIANLDQ

SEQ ID NO: 2310 - protein, 40 aa, Artificial Sequence
  Cyclic GFR-binding peptide
  MOD_RES (37)..(37): Xaa is C or S
ALHDELTRYKKLFIPKKRVIEFYLVSIANLQVQTPRXQVN

SEQ ID NO: 2311 - protein, 30 aa, Artificial Sequence
  Cyclic GFR-binding peptide
  MOD_RES (1)..(1): Xaa is C or S
XSRVVMNRYKKLIVNSSDDFYLVSIANLKT

SEQ ID NO: 2312 - protein, 35 aa, Artificial Sequence
  Cyclic GFR-binding peptide
  MOD_RES (29)..(30): Xaa is C or S
MGEQYNKLTPVGMDDLYLVSIASLKTPVXXAKGVK

SEQ ID NO: 2313 - protein, 39 aa, Artificial Sequence
  Cyclic GFR-binding peptide
  MOD_RES (2)..(34)..(35): Xaa is C or S
GXGEVVMDQYNKLVVKENEDLYLMSIASLETPVXXAKPI

SEQ ID NO: 2314 - protein, 27 aa, Artificial Sequence
  Cyclic GFR-binding peptide
VVMNRYKKLIVNSSDDFYLVSIANLKT

SEQ ID NO: 2315 - protein, 35 aa, Artificial Sequence
  Cyclic GFR-binding peptide
  MOD_RES (2)..(34)..(35): Xaa is C or S
GXARVVMNRYKKLIVNSSDDFYLVSIANLQTPAXX

SEQ ID NO: 2316 - protein, 22 aa, Artificial Sequence
  Cyclic GFR-binding peptide
MRHKRLIKPTKGIYYLISTASL

SEQ ID NO: 2317 - protein, 27 aa, Artificial Sequence
  Cyclic GFR-binding peptide
  MOD_RES (1)..(1): Xaa is C or S
XGEVVMERYKKLVVKDYEDFYLMSIAN

SEQ ID NO: 2318 - protein, 29 aa, Artificial Sequence
  Cyclic GFR-binding peptide
KVVMQYNKLVKPTRGVLYLISIASLDQPV

SEQ ID NO: 2319 - protein, 34 aa, Artificial Sequence
  Cyclic GFR-binding peptide
  MOD_RES (29)..(30): Xaa is C or S
VIMRYKKLVKPKRGVFYLISIANLAQPVXXPAAS

SEQ ID NO: 2320 - protein, 32 aa, Artificial Sequence
  Cyclic GFR-binding peptide
  MOD_RES (30)..(31): Xaa is C or S
VVMNRYKKLIVNNSSDFYLVSIANLKTPAXXA

SEQ ID NO: 2321 - protein, 27 aa, Artificial Sequence
  Cyclic GFR-binding peptide
MNRHKRLIVNSSDDYYLVSTASLKTPA

SEQ ID NO: 2322 - protein, 34 aa, Artificial Sequence
  Cyclic GFR-binding peptide
  MOD_RES (28)..(28): Xaa is C or S
MNYHYKLIVNSSDDKYLVSIPSLKTPAXTPKTVH

SEQ ID NO: 2323 - protein, 34 aa, Artificial Sequence
  Cyclic GFR-binding peptide
  MOD_RES (28)..(28): Xaa is C or S
MNRHKRLIVNSSDDYYLVSTASLKTPAXTPKTVH

SEQ ID NO: 2324 - protein, 28 aa, Artificial Sequence
  Cyclic GFR-binding peptide
  MOD_RES (26)..(27): Xaa is C or S
QYNKLVVKDYEDLYLMSIASLETPVXXA

SEQ ID NO: 2325 - protein, 39 aa, Artificial Sequence
  Cyclic GFR-binding peptide
  MOD_RES (2)..(34)..(35): Xaa is C or S
GXAKVVMNYHYKLIVNNSSDKYLVSIPSLKTPAXXAKPV

SEQ ID NO: 2326 - protein, 41 aa, Artificial Sequence
  Cyclic GFR-binding peptide
  MOD_RES (2)..(4)..(36)..(37): Xaa is C or S
HXGXSRVVMNRHKRLIVNSSDDYYLVSTASLKTPAXXPKPV

SEQ ID NO: 2327 - protein, 37 aa, Artificial Sequence
  Cyclic GFR-binding peptide
  MOD_RES (31)..(32): Xaa is C or S
EVVMEYHYKLVVKDYEDKYLMSIPSLETPVXXAKPIS

SEQ ID NO: 2328 - protein, 35 aa, Artificial Sequence
  Cyclic GFR-binding peptide
  MOD_RES (30)..(31): Xaa is C or S
VVMDYHYKLVVKENEDKYLMSIPSLETPVXXAKPI

SEQ ID NO: 2329 - protein, 34 aa, Artificial Sequence
  Cyclic GFR-binding peptide
  MOD_RES (1)..(33): Xaa is C or S
XSRVVMNYHYKLIVNSSDDKYLVSIPSLKTPAXT

SEQ ID NO: 2330 - protein, 28 aa, Artificial Sequence
  Cyclic GFR-binding peptide
  MOD_RES (1)..(1): Xaa is C or S
XGEVVMERHKRLVVKDYEDYYLMSTASL

SEQ ID NO: 2331 - protein, 27 aa, Artificial Sequence
  Cyclic GFR-binding peptide
  MOD_RES (1)..(1): Xaa is C or S
XGEVVMEYHYKLVVKDYEDKYLMSIPS

SEQ ID NO: 2332 - protein, 25 aa, Artificial Sequence
  Cyclic GFR-binding peptide
EVVMDQYNKLVVKENEDLYLMSIAS

SEQ ID NO: 2333 - protein, 27 aa, Artificial Sequence
  Cyclic GFR-binding peptide
VVMNRHKRLIVNSSDDYYLVSTASLQT

SEQ ID NO: 2334 - protein, 32 aa, Artificial Sequence
  Cyclic GFR-binding peptide
  MOD_RES (2)..(2): Xaa is C or S
GXAKVVMNRYKKLIVNNSSDFYLVSIANLKTP

SEQ ID NO: 2335 - protein, 31 aa, Artificial Sequence
  Cyclic GFR-binding peptide
GEVVMDRHKRLVVKENEDYYLMSTASLETPV

SEQ ID NO: 2336 - protein, 36 aa, Artificial Sequence
  Cyclic GFR-binding peptide
  MOD_RES (2)..(33)..(34): Xaa is C or S
KXSKVIMQYNKLIKPTKGILYLISIASLDQSVXXPS

SEQ ID NO: 2337 - protein, 40 aa, Artificial Sequence
  Cyclic GFR-binding peptide
  MOD_RES (2)..(34)..(35): Xaa is C or S
GXSRVVMNRYKKLIVNSSDDFYLVSIANLKTPAXXPKPVY

SEQ ID NO: 2338 - protein, 27 aa, Artificial Sequence
  Cyclic GFR-binding peptide
GEVVMEQYNKLVVKDYEDLYLMSIASL

SEQ ID NO: 2339 - protein, 35 aa, Artificial Sequence
  Cyclic GFR-binding peptide
  MOD_RES (32)..(33): Xaa is C or S
GEVVMEYHYKLVVKDYEDKYLMSIPSLETPVXXAK

SEQ ID NO: 2340 - protein, 30 aa, Artificial Sequence
  Cyclic GFR-binding peptide
  MOD_RES (26)..(27): Xaa is C or S
RYKKLIVNNSSDFYLVSIANLKTPAXXAKP

SEQ ID NO: 2341 - protein, 29 aa, Artificial Sequence
  Cyclic GFR-binding peptide
RVVMNRHKRLIVNSSDDYYLVSTASLKTP

SEQ ID NO: 2342 - protein, 35 aa, Artificial Sequence
  Cyclic GFR-binding peptide
  MOD_RES (30)..(31): Xaa is C or S
KVIMYHYKLIKPTKGIKYLISIPSLDQSVXXPSAS

SEQ ID NO: 2343 - protein, 30 aa, Artificial Sequence
  Cyclic GFR-binding peptide
GEVVMDRHKRLVVKENEDYYLMSTASLETP

SEQ ID NO: 2344 - protein, 27 aa, Artificial Sequence
  Cyclic GFR-binding peptide
GEVVMERHKRLVVKDYEDYYLMSTASL

SEQ ID NO: 2345 - protein, 31 aa, Artificial Sequence
  Cyclic GFR-binding peptide
GEVVMEYHYKLVVKDYEDKYLMSIPSLETPV

SEQ ID NO: 2346 - protein, 31 aa, Artificial Sequence
  Cyclic GFR-binding peptide
  MOD_RES (2)..(2): Xaa is C or S
GXARVVMNRYKKLIVNSSDDFYLVSIANLQT

SEQ ID NO: 2347 - protein, 27 aa, Artificial Sequence
  Cyclic GFR-binding peptide
GERHKRLTPVGMDDYYLVSTASLKTPV

SEQ ID NO: 2348 - protein, 26 aa, Artificial Sequence
  Cyclic GFR-binding peptide
VIMQYNKLVKPKRGVLYLISIASLAQ

SEQ ID NO: 2349 - protein, 23 aa, Artificial Sequence
  Cyclic GFR-binding peptide
MNYHYKLIVNNSSDKYLVSIPSL

SEQ ID NO: 2350 - protein, 29 aa, Artificial Sequence
  Cyclic GFR-binding peptide
RVIMRHKRLVKPKRGVYYLISTASLAQPV

SEQ ID NO: 2351 - protein, 34 aa, Artificial Sequence
  Cyclic GFR-binding peptide
ALHDELTRYKKLFIPKKRVIEFYLVSIANLQVQT

SEQ ID NO: 2352 - protein, 22 aa, Artificial Sequence
  Cyclic GFR-binding peptide
RYKKLVVKDYEDFYLMSIANLE

SEQ ID NO: 2353 - protein, 35 aa, Artificial Sequence
  Cyclic GFR-binding peptide
  MOD_RES (33)..(33): Xaa is C or S
ELTYHYKLFIPKKRVIEKYLVSIPSLQVQTPRXQV

SEQ ID NO: 2354 - protein, 35 aa, Artificial Sequence
  Cyclic GFR-binding peptide
  MOD_RES (29)..(30): Xaa is C or S
VVMYHYKLVKPTRGVKYLISIPSLDQPVXXPSASA

SEQ ID NO: 2355 - protein, 40 aa, Artificial Sequence
  Cyclic GFR-binding peptide
  MOD_RES (2)..(4)..(36): Xaa is C or S
HXGXSRVVMNYHYKLIVNSSDDKYLVSIPSLKTPAXTPKT

SEQ ID NO: 2356 - protein, 37 aa, Artificial Sequence
  Cyclic GFR-binding peptide
  MOD_RES (1)..(33): Xaa is C or S
XSRVVMNYHYKLIVNSSDDKYLVSIPSLKTPAXTPKT

SEQ ID NO: 2357 - protein, 31 aa, Artificial Sequence
  Cyclic GFR-binding peptide
  MOD_RES (30)..(31): Xaa is C or S
VVMDYHYKLVVKENEDKYLMSIPSLETPVXX

SEQ ID NO: 2358 - protein, 35 aa, Artificial Sequence
  Cyclic GFR-binding peptide
  MOD_RES (1)..(33)..(34): Xaa is C or S
XAKVVMNQYNKLIVNNSSDLYLVSIASLKTPAXXA

SEQ ID NO: 2359 - protein, 24 aa, Artificial Sequence
  Cyclic GFR-binding peptide
QYNKLFIPKKRVIELYLVSIASLQ

SEQ ID NO: 2360 - protein, 31 aa, Artificial Sequence
  Cyclic GFR-binding peptide
  MOD_RES (2)..(4): Xaa is C or S
HXGXARVVMNYHYKLIVNSSDDKYLVSIPSL

SEQ ID NO: 2361 - protein, 35 aa, Artificial Sequence
  Cyclic GFR-binding peptide
  MOD_RES (1)..(33)..(34): Xaa is C or S
XGEVVMEQYNKLVVKDYEDLYLMSIASLETPVXXA

SEQ ID NO: 2362 - protein, 31 aa, Artificial Sequence
  Cyclic GFR-binding peptide
  MOD_RES (27)..(28): Xaa is C or S
MQYNKLVKPTRGVLYLISIASLDQPVXXPSA

SEQ ID NO: 2363 - protein, 29 aa, Artificial Sequence
  Cyclic GFR-binding peptide
QYNKLFIPKKRVIELYLVSIASLQVQTPR

SEQ ID NO: 2364 - protein, 31 aa, Artificial Sequence
  Cyclic GFR-binding peptide
  MOD_RES (28)..(29): Xaa is C or S
GERYKKLTPVGMDDFYLVSIANLKTPVXXAK

SEQ ID NO: 2365 - protein, 38 aa, Artificial Sequence
  Cyclic GFR-binding peptide
  MOD_RES (2)..(34)..(35): Xaa is C or S
GXGEVVMEQYNKLVVKDYEDLYLMSIASLETPVXXAKP

SEQ ID NO: 2366 - protein, 31 aa, Artificial Sequence
  Cyclic GFR-binding peptide
  MOD_RES (1)..(3): Xaa is C or S
XGXARVVMNQYNKLIVNSSDDLYLVSIASLQ

SEQ ID NO: 2367 - protein, 31 aa, Artificial Sequence
  Cyclic GFR-binding peptide
  MOD_RES (2)..(2): Xaa is C or S
KXSKVVMYHYKLVKPTRGVKYLISIPSLDQP

SEQ ID NO: 2368 - protein, 32 aa, Artificial Sequence
  Cyclic GFR-binding peptide
  MOD_RES (1)..(1): Xaa is C or S
XGEVVMDQYNKLVVKENEDLYLMSIASLETPV

SEQ ID NO: 2369 - protein, 23 aa, Artificial Sequence
  Cyclic GFR-binding peptide
VMEYHYKLVVKDYEDKYLMSIPS

SEQ ID NO: 2370 - protein, 40 aa, Artificial Sequence
  Cyclic GFR-binding peptide
  MOD_RES (2)..(4)..(35)..(36): Xaa is C or S
SXKXSKVVMRYKKLVKPTRGVFYLISIANLDQPVXXPSAS

SEQ ID NO: 2371 - protein, 22 aa, Artificial Sequence
  Cyclic GFR-binding peptide
RYKKLVKPTRGVFYLISIANLD

SEQ ID NO: 2372 - protein, 28 aa, Artificial Sequence
  Cyclic GFR-binding peptide
SMGEQYNKLTPVGMDDLYLVSIASLKTP

SEQ ID NO: 2373 - protein, 30 aa, Artificial Sequence
  Cyclic GFR-binding peptide
  MOD_RES (30)..(30): Xaa is C or S
SMGERHKRLTPVGMDDYYLVSTASLKTPVX

SEQ ID NO: 2374 - protein, 30 aa, Artificial Sequence
  Cyclic GFR-binding peptide
SKVVMQYNKLVKPTRGVLYLISIASLDQPV

SEQ ID NO: 2375 - protein, 32 aa, Artificial Sequence
  Cyclic GFR-binding peptide
  MOD_RES (1)..(1): Xaa is C or S
XEAVSMGEQYNKLTPVGMDDLYLVSIASLKTP

SEQ ID NO: 2376 - protein, 34 aa, Artificial Sequence
  Cyclic GFR-binding peptide
  MOD_RES (1)..(33): Xaa is C or S
XSRVVMNRYKKLIVNSSDDFYLVSIANLKTPAXT

SEQ ID NO: 2377 - protein, 33 aa, Artificial Sequence
  Cyclic GFR-binding peptide
  MOD_RES (2)..(4): Xaa is C or S
EXKXALHDELTRYKKLFIPKKRVIEFYLVSIAN

SEQ ID NO: 2378 - protein, 34 aa, Artificial Sequence
  Cyclic GFR-binding peptide
  MOD_RES (30)..(31): Xaa is C or S
VVMNYHYKLIVNNSSDKYLVSIPSLKTPAXXAKP

SEQ ID NO: 2379 - protein, 40 aa, Artificial Sequence
  Cyclic GFR-binding peptide
  MOD_RES (2)..(4)..(37)..(38): Xaa is C or S
RXGXEAVSMGEQYNKLTPVGMDDLYLVSIASLKTPVXXAK

SEQ ID NO: 2380 - protein, 27 aa, Artificial Sequence
  Cyclic GFR-binding peptide
  MOD_RES (27)..(27): Xaa is C or S
MRHKRLIKPTKGIYYLISTASLDQSVX

SEQ ID NO: 2381 - protein, 40 aa, Artificial Sequence
  Cyclic GFR-binding peptide
  MOD_RES (1)..(3)..(36)..(37): Xaa is C or S
XGXEAVSMGERHKRLTPVGMDDYYLVSTASLKTPVXXAKG

SEQ ID NO: 2382 - protein, 32 aa, Artificial Sequence
  Cyclic GFR-binding peptide
  MOD_RES (1)..(3): Xaa is C or S
XKXSRVIMQYNKLVKPKRGVLYLISIASLAQP

SEQ ID NO: 2383 - protein, 24 aa, Artificial Sequence
  Cyclic GFR-binding peptide
VIMRHKRLIKPTKGIYYLISTASL

SEQ ID NO: 2384 - protein, 33 aa, Artificial Sequence
  Cyclic GFR-binding peptide
  MOD_RES (32)..(33): Xaa is C or S
GEVVMDYHYKLVVKENEDKYLMSIPSLETPVXX

SEQ ID NO: 2385 - protein, 22 aa, Artificial Sequence
  Cyclic GFR-binding peptide
NRHKRLIVNSSDDYYLVSTASL

SEQ ID NO: 2386 - protein, 29 aa, Artificial Sequence
  Cyclic GFR-binding peptide
RVVMNRYKKLIVNSSDDFYLVSIANLKTP

SEQ ID NO: 2387 - protein, 28 aa, Artificial Sequence
  Cyclic GFR-binding peptide
  MOD_RES (2)..(2): Xaa is C or S
GXAKVVMNQYNKLIVNNSSDLYLVSIAS

SEQ ID NO: 2388 - protein, 37 aa, Artificial Sequence
  Cyclic GFR-binding peptide
  MOD_RES (36)..(36): Xaa is C or S
LHDELTRYKKLFIPKKRVIEFYLVSIANLQVQTPRXQ

SEQ ID NO: 2389 - protein, 27 aa, Artificial Sequence
  Cyclic GFR-binding peptide
DELTQYNKLFIPKKRVIELYLVSIASL

SEQ ID NO: 2390 - protein, 23 aa, Artificial Sequence
  Cyclic GFR-binding peptide
MYHYKLIKPTKGIKYLISIPSLD

SEQ ID NO: 2391 - protein, 38 aa, Artificial Sequence
  Cyclic GFR-binding peptide
  MOD_RES (1)..(32)..(33): Xaa is C or S
XSKVVMQYNKLVKPTRGVLYLISIASLDQPVXXPSASA

SEQ ID NO: 2392 - protein, 38 aa, Artificial Sequence
  Cyclic GFR-binding peptide
  MOD_RES (1)..(3): Xaa is C or S
XKXALHDELTQYNKLFIPKKRVIELYLVSIASLQVQTP

SEQ ID NO: 2393 - protein, 34 aa, Artificial Sequence
  Cyclic GFR-binding peptide
  MOD_RES (30)..(31): Xaa is C or S
VVMNQYNKLIVNSSDDLYLVSIASLQTPAXXPKP

SEQ ID NO: 2394 - protein, 39 aa, Artificial Sequence
  Cyclic GFR-binding peptide
  MOD_RES (1)..(33)..(34): Xaa is C or S
XSRVVMNRYKKLIVNSSDDFYLVSIANLKTPAXXPKPVY

SEQ ID NO: 2395 - protein, 20 aa, Artificial Sequence
  Cyclic GFR-binding peptide
QYNKLTPVGMDDLYLVSIAS

SEQ ID NO: 2396 - protein, 28 aa, Artificial Sequence
  Cyclic GFR-binding peptide
KVVMQYNKLVKPTRGVLYLISIASLDQP

SEQ ID NO: 2397 - protein, 21 aa, Artificial Sequence
  Cyclic GFR-binding peptide
RYKKLTPVGMDDFYLVSIANL

SEQ ID NO: 2398 - protein, 28 aa, Artificial Sequence
  Cyclic GFR-binding peptide
  MOD_RES (1)..(1): Xaa is C or S
XSRVVMNRHKRLIVNSSDDYYLVSTASL

SEQ ID NO: 2399 - protein, 34 aa, Artificial Sequence
  Cyclic GFR-binding peptide
  MOD_RES (31)..(32): Xaa is C or S
EVVMERYKKLVVKDYEDFYLMSIANLETPVXXAK

SEQ ID NO: 2400 - protein, 30 aa, Artificial Sequence
  Cyclic GFR-binding peptide
  MOD_RES (30)..(30): Xaa is C or S
RVIMRHKRLVKPKRGVYYLISTASLAQPVX

SEQ ID NO: 2401 - protein, 33 aa, Artificial Sequence
  Cyclic GFR-binding peptide
  MOD_RES (29)..(30): Xaa is C or S
VMNYHYKLIVNNSSDKYLVSIPSLKTPAXXAKP

SEQ ID NO: 2402 - protein, 36 aa, Artificial Sequence
  Cyclic GFR-binding peptide
  MOD_RES (2)..(4)..(36): Xaa is C or S
HXGXARVVMNYHYKLIVNSSDDKYLVSIPSLQTPAX

SEQ ID NO: 2403 - protein, 39 aa, Artificial Sequence
  Cyclic GFR-binding peptide
  MOD_RES (2)..(34)..(35): Xaa is C or S
GXGEVVMERYKKLVVKDYEDFYLMSIANLETPVXXAKPI

SEQ ID NO: 2404 - protein, 36 aa, Artificial Sequence
  Cyclic GFR-binding peptide
  MOD_RES (1)..(34)..(35): Xaa is C or S
XEAVSMGEQYNKLTPVGMDDLYLVSIASLKTPVXXA

SEQ ID NO: 2405 - protein, 25 aa, Artificial Sequence
  Cyclic GFR-binding peptide
ELTRYKKLFIPKKRVIEFYLVSIAN

SEQ ID NO: 2406 - protein, 33 aa, Artificial Sequence
  Cyclic GFR-binding peptide
  MOD_RES (2)..(2): Xaa is C or S
GXGEVVMEYHYKLVVKDYEDKYLMSIPSLETPV

SEQ ID NO: 2407 - protein, 31 aa, Artificial Sequence
  Cyclic GFR-binding peptide
  MOD_RES (2)..(2): Xaa is C or S
GXGEVVMERHKRLVVKDYEDYYLMSTASLET

SEQ ID NO: 2408 - protein, 27 aa, Artificial Sequence
  Cyclic GFR-binding peptide
KVVMNYHYKLIVNNSSDKYLVSIPSLK

SEQ ID NO: 2409 - protein, 29 aa, Artificial Sequence
  Cyclic GFR-binding peptide
  MOD_RES (29)..(29): Xaa is C or S
VMNYHYKLIVNSSDDKYLVSIPSLQTPAX

SEQ ID NO: 2410 - protein, 33 aa, Artificial Sequence
  Cyclic GFR-binding peptide
  MOD_RES (2)..(2): Xaa is C or S
GXSRVVMNRYKKLIVNSSDDFYLVSIANLKTPA

SEQ ID NO: 2411 - protein, 26 aa, Artificial Sequence
  Cyclic GFR-binding peptide
VIMYHYKLIKPTKGIKYLISIPSLDQ

SEQ ID NO: 2412 - protein, 38 aa, Artificial Sequence
  Cyclic GFR-binding peptide
  MOD_RES (1)..(3)..(35)..(36): Xaa is C or S
XGXGEVVMERHKRLVVKDYEDYYLMSTASLETPVXXAK

SEQ ID NO: 2413 - protein, 34 aa, Artificial Sequence
  Cyclic GFR-binding peptide
  MOD_RES (2)..(33)..(34): Xaa is C or S
KXSKVVMRHKRLVKPTRGVYYLISTASLDQPVXX

SEQ ID NO: 2414 - protein, 31 aa, Artificial Sequence
  Cyclic GFR-binding peptide
  MOD_RES (27)..(28): Xaa is C or S
DQYNKLVVKENEDLYLMSIASLETPVXXAKP

SEQ ID NO: 2415 - protein, 25 aa, Artificial Sequence
  Cyclic GFR-binding peptide
SKVVMRHKRLVKPTRGVYYLISTAS

SEQ ID NO: 2416 - protein, 34 aa, Artificial Sequence
  Cyclic GFR-binding peptide
  MOD_RES (2)..(4): Xaa is C or S
SXKXSKVIMRYKKLIKPTKGIFYLISIANLDQSV

SEQ ID NO: 2417 - protein, 39 aa, Artificial Sequence
  Cyclic GFR-binding peptide
  MOD_RES (1)..(3)..(35)..(36): Xaa is C or S
XGXAKVVMNYHYKLIVNNSSDKYLVSIPSLKTPAXXAKP

SEQ ID NO: 2418 - protein, 37 aa, Artificial Sequence
  Cyclic GFR-binding peptide
  MOD_RES (31)..(32): Xaa is C or S
EVVMERHKRLVVKDYEDYYLMSTASLETPVXXAKPIS

SEQ ID NO: 2419 - protein, 35 aa, Artificial Sequence
  Cyclic GFR-binding peptide
  MOD_RES (31)..(32): Xaa is C or S
EVVMDRYKKLVVKENEDFYLMSIANLETPVXXAKP

SEQ ID NO: 2420 - protein, 33 aa, Artificial Sequence
  Cyclic GFR-binding peptide
  MOD_RES (29)..(30): Xaa is C or S
VIMQYNKLIKPTKGILYLISIASLDQSVXXPSA

SEQ ID NO: 2421 - protein, 35 aa, Artificial Sequence
  Cyclic GFR-binding peptide
  MOD_RES (1)..(3): Xaa is C or S
XGXEAVSMGEQYNKLTPVGMDDLYLVSIASLKTPV

SEQ ID NO: 2422 - protein, 27 aa, Artificial Sequence
  Cyclic GFR-binding peptide
EVVMERYKKLVVKDYEDFYLMSIANLE

SEQ ID NO: 2423 - protein, 32 aa, Artificial Sequence
  Cyclic GFR-binding peptide
  MOD_RES (26)..(27): Xaa is C or S
RYKKLVKPKRGVFYLISIANLAQPVXXPAASA

SEQ ID NO: 2424 - protein, 34 aa, Artificial Sequence
  Cyclic GFR-binding peptide
  MOD_RES (31)..(31): Xaa is C or S
RVVMNRYKKLIVNSSDDFYLVSIANLKTPAXTPK

SEQ ID NO: 2425 - protein, 41 aa, Artificial Sequence
  Cyclic GFR-binding peptide
  MOD_RES (2)..(4)..(41): Xaa is C or S
EXKXALHDELTYHYKLFIPKKRVIEKYLVSIPSLQVQTPRX

SEQ ID NO: 2426 - protein, 35 aa, Artificial Sequence
  Cyclic GFR-binding peptide
  MOD_RES (2)..(34): Xaa is C or S
GXSRVVMNYHYKLIVNSSDDKYLVSIPSLKTPAXT

SEQ ID NO: 2427 - protein, 37 aa, Artificial Sequence
  Cyclic GFR-binding peptide
  MOD_RES (1)..(33): Xaa is C or S
XSRVVMNRYKKLIVNSSDDFYLVSIANLKTPAXTPKT

SEQ ID NO: 2428 - protein, 29 aa, Artificial Sequence
  Cyclic GFR-binding peptide
KVVMYHYKLVKPTRGVKYLISIPSLDQPV

SEQ ID NO: 2429 - protein, 24 aa, Artificial Sequence
  Cyclic GFR-binding peptide
MNRYKKLIVNSSDDFYLVSIANLQ

SEQ ID NO: 2430 - protein, 29 aa, Artificial Sequence
  Cyclic GFR-binding peptide
  MOD_RES (28)..(29): Xaa is C or S
MERHKRLVVKDYEDYYLMSTASLETPVXX

SEQ ID NO: 2431 - protein, 29 aa, Artificial Sequence
  Cyclic GFR-binding peptide
  MOD_RES (28)..(29): Xaa is C or S
MDRYKKLVVKENEDFYLMSIANLETPVXX

SEQ ID NO: 2432 - protein, 39 aa, Artificial Sequence
  Cyclic GFR-binding peptide
  MOD_RES (1)..(3)..(35)..(36): Xaa is C or S
XGXARVVMNRYKKLIVNSSDDFYLVSIANLQTPAXXPKP

SEQ ID NO: 2433 - protein, 30 aa, Artificial Sequence
  Cyclic GFR-binding peptide
  MOD_RES (1)..(1): Xaa is C or S
XGEVVMEYHYKLVVKDYEDKYLMSIPSLET

SEQ ID NO: 2434 - protein, 30 aa, Artificial Sequence
  Cyclic GFR-binding peptide
SKVVMYHYKLVKPTRGVKYLISIPSLDQPV

SEQ ID NO: 2435 - protein, 35 aa, Artificial Sequence
  Cyclic GFR-binding peptide
  MOD_RES (29)..(30): Xaa is C or S
VMNRYKKLIVNNSSDFYLVSIANLKTPAXXAKPVA

SEQ ID NO: 2436 - protein, 28 aa, Artificial Sequence
  Cyclic GFR-binding peptide
  MOD_RES (27)..(28): Xaa is C or S
DYHYKLVVKENEDKYLMSIPSLETPVXX

SEQ ID NO: 2437 - protein, 37 aa, Artificial Sequence
  Cyclic GFR-binding peptide
  MOD_RES (1)..(3)..(34)..(35): Xaa is C or S
XKXSKVVMYHYKLVKPTRGVKYLISIPSLDQPVXXPS

SEQ ID NO: 2438 - protein, 31 aa, Artificial Sequence
  Cyclic GFR-binding peptide
  MOD_RES (1)..(3): Xaa is C or S
XKXSRVIMQYNKLVKPKRGVLYLISIASLAQ

SEQ ID NO: 2439 - protein, 31 aa, Artificial Sequence
  Cyclic GFR-binding peptide
  MOD_RES (2)..(2): Xaa is C or S
KXSKVVMRYKKLVKPTRGVFYLISIANLDQP

SEQ ID NO: 2440 - protein, 23 aa, Artificial Sequence
  Cyclic GFR-binding peptide
MERYKKLVVKDYEDFYLMSIANL

SEQ ID NO: 2441 - protein, 26 aa, Artificial Sequence
  Cyclic GFR-binding peptide
AKVVMNYHYKLIVNNSSDKYLVSIPS

SEQ ID NO: 2442 - protein, 29 aa, Artificial Sequence
  Cyclic GFR-binding peptide
  MOD_RES (28)..(29): Xaa is C or S
MEYHYKLVVKDYEDKYLMSIPSLETPVXX

SEQ ID NO: 2443 - protein, 40 aa, Artificial Sequence
  Cyclic GFR-binding peptide
  MOD_RES (2)..(4)..(35)..(36): Xaa is C or S
SXKXSKVIMRHKRLIKPTKGIYYLISTASLDQSVXXPSAS

SEQ ID NO: 2444 - protein, 40 aa, Artificial Sequence
  Cyclic GFR-binding peptide
  MOD_RES (1)..(3)..(35)..(36): Xaa is C or S
XGXSRVVMNRYKKLIVNSSDDFYLVSIANLKTPAXXPKPV

SEQ ID NO: 2445 - protein, 38 aa, Artificial Sequence
  Cyclic GFR-binding peptide
  MOD_RES (1)..(3)..(34)..(35): Xaa is C or S
XKXSRVIMYHYKLVKPKRGVKYLISIPSLAQPVXXPAA

SEQ ID NO: 2446 - protein, 29 aa, Artificial Sequence
  Cyclic GFR-binding peptide
VVMERYKKLVVKDYEDFYLMSIANLETPV

SEQ ID NO: 2447 - protein, 40 aa, Artificial Sequence
  Cyclic GFR-binding peptide
  MOD_RES (2)..(4)..(36)..(37): Xaa is C or S
HXGXSRVVMNYHYKLIVNSSDDKYLVSIPSLKTPAXXPKP

SEQ ID NO: 2448 - protein, 32 aa, Artificial Sequence
  Cyclic GFR-binding peptide
  MOD_RES (28)..(29): Xaa is C or S
GERYKKLTPVGMDDFYLVSIANLKTPVXXAKG

SEQ ID NO: 2449 - protein, 32 aa, Artificial Sequence
  Cyclic GFR-binding peptide
  MOD_RES (30)..(31): Xaa is C or S
VVMNRYKKLIVNSSDDFYLVSIANLQTPAXXP

SEQ ID NO: 2450 - protein, 40 aa, Artificial Sequence
  Cyclic GFR-binding peptide
  MOD_RES (1)..(3)..(40): Xaa is C or S
XKXALHDELTQYNKLFIPKKRVIELYLVSIASLQVQTPRX

SEQ ID NO: 2451 - protein, 34 aa, Artificial Sequence
  Cyclic GFR-binding peptide
  MOD_RES (32)..(32): Xaa is C or S
SRVVMNQYNKLIVNSSDDLYLVSIASLKTPAXTP

SEQ ID NO: 2452 - protein, 37 aa, Artificial Sequence
  Cyclic GFR-binding peptide
  MOD_RES (2)..(4)..(35)..(36): Xaa is C or S
SXKXSKVIMRYKKLIKPTKGIFYLISIANLDQSVXXP

SEQ ID NO: 2453 - protein, 30 aa, Artificial Sequence
  Cyclic GFR-binding peptide
  MOD_RES (28)..(29): Xaa is C or S
IMRYKKLIKPTKGIFYLISIANLDQSVXXP

SEQ ID NO: 2454 - protein, 34 aa, Artificial Sequence
  Cyclic GFR-binding peptide
  MOD_RES (2)..(2): Xaa is C or S
KXALHDELTQYNKLFIPKKRVIELYLVSIASLQV

SEQ ID NO: 2455 - protein, 33 aa, Artificial Sequence
  Cyclic GFR-binding peptide
  MOD_RES (28)..(29): Xaa is C or S
MERHKRLVVKDYEDYYLMSTASLETPVXXAKPI

SEQ ID NO: 2456 - protein, 34 aa, Artificial Sequence
  Cyclic GFR-binding peptide
  MOD_RES (2)..(34): Xaa is C or S
GXARVVMNQYNKLIVNSSDDLYLVSIASLQTPAX

SEQ ID NO: 2457 - protein, 38 aa, Artificial Sequence
  Cyclic GFR-binding peptide
  MOD_RES (35)..(35): Xaa is C or S
HDELTRYKKLFIPKKRVIEFYLVSIANLQVQTPRXQVN

SEQ ID NO: 2458 - protein, 25 aa, Artificial Sequence
  Cyclic GFR-binding peptide
RHKRLTPVGMDDYYLVSTASLKTPV

SEQ ID NO: 2459 - protein, 32 aa, Artificial Sequence
  Cyclic GFR-binding peptide
  MOD_RES (1)..(1): Xaa is C or S
XARVVMNRYKKLIVNSSDDFYLVSIANLQTPA

SEQ ID NO: 2460 - protein, 23 aa, Artificial Sequence
  Cyclic GFR-binding peptide
NQYNKLIVNSSDDLYLVSIASLK

SEQ ID NO: 2461 - protein, 42 aa, Artificial Sequence
  Cyclic GFR-binding peptide
  MOD_RES (2)..(4)..(36): Xaa is C or S
HXGXSRVVMNRYKKLIVNSSDDFYLVSIANLKTPAXTPKTVH

SEQ ID NO: 2462 - protein, 40 aa, Artificial Sequence
  Cyclic GFR-binding peptide
  MOD_RES (2)..(34)..(35): Xaa is C or S
GXAKVVMNRYKKLIVNNSSDFYLVSIANLKTPAXXAKPVA

SEQ ID NO: 2463 - protein, 26 aa, Artificial Sequence
  Cyclic GFR-binding peptide
SRVIMRYKKLVKPKRGVFYLISIANL

SEQ ID NO: 2464 - protein, 30 aa, Artificial Sequence
  Cyclic GFR-binding peptide
LHDELTYHYKLFIPKKRVIEKYLVSIPSLQ

SEQ ID NO: 2465 - protein, 34 aa, Artificial Sequence
  Cyclic GFR-binding peptide
  MOD_RES (1)..(32)..(33): Xaa is C or S
XSKVIMQYNKLIKPTKGILYLISIASLDQSVXXP

SEQ ID NO: 2466 - protein, 35 aa, Artificial Sequence
  Cyclic GFR-binding peptide
  MOD_RES (1)..(1): Xaa is C or S
XALHDELTRYKKLFIPKKRVIEFYLVSIANLQVQT

SEQ ID NO: 2467 - protein, 32 aa, Artificial Sequence
  Cyclic GFR-binding peptide
  MOD_RES (1)..(1): Xaa is C or S
XARVVMNYHYKLIVNSSDDKYLVSIPSLQTPA

SEQ ID NO: 2468 - protein, 36 aa, Artificial Sequence
  Cyclic GFR-binding peptide
  MOD_RES (1)..(3)..(34)..(35): Xaa is C or S
XKXSKVIMRYKKLIKPTKGIFYLISIANLDQSVXXP

SEQ ID NO: 2469 - protein, 38 aa, Artificial Sequence
  Cyclic GFR-binding peptide
  MOD_RES (2)..(4)..(35)..(36): Xaa is C or S
SXKXSKVIMQYNKLIKPTKGILYLISIASLDQSVXXPS

SEQ ID NO: 2470 - protein, 32 aa, Artificial Sequence
  Cyclic GFR-binding peptide
  MOD_RES (29)..(30): Xaa is C or S
VMNRHKRLIVNSSDDYYLVSTASLQTPAXXPK

SEQ ID NO: 2471 - protein, 30 aa, Artificial Sequence
  Cyclic GFR-binding peptide
  MOD_RES (30)..(30): Xaa is C or S
QYNKLFIPKKRVIELYLVSIASLQVQTPRX

SEQ ID NO: 2472 - protein, 32 aa, Artificial Sequence
  Cyclic GFR-binding peptide
  MOD_RES (2)..(4): Xaa is C or S
SXKXSKVVMRYKKLVKPTRGVFYLISIANLDQ

SEQ ID NO: 2473 - protein, 32 aa, Artificial Sequence
  Cyclic GFR-binding peptide
  MOD_RES (28)..(29): Xaa is C or S
MNRYKKLIVNSSDDFYLVSIANLKTPAXXPKP

SEQ ID NO: 2474 - protein, 36 aa, Artificial Sequence
  Cyclic GFR-binding peptide
  MOD_RES (32)..(33): Xaa is C or S
AKVVMNQYNKLIVNNSSDLYLVSIASLKTPAXXAKP

SEQ ID NO: 2475 - protein, 35 aa, Artificial Sequence
  Cyclic GFR-binding peptide
  MOD_RES (29)..(30): Xaa is C or S
VMNRYKKLIVNSSDDFYLVSIANLKTPAXXPKPVY

SEQ ID NO: 2476 - protein, 43 aa, Artificial Sequence
  Cyclic GFR-binding peptide
  MOD_RES (2)..(4)..(37)..(38): Xaa is C or S
RXGXEAVSMGERYKKLTPVGMDDFYLVSIANLKTPVXXAKGVK

SEQ ID NO: 2477 - protein, 30 aa, Artificial Sequence
  Cyclic GFR-binding peptide
  MOD_RES (26)..(27): Xaa is C or S
QYNKLVVKENEDLYLMSIASLETPVXXAKP

SEQ ID NO: 2478 - protein, 39 aa, Artificial Sequence
  Cyclic GFR-binding peptide
  MOD_RES (37)..(37): Xaa is C or S
ALHDELTRYKKLFIPKKRVIEFYLVSIANLQVQTPRXQV

SEQ ID NO: 2479 - protein, 28 aa, Artificial Sequence
  Cyclic GFR-binding peptide
VMNYHYKLIVNSSDDKYLVSIPSLKTPA

SEQ ID NO: 2480 - protein, 25 aa, Artificial Sequence
  Cyclic GFR-binding peptide
VVMDQYNKLVVKENEDLYLMSIASL

SEQ ID NO: 2481 - protein, 36 aa, Artificial Sequence
  Cyclic GFR-binding peptide
  MOD_RES (32)..(33): Xaa is C or S
ARVVMNQYNKLIVNSSDDLYLVSIASLQTPAXXPKP

SEQ ID NO: 2482 - protein, 31 aa, Artificial Sequence
  Cyclic GFR-binding peptide
  MOD_RES (26)..(27): Xaa is C or S
RHKRLIVNSSDDYYLVSTASLKTPAXXPKPV

SEQ ID NO: 2483 - protein, 34 aa, Artificial Sequence
  Cyclic GFR-binding peptide
  MOD_RES (2)..(4): Xaa is C or S
HXGXARVVMNQYNKLIVNSSDDLYLVSIASLQTP

SEQ ID NO: 2484 - protein, 30 aa, Artificial Sequence
  Cyclic GFR-binding peptide
  MOD_RES (2)..(4): Xaa is C or S
RXGXGEVVMDYHYKLVVKENEDKYLMSIPS

SEQ ID NO: 2485 - protein, 30 aa, Artificial Sequence
  Cyclic GFR-binding peptide
  MOD_RES (30)..(30): Xaa is C or S
VVMDRYKKLVVKENEDFYLMSIANLETPVX

SEQ ID NO: 2486 - protein, 33 aa, Artificial Sequence
  Cyclic GFR-binding peptide
  MOD_RES (30)..(31): Xaa is C or S
SMGERYKKLTPVGMDDFYLVSIANLKTPVXXAK

SEQ ID NO: 2487 - protein, 28 aa, Artificial Sequence
  Cyclic GFR-binding peptide
EVVMDRYKKLVVKENEDFYLMSIANLET

SEQ ID NO: 2488 - protein, 32 aa, Artificial Sequence
  Cyclic GFR-binding peptide
ELTRYKKLFIPKKRVIEFYLVSIANLQVQTPR

SEQ ID NO: 2489 - protein, 35 aa, Artificial Sequence
  Cyclic GFR-binding peptide
  MOD_RES (2)..(33)..(34): Xaa is C or S
KXSRVIMRHKRLVKPKRGVYYLISTASLAQPVXXP

SEQ ID NO: 2490 - protein, 37 aa, Artificial Sequence
  Cyclic GFR-binding peptide
  MOD_RES (2)..(35)..(36): Xaa is C or S
GXEAVSMGEQYNKLTPVGMDDLYLVSIASLKTPVXXA

SEQ ID NO: 2491 - protein, 24 aa, Artificial Sequence
  Cyclic GFR-binding peptide
VVMERHKRLVVKDYEDYYLMSTAS

SEQ ID NO: 2492 - protein, 33 aa, Artificial Sequence
  Cyclic GFR-binding peptide
  MOD_RES (1)..(3): Xaa is C or S
XGXGEVVMDRYKKLVVKENEDFYLMSIANLETP

SEQ ID NO: 2493 - protein, 30 aa, Artificial Sequence
  Cyclic GFR-binding peptide
  MOD_RES (27)..(28): Xaa is C or S
MYHYKLIKPTKGIKYLISIPSLDQSVXXPS

SEQ ID NO: 2494 - protein, 25 aa, Artificial Sequence
  Cyclic GFR-binding peptide
MNQYNKLIVNSSDDLYLVSIASLQT

SEQ ID NO: 2495 - protein, 39 aa, Artificial Sequence
  Cyclic GFR-binding peptide
  MOD_RES (2)..(4): Xaa is C or S
EXKXALHDELTRYKKLFIPKKRVIEFYLVSIANLQVQTP

SEQ ID NO: 2496 - protein, 24 aa, Artificial Sequence
  Cyclic GFR-binding peptide
IMYHYKLIKPTKGIKYLISIPSLD

SEQ ID NO: 2497 - protein, 30 aa, Artificial Sequence
  Cyclic GFR-binding peptide
  MOD_RES (2)..(4): Xaa is C or S
SXKXSKVIMRYKKLIKPTKGIFYLISIANL

SEQ ID NO: 2498 - protein, 38 aa, Artificial Sequence
  Cyclic GFR-binding peptide
  MOD_RES (1)..(3)..(35)..(36): Xaa is C or S
XGXAKVVMNRYKKLIVNNSSDFYLVSIANLKTPAXXAK

SEQ ID NO: 2499 - protein, 29 aa, Artificial Sequence
  Cyclic GFR-binding peptide
  MOD_RES (28)..(29): Xaa is C or S
IMYHYKLIKPTKGIKYLISIPSLDQSVXX

SEQ ID NO: 2500 - protein, 34 aa, Artificial Sequence
  Cyclic GFR-binding peptide
  MOD_RES (2)..(33)..(34): Xaa is C or S
KXSRVIMQYNKLVKPKRGVLYLISIASLAQPVXX

SEQ ID NO: 2501 - protein, 30 aa, Artificial Sequence
  Cyclic GFR-binding peptide
  MOD_RES (28)..(29): Xaa is C or S
VMRYKKLVKPTRGVFYLISIANLDQPVXXP

SEQ ID NO: 2502 - protein, 31 aa, Artificial Sequence
  Cyclic GFR-binding peptide
  MOD_RES (29)..(29): Xaa is C or S
VMNRYKKLIVNSSDDFYLVSIANLKTPAXTP

SEQ ID NO: 2503 - protein, 26 aa, Artificial Sequence
  Cyclic GFR-binding peptide
GEVVMDYHYKLVVKENEDKYLMSIPS

SEQ ID NO: 2504 - protein, 27 aa, Artificial Sequence
  Cyclic GFR-binding peptide
MNRHKRLIVNSSDDYYLVSTASLQTPA

SEQ ID NO: 2505 - protein, 22 aa, Artificial Sequence
  Cyclic GFR-binding peptide
QYNKLVVKENEDLYLMSIASLE

SEQ ID NO: 2506 - protein, 26 aa, Artificial Sequence
  Cyclic GFR-binding peptide
AVSMGEQYNKLTPVGMDDLYLVSIAS

SEQ ID NO: 2507 - protein, 26 aa, Artificial Sequence
  Cyclic GFR-binding peptide
  MOD_RES (1)..(1): Xaa is C or S
XSKVIMRYKKLIKPTKGIFYLISIAN

SEQ ID NO: 2508 - protein, 28 aa, Artificial Sequence
  Cyclic GFR-binding peptide
AKVVMNRYKKLIVNNSSDFYLVSIANLK

SEQ ID NO: 2509 - protein, 29 aa, Artificial Sequence
  Cyclic GFR-binding peptide
  MOD_RES (1)..(1): Xaa is C or S
XEAVSMGEQYNKLTPVGMDDLYLVSIASL

SEQ ID NO: 2510 - protein, 30 aa, Artificial Sequence
  Cyclic GFR-binding peptide
  MOD_RES (1)..(3): Xaa is C or S
XKXSKVIMYHYKLIKPTKGIKYLISIPSLD

SEQ ID NO: 2511 - protein, 24 aa, Artificial Sequence
  Cyclic GFR-binding peptide
RYKKLIVNNSSDFYLVSIANLKTP

SEQ ID NO: 2512 - protein, 31 aa, Artificial Sequence
  Cyclic GFR-binding peptide
  MOD_RES (30)..(31): Xaa is C or S
VVMNRYKKLIVNSSDDFYLVSIANLQTPAXX

SEQ ID NO: 2513 - protein, 25 aa, Artificial Sequence
  Cyclic GFR-binding peptide
RYKKLIVNSSDDFYLVSIANLQTPA

SEQ ID NO: 2514 - protein, 29 aa, Artificial Sequence
  Cyclic GFR-binding peptide
  MOD_RES (26)..(26): Xaa is C or S
YHYKLIVNSSDDKYLVSIPSLKTPAXTPK

SEQ ID NO: 2515 - protein, 30 aa, Artificial Sequence
  Cyclic GFR-binding peptide
LTYHYKLFIPKKRVIEKYLVSIPSLQVQTP

SEQ ID NO: 2516 - protein, 24 aa, Artificial Sequence
  Cyclic GFR-binding peptide
KVIMRHKRLIKPTKGIYYLISTAS

SEQ ID NO: 2517 - protein, 30 aa, Artificial Sequence
  Cyclic GFR-binding peptide
  MOD_RES (2)..(2): Xaa is C or S
KXSKVIMYHYKLIKPTKGIKYLISIPSLDQ

SEQ ID NO: 2518 - protein, 26 aa, Artificial Sequence
  Cyclic GFR-binding peptide
  MOD_RES (26)..(26): Xaa is C or S
QYNKLVKPTRGVLYLISIASLDQPVX

SEQ ID NO: 2519 - protein, 29 aa, Artificial Sequence
  Cyclic GFR-binding peptide
SRVVMNQYNKLIVNSSDDLYLVSIASLKT

SEQ ID NO: 2520 - protein, 34 aa, Artificial Sequence
  Cyclic GFR-binding peptide
  MOD_RES (32)..(33): Xaa is C or S
SRVVMNQYNKLIVNSSDDLYLVSIASLKTPAXXP

SEQ ID NO: 2521 - protein, 37 aa, Artificial Sequence
  Cyclic GFR-binding peptide
  MOD_RES (2)..(4)..(37): Xaa is C or S
RXGXEAVSMGERYKKLTPVGMDDFYLVSIANLKTPVX

SEQ ID NO: 2522 - protein, 33 aa, Artificial Sequence
  Cyclic GFR-binding peptide
  MOD_RES (2)..(2): Xaa is C or S
GXAKVVMNYHYKLIVNNSSDKYLVSIPSLKTPA

SEQ ID NO: 2523 - protein, 39 aa, Artificial Sequence
  Cyclic GFR-binding peptide
  MOD_RES (1)..(33)..(34): Xaa is C or S
XGEVVMERHKRLVVKDYEDYYLMSTASLETPVXXAKPIS

SEQ ID NO: 2524 - protein, 33 aa, Artificial Sequence
  Cyclic GFR-binding peptide
  MOD_RES (30)..(31): Xaa is C or S
VVMDYHYKLVVKENEDKYLMSIPSLETPVXXAK

SEQ ID NO: 2525 - protein, 27 aa, Artificial Sequence
  Cyclic GFR-binding peptide
RVVMNQYNKLIVNSSDDLYLVSIASLK

SEQ ID NO: 2526 - protein, 33 aa, Artificial Sequence
  Cyclic GFR-binding peptide
  MOD_RES (27)..(28): Xaa is C or S
NRYKKLIVNSSDDFYLVSIANLKTPAXXPKPVY

SEQ ID NO: 2527 - protein, 41 aa, Artificial Sequence
  Cyclic GFR-binding peptide
  MOD_RES (1)..(3)..(36)..(37): Xaa is C or S
XGXEAVSMGEQYNKLTPVGMDDLYLVSIASLKTPVXXAKGV

SEQ ID NO: 2528 - protein, 31 aa, Artificial Sequence
  Cyclic GFR-binding peptide
  MOD_RES (1)..(3): Xaa is C or S
XGXEAVSMGERHKRLTPVGMDDYYLVSTASL

SEQ ID NO: 2529 - protein, 39 aa, Artificial Sequence
  Cyclic GFR-binding peptide
  MOD_RES (2)..(33)..(34): Xaa is C or S
KXSRVIMRYKKLVKPKRGVFYLISIANLAQPVXXPAASA

SEQ ID NO: 2530 - protein, 23 aa, Artificial Sequence
  Cyclic GFR-binding peptide
VVMYHYKLVKPTRGVKYLISIPS

SEQ ID NO: 2531 - protein, 35 aa, Artificial Sequence
  Cyclic GFR-binding peptide
  MOD_RES (32)..(33): Xaa is C or S
ARVVMNYHYKLIVNSSDDKYLVSIPSLQTPAXXPK

SEQ ID NO: 2532 - protein, 28 aa, Artificial Sequence
  Cyclic GFR-binding peptide
SMGERHKRLTPVGMDDYYLVSTASLKTP

SEQ ID NO: 2533 - protein, 21 aa, Artificial Sequence
  Cyclic GFR-binding peptide
RYKKLIVNSSDDFYLVSIANL

SEQ ID NO: 2534 - protein, 23 aa, Artificial Sequence
  Cyclic GFR-binding peptide
EQYNKLTPVGMDDLYLVSIASLK

SEQ ID NO: 2535 - protein, 39 aa, Artificial Sequence
  Cyclic GFR-binding peptide
  MOD_RES (2)..(4)..(36)..(37): Xaa is C or S
RXGXGEVVMERHKRLVVKDYEDYYLMSTASLETPVXXAK

SEQ ID NO: 2536 - protein, 24 aa, Artificial Sequence
  Cyclic GFR-binding peptide
QYNKLVKPKRGVLYLISIASLAQP

SEQ ID NO: 2537 - protein, 33 aa, Artificial Sequence
  Cyclic GFR-binding peptide
  MOD_RES (1)..(33): Xaa is C or S
XGEVVMDYHYKLVVKENEDKYLMSIPSLETPVX

SEQ ID NO: 2538 - protein, 35 aa, Artificial Sequence
  Cyclic GFR-binding peptide
  MOD_RES (2)..(4): Xaa is C or S
RXGXGEVVMERYKKLVVKDYEDFYLMSIANLETPV

SEQ ID NO: 2539 - protein, 36 aa, Artificial Sequence
  Cyclic GFR-binding peptide
  MOD_RES (31)..(32): Xaa is C or S
SKVIMRYKKLIKPTKGIFYLISIANLDQSVXXPSAS

SEQ ID NO: 2540 - protein, 28 aa, Artificial Sequence
  Cyclic GFR-binding peptide
ELTRYKKLFIPKKRVIEFYLVSIANLQV

SEQ ID NO: 2541 - protein, 28 aa, Artificial Sequence
  Cyclic GFR-binding peptide
  MOD_RES (27)..(28): Xaa is C or S
MQYNKLVKPKRGVLYLISIASLAQPVXX

SEQ ID NO: 2542 - protein, 26 aa, Artificial Sequence
  Cyclic GFR-binding peptide
MRHKRLIKPTKGIYYLISTASLDQSV

SEQ ID NO: 2543 - protein, 31 aa, Artificial Sequence
  Cyclic GFR-binding peptide
  MOD_RES (28)..(28): Xaa is C or S
MNRHKRLIVNSSDDYYLVSTASLKTPAXTPK

SEQ ID NO: 2544 - protein, 34 aa, Artificial Sequence
  Cyclic GFR-binding peptide
  MOD_RES (2)..(4): Xaa is C or S
HXGXAKVVMNRHKRLIVNNSSDYYLVSTASLKTP

SEQ ID NO: 2545 - protein, 33 aa, Artificial Sequence
  Cyclic GFR-binding peptide
  MOD_RES (31)..(32): Xaa is C or S
VSMGERHKRLTPVGMDDYYLVSTASLKTPVXXA

SEQ ID NO: 2546 - protein, 32 aa, Artificial Sequence
  Cyclic GFR-binding peptide
  MOD_RES (27)..(28): Xaa is C or S
MRYKKLVKPTRGVFYLISIANLDQPVXXPSAS

SEQ ID NO: 2547 - protein, 33 aa, Artificial Sequence
  Cyclic GFR-binding peptide
  MOD_RES (2)..(2): Xaa is C or S
KXALHDELTRYKKLFIPKKRVIEFYLVSIANLQ

SEQ ID NO: 2548 - protein, 32 aa, Artificial Sequence
  Cyclic GFR-binding peptide
  MOD_RES (2)..(4): Xaa is C or S
HXGXSRVVMNYHYKLIVNSSDDKYLVSIPSLK

SEQ ID NO: 2549 - protein, 27 aa, Artificial Sequence
  Cyclic GFR-binding peptide
EVVMERHKRLVVKDYEDYYLMSTASLE

SEQ ID NO: 2550 - protein, 26 aa, Artificial Sequence
  Cyclic GFR-binding peptide
DELTRYKKLFIPKKRVIEFYLVSIAN

SEQ ID NO: 2551 - protein, 35 aa, Artificial Sequence
  Cyclic GFR-binding peptide
  MOD_RES (1)..(33): Xaa is C or S
XSRVVMNRHKRLIVNSSDDYYLVSTASLKTPAXTP

SEQ ID NO: 2552 - protein, 25 aa, Artificial Sequence
  Cyclic GFR-binding peptide
LTQYNKLFIPKKRVIELYLVSIASL

SEQ ID NO: 2553 - protein, 35 aa, Artificial Sequence
  Cyclic GFR-binding peptide
  MOD_RES (2)..(34)..(35): Xaa is C or S
GXSRVVMNRHKRLIVNSSDDYYLVSTASLKTPAXX

SEQ ID NO: 2554 - protein, 30 aa, Artificial Sequence
  Cyclic GFR-binding peptide
SKVIMRYKKLIKPTKGIFYLISIANLDQSV

SEQ ID NO: 2555 - protein, 29 aa, Artificial Sequence
  Cyclic GFR-binding peptide
SKVIMRHKRLIKPTKGIYYLISTASLDQS

SEQ ID NO: 2556 - protein, 25 aa, Artificial Sequence
  Cyclic GFR-binding peptide
YHYKLVKPTRGVKYLISIPSLDQPV

SEQ ID NO: 2557 - protein, 21 aa, Artificial Sequence
  Cyclic GFR-binding peptide
QYNKLIVNNSSDLYLVSIASL

SEQ ID NO: 2558 - protein, 38 aa, Artificial Sequence
  Cyclic GFR-binding peptide
  MOD_RES (2)..(4)..(35)..(36): Xaa is C or S
SXKXSKVIMRYKKLIKPTKGIFYLISIANLDQSVXXPS

SEQ ID NO: 2559 - protein, 20 aa, Artificial Sequence
  Cyclic GFR-binding peptide
QYNKLIVNSSDDLYLVSIAS

SEQ ID NO: 2560 - protein, 29 aa, Artificial Sequence
  Cyclic GFR-binding peptide
  MOD_RES (26)..(27): Xaa is C or S
QYNKLIVNNSSDLYLVSIASLKTPAXXAK

SEQ ID NO: 2561 - protein, 32 aa, Artificial Sequence
  Cyclic GFR-binding peptide
  MOD_RES (1)..(1): Xaa is C or S
XSRVVMNRHKRLIVNSSDDYYLVSTASLKTPA

SEQ ID NO: 2562 - protein, 44 aa, Artificial Sequence
  Cyclic GFR-binding peptide
  MOD_RES (1)..(3)..(40): Xaa is C or S
XKXALHDELTRHKRLFIPKKRVIEYYLVSTASLQVQTPRXQVNR

SEQ ID NO: 2563 - protein, 30 aa, Artificial Sequence
  Cyclic GFR-binding peptide
  MOD_RES (2)..(4): Xaa is C or S
RXGXGEVVMERYKKLVVKDYEDFYLMSIAN

SEQ ID NO: 2564 - protein, 38 aa, Artificial Sequence
  Cyclic GFR-binding peptide
  MOD_RES (32)..(33): Xaa is C or S
ARVVMNRHKRLIVNSSDDYYLVSTASLQTPAXXPKPVT

SEQ ID NO: 2565 - protein, 35 aa, Artificial Sequence
  Cyclic GFR-binding peptide
  MOD_RES (31)..(31): Xaa is C or S
TYHYKLFIPKKRVIEKYLVSIPSLQVQTPRXQVNR

SEQ ID NO: 2566 - protein, 35 aa, Artificial Sequence
  Cyclic GFR-binding peptide
  MOD_RES (30)..(31): Xaa is C or S
VVMNYHYKLIVNNSSDKYLVSIPSLKTPAXXAKPV

SEQ ID NO: 2567 - protein, 28 aa, Artificial Sequence
  Cyclic GFR-binding peptide
AVSMGERHKRLTPVGMDDYYLVSTASLK

SEQ ID NO: 2568 - protein, 33 aa, Artificial Sequence
  Cyclic GFR-binding peptide
  MOD_RES (28)..(28): Xaa is C or S
MNRHKRLIVNSSDDYYLVSTASLKTPAXTPKTV

SEQ ID NO: 2569 - protein, 34 aa, Artificial Sequence
  Cyclic GFR-binding peptide
  MOD_RES (1)..(33)..(34): Xaa is C or S
XARVVMNYHYKLIVNSSDDKYLVSIPSLQTPAXX

SEQ ID NO: 2570 - protein, 39 aa, Artificial Sequence
  Cyclic GFR-binding peptide
  MOD_RES (2)..(4)..(36)..(37): Xaa is C or S
HXGXARVVMNRHKRLIVNSSDDYYLVSTASLQTPAXXPK

SEQ ID NO: 2571 - protein, 39 aa, Artificial Sequence
  Cyclic GFR-binding peptide
  MOD_RES (2)..(34)..(35): Xaa is C or S
GXAKVVMNQYNKLIVNNSSDLYLVSIASLKTPAXXAKPV

SEQ ID NO: 2572 - protein, 40 aa, Artificial Sequence
  Cyclic GFR-binding peptide
  MOD_RES (1)..(3)..(34)..(35): Xaa is C or S
XKXSKVIMYHYKLIKPTKGIKYLISIPSLDQSVXXPSASA

SEQ ID NO: 2573 - protein, 41 aa, Artificial Sequence
  Cyclic GFR-binding peptide
  MOD_RES (1)..(3)..(36)..(37): Xaa is C or S
XGXEAVSMGERYKKLTPVGMDDFYLVSIANLKTPVXXAKGV

SEQ ID NO: 2574 - protein, 33 aa, Artificial Sequence
  Cyclic GFR-binding peptide
  MOD_RES (30)..(30): Xaa is C or S
VVMNRYKKLIVNSSDDFYLVSIANLKTPAXTPK

SEQ ID NO: 2575 - protein, 30 aa, Artificial Sequence
  Cyclic GFR-binding peptide
  MOD_RES (28)..(29): Xaa is C or S
MNRYKKLIVNSSDDFYLVSIANLQTPAXXP

SEQ ID NO: 2576 - protein, 25 aa, Artificial Sequence
  Cyclic GFR-binding peptide
QYNKLIVNSSDDLYLVSIASLQTPA

SEQ ID NO: 2577 - protein, 23 aa, Artificial Sequence
  Cyclic GFR-binding peptide
EQYNKLVVKDYEDLYLMSIASLE

SEQ ID NO: 2578 - protein, 32 aa, Artificial Sequence
  Cyclic GFR-binding peptide
  MOD_RES (2)..(2): Xaa is C or S
GXEAVSMGERHKRLTPVGMDDYYLVSTASLKT

SEQ ID NO: 2579 - protein, 34 aa, Artificial Sequence
  Cyclic GFR-binding peptide
  MOD_RES (2)..(4): Xaa is C or S
RXGXGEVVMERYKKLVVKDYEDFYLMSIANLETP

SEQ ID NO: 2580 - protein, 31 aa, Artificial Sequence
  Cyclic GFR-binding peptide
  MOD_RES (28)..(29): Xaa is C or S
VMRHKRLVKPTRGVYYLISTASLDQPVXXPS

SEQ ID NO: 2581 - protein, 38 aa, Artificial Sequence
  Cyclic GFR-binding peptide
  MOD_RES (2)..(4)..(36): Xaa is C or S
HXGXSRVVMNQYNKLIVNSSDDLYLVSIASLKTPAXTP

SEQ ID NO: 2582 - protein, 36 aa, Artificial Sequence
  Cyclic GFR-binding peptide
  MOD_RES (1)..(3)..(35)..(36): Xaa is C or S
XGXAKVVMNYHYKLIVNNSSDKYLVSIPSLKTPAXX

SEQ ID NO: 2583 - protein, 35 aa, Artificial Sequence
  Cyclic GFR-binding peptide
  MOD_RES (30)..(31): Xaa is C or S
VVMNYHYKLIVNSSDDKYLVSIPSLKTPAXXPKPV

SEQ ID NO: 2584 - protein, 26 aa, Artificial Sequence
  Cyclic GFR-binding peptide
GERHKRLTPVGMDDYYLVSTASLKTP

SEQ ID NO: 2585 - protein, 32 aa, Artificial Sequence
  Cyclic GFR-binding peptide
  MOD_RES (31)..(32): Xaa is C or S
EVVMEQYNKLVVKDYEDLYLMSIASLETPVXX

SEQ ID NO: 2586 - protein, 34 aa, Artificial Sequence
  Cyclic GFR-binding peptide
LHDELTYHYKLFIPKKRVIEKYLVSIPSLQVQTP

SEQ ID NO: 2587 - protein, 38 aa, Artificial Sequence
  Cyclic GFR-binding peptide
  MOD_RES (1)..(3)..(36)..(37): Xaa is C or S
XGXEAVSMGERHKRLTPVGMDDYYLVSTASLKTPVXXA

SEQ ID NO: 2588 - protein, 33 aa, Artificial Sequence
  Cyclic GFR-binding peptide
  MOD_RES (1)..(3): Xaa is C or S
XGXEAVSMGEQYNKLTPVGMDDLYLVSIASLKT

SEQ ID NO: 2589 - protein, 28 aa, Artificial Sequence
  Cyclic GFR-binding peptide
SRVIMQYNKLVKPKRGVLYLISIASLAQ

SEQ ID NO: 2590 - protein, 25 aa, Artificial Sequence
  Cyclic GFR-binding peptide
VMRHKRLVKPTRGVYYLISTASLDQ

SEQ ID NO: 2591 - protein, 30 aa, Artificial Sequence
  Cyclic GFR-binding peptide
AKVVMNQYNKLIVNNSSDLYLVSIASLKTP

SEQ ID NO: 2592 - protein, 38 aa, Artificial Sequence
  Cyclic GFR-binding peptide
  MOD_RES (1)..(34)..(35): Xaa is C or S
XEAVSMGERYKKLTPVGMDDFYLVSIANLKTPVXXAKG

SEQ ID NO: 2593 - protein, 28 aa, Artificial Sequence
  Cyclic GFR-binding peptide
RVVMNRHKRLIVNSSDDYYLVSTASLQT

SEQ ID NO: 2594 - protein, 41 aa, Artificial Sequence
  Cyclic GFR-binding peptide
  MOD_RES (1)..(3)..(35)..(36): Xaa is C or S
XGXSRVVMNRYKKLIVNSSDDFYLVSIANLKTPAXXPKPVY

SEQ ID NO: 2595 - protein, 31 aa, Artificial Sequence
  Cyclic GFR-binding peptide
  MOD_RES (2)..(4): Xaa is C or S
HXGXSRVVMNYHYKLIVNSSDDKYLVSIPSL

SEQ ID NO: 2596 - protein, 29 aa, Artificial Sequence
  Cyclic GFR-binding peptide
  MOD_RES (1)..(1): Xaa is C or S
XSKVIMQYNKLIKPTKGILYLISIASLDQ

SEQ ID NO: 2597 - protein, 39 aa, Artificial Sequence
  Cyclic GFR-binding peptide
  MOD_RES (1)..(3)..(34)..(35): Xaa is C or S
XKXSRVIMRYKKLVKPKRGVFYLISIANLAQPVXXPAAS

SEQ ID NO: 2598 - protein, 36 aa, Artificial Sequence
  Cyclic GFR-binding peptide
  MOD_RES (31)..(32): Xaa is C or S
RVVMNYHYKLIVNSSDDKYLVSIPSLKTPAXXPKPV

SEQ ID NO: 2599 - protein, 30 aa, Artificial Sequence
  Cyclic GFR-binding peptide
  MOD_RES (2)..(2): Xaa is C or S
KXSKVIMRYKKLIKPTKGIFYLISIANLDQ

SEQ ID NO: 2600 - protein, 31 aa, Artificial Sequence
  Cyclic GFR-binding peptide
SRVVMNRYKKLIVNSSDDFYLVSIANLKTPA

SEQ ID NO: 2601 - protein, 35 aa, Artificial Sequence
  Cyclic GFR-binding peptide
  MOD_RES (31)..(32): Xaa is C or S
EVVMDRHKRLVVKENEDYYLMSTASLETPVXXAKP

SEQ ID NO: 2602 - protein, 30 aa, Artificial Sequence
  Cyclic GFR-binding peptide
  MOD_RES (27)..(27): Xaa is C or S
NRYKKLIVNSSDDFYLVSIANLKTPAXTPK

SEQ ID NO: 2603 - protein, 25 aa, Artificial Sequence
  Cyclic GFR-binding peptide
KVVMYHYKLVKPTRGVKYLISIPSL

SEQ ID NO: 2604 - protein, 34 aa, Artificial Sequence
  Cyclic GFR-binding peptide
ALHDELTQYNKLFIPKKRVIELYLVSIASLQVQT

SEQ ID NO: 2605 - protein, 30 aa, Artificial Sequence
  Cyclic GFR-binding peptide
  MOD_RES (2)..(2): Xaa is C or S
GXSRVVMNYHYKLIVNSSDDKYLVSIPSLK

SEQ ID NO: 2606 - protein, 34 aa, Artificial Sequence
  Cyclic GFR-binding peptide
  MOD_RES (31)..(32): Xaa is C or S
SKVVMRYKKLVKPTRGVFYLISIANLDQPVXXPS

SEQ ID NO: 2607 - protein, 32 aa, Artificial Sequence
  Cyclic GFR-binding peptide
  MOD_RES (26)..(27): Xaa is C or S
YHYKLIKPTKGIKYLISIPSLDQSVXXPSASA

SEQ ID NO: 2608 - protein, 35 aa, Artificial Sequence
  Cyclic GFR-binding peptide
  MOD_RES (30)..(31): Xaa is C or S
KVVMRYKKLVKPTRGVFYLISIANLDQPVXXPSAS

SEQ ID NO: 2609 - protein, 34 aa, Artificial Sequence
  Cyclic GFR-binding peptide
  MOD_RES (30)..(31): Xaa is C or S
RVIMRYKKLVKPKRGVFYLISIANLAQPVXXPAA

SEQ ID NO: 2610 - protein, 34 aa, Artificial Sequence
  Cyclic GFR-binding peptide
ALHDELTRHKRLFIPKKRVIEYYLVSTASLQVQT

SEQ ID NO: 2611 - protein, 42 aa, Artificial Sequence
  Cyclic GFR-binding peptide
  MOD_RES (2)..(4)..(36)..(37): Xaa is C or S
RXGXGEVVMEYHYKLVVKDYEDKYLMSIPSLETPVXXAKPIS

SEQ ID NO: 2612 - protein, 28 aa, Artificial Sequence
  Cyclic GFR-binding peptide
  MOD_RES (27)..(28): Xaa is C or S
NYHYKLIVNSSDDKYLVSIPSLKTPAXX

SEQ ID NO: 2613 - protein, 29 aa, Artificial Sequence
  Cyclic GFR-binding peptide
  MOD_RES (1)..(3): Xaa is C or S
XKXSKVIMRYKKLIKPTKGIFYLISIANL

SEQ ID NO: 2614 - protein, 33 aa, Artificial Sequence
  Cyclic GFR-binding peptide
  MOD_RES (32)..(32): Xaa is C or S
LTYHYKLFIPKKRVIEKYLVSIPSLQVQTPRXQ

SEQ ID NO: 2615 - protein, 31 aa, Artificial Sequence
  Cyclic GFR-binding peptide
  MOD_RES (27)..(28): Xaa is C or S
NQYNKLIVNSSDDLYLVSIASLQTPAXXPKP

SEQ ID NO: 2616 - protein, 39 aa, Artificial Sequence
  Cyclic GFR-binding peptide
  MOD_RES (2)..(4)..(36)..(37): Xaa is C or S
RXGXGEVVMDYHYKLVVKENEDKYLMSIPSLETPVXXAK

SEQ ID NO: 2617 - protein, 33 aa, Artificial Sequence
  Cyclic GFR-binding peptide
  MOD_RES (28)..(29): Xaa is C or S
IMRYKKLVKPKRGVFYLISIANLAQPVXXPAAS

SEQ ID NO: 2618 - protein, 27 aa, Artificial Sequence
  Cyclic GFR-binding peptide
  MOD_RES (27)..(27): Xaa is C or S
EQYNKLTPVGMDDLYLVSIASLKTPVX

SEQ ID NO: 2619 - protein, 29 aa, Artificial Sequence
  Cyclic GFR-binding peptide
  MOD_RES (27)..(28): Xaa is C or S
MRYKKLIKPTKGIFYLISIANLDQSVXXP

SEQ ID NO: 2620 - protein, 35 aa, Artificial Sequence
  Cyclic GFR-binding peptide
  MOD_RES (2)..(35): Xaa is C or S
GXEAVSMGERYKKLTPVGMDDFYLVSIANLKTPVX

SEQ ID NO: 2621 - protein, 32 aa, Artificial Sequence
  Cyclic GFR-binding peptide
LHDELTQYNKLFIPKKRVIELYLVSIASLQVQ

SEQ ID NO: 2622 - protein, 43 aa, Artificial Sequence
  Cyclic GFR-binding peptide
  MOD_RES (2)..(4)..(37)..(38): Xaa is C or S
RXGXEAVSMGEYHYKLTPVGMDDKYLVSIPSLKTPVXXAKGVK

SEQ ID NO: 2623 - protein, 33 aa, Artificial Sequence
  Cyclic GFR-binding peptide
  MOD_RES (27)..(28): Xaa is C or S
MRHKRLVKPTRGVYYLISTASLDQPVXXPSASA

SEQ ID NO: 2624 - protein, 43 aa, Artificial Sequence
  Cyclic GFR-binding peptide
  MOD_RES (2)..(39): Xaa is C or S
KXALHDELTRHKRLFIPKKRVIEYYLVSTASLQVQTPRXQVNR

SEQ ID NO: 2625 - protein, 31 aa, Artificial Sequence
  Cyclic GFR-binding peptide
  MOD_RES (2)..(2): Xaa is C or S
GXGEVVMDRYKKLVVKENEDFYLMSIANLET

SEQ ID NO: 2626 - protein, 29 aa, Artificial Sequence
  Cyclic GFR-binding peptide
  MOD_RES (28)..(28): Xaa is C or S
MNRHKRLIVNSSDDYYLVSTASLKTPAXT

SEQ ID NO: 2627 - protein, 33 aa, Artificial Sequence
  Cyclic GFR-binding peptide
  MOD_RES (2)..(2): Xaa is C or S
GXEAVSMGERYKKLTPVGMDDFYLVSIANLKTP

SEQ ID NO: 2628 - protein, 33 aa, Artificial Sequence
  Cyclic GFR-binding peptide
  MOD_RES (1)..(33): Xaa is C or S
XGEVVMDRYKKLVVKENEDFYLMSIANLETPVX

SEQ ID NO: 2629 - protein, 34 aa, Artificial Sequence
  Cyclic GFR-binding peptide
  MOD_RES (29)..(30): Xaa is C or S
VMNYHYKLIVNNSSDKYLVSIPSLKTPAXXAKPV

SEQ ID NO: 2630 - protein, 31 aa, Artificial Sequence
  Cyclic GFR-binding peptide
  MOD_RES (2)..(2): Xaa is C or S
GXEAVSMGERYKKLTPVGMDDFYLVSIANLK

SEQ ID NO: 2631 - protein, 32 aa, Artificial Sequence
  Cyclic GFR-binding peptide
  MOD_RES (27)..(27): Xaa is C or S
NQYNKLIVNSSDDLYLVSIASLKTPAXTPKTV

SEQ ID NO: 2632 - protein, 32 aa, Artificial Sequence
  Cyclic GFR-binding peptide
  MOD_RES (27)..(28): Xaa is C or S
ERYKKLVVKDYEDFYLMSIANLETPVXXAKPI

SEQ ID NO: 2633 - protein, 31 aa, Artificial Sequence
  Cyclic GFR-binding peptide
ELTRHKRLFIPKKRVIEYYLVSTASLQVQTP

SEQ ID NO: 2634 - protein, 34 aa, Artificial Sequence
  Cyclic GFR-binding peptide
  MOD_RES (1)..(33)..(34): Xaa is C or S
XGEVVMDRYKKLVVKENEDFYLMSIANLETPVXX

SEQ ID NO: 2635 - protein, 39 aa, Artificial Sequence
  Cyclic GFR-binding peptide
  MOD_RES (33)..(34): Xaa is C or S
EAVSMGERYKKLTPVGMDDFYLVSIANLKTPVXXAKGVK

SEQ ID NO: 2636 - protein, 31 aa, Artificial Sequence
  Cyclic GFR-binding peptide
  MOD_RES (29)..(30): Xaa is C or S
VMNQYNKLIVNSSDDLYLVSIASLKTPAXXP

SEQ ID NO: 2637 - protein, 24 aa, Artificial Sequence
  Cyclic GFR-binding peptide
RYKKLVKPKRGVFYLISIANLAQP

SEQ ID NO: 2638 - protein, 35 aa, Artificial Sequence
  Cyclic GFR-binding peptide
  MOD_RES (2)..(34)..(35): Xaa is C or S
GXARVVMNRHKRLIVNSSDDYYLVSTASLQTPAXX

SEQ ID NO: 2639 - protein, 25 aa, Artificial Sequence
  Cyclic GFR-binding peptide
IMQYNKLVKPKRGVLYLISIASLAQ

SEQ ID NO: 2640 - protein, 29 aa, Artificial Sequence
  Cyclic GFR-binding peptide
  MOD_RES (29)..(29): Xaa is C or S
VIMRHKRLVKPKRGVYYLISTASLAQPVX

SEQ ID NO: 2641 - protein, 27 aa, Artificial Sequence
  Cyclic GFR-binding peptide
SKVVMQYNKLVKPTRGVLYLISIASLD

SEQ ID NO: 2642 - protein, 37 aa, Artificial Sequence
  Cyclic GFR-binding peptide
  MOD_RES (1)..(3)..(34)..(35): Xaa is C or S
XKXSRVIMYHYKLVKPKRGVKYLISIPSLAQPVXXPA

SEQ ID NO: 2643 - protein, 36 aa, Artificial Sequence
  Cyclic GFR-binding peptide
  MOD_RES (30)..(31): Xaa is C or S
KVIMQYNKLIKPTKGILYLISIASLDQSVXXPSASA

SEQ ID NO: 2644 - protein, 28 aa, Artificial Sequence
  Cyclic GFR-binding peptide
  MOD_RES (28)..(28): Xaa is C or S
IMYHYKLIKPTKGIKYLISIPSLDQSVX

SEQ ID NO: 2645 - protein, 34 aa, Artificial Sequence
  Cyclic GFR-binding peptide
  MOD_RES (1)..(33)..(34): Xaa is C or S
XGEVVMDYHYKLVVKENEDKYLMSIPSLETPVXX

SEQ ID NO: 2646 - protein, 27 aa, Artificial Sequence
  Cyclic GFR-binding peptide
  MOD_RES (27)..(27): Xaa is C or S
NQYNKLIVNSSDDLYLVSIASLKTPAX

SEQ ID NO: 2647 - protein, 36 aa, Artificial Sequence
  Cyclic GFR-binding peptide
  MOD_RES (2)..(4)..(35)..(36): Xaa is C or S
SXKXSKVIMRYKKLIKPTKGIFYLISIANLDQSVXX

SEQ ID NO: 2648 - protein, 28 aa, Artificial Sequence
  Cyclic GFR-binding peptide
  MOD_RES (1)..(1): Xaa is C or S
XSRVVMNRYKKLIVNSSDDFYLVSIANL

SEQ ID NO: 2649 - protein, 24 aa, Artificial Sequence
  Cyclic GFR-binding peptide
NQYNKLIVNNSSDLYLVSIASLKT

SEQ ID NO: 2650 - protein, 26 aa, Artificial Sequence
  Cyclic GFR-binding peptide
  MOD_RES (26)..(26): Xaa is C or S
RYKKLVKPTRGVFYLISIANLDQPVX

SEQ ID NO: 2651 - protein, 29 aa, Artificial Sequence
  Cyclic GFR-binding peptide
  MOD_RES (26)..(27): Xaa is C or S
RYKKLVKPKRGVFYLISIANLAQPVXXPA

SEQ ID NO: 2652 - protein, 32 aa, Artificial Sequence
  Cyclic GFR-binding peptide
  MOD_RES (1)..(1): Xaa is C or S
XARVVMNQYNKLIVNSSDDLYLVSIASLQTPA

SEQ ID NO: 2653 - protein, 27 aa, Artificial Sequence
  Cyclic GFR-binding peptide
MDYHYKLVVKENEDKYLMSIPSLETPV

SEQ ID NO: 2654 - protein, 32 aa, Artificial Sequence
  Cyclic GFR-binding peptide
DELTQYNKLFIPKKRVIELYLVSIASLQVQTP

SEQ ID NO: 2655 - protein, 38 aa, Artificial Sequence
  Cyclic GFR-binding peptide
  MOD_RES (1)..(33)..(34): Xaa is C or S
XGEVVMERYKKLVVKDYEDFYLMSIANLETPVXXAKPI

SEQ ID NO: 2656 - protein, 37 aa, Artificial Sequence
  Cyclic GFR-binding peptide
  MOD_RES (31)..(32): Xaa is C or S
RVVMNQYNKLIVNSSDDLYLVSIASLKTPAXXPKPVY

SEQ ID NO: 2657 - protein, 28 aa, Artificial Sequence
  Cyclic GFR-binding peptide
  MOD_RES (27)..(28): Xaa is C or S
ERHKRLVVKDYEDYYLMSTASLETPVXX

SEQ ID NO: 2658 - protein, 32 aa, Artificial Sequence
  Cyclic GFR-binding peptide
  MOD_RES (28)..(29): Xaa is C or S
MNRYKKLIVNSSDDFYLVSIANLQTPAXXPKP

SEQ ID NO: 2659 - protein, 39 aa, Artificial Sequence
  Cyclic GFR-binding peptide
  MOD_RES (1)..(3)..(35): Xaa is C or S
XGXSRVVMNYHYKLIVNSSDDKYLVSIPSLKTPAXTPKT

SEQ ID NO: 2660 - protein, 24 aa, Artificial Sequence
  Cyclic GFR-binding peptide
QYNKLVKPTRGVLYLISIASLDQP

SEQ ID NO: 2661 - protein, 29 aa, Artificial Sequence
  Cyclic GFR-binding peptide
SKVVMYHYKLVKPTRGVKYLISIPSLDQP

SEQ ID NO: 2662 - protein, 24 aa, Artificial Sequence
  Cyclic GFR-binding peptide
RYKKLFIPKKRVIEFYLVSIANLQ

SEQ ID NO: 2663 - protein, 31 aa, Artificial Sequence
  Cyclic GFR-binding peptide
  MOD_RES (30)..(31): Xaa is C or S
VVMEYHYKLVVKDYEDKYLMSIPSLETPVXX

SEQ ID NO: 2664 - protein, 25 aa, Artificial Sequence
  Cyclic GFR-binding peptide
DRHKRLVVKENEDYYLMSTASLETP

SEQ ID NO: 2665 - protein, 31 aa, Artificial Sequence
  Cyclic GFR-binding peptide
GEVVMDQYNKLVVKENEDLYLMSIASLETPV

SEQ ID NO: 2666 - protein, 37 aa, Artificial Sequence
  Cyclic GFR-binding peptide
  MOD_RES (2)..(34)..(35): Xaa is C or S
GXGEVVMEQYNKLVVKDYEDLYLMSIASLETPVXXAK

SEQ ID NO: 2667 - protein, 32 aa, Artificial Sequence
  Cyclic GFR-binding peptide
  MOD_RES (26)..(27): Xaa is C or S
QYNKLVVKDYEDLYLMSIASLETPVXXAKPIS

SEQ ID NO: 2668 - protein, 30 aa, Artificial Sequence
  Cyclic GFR-binding peptide
TYHYKLFIPKKRVIEKYLVSIPSLQVQTPR

SEQ ID NO: 2669 - protein, 31 aa, Artificial Sequence
  Cyclic GFR-binding peptide
  MOD_RES (26)..(27): Xaa is C or S
RHKRLVKPKRGVYYLISTASLAQPVXXPAAS

SEQ ID NO: 2670 - protein, 32 aa, Artificial Sequence
  Cyclic GFR-binding peptide
LHDELTRYKKLFIPKKRVIEFYLVSIANLQVQ

SEQ ID NO: 2671 - protein, 23 aa, Artificial Sequence
  Cyclic GFR-binding peptide
RHKRLVVKENEDYYLMSTASLET

SEQ ID NO: 2672 - protein, 35 aa, Artificial Sequence
  Cyclic GFR-binding peptide
  MOD_RES (32)..(33): Xaa is C or S
GEVVMDRHKRLVVKENEDYYLMSTASLETPVXXAK

SEQ ID NO: 2673 - protein, 27 aa, Artificial Sequence
  Cyclic GFR-binding peptide
  MOD_RES (26)..(27): Xaa is C or S
QYNKLVKPKRGVLYLISIASLAQPVXX

SEQ ID NO: 2674 - protein, 29 aa, Artificial Sequence
  Cyclic GFR-binding peptide
  MOD_RES (29)..(29): Xaa is C or S
VIMQYNKLIKPTKGILYLISIASLDQSVX

SEQ ID NO: 2675 - protein, 31 aa, Artificial Sequence
  Cyclic GFR-binding peptide
  MOD_RES (30)..(31): Xaa is C or S
SMGERYKKLTPVGMDDFYLVSIANLKTPVXX

SEQ ID NO: 2676 - protein, 40 aa, Artificial Sequence
  Cyclic GFR-binding peptide
  MOD_RES (1)..(3)..(34)..(35): Xaa is C or S
XKXSKVVMRHKRLVKPTRGVYYLISTASLDQPVXXPSASA

SEQ ID NO: 2677 - protein, 28 aa, Artificial Sequence
  Cyclic GFR-binding peptide
  MOD_RES (28)..(28): Xaa is C or S
VMYHYKLVKPTRGVKYLISIPSLDQPVX

SEQ ID NO: 2678 - protein, 36 aa, Artificial Sequence
  Cyclic GFR-binding peptide
  MOD_RES (32)..(33): Xaa is C or S
GEVVMEQYNKLVVKDYEDLYLMSIASLETPVXXAKP

SEQ ID NO: 2679 - protein, 39 aa, Artificial Sequence
  Cyclic GFR-binding peptide
  MOD_RES (1)..(3)..(34)..(35): Xaa is C or S
XKXSKVVMYHYKLVKPTRGVKYLISIPSLDQPVXXPSAS

SEQ ID NO: 2680 - protein, 28 aa, Artificial Sequence
  Cyclic GFR-binding peptide
  MOD_RES (2)..(2): Xaa is C or S
KXSKVVMYHYKLVKPTRGVKYLISIPSL

SEQ ID NO: 2681 - protein, 30 aa, Artificial Sequence
  Cyclic GFR-binding peptide
  MOD_RES (28)..(29): Xaa is C or S
IMYHYKLVKPKRGVKYLISIPSLAQPVXXP

SEQ ID NO: 2682 - protein, 32 aa, Artificial Sequence
  Cyclic GFR-binding peptide
  MOD_RES (27)..(28): Xaa is C or S
NQYNKLIVNSSDDLYLVSIASLKTPAXXPKPV

SEQ ID NO: 2683 - protein, 32 aa, Artificial Sequence
  Cyclic GFR-binding peptide
  MOD_RES (32)..(32): Xaa is C or S
GEVVMERHKRLVVKDYEDYYLMSTASLETPVX

SEQ ID NO: 2684 - protein, 23 aa, Artificial Sequence
  Cyclic GFR-binding peptide
MQYNKLVKPKRGVLYLISIASLA

SEQ ID NO: 2685 - protein, 32 aa, Artificial Sequence
  Cyclic GFR-binding peptide
  MOD_RES (28)..(29): Xaa is C or S
MERYKKLVVKDYEDFYLMSIANLETPVXXAKP

SEQ ID NO: 2686 - protein, 24 aa, Artificial Sequence
  Cyclic GFR-binding peptide
MGERYKKLTPVGMDDFYLVSIANL

SEQ ID NO: 2687 - protein, 36 aa, Artificial Sequence
  Cyclic GFR-binding peptide
  MOD_RES (1)..(3)..(35)..(36): Xaa is C or S
XGXARVVMNQYNKLIVNSSDDLYLVSIASLQTPAXX

SEQ ID NO: 2688 - protein, 29 aa, Artificial Sequence
  Cyclic GFR-binding peptide
  MOD_RES (27)..(28): Xaa is C or S
EQYNKLVVKDYEDLYLMSIASLETPVXXA

SEQ ID NO: 2689 - protein, 28 aa, Artificial Sequence
  Cyclic GFR-binding peptide
  MOD_RES (1)..(1): Xaa is C or S
XSRVVMNYHYKLIVNSSDDKYLVSIPSL

SEQ ID NO: 2690 - protein, 26 aa, Artificial Sequence
  Cyclic GFR-binding peptide
  MOD_RES (1)..(1): Xaa is C or S
XSKVVMRHKRLVKPTRGVYYLISTAS

SEQ ID NO: 2691 - protein, 26 aa, Artificial Sequence
  Cyclic GFR-binding peptide
DRYKKLVVKENEDFYLMSIANLETPV

SEQ ID NO: 2692 - protein, 29 aa, Artificial Sequence
  Cyclic GFR-binding peptide
ARVVMNYHYKLIVNSSDDKYLVSIPSLQT

SEQ ID NO: 2693 - protein, 29 aa, Artificial Sequence
  Cyclic GFR-binding peptide
  MOD_RES (28)..(29): Xaa is C or S
GEQYNKLTPVGMDDLYLVSIASLKTPVXX

SEQ ID NO: 2694 - protein, 36 aa, Artificial Sequence
  Cyclic GFR-binding peptide
  MOD_RES (32)..(32): Xaa is C or S
SRVVMNYHYKLIVNSSDDKYLVSIPSLKTPAXTPKT

SEQ ID NO: 2695 - protein, 41 aa, Artificial Sequence
  Cyclic GFR-binding peptide
  MOD_RES (1)..(3)..(35)..(36): Xaa is C or S
XGXGEVVMDRYKKLVVKENEDFYLMSIANLETPVXXAKPIK

SEQ ID NO: 2696 - protein, 31 aa, Artificial Sequence
  Cyclic GFR-binding peptide
  MOD_RES (30)..(30): Xaa is C or S
VVMNQYNKLIVNSSDDLYLVSIASLKTPAXT

SEQ ID NO: 2697 - protein, 36 aa, Artificial Sequence
  Cyclic GFR-binding peptide
  MOD_RES (30)..(30): Xaa is C or S
VVMNRHKRLIVNSSDDYYLVSTASLKTPAXTPKTVH

SEQ ID NO: 2698 - protein, 29 aa, Artificial Sequence
  Cyclic GFR-binding peptide
  MOD_RES (2)..(2): Xaa is C or S
GXGEVVMERHKRLVVKDYEDYYLMSTASL

SEQ ID NO: 2699 - protein, 31 aa, Artificial Sequence
  Cyclic GFR-binding peptide
  MOD_RES (27)..(28): Xaa is C or S
EYHYKLVVKDYEDKYLMSIPSLETPVXXAKP

SEQ ID NO: 2700 - protein, 35 aa, Artificial Sequence
  Cyclic GFR-binding peptide
  MOD_RES (2)..(34)..(35): Xaa is C or S
GXAKVVMNQYNKLIVNNSSDLYLVSIASLKTPAXX

SEQ ID NO: 2701 - protein, 37 aa, Artificial Sequence
  Cyclic GFR-binding peptide
  MOD_RES (2)..(4)..(36): Xaa is C or S
HXGXSRVVMNRYKKLIVNSSDDFYLVSIANLKTPAXT

SEQ ID NO: 2702 - protein, 24 aa, Artificial Sequence
  Cyclic GFR-binding peptide
VVMNRYKKLIVNNSSDFYLVSIAN

SEQ ID NO: 2703 - protein, 27 aa, Artificial Sequence
  Cyclic GFR-binding peptide
SKVIMYHYKLIKPTKGIKYLISIPSLD

SEQ ID NO: 2704 - protein, 33 aa, Artificial Sequence
  Cyclic GFR-binding peptide
  MOD_RES (29)..(30): Xaa is C or S
VIMYHYKLIKPTKGIKYLISIPSLDQSVXXPSA

SEQ ID NO: 2705 - protein, 40 aa, Artificial Sequence
  Cyclic GFR-binding peptide
  MOD_RES (1)..(3)..(35)..(36): Xaa is C or S
XGXGEVVMERHKRLVVKDYEDYYLMSTASLETPVXXAKPI

SEQ ID NO: 2706 - protein, 27 aa, Artificial Sequence
  Cyclic GFR-binding peptide
AKVVMNQYNKLIVNNSSDLYLVSIASL

SEQ ID NO: 2707 - protein, 41 aa, Artificial Sequence
  Cyclic GFR-binding peptide
  MOD_RES (2)..(4)..(41): Xaa is C or S
EXKXALHDELTQYNKLFIPKKRVIELYLVSIASLQVQTPRX

SEQ ID NO: 2708 - protein, 24 aa, Artificial Sequence
  Cyclic GFR-binding peptide
MDRYKKLVVKENEDFYLMSIANLE

SEQ ID NO: 2709 - protein, 34 aa, Artificial Sequence
  Cyclic GFR-binding peptide
  MOD_RES (1)..(32)..(33): Xaa is C or S
XSKVIMRYKKLIKPTKGIFYLISIANLDQSVXXP

SEQ ID NO: 2710 - protein, 29 aa, Artificial Sequence
  Cyclic GFR-binding peptide
  MOD_RES (29)..(29): Xaa is C or S
VMNQYNKLIVNSSDDLYLVSIASLQTPAX

SEQ ID NO: 2711 - protein, 38 aa, Artificial Sequence
  Cyclic GFR-binding peptide
  MOD_RES (2)..(33)..(34): Xaa is C or S
KXSKVIMRHKRLIKPTKGIYYLISTASLDQSVXXPSAS

SEQ ID NO: 2712 - protein, 31 aa, Artificial Sequence
  Cyclic GFR-binding peptide
  MOD_RES (27)..(28): Xaa is C or S
MRHKRLVKPKRGVYYLISTASLAQPVXXPAA

SEQ ID NO: 2713 - protein, 23 aa, Artificial Sequence
  Cyclic GFR-binding peptide
RHKRLVVKDYEDYYLMSTASLET

SEQ ID NO: 2714 - protein, 28 aa, Artificial Sequence
  Cyclic GFR-binding peptide
  MOD_RES (2)..(2): Xaa is C or S
GXGEVVMERYKKLVVKDYEDFYLMSIAN

SEQ ID NO: 2715 - protein, 35 aa, Artificial Sequence
  Cyclic GFR-binding peptide
  MOD_RES (34)..(34): Xaa is C or S
DELTRHKRLFIPKKRVIEYYLVSTASLQVQTPRXQ

SEQ ID NO: 2716 - protein, 28 aa, Artificial Sequence
  Cyclic GFR-binding peptide
VVMDRHKRLVVKENEDYYLMSTASLETP

SEQ ID NO: 2717 - protein, 23 aa, Artificial Sequence
  Cyclic GFR-binding peptide
VMDYHYKLVVKENEDKYLMSIPS

SEQ ID NO: 2718 - protein, 26 aa, Artificial Sequence
  Cyclic GFR-binding peptide
VVMRYKKLVKPTRGVFYLISIANLDQ

SEQ ID NO: 2719 - protein, 21 aa, Artificial Sequence
  Cyclic GFR-binding peptide
MYHYKLVKPKRGVKYLISIPS

SEQ ID NO: 2720 - protein, 32 aa, Artificial Sequence
  Cyclic GFR-binding peptide
  MOD_RES (32)..(32): Xaa is C or S
AVSMGERHKRLTPVGMDDYYLVSTASLKTPVX

SEQ ID NO: 2721 - protein, 31 aa, Artificial Sequence
  Cyclic GFR-binding peptide
  MOD_RES (2)..(4): Xaa is C or S
RXGXEAVSMGERYKKLTPVGMDDFYLVSIAN

SEQ ID NO: 2722 - protein, 41 aa, Artificial Sequence
  Cyclic GFR-binding peptide
  MOD_RES (2)..(4)..(35)..(36): Xaa is C or S
SXKXSKVIMQYNKLIKPTKGILYLISIASLDQSVXXPSASA

SEQ ID NO: 2723 - protein, 25 aa, Artificial Sequence
  Cyclic GFR-binding peptide
RVIMRYKKLVKPKRGVFYLISIANL

SEQ ID NO: 2724 - protein, 30 aa, Artificial Sequence
  Cyclic GFR-binding peptide
  MOD_RES (1)..(3): Xaa is C or S
XGXARVVMNYHYKLIVNSSDDKYLVSIPSL

SEQ ID NO: 2725 - protein, 28 aa, Artificial Sequence
  Cyclic GFR-binding peptide
  MOD_RES (1)..(1): Xaa is C or S
XGEVVMEYHYKLVVKDYEDKYLMSIPSL

SEQ ID NO: 2726 - protein, 40 aa, Artificial Sequence
  Cyclic GFR-binding peptide
  MOD_RES (1)..(3)..(34)..(35): Xaa is C or S
XKXSRVIMQYNKLVKPKRGVLYLISIASLAQPVXXPAASA

SEQ ID NO: 2727 - protein, 34 aa, Artificial Sequence
  Cyclic GFR-binding peptide
  MOD_RES (2)..(34): Xaa is C or S
GXGEVVMERYKKLVVKDYEDFYLMSIANLETPVX

SEQ ID NO: 2728 - protein, 30 aa, Artificial Sequence
  Cyclic GFR-binding peptide
  MOD_RES (30)..(30): Xaa is C or S
VVMNRYKKLIVNNSSDFYLVSIANLKTPAX

SEQ ID NO: 2729 - protein, 32 aa, Artificial Sequence
  Cyclic GFR-binding peptide
  MOD_RES (27)..(28): Xaa is C or S
NRYKKLIVNSSDDFYLVSIANLQTPAXXPKPV

SEQ ID NO: 2730 - protein, 27 aa, Artificial Sequence
  Cyclic GFR-binding peptide
SKVVMYHYKLVKPTRGVKYLISIPSLD

SEQ ID NO: 2731 - protein, 35 aa, Artificial Sequence
  Cyclic GFR-binding peptide
  MOD_RES (1)..(3): Xaa is C or S
XKXALHDELTYHYKLFIPKKRVIEKYLVSIPSLQV

SEQ ID NO: 2732 - protein, 34 aa, Artificial Sequence
  Cyclic GFR-binding peptide
  MOD_RES (1)..(33)..(34): Xaa is C or S
XARVVMNRYKKLIVNSSDDFYLVSIANLQTPAXX

SEQ ID NO: 2733 - protein, 29 aa, Artificial Sequence
  Cyclic GFR-binding peptide
  MOD_RES (2)..(2): Xaa is C or S
GXSRVVMNRHKRLIVNSSDDYYLVSTASL

SEQ ID NO: 2734 - protein, 37 aa, Artificial Sequence
  Cyclic GFR-binding peptide
  MOD_RES (31)..(32): Xaa is C or S
SRVIMRYKKLVKPKRGVFYLISIANLAQPVXXPAASA

SEQ ID NO: 2735 - protein, 29 aa, Artificial Sequence
  Cyclic GFR-binding peptide
  MOD_RES (28)..(29): Xaa is C or S
VMYHYKLVKPTRGVKYLISIPSLDQPVXX

SEQ ID NO: 2736 - protein, 29 aa, Artificial Sequence
  Cyclic GFR-binding peptide
  MOD_RES (28)..(29): Xaa is C or S
MEQYNKLVVKDYEDLYLMSIASLETPVXX

SEQ ID NO: 2737 - protein, 41 aa, Artificial Sequence
  Cyclic GFR-binding peptide
  MOD_RES (2)..(4)..(37)..(38): Xaa is C or S
RXGXEAVSMGERYKKLTPVGMDDFYLVSIANLKTPVXXAKG

SEQ ID NO: 2738 - protein, 29 aa, Artificial Sequence
  Cyclic GFR-binding peptide
VVMDRYKKLVVKENEDFYLMSIANLETPV

SEQ ID NO: 2739 - protein, 36 aa, Artificial Sequence
  Cyclic GFR-binding peptide
  MOD_RES (2)..(4)..(35)..(36): Xaa is C or S
SXKXSKVIMQYNKLIKPTKGILYLISIASLDQSVXX

SEQ ID NO: 2740 - protein, 36 aa, Artificial Sequence
  Cyclic GFR-binding peptide
  MOD_RES (31)..(32): Xaa is C or S
RVVMNQYNKLIVNSSDDLYLVSIASLKTPAXXPKPV

SEQ ID NO: 2741 - protein, 31 aa, Artificial Sequence
  Cyclic GFR-binding peptide
ARVVMNYHYKLIVNSSDDKYLVSIPSLQTPA

SEQ ID NO: 2742 - protein, 22 aa, Artificial Sequence
  Cyclic GFR-binding peptide
MEYHYKLVVKDYEDKYLMSIPS

SEQ ID NO: 2743 - protein, 33 aa, Artificial Sequence
  Cyclic GFR-binding peptide
  MOD_RES (27)..(28): Xaa is C or S
MRYKKLIKPTKGIFYLISIANLDQSVXXPSASA

SEQ ID NO: 2744 - protein, 37 aa, Artificial Sequence
  Cyclic GFR-binding peptide
  MOD_RES (2)..(4): Xaa is C or S
EXKXALHDELTRYKKLFIPKKRVIEFYLVSIANLQVQ

SEQ ID NO: 2745 - protein, 40 aa, Artificial Sequence
  Cyclic GFR-binding peptide
  MOD_RES (2)..(34)..(35): Xaa is C or S
GXGEVVMEQYNKLVVKDYEDLYLMSIASLETPVXXAKPIS

SEQ ID NO: 2746 - protein, 33 aa, Artificial Sequence
  Cyclic GFR-binding peptide
  MOD_RES (32)..(33): Xaa is C or S
GEVVMERYKKLVVKDYEDFYLMSIANLETPVXX

SEQ ID NO: 2747 - protein, 29 aa, Artificial Sequence
  Cyclic GFR-binding peptide
  MOD_RES (27)..(27): Xaa is C or S
NYHYKLIVNSSDDKYLVSIPSLKTPAXTP

SEQ ID NO: 2748 - protein, 29 aa, Artificial Sequence
  Cyclic GFR-binding peptide
  MOD_RES (27)..(28): Xaa is C or S
EQYNKLTPVGMDDLYLVSIASLKTPVXXA

SEQ ID NO: 2749 - protein, 32 aa, Artificial Sequence
  Cyclic GFR-binding peptide
  MOD_RES (30)..(31): Xaa is C or S
RVIMRYKKLVKPKRGVFYLISIANLAQPVXXP

SEQ ID NO: 2750 - protein, 23 aa, Artificial Sequence
  Cyclic GFR-binding peptide
DYHYKLVVKENEDKYLMSIPSLE

SEQ ID NO: 2751 - protein, 32 aa, Artificial Sequence
  Cyclic GFR-binding peptide
  MOD_RES (29)..(29): Xaa is C or S
VMNYHYKLIVNSSDDKYLVSIPSLKTPAXTPK

SEQ ID NO: 2752 - protein, 28 aa, Artificial Sequence
  Cyclic GFR-binding peptide
  MOD_RES (1)..(1): Xaa is C or S
XEAVSMGEQYNKLTPVGMDDLYLVSIAS

SEQ ID NO: 2753 - protein, 33 aa, Artificial Sequence
  Cyclic GFR-binding peptide
  MOD_RES (2)..(4): Xaa is C or S
HXGXAKVVMNQYNKLIVNNSSDLYLVSIASLKT

SEQ ID NO: 2754 - protein, 26 aa, Artificial Sequence
  Cyclic GFR-binding peptide
KVVMNRYKKLIVNNSSDFYLVSIANL

SEQ ID NO: 2755 - protein, 37 aa, Artificial Sequence
  Cyclic GFR-binding peptide
  MOD_RES (2)..(4)..(36)..(37): Xaa is C or S
RXGXGEVVMDRYKKLVVKENEDFYLMSIANLETPVXX

SEQ ID NO: 2756 - protein, 31 aa, Artificial Sequence
  Cyclic GFR-binding peptide
AVSMGERYKKLTPVGMDDFYLVSIANLKTPV

SEQ ID NO: 2757 - protein, 34 aa, Artificial Sequence
  Cyclic GFR-binding peptide
  MOD_RES (28)..(29): Xaa is C or S
VMRHKRLVKPTRGVYYLISTASLDQPVXXPSASA

SEQ ID NO: 2758 - protein, 32 aa, Artificial Sequence
  Cyclic GFR-binding peptide
  MOD_RES (28)..(28): Xaa is C or S
MNRYKKLIVNSSDDFYLVSIANLKTPAXTPKT

SEQ ID NO: 2759 - protein, 30 aa, Artificial Sequence
  Cyclic GFR-binding peptide
  MOD_RES (1)..(1): Xaa is C or S
XGEVVMERHKRLVVKDYEDYYLMSTASLET

SEQ ID NO: 2760 - protein, 38 aa, Artificial Sequence
  Cyclic GFR-binding peptide
  MOD_RES (2)..(4)..(36)..(37): Xaa is C or S
HXGXSRVVMNRHKRLIVNSSDDYYLVSTASLKTPAXXP

SEQ ID NO: 2761 - protein, 35 aa, Artificial Sequence
  Cyclic GFR-binding peptide
  MOD_RES (29)..(30): Xaa is C or S
VMNRHKRLIVNSSDDYYLVSTASLQTPAXXPKPVT

SEQ ID NO: 2762 - protein, 29 aa, Artificial Sequence
  Cyclic GFR-binding peptide
LTYHYKLFIPKKRVIEKYLVSIPSLQVQT

SEQ ID NO: 2763 - protein, 37 aa, Artificial Sequence
  Cyclic GFR-binding peptide
  MOD_RES (1)..(3): Xaa is C or S
XKXALHDELTRHKRLFIPKKRVIEYYLVSTASLQVQT

SEQ ID NO: 2764 - protein, 36 aa, Artificial Sequence
  Cyclic GFR-binding peptide
  MOD_RES (31)..(32): Xaa is C or S
SKVVMRYKKLVKPTRGVFYLISIANLDQPVXXPSAS

SEQ ID NO: 2765 - protein, 30 aa, Artificial Sequence
  Cyclic GFR-binding peptide
  MOD_RES (26)..(27): Xaa is C or S
YHYKLIVNNSSDKYLVSIPSLKTPAXXAKP

SEQ ID NO: 2766 - protein, 32 aa, Artificial Sequence
  Cyclic GFR-binding peptide
  MOD_RES (29)..(30): Xaa is C or S
VMEYHYKLVVKDYEDKYLMSIPSLETPVXXAK

SEQ ID NO: 2767 - protein, 31 aa, Artificial Sequence
  Cyclic GFR-binding peptide
  MOD_RES (28)..(28): Xaa is C or S
MNYHYKLIVNSSDDKYLVSIPSLKTPAXTPK

SEQ ID NO: 2768 - protein, 32 aa, Artificial Sequence
  Cyclic GFR-binding peptide
  MOD_RES (29)..(30): Xaa is C or S
MGEQYNKLTPVGMDDLYLVSIASLKTPVXXAK

SEQ ID NO: 2769 - protein, 35 aa, Artificial Sequence
  Cyclic GFR-binding peptide
  MOD_RES (2)..(4)..(35): Xaa is C or S
SXKXSRVIMRHKRLVKPKRGVYYLISTASLAQPVX

SEQ ID NO: 2770 - protein, 20 aa, Artificial Sequence
  Cyclic GFR-binding peptide
YHYKLIKPTKGIKYLISIPS

SEQ ID NO: 2771 - protein, 26 aa, Artificial Sequence
  Cyclic GFR-binding peptide
VVMNRYKKLIVNNSSDFYLVSIANLK

SEQ ID NO: 2772 - protein, 35 aa, Artificial Sequence
  Cyclic GFR-binding peptide
  MOD_RES (1)..(3)..(35): Xaa is C or S
XGXGEVVMERHKRLVVKDYEDYYLMSTASLETPVX

SEQ ID NO: 2773 - protein, 31 aa, Artificial Sequence
  Cyclic GFR-binding peptide
  MOD_RES (27)..(28): Xaa is C or S
NQYNKLIVNNSSDLYLVSIASLKTPAXXAKP

SEQ ID NO: 2774 - protein, 35 aa, Artificial Sequence
  Cyclic GFR-binding peptide
  MOD_RES (2)..(4)..(35): Xaa is C or S
SXKXSRVIMYHYKLVKPKRGVKYLISIPSLAQPVX

SEQ ID NO: 2775 - protein, 27 aa, Artificial Sequence
  Cyclic GFR-binding peptide
RVVMNYHYKLIVNSSDDKYLVSIPSLK

SEQ ID NO: 2776 - protein, 26 aa, Artificial Sequence
  Cyclic GFR-binding peptide
KVVMRYKKLVKPTRGVFYLISIANLD

SEQ ID NO: 2777 - protein, 39 aa, Artificial Sequence
  Cyclic GFR-binding peptide
  MOD_RES (1)..(3)..(34)..(35): Xaa is C or S
XKXSKVIMYHYKLIKPTKGIKYLISIPSLDQSVXXPSAS

SEQ ID NO: 2778 - protein, 39 aa, Artificial Sequence
  Cyclic GFR-binding peptide
  MOD_RES (2)..(34)..(35): Xaa is C or S
GXGEVVMDYHYKLVVKENEDKYLMSIPSLETPVXXAKPI

SEQ ID NO: 2779 - protein, 29 aa, Artificial Sequence
  Cyclic GFR-binding peptide
  MOD_RES (2)..(2): Xaa is C or S
GXAKVVMNQYNKLIVNNSSDLYLVSIASL

SEQ ID NO: 2780 - protein, 39 aa, Artificial Sequence
  Cyclic GFR-binding peptide
  MOD_RES (2)..(33)..(34): Xaa is C or S
KXSRVIMYHYKLVKPKRGVKYLISIPSLAQPVXXPAASA

SEQ ID NO: 2781 - protein, 22 aa, Artificial Sequence
  Cyclic GFR-binding peptide
NRYKKLIVNNSSDFYLVSIANL

SEQ ID NO: 2782 - protein, 28 aa, Artificial Sequence
  Cyclic GFR-binding peptide
ARVVMNYHYKLIVNSSDDKYLVSIPSLQ

SEQ ID NO: 2783 - protein, 37 aa, Artificial Sequence
  Cyclic GFR-binding peptide
  MOD_RES (32)..(33): Xaa is C or S
AVSMGEQYNKLTPVGMDDLYLVSIASLKTPVXXAKGV

SEQ ID NO: 2784 - protein, 22 aa, Artificial Sequence
  Cyclic GFR-binding peptide
MNRYKKLIVNNSSDFYLVSIAN

SEQ ID NO: 2785 - protein, 29 aa, Artificial Sequence
  Cyclic GFR-binding peptide
AKVVMNRYKKLIVNNSSDFYLVSIANLKT

SEQ ID NO: 2786 - protein, 28 aa, Artificial Sequence
  Cyclic GFR-binding peptide
  MOD_RES (27)..(28): Xaa is C or S
NYHYKLIVNNSSDKYLVSIPSLKTPAXX

SEQ ID NO: 2787 - protein, 33 aa, Artificial Sequence
  Cyclic GFR-binding peptide
  MOD_RES (30)..(31): Xaa is C or S
KVIMQYNKLIKPTKGILYLISIASLDQSVXXPS

SEQ ID NO: 2788 - protein, 40 aa, Artificial Sequence
  Cyclic GFR-binding peptide
  MOD_RES (1)..(3)..(35): Xaa is C or S
XGXSRVVMNYHYKLIVNSSDDKYLVSIPSLKTPAXTPKTV

SEQ ID NO: 2789 - protein, 32 aa, Artificial Sequence
  Cyclic GFR-binding peptide
  MOD_RES (27)..(28): Xaa is C or S
MRHKRLVKPKRGVYYLISTASLAQPVXXPAAS

SEQ ID NO: 2790 - protein, 27 aa, Artificial Sequence
  Cyclic GFR-binding peptide
SKVIMQYNKLIKPTKGILYLISIASLD

SEQ ID NO: 2791 - protein, 29 aa, Artificial Sequence
  Cyclic GFR-binding peptide
  MOD_RES (2)..(4): Xaa is C or S
SXKXSRVIMQYNKLVKPKRGVLYLISIAS

SEQ ID NO: 2792 - protein, 36 aa, Artificial Sequence
  Cyclic GFR-binding peptide
  MOD_RES (1)..(3)..(35)..(36): Xaa is C or S
XGXARVVMNRYKKLIVNSSDDFYLVSIANLQTPAXX

SEQ ID NO: 2793 - protein, 25 aa, Artificial Sequence
  Cyclic GFR-binding peptide
SMGERHKRLTPVGMDDYYLVSTASL

SEQ ID NO: 2794 - protein, 30 aa, Artificial Sequence
  Cyclic GFR-binding peptide
ELTQYNKLFIPKKRVIELYLVSIASLQVQT

SEQ ID NO: 2795 - protein, 40 aa, Artificial Sequence
  Cyclic GFR-binding peptide
  MOD_RES (2)..(4)..(36)..(37): Xaa is C or S
RXGXGEVVMERHKRLVVKDYEDYYLMSTASLETPVXXAKP

SEQ ID NO: 2796 - protein, 24 aa, Artificial Sequence
  Cyclic GFR-binding peptide
VMNRYKKLIVNNSSDFYLVSIANL

SEQ ID NO: 2797 - protein, 32 aa, Artificial Sequence
  Cyclic GFR-binding peptide
  MOD_RES (30)..(31): Xaa is C or S
KVVMRHKRLVKPTRGVYYLISTASLDQPVXXP

SEQ ID NO: 2798 - protein, 37 aa, Artificial Sequence
  Cyclic GFR-binding peptide
  MOD_RES (1)..(3)..(35): Xaa is C or S
XGXSRVVMNRYKKLIVNSSDDFYLVSIANLKTPAXTP

SEQ ID NO: 2799 - protein, 34 aa, Artificial Sequence
  Cyclic GFR-binding peptide
  MOD_RES (28)..(29): Xaa is C or S
GERYKKLTPVGMDDFYLVSIANLKTPVXXAKGVK

SEQ ID NO: 2800 - protein, 30 aa, Artificial Sequence
  Cyclic GFR-binding peptide
  MOD_RES (28)..(29): Xaa is C or S
MNRYKKLIVNSSDDFYLVSIANLKTPAXXP

SEQ ID NO: 2801 - protein, 28 aa, Artificial Sequence
  Cyclic GFR-binding peptide
  MOD_RES (1)..(3): Xaa is C or S
XKXSKVIMQYNKLIKPTKGILYLISIAS

SEQ ID NO: 2802 - protein, 37 aa, Artificial Sequence
  Cyclic GFR-binding peptide
  MOD_RES (31)..(31): Xaa is C or S
RVVMNYHYKLIVNSSDDKYLVSIPSLKTPAXTPKTVH

SEQ ID NO: 2803 - protein, 33 aa, Artificial Sequence
  Cyclic GFR-binding peptide
  MOD_RES (1)..(1): Xaa is C or S
XEAVSMGERYKKLTPVGMDDFYLVSIANLKTPV

SEQ ID NO: 2804 - protein, 31 aa, Artificial Sequence
  Cyclic GFR-binding peptide
  MOD_RES (28)..(29): Xaa is C or S
MDYHYKLVVKENEDKYLMSIPSLETPVXXAK

SEQ ID NO: 2805 - protein, 33 aa, Artificial Sequence
  Cyclic GFR-binding peptide
  MOD_RES (27)..(27): Xaa is C or S
NRHKRLIVNSSDDYYLVSTASLKTPAXTPKTVH

SEQ ID NO: 2806 - protein, 40 aa, Artificial Sequence
  Cyclic GFR-binding peptide
  MOD_RES (1)..(34)..(35): Xaa is C or S
XEAVSMGEQYNKLTPVGMDDLYLVSIASLKTPVXXAKGVK

SEQ ID NO: 2807 - protein, 29 aa, Artificial Sequence
  Cyclic GFR-binding peptide
SKVVMQYNKLVKPTRGVLYLISIASLDQP

SEQ ID NO: 2808 - protein, 34 aa, Artificial Sequence
  Cyclic GFR-binding peptide
  MOD_RES (30)..(31): Xaa is C or S
VVMDRYKKLVVKENEDFYLMSIANLETPVXXAKP

SEQ ID NO: 2809 - protein, 45 aa, Artificial Sequence
  Cyclic GFR-binding peptide
  MOD_RES (2)..(4)..(41): Xaa is C or S
EXKXALHDELTQYNKLFIPKKRVIELYLVSIASLQVQTPRXQVNR

SEQ ID NO: 2810 - protein, 37 aa, Artificial Sequence
  Cyclic GFR-binding peptide
  MOD_RES (31)..(32): Xaa is C or S
RVVMNYHYKLIVNSSDDKYLVSIPSLKTPAXXPKPVY

SEQ ID NO: 2811 - protein, 25 aa, Artificial Sequence
  Cyclic GFR-binding peptide
NQYNKLIVNNSSDLYLVSIASLKTP

SEQ ID NO: 2812 - protein, 33 aa, Artificial Sequence
  Cyclic GFR-binding peptide
  MOD_RES (2)..(2): Xaa is C or S
KXALHDELTRHKRLFIPKKRVIEYYLVSTASLQ

SEQ ID NO: 2813 - protein, 22 aa, Artificial Sequence
  Cyclic GFR-binding peptide
IMRHKRLVKPKRGVYYLISTAS

SEQ ID NO: 2814 - protein, 32 aa, Artificial Sequence
  Cyclic GFR-binding peptide
  MOD_RES (2)..(2): Xaa is C or S
KXSKVVMRHKRLVKPTRGVYYLISTASLDQPV

SEQ ID NO: 2815 - protein, 26 aa, Artificial Sequence
  Cyclic GFR-binding peptide
VMNRYKKLIVNSSDDFYLVSIANLKT

SEQ ID NO: 2816 - protein, 36 aa, Artificial Sequence
  Cyclic GFR-binding peptide
  MOD_RES (31)..(32): Xaa is C or S
VSMGERYKKLTPVGMDDFYLVSIANLKTPVXXAKGV

SEQ ID NO: 2817 - protein, 38 aa, Artificial Sequence
  Cyclic GFR-binding peptide
  MOD_RES (32)..(33): Xaa is C or S
AVSMGERYKKLTPVGMDDFYLVSIANLKTPVXXAKGVK

SEQ ID NO: 2818 - protein, 38 aa, Artificial Sequence
  Cyclic GFR-binding peptide
  MOD_RES (32)..(33): Xaa is C or S
GEVVMEYHYKLVVKDYEDKYLMSIPSLETPVXXAKPIS

SEQ ID NO: 2819 - protein, 34 aa, Artificial Sequence
  Cyclic GFR-binding peptide
  MOD_RES (28)..(29): Xaa is C or S
IMRHKRLIKPTKGIYYLISTASLDQSVXXPSASA

SEQ ID NO: 2820 - protein, 28 aa, Artificial Sequence
  Cyclic GFR-binding peptide
  MOD_RES (1)..(3): Xaa is C or S
XKXSRVIMQYNKLVKPKRGVLYLISIAS

SEQ ID NO: 2821 - protein, 27 aa, Artificial Sequence
  Cyclic GFR-binding peptide
  MOD_RES (26)..(27): Xaa is C or S
YHYKLVVKDYEDKYLMSIPSLETPVXX

SEQ ID NO: 2822 - protein, 26 aa, Artificial Sequence
  Cyclic GFR-binding peptide
DELTQYNKLFIPKKRVIELYLVSIAS

SEQ ID NO: 2823 - protein, 35 aa, Artificial Sequence
  Cyclic GFR-binding peptide
  MOD_RES (30)..(31): Xaa is C or S
RVIMQYNKLVKPKRGVLYLISIASLAQPVXXPAAS

SEQ ID NO: 2824 - protein, 30 aa, Artificial Sequence
  Cyclic GFR-binding peptide
  MOD_RES (26)..(27): Xaa is C or S
YHYKLVKPKRGVKYLISIPSLAQPVXXPAA

SEQ ID NO: 2825 - protein, 30 aa, Artificial Sequence
  Cyclic GFR-binding peptide
  MOD_RES (30)..(30): Xaa is C or S
VVMNYHYKLIVNNSSDKYLVSIPSLKTPAX

SEQ ID NO: 2826 - protein, 21 aa, Artificial Sequence
  Cyclic GFR-binding peptide
ERHKRLVVKDYEDYYLMSTAS

SEQ ID NO: 2827 - protein, 32 aa, Artificial Sequence
  Cyclic GFR-binding peptide
  MOD_RES (28)..(29): Xaa is C or S
MDQYNKLVVKENEDLYLMSIASLETPVXXAKP

SEQ ID NO: 2828 - protein, 39 aa, Artificial Sequence
  Cyclic GFR-binding peptide
  MOD_RES (1)..(3)..(34)..(35): Xaa is C or S
XKXSKVIMRYKKLIKPTKGIFYLISIANLDQSVXXPSAS

SEQ ID NO: 2829 - protein, 36 aa, Artificial Sequence
  Cyclic GFR-binding peptide
ALHDELTQYNKLFIPKKRVIELYLVSIASLQVQTPR

SEQ ID NO: 2830 - protein, 34 aa, Artificial Sequence
  Cyclic GFR-binding peptide
  MOD_RES (31)..(31): Xaa is C or S
TRYKKLFIPKKRVIEFYLVSIANLQVQTPRXQVN

SEQ ID NO: 2831 - protein, 30 aa, Artificial Sequence
  Cyclic GFR-binding peptide
  MOD_RES (26)..(27): Xaa is C or S
QYNKLIVNNSSDLYLVSIASLKTPAXXAKP

SEQ ID NO: 2832 - protein, 34 aa, Artificial Sequence
  Cyclic GFR-binding peptide
  MOD_RES (1)..(3): Xaa is C or S
XGXARVVMNYHYKLIVNSSDDKYLVSIPSLQTPA

SEQ ID NO: 2833 - protein, 22 aa, Artificial Sequence
  Cyclic GFR-binding peptide
RYKKLVKPKRGVFYLISIANLA

SEQ ID NO: 2834 - protein, 25 aa, Artificial Sequence
  Cyclic GFR-binding peptide
NYHYKLIVNSSDDKYLVSIPSLQTP

SEQ ID NO: 2835 - protein, 32 aa, Artificial Sequence
  Cyclic GFR-binding peptide
  MOD_RES (28)..(28): Xaa is C or S
MNYHYKLIVNSSDDKYLVSIPSLKTPAXTPKT

SEQ ID NO: 2836 - protein, 21 aa, Artificial Sequence
  Cyclic GFR-binding peptide
MQYNKLVKPTRGVLYLISIAS

SEQ ID NO: 2837 - protein, 37 aa, Artificial Sequence
  Cyclic GFR-binding peptide
  MOD_RES (31)..(32): Xaa is C or S
EVVMERYKKLVVKDYEDFYLMSIANLETPVXXAKPIS

SEQ ID NO: 2838 - protein, 35 aa, Artificial Sequence
  Cyclic GFR-binding peptide
  MOD_RES (2)..(4): Xaa is C or S
HXGXAKVVMNRYKKLIVNNSSDFYLVSIANLKTPA

SEQ ID NO: 2839 - protein, 32 aa, Artificial Sequence
  Cyclic GFR-binding peptide
LHDELTYHYKLFIPKKRVIEKYLVSIPSLQVQ

SEQ ID NO: 2840 - protein, 34 aa, Artificial Sequence
  Cyclic GFR-binding peptide
  MOD_RES (2)..(4): Xaa is C or S
RXGXEAVSMGERHKRLTPVGMDDYYLVSTASLKT

SEQ ID NO: 2841 - protein, 25 aa, Artificial Sequence
  Cyclic GFR-binding peptide
SKVVMYHYKLVKPTRGVKYLISIPS

SEQ ID NO: 2842 - protein, 25 aa, Artificial Sequence
  Cyclic GFR-binding peptide
IMRHKRLVKPKRGVYYLISTASLAQ

SEQ ID NO: 2843 - protein, 28 aa, Artificial Sequence
  Cyclic GFR-binding peptide
  MOD_RES (1)..(1): Xaa is C or S
XSKVIMQYNKLIKPTKGILYLISIASLD

SEQ ID NO: 2844 - protein, 31 aa, Artificial Sequence
  Cyclic GFR-binding peptide
  MOD_RES (30)..(31): Xaa is C or S
VVMNQYNKLIVNSSDDLYLVSIASLKTPAXX

SEQ ID NO: 2845 - protein, 38 aa, Artificial Sequence
  Cyclic GFR-binding peptide
  MOD_RES (2)..(34)..(35): Xaa is C or S
GXSRVVMNQYNKLIVNSSDDLYLVSIASLKTPAXXPKP

SEQ ID NO: 2846 - protein, 26 aa, Artificial Sequence
  Cyclic GFR-binding peptide
GEVVMEQYNKLVVKDYEDLYLMSIAS

SEQ ID NO: 2847 - protein, 32 aa, Artificial Sequence
  Cyclic GFR-binding peptide
  MOD_RES (30)..(31): Xaa is C or S
KVIMQYNKLIKPTKGILYLISIASLDQSVXXP

SEQ ID NO: 2848 - protein, 31 aa, Artificial Sequence
  Cyclic GFR-binding peptide
  MOD_RES (30)..(31): Xaa is C or S
KVIMQYNKLIKPTKGILYLISIASLDQSVXX

SEQ ID NO: 2849 - protein, 31 aa, Artificial Sequence
  Cyclic GFR-binding peptide
  MOD_RES (2)..(2): Xaa is C or S
KXSKVVMQYNKLVKPTRGVLYLISIASLDQP

SEQ ID NO: 2850 - protein, 28 aa, Artificial Sequence
  Cyclic GFR-binding peptide
ELTQYNKLFIPKKRVIELYLVSIASLQV

SEQ ID NO: 2851 - protein, 33 aa, Artificial Sequence
  Cyclic GFR-binding peptide
  MOD_RES (31)..(32): Xaa is C or S
VSMGERYKKLTPVGMDDFYLVSIANLKTPVXXA

SEQ ID NO: 2852 - protein, 29 aa, Artificial Sequence
  Cyclic GFR-binding peptide
SMGEQYNKLTPVGMDDLYLVSIASLKTPV

SEQ ID NO: 2853 - protein, 33 aa, Artificial Sequence
  Cyclic GFR-binding peptide
  MOD_RES (27)..(28): Xaa is C or S
MYHYKLVKPKRGVKYLISIPSLAQPVXXPAASA

SEQ ID NO: 2854 - protein, 36 aa, Artificial Sequence
  Cyclic GFR-binding peptide
ALHDELTRHKRLFIPKKRVIEYYLVSTASLQVQTPR

SEQ ID NO: 2855 - protein, 31 aa, Artificial Sequence
  Cyclic GFR-binding peptide
  MOD_RES (1)..(3): Xaa is C or S
XGXGEVVMERHKRLVVKDYEDYYLMSTASLE

SEQ ID NO: 2856 - protein, 38 aa, Artificial Sequence
  Cyclic GFR-binding peptide
  MOD_RES (2)..(34)..(35): Xaa is C or S
GXSRVVMNYHYKLIVNSSDDKYLVSIPSLKTPAXXPKP

SEQ ID NO: 2857 - protein, 23 aa, Artificial Sequence
  Cyclic GFR-binding peptide
GERYKKLTPVGMDDFYLVSIANL

SEQ ID NO: 2858 - protein, 40 aa, Artificial Sequence
  Cyclic GFR-binding peptide
  MOD_RES (1)..(3)..(35)..(36): Xaa is C or S
XGXGEVVMDRHKRLVVKENEDYYLMSTASLETPVXXAKPI

SEQ ID NO: 2859 - protein, 28 aa, Artificial Sequence
  Cyclic GFR-binding peptide
TYHYKLFIPKKRVIEKYLVSIPSLQVQT

SEQ ID NO: 2860 - protein, 31 aa, Artificial Sequence
  Cyclic GFR-binding peptide
  MOD_RES (1)..(1): Xaa is C or S
XSRVIMQYNKLVKPKRGVLYLISIASLAQPV

SEQ ID NO: 2861 - protein, 44 aa, Artificial Sequence
  Cyclic GFR-binding peptide
  MOD_RES (2)..(4)..(41): Xaa is C or S
EXKXALHDELTRYKKLFIPKKRVIEFYLVSIANLQVQTPRXQVN

SEQ ID NO: 2862 - protein, 22 aa, Artificial Sequence
  Cyclic GFR-binding peptide
QYNKLVVKDYEDLYLMSIASLE

SEQ ID NO: 2863 - protein, 31 aa, Artificial Sequence
  Cyclic GFR-binding peptide
  MOD_RES (28)..(29): Xaa is C or S
IMYHYKLIKPTKGIKYLISIPSLDQSVXXPS

SEQ ID NO: 2864 - protein, 34 aa, Artificial Sequence
  Cyclic GFR-binding peptide
  MOD_RES (32)..(32): Xaa is C or S
LTYHYKLFIPKKRVIEKYLVSIPSLQVQTPRXQV

SEQ ID NO: 2865 - protein, 35 aa, Artificial Sequence
  Cyclic GFR-binding peptide
  MOD_RES (32)..(33): Xaa is C or S
AVSMGEQYNKLTPVGMDDLYLVSIASLKTPVXXAK

SEQ ID NO: 2866 - protein, 30 aa, Artificial Sequence
  Cyclic GFR-binding peptide
  MOD_RES (27)..(28): Xaa is C or S
MYHYKLVKPKRGVKYLISIPSLAQPVXXPA

SEQ ID NO: 2867 - protein, 34 aa, Artificial Sequence
  Cyclic GFR-binding peptide
  MOD_RES (1)..(34): Xaa is C or S
XEAVSMGERYKKLTPVGMDDFYLVSIANLKTPVX

SEQ ID NO: 2868 - protein, 33 aa, Artificial Sequence
  Cyclic GFR-binding peptide
  MOD_RES (1)..(1): Xaa is C or S
XALHDELTQYNKLFIPKKRVIELYLVSIASLQV

SEQ ID NO: 2869 - protein, 26 aa, Artificial Sequence
  Cyclic GFR-binding peptide
MNRYKKLIVNNSSDFYLVSIANLKTP

SEQ ID NO: 2870 - protein, 41 aa, Artificial Sequence
  Cyclic GFR-binding peptide
  MOD_RES (2)..(4)..(36)..(37): Xaa is C or S
RXGXGEVVMDYHYKLVVKENEDKYLMSIPSLETPVXXAKPI

SEQ ID NO: 2871 - protein, 32 aa, Artificial Sequence
  Cyclic GFR-binding peptide
  MOD_RES (27)..(28): Xaa is C or S
MYHYKLVKPTRGVKYLISIPSLDQPVXXPSAS

SEQ ID NO: 2872 - protein, 31 aa, Artificial Sequence
  Cyclic GFR-binding peptide
DELTRYKKLFIPKKRVIEFYLVSIANLQVQT

SEQ ID NO: 2873 - protein, 33 aa, Artificial Sequence
  Cyclic GFR-binding peptide
  MOD_RES (30)..(31): Xaa is C or S
VVMEYHYKLVVKDYEDKYLMSIPSLETPVXXAK

SEQ ID NO: 2874 - protein, 35 aa, Artificial Sequence
  Cyclic GFR-binding peptide
  MOD_RES (1)..(3)..(35): Xaa is C or S
XGXARVVMNRHKRLIVNSSDDYYLVSTASLQTPAX

SEQ ID NO: 2875 - protein, 30 aa, Artificial Sequence
  Cyclic GFR-binding peptide
  MOD_RES (1)..(1): Xaa is C or S
XSKVVMRHKRLVKPTRGVYYLISTASLDQP

SEQ ID NO: 2876 - protein, 35 aa, Artificial Sequence
  Cyclic GFR-binding peptide
  MOD_RES (1)..(3)..(35): Xaa is C or S
XGXSRVVMNRHKRLIVNSSDDYYLVSTASLKTPAX

SEQ ID NO: 2877 - protein, 41 aa, Artificial Sequence
  Cyclic GFR-binding peptide
  MOD_RES (2)..(4)..(36)..(37): Xaa is C or S
RXGXGEVVMEQYNKLVVKDYEDLYLMSIASLETPVXXAKPI

SEQ ID NO: 2878 - protein, 35 aa, Artificial Sequence
  Cyclic GFR-binding peptide
  MOD_RES (29)..(30): Xaa is C or S
VIMYHYKLVKPKRGVKYLISIPSLAQPVXXPAASA

SEQ ID NO: 2879 - protein, 34 aa, Artificial Sequence
  Cyclic GFR-binding peptide
  MOD_RES (28)..(29): Xaa is C or S
MERYKKLVVKDYEDFYLMSIANLETPVXXAKPIS

SEQ ID NO: 2880 - protein, 37 aa, Artificial Sequence
  Cyclic GFR-binding peptide
  MOD_RES (1)..(3)..(35)..(36): Xaa is C or S
XGXAKVVMNYHYKLIVNNSSDKYLVSIPSLKTPAXXA

SEQ ID NO: 2881 - protein, 23 aa, Artificial Sequence
  Cyclic GFR-binding peptide
VMNRYKKLIVNSSDDFYLVSIAN

SEQ ID NO: 2882 - protein, 30 aa, Artificial Sequence
  Cyclic GFR-binding peptide
  MOD_RES (27)..(28): Xaa is C or S
DRYKKLVVKENEDFYLMSIANLETPVXXAK

SEQ ID NO: 2883 - protein, 33 aa, Artificial Sequence
  Cyclic GFR-binding peptide
  MOD_RES (1)..(33): Xaa is C or S
XAKVVMNQYNKLIVNNSSDLYLVSIASLKTPAX

SEQ ID NO: 2884 - protein, 31 aa, Artificial Sequence
  Cyclic GFR-binding peptide
AKVVMNQYNKLIVNNSSDLYLVSIASLKTPA

SEQ ID NO: 2885 - protein, 26 aa, Artificial Sequence
  Cyclic GFR-binding peptide
SMGEQYNKLTPVGMDDLYLVSIASLK

SEQ ID NO: 2886 - protein, 36 aa, Artificial Sequence
  Cyclic GFR-binding peptide
  MOD_RES (2)..(4)..(36): Xaa is C or S
RXGXGEVVMDQYNKLVVKENEDLYLMSIASLETPVX

SEQ ID NO: 2887 - protein, 34 aa, Artificial Sequence
  Cyclic GFR-binding peptide
  MOD_RES (2)..(4): Xaa is C or S
EXKXALHDELTQYNKLFIPKKRVIELYLVSIASL

SEQ ID NO: 2888 - protein, 40 aa, Artificial Sequence
  Cyclic GFR-binding peptide
  MOD_RES (2)..(4)..(35)..(36): Xaa is C or S
SXKXSRVIMYHYKLVKPKRGVKYLISIPSLAQPVXXPAAS

SEQ ID NO: 2889 - protein, 31 aa, Artificial Sequence
  Cyclic GFR-binding peptide
  MOD_RES (30)..(31): Xaa is C or S
VVMNQYNKLIVNSSDDLYLVSIASLQTPAXX

SEQ ID NO: 2890 - protein, 27 aa, Artificial Sequence
  Cyclic GFR-binding peptide
  MOD_RES (26)..(27): Xaa is C or S
QYNKLVKPTRGVLYLISIASLDQPVXX

SEQ ID NO: 2891 - protein, 26 aa, Artificial Sequence
  Cyclic GFR-binding peptide
SRVVMNRYKKLIVNSSDDFYLVSIAN

SEQ ID NO: 2892 - protein, 30 aa, Artificial Sequence
  Cyclic GFR-binding peptide
  MOD_RES (29)..(29): Xaa is C or S
VMNRYKKLIVNSSDDFYLVSIANLKTPAXT

SEQ ID NO: 2893 - protein, 25 aa, Artificial Sequence
  Cyclic GFR-binding peptide
MRYKKLIKPTKGIFYLISIANLDQS

SEQ ID NO: 2894 - protein, 35 aa, Artificial Sequence
  Cyclic GFR-binding peptide
  MOD_RES (2)..(4): Xaa is C or S
HXGXARVVMNRHKRLIVNSSDDYYLVSTASLQTPA

SEQ ID NO: 2895 - protein, 31 aa, Artificial Sequence
  Cyclic GFR-binding peptide
  MOD_RES (2)..(4): Xaa is C or S
RXGXGEVVMDRHKRLVVKENEDYYLMSTASL

SEQ ID NO: 2896 - protein, 26 aa, Artificial Sequence
  Cyclic GFR-binding peptide
ARVVMNRYKKLIVNSSDDFYLVSIAN

SEQ ID NO: 2897 - protein, 29 aa, Artificial Sequence
  Cyclic GFR-binding peptide
  MOD_RES (1)..(1): Xaa is C or S
XARVVMNRHKRLIVNSSDDYYLVSTASLQ

SEQ ID NO: 2898 - protein, 34 aa, Artificial Sequence
  Cyclic GFR-binding peptide
  MOD_RES (1)..(33)..(34): Xaa is C or S
XGEVVMDQYNKLVVKENEDLYLMSIASLETPVXX

SEQ ID NO: 2899 - protein, 42 aa, Artificial Sequence
  Cyclic GFR-binding peptide
  MOD_RES (2)..(4)..(41): Xaa is C or S
EXKXALHDELTYHYKLFIPKKRVIEKYLVSIPSLQVQTPRXQ

SEQ ID NO: 2900 - protein, 34 aa, Artificial Sequence
  Cyclic GFR-binding peptide
  MOD_RES (28)..(28): Xaa is C or S
MNQYNKLIVNSSDDLYLVSIASLKTPAXTPKTVH

SEQ ID NO: 2901 - protein, 35 aa, Artificial Sequence
  Cyclic GFR-binding peptide
  MOD_RES (1)..(32)..(33): Xaa is C or S
XSKVVMRHKRLVKPTRGVYYLISTASLDQPVXXPS

SEQ ID NO: 2902 - protein, 33 aa, Artificial Sequence
  Cyclic GFR-binding peptide
  MOD_RES (29)..(29): Xaa is C or S
VMNRYKKLIVNSSDDFYLVSIANLKTPAXTPKT

SEQ ID NO: 2903 - protein, 36 aa, Artificial Sequence
  Cyclic GFR-binding peptide
  MOD_RES (1)..(3)..(34)..(35): Xaa is C or S
XKXSRVIMYHYKLVKPKRGVKYLISIPSLAQPVXXP

SEQ ID NO: 2904 - protein, 27 aa, Artificial Sequence
  Cyclic GFR-binding peptide
HDELTQYNKLFIPKKRVIELYLVSIAS

SEQ ID NO: 2905 - protein, 33 aa, Artificial Sequence
  Cyclic GFR-binding peptide
  MOD_RES (2)..(2): Xaa is C or S
GXGEVVMDRHKRLVVKENEDYYLMSTASLETPV

SEQ ID NO: 2906 - protein, 38 aa, Artificial Sequence
  Cyclic GFR-binding peptide
  MOD_RES (2)..(33)..(34): Xaa is C or S
KXSKVVMRHKRLVKPTRGVYYLISTASLDQPVXXPSAS

SEQ ID NO: 2907 - protein, 22 aa, Artificial Sequence
  Cyclic GFR-binding peptide
MNQYNKLIVNNSSDLYLVSIAS

SEQ ID NO: 2908 - protein, 30 aa, Artificial Sequence
  Cyclic GFR-binding peptide
  MOD_RES (28)..(29): Xaa is C or S
IMYHYKLIKPTKGIKYLISIPSLDQSVXXP

SEQ ID NO: 2909 - protein, 29 aa, Artificial Sequence
  Cyclic GFR-binding peptide
RVVMNQYNKLIVNSSDDLYLVSIASLKTP

SEQ ID NO: 2910 - protein, 23 aa, Artificial Sequence
  Cyclic GFR-binding peptide
MNQYNKLIVNNSSDLYLVSIASL

SEQ ID NO: 2911 - protein, 40 aa, Artificial Sequence
  Cyclic GFR-binding peptide
  MOD_RES (1)..(3)..(35)..(36): Xaa is C or S
XGXAKVVMNYHYKLIVNNSSDKYLVSIPSLKTPAXXAKPV

SEQ ID NO: 2912 - protein, 31 aa, Artificial Sequence
  Cyclic GFR-binding peptide
  MOD_RES (26)..(27): Xaa is C or S
YHYKLIVNSSDDKYLVSIPSLKTPAXXPKPV

SEQ ID NO: 2913 - protein, 38 aa, Artificial Sequence
  Cyclic GFR-binding peptide
  MOD_RES (2)..(4)..(36)..(37): Xaa is C or S
HXGXAKVVMNQYNKLIVNNSSDLYLVSIASLKTPAXXA

SEQ ID NO: 2914 - protein, 24 aa, Artificial Sequence
  Cyclic GFR-binding peptide
MRYKKLVKPTRGVFYLISIANLDQ

SEQ ID NO: 2915 - protein, 23 aa, Artificial Sequence
  Cyclic GFR-binding peptide
MQYNKLVKPTRGVLYLISIASLD

SEQ ID NO: 2916 - protein, 33 aa, Artificial Sequence
  Cyclic GFR-binding peptide
  MOD_RES (27)..(28): Xaa is C or S
NYHYKLIVNSSDDKYLVSIPSLKTPAXXPKPVY

SEQ ID NO: 2917 - protein, 29 aa, Artificial Sequence
  Cyclic GFR-binding peptide
  MOD_RES (27)..(28): Xaa is C or S
DRYKKLVVKENEDFYLMSIANLETPVXXA

SEQ ID NO: 2918 - protein, 30 aa, Artificial Sequence
  Cyclic GFR-binding peptide
  MOD_RES (1)..(3): Xaa is C or S
XKXSKVIMRYKKLIKPTKGIFYLISIANLD

SEQ ID NO: 2919 - protein, 29 aa, Artificial Sequence
  Cyclic GFR-binding peptide
  MOD_RES (29)..(29): Xaa is C or S
VMEYHYKLVVKDYEDKYLMSIPSLETPVX

SEQ ID NO: 2920 - protein, 39 aa, Artificial Sequence
  Cyclic GFR-binding peptide
  MOD_RES (1)..(33)..(34): Xaa is C or S
XSRVVMNQYNKLIVNSSDDLYLVSIASLKTPAXXPKPVY

SEQ ID NO: 2921 - protein, 25 aa, Artificial Sequence
  Cyclic GFR-binding peptide
SKVVMQYNKLVKPTRGVLYLISIAS

SEQ ID NO: 2922 - protein, 35 aa, Artificial Sequence
  Cyclic GFR-binding peptide
  MOD_RES (2)..(33)..(34): Xaa is C or S
KXSRVIMRYKKLVKPKRGVFYLISIANLAQPVXXP

SEQ ID NO: 2923 - protein, 31 aa, Artificial Sequence
  Cyclic GFR-binding peptide
AKVVMNRYKKLIVNNSSDFYLVSIANLKTPA

SEQ ID NO: 2924 - protein, 38 aa, Artificial Sequence
  Cyclic GFR-binding peptide
  MOD_RES (1)..(32)..(33): Xaa is C or S
XSRVIMYHYKLVKPKRGVKYLISIPSLAQPVXXPAASA

SEQ ID NO: 2925 - protein, 36 aa, Artificial Sequence
  Cyclic GFR-binding peptide
  MOD_RES (2)..(4)..(36): Xaa is C or S
HXGXSRVVMNRYKKLIVNSSDDFYLVSIANLKTPAX

SEQ ID NO: 2926 - protein, 34 aa, Artificial Sequence
  Cyclic GFR-binding peptide
  MOD_RES (1)..(3): Xaa is C or S
XGXSRVVMNYHYKLIVNSSDDKYLVSIPSLKTPA

SEQ ID NO: 2927 - protein, 35 aa, Artificial Sequence
  Cyclic GFR-binding peptide
  MOD_RES (31)..(32): Xaa is C or S
EVVMERYKKLVVKDYEDFYLMSIANLETPVXXAKP

SEQ ID NO: 2928 - protein, 25 aa, Artificial Sequence
  Cyclic GFR-binding peptide
MNRYKKLIVNSSDDFYLVSIANLKT

SEQ ID NO: 2929 - protein, 35 aa, Artificial Sequence
  Cyclic GFR-binding peptide
  MOD_RES (2)..(33)..(34): Xaa is C or S
KXSRVIMYHYKLVKPKRGVKYLISIPSLAQPVXXP

SEQ ID NO: 2930 - protein, 34 aa, Artificial Sequence
  Cyclic GFR-binding peptide
  MOD_RES (30)..(31): Xaa is C or S
VVMDQYNKLVVKENEDLYLMSIASLETPVXXAKP

SEQ ID NO: 2931 - protein, 24 aa, Artificial Sequence
  Cyclic GFR-binding peptide
VVMYHYKLVKPTRGVKYLISIPSL

SEQ ID NO: 2932 - protein, 31 aa, Artificial Sequence
  Cyclic GFR-binding peptide
  MOD_RES (29)..(30): Xaa is C or S
MGEQYNKLTPVGMDDLYLVSIASLKTPVXXA

SEQ ID NO: 2933 - protein, 29 aa, Artificial Sequence
  Cyclic GFR-binding peptide
GEVVMDRHKRLVVKENEDYYLMSTASLET

SEQ ID NO: 2934 - protein, 30 aa, Artificial Sequence
  Cyclic GFR-binding peptide
  MOD_RES (1)..(3): Xaa is C or S
XKXSKVVMRYKKLVKPTRGVFYLISIANLD

SEQ ID NO: 2935 - protein, 36 aa, Artificial Sequence
  Cyclic GFR-binding peptide
  MOD_RES (30)..(31): Xaa is C or S
KVVMRHKRLVKPTRGVYYLISTASLDQPVXXPSASA

SEQ ID NO: 2936 - protein, 32 aa, Artificial Sequence
  Cyclic GFR-binding peptide
  MOD_RES (28)..(29): Xaa is C or S
MNQYNKLIVNSSDDLYLVSIASLQTPAXXPKP

SEQ ID NO: 2937 - protein, 35 aa, Artificial Sequence
  Cyclic GFR-binding peptide
  MOD_RES (29)..(30): Xaa is C or S
VMDQYNKLVVKENEDLYLMSIASLETPVXXAKPIK

SEQ ID NO: 2938 - protein, 25 aa, Artificial Sequence
  Cyclic GFR-binding peptide
TRHKRLFIPKKRVIEYYLVSTASLQ

SEQ ID NO: 2939 - protein, 27 aa, Artificial Sequence
  Cyclic GFR-binding peptide
RVIMRYKKLVKPKRGVFYLISIANLAQ

SEQ ID NO: 2940 - protein, 31 aa, Artificial Sequence
  Cyclic GFR-binding peptide
  MOD_RES (27)..(28): Xaa is C or S
NYHYKLIVNSSDDKYLVSIPSLQTPAXXPKP

SEQ ID NO: 2941 - protein, 28 aa, Artificial Sequence
  Cyclic GFR-binding peptide
VVMNRYKKLIVNNSSDFYLVSIANLKTP

SEQ ID NO: 2942 - protein, 32 aa, Artificial Sequence
  Cyclic GFR-binding peptide
  MOD_RES (1)..(1): Xaa is C or S
XGEVVMDRYKKLVVKENEDFYLMSIANLETPV

SEQ ID NO: 2943 - protein, 33 aa, Artificial Sequence
  Cyclic GFR-binding peptide
  MOD_RES (2)..(4): Xaa is C or S
RXGXGEVVMDRHKRLVVKENEDYYLMSTASLET

SEQ ID NO: 2944 - protein, 30 aa, Artificial Sequence
  Cyclic GFR-binding peptide
  MOD_RES (1)..(3): Xaa is C or S
XGXAKVVMNQYNKLIVNNSSDLYLVSIASL

SEQ ID NO: 2945 - protein, 35 aa, Artificial Sequence
  Cyclic GFR-binding peptide
  MOD_RES (2)..(34)..(35): Xaa is C or S
GXAKVVMNYHYKLIVNNSSDKYLVSIPSLKTPAXX

SEQ ID NO: 2946 - protein, 32 aa, Artificial Sequence
  Cyclic GFR-binding peptide
DELTRHKRLFIPKKRVIEYYLVSTASLQVQTP

SEQ ID NO: 2947 - protein, 34 aa, Artificial Sequence
  Cyclic GFR-binding peptide
  MOD_RES (33)..(33): Xaa is C or S
ELTYHYKLFIPKKRVIEKYLVSIPSLQVQTPRXQ

SEQ ID NO: 2948 - protein, 31 aa, Artificial Sequence
  Cyclic GFR-binding peptide
  MOD_RES (28)..(29): Xaa is C or S
MERYKKLVVKDYEDFYLMSIANLETPVXXAK

SEQ ID NO: 2949 - protein, 35 aa, Artificial Sequence
  Cyclic GFR-binding peptide
  MOD_RES (30)..(31): Xaa is C or S
KVIMRYKKLIKPTKGIFYLISIANLDQSVXXPSAS

SEQ ID NO: 2950 - protein, 25 aa, Artificial Sequence
  Cyclic GFR-binding peptide
RYKKLFIPKKRVIEFYLVSIANLQV

SEQ ID NO: 2951 - protein, 28 aa, Artificial Sequence
  Cyclic GFR-binding peptide
  MOD_RES (2)..(2): Xaa is C or S
GXSRVVMNRYKKLIVNSSDDFYLVSIAN

SEQ ID NO: 2952 - protein, 35 aa, Artificial Sequence
  Cyclic GFR-binding peptide
  MOD_RES (32)..(33): Xaa is C or S
AVSMGERYKKLTPVGMDDFYLVSIANLKTPVXXAK

SEQ ID NO: 2953 - protein, 25 aa, Artificial Sequence
  Cyclic GFR-binding peptide
MRYKKLVKPTRGVFYLISIANLDQP

SEQ ID NO: 2954 - protein, 29 aa, Artificial Sequence
  Cyclic GFR-binding peptide
RVVMNYHYKLIVNSSDDKYLVSIPSLKTP

SEQ ID NO: 2955 - protein, 29 aa, Artificial Sequence
  Cyclic GFR-binding peptide
  MOD_RES (1)..(1): Xaa is C or S
XSKVIMRYKKLIKPTKGIFYLISIANLDQ

SEQ ID NO: 2956 - protein, 36 aa, Artificial Sequence
  Cyclic GFR-binding peptide
  MOD_RES (32)..(33): Xaa is C or S
GEVVMDRHKRLVVKENEDYYLMSTASLETPVXXAKP

SEQ ID NO: 2957 - protein, 34 aa, Artificial Sequence
  Cyclic GFR-binding peptide
  MOD_RES (2)..(4): Xaa is C or S
RXGXGEVVMDRYKKLVVKENEDFYLMSIANLETP

SEQ ID NO: 2958 - protein, 31 aa, Artificial Sequence
  Cyclic GFR-binding peptide
  MOD_RES (2)..(4): Xaa is C or S
SXKXSKVVMRYKKLVKPTRGVFYLISIANLD

SEQ ID NO: 2959 - protein, 26 aa, Artificial Sequence
  Cyclic GFR-binding peptide
DYHYKLVVKENEDKYLMSIPSLETPV

SEQ ID NO: 2960 - protein, 28 aa, Artificial Sequence
  Cyclic GFR-binding peptide
  MOD_RES (28)..(28): Xaa is C or S
MEQYNKLVVKDYEDLYLMSIASLETPVX

SEQ ID NO: 2961 - protein, 40 aa, Artificial Sequence
  Cyclic GFR-binding peptide
  MOD_RES (1)..(3)..(35)..(36): Xaa is C or S
XGXGEVVMEQYNKLVVKDYEDLYLMSIASLETPVXXAKPI

SEQ ID NO: 2962 - protein, 38 aa, Artificial Sequence
  Cyclic GFR-binding peptide
  MOD_RES (1)..(33)..(34): Xaa is C or S
XGEVVMEYHYKLVVKDYEDKYLMSIPSLETPVXXAKPI

SEQ ID NO: 2963 - protein, 36 aa, Artificial Sequence
  Cyclic GFR-binding peptide
  MOD_RES (2)..(4): Xaa is C or S
EXKXALHDELTYHYKLFIPKKRVIEKYLVSIPSLQV

SEQ ID NO: 2964 - protein, 30 aa, Artificial Sequence
  Cyclic GFR-binding peptide
  MOD_RES (28)..(29): Xaa is C or S
VMQYNKLVKPTRGVLYLISIASLDQPVXXP

SEQ ID NO: 2965 - protein, 39 aa, Artificial Sequence
  Cyclic GFR-binding peptide
  MOD_RES (2)..(34): Xaa is C or S
GXSRVVMNQYNKLIVNSSDDLYLVSIASLKTPAXTPKTV

SEQ ID NO: 2966 - protein, 39 aa, Artificial Sequence
  Cyclic GFR-binding peptide
  MOD_RES (35)..(35): Xaa is C or S
HDELTRHKRLFIPKKRVIEYYLVSTASLQVQTPRXQVNR

SEQ ID NO: 2967 - protein, 32 aa, Artificial Sequence
  Cyclic GFR-binding peptide
  MOD_RES (2)..(4): Xaa is C or S
SXKXSKVIMYHYKLIKPTKGIKYLISIPSLDQ

SEQ ID NO: 2968 - protein, 39 aa, Artificial Sequence
  Cyclic GFR-binding peptide
  MOD_RES (37)..(37): Xaa is C or S
ALHDELTYHYKLFIPKKRVIEKYLVSIPSLQVQTPRXQV

SEQ ID NO: 2969 - protein, 32 aa, Artificial Sequence
  Cyclic GFR-binding peptide
  MOD_RES (2)..(2): Xaa is C or S
KXALHDELTRHKRLFIPKKRVIEYYLVSTASL

SEQ ID NO: 2970 - protein, 29 aa, Artificial Sequence
  Cyclic GFR-binding peptide
  MOD_RES (29)..(29): Xaa is C or S
VIMYHYKLIKPTKGIKYLISIPSLDQSVX

SEQ ID NO: 2971 - protein, 27 aa, Artificial Sequence
  Cyclic GFR-binding peptide
ELTRHKRLFIPKKRVIEYYLVSTASLQ

SEQ ID NO: 2972 - protein, 27 aa, Artificial Sequence
  Cyclic GFR-binding peptide
SKVVMRHKRLVKPTRGVYYLISTASLD

SEQ ID NO: 2973 - protein, 28 aa, Artificial Sequence
  Cyclic GFR-binding peptide
  MOD_RES (28)..(28): Xaa is C or S
MNYHYKLIVNSSDDKYLVSIPSLQTPAX

SEQ ID NO: 2974 - protein, 35 aa, Artificial Sequence
  Cyclic GFR-binding peptide
  MOD_RES (1)..(33): Xaa is C or S
XSRVVMNYHYKLIVNSSDDKYLVSIPSLKTPAXTP

SEQ ID NO: 2975 - protein, 26 aa, Artificial Sequence
  Cyclic GFR-binding peptide
ELTYHYKLFIPKKRVIEKYLVSIPSL

SEQ ID NO: 2976 - protein, 40 aa, Artificial Sequence
  Cyclic GFR-binding peptide
  MOD_RES (2)..(34)..(35): Xaa is C or S
GXARVVMNQYNKLIVNSSDDLYLVSIASLQTPAXXPKPVT

SEQ ID NO: 2977 - protein, 34 aa, Artificial Sequence
  Cyclic GFR-binding peptide
  MOD_RES (2)..(33)..(34): Xaa is C or S
KXSRVIMRYKKLVKPKRGVFYLISIANLAQPVXX

SEQ ID NO: 2978 - protein, 27 aa, Artificial Sequence
  Cyclic GFR-binding peptide
VMNYHYKLIVNSSDDKYLVSIPSLQTP

SEQ ID NO: 2979 - protein, 31 aa, Artificial Sequence
  Cyclic GFR-binding peptide
  MOD_RES (31)..(31): Xaa is C or S
TYHYKLFIPKKRVIEKYLVSIPSLQVQTPRX

SEQ ID NO: 2980 - protein, 29 aa, Artificial Sequence
  Cyclic GFR-binding peptide
  MOD_RES (26)..(27): Xaa is C or S
QYNKLTPVGMDDLYLVSIASLKTPVXXAK

SEQ ID NO: 2981 - protein, 28 aa, Artificial Sequence
  Cyclic GFR-binding peptide
SKVIMQYNKLIKPTKGILYLISIASLDQ

SEQ ID NO: 2982 - protein, 36 aa, Artificial Sequence
  Cyclic GFR-binding peptide
  MOD_RES (30)..(31): Xaa is C or S
VVMEQYNKLVVKDYEDLYLMSIASLETPVXXAKPIS

SEQ ID NO: 2983 - protein, 34 aa, Artificial Sequence
  Cyclic GFR-binding peptide
  MOD_RES (29)..(30): Xaa is C or S
VVMRYKKLVKPTRGVFYLISIANLDQPVXXPSAS

SEQ ID NO: 2984 - protein, 32 aa, Artificial Sequence
  Cyclic GFR-binding peptide
  MOD_RES (30)..(31): Xaa is C or S
SMGERHKRLTPVGMDDYYLVSTASLKTPVXXA

SEQ ID NO: 2985 - protein, 33 aa, Artificial Sequence
  Cyclic GFR-binding peptide
  MOD_RES (2)..(4): Xaa is C or S
HXGXAKVVMNRYKKLIVNNSSDFYLVSIANLKT

SEQ ID NO: 2986 - protein, 40 aa, Artificial Sequence
  Cyclic GFR-binding peptide
  MOD_RES (36)..(36): Xaa is C or S
LHDELTRHKRLFIPKKRVIEYYLVSTASLQVQTPRXQVNR

SEQ ID NO: 2987 - protein, 26 aa, Artificial Sequence
  Cyclic GFR-binding peptide
  MOD_RES (1)..(1): Xaa is C or S
XSRVIMRHKRLVKPKRGVYYLISTAS

SEQ ID NO: 2988 - protein, 31 aa, Artificial Sequence
  Cyclic GFR-binding peptide
  MOD_RES (29)..(30): Xaa is C or S
VMEQYNKLVVKDYEDLYLMSIASLETPVXXA

SEQ ID NO: 2989 - protein, 37 aa, Artificial Sequence
  Cyclic GFR-binding peptide
  MOD_RES (37)..(37): Xaa is C or S
ALHDELTYHYKLFIPKKRVIEKYLVSIPSLQVQTPRX

SEQ ID NO: 2990 - protein, 24 aa, Artificial Sequence
  Cyclic GFR-binding peptide
VVMDQYNKLVVKENEDLYLMSIAS

SEQ ID NO: 2991 - protein, 29 aa, Artificial Sequence
  Cyclic GFR-binding peptide
  MOD_RES (26)..(27): Xaa is C or S
YHYKLIKPTKGIKYLISIPSLDQSVXXPS

SEQ ID NO: 2992 - protein, 22 aa, Artificial Sequence
  Cyclic GFR-binding peptide
MNRHKRLIVNSSDDYYLVSTAS

SEQ ID NO: 2993 - protein, 32 aa, Artificial Sequence
  Cyclic GFR-binding peptide
  MOD_RES (26)..(27): Xaa is C or S
RHKRLVKPTRGVYYLISTASLDQPVXXPSASA

SEQ ID NO: 2994 - protein, 33 aa, Artificial Sequence
  Cyclic GFR-binding peptide
  MOD_RES (27)..(27): Xaa is C or S
NQYNKLIVNSSDDLYLVSIASLKTPAXTPKTVH

SEQ ID NO: 2995 - protein, 32 aa, Artificial Sequence
  Cyclic GFR-binding peptide
  MOD_RES (32)..(32): Xaa is C or S
LTRYKKLFIPKKRVIEFYLVSIANLQVQTPRX

SEQ ID NO: 2996 - protein, 31 aa, Artificial Sequence
  Cyclic GFR-binding peptide
  MOD_RES (31)..(31): Xaa is C or S
EVVMERHKRLVVKDYEDYYLMSTASLETPVX

SEQ ID NO: 2997 - protein, 25 aa, Artificial Sequence
  Cyclic GFR-binding peptide
MNQYNKLIVNSSDDLYLVSIASLKT

SEQ ID NO: 2998 - protein, 36 aa, Artificial Sequence
  Cyclic GFR-binding peptide
  MOD_RES (1)..(3)..(34)..(35): Xaa is C or S
XKXSKVVMRYKKLVKPTRGVFYLISIANLDQPVXXP

SEQ ID NO: 2999 - protein, 27 aa, Artificial Sequence
  Cyclic GFR-binding peptide
AVSMGEQYNKLTPVGMDDLYLVSIASL

SEQ ID NO: 3000 - protein, 37 aa, Artificial Sequence
  Cyclic GFR-binding peptide
  MOD_RES (2)..(34)..(35): Xaa is C or S
GXARVVMNYHYKLIVNSSDDKYLVSIPSLQTPAXXPK

SEQ ID NO: 3001 - protein, 35 aa, Artificial Sequence
  Cyclic GFR-binding peptide
  MOD_RES (29)..(29): Xaa is C or S
VMNRYKKLIVNSSDDFYLVSIANLKTPAXTPKTVH

SEQ ID NO: 3002 - protein, 30 aa, Artificial Sequence
  Cyclic GFR-binding peptide
LTRYKKLFIPKKRVIEFYLVSIANLQVQTP

SEQ ID NO: 3003 - protein, 35 aa, Artificial Sequence
  Cyclic GFR-binding peptide
  MOD_RES (30)..(31): Xaa is C or S
VVMNYHYKLIVNSSDDKYLVSIPSLQTPAXXPKPV

SEQ ID NO: 3004 - protein, 39 aa, Artificial Sequence
  Cyclic GFR-binding peptide
  MOD_RES (2)..(39): Xaa is C or S
KXALHDELTRYKKLFIPKKRVIEFYLVSIANLQVQTPRX

SEQ ID NO: 3005 - protein, 30 aa, Artificial Sequence
  Cyclic GFR-binding peptide
  MOD_RES (1)..(3): Xaa is C or S
XGXSRVVMNYHYKLIVNSSDDKYLVSIPSL

SEQ ID NO: 3006 - protein, 34 aa, Artificial Sequence
  Cyclic GFR-binding peptide
  MOD_RES (31)..(32): Xaa is C or S
EVVMERHKRLVVKDYEDYYLMSTASLETPVXXAK

SEQ ID NO: 3007 - protein, 35 aa, Artificial Sequence
  Cyclic GFR-binding peptide
  MOD_RES (1)..(33): Xaa is C or S
XSRVVMNRYKKLIVNSSDDFYLVSIANLKTPAXTP

SEQ ID NO: 3008 - protein, 36 aa, Artificial Sequence
  Cyclic GFR-binding peptide
  MOD_RES (30)..(31): Xaa is C or S
KVIMRYKKLIKPTKGIFYLISIANLDQSVXXPSASA

SEQ ID NO: 3009 - protein, 29 aa, Artificial Sequence
  Cyclic GFR-binding peptide
VVMEQYNKLVVKDYEDLYLMSIASLETPV

SEQ ID NO: 3010 - protein, 30 aa, Artificial Sequence
  Cyclic GFR-binding peptide
  MOD_RES (28)..(29): Xaa is C or S
MNQYNKLIVNNSSDLYLVSIASLKTPAXXA

SEQ ID NO: 3011 - protein, 32 aa, Artificial Sequence
  Cyclic GFR-binding peptide
  MOD_RES (2)..(2): Xaa is C or S
GXSRVVMNYHYKLIVNSSDDKYLVSIPSLKTP

SEQ ID NO: 3012 - protein, 25 aa, Artificial Sequence
  Cyclic GFR-binding peptide
QYNKLVKPTRGVLYLISIASLDQPV

SEQ ID NO: 3013 - protein, 33 aa, Artificial Sequence
  Cyclic GFR-binding peptide
  MOD_RES (2)..(2): Xaa is C or S
GXEAVSMGERHKRLTPVGMDDYYLVSTASLKTP

SEQ ID NO: 3014 - protein, 33 aa, Artificial Sequence
  Cyclic GFR-binding peptide
  MOD_RES (27)..(28): Xaa is C or S
NRHKRLIVNSSDDYYLVSTASLQTPAXXPKPVT

SEQ ID NO: 3015 - protein, 28 aa, Artificial Sequence
  Cyclic GFR-binding peptide
  MOD_RES (1)..(1): Xaa is C or S
XARVVMNRHKRLIVNSSDDYYLVSTASL

SEQ ID NO: 3016 - protein, 31 aa, Artificial Sequence
  Cyclic GFR-binding peptide
  MOD_RES (29)..(30): Xaa is C or S
VMNRYKKLIVNNSSDFYLVSIANLKTPAXXA

SEQ ID NO: 3017 - protein, 32 aa, Artificial Sequence
  Cyclic GFR-binding peptide
  MOD_RES (26)..(27): Xaa is C or S
RYKKLIKPTKGIFYLISIANLDQSVXXPSASA

SEQ ID NO: 3018 - protein, 38 aa, Artificial Sequence
  Cyclic GFR-binding peptide
  MOD_RES (1)..(3)..(35)..(36): Xaa is C or S
XGXARVVMNQYNKLIVNSSDDLYLVSIASLQTPAXXPK

SEQ ID NO: 3019 - protein, 33 aa, Artificial Sequence
  Cyclic GFR-binding peptide
  MOD_RES (2)..(33): Xaa is C or S
KXSKVVMRHKRLVKPTRGVYYLISTASLDQPVX

SEQ ID NO: 3020 - protein, 28 aa, Artificial Sequence
  Cyclic GFR-binding peptide
VVMERHKRLVVKDYEDYYLMSTASLETP

SEQ ID NO: 3021 - protein, 25 aa, Artificial Sequence
  Cyclic GFR-binding peptide
RYKKLVKPKRGVFYLISIANLAQPV

SEQ ID NO: 3022 - protein, 39 aa, Artificial Sequence
  Cyclic GFR-binding peptide
  MOD_RES (1)..(3)..(35)..(36): Xaa is C or S
XGXGEVVMDRHKRLVVKENEDYYLMSTASLETPVXXAKP

SEQ ID NO: 3023 - protein, 37 aa, Artificial Sequence
  Cyclic GFR-binding peptide
  MOD_RES (1)..(1): Xaa is C or S
XALHDELTRHKRLFIPKKRVIEYYLVSTASLQVQTPR

SEQ ID NO: 3024 - protein, 31 aa, Artificial Sequence
  Cyclic GFR-binding peptide
  MOD_RES (27)..(28): Xaa is C or S
ERYKKLTPVGMDDFYLVSIANLKTPVXXAKG

SEQ ID NO: 3025 - protein, 33 aa, Artificial Sequence
  Cyclic GFR-binding peptide
  MOD_RES (1)..(3): Xaa is C or S
XGXSRVVMNRHKRLIVNSSDDYYLVSTASLKTP

SEQ ID NO: 3026 - protein, 26 aa, Artificial Sequence
  Cyclic GFR-binding peptide
GEVVMERYKKLVVKDYEDFYLMSIAN

SEQ ID NO: 3027 - protein, 35 aa, Artificial Sequence
  Cyclic GFR-binding peptide
  MOD_RES (1)..(1): Xaa is C or S
XALHDELTYHYKLFIPKKRVIEKYLVSIPSLQVQT

SEQ ID NO: 3028 - protein, 28 aa, Artificial Sequence
  Cyclic GFR-binding peptide
  MOD_RES (26)..(27): Xaa is C or S
RHKRLVVKDYEDYYLMSTASLETPVXXA

SEQ ID NO: 3029 - protein, 31 aa, Artificial Sequence
  Cyclic GFR-binding peptide
FIPKKRVIEQYNKLFIPKKRVIELYLVSIAS

SEQ ID NO: 3030 - protein, 29 aa, Artificial Sequence
  Cyclic GFR-binding peptide
VVMNRYKKLIVNNSSDFYLVSIANLKTPA

SEQ ID NO: 3031 - protein, 30 aa, Artificial Sequence
  Cyclic GFR-binding peptide
  MOD_RES (1)..(3): Xaa is C or S
XKXSRVIMYHYKLVKPKRGVKYLISIPSLA

SEQ ID NO: 3032 - protein, 36 aa, Artificial Sequence
  Cyclic GFR-binding peptide
  MOD_RES (2)..(4)..(36): Xaa is C or S
HXGXARVVMNRYKKLIVNSSDDFYLVSIANLQTPAX

SEQ ID NO: 3033 - protein, 25 aa, Artificial Sequence
  Cyclic GFR-binding peptide
RYKKLIKPTKGIFYLISIANLDQSV

SEQ ID NO: 3034 - protein, 34 aa, Artificial Sequence
  Cyclic GFR-binding peptide
  MOD_RES (28)..(29): Xaa is C or S
MEQYNKLVVKDYEDLYLMSIASLETPVXXAKPIS

SEQ ID NO: 3035 - protein, 31 aa, Artificial Sequence
  Cyclic GFR-binding peptide
  MOD_RES (26)..(27): Xaa is C or S
RYKKLVVKENEDFYLMSIANLETPVXXAKPI

SEQ ID NO: 3036 - protein, 26 aa, Artificial Sequence
  Cyclic GFR-binding peptide
VMNYHYKLIVNNSSDKYLVSIPSLKT

SEQ ID NO: 3037 - protein, 33 aa, Artificial Sequence
  Cyclic GFR-binding peptide
  MOD_RES (32)..(33): Xaa is C or S
ARVVMNRYKKLIVNSSDDFYLVSIANLQTPAXX

SEQ ID NO: 3038 - protein, 39 aa, Artificial Sequence
  Cyclic GFR-binding peptide
  MOD_RES (36)..(36): Xaa is C or S
LHDELTRYKKLFIPKKRVIEFYLVSIANLQVQTPRXQVN

SEQ ID NO: 3039 - protein, 30 aa, Artificial Sequence
  Cyclic GFR-binding peptide
  MOD_RES (2)..(2): Xaa is C or S
GXSRVVMNQYNKLIVNSSDDLYLVSIASLK

SEQ ID NO: 3040 - protein, 37 aa, Artificial Sequence
  Cyclic GFR-binding peptide
  MOD_RES (1)..(34)..(35): Xaa is C or S
XEAVSMGEQYNKLTPVGMDDLYLVSIASLKTPVXXAK

SEQ ID NO: 3041 - protein, 24 aa, Artificial Sequence
  Cyclic GFR-binding peptide
SMGERHKRLTPVGMDDYYLVSTAS

SEQ ID NO: 3042 - protein, 29 aa, Artificial Sequence
  Cyclic GFR-binding peptide
DELTRHKRLFIPKKRVIEYYLVSTASLQV

SEQ ID NO: 3043 - protein, 28 aa, Artificial Sequence
  Cyclic GFR-binding peptide
  MOD_RES (28)..(28): Xaa is C or S
GERHKRLTPVGMDDYYLVSTASLKTPVX

SEQ ID NO: 3044 - protein, 23 aa, Artificial Sequence
  Cyclic GFR-binding peptide
NRHKRLIVNSSDDYYLVSTASLQ

SEQ ID NO: 3045 - protein, 36 aa, Artificial Sequence
  Cyclic GFR-binding peptide
  MOD_RES (35)..(35): Xaa is C or S
HDELTRYKKLFIPKKRVIEFYLVSIANLQVQTPRXQ

SEQ ID NO: 3046 - protein, 23 aa, Artificial Sequence
  Cyclic GFR-binding peptide
NYHYKLIVNNSSDKYLVSIPSLK

SEQ ID NO: 3047 - protein, 36 aa, Artificial Sequence
  Cyclic GFR-binding peptide
  MOD_RES (31)..(32): Xaa is C or S
KVVMNRYKKLIVNNSSDFYLVSIANLKTPAXXAKPV

SEQ ID NO: 3048 - protein, 28 aa, Artificial Sequence
  Cyclic GFR-binding peptide
VMEYHYKLVVKDYEDKYLMSIPSLETPV

SEQ ID NO: 3049 - protein, 28 aa, Artificial Sequence
  Cyclic GFR-binding peptide
  MOD_RES (28)..(28): Xaa is C or S
MERYKKLVVKDYEDFYLMSIANLETPVX

SEQ ID NO: 3050 - protein, 27 aa, Artificial Sequence
  Cyclic GFR-binding peptide
MNRYKKLIVNSSDDFYLVSIANLKTPA

SEQ ID NO: 3051 - protein, 39 aa, Artificial Sequence
  Cyclic GFR-binding peptide
  MOD_RES (1)..(3)..(35)..(36): Xaa is C or S
XGXARVVMNQYNKLIVNSSDDLYLVSIASLQTPAXXPKP

SEQ ID NO: 3052 - protein, 25 aa, Artificial Sequence
  Cyclic GFR-binding peptide
MNRYKKLIVNSSDDFYLVSIANLQT

SEQ ID NO: 3053 - protein, 23 aa, Artificial Sequence
  Cyclic GFR-binding peptide
VIMRHKRLVKPKRGVYYLISTAS

SEQ ID NO: 3054 - protein, 33 aa, Artificial Sequence
  Cyclic GFR-binding peptide
  MOD_RES (2)..(2): Xaa is C or S
GXARVVMNRYKKLIVNSSDDFYLVSIANLQTPA

SEQ ID NO: 3055 - protein, 38 aa, Artificial Sequence
  Cyclic GFR-binding peptide
  MOD_RES (1)..(3)..(35)..(36): Xaa is C or S
XGXGEVVMDRHKRLVVKENEDYYLMSTASLETPVXXAK

SEQ ID NO: 3056 - protein, 32 aa, Artificial Sequence
  Cyclic GFR-binding peptide
  MOD_RES (29)..(30): Xaa is C or S
VVMRYKKLVKPTRGVFYLISIANLDQPVXXPS

SEQ ID NO: 3057 - protein, 38 aa, Artificial Sequence
  Cyclic GFR-binding peptide
  MOD_RES (1)..(3)..(34)..(35): Xaa is C or S
XKXSRVIMRYKKLVKPKRGVFYLISIANLAQPVXXPAA

SEQ ID NO: 3058 - protein, 26 aa, Artificial Sequence
  Cyclic GFR-binding peptide
NRYKKLIVNNSSDFYLVSIANLKTPA

SEQ ID NO: 3059 - protein, 26 aa, Artificial Sequence
  Cyclic GFR-binding peptide
VMNRHKRLIVNSSDDYYLVSTASLKT

SEQ ID NO: 3060 - protein, 23 aa, Artificial Sequence
  Cyclic GFR-binding peptide
ERHKRLVVKDYEDYYLMSTASLE

SEQ ID NO: 3061 - protein, 37 aa, Artificial Sequence
  Cyclic GFR-binding peptide
  MOD_RES (2)..(4)..(35)..(36): Xaa is C or S
SXKXSKVVMYHYKLVKPTRGVKYLISIPSLDQPVXXP

SEQ ID NO: 3062 - protein, 27 aa, Artificial Sequence
  Cyclic GFR-binding peptide
QYNKLFIPKKRVIELYLVSIASLQVQT

SEQ ID NO: 3063 - protein, 40 aa, Artificial Sequence
  Cyclic GFR-binding peptide
  MOD_RES (1)..(3)..(35)..(36): Xaa is C or S
XGXSRVVMNQYNKLIVNSSDDLYLVSIASLKTPAXXPKPV

SEQ ID NO: 3064 - protein, 42 aa, Artificial Sequence
  Cyclic GFR-binding peptide
  MOD_RES (2)..(4)..(36)..(37): Xaa is C or S
HXGXAKVVMNYHYKLIVNNSSDKYLVSIPSLKTPAXXAKPVA

SEQ ID NO: 3065 - protein, 26 aa, Artificial Sequence
  Cyclic GFR-binding peptide
MRHKRLVKPTRGVYYLISTASLDQPV

SEQ ID NO: 3066 - protein, 37 aa, Artificial Sequence
  Cyclic GFR-binding peptide
  MOD_RES (32)..(33): Xaa is C or S
GEVVMERHKRLVVKDYEDYYLMSTASLETPVXXAKPI

SEQ ID NO: 3067 - protein, 34 aa, Artificial Sequence
  Cyclic GFR-binding peptide
  MOD_RES (1)..(3): Xaa is C or S
XGXGEVVMDRYKKLVVKENEDFYLMSIANLETPV

SEQ ID NO: 3068 - protein, 28 aa, Artificial Sequence
  Cyclic GFR-binding peptide
VMNQYNKLIVNSSDDLYLVSIASLQTPA

SEQ ID NO: 3069 - protein, 34 aa, Artificial Sequence
  Cyclic GFR-binding peptide
  MOD_RES (2)..(4): Xaa is C or S
RXGXGEVVMEQYNKLVVKDYEDLYLMSIASLETP

SEQ ID NO: 3070 - protein, 42 aa, Artificial Sequence
  Cyclic GFR-binding peptide
  MOD_RES (2)..(4)..(36)..(37): Xaa is C or S
HXGXARVVMNRYKKLIVNSSDDFYLVSIANLQTPAXXPKPVT

SEQ ID NO: 3071 - protein, 34 aa, Artificial Sequence
  Cyclic GFR-binding peptide
  MOD_RES (29)..(30): Xaa is C or S
VMERHKRLVVKDYEDYYLMSTASLETPVXXAKPI

SEQ ID NO: 3072 - protein, 30 aa, Artificial Sequence
  Cyclic GFR-binding peptide
  MOD_RES (2)..(2): Xaa is C or S
GXAKVVMNRYKKLIVNNSSDFYLVSIANLK

SEQ ID NO: 3073 - protein, 28 aa, Artificial Sequence
  Cyclic GFR-binding peptide
DELTRHKRLFIPKKRVIEYYLVSTASLQ

SEQ ID NO: 3074 - protein, 30 aa, Artificial Sequence
  Cyclic GFR-binding peptide
  MOD_RES (30)..(30): Xaa is C or S
SMGEQYNKLTPVGMDDLYLVSIASLKTPVX

SEQ ID NO: 3075 - protein, 25 aa, Artificial Sequence
  Cyclic GFR-binding peptide
VMNRYKKLIVNSSDDFYLVSIANLK

SEQ ID NO: 3076 - protein, 36 aa, Artificial Sequence
  Cyclic GFR-binding peptide
  MOD_RES (2)..(34)..(35): Xaa is C or S
GXGEVVMERYKKLVVKDYEDFYLMSIANLETPVXXA

SEQ ID NO: 3077 - protein, 27 aa, Artificial Sequence
  Cyclic GFR-binding peptide
GERYKKLTPVGMDDFYLVSIANLKTPV

SEQ ID NO: 3078 - protein, 37 aa, Artificial Sequence
  Cyclic GFR-binding peptide
  MOD_RES (2)..(4)..(35)..(36): Xaa is C or S
SXKXSRVIMQYNKLVKPKRGVLYLISIASLAQPVXXP

SEQ ID NO: 3079 - protein, 34 aa, Artificial Sequence
  Cyclic GFR-binding peptide
  MOD_RES (30)..(31): Xaa is C or S
VVMNRYKKLIVNNSSDFYLVSIANLKTPAXXAKP

SEQ ID NO: 3080 - protein, 36 aa, Artificial Sequence
  Cyclic GFR-binding peptide
  MOD_RES (31)..(32): Xaa is C or S
RVVMNYHYKLIVNSSDDKYLVSIPSLQTPAXXPKPV

SEQ ID NO: 3081 - protein, 27 aa, Artificial Sequence
  Cyclic GFR-binding peptide
  MOD_RES (1)..(1): Xaa is C or S
XARVVMNRYKKLIVNSSDDFYLVSIAN

SEQ ID NO: 3082 - protein, 31 aa, Artificial Sequence
  Cyclic GFR-binding peptide
  MOD_RES (28)..(29): Xaa is C or S
GERHKRLTPVGMDDYYLVSTASLKTPVXXAK

SEQ ID NO: 3083 - protein, 29 aa, Artificial Sequence
  Cyclic GFR-binding peptide
SKVIMYHYKLIKPTKGIKYLISIPSLDQS

SEQ ID NO: 3084 - protein, 31 aa, Artificial Sequence
  Cyclic GFR-binding peptide
  MOD_RES (28)..(29): Xaa is C or S
VMYHYKLVKPTRGVKYLISIPSLDQPVXXPS

SEQ ID NO: 3085 - protein, 33 aa, Artificial Sequence
  Cyclic GFR-binding peptide
  MOD_RES (1)..(3): Xaa is C or S
XGXARVVMNRHKRLIVNSSDDYYLVSTASLQTP

SEQ ID NO: 3086 - protein, 34 aa, Artificial Sequence
  Cyclic GFR-binding peptide
  MOD_RES (1)..(33)..(34): Xaa is C or S
XSRVVMNYHYKLIVNSSDDKYLVSIPSLKTPAXX

SEQ ID NO: 3087 - protein, 35 aa, Artificial Sequence
  Cyclic GFR-binding peptide
  MOD_RES (29)..(30): Xaa is C or S
MGERYKKLTPVGMDDFYLVSIANLKTPVXXAKGVK

SEQ ID NO: 3088 - protein, 32 aa, Artificial Sequence
  Cyclic GFR-binding peptide
  MOD_RES (2)..(2): Xaa is C or S
KXALHDELTQYNKLFIPKKRVIELYLVSIASL

SEQ ID NO: 3089 - protein, 32 aa, Artificial Sequence
  Cyclic GFR-binding peptide
  MOD_RES (1)..(1): Xaa is C or S
XGEVVMDYHYKLVVKENEDKYLMSIPSLETPV

SEQ ID NO: 3090 - protein, 32 aa, Artificial Sequence
  Cyclic GFR-binding peptide
  MOD_RES (2)..(4): Xaa is C or S
SXKXSRVIMQYNKLVKPKRGVLYLISIASLAQ

SEQ ID NO: 3091 - protein, 34 aa, Artificial Sequence
  Cyclic GFR-binding peptide
  MOD_RES (32)..(33): Xaa is C or S
SRVVMNRYKKLIVNSSDDFYLVSIANLKTPAXXP

SEQ ID NO: 3092 - protein, 35 aa, Artificial Sequence
  Cyclic GFR-binding peptide
  MOD_RES (31)..(32): Xaa is C or S
SRVIMRYKKLVKPKRGVFYLISIANLAQPVXXPAA

SEQ ID NO: 3093 - protein, 33 aa, Artificial Sequence
  Cyclic GFR-binding peptide
  MOD_RES (31)..(32): Xaa is C or S
KVVMNYHYKLIVNNSSDKYLVSIPSLKTPAXXA

SEQ ID NO: 3094 - protein, 40 aa, Artificial Sequence
  Cyclic GFR-binding peptide
  MOD_RES (2)..(35)..(36): Xaa is C or S
GXEAVSMGERYKKLTPVGMDDFYLVSIANLKTPVXXAKGV

SEQ ID NO: 3095 - protein, 24 aa, Artificial Sequence
  Cyclic GFR-binding peptide
VMNQYNKLIVNSSDDLYLVSIASL

SEQ ID NO: 3096 - protein, 35 aa, Artificial Sequence
  Cyclic GFR-binding peptide
  MOD_RES (1)..(34)..(35): Xaa is C or S
XEAVSMGERHKRLTPVGMDDYYLVSTASLKTPVXX

SEQ ID NO: 3097 - protein, 34 aa, Artificial Sequence
  Cyclic GFR-binding peptide
  MOD_RES (2)..(33)..(34): Xaa is C or S
KXSRVIMYHYKLVKPKRGVKYLISIPSLAQPVXX

SEQ ID NO: 3098 - protein, 37 aa, Artificial Sequence
  Cyclic GFR-binding peptide
  MOD_RES (32)..(32): Xaa is C or S
SRVVMNRYKKLIVNSSDDFYLVSIANLKTPAXTPKTV

SEQ ID NO: 3099 - protein, 33 aa, Artificial Sequence
  Cyclic GFR-binding peptide
  MOD_RES (2)..(2): Xaa is C or S
KXALHDELTQYNKLFIPKKRVIELYLVSIASLQ

SEQ ID NO: 3100 - protein, 33 aa, Artificial Sequence
  Cyclic GFR-binding peptide
  MOD_RES (2)..(4): Xaa is C or S
EXKXALHDELTQYNKLFIPKKRVIELYLVSIAS

SEQ ID NO: 3101 - protein, 37 aa, Artificial Sequence
  Cyclic GFR-binding peptide
  MOD_RES (2)..(4)..(36): Xaa is C or S
HXGXSRVVMNQYNKLIVNSSDDLYLVSIASLKTPAXT

SEQ ID NO: 3102 - protein, 36 aa, Artificial Sequence
  Cyclic GFR-binding peptide
  MOD_RES (31)..(32): Xaa is C or S
RVVMNRHKRLIVNSSDDYYLVSTASLKTPAXXPKPV

SEQ ID NO: 3103 - protein, 32 aa, Artificial Sequence
  Cyclic GFR-binding peptide
  MOD_RES (2)..(2): Xaa is C or S
GXARVVMNYHYKLIVNSSDDKYLVSIPSLQTP

SEQ ID NO: 3104 - protein, 28 aa, Artificial Sequence
  Cyclic GFR-binding peptide
VIMYHYKLIKPTKGIKYLISIPSLDQSV

SEQ ID NO: 3105 - protein, 29 aa, Artificial Sequence
  Cyclic GFR-binding peptide
  MOD_RES (28)..(29): Xaa is C or S
MDYHYKLVVKENEDKYLMSIPSLETPVXX

SEQ ID NO: 3106 - protein, 28 aa, Artificial Sequence
  Cyclic GFR-binding peptide
  MOD_RES (1)..(1): Xaa is C or S
XSKVVMYHYKLVKPTRGVKYLISIPSLD

SEQ ID NO: 3107 - protein, 27 aa, Artificial Sequence
  Cyclic GFR-binding peptide
  MOD_RES (2)..(2): Xaa is C or S
KXSKVVMQYNKLVKPTRGVLYLISIAS

SEQ ID NO: 3108 - protein, 29 aa, Artificial Sequence
  Cyclic GFR-binding peptide
  MOD_RES (1)..(3): Xaa is C or S
XGXSRVVMNRYKKLIVNSSDDFYLVSIAN

SEQ ID NO: 3109 - protein, 28 aa, Artificial Sequence
  Cyclic GFR-binding peptide
  MOD_RES (2)..(2): Xaa is C or S
GXGEVVMERHKRLVVKDYEDYYLMSTAS

SEQ ID NO: 3110 - protein, 24 aa, Artificial Sequence
  Cyclic GFR-binding peptide
MNYHYKLIVNSSDDKYLVSIPSLQ

SEQ ID NO: 3111 - protein, 35 aa, Artificial Sequence
  Cyclic GFR-binding peptide
  MOD_RES (1)..(33)..(34): Xaa is C or S
XGEVVMDRYKKLVVKENEDFYLMSIANLETPVXXA

SEQ ID NO: 3112 - protein, 27 aa, Artificial Sequence
  Cyclic GFR-binding peptide
VVMNQYNKLIVNSSDDLYLVSIASLQT

SEQ ID NO: 3113 - protein, 31 aa, Artificial Sequence
  Cyclic GFR-binding peptide
  MOD_RES (26)..(27): Xaa is C or S
YHYKLVKPKRGVKYLISIPSLAQPVXXPAAS

SEQ ID NO: 3114 - protein, 35 aa, Artificial Sequence
  Cyclic GFR-binding peptide
  MOD_RES (1)..(33)..(34): Xaa is C or S
XGEVVMDYHYKLVVKENEDKYLMSIPSLETPVXXA

SEQ ID NO: 3115 - protein, 29 aa, Artificial Sequence
  Cyclic GFR-binding peptide
VVMNYHYKLIVNNSSDKYLVSIPSLKTPA

SEQ ID NO: 3116 - protein, 23 aa, Artificial Sequence
  Cyclic GFR-binding peptide
MGERYKKLTPVGMDDFYLVSIAN

SEQ ID NO: 3117 - protein, 35 aa, Artificial Sequence
  Cyclic GFR-binding peptide
  MOD_RES (1)..(3)..(34)..(35): Xaa is C or S
XKXSKVIMRYKKLIKPTKGIFYLISIANLDQSVXX

SEQ ID NO: 3118 - protein, 29 aa, Artificial Sequence
  Cyclic GFR-binding peptide
SKVIMQYNKLIKPTKGILYLISIASLDQS

SEQ ID NO: 3119 - protein, 27 aa, Artificial Sequence
  Cyclic GFR-binding peptide
VIMRHKRLVKPKRGVYYLISTASLAQP

SEQ ID NO: 3120 - protein, 27 aa, Artificial Sequence
  Cyclic GFR-binding peptide
MEQYNKLVVKDYEDLYLMSIASLETPV

SEQ ID NO: 3121 - protein, 32 aa, Artificial Sequence
  Cyclic GFR-binding peptide
  MOD_RES (1)..(1): Xaa is C or S
XALHDELTRYKKLFIPKKRVIEFYLVSIANLQ

SEQ ID NO: 3122 - protein, 32 aa, Artificial Sequence
  Cyclic GFR-binding peptide
  MOD_RES (31)..(32): Xaa is C or S
EVVMERHKRLVVKDYEDYYLMSTASLETPVXX

SEQ ID NO: 3123 - protein, 43 aa, Artificial Sequence
  Cyclic GFR-binding peptide
  MOD_RES (1)..(3)..(40): Xaa is C or S
XKXALHDELTRYKKLFIPKKRVIEFYLVSIANLQVQTPRXQVN

SEQ ID NO: 3124 - protein, 33 aa, Artificial Sequence
  Cyclic GFR-binding peptide
  MOD_RES (1)..(32)..(33): Xaa is C or S
XSRVIMYHYKLVKPKRGVKYLISIPSLAQPVXX

SEQ ID NO: 3125 - protein, 27 aa, Artificial Sequence
  Cyclic GFR-binding peptide
AVSMGERYKKLTPVGMDDFYLVSIANL

SEQ ID NO: 3126 - protein, 38 aa, Artificial Sequence
  Cyclic GFR-binding peptide
  MOD_RES (1)..(33): Xaa is C or S
XSRVVMNQYNKLIVNSSDDLYLVSIASLKTPAXTPKTV

SEQ ID NO: 3127 - protein, 20 aa, Artificial Sequence
  Cyclic GFR-binding peptide
RYKKLIVNNSSDFYLVSIAN

SEQ ID NO: 3128 - protein, 35 aa, Artificial Sequence
  Cyclic GFR-binding peptide
  MOD_RES (1)..(3)..(34)..(35): Xaa is C or S
XKXSRVIMRYKKLVKPKRGVFYLISIANLAQPVXX

SEQ ID NO: 3129 - protein, 27 aa, Artificial Sequence
  Cyclic GFR-binding peptide
MNYHYKLIVNSSDDKYLVSIPSLQTPA

SEQ ID NO: 3130 - protein, 30 aa, Artificial Sequence
  Cyclic GFR-binding peptide
  MOD_RES (27)..(28): Xaa is C or S
DYHYKLVVKENEDKYLMSIPSLETPVXXAK

SEQ ID NO: 3131 - protein, 25 aa, Artificial Sequence
  Cyclic GFR-binding peptide
VVMRYKKLVKPTRGVFYLISIANLD

SEQ ID NO: 3132 - protein, 32 aa, Artificial Sequence
  Cyclic GFR-binding peptide
  MOD_RES (26)..(27): Xaa is C or S
QYNKLIVNNSSDLYLVSIASLKTPAXXAKPVA

SEQ ID NO: 3133 - protein, 25 aa, Artificial Sequence
  Cyclic GFR-binding peptide
MYHYKLIKPTKGIKYLISIPSLDQS

SEQ ID NO: 3134 - protein, 27 aa, Artificial Sequence
  Cyclic GFR-binding peptide
VVMEYHYKLVVKDYEDKYLMSIPSLET

SEQ ID NO: 3135 - protein, 44 aa, Artificial Sequence
  Cyclic GFR-binding peptide
  MOD_RES (1)..(3)..(40): Xaa is C or S
XKXALHDELTQYNKLFIPKKRVIELYLVSIASLQVQTPRXQVNR

SEQ ID NO: 3136 - protein, 27 aa, Artificial Sequence
  Cyclic GFR-binding peptide
RHKRLFIPKKRVIEYYLVSTASLQVQT

SEQ ID NO: 3137 - protein, 23 aa, Artificial Sequence
  Cyclic GFR-binding peptide
MNRYKKLIVNNSSDFYLVSIANL

SEQ ID NO: 3138 - protein, 30 aa, Artificial Sequence
  Cyclic GFR-binding peptide
  MOD_RES (1)..(3): Xaa is C or S
XKXSRVIMRHKRLVKPKRGVYYLISTASLA

SEQ ID NO: 3139 - protein, 27 aa, Artificial Sequence
  Cyclic GFR-binding peptide
  MOD_RES (1)..(1): Xaa is C or S
XARVVMNYHYKLIVNSSDDKYLVSIPS

SEQ ID NO: 3140 - protein, 33 aa, Artificial Sequence
  Cyclic GFR-binding peptide
  MOD_RES (32)..(33): Xaa is C or S
AVSMGERHKRLTPVGMDDYYLVSTASLKTPVXX

SEQ ID NO: 3141 - protein, 24 aa, Artificial Sequence
  Cyclic GFR-binding peptide
VIMQYNKLVKPKRGVLYLISIASL

SEQ ID NO: 3142 - protein, 41 aa, Artificial Sequence
  Cyclic GFR-binding peptide
  MOD_RES (1)..(3)..(35): Xaa is C or S
XGXSRVVMNQYNKLIVNSSDDLYLVSIASLKTPAXTPKTVH

SEQ ID NO: 3143 - protein, 34 aa, Artificial Sequence
  Cyclic GFR-binding peptide
  MOD_RES (1)..(3): Xaa is C or S
XGXGEVVMERYKKLVVKDYEDFYLMSIANLETPV

SEQ ID NO: 3144 - protein, 22 aa, Artificial Sequence
  Cyclic GFR-binding peptide
QYNKLVKPTRGVLYLISIASLD

SEQ ID NO: 3145 - protein, 34 aa, Artificial Sequence
  Cyclic GFR-binding peptide
  MOD_RES (28)..(28): Xaa is C or S
MNRYKKLIVNSSDDFYLVSIANLKTPAXTPKTVH

SEQ ID NO: 3146 - protein, 31 aa, Artificial Sequence
  Cyclic GFR-binding peptide
  MOD_RES (2)..(4): Xaa is C or S
RXGXEAVSMGEYHYKLTPVGMDDKYLVSIPS

SEQ ID NO: 3147 - protein, 28 aa, Artificial Sequence
  Cyclic GFR-binding peptide
KVIMYHYKLIKPTKGIKYLISIPSLDQS

SEQ ID NO: 3148 - protein, 34 aa, Artificial Sequence
  Cyclic GFR-binding peptide
  MOD_RES (31)..(32): Xaa is C or S
SKVIMRHKRLIKPTKGIYYLISTASLDQSVXXPS

SEQ ID NO: 3149 - protein, 38 aa, Artificial Sequence
  Cyclic GFR-binding peptide
  MOD_RES (2)..(2): Xaa is C or S
KXALHDELTQYNKLFIPKKRVIELYLVSIASLQVQTPR

SEQ ID NO: 3150 - protein, 39 aa, Artificial Sequence
  Cyclic GFR-binding peptide
  MOD_RES (2)..(4)..(36)..(37): Xaa is C or S
RXGXGEVVMDRYKKLVVKENEDFYLMSIANLETPVXXAK

SEQ ID NO: 3151 - protein, 25 aa, Artificial Sequence
  Cyclic GFR-binding peptide
QYNKLTPVGMDDLYLVSIASLKTPV

SEQ ID NO: 3152 - protein, 28 aa, Artificial Sequence
  Cyclic GFR-binding peptide
LTRYKKLFIPKKRVIEFYLVSIANLQVQ

SEQ ID NO: 3153 - protein, 27 aa, Artificial Sequence
  Cyclic GFR-binding peptide
SRVVMNQYNKLIVNSSDDLYLVSIASL

SEQ ID NO: 3154 - protein, 28 aa, Artificial Sequence
  Cyclic GFR-binding peptide
  MOD_RES (28)..(28): Xaa is C or S
MNYHYKLIVNSSDDKYLVSIPSLKTPAX

SEQ ID NO: 3155 - protein, 41 aa, Artificial Sequence
  Cyclic GFR-binding peptide
  MOD_RES (1)..(3)..(35)..(36): Xaa is C or S
XGXGEVVMEYHYKLVVKDYEDKYLMSIPSLETPVXXAKPIS

SEQ ID NO: 3156 - protein, 34 aa, Artificial Sequence
  Cyclic GFR-binding peptide
  MOD_RES (2)..(4): Xaa is C or S
HXGXARVVMNRYKKLIVNSSDDFYLVSIANLQTP

SEQ ID NO: 3157 - protein, 38 aa, Artificial Sequence
  Cyclic GFR-binding peptide
  MOD_RES (2)..(4)..(36): Xaa is C or S
HXGXSRVVMNRYKKLIVNSSDDFYLVSIANLKTPAXTP

SEQ ID NO: 3158 - protein, 28 aa, Artificial Sequence
  Cyclic GFR-binding peptide
SRVIMYHYKLVKPKRGVKYLISIPSLAQ

SEQ ID NO: 3159 - protein, 26 aa, Artificial Sequence
  Cyclic GFR-binding peptide
NYHYKLIVNSSDDKYLVSIPSLKTPA

SEQ ID NO: 3160 - protein, 26 aa, Artificial Sequence
  Cyclic GFR-binding peptide
  MOD_RES (26)..(26): Xaa is C or S
RHKRLVVKDYEDYYLMSTASLETPVX

SEQ ID NO: 3161 - protein, 37 aa, Artificial Sequence
  Cyclic GFR-binding peptide
  MOD_RES (37)..(37): Xaa is C or S
ALHDELTRYKKLFIPKKRVIEFYLVSIANLQVQTPRX

SEQ ID NO: 3162 - protein, 39 aa, Artificial Sequence
  Cyclic GFR-binding peptide
  MOD_RES (36)..(36): Xaa is C or S
LHDELTQYNKLFIPKKRVIELYLVSIASLQVQTPRXQVN

SEQ ID NO: 3163 - protein, 37 aa, Artificial Sequence
  Cyclic GFR-binding peptide
  MOD_RES (2)..(34)..(35): Xaa is C or S
GXSRVVMNYHYKLIVNSSDDKYLVSIPSLKTPAXXPK

SEQ ID NO: 3164 - protein, 37 aa, Artificial Sequence
  Cyclic GFR-binding peptide
  MOD_RES (2)..(4)..(36)..(37): Xaa is C or S
RXGXGEVVMEQYNKLVVKDYEDLYLMSIASLETPVXX

SEQ ID NO: 3165 - protein, 27 aa, Artificial Sequence
  Cyclic GFR-binding peptide
ARVVMNQYNKLIVNSSDDLYLVSIASL

SEQ ID NO: 3166 - protein, 31 aa, Artificial Sequence
  Cyclic GFR-binding peptide
  MOD_RES (29)..(30): Xaa is C or S
VMNRYKKLIVNSSDDFYLVSIANLQTPAXXP

SEQ ID NO: 3167 - protein, 25 aa, Artificial Sequence
  Cyclic GFR-binding peptide
RHKRLVKPTRGVYYLISTASLDQPV

SEQ ID NO: 3168 - protein, 33 aa, Artificial Sequence
  Cyclic GFR-binding peptide
  MOD_RES (28)..(29): Xaa is C or S
MDRYKKLVVKENEDFYLMSIANLETPVXXAKPI

SEQ ID NO: 3169 - protein, 26 aa, Artificial Sequence
  Cyclic GFR-binding peptide
MEYHYKLVVKDYEDKYLMSIPSLETP

SEQ ID NO: 3170 - protein, 34 aa, Artificial Sequence
  Cyclic GFR-binding peptide
  MOD_RES (1)..(33)..(34): Xaa is C or S
XSRVVMNRYKKLIVNSSDDFYLVSIANLKTPAXX

SEQ ID NO: 3171 - protein, 34 aa, Artificial Sequence
  Cyclic GFR-binding peptide
  MOD_RES (28)..(29): Xaa is C or S
MNRYKKLIVNNSSDFYLVSIANLKTPAXXAKPVA

SEQ ID NO: 3172 - protein, 31 aa, Artificial Sequence
  Cyclic GFR-binding peptide
  MOD_RES (28)..(29): Xaa is C or S
MEQYNKLVVKDYEDLYLMSIASLETPVXXAK

SEQ ID NO: 3173 - protein, 26 aa, Artificial Sequence
  Cyclic GFR-binding peptide
  MOD_RES (1)..(1): Xaa is C or S
XSKVVMQYNKLVKPTRGVLYLISIAS

SEQ ID NO: 3174 - protein, 31 aa, Artificial Sequence
  Cyclic GFR-binding peptide
  MOD_RES (28)..(28): Xaa is C or S
MNQYNKLIVNSSDDLYLVSIASLKTPAXTPK

SEQ ID NO: 3175 - protein, 33 aa, Artificial Sequence
  Cyclic GFR-binding peptide
  MOD_RES (27)..(28): Xaa is C or S
DYHYKLVVKENEDKYLMSIPSLETPVXXAKPIK

SEQ ID NO: 3176 - protein, 38 aa, Artificial Sequence
  Cyclic GFR-binding peptide
  MOD_RES (2)..(34): Xaa is C or S
GXSRVVMNRYKKLIVNSSDDFYLVSIANLKTPAXTPKT

SEQ ID NO: 3177 - protein, 26 aa, Artificial Sequence
  Cyclic GFR-binding peptide
ERHKRLVVKDYEDYYLMSTASLETPV

SEQ ID NO: 3178 - protein, 29 aa, Artificial Sequence
  Cyclic GFR-binding peptide
  MOD_RES (2)..(4): Xaa is C or S
SXKXSKVIMRYKKLIKPTKGIFYLISIAN

SEQ ID NO: 3179 - protein, 23 aa, Artificial Sequence
  Cyclic GFR-binding peptide
MEYHYKLVVKDYEDKYLMSIPSL

SEQ ID NO: 3180 - protein, 34 aa, Artificial Sequence
  Cyclic GFR-binding peptide
  MOD_RES (31)..(32): Xaa is C or S
SKVIMRYKKLIKPTKGIFYLISIANLDQSVXXPS

SEQ ID NO: 3181 - protein, 42 aa, Artificial Sequence
  Cyclic GFR-binding peptide
  MOD_RES (1)..(3)..(40): Xaa is C or S
XKXALHDELTYHYKLFIPKKRVIEKYLVSIPSLQVQTPRXQV

SEQ ID NO: 3182 - protein, 30 aa, Artificial Sequence
  Cyclic GFR-binding peptide
  MOD_RES (29)..(30): Xaa is C or S
VVMRHKRLVKPTRGVYYLISTASLDQPVXX

SEQ ID NO: 3183 - protein, 32 aa, Artificial Sequence
  Cyclic GFR-binding peptide
  MOD_RES (30)..(31): Xaa is C or S
VVMNRYKKLIVNSSDDFYLVSIANLKTPAXXP

SEQ ID NO: 3184 - protein, 36 aa, Artificial Sequence
  Cyclic GFR-binding peptide
  MOD_RES (1)..(3)..(34)..(35): Xaa is C or S
XKXSRVIMRYKKLVKPKRGVFYLISIANLAQPVXXP

SEQ ID NO: 3185 - protein, 34 aa, Artificial Sequence
  Cyclic GFR-binding peptide
  MOD_RES (1)..(3): Xaa is C or S
XGXAKVVMNQYNKLIVNNSSDLYLVSIASLKTPA

SEQ ID NO: 3186 - protein, 29 aa, Artificial Sequence
  Cyclic GFR-binding peptide
ELTRHKRLFIPKKRVIEYYLVSTASLQVQ

SEQ ID NO: 3187 - protein, 27 aa, Artificial Sequence
  Cyclic GFR-binding peptide
MNRYKKLIVNSSDDFYLVSIANLQTPA

SEQ ID NO: 3188 - protein, 26 aa, Artificial Sequence
  Cyclic GFR-binding peptide
  MOD_RES (26)..(26): Xaa is C or S
YHYKLVVKDYEDKYLMSIPSLETPVX

SEQ ID NO: 3189 - protein, 29 aa, Artificial Sequence
  Cyclic GFR-binding peptide
AVSMGERYKKLTPVGMDDFYLVSIANLKT

SEQ ID NO: 3190 - protein, 35 aa, Artificial Sequence
  Cyclic GFR-binding peptide
  MOD_RES (31)..(32): Xaa is C or S
EVVMEQYNKLVVKDYEDLYLMSIASLETPVXXAKP

SEQ ID NO: 3191 - protein, 32 aa, Artificial Sequence
  Cyclic GFR-binding peptide
  MOD_RES (32)..(32): Xaa is C or S
GEVVMDYHYKLVVKENEDKYLMSIPSLETPVX

SEQ ID NO: 3192 - protein, 31 aa, Artificial Sequence
  Cyclic GFR-binding peptide
  MOD_RES (29)..(30): Xaa is C or S
VIMRYKKLIKPTKGIFYLISIANLDQSVXXP

SEQ ID NO: 3193 - protein, 23 aa, Artificial Sequence
  Cyclic GFR-binding peptide
DRYKKLVVKENEDFYLMSIANLE

SEQ ID NO: 3194 - protein, 33 aa, Artificial Sequence
  Cyclic GFR-binding peptide
  MOD_RES (31)..(32): Xaa is C or S
KVVMNQYNKLIVNNSSDLYLVSIASLKTPAXXA

SEQ ID NO: 3195 - protein, 25 aa, Artificial Sequence
  Cyclic GFR-binding peptide
VIMQYNKLVKPKRGVLYLISIASLA

SEQ ID NO: 3196 - protein, 30 aa, Artificial Sequence
  Cyclic GFR-binding peptide
  MOD_RES (26)..(27): Xaa is C or S
QYNKLTPVGMDDLYLVSIASLKTPVXXAKG

SEQ ID NO: 3197 - protein, 33 aa, Artificial Sequence
  Cyclic GFR-binding peptide
  MOD_RES (2)..(4): Xaa is C or S
SXKXSKVVMQYNKLVKPTRGVLYLISIASLDQP

SEQ ID NO: 3198 - protein, 38 aa, Artificial Sequence
  Cyclic GFR-binding peptide
  MOD_RES (2)..(4)..(35)..(36): Xaa is C or S
SXKXSKVVMYHYKLVKPTRGVKYLISIPSLDQPVXXPS

SEQ ID NO: 3199 - protein, 30 aa, Artificial Sequence
  Cyclic GFR-binding peptide
  MOD_RES (28)..(29): Xaa is C or S
VMYHYKLVKPTRGVKYLISIPSLDQPVXXP

SEQ ID NO: 3200 - protein, 36 aa, Artificial Sequence
  Cyclic GFR-binding peptide
  MOD_RES (1)..(1): Xaa is C or S
XALHDELTRYKKLFIPKKRVIEFYLVSIANLQVQTP

SEQ ID NO: 3201 - protein, 26 aa, Artificial Sequence
  Cyclic GFR-binding peptide
  MOD_RES (1)..(1): Xaa is C or S
XSRVIMYHYKLVKPKRGVKYLISIPS

SEQ ID NO: 3202 - protein, 39 aa, Artificial Sequence
  Cyclic GFR-binding peptide
  MOD_RES (2)..(4)..(37)..(38): Xaa is C or S
RXGXEAVSMGERHKRLTPVGMDDYYLVSTASLKTPVXXA

SEQ ID NO: 3203 - protein, 31 aa, Artificial Sequence
  Cyclic GFR-binding peptide
  MOD_RES (28)..(28): Xaa is C or S
MNRYKKLIVNSSDDFYLVSIANLKTPAXTPK

SEQ ID NO: 3204 - protein, 30 aa, Artificial Sequence
  Cyclic GFR-binding peptide
  MOD_RES (1)..(1): Xaa is C or S
XSRVVMNQYNKLIVNSSDDLYLVSIASLKT

SEQ ID NO: 3205 - protein, 32 aa, Artificial Sequence
  Cyclic GFR-binding peptide
  MOD_RES (30)..(31): Xaa is C or S
RVIMYHYKLVKPKRGVKYLISIPSLAQPVXXP

SEQ ID NO: 3206 - protein, 32 aa, Artificial Sequence
  Cyclic GFR-binding peptide
  MOD_RES (32)..(32): Xaa is C or S
SRVVMNYHYKLIVNSSDDKYLVSIPSLKTPAX

SEQ ID NO: 3207 - protein, 32 aa, Artificial Sequence
  Cyclic GFR-binding peptide
  MOD_RES (29)..(30): Xaa is C or S
VMNQYNKLIVNSSDDLYLVSIASLKTPAXXPK

SEQ ID NO: 3208 - protein, 37 aa, Artificial Sequence
  Cyclic GFR-binding peptide
  MOD_RES (33)..(33): Xaa is C or S
ELTYHYKLFIPKKRVIEKYLVSIPSLQVQTPRXQVNR

SEQ ID NO: 3209 - protein, 33 aa, Artificial Sequence
  Cyclic GFR-binding peptide
  MOD_RES (28)..(29): Xaa is C or S
MDQYNKLVVKENEDLYLMSIASLETPVXXAKPI

SEQ ID NO: 3210 - protein, 28 aa, Artificial Sequence
  Cyclic GFR-binding peptide
  MOD_RES (1)..(3): Xaa is C or S
XKXSKVVMQYNKLVKPTRGVLYLISIAS

SEQ ID NO: 3211 - protein, 37 aa, Artificial Sequence
  Cyclic GFR-binding peptide
  MOD_RES (1)..(3)..(35)..(36): Xaa is C or S
XGXGEVVMDQYNKLVVKENEDLYLMSIASLETPVXXA

SEQ ID NO: 3212 - protein, 36 aa, Artificial Sequence
  Cyclic GFR-binding peptide
  MOD_RES (31)..(32): Xaa is C or S
RVVMNRYKKLIVNSSDDFYLVSIANLQTPAXXPKPV

SEQ ID NO: 3213 - protein, 30 aa, Artificial Sequence
  Cyclic GFR-binding peptide
  MOD_RES (1)..(1): Xaa is C or S
XSKVIMRHKRLIKPTKGIYYLISTASLDQS

SEQ ID NO: 3214 - protein, 38 aa, Artificial Sequence
  Cyclic GFR-binding peptide
  MOD_RES (1)..(3)..(34)..(35): Xaa is C or S
XKXSKVIMYHYKLIKPTKGIKYLISIPSLDQSVXXPSA

SEQ ID NO: 3215 - protein, 41 aa, Artificial Sequence
  Cyclic GFR-binding peptide
  MOD_RES (2)..(4)..(35)..(36): Xaa is C or S
SXKXSRVIMRHKRLVKPKRGVYYLISTASLAQPVXXPAASA

SEQ ID NO: 3216 - protein, 30 aa, Artificial Sequence
  Cyclic GFR-binding peptide
  MOD_RES (1)..(3): Xaa is C or S
XKXSKVVMYHYKLVKPTRGVKYLISIPSLD

SEQ ID NO: 3217 - protein, 39 aa, Artificial Sequence
  Cyclic GFR-binding peptide
  MOD_RES (1)..(3)..(35)..(36): Xaa is C or S
XGXSRVVMNQYNKLIVNSSDDLYLVSIASLKTPAXXPKP

SEQ ID NO: 3218 - protein, 29 aa, Artificial Sequence
  Cyclic GFR-binding peptide
GEVVMEYHYKLVVKDYEDKYLMSIPSLET

SEQ ID NO: 3219 - protein, 25 aa, Artificial Sequence
  Cyclic GFR-binding peptide
RYKKLTPVGMDDFYLVSIANLKTPV

SEQ ID NO: 3220 - protein, 32 aa, Artificial Sequence
  Cyclic GFR-binding peptide
  MOD_RES (26)..(27): Xaa is C or S
QYNKLIKPTKGILYLISIASLDQSVXXPSASA

SEQ ID NO: 3221 - protein, 24 aa, Artificial Sequence
  Cyclic GFR-binding peptide
MNQYNKLIVNSSDDLYLVSIASLQ

SEQ ID NO: 3222 - protein, 24 aa, Artificial Sequence
  Cyclic GFR-binding peptide
VVMEQYNKLVVKDYEDLYLMSIAS

SEQ ID NO: 3223 - protein, 37 aa, Artificial Sequence
  Cyclic GFR-binding peptide
  MOD_RES (1)..(3)..(34)..(35): Xaa is C or S
XKXSKVIMYHYKLIKPTKGIKYLISIPSLDQSVXXPS

SEQ ID NO: 3224 - protein, 36 aa, Artificial Sequence
  Cyclic GFR-binding peptide
  MOD_RES (1)..(32)..(33): Xaa is C or S
XSRVIMRYKKLVKPKRGVFYLISIANLAQPVXXPAA

SEQ ID NO: 3225 - protein, 42 aa, Artificial Sequence
  Cyclic GFR-binding peptide
  MOD_RES (1)..(3)..(36)..(37): Xaa is C or S
XGXEAVSMGERHKRLTPVGMDDYYLVSTASLKTPVXXAKGVK

SEQ ID NO: 3226 - protein, 29 aa, Artificial Sequence
  Cyclic GFR-binding peptide
  MOD_RES (2)..(2): Xaa is C or S
KXSKVVMQYNKLVKPTRGVLYLISIASLD

SEQ ID NO: 3227 - protein, 29 aa, Artificial Sequence
  Cyclic GFR-binding peptide
  MOD_RES (1)..(3): Xaa is C or S
XGXGEVVMDRHKRLVVKENEDYYLMSTAS

SEQ ID NO: 3228 - protein, 32 aa, Artificial Sequence
  Cyclic GFR-binding peptide
  MOD_RES (29)..(29): Xaa is C or S
VMNQYNKLIVNSSDDLYLVSIASLKTPAXTPK

SEQ ID NO: 3229 - protein, 30 aa, Artificial Sequence
  Cyclic GFR-binding peptide
  MOD_RES (30)..(30): Xaa is C or S
KVVMRYKKLVKPTRGVFYLISIANLDQPVX

SEQ ID NO: 3230 - protein, 25 aa, Artificial Sequence
  Cyclic GFR-binding peptide
VVMDRHKRLVVKENEDYYLMSTASL

SEQ ID NO: 3231 - protein, 21 aa, Artificial Sequence
  Cyclic GFR-binding peptide
DYHYKLVVKENEDKYLMSIPS

SEQ ID NO: 3232 - protein, 27 aa, Artificial Sequence
  Cyclic GFR-binding peptide
MNQYNKLIVNSSDDLYLVSIASLKTPA

SEQ ID NO: 3233 - protein, 33 aa, Artificial Sequence
  Cyclic GFR-binding peptide
  MOD_RES (1)..(3): Xaa is C or S
XGXEAVSMGERYKKLTPVGMDDFYLVSIANLKT

SEQ ID NO: 3234 - protein, 30 aa, Artificial Sequence
  Cyclic GFR-binding peptide
  MOD_RES (29)..(30): Xaa is C or S
VMNYHYKLIVNNSSDKYLVSIPSLKTPAXX

SEQ ID NO: 3235 - protein, 36 aa, Artificial Sequence
  Cyclic GFR-binding peptide
  MOD_RES (2)..(34)..(35): Xaa is C or S
GXAKVVMNRYKKLIVNNSSDFYLVSIANLKTPAXXA

SEQ ID NO: 3236 - protein, 38 aa, Artificial Sequence
  Cyclic GFR-binding peptide
  MOD_RES (2)..(33)..(34): Xaa is C or S
KXSRVIMYHYKLVKPKRGVKYLISIPSLAQPVXXPAAS

SEQ ID NO: 3237 - protein, 38 aa, Artificial Sequence
  Cyclic GFR-binding peptide
  MOD_RES (1)..(3)..(35)..(36): Xaa is C or S
XGXSRVVMNQYNKLIVNSSDDLYLVSIASLKTPAXXPK

SEQ ID NO: 3238 - protein, 31 aa, Artificial Sequence
  Cyclic GFR-binding peptide
DELTYHYKLFIPKKRVIEKYLVSIPSLQVQT

SEQ ID NO: 3239 - protein, 33 aa, Artificial Sequence
  Cyclic GFR-binding peptide
  MOD_RES (32)..(32): Xaa is C or S
LTRHKRLFIPKKRVIEYYLVSTASLQVQTPRXQ

SEQ ID NO: 3240 - protein, 26 aa, Artificial Sequence
  Cyclic GFR-binding peptide
MERYKKLVVKDYEDFYLMSIANLETP

SEQ ID NO: 3241 - protein, 28 aa, Artificial Sequence
  Cyclic GFR-binding peptide
VIMRYKKLVKPKRGVFYLISIANLAQPV

SEQ ID NO: 3242 - protein, 37 aa, Artificial Sequence
  Cyclic GFR-binding peptide
  MOD_RES (1)..(32)..(33): Xaa is C or S
XSKVVMQYNKLVKPTRGVLYLISIASLDQPVXXPSAS

SEQ ID NO: 3243 - protein, 29 aa, Artificial Sequence
  Cyclic GFR-binding peptide
  MOD_RES (29)..(29): Xaa is C or S
VIMRYKKLVKPKRGVFYLISIANLAQPVX

SEQ ID NO: 3244 - protein, 38 aa, Artificial Sequence
  Cyclic GFR-binding peptide
  MOD_RES (1)..(38): Xaa is C or S
XALHDELTYHYKLFIPKKRVIEKYLVSIPSLQVQTPRX

SEQ ID NO: 3245 - protein, 32 aa, Artificial Sequence
  Cyclic GFR-binding peptide
  MOD_RES (29)..(30): Xaa is C or S
VMDQYNKLVVKENEDLYLMSIASLETPVXXAK

SEQ ID NO: 3246 - protein, 37 aa, Artificial Sequence
  Cyclic GFR-binding peptide
  MOD_RES (1)..(3)..(34)..(35): Xaa is C or S
XKXSKVIMRHKRLIKPTKGIYYLISTASLDQSVXXPS

SEQ ID NO: 3247 - protein, 37 aa, Artificial Sequence
  Cyclic GFR-binding peptide
  MOD_RES (1)..(3)..(35)..(36): Xaa is C or S
XGXARVVMNRYKKLIVNSSDDFYLVSIANLQTPAXXP

SEQ ID NO: 3248 - protein, 24 aa, Artificial Sequence
  Cyclic GFR-binding peptide
ERYKKLVVKDYEDFYLMSIANLET

SEQ ID NO: 3249 - protein, 42 aa, Artificial Sequence
  Cyclic GFR-binding peptide
  MOD_RES (2)..(4)..(36)..(37): Xaa is C or S
RXGXGEVVMDQYNKLVVKENEDLYLMSIASLETPVXXAKPIK

SEQ ID NO: 3250 - protein, 30 aa, Artificial Sequence
  Cyclic GFR-binding peptide
  MOD_RES (1)..(3): Xaa is C or S
XKXSKVVMRHKRLVKPTRGVYYLISTASLD

SEQ ID NO: 3251 - protein, 40 aa, Artificial Sequence
  Cyclic GFR-binding peptide
  MOD_RES (37)..(37): Xaa is C or S
ALHDELTRHKRLFIPKKRVIEYYLVSTASLQVQTPRXQVN

SEQ ID NO: 3252 - protein, 31 aa, Artificial Sequence
  Cyclic GFR-binding peptide
DELTQYNKLFIPKKRVIELYLVSIASLQVQT

SEQ ID NO: 3253 - protein, 23 aa, Artificial Sequence
  Cyclic GFR-binding peptide
NRYKKLIVNNSSDFYLVSIANLK

SEQ ID NO: 3254 - protein, 31 aa, Artificial Sequence
  Cyclic GFR-binding peptide
  MOD_RES (1)..(3): Xaa is C or S
XGXAKVVMNYHYKLIVNNSSDKYLVSIPSLK

SEQ ID NO: 3255 - protein, 33 aa, Artificial Sequence
  Cyclic GFR-binding peptide
  MOD_RES (1)..(3): Xaa is C or S
XGXAKVVMNRYKKLIVNNSSDFYLVSIANLKTP

SEQ ID NO: 3256 - protein, 32 aa, Artificial Sequence
  Cyclic GFR-binding peptide
  MOD_RES (1)..(1): Xaa is C or S
XAKVVMNQYNKLIVNNSSDLYLVSIASLKTPA

SEQ ID NO: 3257 - protein, 34 aa, Artificial Sequence
  Cyclic GFR-binding peptide
  MOD_RES (2)..(34): Xaa is C or S
GXGEVVMERHKRLVVKDYEDYYLMSTASLETPVX

SEQ ID NO: 3258 - protein, 27 aa, Artificial Sequence
  Cyclic GFR-binding peptide
VKPKRGVQYNKLVKPKRGVLYLISIAS

SEQ ID NO: 3259 - protein, 25 aa, Artificial Sequence
  Cyclic GFR-binding peptide
EVVMDYHYKLVVKENEDKYLMSIPS

SEQ ID NO: 3260 - protein, 29 aa, Artificial Sequence
  Cyclic GFR-binding peptide
  MOD_RES (29)..(29): Xaa is C or S
VMDYHYKLVVKENEDKYLMSIPSLETPVX

SEQ ID NO: 3261 - protein, 29 aa, Artificial Sequence
  Cyclic GFR-binding peptide
  MOD_RES (28)..(29): Xaa is C or S
MNRYKKLIVNSSDDFYLVSIANLKTPAXX

SEQ ID NO: 3262 - protein, 26 aa, Artificial Sequence
  Cyclic GFR-binding peptide
GEQYNKLTPVGMDDLYLVSIASLKTP

SEQ ID NO: 3263 - protein, 39 aa, Artificial Sequence
  Cyclic GFR-binding peptide
  MOD_RES (1)..(34)..(35): Xaa is C or S
XEAVSMGEQYNKLTPVGMDDLYLVSIASLKTPVXXAKGV

SEQ ID NO: 3264 - protein, 28 aa, Artificial Sequence
  Cyclic GFR-binding peptide
  MOD_RES (28)..(28): Xaa is C or S
MNQYNKLIVNSSDDLYLVSIASLQTPAX

SEQ ID NO: 3265 - protein, 32 aa, Artificial Sequence
  Cyclic GFR-binding peptide
  MOD_RES (2)..(2): Xaa is C or S
GXEAVSMGERYKKLTPVGMDDFYLVSIANLKT

SEQ ID NO: 3266 - protein, 27 aa, Artificial Sequence
  Cyclic GFR-binding peptide
  MOD_RES (26)..(26): Xaa is C or S
QYNKLIVNSSDDLYLVSIASLKTPAXT

SEQ ID NO: 3267 - protein, 28 aa, Artificial Sequence
  Cyclic GFR-binding peptide
GEVVMEQYNKLVVKDYEDLYLMSIASLE

SEQ ID NO: 3268 - protein, 30 aa, Artificial Sequence
  Cyclic GFR-binding peptide
  MOD_RES (1)..(1): Xaa is C or S
XSKVVMYHYKLVKPTRGVKYLISIPSLDQP

SEQ ID NO: 3269 - protein, 33 aa, Artificial Sequence
  Cyclic GFR-binding peptide
  MOD_RES (2)..(4): Xaa is C or S
SXKXSKVIMYHYKLIKPTKGIKYLISIPSLDQS

SEQ ID NO: 3270 - protein, 36 aa, Artificial Sequence
  Cyclic GFR-binding peptide
  MOD_RES (36)..(36): Xaa is C or S
LHDELTQYNKLFIPKKRVIELYLVSIASLQVQTPRX

SEQ ID NO: 3271 - protein, 27 aa, Artificial Sequence
  Cyclic GFR-binding peptide
TPVGMDDQYNKLTPVGMDDLYLVSIAS

SEQ ID NO: 3272 - protein, 33 aa, Artificial Sequence
  Cyclic GFR-binding peptide
  MOD_RES (1)..(32)..(33): Xaa is C or S
XSRVIMRHKRLVKPKRGVYYLISTASLAQPVXX

SEQ ID NO: 3273 - protein, 35 aa, Artificial Sequence
  Cyclic GFR-binding peptide
  MOD_RES (30)..(31): Xaa is C or S
VVMEYHYKLVVKDYEDKYLMSIPSLETPVXXAKPI

SEQ ID NO: 3274 - protein, 37 aa, Artificial Sequence
  Cyclic GFR-binding peptide
  MOD_RES (1)..(3)..(36)..(37): Xaa is C or S
XGXEAVSMGERHKRLTPVGMDDYYLVSTASLKTPVXX

SEQ ID NO: 3275 - protein, 24 aa, Artificial Sequence
  Cyclic GFR-binding peptide
QYNKLIVNSSDDLYLVSIASLQTP

SEQ ID NO: 3276 - protein, 28 aa, Artificial Sequence
  Cyclic GFR-binding peptide
EAVSMGEQYNKLTPVGMDDLYLVSIASL

SEQ ID NO: 3277 - protein, 29 aa, Artificial Sequence
  Cyclic GFR-binding peptide
  MOD_RES (26)..(27): Xaa is C or S
RHKRLTPVGMDDYYLVSTASLKTPVXXAK

SEQ ID NO: 3278 - protein, 36 aa, Artificial Sequence
  Cyclic GFR-binding peptide
  MOD_RES (30)..(31): Xaa is C or S
VVMNQYNKLIVNSSDDLYLVSIASLQTPAXXPKPVT

SEQ ID NO: 3279 - protein, 41 aa, Artificial Sequence
  Cyclic GFR-binding peptide
  MOD_RES (2)..(39): Xaa is C or S
KXALHDELTRYKKLFIPKKRVIEFYLVSIANLQVQTPRXQV

SEQ ID NO: 3280 - protein, 32 aa, Artificial Sequence
  Cyclic GFR-binding peptide
  MOD_RES (2)..(4): Xaa is C or S
HXGXARVVMNYHYKLIVNSSDDKYLVSIPSLQ

SEQ ID NO: 3281 - protein, 30 aa, Artificial Sequence
  Cyclic GFR-binding peptide
  MOD_RES (28)..(29): Xaa is C or S
IMQYNKLIKPTKGILYLISIASLDQSVXXP

SEQ ID NO: 3282 - protein, 32 aa, Artificial Sequence
  Cyclic GFR-binding peptide
  MOD_RES (27)..(28): Xaa is C or S
EYHYKLVVKDYEDKYLMSIPSLETPVXXAKPI

SEQ ID NO: 3283 - protein, 34 aa, Artificial Sequence
  Cyclic GFR-binding peptide
  MOD_RES (29)..(30): Xaa is C or S
VMDRYKKLVVKENEDFYLMSIANLETPVXXAKPI

SEQ ID NO: 3284 - protein, 38 aa, Artificial Sequence
  Cyclic GFR-binding peptide
  MOD_RES (2)..(4)..(36)..(37): Xaa is C or S
RXGXGEVVMDRYKKLVVKENEDFYLMSIANLETPVXXA

SEQ ID NO: 3285 - protein, 35 aa, Artificial Sequence
  Cyclic GFR-binding peptide
  MOD_RES (2)..(34): Xaa is C or S
GXSRVVMNQYNKLIVNSSDDLYLVSIASLKTPAXT

SEQ ID NO: 3286 - protein, 34 aa, Artificial Sequence
  Cyclic GFR-binding peptide
  MOD_RES (31)..(31): Xaa is C or S
RVVMNRHKRLIVNSSDDYYLVSTASLKTPAXTPK

SEQ ID NO: 3287 - protein, 28 aa, Artificial Sequence
  Cyclic GFR-binding peptide
  MOD_RES (27)..(28): Xaa is C or S
NRHKRLIVNSSDDYYLVSTASLQTPAXX

SEQ ID NO: 3288 - protein, 26 aa, Artificial Sequence
  Cyclic GFR-binding peptide
EQYNKLTPVGMDDLYLVSIASLKTPV

SEQ ID NO: 3289 - protein, 32 aa, Artificial Sequence
  Cyclic GFR-binding peptide
  MOD_RES (2)..(2): Xaa is C or S
KXSRVIMRYKKLVKPKRGVFYLISIANLAQPV

SEQ ID NO: 3290 - protein, 45 aa, Artificial Sequence
  Cyclic GFR-binding peptide
  MOD_RES (2)..(4)..(41): Xaa is C or S
EXKXALHDELTRYKKLFIPKKRVIEFYLVSIANLQVQTPRXQVNR

SEQ ID NO: 3291 - protein, 34 aa, Artificial Sequence
  Cyclic GFR-binding peptide
  MOD_RES (30)..(31): Xaa is C or S
VVMEQYNKLVVKDYEDLYLMSIASLETPVXXAKP

SEQ ID NO: 3292 - protein, 23 aa, Artificial Sequence
  Cyclic GFR-binding peptide
GEQYNKLTPVGMDDLYLVSIASL

SEQ ID NO: 3293 - protein, 27 aa, Artificial Sequence
  Cyclic GFR-binding peptide
ARVVMNRYKKLIVNSSDDFYLVSIANL

SEQ ID NO: 3294 - protein, 35 aa, Artificial Sequence
  Cyclic GFR-binding peptide
  MOD_RES (1)..(32)..(33): Xaa is C or S
XSKVIMYHYKLIKPTKGIKYLISIPSLDQSVXXPS

SEQ ID NO: 3295 - protein, 31 aa, Artificial Sequence
  Cyclic GFR-binding peptide
ELTQYNKLFIPKKRVIELYLVSIASLQVQTP

SEQ ID NO: 3296 - protein, 22 aa, Artificial Sequence
  Cyclic GFR-binding peptide
YHYKLVVKENEDKYLMSIPSLE

SEQ ID NO: 3297 - protein, 31 aa, Artificial Sequence
  Cyclic GFR-binding peptide
  MOD_RES (1)..(3): Xaa is C or S
XGXSRVVMNQYNKLIVNSSDDLYLVSIASLK

SEQ ID NO: 3298 - protein, 35 aa, Artificial Sequence
  Cyclic GFR-binding peptide
  MOD_RES (32)..(33): Xaa is C or S
AKVVMNQYNKLIVNNSSDLYLVSIASLKTPAXXAK

SEQ ID NO: 3299 - protein, 35 aa, Artificial Sequence
  Cyclic GFR-binding peptide
  MOD_RES (32)..(33): Xaa is C or S
SRVVMNRHKRLIVNSSDDYYLVSTASLKTPAXXPK

SEQ ID NO: 3300 - protein, 33 aa, Artificial Sequence
  Cyclic GFR-binding peptide
  MOD_RES (27)..(28): Xaa is C or S
ERYKKLVVKDYEDFYLMSIANLETPVXXAKPIS

SEQ ID NO: 3301 - protein, 33 aa, Artificial Sequence
  Cyclic GFR-binding peptide
LHDELTRYKKLFIPKKRVIEFYLVSIANLQVQT

SEQ ID NO: 3302 - protein, 30 aa, Artificial Sequence
  Cyclic GFR-binding peptide
  MOD_RES (26)..(27): Xaa is C or S
QYNKLIVNSSDDLYLVSIASLQTPAXXPKP

SEQ ID NO: 3303 - protein, 30 aa, Artificial Sequence
  Cyclic GFR-binding peptide
  MOD_RES (2)..(2): Xaa is C or S
GXGEVVMERHKRLVVKDYEDYYLMSTASLE

SEQ ID NO: 3304 - protein, 39 aa, Artificial Sequence
  Cyclic GFR-binding peptide
  MOD_RES (1)..(33)..(34): Xaa is C or S
XGEVVMDQYNKLVVKENEDLYLMSIASLETPVXXAKPIK

SEQ ID NO: 3305 - protein, 29 aa, Artificial Sequence
  Cyclic GFR-binding peptide
  MOD_RES (28)..(29): Xaa is C or S
GERHKRLTPVGMDDYYLVSTASLKTPVXX

SEQ ID NO: 3306 - protein, 43 aa, Artificial Sequence
  Cyclic GFR-binding peptide
  MOD_RES (2)..(4)..(41): Xaa is C or S
EXKXALHDELTYHYKLFIPKKRVIEKYLVSIPSLQVQTPRXQV

SEQ ID NO: 3307 - protein, 26 aa, Artificial Sequence
  Cyclic GFR-binding peptide
VSMGERYKKLTPVGMDDFYLVSIANL

SEQ ID NO: 3308 - protein, 31 aa, Artificial Sequence
  Cyclic GFR-binding peptide
  MOD_RES (28)..(29): Xaa is C or S
VMRYKKLVKPTRGVFYLISIANLDQPVXXPS

SEQ ID NO: 3309 - protein, 37 aa, Artificial Sequence
  Cyclic GFR-binding peptide
  MOD_RES (1)..(32)..(33): Xaa is C or S
XSRVIMYHYKLVKPKRGVKYLISIPSLAQPVXXPAAS

SEQ ID NO: 3310 - protein, 22 aa, Artificial Sequence
  Cyclic GFR-binding peptide
ERYKKLVVKDYEDFYLMSIANL

SEQ ID NO: 3311 - protein, 25 aa, Artificial Sequence
  Cyclic GFR-binding peptide
VVMNRYKKLIVNNSSDFYLVSIANL

SEQ ID NO: 3312 - protein, 27 aa, Artificial Sequence
  Cyclic GFR-binding peptide
  MOD_RES (2)..(2): Xaa is C or S
KXSRVIMRHKRLVKPKRGVYYLISTAS

SEQ ID NO: 3313 - protein, 30 aa, Artificial Sequence
  Cyclic GFR-binding peptide
  MOD_RES (28)..(29): Xaa is C or S
MNRHKRLIVNSSDDYYLVSTASLQTPAXXP

SEQ ID NO: 3314 - protein, 38 aa, Artificial Sequence
  Cyclic GFR-binding peptide
  MOD_RES (34)..(34): Xaa is C or S
DELTRHKRLFIPKKRVIEYYLVSTASLQVQTPRXQVNR

SEQ ID NO: 3315 - protein, 28 aa, Artificial Sequence
  Cyclic GFR-binding peptide
EAVSMGERYKKLTPVGMDDFYLVSIANL

SEQ ID NO: 3316 - protein, 40 aa, Artificial Sequence
  Cyclic GFR-binding peptide
  MOD_RES (2)..(4)..(36)..(37): Xaa is C or S
HXGXSRVVMNRYKKLIVNSSDDFYLVSIANLKTPAXXPKP

SEQ ID NO: 3317 - protein, 27 aa, Artificial Sequence
  Cyclic GFR-binding peptide
SRVVMNRYKKLIVNSSDDFYLVSIANL

SEQ ID NO: 3318 - protein, 23 aa, Artificial Sequence
  Cyclic GFR-binding peptide
VIMRYKKLVKPKRGVFYLISIAN

SEQ ID NO: 3319 - protein, 38 aa, Artificial Sequence
  Cyclic GFR-binding peptide
  MOD_RES (1)..(3)..(34)..(35): Xaa is C or S
XKXSKVIMRHKRLIKPTKGIYYLISTASLDQSVXXPSA

SEQ ID NO: 3320 - protein, 30 aa, Artificial Sequence
  Cyclic GFR-binding peptide
SKVIMQYNKLIKPTKGILYLISIASLDQSV

SEQ ID NO: 3321 - protein, 24 aa, Artificial Sequence
  Cyclic GFR-binding peptide
YHYKLVVKDYEDKYLMSIPSLETP

SEQ ID NO: 3322 - protein, 39 aa, Artificial Sequence
  Cyclic GFR-binding peptide
  MOD_RES (2)..(34): Xaa is C or S
GXSRVVMNYHYKLIVNSSDDKYLVSIPSLKTPAXTPKTV

SEQ ID NO: 3323 - protein, 35 aa, Artificial Sequence
  Cyclic GFR-binding peptide
  MOD_RES (32)..(32): Xaa is C or S
SRVVMNRHKRLIVNSSDDYYLVSTASLKTPAXTPK

SEQ ID NO: 3324 - protein, 38 aa, Artificial Sequence
  Cyclic GFR-binding peptide
  MOD_RES (2)..(4)..(36)..(37): Xaa is C or S
HXGXARVVMNRHKRLIVNSSDDYYLVSTASLQTPAXXP

SEQ ID NO: 3325 - protein, 41 aa, Artificial Sequence
  Cyclic GFR-binding peptide
  MOD_RES (1)..(38): Xaa is C or S
XALHDELTQYNKLFIPKKRVIELYLVSIASLQVQTPRXQVN

SEQ ID NO: 3326 - protein, 30 aa, Artificial Sequence
  Cyclic GFR-binding peptide
ALHDELTRHKRLFIPKKRVIEYYLVSTASL

SEQ ID NO: 3327 - protein, 38 aa, Artificial Sequence
  Cyclic GFR-binding peptide
  MOD_RES (2)..(34)..(35): Xaa is C or S
GXGEVVMDQYNKLVVKENEDLYLMSIASLETPVXXAKP

SEQ ID NO: 3328 - protein, 28 aa, Artificial Sequence
  Cyclic GFR-binding peptide
EVVMDYHYKLVVKENEDKYLMSIPSLET

SEQ ID NO: 3329 - protein, 29 aa, Artificial Sequence
  Cyclic GFR-binding peptide
  MOD_RES (1)..(3): Xaa is C or S
XKXSKVVMRYKKLVKPTRGVFYLISIANL

SEQ ID NO: 3330 - protein, 28 aa, Artificial Sequence
  Cyclic GFR-binding peptide
  MOD_RES (1)..(1): Xaa is C or S
XSKVIMRYKKLIKPTKGIFYLISIANLD

SEQ ID NO: 3331 - protein, 40 aa, Artificial Sequence
  Cyclic GFR-binding peptide
  MOD_RES (1)..(3)..(34)..(35): Xaa is C or S
XKXSKVIMRYKKLIKPTKGIFYLISIANLDQSVXXPSASA

SEQ ID NO: 3332 - protein, 38 aa, Artificial Sequence
  Cyclic GFR-binding peptide
  MOD_RES (1)..(33)..(34): Xaa is C or S
XAKVVMNQYNKLIVNNSSDLYLVSIASLKTPAXXAKPV

SEQ ID NO: 3333 - protein, 38 aa, Artificial Sequence
  Cyclic GFR-binding peptide
  MOD_RES (1)..(32)..(33): Xaa is C or S
XSKVIMRYKKLIKPTKGIFYLISIANLDQSVXXPSASA

SEQ ID NO: 3334 - protein, 27 aa, Artificial Sequence
  Cyclic GFR-binding peptide
VMDYHYKLVVKENEDKYLMSIPSLETP

SEQ ID NO: 3335 - protein, 35 aa, Artificial Sequence
  Cyclic GFR-binding peptide
  MOD_RES (29)..(30): Xaa is C or S
VMNRHKRLIVNSSDDYYLVSTASLKTPAXXPKPVY

SEQ ID NO: 3336 - protein, 39 aa, Artificial Sequence
  Cyclic GFR-binding peptide
  MOD_RES (1)..(3)..(34)..(35): Xaa is C or S
XKXSKVVMRYKKLVKPTRGVFYLISIANLDQPVXXPSAS

SEQ ID NO: 3337 - protein, 38 aa, Artificial Sequence
  Cyclic GFR-binding peptide
  MOD_RES (2)..(35)..(36): Xaa is C or S
GXEAVSMGERYKKLTPVGMDDFYLVSIANLKTPVXXAK

SEQ ID NO: 3338 - protein, 26 aa, Artificial Sequence
  Cyclic GFR-binding peptide
GERYKKLTPVGMDDFYLVSIANLKTP

SEQ ID NO: 3339 - protein, 26 aa, Artificial Sequence
  Cyclic GFR-binding peptide
SRVVMNQYNKLIVNSSDDLYLVSIAS

SEQ ID NO: 3340 - protein, 31 aa, Artificial Sequence
  Cyclic GFR-binding peptide
  MOD_RES (29)..(30): Xaa is C or S
VIMRHKRLIKPTKGIYYLISTASLDQSVXXP

SEQ ID NO: 3341 - protein, 27 aa, Artificial Sequence
  Cyclic GFR-binding peptide
MNYHYKLIVNSSDDKYLVSIPSLKTPA

SEQ ID NO: 3342 - protein, 33 aa, Artificial Sequence
  Cyclic GFR-binding peptide
  MOD_RES (30)..(30): Xaa is C or S
VVMNYHYKLIVNSSDDKYLVSIPSLKTPAXTPK

SEQ ID NO: 3343 - protein, 29 aa, Artificial Sequence
  Cyclic GFR-binding peptide
  MOD_RES (27)..(28): Xaa is C or S
MRHKRLVKPKRGVYYLISTASLAQPVXXP

SEQ ID NO: 3344 - protein, 29 aa, Artificial Sequence
  Cyclic GFR-binding peptide
  MOD_RES (1)..(3): Xaa is C or S
XGXGEVVMERHKRLVVKDYEDYYLMSTAS

SEQ ID NO: 3345 - protein, 34 aa, Artificial Sequence
  Cyclic GFR-binding peptide
  MOD_RES (31)..(32): Xaa is C or S
SKVVMQYNKLVKPTRGVLYLISIASLDQPVXXPS

SEQ ID NO: 3346 - protein, 38 aa, Artificial Sequence
  Cyclic GFR-binding peptide
  MOD_RES (1)..(3)..(34)..(35): Xaa is C or S
XKXSKVVMYHYKLVKPTRGVKYLISIPSLDQPVXXPSA

SEQ ID NO: 3347 - protein, 30 aa, Artificial Sequence
  Cyclic GFR-binding peptide
ALHDELTQYNKLFIPKKRVIELYLVSIASL

SEQ ID NO: 3348 - protein, 37 aa, Artificial Sequence
  Cyclic GFR-binding peptide
  MOD_RES (1)..(33)..(34): Xaa is C or S
XGEVVMEYHYKLVVKDYEDKYLMSIPSLETPVXXAKP

SEQ ID NO: 3349 - protein, 37 aa, Artificial Sequence
  Cyclic GFR-binding peptide
  MOD_RES (1)..(33): Xaa is C or S
XSRVVMNRHKRLIVNSSDDYYLVSTASLKTPAXTPKT

SEQ ID NO: 3350 - protein, 31 aa, Artificial Sequence
  Cyclic GFR-binding peptide
  MOD_RES (2)..(4): Xaa is C or S
SXKXSKVIMRYKKLIKPTKGIFYLISIANLD

SEQ ID NO: 3351 - protein, 32 aa, Artificial Sequence
  Cyclic GFR-binding peptide
  MOD_RES (28)..(29): Xaa is C or S
MDYHYKLVVKENEDKYLMSIPSLETPVXXAKP

SEQ ID NO: 3352 - protein, 24 aa, Artificial Sequence
  Cyclic GFR-binding peptide
NYHYKLIVNSSDDKYLVSIPSLQT

SEQ ID NO: 3353 - protein, 36 aa, Artificial Sequence
  Cyclic GFR-binding peptide
  MOD_RES (2)..(4)..(35)..(36): Xaa is C or S
SXKXSRVIMQYNKLVKPKRGVLYLISIASLAQPVXX

SEQ ID NO: 3354 - protein, 34 aa, Artificial Sequence
  Cyclic GFR-binding peptide
  MOD_RES (2)..(4): Xaa is C or S
RXGXGEVVMDYHYKLVVKENEDKYLMSIPSLETP

SEQ ID NO: 3355 - protein, 36 aa, Artificial Sequence
  Cyclic GFR-binding peptide
  MOD_RES (1)..(33)..(34): Xaa is C or S
XGEVVMERYKKLVVKDYEDFYLMSIANLETPVXXAK

SEQ ID NO: 3356 - protein, 32 aa, Artificial Sequence
  Cyclic GFR-binding peptide
  MOD_RES (32)..(32): Xaa is C or S
LTYHYKLFIPKKRVIEKYLVSIPSLQVQTPRX

SEQ ID NO: 3357 - protein, 37 aa, Artificial Sequence
  Cyclic GFR-binding peptide
  MOD_RES (1)..(3): Xaa is C or S
XKXALHDELTQYNKLFIPKKRVIELYLVSIASLQVQT

SEQ ID NO: 3358 - protein, 24 aa, Artificial Sequence
  Cyclic GFR-binding peptide
MDRHKRLVVKENEDYYLMSTASLE

SEQ ID NO: 3359 - protein, 36 aa, Artificial Sequence
  Cyclic GFR-binding peptide
  MOD_RES (31)..(32): Xaa is C or S
RVVMNQYNKLIVNSSDDLYLVSIASLQTPAXXPKPV

SEQ ID NO: 3360 - protein, 28 aa, Artificial Sequence
  Cyclic GFR-binding peptide
  MOD_RES (27)..(27): Xaa is C or S
NRYKKLIVNSSDDFYLVSIANLKTPAXT

SEQ ID NO: 3361 - protein, 26 aa, Artificial Sequence
  Cyclic GFR-binding peptide
MEQYNKLVVKDYEDLYLMSIASLETP

SEQ ID NO: 3362 - protein, 37 aa, Artificial Sequence
  Cyclic GFR-binding peptide
  MOD_RES (2)..(4)..(36)..(37): Xaa is C or S
RXGXGEVVMDYHYKLVVKENEDKYLMSIPSLETPVXX

SEQ ID NO: 3363 - protein, 35 aa, Artificial Sequence
  Cyclic GFR-binding peptide
  MOD_RES (1)..(32)..(33): Xaa is C or S
XSKVVMYHYKLVKPTRGVKYLISIPSLDQPVXXPS

SEQ ID NO: 3364 - protein, 35 aa, Artificial Sequence
  Cyclic GFR-binding peptide
  MOD_RES (31)..(32): Xaa is C or S
SRVIMQYNKLVKPKRGVLYLISIASLAQPVXXPAA

SEQ ID NO: 3365 - protein, 35 aa, Artificial Sequence
  Cyclic GFR-binding peptide
LHDELTRYKKLFIPKKRVIEFYLVSIANLQVQTPR

SEQ ID NO: 3366 - protein, 37 aa, Artificial Sequence
  Cyclic GFR-binding peptide
  MOD_RES (1)..(32)..(33): Xaa is C or S
XSKVVMRYKKLVKPTRGVFYLISIANLDQPVXXPSAS

SEQ ID NO: 3367 - protein, 39 aa, Artificial Sequence
  Cyclic GFR-binding peptide
  MOD_RES (2)..(4)..(37)..(38): Xaa is C or S
RXGXEAVSMGEQYNKLTPVGMDDLYLVSIASLKTPVXXA

SEQ ID NO: 3368 - protein, 32 aa, Artificial Sequence
  Cyclic GFR-binding peptide
  MOD_RES (30)..(31): Xaa is C or S
VVMEQYNKLVVKDYEDLYLMSIASLETPVXXA

SEQ ID NO: 3369 - protein, 34 aa, Artificial Sequence
  Cyclic GFR-binding peptide
  MOD_RES (31)..(31): Xaa is C or S
TRHKRLFIPKKRVIEYYLVSTASLQVQTPRXQVN

SEQ ID NO: 3370 - protein, 37 aa, Artificial Sequence
  Cyclic GFR-binding peptide
  MOD_RES (1)..(33)..(34): Xaa is C or S
XGEVVMERYKKLVVKDYEDFYLMSIANLETPVXXAKP

SEQ ID NO: 3371 - protein, 26 aa, Artificial Sequence
  Cyclic GFR-binding peptide
VSMGERHKRLTPVGMDDYYLVSTASL

SEQ ID NO: 3372 - protein, 28 aa, Artificial Sequence
  Cyclic GFR-binding peptide
VMDYHYKLVVKENEDKYLMSIPSLETPV

SEQ ID NO: 3373 - protein, 31 aa, Artificial Sequence
  Cyclic GFR-binding peptide
  MOD_RES (29)..(30): Xaa is C or S
VMNRHKRLIVNSSDDYYLVSTASLQTPAXXP

SEQ ID NO: 3374 - protein, 29 aa, Artificial Sequence
  Cyclic GFR-binding peptide
AVSMGEQYNKLTPVGMDDLYLVSIASLKT

SEQ ID NO: 3375 - protein, 42 aa, Artificial Sequence
  Cyclic GFR-binding peptide
  MOD_RES (2)..(4)..(36)..(37): Xaa is C or S
HXGXARVVMNYHYKLIVNSSDDKYLVSIPSLQTPAXXPKPVT

SEQ ID NO: 3376 - protein, 38 aa, Artificial Sequence
  Cyclic GFR-binding peptide
  MOD_RES (2)..(34)..(35): Xaa is C or S
GXARVVMNYHYKLIVNSSDDKYLVSIPSLQTPAXXPKP

SEQ ID NO: 3377 - protein, 39 aa, Artificial Sequence
  Cyclic GFR-binding peptide
  MOD_RES (2)..(34)..(35): Xaa is C or S
GXARVVMNRHKRLIVNSSDDYYLVSTASLQTPAXXPKPV

SEQ ID NO: 3378 - protein, 30 aa, Artificial Sequence
  Cyclic GFR-binding peptide
GEVVMEQYNKLVVKDYEDLYLMSIASLETP

SEQ ID NO: 3379 - protein, 38 aa, Artificial Sequence
  Cyclic GFR-binding peptide
  MOD_RES (1)..(3)..(34)..(35): Xaa is C or S
XKXSKVVMRHKRLVKPTRGVYYLISTASLDQPVXXPSA

SEQ ID NO: 3380 - protein, 21 aa, Artificial Sequence
  Cyclic GFR-binding peptide
NYHYKLIVNSSDDKYLVSIPS

SEQ ID NO: 3381 - protein, 35 aa, Artificial Sequence
  Cyclic GFR-binding peptide
  MOD_RES (1)..(32)..(33): Xaa is C or S
XSKVIMRHKRLIKPTKGIYYLISTASLDQSVXXPS

SEQ ID NO: 3382 - protein, 27 aa, Artificial Sequence
  Cyclic GFR-binding peptide
VIMRYKKLVKPKRGVFYLISIANLAQP

SEQ ID NO: 3383 - protein, 32 aa, Artificial Sequence
  Cyclic GFR-binding peptide
  MOD_RES (29)..(30): Xaa is C or S
VMNRYKKLIVNSSDDFYLVSIANLQTPAXXPK

SEQ ID NO: 3384 - protein, 37 aa, Artificial Sequence
  Cyclic GFR-binding peptide
  MOD_RES (2)..(4)..(36)..(37): Xaa is C or S
HXGXAKVVMNQYNKLIVNNSSDLYLVSIASLKTPAXX

SEQ ID NO: 3385 - protein, 23 aa, Artificial Sequence
  Cyclic GFR-binding peptide
QYNKLVVKDYEDLYLMSIASLET

SEQ ID NO: 3386 - protein, 35 aa, Artificial Sequence
  Cyclic GFR-binding peptide
  MOD_RES (29)..(30): Xaa is C or S
VMEYHYKLVVKDYEDKYLMSIPSLETPVXXAKPIS

SEQ ID NO: 3387 - protein, 23 aa, Artificial Sequence
  Cyclic GFR-binding peptide
MEQYNKLVVKDYEDLYLMSIASL

SEQ ID NO: 3388 - protein, 24 aa, Artificial Sequence
  Cyclic GFR-binding peptide
VVMNYHYKLIVNNSSDKYLVSIPS

SEQ ID NO: 3389 - protein, 34 aa, Artificial Sequence
  Cyclic GFR-binding peptide
  MOD_RES (32)..(32): Xaa is C or S
LTRYKKLFIPKKRVIEFYLVSIANLQVQTPRXQV

SEQ ID NO: 3390 - protein, 29 aa, Artificial Sequence
  Cyclic GFR-binding peptide
  MOD_RES (2)..(2): Xaa is C or S
GXEAVSMGERYKKLTPVGMDDFYLVSIAN

SEQ ID NO: 3391 - protein, 34 aa, Artificial Sequence
  Cyclic GFR-binding peptide
  MOD_RES (29)..(30): Xaa is C or S
VMDRHKRLVVKENEDYYLMSTASLETPVXXAKPI

SEQ ID NO: 3392 - protein, 35 aa, Artificial Sequence
  Cyclic GFR-binding peptide
  MOD_RES (1)..(3)..(35): Xaa is C or S
XGXAKVVMNRYKKLIVNNSSDFYLVSIANLKTPAX

SEQ ID NO: 3393 - protein, 32 aa, Artificial Sequence
  Cyclic GFR-binding peptide
  MOD_RES (2)..(2): Xaa is C or S
KXSRVIMYHYKLVKPKRGVKYLISIPSLAQPV

SEQ ID NO: 3394 - protein, 29 aa, Artificial Sequence
  Cyclic GFR-binding peptide
LHDELTYHYKLFIPKKRVIEKYLVSIPSL

SEQ ID NO: 3395 - protein, 29 aa, Artificial Sequence
  Cyclic GFR-binding peptide
  MOD_RES (1)..(3): Xaa is C or S
XGXARVVMNYHYKLIVNSSDDKYLVSIPS

SEQ ID NO: 3396 - protein, 26 aa, Artificial Sequence
  Cyclic GFR-binding peptide
ARVVMNQYNKLIVNSSDDLYLVSIAS

SEQ ID NO: 3397 - protein, 31 aa, Artificial Sequence
  Cyclic GFR-binding peptide
  MOD_RES (30)..(30): Xaa is C or S
VVMNRHKRLIVNSSDDYYLVSTASLKTPAXT

SEQ ID NO: 3398 - protein, 27 aa, Artificial Sequence
  Cyclic GFR-binding peptide
DELTYHYKLFIPKKRVIEKYLVSIPSL

SEQ ID NO: 3399 - protein, 38 aa, Artificial Sequence
  Cyclic GFR-binding peptide
  MOD_RES (2)..(4)..(36)..(37): Xaa is C or S
RXGXGEVVMEQYNKLVVKDYEDLYLMSIASLETPVXXA

SEQ ID NO: 3400 - protein, 32 aa, Artificial Sequence
  Cyclic GFR-binding peptide
  MOD_RES (26)..(27): Xaa is C or S
YHYKLVKPTRGVKYLISIPSLDQPVXXPSASA

SEQ ID NO: 3401 - protein, 29 aa, Artificial Sequence
  Cyclic GFR-binding peptide
  MOD_RES (28)..(29): Xaa is C or S
MNRYKKLIVNSSDDFYLVSIANLQTPAXX

SEQ ID NO: 3402 - protein, 36 aa, Artificial Sequence
  Cyclic GFR-binding peptide
  MOD_RES (31)..(32): Xaa is C or S
KVVMNQYNKLIVNNSSDLYLVSIASLKTPAXXAKPV

SEQ ID NO: 3403 - protein, 35 aa, Artificial Sequence
  Cyclic GFR-binding peptide
  MOD_RES (1)..(33)..(34): Xaa is C or S
XSRVVMNRHKRLIVNSSDDYYLVSTASLKTPAXXP

SEQ ID NO: 3404 - protein, 33 aa, Artificial Sequence
  Cyclic GFR-binding peptide
  MOD_RES (31)..(32): Xaa is C or S
RVVMNRYKKLIVNSSDDFYLVSIANLQTPAXXP

SEQ ID NO: 3405 - protein, 28 aa, Artificial Sequence
  Cyclic GFR-binding peptide
VVMDQYNKLVVKENEDLYLMSIASLETP

SEQ ID NO: 3406 - protein, 39 aa, Artificial Sequence
  Cyclic GFR-binding peptide
  MOD_RES (2)..(4)..(36): Xaa is C or S
HXGXSRVVMNQYNKLIVNSSDDLYLVSIASLKTPAXTPK

SEQ ID NO: 3407 - protein, 24 aa, Artificial Sequence
  Cyclic GFR-binding peptide
MNYHYKLIVNSSDDKYLVSIPSLK

SEQ ID NO: 3408 - protein, 42 aa, Artificial Sequence
  Cyclic GFR-binding peptide
  MOD_RES (2)..(4)..(36)..(37): Xaa is C or S
HXGXAKVVMNRYKKLIVNNSSDFYLVSIANLKTPAXXAKPVA

SEQ ID NO: 3409 - protein, 31 aa, Artificial Sequence
  Cyclic GFR-binding peptide
  MOD_RES (28)..(29): Xaa is C or S
IMQYNKLIKPTKGILYLISIASLDQSVXXPS

SEQ ID NO: 3410 - protein, 36 aa, Artificial Sequence
  Cyclic GFR-binding peptide
  MOD_RES (30)..(31): Xaa is C or S
VVMNYHYKLIVNNSSDKYLVSIPSLKTPAXXAKPVA

SEQ ID NO: 3411 - protein, 33 aa, Artificial Sequence
  Cyclic GFR-binding peptide
  MOD_RES (28)..(29): Xaa is C or S
IMYHYKLVKPKRGVKYLISIPSLAQPVXXPAAS

SEQ ID NO: 3412 - protein, 40 aa, Artificial Sequence
  Cyclic GFR-binding peptide
  MOD_RES (2)..(34)..(35): Xaa is C or S
GXGEVVMDYHYKLVVKENEDKYLMSIPSLETPVXXAKPIK

SEQ ID NO: 3413 - protein, 27 aa, Artificial Sequence
  Cyclic GFR-binding peptide
TQYNKLFIPKKRVIELYLVSIASLQVQ

SEQ ID NO: 3414 - protein, 27 aa, Artificial Sequence
  Cyclic GFR-binding peptide
MERYKKLVVKDYEDFYLMSIANLETPV

SEQ ID NO: 3415 - protein, 37 aa, Artificial Sequence
  Cyclic GFR-binding peptide
  MOD_RES (2)..(4)..(36)..(37): Xaa is C or S
HXGXSRVVMNYHYKLIVNSSDDKYLVSIPSLKTPAXX

SEQ ID NO: 3416 - protein, 29 aa, Artificial Sequence
  Cyclic GFR-binding peptide
  MOD_RES (28)..(29): Xaa is C or S
MNQYNKLIVNSSDDLYLVSIASLKTPAXX

SEQ ID NO: 3417 - protein, 35 aa, Artificial Sequence
  Cyclic GFR-binding peptide
  MOD_RES (31)..(32): Xaa is C or S
SRVIMYHYKLVKPKRGVKYLISIPSLAQPVXXPAA

SEQ ID NO: 3418 - protein, 42 aa, Artificial Sequence
  Cyclic GFR-binding peptide
  MOD_RES (2)..(39): Xaa is C or S
KXALHDELTRYKKLFIPKKRVIEFYLVSIANLQVQTPRXQVN

SEQ ID NO: 3419 - protein, 37 aa, Artificial Sequence
  Cyclic GFR-binding peptide
  MOD_RES (1)..(32)..(33): Xaa is C or S
XSRVIMRHKRLVKPKRGVYYLISTASLAQPVXXPAAS

SEQ ID NO: 3420 - protein, 30 aa, Artificial Sequence
  Cyclic GFR-binding peptide
  MOD_RES (27)..(28): Xaa is C or S
ERHKRLVVKDYEDYYLMSTASLETPVXXAK

SEQ ID NO: 3421 - protein, 26 aa, Artificial Sequence
  Cyclic GFR-binding peptide
VVMEQYNKLVVKDYEDLYLMSIASLE

SEQ ID NO: 3422 - protein, 30 aa, Artificial Sequence
  Cyclic GFR-binding peptide
GEVVMERYKKLVVKDYEDFYLMSIANLETP

SEQ ID NO: 3423 - protein, 40 aa, Artificial Sequence
  Cyclic GFR-binding peptide
  MOD_RES (37)..(37): Xaa is C or S
ALHDELTQYNKLFIPKKRVIELYLVSIASLQVQTPRXQVN

SEQ ID NO: 3424 - protein, 33 aa, Artificial Sequence
  Cyclic GFR-binding peptide
  MOD_RES (31)..(32): Xaa is C or S
VSMGEQYNKLTPVGMDDLYLVSIASLKTPVXXA

SEQ ID NO: 3425 - protein, 32 aa, Artificial Sequence
  Cyclic GFR-binding peptide
  MOD_RES (1)..(3): Xaa is C or S
XKXALHDELTYHYKLFIPKKRVIEKYLVSIPS

SEQ ID NO: 3426 - protein, 34 aa, Artificial Sequence
  Cyclic GFR-binding peptide
  MOD_RES (33)..(34): Xaa is C or S
EAVSMGERYKKLTPVGMDDFYLVSIANLKTPVXX

SEQ ID NO: 3427 - protein, 32 aa, Artificial Sequence
  Cyclic GFR-binding peptide
  MOD_RES (27)..(28): Xaa is C or S
DRHKRLVVKENEDYYLMSTASLETPVXXAKPI

SEQ ID NO: 3428 - protein, 35 aa, Artificial Sequence
  Cyclic GFR-binding peptide
  MOD_RES (2)..(4): Xaa is C or S
EXKXALHDELTRYKKLFIPKKRVIEFYLVSIANLQ

SEQ ID NO: 3429 - protein, 30 aa, Artificial Sequence
  Cyclic GFR-binding peptide
  MOD_RES (28)..(29): Xaa is C or S
MNRYKKLIVNNSSDFYLVSIANLKTPAXXA

SEQ ID NO: 3430 - protein, 26 aa, Artificial Sequence
  Cyclic GFR-binding peptide
MQYNKLVKPKRGVLYLISIASLAQPV

SEQ ID NO: 3431 - protein, 35 aa, Artificial Sequence
  Cyclic GFR-binding peptide
  MOD_RES (32)..(33): Xaa is C or S
AKVVMNRYKKLIVNNSSDFYLVSIANLKTPAXXAK

SEQ ID NO: 3432 - protein, 37 aa, Artificial Sequence
  Cyclic GFR-binding peptide
  MOD_RES (31)..(32): Xaa is C or S
EVVMEQYNKLVVKDYEDLYLMSIASLETPVXXAKPIS

SEQ ID NO: 3433 - protein, 29 aa, Artificial Sequence
  Cyclic GFR-binding peptide
  MOD_RES (26)..(27): Xaa is C or S
RHKRLIKPTKGIYYLISTASLDQSVXXPS

SEQ ID NO: 3434 - protein, 28 aa, Artificial Sequence
  Cyclic GFR-binding peptide
SKVIMRHKRLIKPTKGIYYLISTASLDQ

SEQ ID NO: 3435 - protein, 27 aa, Artificial Sequence
  Cyclic GFR-binding peptide
  MOD_RES (27)..(27): Xaa is C or S
NRHKRLIVNSSDDYYLVSTASLQTPAX

SEQ ID NO: 3436 - protein, 28 aa, Artificial Sequence
  Cyclic GFR-binding peptide
  MOD_RES (26)..(27): Xaa is C or S
YHYKLVVKDYEDKYLMSIPSLETPVXXA

SEQ ID NO: 3437 - protein, 28 aa, Artificial Sequence
  Cyclic GFR-binding peptide
  MOD_RES (1)..(1): Xaa is C or S
XAKVVMNQYNKLIVNNSSDLYLVSIASL

SEQ ID NO: 3438 - protein, 27 aa, Artificial Sequence
  Cyclic GFR-binding peptide
  MOD_RES (27)..(27): Xaa is C or S
MRHKRLVKPTRGVYYLISTASLDQPVX

SEQ ID NO: 3439 - protein, 28 aa, Artificial Sequence
  Cyclic GFR-binding peptide
  MOD_RES (2)..(2): Xaa is C or S
GXAKVVMNYHYKLIVNNSSDKYLVSIPS

SEQ ID NO: 3440 - protein, 38 aa, Artificial Sequence
  Cyclic GFR-binding peptide
  MOD_RES (2)..(4)..(35)..(36): Xaa is C or S
SXKXSRVIMQYNKLVKPKRGVLYLISIASLAQPVXXPA

SEQ ID NO: 3441 - protein, 30 aa, Artificial Sequence
  Cyclic GFR-binding peptide
  MOD_RES (1)..(1): Xaa is C or S
XEAVSMGERYKKLTPVGMDDFYLVSIANLK

SEQ ID NO: 3442 - protein, 28 aa, Artificial Sequence
  Cyclic GFR-binding peptide
SRVVMNRHKRLIVNSSDDYYLVSTASLK

SEQ ID NO: 3443 - protein, 32 aa, Artificial Sequence
  Cyclic GFR-binding peptide
  MOD_RES (28)..(29): Xaa is C or S
MERHKRLVVKDYEDYYLMSTASLETPVXXAKP

SEQ ID NO: 3444 - protein, 35 aa, Artificial Sequence
  Cyclic GFR-binding peptide
  MOD_RES (1)..(33)..(34): Xaa is C or S
XARVVMNRYKKLIVNSSDDFYLVSIANLQTPAXXP

SEQ ID NO: 3445 - protein, 30 aa, Artificial Sequence
  Cyclic GFR-binding peptide
  MOD_RES (28)..(29): Xaa is C or S
MNRHKRLIVNSSDDYYLVSTASLKTPAXXP

SEQ ID NO: 3446 - protein, 37 aa, Artificial Sequence
  Cyclic GFR-binding peptide
  MOD_RES (2)..(34): Xaa is C or S
GXSRVVMNRYKKLIVNSSDDFYLVSIANLKTPAXTPK

SEQ ID NO: 3447 - protein, 25 aa, Artificial Sequence
  Cyclic GFR-binding peptide
VVMRHKRLVKPTRGVYYLISTASLD

SEQ ID NO: 3448 - protein, 29 aa, Artificial Sequence
  Cyclic GFR-binding peptide
  MOD_RES (27)..(28): Xaa is C or S
NQYNKLIVNSSDDLYLVSIASLKTPAXXP

SEQ ID NO: 3449 - protein, 31 aa, Artificial Sequence
  Cyclic GFR-binding peptide
  MOD_RES (2)..(4): Xaa is C or S
SXKXSRVIMRHKRLVKPKRGVYYLISTASLA

SEQ ID NO: 3450 - protein, 38 aa, Artificial Sequence
  Cyclic GFR-binding peptide
  MOD_RES (1)..(32)..(33): Xaa is C or S
XSKVVMRYKKLVKPTRGVFYLISIANLDQPVXXPSASA

SEQ ID NO: 3451 - protein, 30 aa, Artificial Sequence
  Cyclic GFR-binding peptide
SRVVMNRHKRLIVNSSDDYYLVSTASLKTP

SEQ ID NO: 3452 - protein, 34 aa, Artificial Sequence
  Cyclic GFR-binding peptide
  MOD_RES (32)..(33): Xaa is C or S
GEVVMDRYKKLVVKENEDFYLMSIANLETPVXXA

SEQ ID NO: 3453 - protein, 31 aa, Artificial Sequence
  Cyclic GFR-binding peptide
  MOD_RES (2)..(2): Xaa is C or S
GXGEVVMDRHKRLVVKENEDYYLMSTASLET

SEQ ID NO: 3454 - protein, 36 aa, Artificial Sequence
  Cyclic GFR-binding peptide
  MOD_RES (31)..(32): Xaa is C or S
KVVMNYHYKLIVNNSSDKYLVSIPSLKTPAXXAKPV

SEQ ID NO: 3455 - protein, 22 aa, Artificial Sequence
  Cyclic GFR-binding peptide
MNYHYKLIVNNSSDKYLVSIPS

SEQ ID NO: 3456 - protein, 31 aa, Artificial Sequence
  Cyclic GFR-binding peptide
  MOD_RES (28)..(29): Xaa is C or S
VMQYNKLVKPTRGVLYLISIASLDQPVXXPS

SEQ ID NO: 3457 - protein, 21 aa, Artificial Sequence
  Cyclic GFR-binding peptide
MRYKKLVKPKRGVFYLISIAN

SEQ ID NO: 3458 - protein, 31 aa, Artificial Sequence
  Cyclic GFR-binding peptide
  MOD_RES (29)..(30): Xaa is C or S
VVMQYNKLVKPTRGVLYLISIASLDQPVXXP

SEQ ID NO: 3459 - protein, 27 aa, Artificial Sequence
  Cyclic GFR-binding peptide
DELTRYKKLFIPKKRVIEFYLVSIANL

SEQ ID NO: 3460 - protein, 37 aa, Artificial Sequence
  Cyclic GFR-binding peptide
  MOD_RES (2)..(34)..(35): Xaa is C or S
GXGEVVMDYHYKLVVKENEDKYLMSIPSLETPVXXAK

SEQ ID NO: 3461 - protein, 38 aa, Artificial Sequence
  Cyclic GFR-binding peptide
  MOD_RES (1)..(3)..(35): Xaa is C or S
XGXSRVVMNRHKRLIVNSSDDYYLVSTASLKTPAXTPK

SEQ ID NO: 3462 - protein, 30 aa, Artificial Sequence
  Cyclic GFR-binding peptide
  MOD_RES (26)..(27): Xaa is C or S
RYKKLIVNSSDDFYLVSIANLQTPAXXPKP

SEQ ID NO: 3463 - protein, 30 aa, Artificial Sequence
  Cyclic GFR-binding peptide
  MOD_RES (2)..(4): Xaa is C or S
SXKXSRVIMRYKKLVKPKRGVFYLISIANL

SEQ ID NO: 3464 - protein, 37 aa, Artificial Sequence
  Cyclic GFR-binding peptide
  MOD_RES (1)..(3)..(35)..(36): Xaa is C or S
XGXGEVVMEQYNKLVVKDYEDLYLMSIASLETPVXXA

SEQ ID NO: 3465 - protein, 35 aa, Artificial Sequence
  Cyclic GFR-binding peptide
  MOD_RES (1)..(33)..(34): Xaa is C or S
XARVVMNYHYKLIVNSSDDKYLVSIPSLQTPAXXP

SEQ ID NO: 3466 - protein, 34 aa, Artificial Sequence
  Cyclic GFR-binding peptide
  MOD_RES (2)..(4): Xaa is C or S
HXGXSRVVMNQYNKLIVNSSDDLYLVSIASLKTP

SEQ ID NO: 3467 - protein, 33 aa, Artificial Sequence
  Cyclic GFR-binding peptide
  MOD_RES (31)..(32): Xaa is C or S
RVVMNRHKRLIVNSSDDYYLVSTASLQTPAXXP

SEQ ID NO: 3468 - protein, 30 aa, Artificial Sequence
  Cyclic GFR-binding peptide
  MOD_RES (27)..(28): Xaa is C or S
EQYNKLTPVGMDDLYLVSIASLKTPVXXAK

SEQ ID NO: 3469 - protein, 31 aa, Artificial Sequence
  Cyclic GFR-binding peptide
  MOD_RES (1)..(1): Xaa is C or S
XEAVSMGERHKRLTPVGMDDYYLVSTASLKT

SEQ ID NO: 3470 - protein, 41 aa, Artificial Sequence
  Cyclic GFR-binding peptide
  MOD_RES (2)..(4)..(35)..(36): Xaa is C or S
SXKXSKVVMRYKKLVKPTRGVFYLISIANLDQPVXXPSASA

SEQ ID NO: 3471 - protein, 38 aa, Artificial Sequence
  Cyclic GFR-binding peptide
  MOD_RES (33)..(34): Xaa is C or S
EAVSMGERHKRLTPVGMDDYYLVSTASLKTPVXXAKGV

SEQ ID NO: 3472 - protein, 23 aa, Artificial Sequence
  Cyclic GFR-binding peptide
VIMRHKRLIKPTKGIYYLISTAS

SEQ ID NO: 3473 - protein, 22 aa, Artificial Sequence
  Cyclic GFR-binding peptide
NYHYKLIVNNSSDKYLVSIPSL

SEQ ID NO: 3474 - protein, 34 aa, Artificial Sequence
  Cyclic GFR-binding peptide
  MOD_RES (28)..(29): Xaa is C or S
GERHKRLTPVGMDDYYLVSTASLKTPVXXAKGVK

SEQ ID NO: 3475 - protein, 34 aa, Artificial Sequence
  Cyclic GFR-binding peptide
  MOD_RES (31)..(32): Xaa is C or S
SKVVMYHYKLVKPTRGVKYLISIPSLDQPVXXPS

SEQ ID NO: 3476 - protein, 24 aa, Artificial Sequence
  Cyclic GFR-binding peptide
RYKKLIVNSSDDFYLVSIANLQTP

SEQ ID NO: 3477 - protein, 27 aa, Artificial Sequence
  Cyclic GFR-binding peptide
YHYKLFIPKKRVIEKYLVSIPSLQVQT

SEQ ID NO: 3478 - protein, 28 aa, Artificial Sequence
  Cyclic GFR-binding peptide
GEVVMERYKKLVVKDYEDFYLMSIANLE

SEQ ID NO: 3479 - protein, 31 aa, Artificial Sequence
  Cyclic GFR-binding peptide
  MOD_RES (27)..(28): Xaa is C or S
ERYKKLVVKDYEDFYLMSIANLETPVXXAKP

SEQ ID NO: 3480 - protein, 41 aa, Artificial Sequence
  Cyclic GFR-binding peptide
  MOD_RES (2)..(4)..(41): Xaa is C or S
EXKXALHDELTRHKRLFIPKKRVIEYYLVSTASLQVQTPRX

SEQ ID NO: 3481 - protein, 33 aa, Artificial Sequence
  Cyclic GFR-binding peptide
  MOD_RES (30)..(31): Xaa is C or S
KVVMRHKRLVKPTRGVYYLISTASLDQPVXXPS

SEQ ID NO: 3482 - protein, 34 aa, Artificial Sequence
  Cyclic GFR-binding peptide
  MOD_RES (29)..(30): Xaa is C or S
VIMRHKRLVKPKRGVYYLISTASLAQPVXXPAAS

SEQ ID NO: 3483 - protein, 27 aa, Artificial Sequence
  Cyclic GFR-binding peptide
MNQYNKLIVNSSDDLYLVSIASLQTPA

SEQ ID NO: 3484 - protein, 31 aa, Artificial Sequence
  Cyclic GFR-binding peptide
  MOD_RES (2)..(4): Xaa is C or S
HXGXSRVVMNRYKKLIVNSSDDFYLVSIANL

SEQ ID NO: 3485 - protein, 30 aa, Artificial Sequence
  Cyclic GFR-binding peptide
  MOD_RES (28)..(28): Xaa is C or S
MNRHKRLIVNSSDDYYLVSTASLKTPAXTP

SEQ ID NO: 3486 - protein, 38 aa, Artificial Sequence
  Cyclic GFR-binding peptide
  MOD_RES (1)..(32)..(33): Xaa is C or S
XSRVIMRHKRLVKPKRGVYYLISTASLAQPVXXPAASA

SEQ ID NO: 3487 - protein, 30 aa, Artificial Sequence
  Cyclic GFR-binding peptide
  MOD_RES (1)..(1): Xaa is C or S
XSKVIMYHYKLIKPTKGIKYLISIPSLDQS

SEQ ID NO: 3488 - protein, 30 aa, Artificial Sequence
  Cyclic GFR-binding peptide
SKVIMYHYKLIKPTKGIKYLISIPSLDQSV

SEQ ID NO: 3489 - protein, 36 aa, Artificial Sequence
  Cyclic GFR-binding peptide
  MOD_RES (1)..(3)..(35)..(36): Xaa is C or S
XGXGEVVMEQYNKLVVKDYEDLYLMSIASLETPVXX

SEQ ID NO: 3490 - protein, 36 aa, Artificial Sequence
  Cyclic GFR-binding peptide
  MOD_RES (36)..(36): Xaa is C or S
LHDELTRYKKLFIPKKRVIEFYLVSIANLQVQTPRX

SEQ ID NO: 3491 - protein, 25 aa, Artificial Sequence
  Cyclic GFR-binding peptide
ERYKKLVVKDYEDFYLMSIANLETP

SEQ ID NO: 3492 - protein, 30 aa, Artificial Sequence
  Cyclic GFR-binding peptide
  MOD_RES (2)..(4): Xaa is C or S
HXGXARVVMNRHKRLIVNSSDDYYLVSTAS

SEQ ID NO: 3493 - protein, 34 aa, Artificial Sequence
  Cyclic GFR-binding peptide
  MOD_RES (2)..(4): Xaa is C or S
RXGXEAVSMGEQYNKLTPVGMDDLYLVSIASLKT

SEQ ID NO: 3494 - protein, 32 aa, Artificial Sequence
  Cyclic GFR-binding peptide
  MOD_RES (1)..(32): Xaa is C or S
XSRVIMRYKKLVKPKRGVFYLISIANLAQPVX

SEQ ID NO: 3495 - protein, 31 aa, Artificial Sequence
  Cyclic GFR-binding peptide
  MOD_RES (1)..(1): Xaa is C or S
XSRVIMRYKKLVKPKRGVFYLISIANLAQPV

SEQ ID NO: 3496 - protein, 23 aa, Artificial Sequence
  Cyclic GFR-binding peptide
RYKKLVVKDYEDFYLMSIANLET

SEQ ID NO: 3497 - protein, 30 aa, Artificial Sequence
  Cyclic GFR-binding peptide
  MOD_RES (26)..(27): Xaa is C or S
RYKKLTPVGMDDFYLVSIANLKTPVXXAKG

SEQ ID NO: 3498 - protein, 22 aa, Artificial Sequence
  Cyclic GFR-binding peptide
EQYNKLTPVGMDDLYLVSIASL

SEQ ID NO: 3499 - protein, 28 aa, Artificial Sequence
  Cyclic GFR-binding peptide
  MOD_RES (2)..(2): Xaa is C or S
KXSKVIMQYNKLIKPTKGILYLISIASL

SEQ ID NO: 3500 - protein, 23 aa, Artificial Sequence
  Cyclic GFR-binding peptide
MGERHKRLTPVGMDDYYLVSTAS

SEQ ID NO: 3501 - protein, 30 aa, Artificial Sequence
  Cyclic GFR-binding peptide
  MOD_RES (27)..(28): Xaa is C or S
MRYKKLIKPTKGIFYLISIANLDQSVXXPS

SEQ ID NO: 3502 - protein, 36 aa, Artificial Sequence
  Cyclic GFR-binding peptide
  MOD_RES (2)..(4)..(35)..(36): Xaa is C or S
SXKXSKVVMYHYKLVKPTRGVKYLISIPSLDQPVXX

SEQ ID NO: 3503 - protein, 35 aa, Artificial Sequence
  Cyclic GFR-binding peptide
  MOD_RES (2)..(4)..(35): Xaa is C or S
SXKXSKVIMRHKRLIKPTKGIYYLISTASLDQSVX

SEQ ID NO: 3504 - protein, 40 aa, Artificial Sequence
  Cyclic GFR-binding peptide
  MOD_RES (1)..(3)..(34)..(35): Xaa is C or S
XKXSKVVMRYKKLVKPTRGVFYLISIANLDQPVXXPSASA

SEQ ID NO: 3505 - protein, 34 aa, Artificial Sequence
  Cyclic GFR-binding peptide
  MOD_RES (30)..(31): Xaa is C or S
RVIMYHYKLVKPKRGVKYLISIPSLAQPVXXPAA

SEQ ID NO: 3506 - protein, 36 aa, Artificial Sequence
  Cyclic GFR-binding peptide
  MOD_RES (32)..(32): Xaa is C or S
LTYHYKLFIPKKRVIEKYLVSIPSLQVQTPRXQVNR

SEQ ID NO: 3507 - protein, 30 aa, Artificial Sequence
  Cyclic GFR-binding peptide
  MOD_RES (2)..(2): Xaa is C or S
GXGEVVMDRYKKLVVKENEDFYLMSIANLE

SEQ ID NO: 3508 - protein, 27 aa, Artificial Sequence
  Cyclic GFR-binding peptide
  MOD_RES (26)..(26): Xaa is C or S
RYKKLIVNSSDDFYLVSIANLKTPAXT

SEQ ID NO: 3509 - protein, 30 aa, Artificial Sequence
  Cyclic GFR-binding peptide
  MOD_RES (1)..(3): Xaa is C or S
XGXGEVVMDQYNKLVVKENEDLYLMSIASL

SEQ ID NO: 3510 - protein, 28 aa, Artificial Sequence
  Cyclic GFR-binding peptide
  MOD_RES (2)..(2): Xaa is C or S
GXSRVVMNYHYKLIVNSSDDKYLVSIPS

SEQ ID NO: 3511 - protein, 34 aa, Artificial Sequence
  Cyclic GFR-binding peptide
  MOD_RES (28)..(29): Xaa is C or S
MERHKRLVVKDYEDYYLMSTASLETPVXXAKPIS

SEQ ID NO: 3512 - protein, 25 aa, Artificial Sequence
  Cyclic GFR-binding peptide
VMNRYKKLIVNSSDDFYLVSIANLQ

SEQ ID NO: 3513 - protein, 24 aa, Artificial Sequence
  Cyclic GFR-binding peptide
QYNKLVVKENEDLYLMSIASLETP

SEQ ID NO: 3514 - protein, 36 aa, Artificial Sequence
  Cyclic GFR-binding peptide
  MOD_RES (1)..(33)..(34): Xaa is C or S
XSRVVMNRYKKLIVNSSDDFYLVSIANLKTPAXXPK

SEQ ID NO: 3515 - protein, 39 aa, Artificial Sequence
  Cyclic GFR-binding peptide
  MOD_RES (1)..(33)..(34): Xaa is C or S
XARVVMNRYKKLIVNSSDDFYLVSIANLQTPAXXPKPVT

SEQ ID NO: 3516 - protein, 32 aa, Artificial Sequence
  Cyclic GFR-binding peptide
  MOD_RES (27)..(28): Xaa is C or S
NQYNKLIVNNSSDLYLVSIASLKTPAXXAKPV

SEQ ID NO: 3517 - protein, 37 aa, Artificial Sequence
  Cyclic GFR-binding peptide
  MOD_RES (2)..(4)..(35)..(36): Xaa is C or S
SXKXSRVIMRYKKLVKPKRGVFYLISIANLAQPVXXP

SEQ ID NO: 3518 - protein, 31 aa, Artificial Sequence
  Cyclic GFR-binding peptide
  MOD_RES (30)..(31): Xaa is C or S
VVMNRHKRLIVNSSDDYYLVSTASLQTPAXX

SEQ ID NO: 3519 - protein, 35 aa, Artificial Sequence
  Cyclic GFR-binding peptide
  MOD_RES (1)..(3)..(34)..(35): Xaa is C or S
XKXSKVIMYHYKLIKPTKGIKYLISIPSLDQSVXX

SEQ ID NO: 3520 - protein, 30 aa, Artificial Sequence
  Cyclic GFR-binding peptide
  MOD_RES (2)..(2): Xaa is C or S
KXSKVVMYHYKLVKPTRGVKYLISIPSLDQ

SEQ ID NO: 3521 - protein, 36 aa, Artificial Sequence
  Cyclic GFR-binding peptide
  MOD_RES (2)..(4)..(36): Xaa is C or S
RXGXGEVVMDRHKRLVVKENEDYYLMSTASLETPVX

SEQ ID NO: 3522 - protein, 38 aa, Artificial Sequence
  Cyclic GFR-binding peptide
  MOD_RES (1)..(33)..(34): Xaa is C or S
XAKVVMNRYKKLIVNNSSDFYLVSIANLKTPAXXAKPV

SEQ ID NO: 3523 - protein, 36 aa, Artificial Sequence
  Cyclic GFR-binding peptide
  MOD_RES (33)..(33): Xaa is C or S
ELTRYKKLFIPKKRVIEFYLVSIANLQVQTPRXQVN

SEQ ID NO: 3524 - protein, 30 aa, Artificial Sequence
  Cyclic GFR-binding peptide
  MOD_RES (2)..(2): Xaa is C or S
GXEAVSMGEQYNKLTPVGMDDLYLVSIASL

SEQ ID NO: 3525 - protein, 29 aa, Artificial Sequence
  Cyclic GFR-binding peptide
  MOD_RES (2)..(2): Xaa is C or S
GXSRVVMNYHYKLIVNSSDDKYLVSIPSL

SEQ ID NO: 3526 - protein, 29 aa, Artificial Sequence
  Cyclic GFR-binding peptide
  MOD_RES (2)..(4): Xaa is C or S
SXKXSKVVMYHYKLVKPTRGVKYLISIPS

SEQ ID NO: 3527 - protein, 25 aa, Artificial Sequence
  Cyclic GFR-binding peptide
MNYHYKLIVNSSDDKYLVSIPSLKT

SEQ ID NO: 3528 - protein, 29 aa, Artificial Sequence
  Cyclic GFR-binding peptide
  MOD_RES (2)..(4): Xaa is C or S
SXKXSRVIMRYKKLVKPKRGVFYLISIAN

SEQ ID NO: 3529 - protein, 30 aa, Artificial Sequence
  Cyclic GFR-binding peptide
KVVMNRYKKLIVNNSSDFYLVSIANLKTPA

SEQ ID NO: 3530 - protein, 29 aa, Artificial Sequence
  Cyclic GFR-binding peptide
  MOD_RES (29)..(29): Xaa is C or S
VMNQYNKLIVNNSSDLYLVSIASLKTPAX

SEQ ID NO: 3531 - protein, 23 aa, Artificial Sequence
  Cyclic GFR-binding peptide
NYHYKLIVNSSDDKYLVSIPSLK

SEQ ID NO: 3532 - protein, 37 aa, Artificial Sequence
  Cyclic GFR-binding peptide
  MOD_RES (1)..(3)..(35)..(36): Xaa is C or S
XGXGEVVMDRHKRLVVKENEDYYLMSTASLETPVXXA

SEQ ID NO: 3533 - protein, 26 aa, Artificial Sequence
  Cyclic GFR-binding peptide
DELTYHYKLFIPKKRVIEKYLVSIPS

SEQ ID NO: 3534 - protein, 33 aa, Artificial Sequence
  Cyclic GFR-binding peptide
  MOD_RES (29)..(30): Xaa is C or S
MGERHKRLTPVGMDDYYLVSTASLKTPVXXAKG

SEQ ID NO: 3535 - protein, 38 aa, Artificial Sequence
  Cyclic GFR-binding peptide
  MOD_RES (2)..(35)..(36): Xaa is C or S
GXEAVSMGERHKRLTPVGMDDYYLVSTASLKTPVXXAK

SEQ ID NO: 3536 - protein, 29 aa, Artificial Sequence
  Cyclic GFR-binding peptide
  MOD_RES (1)..(1): Xaa is C or S
XSRVVMNRYKKLIVNSSDDFYLVSIANLK

SEQ ID NO: 3537 - protein, 30 aa, Artificial Sequence
  Cyclic GFR-binding peptide
  MOD_RES (1)..(1): Xaa is C or S
XGEVVMDQYNKLVVKENEDLYLMSIASLET

SEQ ID NO: 3538 - protein, 28 aa, Artificial Sequence
  Cyclic GFR-binding peptide
  MOD_RES (26)..(26): Xaa is C or S
RYKKLIVNSSDDFYLVSIANLKTPAXTP

SEQ ID NO: 3539 - protein, 31 aa, Artificial Sequence
  Cyclic GFR-binding peptide
  MOD_RES (31)..(31): Xaa is C or S
SKVIMRHKRLIKPTKGIYYLISTASLDQSVX

SEQ ID NO: 3540 - protein, 33 aa, Artificial Sequence
  Cyclic GFR-binding peptide
  MOD_RES (29)..(30): Xaa is C or S
VMERHKRLVVKDYEDYYLMSTASLETPVXXAKP

SEQ ID NO: 3541 - protein, 38 aa, Artificial Sequence
  Cyclic GFR-binding peptide
  MOD_RES (1)..(33): Xaa is C or S
XSRVVMNYHYKLIVNSSDDKYLVSIPSLKTPAXTPKTV

SEQ ID NO: 3542 - protein, 31 aa, Artificial Sequence
  Cyclic GFR-binding peptide
  MOD_RES (28)..(29): Xaa is C or S
MEYHYKLVVKDYEDKYLMSIPSLETPVXXAK

SEQ ID NO: 3543 - protein, 27 aa, Artificial Sequence
  Cyclic GFR-binding peptide
SRVIMRHKRLVKPKRGVYYLISTASLA

SEQ ID NO: 3544 - protein, 35 aa, Artificial Sequence
  Cyclic GFR-binding peptide
  MOD_RES (2)..(4)..(35): Xaa is C or S
SXKXSKVVMRYKKLVKPTRGVFYLISIANLDQPVX

SEQ ID NO: 3545 - protein, 30 aa, Artificial Sequence
  Cyclic GFR-binding peptide
  MOD_RES (1)..(1): Xaa is C or S
XALHDELTRHKRLFIPKKRVIEYYLVSTAS

SEQ ID NO: 3546 - protein, 29 aa, Artificial Sequence
  Cyclic GFR-binding peptide
  MOD_RES (26)..(27): Xaa is C or S
RYKKLVKPTRGVFYLISIANLDQPVXXPS

SEQ ID NO: 3547 - protein, 34 aa, Artificial Sequence
  Cyclic GFR-binding peptide
  MOD_RES (29)..(30): Xaa is C or S
VMDQYNKLVVKENEDLYLMSIASLETPVXXAKPI

SEQ ID NO: 3548 - protein, 21 aa, Artificial Sequence
  Cyclic GFR-binding peptide
RHKRLIKPTKGIYYLISTASL

SEQ ID NO: 3549 - protein, 35 aa, Artificial Sequence
  Cyclic GFR-binding peptide
  MOD_RES (1)..(3)..(35): Xaa is C or S
XGXGEVVMEYHYKLVVKDYEDKYLMSIPSLETPVX

SEQ ID NO: 3550 - protein, 35 aa, Artificial Sequence
  Cyclic GFR-binding peptide
  MOD_RES (2)..(35): Xaa is C or S
GXEAVSMGEQYNKLTPVGMDDLYLVSIASLKTPVX

SEQ ID NO: 3551 - protein, 37 aa, Artificial Sequence
  Cyclic GFR-binding peptide
  MOD_RES (31)..(32): Xaa is C or S
EVVMDRHKRLVVKENEDYYLMSTASLETPVXXAKPIK

SEQ ID NO: 3552 - protein, 29 aa, Artificial Sequence
  Cyclic GFR-binding peptide
  MOD_RES (28)..(28): Xaa is C or S
MNQYNKLIVNSSDDLYLVSIASLKTPAXT

SEQ ID NO: 3553 - protein, 29 aa, Artificial Sequence
  Cyclic GFR-binding peptide
  MOD_RES (27)..(28): Xaa is C or S
NYHYKLIVNNSSDKYLVSIPSLKTPAXXA

SEQ ID NO: 3554 - protein, 32 aa, Artificial Sequence
  Cyclic GFR-binding peptide
  MOD_RES (2)..(4): Xaa is C or S
HXGXSRVVMNRHKRLIVNSSDDYYLVSTASLK

SEQ ID NO: 3555 - protein, 27 aa, Artificial Sequence
  Cyclic GFR-binding peptide
MGEQYNKLTPVGMDDLYLVSIASLKTP

SEQ ID NO: 3556 - protein, 27 aa, Artificial Sequence
  Cyclic GFR-binding peptide
  MOD_RES (1)..(1): Xaa is C or S
XSKVVMRYKKLVKPTRGVFYLISIANL

SEQ ID NO: 3557 - protein, 22 aa, Artificial Sequence
  Cyclic GFR-binding peptide
NQYNKLIVNSSDDLYLVSIASL

SEQ ID NO: 3558 - protein, 26 aa, Artificial Sequence
  Cyclic GFR-binding peptide
VVMERHKRLVVKDYEDYYLMSTASLE

SEQ ID NO: 3559 - protein, 41 aa, Artificial Sequence
  Cyclic GFR-binding peptide
  MOD_RES (1)..(38): Xaa is C or S
XALHDELTYHYKLFIPKKRVIEKYLVSIPSLQVQTPRXQVN

SEQ ID NO: 3560 - protein, 28 aa, Artificial Sequence
  Cyclic GFR-binding peptide
VMDRYKKLVVKENEDFYLMSIANLETPV

SEQ ID NO: 3561 - protein, 41 aa, Artificial Sequence
  Cyclic GFR-binding peptide
  MOD_RES (2)..(4)..(36)..(37): Xaa is C or S
RXGXGEVVMERYKKLVVKDYEDFYLMSIANLETPVXXAKPI

SEQ ID NO: 3562 - protein, 29 aa, Artificial Sequence
  Cyclic GFR-binding peptide
  MOD_RES (29)..(29): Xaa is C or S
VVMYHYKLVKPTRGVKYLISIPSLDQPVX

SEQ ID NO: 3563 - protein, 41 aa, Artificial Sequence
  Cyclic GFR-binding peptide
  MOD_RES (1)..(3)..(35): Xaa is C or S
XGXSRVVMNRYKKLIVNSSDDFYLVSIANLKTPAXTPKTVH

SEQ ID NO: 3564 - protein, 26 aa, Artificial Sequence
  Cyclic GFR-binding peptide
  MOD_RES (1)..(1): Xaa is C or S
XSKVVMYHYKLVKPTRGVKYLISIPS

SEQ ID NO: 3565 - protein, 26 aa, Artificial Sequence
  Cyclic GFR-binding peptide
NRYKKLIVNSSDDFYLVSIANLQTPA

SEQ ID NO: 3566 - protein, 27 aa, Artificial Sequence
  Cyclic GFR-binding peptide
DELTRHKRLFIPKKRVIEYYLVSTASL

SEQ ID NO: 3567 - protein, 27 aa, Artificial Sequence
  Cyclic GFR-binding peptide
  MOD_RES (2)..(2): Xaa is C or S
KXSKVIMYHYKLIKPTKGIKYLISIPS

SEQ ID NO: 3568 - protein, 24 aa, Artificial Sequence
  Cyclic GFR-binding peptide
VIMRYKKLVKPKRGVFYLISIANL

SEQ ID NO: 3569 - protein, 29 aa, Artificial Sequence
  Cyclic GFR-binding peptide
  MOD_RES (27)..(28): Xaa is C or S
ERHKRLVVKDYEDYYLMSTASLETPVXXA

SEQ ID NO: 3570 - protein, 37 aa, Artificial Sequence
  Cyclic GFR-binding peptide
  MOD_RES (2)..(4)..(35)..(36): Xaa is C or S
SXKXSKVVMRHKRLVKPTRGVYYLISTASLDQPVXXP

SEQ ID NO: 3571 - protein, 25 aa, Artificial Sequence
  Cyclic GFR-binding peptide
DQYNKLVVKENEDLYLMSIASLETP

SEQ ID NO: 3572 - protein, 44 aa, Artificial Sequence
  Cyclic GFR-binding peptide
  MOD_RES (2)..(4)..(41): Xaa is C or S
EXKXALHDELTRHKRLFIPKKRVIEYYLVSTASLQVQTPRXQVN

SEQ ID NO: 3573 - protein, 29 aa, Artificial Sequence
  Cyclic GFR-binding peptide
  MOD_RES (29)..(29): Xaa is C or S
VMNQYNKLIVNSSDDLYLVSIASLKTPAX

SEQ ID NO: 3574 - protein, 31 aa, Artificial Sequence
  Cyclic GFR-binding peptide
  MOD_RES (2)..(2): Xaa is C or S
GXEAVSMGERHKRLTPVGMDDYYLVSTASLK

SEQ ID NO: 3575 - protein, 27 aa, Artificial Sequence
  Cyclic GFR-binding peptide
KVVMRYKKLVKPTRGVFYLISIANLDQ

SEQ ID NO: 3576 - protein, 32 aa, Artificial Sequence
  Cyclic GFR-binding peptide
  MOD_RES (2)..(4): Xaa is C or S
HXGXAKVVMNRHKRLIVNNSSDYYLVSTASLK

SEQ ID NO: 3577 - protein, 30 aa, Artificial Sequence
  Cyclic GFR-binding peptide
  MOD_RES (30)..(30): Xaa is C or S
VVMDQYNKLVVKENEDLYLMSIASLETPVX

SEQ ID NO: 3578 - protein, 29 aa, Artificial Sequence
  Cyclic GFR-binding peptide
EVVMERHKRLVVKDYEDYYLMSTASLETP

SEQ ID NO: 3579 - protein, 34 aa, Artificial Sequence
  Cyclic GFR-binding peptide
  MOD_RES (1)..(3)..(34): Xaa is C or S
XKXSKVIMYHYKLIKPTKGIKYLISIPSLDQSVX

SEQ ID NO: 3580 - protein, 36 aa, Artificial Sequence
  Cyclic GFR-binding peptide
  MOD_RES (2)..(33)..(34): Xaa is C or S
KXSRVIMQYNKLVKPKRGVLYLISIASLAQPVXXPA

SEQ ID NO: 3581 - protein, 35 aa, Artificial Sequence
  Cyclic GFR-binding peptide
  MOD_RES (30)..(31): Xaa is C or S
VVMERYKKLVVKDYEDFYLMSIANLETPVXXAKPI

SEQ ID NO: 3582 - protein, 27 aa, Artificial Sequence
  Cyclic GFR-binding peptide
  MOD_RES (2)..(2): Xaa is C or S
KXSRVIMYHYKLVKPKRGVKYLISIPS

SEQ ID NO: 3583 - protein, 36 aa, Artificial Sequence
  Cyclic GFR-binding peptide
  MOD_RES (2)..(35)..(36): Xaa is C or S
GXEAVSMGEQYNKLTPVGMDDLYLVSIASLKTPVXX

SEQ ID NO: 3584 - protein, 34 aa, Artificial Sequence
  Cyclic GFR-binding peptide
  MOD_RES (29)..(29): Xaa is C or S
VMNQYNKLIVNSSDDLYLVSIASLKTPAXTPKTV

SEQ ID NO: 3585 - protein, 30 aa, Artificial Sequence
  Cyclic GFR-binding peptide
  MOD_RES (27)..(28): Xaa is C or S
MQYNKLVKPTRGVLYLISIASLDQPVXXPS

SEQ ID NO: 3586 - protein, 32 aa, Artificial Sequence
  Cyclic GFR-binding peptide
  MOD_RES (26)..(27): Xaa is C or S
RYKKLIVNNSSDFYLVSIANLKTPAXXAKPVA

SEQ ID NO: 3587 - protein, 27 aa, Artificial Sequence
  Cyclic GFR-binding peptide
  MOD_RES (26)..(27): Xaa is C or S
RHKRLIVNSSDDYYLVSTASLQTPAXX

SEQ ID NO: 3588 - protein, 34 aa, Artificial Sequence
  Cyclic GFR-binding peptide
  MOD_RES (30)..(30): Xaa is C or S
RYKKLFIPKKRVIEFYLVSIANLQVQTPRXQVNR

SEQ ID NO: 3589 - protein, 35 aa, Artificial Sequence
  Cyclic GFR-binding peptide
ALHDELTRYKKLFIPKKRVIEFYLVSIANLQVQTP

SEQ ID NO: 3590 - protein, 42 aa, Artificial Sequence
  Cyclic GFR-binding peptide
  MOD_RES (1)..(38): Xaa is C or S
XALHDELTRYKKLFIPKKRVIEFYLVSIANLQVQTPRXQVNR

SEQ ID NO: 3591 - protein, 34 aa, Artificial Sequence
  Cyclic GFR-binding peptide
  MOD_RES (1)..(32)..(33): Xaa is C or S
XSKVVMQYNKLVKPTRGVLYLISIASLDQPVXXP

SEQ ID NO: 3592 - protein, 29 aa, Artificial Sequence
  Cyclic GFR-binding peptide
GEVVMDYHYKLVVKENEDKYLMSIPSLET

SEQ ID NO: 3593 - protein, 28 aa, Artificial Sequence
  Cyclic GFR-binding peptide
  MOD_RES (26)..(27): Xaa is C or S
RYKKLVVKENEDFYLMSIANLETPVXXA

SEQ ID NO: 3594 - protein, 31 aa, Artificial Sequence
  Cyclic GFR-binding peptide
  MOD_RES (28)..(29): Xaa is C or S
MERHKRLVVKDYEDYYLMSTASLETPVXXAK

SEQ ID NO: 3595 - protein, 27 aa, Artificial Sequence
  Cyclic GFR-binding peptide
  MOD_RES (26)..(27): Xaa is C or S
YHYKLIVNNSSDKYLVSIPSLKTPAXX

SEQ ID NO: 3596 - protein, 42 aa, Artificial Sequence
  Cyclic GFR-binding peptide
  MOD_RES (2)..(4)..(37)..(38): Xaa is C or S
RXGXEAVSMGERYKKLTPVGMDDFYLVSIANLKTPVXXAKGV

SEQ ID NO: 3597 - protein, 29 aa, Artificial Sequence
  Cyclic GFR-binding peptide
  MOD_RES (27)..(28): Xaa is C or S
ERYKKLTPVGMDDFYLVSIANLKTPVXXA

SEQ ID NO: 3598 - protein, 32 aa, Artificial Sequence
  Cyclic GFR-binding peptide
  MOD_RES (28)..(29): Xaa is C or S
MNYHYKLIVNSSDDKYLVSIPSLQTPAXXPKP

SEQ ID NO: 3599 - protein, 39 aa, Artificial Sequence
  Cyclic GFR-binding peptide
  MOD_RES (1)..(33): Xaa is C or S
XSRVVMNQYNKLIVNSSDDLYLVSIASLKTPAXTPKTVH

SEQ ID NO: 3600 - protein, 25 aa, Artificial Sequence
  Cyclic GFR-binding peptide
RVIMQYNKLVKPKRGVLYLISIASL

SEQ ID NO: 3601 - protein, 37 aa, Artificial Sequence
  Cyclic GFR-binding peptide
  MOD_RES (2)..(4)..(36): Xaa is C or S
HXGXSRVVMNRHKRLIVNSSDDYYLVSTASLKTPAXT

SEQ ID NO: 3602 - protein, 30 aa, Artificial Sequence
  Cyclic GFR-binding peptide
  MOD_RES (1)..(3): Xaa is C or S
XKXSRVIMRYKKLVKPKRGVFYLISIANLA

SEQ ID NO: 3603 - protein, 34 aa, Artificial Sequence
  Cyclic GFR-binding peptide
  MOD_RES (1)..(1): Xaa is C or S
XALHDELTYHYKLFIPKKRVIEKYLVSIPSLQVQ

SEQ ID NO: 3604 - protein, 27 aa, Artificial Sequence
  Cyclic GFR-binding peptide
GEVVMDYHYKLVVKENEDKYLMSIPSL

SEQ ID NO: 3605 - protein, 29 aa, Artificial Sequence
  Cyclic GFR-binding peptide
  MOD_RES (29)..(29): Xaa is C or S
VMNRHKRLIVNSSDDYYLVSTASLKTPAX

SEQ ID NO: 3606 - protein, 31 aa, Artificial Sequence
  Cyclic GFR-binding peptide
  MOD_RES (29)..(30): Xaa is C or S
VMNRYKKLIVNSSDDFYLVSIANLKTPAXXP

SEQ ID NO: 3607 - protein, 33 aa, Artificial Sequence
  Cyclic GFR-binding peptide
  MOD_RES (27)..(28): Xaa is C or S
MQYNKLIKPTKGILYLISIASLDQSVXXPSASA

SEQ ID NO: 3608 - protein, 33 aa, Artificial Sequence
  Cyclic GFR-binding peptide
  MOD_RES (31)..(31): Xaa is C or S
RVVMNYHYKLIVNSSDDKYLVSIPSLKTPAXTP

SEQ ID NO: 3609 - protein, 32 aa, Artificial Sequence
  Cyclic GFR-binding peptide
  MOD_RES (28)..(29): Xaa is C or S
MNRHKRLIVNSSDDYYLVSTASLQTPAXXPKP

SEQ ID NO: 3610 - protein, 22 aa, Artificial Sequence
  Cyclic GFR-binding peptide
VMRYKKLVKPTRGVFYLISIAN

SEQ ID NO: 3611 - protein, 27 aa, Artificial Sequence
  Cyclic GFR-binding peptide
  MOD_RES (26)..(27): Xaa is C or S
QYNKLVVKDYEDLYLMSIASLETPVXX

SEQ ID NO: 3612 - protein, 30 aa, Artificial Sequence
  Cyclic GFR-binding peptide
  MOD_RES (27)..(28): Xaa is C or S
NYHYKLIVNSSDDKYLVSIPSLQTPAXXPK

SEQ ID NO: 3613 - protein, 30 aa, Artificial Sequence
  Cyclic GFR-binding peptide
  MOD_RES (26)..(27): Xaa is C or S
QYNKLVKPKRGVLYLISIASLAQPVXXPAA

SEQ ID NO: 3614 - protein, 37 aa, Artificial Sequence
  Cyclic GFR-binding peptide
  MOD_RES (33)..(33): Xaa is C or S
ELTRHKRLFIPKKRVIEYYLVSTASLQVQTPRXQVNR

SEQ ID NO: 3615 - protein, 31 aa, Artificial Sequence
  Cyclic GFR-binding peptide
  MOD_RES (29)..(30): Xaa is C or S
VMNQYNKLIVNNSSDLYLVSIASLKTPAXXA

SEQ ID NO: 3616 - protein, 39 aa, Artificial Sequence
  Cyclic GFR-binding peptide
  MOD_RES (2)..(33)..(34): Xaa is C or S
KXSRVIMQYNKLVKPKRGVLYLISIASLAQPVXXPAASA

SEQ ID NO: 3617 - protein, 35 aa, Artificial Sequence
  Cyclic GFR-binding peptide
  MOD_RES (1)..(3)..(34)..(35): Xaa is C or S
XKXSRVIMRHKRLVKPKRGVYYLISTASLAQPVXX

SEQ ID NO: 3618 - protein, 28 aa, Artificial Sequence
  Cyclic GFR-binding peptide
TRYKKLFIPKKRVIEFYLVSIANLQVQT

SEQ ID NO: 3619 - protein, 30 aa, Artificial Sequence
  Cyclic GFR-binding peptide
TRYKKLFIPKKRVIEFYLVSIANLQVQTPR

SEQ ID NO: 3620 - protein, 31 aa, Artificial Sequence
  Cyclic GFR-binding peptide
  MOD_RES (2)..(2): Xaa is C or S
KXALHDELTQYNKLFIPKKRVIELYLVSIAS

SEQ ID NO: 3621 - protein, 31 aa, Artificial Sequence
  Cyclic GFR-binding peptide
  MOD_RES (2)..(4): Xaa is C or S
HXGXSRVVMNQYNKLIVNSSDDLYLVSIASL

SEQ ID NO: 3622 - protein, 28 aa, Artificial Sequence
  Cyclic GFR-binding peptide
EVVMDQYNKLVVKENEDLYLMSIASLET

SEQ ID NO: 3623 - protein, 40 aa, Artificial Sequence
  Cyclic GFR-binding peptide
  MOD_RES (2)..(4)..(36)..(37): Xaa is C or S
HXGXAKVVMNQYNKLIVNNSSDLYLVSIASLKTPAXXAKP

SEQ ID NO: 3624 - protein, 31 aa, Artificial Sequence
  Cyclic GFR-binding peptide
  MOD_RES (28)..(29): Xaa is C or S
IMRYKKLIKPTKGIFYLISIANLDQSVXXPS

SEQ ID NO: 3625 - protein, 32 aa, Artificial Sequence
  Cyclic GFR-binding peptide
ALHDELTRYKKLFIPKKRVIEFYLVSIANLQV

SEQ ID NO: 3626 - protein, 26 aa, Artificial Sequence
  Cyclic GFR-binding peptide
KVVMQYNKLVKPTRGVLYLISIASLD

SEQ ID NO: 3627 - protein, 26 aa, Artificial Sequence
  Cyclic GFR-binding peptide
VVMRHKRLVKPTRGVYYLISTASLDQ

SEQ ID NO: 3628 - protein, 26 aa, Artificial Sequence
  Cyclic GFR-binding peptide
TQYNKLFIPKKRVIELYLVSIASLQV

SEQ ID NO: 3629 - protein, 31 aa, Artificial Sequence
  Cyclic GFR-binding peptide
  MOD_RES (30)..(31): Xaa is C or S
KVIMRHKRLIKPTKGIYYLISTASLDQSVXX

SEQ ID NO: 3630 - protein, 31 aa, Artificial Sequence
  Cyclic GFR-binding peptide
  MOD_RES (2)..(2): Xaa is C or S
GXSRVVMNQYNKLIVNSSDDLYLVSIASLKT

SEQ ID NO: 3631 - protein, 33 aa, Artificial Sequence
  Cyclic GFR-binding peptide
  MOD_RES (2)..(33): Xaa is C or S
KXSKVVMRYKKLVKPTRGVFYLISIANLDQPVX

SEQ ID NO: 3632 - protein, 26 aa, Artificial Sequence
  Cyclic GFR-binding peptide
LTRYKKLFIPKKRVIEFYLVSIANLQ

SEQ ID NO: 3633 - protein, 30 aa, Artificial Sequence
  Cyclic GFR-binding peptide
  MOD_RES (2)..(4): Xaa is C or S
SXKXSKVVMRYKKLVKPTRGVFYLISIANL

SEQ ID NO: 3634 - protein, 33 aa, Artificial Sequence
  Cyclic GFR-binding peptide
  MOD_RES (28)..(29): Xaa is C or S
VMYHYKLVKPTRGVKYLISIPSLDQPVXXPSAS

SEQ ID NO: 3635 - protein, 28 aa, Artificial Sequence
  Cyclic GFR-binding peptide
EVVMERHKRLVVKDYEDYYLMSTASLET

SEQ ID NO: 3636 - protein, 33 aa, Artificial Sequence
  Cyclic GFR-binding peptide
  MOD_RES (2)..(33): Xaa is C or S
KXSKVIMRYKKLIKPTKGIFYLISIANLDQSVX

SEQ ID NO: 3637 - protein, 31 aa, Artificial Sequence
  Cyclic GFR-binding peptide
  MOD_RES (2)..(2): Xaa is C or S
GXGEVVMEQYNKLVVKDYEDLYLMSIASLET

SEQ ID NO: 3638 - protein, 36 aa, Artificial Sequence
  Cyclic GFR-binding peptide
  MOD_RES (2)..(33)..(34): Xaa is C or S
KXSKVVMRHKRLVKPTRGVYYLISTASLDQPVXXPS

SEQ ID NO: 3639 - protein, 26 aa, Artificial Sequence
  Cyclic GFR-binding peptide
VVMNQYNKLIVNNSSDLYLVSIASLK

SEQ ID NO: 3640 - protein, 40 aa, Artificial Sequence
  Cyclic GFR-binding peptide
  MOD_RES (2)..(34): Xaa is C or S
GXSRVVMNYHYKLIVNSSDDKYLVSIPSLKTPAXTPKTVH

SEQ ID NO: 3641 - protein, 29 aa, Artificial Sequence
  Cyclic GFR-binding peptide
  MOD_RES (1)..(1): Xaa is C or S
XGEVVMDRHKRLVVKENEDYYLMSTASLE

SEQ ID NO: 3642 - protein, 37 aa, Artificial Sequence
  Cyclic GFR-binding peptide
  MOD_RES (2)..(34)..(35): Xaa is C or S
GXGEVVMDQYNKLVVKENEDLYLMSIASLETPVXXAK

SEQ ID NO: 3643 - protein, 24 aa, Artificial Sequence
  Cyclic GFR-binding peptide
EYHYKLVVKDYEDKYLMSIPSLET

SEQ ID NO: 3644 - protein, 20 aa, Artificial Sequence
  Cyclic GFR-binding peptide
RHKRLVKPKRGVYYLISTAS

SEQ ID NO: 3645 - protein, 36 aa, Artificial Sequence
  Cyclic GFR-binding peptide
  MOD_RES (2)..(4)..(35)..(36): Xaa is C or S
SXKXSKVVMQYNKLVKPTRGVLYLISIASLDQPVXX

SEQ ID NO: 3646 - protein, 40 aa, Artificial Sequence
  Cyclic GFR-binding peptide
  MOD_RES (2)..(4)..(36)..(37): Xaa is C or S
RXGXGEVVMERYKKLVVKDYEDFYLMSIANLETPVXXAKP

SEQ ID NO: 3647 - protein, 40 aa, Artificial Sequence
  Cyclic GFR-binding peptide
  MOD_RES (2)..(35)..(36): Xaa is C or S
GXEAVSMGERHKRLTPVGMDDYYLVSTASLKTPVXXAKGV

SEQ ID NO: 3648 - protein, 32 aa, Artificial Sequence
  Cyclic GFR-binding peptide
  MOD_RES (31)..(32): Xaa is C or S
EVVMERYKKLVVKDYEDFYLMSIANLETPVXX

SEQ ID NO: 3649 - protein, 27 aa, Artificial Sequence
  Cyclic GFR-binding peptide
  MOD_RES (27)..(27): Xaa is C or S
ERHKRLVVKDYEDYYLMSTASLETPVX

SEQ ID NO: 3650 - protein, 27 aa, Artificial Sequence
  Cyclic GFR-binding peptide
LTRYKKLFIPKKRVIEFYLVSIANLQV

SEQ ID NO: 3651 - protein, 36 aa, Artificial Sequence
  Cyclic GFR-binding peptide
  MOD_RES (1)..(34)..(35): Xaa is C or S
XEAVSMGERHKRLTPVGMDDYYLVSTASLKTPVXXA

SEQ ID NO: 3652 - protein, 32 aa, Artificial Sequence
  Cyclic GFR-binding peptide
  MOD_RES (2)..(4): Xaa is C or S
SXKXSKVIMRHKRLIKPTKGIYYLISTASLDQ

SEQ ID NO: 3653 - protein, 32 aa, Artificial Sequence
  Cyclic GFR-binding peptide
  MOD_RES (1)..(1): Xaa is C or S
XGEVVMERYKKLVVKDYEDFYLMSIANLETPV

SEQ ID NO: 3654 - protein, 30 aa, Artificial Sequence
  Cyclic GFR-binding peptide
RVVMNYHYKLIVNSSDDKYLVSIPSLQTPA

SEQ ID NO: 3655 - protein, 41 aa, Artificial Sequence
  Cyclic GFR-binding peptide
  MOD_RES (1)..(3)..(35)..(36): Xaa is C or S
XGXGEVVMDQYNKLVVKENEDLYLMSIASLETPVXXAKPIK

SEQ ID NO: 3656 - protein, 39 aa, Artificial Sequence
  Cyclic GFR-binding peptide
  MOD_RES (2)..(33)..(34): Xaa is C or S
KXSKVVMRHKRLVKPTRGVYYLISTASLDQPVXXPSASA

SEQ ID NO: 3657 - protein, 31 aa, Artificial Sequence
  Cyclic GFR-binding peptide
  MOD_RES (30)..(31): Xaa is C or S
VVMNRYKKLIVNNSSDFYLVSIANLKTPAXX

SEQ ID NO: 3658 - protein, 23 aa, Artificial Sequence
  Cyclic GFR-binding peptide
RYKKLVKPKRGVFYLISIANLAQ

SEQ ID NO: 3659 - protein, 38 aa, Artificial Sequence
  Cyclic GFR-binding peptide
  MOD_RES (1)..(3)..(35)..(36): Xaa is C or S
XGXGEVVMDYHYKLVVKENEDKYLMSIPSLETPVXXAK

SEQ ID NO: 3660 - protein, 33 aa, Artificial Sequence
  Cyclic GFR-binding peptide
  MOD_RES (29)..(30): Xaa is C or S
MGEQYNKLTPVGMDDLYLVSIASLKTPVXXAKG

SEQ ID NO: 3661 - protein, 33 aa, Artificial Sequence
  Cyclic GFR-binding peptide
  MOD_RES (28)..(29): Xaa is C or S
MNQYNKLIVNNSSDLYLVSIASLKTPAXXAKPV

SEQ ID NO: 3662 - protein, 36 aa, Artificial Sequence
  Cyclic GFR-binding peptide
  MOD_RES (1)..(3)..(35)..(36): Xaa is C or S
XGXSRVVMNRHKRLIVNSSDDYYLVSTASLKTPAXX

SEQ ID NO: 3663 - protein, 28 aa, Artificial Sequence
  Cyclic GFR-binding peptide
  MOD_RES (26)..(27): Xaa is C or S
RHKRLIKPTKGIYYLISTASLDQSVXXP

SEQ ID NO: 3664 - protein, 33 aa, Artificial Sequence
  Cyclic GFR-binding peptide
  MOD_RES (1)..(3): Xaa is C or S
XGXSRVVMNYHYKLIVNSSDDKYLVSIPSLKTP

SEQ ID NO: 3665 - protein, 32 aa, Artificial Sequence
  Cyclic GFR-binding peptide
  MOD_RES (1)..(3): Xaa is C or S
XGXGEVVMERHKRLVVKDYEDYYLMSTASLET

SEQ ID NO: 3666 - protein, 26 aa, Artificial Sequence
  Cyclic GFR-binding peptide
VVMNRYKKLIVNSSDDFYLVSIANLQ

SEQ ID NO: 3667 - protein, 34 aa, Artificial Sequence
  Cyclic GFR-binding peptide
  MOD_RES (2)..(34): Xaa is C or S
GXARVVMNRHKRLIVNSSDDYYLVSTASLQTPAX

SEQ ID NO: 3668 - protein, 28 aa, Artificial Sequence
  Cyclic GFR-binding peptide
GEVVMDQYNKLVVKENEDLYLMSIASLE

SEQ ID NO: 3669 - protein, 38 aa, Artificial Sequence
  Cyclic GFR-binding peptide
  MOD_RES (2)..(34)..(35): Xaa is C or S
GXAKVVMNRYKKLIVNNSSDFYLVSIANLKTPAXXAKP

SEQ ID NO: 3670 - protein, 37 aa, Artificial Sequence
  Cyclic GFR-binding peptide
  MOD_RES (31)..(32): Xaa is C or S
KVVMNYHYKLIVNNSSDKYLVSIPSLKTPAXXAKPVA

SEQ ID NO: 3671 - protein, 26 aa, Artificial Sequence
  Cyclic GFR-binding peptide
VVMQYNKLVKPTRGVLYLISIASLDQ

SEQ ID NO: 3672 - protein, 33 aa, Artificial Sequence
  Cyclic GFR-binding peptide
  MOD_RES (31)..(32): Xaa is C or S
SRVIMYHYKLVKPKRGVKYLISIPSLAQPVXXP

SEQ ID NO: 3673 - protein, 33 aa, Artificial Sequence
  Cyclic GFR-binding peptide
  MOD_RES (28)..(29): Xaa is C or S
GEQYNKLTPVGMDDLYLVSIASLKTPVXXAKGV

SEQ ID NO: 3674 - protein, 35 aa, Artificial Sequence
  Cyclic GFR-binding peptide
  MOD_RES (31)..(32): Xaa is C or S
SRVIMRHKRLVKPKRGVYYLISTASLAQPVXXPAA

SEQ ID NO: 3675 - protein, 25 aa, Artificial Sequence
  Cyclic GFR-binding peptide
MNRHKRLIVNSSDDYYLVSTASLKT

SEQ ID NO: 3676 - protein, 24 aa, Artificial Sequence
  Cyclic GFR-binding peptide
RYKKLIVNSSDDFYLVSIANLKTP

SEQ ID NO: 3677 - protein, 21 aa, Artificial Sequence
  Cyclic GFR-binding peptide
RHKRLVVKDYEDYYLMSTASL

SEQ ID NO: 3678 - protein, 28 aa, Artificial Sequence
  Cyclic GFR-binding peptide
  MOD_RES (2)..(2): Xaa is C or S
KXSRVIMRHKRLVKPKRGVYYLISTASL

SEQ ID NO: 3679 - protein, 29 aa, Artificial Sequence
  Cyclic GFR-binding peptide
ALHDELTRHKRLFIPKKRVIEYYLVSTAS

SEQ ID NO: 3680 - protein, 25 aa, Artificial Sequence
  Cyclic GFR-binding peptide
QYNKLVKPKRGVLYLISIASLAQPV

SEQ ID NO: 3681 - protein, 22 aa, Artificial Sequence
  Cyclic GFR-binding peptide
QYNKLVKPKRGVLYLISIASLA

SEQ ID NO: 3682 - protein, 34 aa, Artificial Sequence
  Cyclic GFR-binding peptide
  MOD_RES (28)..(29): Xaa is C or S
MEYHYKLVVKDYEDKYLMSIPSLETPVXXAKPIS

SEQ ID NO: 3683 - protein, 38 aa, Artificial Sequence
  Cyclic GFR-binding peptide
  MOD_RES (1)..(33)..(34): Xaa is C or S
XARVVMNRYKKLIVNSSDDFYLVSIANLQTPAXXPKPV

SEQ ID NO: 3684 - protein, 30 aa, Artificial Sequence
  Cyclic GFR-binding peptide
AKVVMNYHYKLIVNNSSDKYLVSIPSLKTP

SEQ ID NO: 3685 - protein, 24 aa, Artificial Sequence
  Cyclic GFR-binding peptide
GERHKRLTPVGMDDYYLVSTASLK

SEQ ID NO: 3686 - protein, 37 aa, Artificial Sequence
  Cyclic GFR-binding peptide
  MOD_RES (2)..(4)..(35)..(36): Xaa is C or S
SXKXSKVIMYHYKLIKPTKGIKYLISIPSLDQSVXXP

SEQ ID NO: 3687 - protein, 27 aa, Artificial Sequence
  Cyclic GFR-binding peptide
  MOD_RES (27)..(27): Xaa is C or S
DYHYKLVVKENEDKYLMSIPSLETPVX

SEQ ID NO: 3688 - protein, 33 aa, Artificial Sequence
  Cyclic GFR-binding peptide
  MOD_RES (28)..(29): Xaa is C or S
MDRHKRLVVKENEDYYLMSTASLETPVXXAKPI

SEQ ID NO: 3689 - protein, 39 aa, Artificial Sequence
  Cyclic GFR-binding peptide
  MOD_RES (2)..(39): Xaa is C or S
KXALHDELTRHKRLFIPKKRVIEYYLVSTASLQVQTPRX

SEQ ID NO: 3690 - protein, 22 aa, Artificial Sequence
  Cyclic GFR-binding peptide
EYHYKLVVKDYEDKYLMSIPSL

SEQ ID NO: 3691 - protein, 28 aa, Artificial Sequence
  Cyclic GFR-binding peptide
  MOD_RES (1)..(3): Xaa is C or S
XKXSRVIMRYKKLVKPKRGVFYLISIAN

SEQ ID NO: 3692 - protein, 25 aa, Artificial Sequence
  Cyclic GFR-binding peptide
VMERHKRLVVKDYEDYYLMSTASLE

SEQ ID NO: 3693 - protein, 30 aa, Artificial Sequence
  Cyclic GFR-binding peptide
  MOD_RES (28)..(29): Xaa is C or S
MDYHYKLVVKENEDKYLMSIPSLETPVXXA

SEQ ID NO: 3694 - protein, 36 aa, Artificial Sequence
  Cyclic GFR-binding peptide
  MOD_RES (32)..(33): Xaa is C or S
GEVVMEYHYKLVVKDYEDKYLMSIPSLETPVXXAKP

SEQ ID NO: 3695 - protein, 39 aa, Artificial Sequence
  Cyclic GFR-binding peptide
  MOD_RES (2)..(33)..(34): Xaa is C or S
KXSKVIMRHKRLIKPTKGIYYLISTASLDQSVXXPSASA

SEQ ID NO: 3696 - protein, 37 aa, Artificial Sequence
  Cyclic GFR-binding peptide
  MOD_RES (37)..(37): Xaa is C or S
ALHDELTRHKRLFIPKKRVIEYYLVSTASLQVQTPRX

SEQ ID NO: 3697 - protein, 27 aa, Artificial Sequence
  Cyclic GFR-binding peptide
VMEYHYKLVVKDYEDKYLMSIPSLETP

SEQ ID NO: 3698 - protein, 24 aa, Artificial Sequence
  Cyclic GFR-binding peptide
IMQYNKLVKPKRGVLYLISIASLA

SEQ ID NO: 3699 - protein, 26 aa, Artificial Sequence
  Cyclic GFR-binding peptide
YHYKLFIPKKRVIEKYLVSIPSLQVQ

SEQ ID NO: 3700 - protein, 31 aa, Artificial Sequence
  Cyclic GFR-binding peptide
  MOD_RES (2)..(2): Xaa is C or S
KXALHDELTRHKRLFIPKKRVIEYYLVSTAS

SEQ ID NO: 3701 - protein, 36 aa, Artificial Sequence
  Cyclic GFR-binding peptide
  MOD_RES (2)..(34)..(35): Xaa is C or S
GXGEVVMEYHYKLVVKDYEDKYLMSIPSLETPVXXA

SEQ ID NO: 3702 - protein, 28 aa, Artificial Sequence
  Cyclic GFR-binding peptide
LHDELTRHKRLFIPKKRVIEYYLVSTAS

SEQ ID NO: 3703 - protein, 21 aa, Artificial Sequence
  Cyclic GFR-binding peptide
QYNKLVVKENEDLYLMSIASL

SEQ ID NO: 3704 - protein, 36 aa, Artificial Sequence
  Cyclic GFR-binding peptide
  MOD_RES (1)..(32)..(33): Xaa is C or S
XSKVIMYHYKLIKPTKGIKYLISIPSLDQSVXXPSA

SEQ ID NO: 3705 - protein, 22 aa, Artificial Sequence
  Cyclic GFR-binding peptide
RHKRLVKPKRGVYYLISTASLA

SEQ ID NO: 3706 - protein, 31 aa, Artificial Sequence
  Cyclic GFR-binding peptide
  MOD_RES (29)..(29): Xaa is C or S
VMNRHKRLIVNSSDDYYLVSTASLKTPAXTP

SEQ ID NO: 3707 - protein, 32 aa, Artificial Sequence
  Cyclic GFR-binding peptide
  MOD_RES (28)..(28): Xaa is C or S
MNQYNKLIVNSSDDLYLVSIASLKTPAXTPKT

SEQ ID NO: 3708 - protein, 32 aa, Artificial Sequence
  Cyclic GFR-binding peptide
  MOD_RES (2)..(4): Xaa is C or S
SXKXSKVIMQYNKLIKPTKGILYLISIASLDQ

SEQ ID NO: 3709 - protein, 34 aa, Artificial Sequence
  Cyclic GFR-binding peptide
  MOD_RES (34)..(34): Xaa is C or S
DELTYHYKLFIPKKRVIEKYLVSIPSLQVQTPRX

SEQ ID NO: 3710 - protein, 35 aa, Artificial Sequence
  Cyclic GFR-binding peptide
  MOD_RES (35)..(35): Xaa is C or S
HDELTRYKKLFIPKKRVIEFYLVSIANLQVQTPRX

SEQ ID NO: 3711 - protein, 34 aa, Artificial Sequence
  Cyclic GFR-binding peptide
  MOD_RES (1)..(32)..(33): Xaa is C or S
XSKVVMRYKKLVKPTRGVFYLISIANLDQPVXXP

SEQ ID NO: 3712 - protein, 25 aa, Artificial Sequence
  Cyclic GFR-binding peptide
VVMNRHKRLIVNSSDDYYLVSTASL

SEQ ID NO: 3713 - protein, 38 aa, Artificial Sequence
  Cyclic GFR-binding peptide
  MOD_RES (37)..(37): Xaa is C or S
ALHDELTQYNKLFIPKKRVIELYLVSIASLQVQTPRXQ

SEQ ID NO: 3714 - protein, 37 aa, Artificial Sequence
  Cyclic GFR-binding peptide
  MOD_RES (2)..(4)..(36)..(37): Xaa is C or S
HXGXAKVVMNYHYKLIVNNSSDKYLVSIPSLKTPAXX

SEQ ID NO: 3715 - protein, 35 aa, Artificial Sequence
  Cyclic GFR-binding peptide
  MOD_RES (29)..(30): Xaa is C or S
VMEQYNKLVVKDYEDLYLMSIASLETPVXXAKPIS

SEQ ID NO: 3716 - protein, 30 aa, Artificial Sequence
  Cyclic GFR-binding peptide
  MOD_RES (28)..(29): Xaa is C or S
MDRHKRLVVKENEDYYLMSTASLETPVXXA

SEQ ID NO: 3717 - protein, 33 aa, Artificial Sequence
  Cyclic GFR-binding peptide
  MOD_RES (1)..(1): Xaa is C or S
XEAVSMGEQYNKLTPVGMDDLYLVSIASLKTPV

SEQ ID NO: 3718 - protein, 36 aa, Artificial Sequence
  Cyclic GFR-binding peptide
  MOD_RES (31)..(32): Xaa is C or S
RVVMNRYKKLIVNSSDDFYLVSIANLKTPAXXPKPV

SEQ ID NO: 3719 - protein, 37 aa, Artificial Sequence
  Cyclic GFR-binding peptide
  MOD_RES (2)..(4)..(36)..(37): Xaa is C or S
RXGXGEVVMDRHKRLVVKENEDYYLMSTASLETPVXX

SEQ ID NO: 3720 - protein, 34 aa, Artificial Sequence
  Cyclic GFR-binding peptide
  MOD_RES (29)..(30): Xaa is C or S
VIMYHYKLIKPTKGIKYLISIPSLDQSVXXPSAS

SEQ ID NO: 3721 - protein, 34 aa, Artificial Sequence
  Cyclic GFR-binding peptide
  MOD_RES (2)..(4): Xaa is C or S
RXGXGEVVMERHKRLVVKDYEDYYLMSTASLETP

SEQ ID NO: 3722 - protein, 32 aa, Artificial Sequence
  Cyclic GFR-binding peptide
  MOD_RES (27)..(28): Xaa is C or S
EQYNKLTPVGMDDLYLVSIASLKTPVXXAKGV

SEQ ID NO: 3723 - protein, 32 aa, Artificial Sequence
  Cyclic GFR-binding peptide
  MOD_RES (32)..(32): Xaa is C or S
ARVVMNYHYKLIVNSSDDKYLVSIPSLQTPAX

SEQ ID NO: 3724 - protein, 35 aa, Artificial Sequence
  Cyclic GFR-binding peptide
  MOD_RES (31)..(32): Xaa is C or S
SKVVMYHYKLVKPTRGVKYLISIPSLDQPVXXPSA

SEQ ID NO: 3725 - protein, 25 aa, Artificial Sequence
  Cyclic GFR-binding peptide
GERYKKLTPVGMDDFYLVSIANLKT

SEQ ID NO: 3726 - protein, 40 aa, Artificial Sequence
  Cyclic GFR-binding peptide
  MOD_RES (1)..(3)..(35)..(36): Xaa is C or S
XGXSRVVMNYHYKLIVNSSDDKYLVSIPSLKTPAXXPKPV

SEQ ID NO: 3727 - protein, 35 aa, Artificial Sequence
  Cyclic GFR-binding peptide
  MOD_RES (30)..(31): Xaa is C or S
KVVMQYNKLVKPTRGVLYLISIASLDQPVXXPSAS

SEQ ID NO: 3728 - protein, 23 aa, Artificial Sequence
  Cyclic GFR-binding peptide
QYNKLFIPKKRVIELYLVSIASL

SEQ ID NO: 3729 - protein, 34 aa, Artificial Sequence
  Cyclic GFR-binding peptide
  MOD_RES (30)..(30): Xaa is C or S
VVMNYHYKLIVNSSDDKYLVSIPSLKTPAXTPKT

SEQ ID NO: 3730 - protein, 30 aa, Artificial Sequence
  Cyclic GFR-binding peptide
  MOD_RES (2)..(2): Xaa is C or S
GXGEVVMDQYNKLVVKENEDLYLMSIASLE

SEQ ID NO: 3731 - protein, 24 aa, Artificial Sequence
  Cyclic GFR-binding peptide
VMRHKRLVKPTRGVYYLISTASLD

SEQ ID NO: 3732 - protein, 30 aa, Artificial Sequence
  Cyclic GFR-binding peptide
  MOD_RES (28)..(29): Xaa is C or S
MNQYNKLIVNSSDDLYLVSIASLQTPAXXP

SEQ ID NO: 3733 - protein, 32 aa, Artificial Sequence
  Cyclic GFR-binding peptide
  MOD_RES (2)..(2): Xaa is C or S
KXALHDELTRYKKLFIPKKRVIEFYLVSIANL

SEQ ID NO: 3734 - protein, 22 aa, Artificial Sequence
  Cyclic GFR-binding peptide
DQYNKLVVKENEDLYLMSIASL

SEQ ID NO: 3735 - protein, 27 aa, Artificial Sequence
  Cyclic GFR-binding peptide
  MOD_RES (1)..(1): Xaa is C or S
XAKVVMNYHYKLIVNNSSDKYLVSIPS

SEQ ID NO: 3736 - protein, 27 aa, Artificial Sequence
  Cyclic GFR-binding peptide
  MOD_RES (27)..(27): Xaa is C or S
MQYNKLVKPKRGVLYLISIASLAQPVX

SEQ ID NO: 3737 - protein, 32 aa, Artificial Sequence
  Cyclic GFR-binding peptide
  MOD_RES (26)..(26): Xaa is C or S
RHKRLIVNSSDDYYLVSTASLKTPAXTPKTVH

SEQ ID NO: 3738 - protein, 24 aa, Artificial Sequence
  Cyclic GFR-binding peptide
QYNKLIVNNSSDLYLVSIASLKTP

SEQ ID NO: 3739 - protein, 38 aa, Artificial Sequence
  Cyclic GFR-binding peptide
  MOD_RES (37)..(37): Xaa is C or S
ALHDELTRHKRLFIPKKRVIEYYLVSTASLQVQTPRXQ

SEQ ID NO: 3740 - protein, 30 aa, Artificial Sequence
  Cyclic GFR-binding peptide
  MOD_RES (2)..(4): Xaa is C or S
HXGXSRVVMNRHKRLIVNSSDDYYLVSTAS

SEQ ID NO: 3741 - protein, 39 aa, Artificial Sequence
  Cyclic GFR-binding peptide
  MOD_RES (2)..(35)..(36): Xaa is C or S
GXEAVSMGEQYNKLTPVGMDDLYLVSIASLKTPVXXAKG

SEQ ID NO: 3742 - protein, 29 aa, Artificial Sequence
  Cyclic GFR-binding peptide
  MOD_RES (2)..(2): Xaa is C or S
GXGEVVMDRHKRLVVKENEDYYLMSTASL

SEQ ID NO: 3743 - protein, 24 aa, Artificial Sequence
  Cyclic GFR-binding peptide
VMYHYKLVKPTRGVKYLISIPSLD

SEQ ID NO: 3744 - protein, 29 aa, Artificial Sequence
  Cyclic GFR-binding peptide
  MOD_RES (27)..(28): Xaa is C or S
ERHKRLTPVGMDDYYLVSTASLKTPVXXA

SEQ ID NO: 3745 - protein, 29 aa, Artificial Sequence
  Cyclic GFR-binding peptide
TRYKKLFIPKKRVIEFYLVSIANLQVQTP

SEQ ID NO: 3746 - protein, 27 aa, Artificial Sequence
  Cyclic GFR-binding peptide
LTRHKRLFIPKKRVIEYYLVSTASLQV

SEQ ID NO: 3747 - protein, 28 aa, Artificial Sequence
  Cyclic GFR-binding peptide
  MOD_RES (28)..(28): Xaa is C or S
MNRYKKLIVNSSDDFYLVSIANLKTPAX

SEQ ID NO: 3748 - protein, 31 aa, Artificial Sequence
  Cyclic GFR-binding peptide
  MOD_RES (27)..(28): Xaa is C or S
DYHYKLVVKENEDKYLMSIPSLETPVXXAKP

SEQ ID NO: 3749 - protein, 24 aa, Artificial Sequence
  Cyclic GFR-binding peptide
RHKRLVVKDYEDYYLMSTASLETP

SEQ ID NO: 3750 - protein, 31 aa, Artificial Sequence
  Cyclic GFR-binding peptide
  MOD_RES (1)..(1): Xaa is C or S
XGEVVMDRHKRLVVKENEDYYLMSTASLETP

SEQ ID NO: 3751 - protein, 33 aa, Artificial Sequence
  Cyclic GFR-binding peptide
  MOD_RES (1)..(3): Xaa is C or S
XGXEAVSMGERHKRLTPVGMDDYYLVSTASLKT

SEQ ID NO: 3752 - protein, 31 aa, Artificial Sequence
  Cyclic GFR-binding peptide
  MOD_RES (27)..(28): Xaa is C or S
MYHYKLVKPTRGVKYLISIPSLDQPVXXPSA

SEQ ID NO: 3753 - protein, 26 aa, Artificial Sequence
  Cyclic GFR-binding peptide
ERYKKLTPVGMDDFYLVSIANLKTPV

SEQ ID NO: 3754 - protein, 31 aa, Artificial Sequence
  Cyclic GFR-binding peptide
  MOD_RES (29)..(29): Xaa is C or S
VMNYHYKLIVNSSDDKYLVSIPSLKTPAXTP

SEQ ID NO: 3755 - protein, 36 aa, Artificial Sequence
  Cyclic GFR-binding peptide
  MOD_RES (2)..(34): Xaa is C or S
GXSRVVMNQYNKLIVNSSDDLYLVSIASLKTPAXTP

SEQ ID NO: 3756 - protein, 37 aa, Artificial Sequence
  Cyclic GFR-binding peptide
  MOD_RES (37)..(37): Xaa is C or S
ALHDELTQYNKLFIPKKRVIELYLVSIASLQVQTPRX

SEQ ID NO: 3757 - protein, 28 aa, Artificial Sequence
  Cyclic GFR-binding peptide
GEVVMDRHKRLVVKENEDYYLMSTASLE

SEQ ID NO: 3758 - protein, 29 aa, Artificial Sequence
  Cyclic GFR-binding peptide
VVMERHKRLVVKDYEDYYLMSTASLETPV

SEQ ID NO: 3759 - protein, 39 aa, Artificial Sequence
  Cyclic GFR-binding peptide
  MOD_RES (1)..(33)..(34): Xaa is C or S
XAKVVMNQYNKLIVNNSSDLYLVSIASLKTPAXXAKPVA

SEQ ID NO: 3760 - protein, 40 aa, Artificial Sequence
  Cyclic GFR-binding peptide
  MOD_RES (2)..(34)..(35): Xaa is C or S
GXARVVMNRYKKLIVNSSDDFYLVSIANLQTPAXXPKPVT

SEQ ID NO: 3761 - protein, 29 aa, Artificial Sequence
  Cyclic GFR-binding peptide
ELTRYKKLFIPKKRVIEFYLVSIANLQVQ

SEQ ID NO: 3762 - protein, 27 aa, Artificial Sequence
  Cyclic GFR-binding peptide
VMERHKRLVVKDYEDYYLMSTASLETP

SEQ ID NO: 3763 - protein, 39 aa, Artificial Sequence
  Cyclic GFR-binding peptide
  MOD_RES (1)..(3)..(36)..(37): Xaa is C or S
XGXEAVSMGERHKRLTPVGMDDYYLVSTASLKTPVXXAK

SEQ ID NO: 3764 - protein, 39 aa, Artificial Sequence
  Cyclic GFR-binding peptide
  MOD_RES (2)..(4)..(35)..(36): Xaa is C or S
SXKXSKVIMRHKRLIKPTKGIYYLISTASLDQSVXXPSA

SEQ ID NO: 3765 - protein, 37 aa, Artificial Sequence
  Cyclic GFR-binding peptide
  MOD_RES (2)..(34)..(35): Xaa is C or S
GXSRVVMNRYKKLIVNSSDDFYLVSIANLKTPAXXPK

SEQ ID NO: 3766 - protein, 33 aa, Artificial Sequence
  Cyclic GFR-binding peptide
  MOD_RES (28)..(29): Xaa is C or S
MDYHYKLVVKENEDKYLMSIPSLETPVXXAKPI

SEQ ID NO: 3767 - protein, 20 aa, Artificial Sequence
  Cyclic GFR-binding peptide
QYNKLIVNNSSDLYLVSIAS

SEQ ID NO: 3768 - protein, 33 aa, Artificial Sequence
  Cyclic GFR-binding peptide
  MOD_RES (29)..(30): Xaa is C or S
VMEQYNKLVVKDYEDLYLMSIASLETPVXXAKP

SEQ ID NO: 3769 - protein, 25 aa, Artificial Sequence
  Cyclic GFR-binding peptide
TRYKKLFIPKKRVIEFYLVSIANLQ

SEQ ID NO: 3770 - protein, 27 aa, Artificial Sequence
  Cyclic GFR-binding peptide
AKVVMNRYKKLIVNNSSDFYLVSIANL

SEQ ID NO: 3771 - protein, 33 aa, Artificial Sequence
  Cyclic GFR-binding peptide
  MOD_RES (32)..(33): Xaa is C or S
AKVVMNQYNKLIVNNSSDLYLVSIASLKTPAXX

SEQ ID NO: 3772 - protein, 33 aa, Artificial Sequence
  Cyclic GFR-binding peptide
  MOD_RES (1)..(3): Xaa is C or S
XKXSKVVMQYNKLVKPTRGVLYLISIASLDQPV

SEQ ID NO: 3773 - protein, 30 aa, Artificial Sequence
  Cyclic GFR-binding peptide
  MOD_RES (2)..(2): Xaa is C or S
GXARVVMNQYNKLIVNSSDDLYLVSIASLQ

SEQ ID NO: 3774 - protein, 34 aa, Artificial Sequence
  Cyclic GFR-binding peptide
LHDELTQYNKLFIPKKRVIELYLVSIASLQVQTP

SEQ ID NO: 3775 - protein, 37 aa, Artificial Sequence
  Cyclic GFR-binding peptide
  MOD_RES (35)..(35): Xaa is C or S
HDELTRYKKLFIPKKRVIEFYLVSIANLQVQTPRXQV

SEQ ID NO: 3776 - protein, 33 aa, Artificial Sequence
  Cyclic GFR-binding peptide
  MOD_RES (32)..(33): Xaa is C or S
SRVVMNYHYKLIVNSSDDKYLVSIPSLKTPAXX

SEQ ID NO: 3777 - protein, 34 aa, Artificial Sequence
  Cyclic GFR-binding peptide
  MOD_RES (28)..(29): Xaa is C or S
MNQYNKLIVNSSDDLYLVSIASLKTPAXXPKPVY

SEQ ID NO: 3778 - protein, 28 aa, Artificial Sequence
  Cyclic GFR-binding peptide
VVMRYKKLVKPTRGVFYLISIANLDQPV

SEQ ID NO: 3779 - protein, 31 aa, Artificial Sequence
  Cyclic GFR-binding peptide
ELTYHYKLFIPKKRVIEKYLVSIPSLQVQTP

SEQ ID NO: 3780 - protein, 35 aa, Artificial Sequence
  Cyclic GFR-binding peptide
  MOD_RES (2)..(33)..(34): Xaa is C or S
KXSKVVMRHKRLVKPTRGVYYLISTASLDQPVXXP

SEQ ID NO: 3781 - protein, 24 aa, Artificial Sequence
  Cyclic GFR-binding peptide
MNQYNKLIVNSSDDLYLVSIASLK

SEQ ID NO: 3782 - protein, 33 aa, Artificial Sequence
  Cyclic GFR-binding peptide
  MOD_RES (27)..(28): Xaa is C or S
MQYNKLVKPTRGVLYLISIASLDQPVXXPSASA

SEQ ID NO: 3783 - protein, 21 aa, Artificial Sequence
  Cyclic GFR-binding peptide
QYNKLIKPTKGILYLISIASL

SEQ ID NO: 3784 - protein, 27 aa, Artificial Sequence
  Cyclic GFR-binding peptide
SKVVMRYKKLVKPTRGVFYLISIANLD

SEQ ID NO: 3785 - protein, 41 aa, Artificial Sequence
  Cyclic GFR-binding peptide
  MOD_RES (2)..(4)..(36)..(37): Xaa is C or S
HXGXARVVMNRHKRLIVNSSDDYYLVSTASLQTPAXXPKPV

SEQ ID NO: 3786 - protein, 33 aa, Artificial Sequence
  Cyclic GFR-binding peptide
  MOD_RES (1)..(33): Xaa is C or S
XSRVVMNYHYKLIVNSSDDKYLVSIPSLKTPAX

SEQ ID NO: 3787 - protein, 31 aa, Artificial Sequence
  Cyclic GFR-binding peptide
  MOD_RES (26)..(27): Xaa is C or S
QYNKLIVNSSDDLYLVSIASLQTPAXXPKPV

SEQ ID NO: 3788 - protein, 29 aa, Artificial Sequence
  Cyclic GFR-binding peptide
  MOD_RES (1)..(3): Xaa is C or S
XKXSRVIMYHYKLVKPKRGVKYLISIPSL

SEQ ID NO: 3789 - protein, 38 aa, Artificial Sequence
  Cyclic GFR-binding peptide
  MOD_RES (1)..(3)..(34)..(35): Xaa is C or S
XKXSRVIMRHKRLVKPKRGVYYLISTASLAQPVXXPAA

SEQ ID NO: 3790 - protein, 34 aa, Artificial Sequence
  Cyclic GFR-binding peptide
  MOD_RES (1)..(3): Xaa is C or S
XGXAKVVMNRYKKLIVNNSSDFYLVSIANLKTPA

SEQ ID NO: 3791 - protein, 28 aa, Artificial Sequence
  Cyclic GFR-binding peptide
VIMYHYKLVKPKRGVKYLISIPSLAQPV

SEQ ID NO: 3792 - protein, 35 aa, Artificial Sequence
  Cyclic GFR-binding peptide
  MOD_RES (2)..(34)..(35): Xaa is C or S
GXSRVVMNRYKKLIVNSSDDFYLVSIANLKTPAXX

SEQ ID NO: 3793 - protein, 30 aa, Artificial Sequence
  Cyclic GFR-binding peptide
  MOD_RES (2)..(4): Xaa is C or S
SXKXSKVIMYHYKLIKPTKGIKYLISIPSL

SEQ ID NO: 3794 - protein, 25 aa, Artificial Sequence
  Cyclic GFR-binding peptide
IMRYKKLVKPKRGVFYLISIANLAQ

SEQ ID NO: 3795 - protein, 24 aa, Artificial Sequence
  Cyclic GFR-binding peptide
YHYKLIVNSSDDKYLVSIPSLKTP

SEQ ID NO: 3796 - protein, 32 aa, Artificial Sequence
  Cyclic GFR-binding peptide
  MOD_RES (1)..(3): Xaa is C or S
XKXSKVVMQYNKLVKPTRGVLYLISIASLDQP

SEQ ID NO: 3797 - protein, 28 aa, Artificial Sequence
  Cyclic GFR-binding peptide
  MOD_RES (2)..(2): Xaa is C or S
KXSKVIMRHKRLIKPTKGIYYLISTASL

SEQ ID NO: 3798 - protein, 34 aa, Artificial Sequence
  Cyclic GFR-binding peptide
  MOD_RES (31)..(32): Xaa is C or S
RVVMNRHKRLIVNSSDDYYLVSTASLQTPAXXPK

SEQ ID NO: 3799 - protein, 40 aa, Artificial Sequence
  Cyclic GFR-binding peptide
  MOD_RES (2)..(4)..(36)..(37): Xaa is C or S
HXGXARVVMNRYKKLIVNSSDDFYLVSIANLQTPAXXPKP

SEQ ID NO: 3800 - protein, 43 aa, Artificial Sequence
  Cyclic GFR-binding peptide
  MOD_RES (2)..(39): Xaa is C or S
KXALHDELTYHYKLFIPKKRVIEKYLVSIPSLQVQTPRXQVNR

SEQ ID NO: 3801 - protein, 34 aa, Artificial Sequence
  Cyclic GFR-binding peptide
  MOD_RES (2)..(34): Xaa is C or S
GXGEVVMDRYKKLVVKENEDFYLMSIANLETPVX

SEQ ID NO: 3802 - protein, 42 aa, Artificial Sequence
  Cyclic GFR-binding peptide
  MOD_RES (2)..(4)..(36)..(37): Xaa is C or S
HXGXSRVVMNYHYKLIVNSSDDKYLVSIPSLKTPAXXPKPVY

SEQ ID NO: 3803 - protein, 35 aa, Artificial Sequence
  Cyclic GFR-binding peptide
  MOD_RES (2)..(33)..(34): Xaa is C or S
KXSRVIMQYNKLVKPKRGVLYLISIASLAQPVXXP

SEQ ID NO: 3804 - protein, 33 aa, Artificial Sequence
  Cyclic GFR-binding peptide
  MOD_RES (1)..(32)..(33): Xaa is C or S
XSKVVMYHYKLVKPTRGVKYLISIPSLDQPVXX

SEQ ID NO: 3805 - protein, 35 aa, Artificial Sequence
  Cyclic GFR-binding peptide
  MOD_RES (1)..(3)..(34)..(35): Xaa is C or S
XKXSKVVMRYKKLVKPTRGVFYLISIANLDQPVXX

SEQ ID NO: 3806 - protein, 35 aa, Artificial Sequence
  Cyclic GFR-binding peptide
  MOD_RES (31)..(32): Xaa is C or S
KVVMNRYKKLIVNNSSDFYLVSIANLKTPAXXAKP

SEQ ID NO: 3807 - protein, 32 aa, Artificial Sequence
  Cyclic GFR-binding peptide
HDELTYHYKLFIPKKRVIEKYLVSIPSLQVQT

SEQ ID NO: 3808 - protein, 21 aa, Artificial Sequence
  Cyclic GFR-binding peptide
RYKKLIVNNSSDFYLVSIANL

SEQ ID NO: 3809 - protein, 23 aa, Artificial Sequence
  Cyclic GFR-binding peptide
YHYKLVKPKRGVKYLISIPSLAQ

SEQ ID NO: 3810 - protein, 28 aa, Artificial Sequence
  Cyclic GFR-binding peptide
  MOD_RES (2)..(2): Xaa is C or S
GXARVVMNQYNKLIVNSSDDLYLVSIAS

SEQ ID NO: 3811 - protein, 28 aa, Artificial Sequence
  Cyclic GFR-binding peptide
  MOD_RES (26)..(26): Xaa is C or S
YHYKLIVNSSDDKYLVSIPSLKTPAXTP

SEQ ID NO: 3812 - protein, 29 aa, Artificial Sequence
  Cyclic GFR-binding peptide
  MOD_RES (29)..(29): Xaa is C or S
VVMQYNKLVKPTRGVLYLISIASLDQPVX

SEQ ID NO: 3813 - protein, 33 aa, Artificial Sequence
  Cyclic GFR-binding peptide
  MOD_RES (31)..(32): Xaa is C or S
SKVVMRYKKLVKPTRGVFYLISIANLDQPVXXP

SEQ ID NO: 3814 - protein, 33 aa, Artificial Sequence
  Cyclic GFR-binding peptide
  MOD_RES (31)..(32): Xaa is C or S
SRVIMQYNKLVKPKRGVLYLISIASLAQPVXXP

SEQ ID NO: 3815 - protein, 28 aa, Artificial Sequence
  Cyclic GFR-binding peptide
HDELTQYNKLFIPKKRVIELYLVSIASL

SEQ ID NO: 3816 - protein, 36 aa, Artificial Sequence
  Cyclic GFR-binding peptide
  MOD_RES (32)..(33): Xaa is C or S
AVSMGEQYNKLTPVGMDDLYLVSIASLKTPVXXAKG

SEQ ID NO: 3817 - protein, 24 aa, Artificial Sequence
  Cyclic GFR-binding peptide
DQYNKLVVKENEDLYLMSIASLET

SEQ ID NO: 3818 - protein, 24 aa, Artificial Sequence
  Cyclic GFR-binding peptide
VMEQYNKLVVKDYEDLYLMSIASL

SEQ ID NO: 3819 - protein, 34 aa, Artificial Sequence
  Cyclic GFR-binding peptide
  MOD_RES (2)..(4): Xaa is C or S
SXKXSRVIMRHKRLVKPKRGVYYLISTASLAQPV

SEQ ID NO: 3820 - protein, 31 aa, Artificial Sequence
  Cyclic GFR-binding peptide
  MOD_RES (28)..(29): Xaa is C or S
MNRHKRLIVNSSDDYYLVSTASLKTPAXXPK

SEQ ID NO: 3821 - protein, 33 aa, Artificial Sequence
  Cyclic GFR-binding peptide
  MOD_RES (28)..(29): Xaa is C or S
IMQYNKLVKPKRGVLYLISIASLAQPVXXPAAS

SEQ ID NO: 3822 - protein, 36 aa, Artificial Sequence
  Cyclic GFR-binding peptide
  MOD_RES (2)..(4): Xaa is C or S
RXGXEAVSMGERYKKLTPVGMDDFYLVSIANLKTPV

SEQ ID NO: 3823 - protein, 36 aa, Artificial Sequence
  Cyclic GFR-binding peptide
  MOD_RES (30)..(31): Xaa is C or S
SMGERYKKLTPVGMDDFYLVSIANLKTPVXXAKGVK

SEQ ID NO: 3824 - protein, 33 aa, Artificial Sequence
  Cyclic GFR-binding peptide
  MOD_RES (31)..(32): Xaa is C or S
RVVMNQYNKLIVNSSDDLYLVSIASLKTPAXXP

SEQ ID NO: 3825 - protein, 38 aa, Artificial Sequence
  Cyclic GFR-binding peptide
  MOD_RES (2)..(33)..(34): Xaa is C or S
KXSRVIMRYKKLVKPKRGVFYLISIANLAQPVXXPAAS

SEQ ID NO: 3826 - protein, 28 aa, Artificial Sequence
  Cyclic GFR-binding peptide
  MOD_RES (1)..(3): Xaa is C or S
XKXSRVIMYHYKLVKPKRGVKYLISIPS

SEQ ID NO: 3827 - protein, 25 aa, Artificial Sequence
  Cyclic GFR-binding peptide
VVMERYKKLVVKDYEDFYLMSIANL

SEQ ID NO: 3828 - protein, 28 aa, Artificial Sequence
  Cyclic GFR-binding peptide
VIMRHKRLVKPKRGVYYLISTASLAQPV

SEQ ID NO: 3829 - protein, 31 aa, Artificial Sequence
  Cyclic GFR-binding peptide
  MOD_RES (26)..(27): Xaa is C or S
RHKRLIVNSSDDYYLVSTASLQTPAXXPKPV

SEQ ID NO: 3830 - protein, 25 aa, Artificial Sequence
  Cyclic GFR-binding peptide
RHKRLIVNSSDDYYLVSTASLKTPA

SEQ ID NO: 3831 - protein, 34 aa, Artificial Sequence
  Cyclic GFR-binding peptide
  MOD_RES (2)..(4): Xaa is C or S
RXGXEAVSMGERYKKLTPVGMDDFYLVSIANLKT

SEQ ID NO: 3832 - protein, 25 aa, Artificial Sequence
  Cyclic GFR-binding peptide
KVVMRYKKLVKPTRGVFYLISIANL

SEQ ID NO: 3833 - protein, 29 aa, Artificial Sequence
  Cyclic GFR-binding peptide
  MOD_RES (1)..(3): Xaa is C or S
XGXAKVVMNRYKKLIVNNSSDFYLVSIAN

SEQ ID NO: 3834 - protein, 35 aa, Artificial Sequence
  Cyclic GFR-binding peptide
  MOD_RES (2)..(4): Xaa is C or S
RXGXGEVVMDRHKRLVVKENEDYYLMSTASLETPV

SEQ ID NO: 3835 - protein, 23 aa, Artificial Sequence
  Cyclic GFR-binding peptide
QYNKLIVNSSDDLYLVSIASLKT

SEQ ID NO: 3836 - protein, 34 aa, Artificial Sequence
  Cyclic GFR-binding peptide
  MOD_RES (1)..(33)..(34): Xaa is C or S
XGEVVMERHKRLVVKDYEDYYLMSTASLETPVXX

SEQ ID NO: 3837 - protein, 31 aa, Artificial Sequence
  Cyclic GFR-binding peptide
HDELTRYKKLFIPKKRVIEFYLVSIANLQVQ

SEQ ID NO: 3838 - protein, 29 aa, Artificial Sequence
  Cyclic GFR-binding peptide
KVIMYHYKLIKPTKGIKYLISIPSLDQSV

SEQ ID NO: 3839 - protein, 34 aa, Artificial Sequence
  Cyclic GFR-binding peptide
  MOD_RES (2)..(4): Xaa is C or S
EXKXALHDELTRHKRLFIPKKRVIEYYLVSTASL

SEQ ID NO: 3840 - protein, 29 aa, Artificial Sequence
  Cyclic GFR-binding peptide
  MOD_RES (2)..(4): Xaa is C or S
SXKXSKVIMRHKRLIKPTKGIYYLISTAS

SEQ ID NO: 3841 - protein, 35 aa, Artificial Sequence
  Cyclic GFR-binding peptide
  MOD_RES (2)..(34)..(35): Xaa is C or S
GXGEVVMEYHYKLVVKDYEDKYLMSIPSLETPVXX

SEQ ID NO: 3842 - protein, 33 aa, Artificial Sequence
  Cyclic GFR-binding peptide
  MOD_RES (1)..(32)..(33): Xaa is C or S
XSRVIMRYKKLVKPKRGVFYLISIANLAQPVXX

SEQ ID NO: 3843 - protein, 30 aa, Artificial Sequence
  Cyclic GFR-binding peptide
  MOD_RES (2)..(2): Xaa is C or S
GXAKVVMNYHYKLIVNNSSDKYLVSIPSLK

SEQ ID NO: 3844 - protein, 38 aa, Artificial Sequence
  Cyclic GFR-binding peptide
  MOD_RES (1)..(3)..(36)..(37): Xaa is C or S
XGXEAVSMGERYKKLTPVGMDDFYLVSIANLKTPVXXA

SEQ ID NO: 3845 - protein, 36 aa, Artificial Sequence
  Cyclic GFR-binding peptide
  MOD_RES (32)..(33): Xaa is C or S
GEVVMDYHYKLVVKENEDKYLMSIPSLETPVXXAKP

SEQ ID NO: 3846 - protein, 39 aa, Artificial Sequence
  Cyclic GFR-binding peptide
  MOD_RES (2)..(34)..(35): Xaa is C or S
GXGEVVMDRHKRLVVKENEDYYLMSTASLETPVXXAKPI

SEQ ID NO: 3847 - protein, 29 aa, Artificial Sequence
  Cyclic GFR-binding peptide
  MOD_RES (29)..(29): Xaa is C or S
VMNYHYKLIVNNSSDKYLVSIPSLKTPAX

SEQ ID NO: 3848 - protein, 28 aa, Artificial Sequence
  Cyclic GFR-binding peptide
  MOD_RES (1)..(1): Xaa is C or S
XSRVIMYHYKLVKPKRGVKYLISIPSLA

SEQ ID NO: 3849 - protein, 32 aa, Artificial Sequence
  Cyclic GFR-binding peptide
  MOD_RES (2)..(4): Xaa is C or S
HXGXARVVMNRYKKLIVNSSDDFYLVSIANLQ

SEQ ID NO: 3850 - protein, 26 aa, Artificial Sequence
  Cyclic GFR-binding peptide
NRHKRLIVNSSDDYYLVSTASLQTPA

SEQ ID NO: 3851 - protein, 23 aa, Artificial Sequence
  Cyclic GFR-binding peptide
VMNQYNKLIVNNSSDLYLVSIAS

SEQ ID NO: 3852 - protein, 23 aa, Artificial Sequence
  Cyclic GFR-binding peptide
ERYKKLTPVGMDDFYLVSIANLK

SEQ ID NO: 3853 - protein, 32 aa, Artificial Sequence
  Cyclic GFR-binding peptide
  MOD_RES (2)..(2): Xaa is C or S
KXSKVIMQYNKLIKPTKGILYLISIASLDQSV

SEQ ID NO: 3854 - protein, 34 aa, Artificial Sequence
  Cyclic GFR-binding peptide
  MOD_RES (33)..(34): Xaa is C or S
EAVSMGEQYNKLTPVGMDDLYLVSIASLKTPVXX

SEQ ID NO: 3855 - protein, 26 aa, Artificial Sequence
  Cyclic GFR-binding peptide
VMDYHYKLVVKENEDKYLMSIPSLET

SEQ ID NO: 3856 - protein, 36 aa, Artificial Sequence
  Cyclic GFR-binding peptide
  MOD_RES (31)..(32): Xaa is C or S
RVVMNRHKRLIVNSSDDYYLVSTASLQTPAXXPKPV

SEQ ID NO: 3857 - protein, 38 aa, Artificial Sequence
  Cyclic GFR-binding peptide
  MOD_RES (2)..(34)..(35): Xaa is C or S
GXARVVMNQYNKLIVNSSDDLYLVSIASLQTPAXXPKP

SEQ ID NO: 3858 - protein, 39 aa, Artificial Sequence
  Cyclic GFR-binding peptide
  MOD_RES (2)..(4)..(35)..(36): Xaa is C or S
SXKXSKVIMQYNKLIKPTKGILYLISIASLDQSVXXPSA

SEQ ID NO: 3859 - protein, 37 aa, Artificial Sequence
  Cyclic GFR-binding peptide
  MOD_RES (2)..(4): Xaa is C or S
EXKXALHDELTRHKRLFIPKKRVIEYYLVSTASLQVQ

SEQ ID NO: 3860 - protein, 31 aa, Artificial Sequence
  Cyclic GFR-binding peptide
  MOD_RES (1)..(1): Xaa is C or S
XGEVVMERYKKLVVKDYEDFYLMSIANLETP

SEQ ID NO: 3861 - protein, 25 aa, Artificial Sequence
  Cyclic GFR-binding peptide
VVMNYHYKLIVNNSSDKYLVSIPSL

SEQ ID NO: 3862 - protein, 35 aa, Artificial Sequence
  Cyclic GFR-binding peptide
  MOD_RES (29)..(30): Xaa is C or S
VMNRYKKLIVNSSDDFYLVSIANLQTPAXXPKPVT

SEQ ID NO: 3863 - protein, 33 aa, Artificial Sequence
  Cyclic GFR-binding peptide
  MOD_RES (31)..(32): Xaa is C or S
EVVMDRHKRLVVKENEDYYLMSTASLETPVXXA

SEQ ID NO: 3864 - protein, 27 aa, Artificial Sequence
  Cyclic GFR-binding peptide
VIMYHYKLIKPTKGIKYLISIPSLDQS

SEQ ID NO: 3865 - protein, 31 aa, Artificial Sequence
  Cyclic GFR-binding peptide
  MOD_RES (28)..(29): Xaa is C or S
MNYHYKLIVNSSDDKYLVSIPSLKTPAXXPK

SEQ ID NO: 3866 - protein, 27 aa, Artificial Sequence
  Cyclic GFR-binding peptide
VIMRHKRLIKPTKGIYYLISTASLDQS

SEQ ID NO: 3867 - protein, 27 aa, Artificial Sequence
  Cyclic GFR-binding peptide
  MOD_RES (26)..(27): Xaa is C or S
RYKKLVKPKRGVFYLISIANLAQPVXX

SEQ ID NO: 3868 - protein, 31 aa, Artificial Sequence
  Cyclic GFR-binding peptide
  MOD_RES (29)..(30): Xaa is C or S
VIMYHYKLVKPKRGVKYLISIPSLAQPVXXP

SEQ ID NO: 3869 - protein, 34 aa, Artificial Sequence
  Cyclic GFR-binding peptide
  MOD_RES (29)..(30): Xaa is C or S
MGERYKKLTPVGMDDFYLVSIANLKTPVXXAKGV

SEQ ID NO: 3870 - protein, 39 aa, Artificial Sequence
  Cyclic GFR-binding peptide
  MOD_RES (1)..(3): Xaa is C or S
XKXALHDELTYHYKLFIPKKRVIEKYLVSIPSLQVQTPR

SEQ ID NO: 3871 - protein, 38 aa, Artificial Sequence
  Cyclic GFR-binding peptide
  MOD_RES (1)..(34)..(35): Xaa is C or S
XEAVSMGEQYNKLTPVGMDDLYLVSIASLKTPVXXAKG

SEQ ID NO: 3872 - protein, 28 aa, Artificial Sequence
  Cyclic GFR-binding peptide
LHDELTQYNKLFIPKKRVIELYLVSIAS

SEQ ID NO: 3873 - protein, 30 aa, Artificial Sequence
  Cyclic GFR-binding peptide
  MOD_RES (30)..(30): Xaa is C or S
KVIMYHYKLIKPTKGIKYLISIPSLDQSVX

SEQ ID NO: 3874 - protein, 39 aa, Artificial Sequence
  Cyclic GFR-binding peptide
  MOD_RES (2)..(34)..(35): Xaa is C or S
GXARVVMNQYNKLIVNSSDDLYLVSIASLQTPAXXPKPV

SEQ ID NO: 3875 - protein, 29 aa, Artificial Sequence
  Cyclic GFR-binding peptide
  MOD_RES (28)..(29): Xaa is C or S
MERYKKLVVKDYEDFYLMSIANLETPVXX

SEQ ID NO: 3876 - protein, 32 aa, Artificial Sequence
  Cyclic GFR-binding peptide
  MOD_RES (1)..(3): Xaa is C or S
XGXGEVVMEQYNKLVVKDYEDLYLMSIASLET

SEQ ID NO: 3877 - protein, 25 aa, Artificial Sequence
  Cyclic GFR-binding peptide
EYHYKLVVKDYEDKYLMSIPSLETP

SEQ ID NO: 3878 - protein, 27 aa, Artificial Sequence
  Cyclic GFR-binding peptide
  MOD_RES (1)..(1): Xaa is C or S
XGEVVMEQYNKLVVKDYEDLYLMSIAS

SEQ ID NO: 3879 - protein, 29 aa, Artificial Sequence
  Cyclic GFR-binding peptide
  MOD_RES (1)..(1): Xaa is C or S
XSKVVMYHYKLVKPTRGVKYLISIPSLDQ

SEQ ID NO: 3880 - protein, 34 aa, Artificial Sequence
  Cyclic GFR-binding peptide
  MOD_RES (1)..(3)..(34): Xaa is C or S
XKXSKVIMRYKKLIKPTKGIFYLISIANLDQSVX

SEQ ID NO: 3881 - protein, 32 aa, Artificial Sequence
  Cyclic GFR-binding peptide
  MOD_RES (30)..(31): Xaa is C or S
SMGERYKKLTPVGMDDFYLVSIANLKTPVXXA

SEQ ID NO: 3882 - protein, 22 aa, Artificial Sequence
  Cyclic GFR-binding peptide
MYHYKLVKPTRGVKYLISIPSL

SEQ ID NO: 3883 - protein, 31 aa, Artificial Sequence
  Cyclic GFR-binding peptide
AVSMGEQYNKLTPVGMDDLYLVSIASLKTPV

SEQ ID NO: 3884 - protein, 34 aa, Artificial Sequence
  Cyclic GFR-binding peptide
  MOD_RES (30)..(31): Xaa is C or S
KVVMYHYKLVKPTRGVKYLISIPSLDQPVXXPSA

SEQ ID NO: 3885 - protein, 35 aa, Artificial Sequence
  Cyclic GFR-binding peptide
  MOD_RES (1)..(33)..(34): Xaa is C or S
XGEVVMEYHYKLVVKDYEDKYLMSIPSLETPVXXA

SEQ ID NO: 3886 - protein, 30 aa, Artificial Sequence
  Cyclic GFR-binding peptide
  MOD_RES (1)..(1): Xaa is C or S
XSRVIMYHYKLVKPKRGVKYLISIPSLAQP

SEQ ID NO: 3887 - protein, 30 aa, Artificial Sequence
  Cyclic GFR-binding peptide
  MOD_RES (2)..(4): Xaa is C or S
RXGXGEVVMEQYNKLVVKDYEDLYLMSIAS

SEQ ID NO: 3888 - protein, 25 aa, Artificial Sequence
  Cyclic GFR-binding peptide
QYNKLIVNSSDDLYLVSIASLKTPA

SEQ ID NO: 3889 - protein, 30 aa, Artificial Sequence
  Cyclic GFR-binding peptide
  MOD_RES (29)..(30): Xaa is C or S
VIMRHKRLIKPTKGIYYLISTASLDQSVXX

SEQ ID NO: 3890 - protein, 34 aa, Artificial Sequence
  Cyclic GFR-binding peptide
  MOD_RES (31)..(32): Xaa is C or S
EVVMEQYNKLVVKDYEDLYLMSIASLETPVXXAK

SEQ ID NO: 3891 - protein, 36 aa, Artificial Sequence
  Cyclic GFR-binding peptide
  MOD_RES (32)..(32): Xaa is C or S
LTRYKKLFIPKKRVIEFYLVSIANLQVQTPRXQVNR

SEQ ID NO: 3892 - protein, 30 aa, Artificial Sequence
  Cyclic GFR-binding peptide
  MOD_RES (28)..(28): Xaa is C or S
MNRYKKLIVNSSDDFYLVSIANLKTPAXTP

SEQ ID NO: 3893 - protein, 34 aa, Artificial Sequence
  Cyclic GFR-binding peptide
  MOD_RES (2)..(4): Xaa is C or S
RXGXEAVSMGEYHYKLTPVGMDDKYLVSIPSLKT

SEQ ID NO: 3894 - protein, 31 aa, Artificial Sequence
  Cyclic GFR-binding peptide
  MOD_RES (2)..(4): Xaa is C or S
RXGXEAVSMGERHKRLTPVGMDDYYLVSTAS

SEQ ID NO: 3895 - protein, 28 aa, Artificial Sequence
  Cyclic GFR-binding peptide
ELTYHYKLFIPKKRVIEKYLVSIPSLQV

SEQ ID NO: 3896 - protein, 26 aa, Artificial Sequence
  Cyclic GFR-binding peptide
MERHKRLVVKDYEDYYLMSTASLETP

SEQ ID NO: 3897 - protein, 21 aa, Artificial Sequence
  Cyclic GFR-binding peptide
YHYKLIKPTKGIKYLISIPSL

SEQ ID NO: 3898 - protein, 26 aa, Artificial Sequence
  Cyclic GFR-binding peptide
VVMYHYKLVKPTRGVKYLISIPSLDQ

SEQ ID NO: 3899 - protein, 33 aa, Artificial Sequence
  Cyclic GFR-binding peptide
  MOD_RES (2)..(2): Xaa is C or S
GXGEVVMERHKRLVVKDYEDYYLMSTASLETPV

SEQ ID NO: 3900 - protein, 37 aa, Artificial Sequence
  Cyclic GFR-binding peptide
  MOD_RES (2)..(34)..(35): Xaa is C or S
GXSRVVMNQYNKLIVNSSDDLYLVSIASLKTPAXXPK

SEQ ID NO: 3901 - protein, 33 aa, Artificial Sequence
  Cyclic GFR-binding peptide
  MOD_RES (29)..(30): Xaa is C or S
VIMRYKKLIKPTKGIFYLISIANLDQSVXXPSA

SEQ ID NO: 3902 - protein, 30 aa, Artificial Sequence
  Cyclic GFR-binding peptide
HDELTRHKRLFIPKKRVIEYYLVSTASLQV

SEQ ID NO: 3903 - protein, 29 aa, Artificial Sequence
  Cyclic GFR-binding peptide
SRVIMRHKRLVKPKRGVYYLISTASLAQP

SEQ ID NO: 3904 - protein, 30 aa, Artificial Sequence
  Cyclic GFR-binding peptide
  MOD_RES (1)..(3): Xaa is C or S
XGXARVVMNRHKRLIVNSSDDYYLVSTASL

SEQ ID NO: 3905 - protein, 38 aa, Artificial Sequence
  Cyclic GFR-binding peptide
  MOD_RES (2)..(2): Xaa is C or S
KXALHDELTRHKRLFIPKKRVIEYYLVSTASLQVQTPR

SEQ ID NO: 3906 - protein, 35 aa, Artificial Sequence
  Cyclic GFR-binding peptide
  MOD_RES (31)..(32): Xaa is C or S
SKVVMRHKRLVKPTRGVYYLISTASLDQPVXXPSA

SEQ ID NO: 3907 - protein, 29 aa, Artificial Sequence
  Cyclic GFR-binding peptide
  MOD_RES (28)..(29): Xaa is C or S
MNYHYKLIVNSSDDKYLVSIPSLKTPAXX

SEQ ID NO: 3908 - protein, 35 aa, Artificial Sequence
  Cyclic GFR-binding peptide
  MOD_RES (30)..(31): Xaa is C or S
SMGERYKKLTPVGMDDFYLVSIANLKTPVXXAKGV

SEQ ID NO: 3909 - protein, 32 aa, Artificial Sequence
  Cyclic GFR-binding peptide
  MOD_RES (1)..(3): Xaa is C or S
XKXALHDELTRYKKLFIPKKRVIEFYLVSIAN

SEQ ID NO: 3910 - protein, 32 aa, Artificial Sequence
  Cyclic GFR-binding peptide
  MOD_RES (29)..(30): Xaa is C or S
VIMRYKKLVKPKRGVFYLISIANLAQPVXXPA

SEQ ID NO: 3911 - protein, 30 aa, Artificial Sequence
  Cyclic GFR-binding peptide
  MOD_RES (1)..(3): Xaa is C or S
XKXSKVIMRHKRLIKPTKGIYYLISTASLD

SEQ ID NO: 3912 - protein, 29 aa, Artificial Sequence
  Cyclic GFR-binding peptide
  MOD_RES (26)..(27): Xaa is C or S
YHYKLVKPTRGVKYLISIPSLDQPVXXPS

SEQ ID NO: 3913 - protein, 37 aa, Artificial Sequence
  Cyclic GFR-binding peptide
  MOD_RES (2)..(33)..(34): Xaa is C or S
KXSKVIMYHYKLIKPTKGIKYLISIPSLDQSVXXPSA

SEQ ID NO: 3914 - protein, 33 aa, Artificial Sequence
  Cyclic GFR-binding peptide
  MOD_RES (29)..(30): Xaa is C or S
VMEYHYKLVVKDYEDKYLMSIPSLETPVXXAKP

SEQ ID NO: 3915 - protein, 31 aa, Artificial Sequence
  Cyclic GFR-binding peptide
  MOD_RES (1)..(1): Xaa is C or S
XGEVVMDRYKKLVVKENEDFYLMSIANLETP

SEQ ID NO: 3916 - protein, 28 aa, Artificial Sequence
  Cyclic GFR-binding peptide
  MOD_RES (27)..(27): Xaa is C or S
NYHYKLIVNSSDDKYLVSIPSLKTPAXT

SEQ ID NO: 3917 - protein, 29 aa, Artificial Sequence
  Cyclic GFR-binding peptide
  MOD_RES (1)..(1): Xaa is C or S
XSKVIMYHYKLIKPTKGIKYLISIPSLDQ

SEQ ID NO: 3918 - protein, 34 aa, Artificial Sequence
  Cyclic GFR-binding peptide
  MOD_RES (2)..(33)..(34): Xaa is C or S
KXSKVIMQYNKLIKPTKGILYLISIASLDQSVXX

SEQ ID NO: 3919 - protein, 35 aa, Artificial Sequence
  Cyclic GFR-binding peptide
  MOD_RES (29)..(30): Xaa is C or S
VVMRYKKLVKPTRGVFYLISIANLDQPVXXPSASA

SEQ ID NO: 3920 - protein, 32 aa, Artificial Sequence
  Cyclic GFR-binding peptide
  MOD_RES (2)..(4): Xaa is C or S
SXKXSKVVMYHYKLVKPTRGVKYLISIPSLDQ

SEQ ID NO: 3921 - protein, 24 aa, Artificial Sequence
  Cyclic GFR-binding peptide
VVMEYHYKLVVKDYEDKYLMSIPS

SEQ ID NO: 3922 - protein, 41 aa, Artificial Sequence
  Cyclic GFR-binding peptide
  MOD_RES (1)..(3)..(35)..(36): Xaa is C or S
XGXSRVVMNQYNKLIVNSSDDLYLVSIASLKTPAXXPKPVY

SEQ ID NO: 3923 - protein, 36 aa, Artificial Sequence
  Cyclic GFR-binding peptide
  MOD_RES (30)..(31): Xaa is C or S
VVMNRYKKLIVNNSSDFYLVSIANLKTPAXXAKPVA

SEQ ID NO: 3924 - protein, 33 aa, Artificial Sequence
  Cyclic GFR-binding peptide
  MOD_RES (32)..(33): Xaa is C or S
GEVVMEQYNKLVVKDYEDLYLMSIASLETPVXX

SEQ ID NO: 3925 - protein, 38 aa, Artificial Sequence
  Cyclic GFR-binding peptide
  MOD_RES (1)..(32)..(33): Xaa is C or S
XSKVIMQYNKLIKPTKGILYLISIASLDQSVXXPSASA

SEQ ID NO: 3926 - protein, 27 aa, Artificial Sequence
  Cyclic GFR-binding peptide
  MOD_RES (26)..(27): Xaa is C or S
RYKKLIVNNSSDFYLVSIANLKTPAXX

SEQ ID NO: 3927 - protein, 34 aa, Artificial Sequence
  Cyclic GFR-binding peptide
  MOD_RES (1)..(1): Xaa is C or S
XALHDELTQYNKLFIPKKRVIELYLVSIASLQVQ

SEQ ID NO: 3928 - protein, 35 aa, Artificial Sequence
  Cyclic GFR-binding peptide
  MOD_RES (1)..(33)..(34): Xaa is C or S
XAKVVMNYHYKLIVNNSSDKYLVSIPSLKTPAXXA

SEQ ID NO: 3929 - protein, 32 aa, Artificial Sequence
  Cyclic GFR-binding peptide
EAVSMGERHKRLTPVGMDDYYLVSTASLKTPV

SEQ ID NO: 3930 - protein, 33 aa, Artificial Sequence
  Cyclic GFR-binding peptide
ALHDELTRHKRLFIPKKRVIEYYLVSTASLQVQ

SEQ ID NO: 3931 - protein, 33 aa, Artificial Sequence
  Cyclic GFR-binding peptide
  MOD_RES (2)..(4): Xaa is C or S
RXGXEAVSMGERHKRLTPVGMDDYYLVSTASLK

SEQ ID NO: 3932 - protein, 31 aa, Artificial Sequence
  Cyclic GFR-binding peptide
  MOD_RES (30)..(30): Xaa is C or S
RYKKLFIPKKRVIEFYLVSIANLQVQTPRXQ

SEQ ID NO: 3933 - protein, 31 aa, Artificial Sequence
  Cyclic GFR-binding peptide
  MOD_RES (30)..(31): Xaa is C or S
KVVMQYNKLVKPTRGVLYLISIASLDQPVXX

SEQ ID NO: 3934 - protein, 38 aa, Artificial Sequence
  Cyclic GFR-binding peptide
  MOD_RES (1)..(3)..(34)..(35): Xaa is C or S
XKXSKVVMQYNKLVKPTRGVLYLISIASLDQPVXXPSA

SEQ ID NO: 3935 - protein, 41 aa, Artificial Sequence
  Cyclic GFR-binding peptide
  MOD_RES (1)..(3)..(35)..(36): Xaa is C or S
XGXSRVVMNYHYKLIVNSSDDKYLVSIPSLKTPAXXPKPVY

SEQ ID NO: 3936 - protein, 30 aa, Artificial Sequence
  Cyclic GFR-binding peptide
EAVSMGERHKRLTPVGMDDYYLVSTASLKT

SEQ ID NO: 3937 - protein, 29 aa, Artificial Sequence
  Cyclic GFR-binding peptide
VSMGERYKKLTPVGMDDFYLVSIANLKTP

SEQ ID NO: 3938 - protein, 28 aa, Artificial Sequence
  Cyclic GFR-binding peptide
LTRHKRLFIPKKRVIEYYLVSTASLQVQ

SEQ ID NO: 3939 - protein, 34 aa, Artificial Sequence
  Cyclic GFR-binding peptide
  MOD_RES (30)..(31): Xaa is C or S
VVMNYHYKLIVNSSDDKYLVSIPSLKTPAXXPKP

SEQ ID NO: 3940 - protein, 36 aa, Artificial Sequence
  Cyclic GFR-binding peptide
  MOD_RES (34)..(34): Xaa is C or S
DELTYHYKLFIPKKRVIEKYLVSIPSLQVQTPRXQV

SEQ ID NO: 3941 - protein, 29 aa, Artificial Sequence
  Cyclic GFR-binding peptide
  MOD_RES (27)..(28): Xaa is C or S
DYHYKLVVKENEDKYLMSIPSLETPVXXA

SEQ ID NO: 3942 - protein, 23 aa, Artificial Sequence
  Cyclic GFR-binding peptide
VMQYNKLVKPTRGVLYLISIASL

SEQ ID NO: 3943 - protein, 24 aa, Artificial Sequence
  Cyclic GFR-binding peptide
QYNKLVVKDYEDLYLMSIASLETP

SEQ ID NO: 3944 - protein, 37 aa, Artificial Sequence
  Cyclic GFR-binding peptide
  MOD_RES (2)..(34)..(35): Xaa is C or S
GXGEVVMERYKKLVVKDYEDFYLMSIANLETPVXXAK

SEQ ID NO: 3945 - protein, 29 aa, Artificial Sequence
  Cyclic GFR-binding peptide
SRVVMNYHYKLIVNSSDDKYLVSIPSLKT

SEQ ID NO: 3946 - protein, 26 aa, Artificial Sequence
  Cyclic GFR-binding peptide
VVMDQYNKLVVKENEDLYLMSIASLE

SEQ ID NO: 3947 - protein, 20 aa, Artificial Sequence
  Cyclic GFR-binding peptide
YHYKLVKPKRGVKYLISIPS

SEQ ID NO: 3948 - protein, 25 aa, Artificial Sequence
  Cyclic GFR-binding peptide
VIMRHKRLVKPKRGVYYLISTASLA

SEQ ID NO: 3949 - protein, 30 aa, Artificial Sequence
  Cyclic GFR-binding peptide
  MOD_RES (2)..(2): Xaa is C or S
GXSRVVMNRYKKLIVNSSDDFYLVSIANLK

SEQ ID NO: 3950 - protein, 31 aa, Artificial Sequence
  Cyclic GFR-binding peptide
  MOD_RES (30)..(31): Xaa is C or S
VVMNRYKKLIVNSSDDFYLVSIANLKTPAXX

SEQ ID NO: 3951 - protein, 32 aa, Artificial Sequence
  Cyclic GFR-binding peptide
  MOD_RES (27)..(28): Xaa is C or S
NRHKRLIVNSSDDYYLVSTASLKTPAXXPKPV

SEQ ID NO: 3952 - protein, 32 aa, Artificial Sequence
  Cyclic GFR-binding peptide
  MOD_RES (1)..(3): Xaa is C or S
XKXSRVIMYHYKLVKPKRGVKYLISIPSLAQP

SEQ ID NO: 3953 - protein, 29 aa, Artificial Sequence
  Cyclic GFR-binding peptide
  MOD_RES (1)..(1): Xaa is C or S
XARVVMNRYKKLIVNSSDDFYLVSIANLQ

SEQ ID NO: 3954 - protein, 34 aa, Artificial Sequence
  Cyclic GFR-binding peptide
  MOD_RES (30)..(31): Xaa is C or S
VVMERHKRLVVKDYEDYYLMSTASLETPVXXAKP

SEQ ID NO: 3955 - protein, 30 aa, Artificial Sequence
  Cyclic GFR-binding peptide
  MOD_RES (29)..(30): Xaa is C or S
MGERHKRLTPVGMDDYYLVSTASLKTPVXX

SEQ ID NO: 3956 - protein, 26 aa, Artificial Sequence
  Cyclic GFR-binding peptide
  MOD_RES (1)..(1): Xaa is C or S
XSKVIMRHKRLIKPTKGIYYLISTAS

SEQ ID NO: 3957 - protein, 39 aa, Artificial Sequence
  Cyclic GFR-binding peptide
  MOD_RES (1)..(33)..(34): Xaa is C or S
XARVVMNRHKRLIVNSSDDYYLVSTASLQTPAXXPKPVT

SEQ ID NO: 3958 - protein, 37 aa, Artificial Sequence
  Cyclic GFR-binding peptide
  MOD_RES (2)..(4)..(35)..(36): Xaa is C or S
SXKXSKVVMQYNKLVKPTRGVLYLISIASLDQPVXXP

SEQ ID NO: 3959 - protein, 32 aa, Artificial Sequence
  Cyclic GFR-binding peptide
  MOD_RES (1)..(3): Xaa is C or S
XKXSKVIMQYNKLIKPTKGILYLISIASLDQS

SEQ ID NO: 3960 - protein, 41 aa, Artificial Sequence
  Cyclic GFR-binding peptide
  MOD_RES (1)..(3)..(35)..(36): Xaa is C or S
XGXGEVVMDRHKRLVVKENEDYYLMSTASLETPVXXAKPIK

SEQ ID NO: 3961 - protein, 25 aa, Artificial Sequence
  Cyclic GFR-binding peptide
NRYKKLIVNSSDDFYLVSIANLQTP

SEQ ID NO: 3962 - protein, 21 aa, Artificial Sequence
  Cyclic GFR-binding peptide
RYKKLVKPKRGVFYLISIANL

SEQ ID NO: 3963 - protein, 32 aa, Artificial Sequence
  Cyclic GFR-binding peptide
  MOD_RES (30)..(31): Xaa is C or S
VVMNYHYKLIVNNSSDKYLVSIPSLKTPAXXA

SEQ ID NO: 3964 - protein, 27 aa, Artificial Sequence
  Cyclic GFR-binding peptide
VVMNYHYKLIVNNSSDKYLVSIPSLKT

SEQ ID NO: 3965 - protein, 32 aa, Artificial Sequence
  Cyclic GFR-binding peptide
  MOD_RES (1)..(3): Xaa is C or S
XGXEAVSMGEQYNKLTPVGMDDLYLVSIASLK

SEQ ID NO: 3966 - protein, 32 aa, Artificial Sequence
  Cyclic GFR-binding peptide
  MOD_RES (1)..(1): Xaa is C or S
XALHDELTQYNKLFIPKKRVIELYLVSIASLQ

SEQ ID NO: 3967 - protein, 22 aa, Artificial Sequence
  Cyclic GFR-binding peptide
MYHYKLVKPKRGVKYLISIPSL

SEQ ID NO: 3968 - protein, 37 aa, Artificial Sequence
  Cyclic GFR-binding peptide
  MOD_RES (2)..(34): Xaa is C or S
GXSRVVMNRHKRLIVNSSDDYYLVSTASLKTPAXTPK

SEQ ID NO: 3969 - protein, 37 aa, Artificial Sequence
  Cyclic GFR-binding peptide
  MOD_RES (1)..(3)..(35)..(36): Xaa is C or S
XGXSRVVMNRHKRLIVNSSDDYYLVSTASLKTPAXXP

SEQ ID NO: 3970 - protein, 27 aa, Artificial Sequence
  Cyclic GFR-binding peptide
  MOD_RES (27)..(27): Xaa is C or S
NYHYKLIVNNSSDKYLVSIPSLKTPAX

SEQ ID NO: 3971 - protein, 33 aa, Artificial Sequence
  Cyclic GFR-binding peptide
  MOD_RES (31)..(32): Xaa is C or S
RVVMNRHKRLIVNSSDDYYLVSTASLKTPAXXP

SEQ ID NO: 3972 - protein, 36 aa, Artificial Sequence
  Cyclic GFR-binding peptide
  MOD_RES (1)..(33): Xaa is C or S
XSRVVMNQYNKLIVNSSDDLYLVSIASLKTPAXTPK

SEQ ID NO: 3973 - protein, 31 aa, Artificial Sequence
  Cyclic GFR-binding peptide
  MOD_RES (1)..(1): Xaa is C or S
XARVVMNQYNKLIVNSSDDLYLVSIASLQTP

SEQ ID NO: 3974 - protein, 42 aa, Artificial Sequence
  Cyclic GFR-binding peptide
  MOD_RES (2)..(4)..(36): Xaa is C or S
HXGXSRVVMNRHKRLIVNSSDDYYLVSTASLKTPAXTPKTVH

SEQ ID NO: 3975 - protein, 27 aa, Artificial Sequence
  Cyclic GFR-binding peptide
  MOD_RES (1)..(1): Xaa is C or S
XGEVVMDQYNKLVVKENEDLYLMSIAS

SEQ ID NO: 3976 - protein, 31 aa, Artificial Sequence
  Cyclic GFR-binding peptide
  MOD_RES (29)..(30): Xaa is C or S
VMDQYNKLVVKENEDLYLMSIASLETPVXXA

SEQ ID NO: 3977 - protein, 24 aa, Artificial Sequence
  Cyclic GFR-binding peptide
TRHKRLFIPKKRVIEYYLVSTASL

SEQ ID NO: 3978 - protein, 35 aa, Artificial Sequence
  Cyclic GFR-binding peptide
  MOD_RES (32)..(33): Xaa is C or S
GEVVMERHKRLVVKDYEDYYLMSTASLETPVXXAK

SEQ ID NO: 3979 - protein, 31 aa, Artificial Sequence
  Cyclic GFR-binding peptide
  MOD_RES (1)..(3): Xaa is C or S
XGXGEVVMDYHYKLVVKENEDKYLMSIPSLE

SEQ ID NO: 3980 - protein, 34 aa, Artificial Sequence
  Cyclic GFR-binding peptide
  MOD_RES (2)..(4): Xaa is C or S
HXGXAKVVMNQYNKLIVNNSSDLYLVSIASLKTP

SEQ ID NO: 3981 - protein, 38 aa, Artificial Sequence
  Cyclic GFR-binding peptide
  MOD_RES (2)..(4)..(36)..(37): Xaa is C or S
HXGXAKVVMNYHYKLIVNNSSDKYLVSIPSLKTPAXXA

SEQ ID NO: 3982 - protein, 34 aa, Artificial Sequence
  Cyclic GFR-binding peptide
  MOD_RES (2)..(4): Xaa is C or S
SXKXSRVIMQYNKLVKPKRGVLYLISIASLAQPV

SEQ ID NO: 3983 - protein, 31 aa, Artificial Sequence
  Cyclic GFR-binding peptide
  MOD_RES (1)..(1): Xaa is C or S
XEAVSMGERYKKLTPVGMDDFYLVSIANLKT

SEQ ID NO: 3984 - protein, 23 aa, Artificial Sequence
  Cyclic GFR-binding peptide
TYHYKLFIPKKRVIEKYLVSIPS

SEQ ID NO: 3985 - protein, 30 aa, Artificial Sequence
  Cyclic GFR-binding peptide
AVSMGERHKRLTPVGMDDYYLVSTASLKTP

SEQ ID NO: 3986 - protein, 29 aa, Artificial Sequence
  Cyclic GFR-binding peptide
  MOD_RES (29)..(29): Xaa is C or S
VMNYHYKLIVNSSDDKYLVSIPSLKTPAX

SEQ ID NO: 3987 - protein, 36 aa, Artificial Sequence
  Cyclic GFR-binding peptide
  MOD_RES (32)..(33): Xaa is C or S
ARVVMNRYKKLIVNSSDDFYLVSIANLQTPAXXPKP

SEQ ID NO: 3988 - protein, 38 aa, Artificial Sequence
  Cyclic GFR-binding peptide
  MOD_RES (2)..(4)..(36): Xaa is C or S
HXGXSRVVMNRHKRLIVNSSDDYYLVSTASLKTPAXTP

SEQ ID NO: 3989 - protein, 21 aa, Artificial Sequence
  Cyclic GFR-binding peptide
NRYKKLIVNNSSDFYLVSIAN

SEQ ID NO: 3990 - protein, 35 aa, Artificial Sequence
  Cyclic GFR-binding peptide
  MOD_RES (2)..(4): Xaa is C or S
HXGXAKVVMNYHYKLIVNNSSDKYLVSIPSLKTPA

SEQ ID NO: 3991 - protein, 34 aa, Artificial Sequence
  Cyclic GFR-binding peptide
  MOD_RES (2)..(33)..(34): Xaa is C or S
KXSKVIMRYKKLIKPTKGIFYLISIANLDQSVXX

SEQ ID NO: 3992 - protein, 30 aa, Artificial Sequence
  Cyclic GFR-binding peptide
  MOD_RES (29)..(30): Xaa is C or S
VIMRYKKLIKPTKGIFYLISIANLDQSVXX

SEQ ID NO: 3993 - protein, 34 aa, Artificial Sequence
  Cyclic GFR-binding peptide
  MOD_RES (32)..(33): Xaa is C or S
AKVVMNYHYKLIVNNSSDKYLVSIPSLKTPAXXA

SEQ ID NO: 3994 - protein, 34 aa, Artificial Sequence
  Cyclic GFR-binding peptide
  MOD_RES (2)..(34): Xaa is C or S
GXAKVVMNRYKKLIVNNSSDFYLVSIANLKTPAX

SEQ ID NO: 3995 - protein, 25 aa, Artificial Sequence
  Cyclic GFR-binding peptide
MRHKRLVKPKRGVYYLISTASLAQP

SEQ ID NO: 3996 - protein, 38 aa, Artificial Sequence
  Cyclic GFR-binding peptide
  MOD_RES (2)..(34): Xaa is C or S
GXSRVVMNQYNKLIVNSSDDLYLVSIASLKTPAXTPKT

SEQ ID NO: 3997 - protein, 40 aa, Artificial Sequence
  Cyclic GFR-binding peptide
  MOD_RES (1)..(3)..(34)..(35): Xaa is C or S
XKXSKVIMRHKRLIKPTKGIYYLISTASLDQSVXXPSASA

SEQ ID NO: 3998 - protein, 34 aa, Artificial Sequence
  Cyclic GFR-binding peptide
  MOD_RES (32)..(32): Xaa is C or S
SRVVMNRYKKLIVNSSDDFYLVSIANLKTPAXTP

SEQ ID NO: 3999 - protein, 39 aa, Artificial Sequence
  Cyclic GFR-binding peptide
  MOD_RES (2)..(4)..(36)..(37): Xaa is C or S
HXGXARVVMNQYNKLIVNSSDDLYLVSIASLQTPAXXPK

SEQ ID NO: 4000 - protein, 36 aa, Artificial Sequence
  Cyclic GFR-binding peptide
  MOD_RES (2)..(4)..(36): Xaa is C or S
RXGXGEVVMEQYNKLVVKDYEDLYLMSIASLETPVX

SEQ ID NO: 4001 - protein, 35 aa, Artificial Sequence
  Cyclic GFR-binding peptide
  MOD_RES (29)..(30): Xaa is C or S
VIMRYKKLVKPKRGVFYLISIANLAQPVXXPAASA

SEQ ID NO: 4002 - protein, 25 aa, Artificial Sequence
  Cyclic GFR-binding peptide
RHKRLVKPKRGVYYLISTASLAQPV

SEQ ID NO: 4003 - protein, 28 aa, Artificial Sequence
  Cyclic GFR-binding peptide
  MOD_RES (28)..(28): Xaa is C or S
MDRHKRLVVKENEDYYLMSTASLETPVX

SEQ ID NO: 4004 - protein, 34 aa, Artificial Sequence
  Cyclic GFR-binding peptide
  MOD_RES (31)..(32): Xaa is C or S
EVVMEYHYKLVVKDYEDKYLMSIPSLETPVXXAK

SEQ ID NO: 4005 - protein, 36 aa, Artificial Sequence
  Cyclic GFR-binding peptide
  MOD_RES (2)..(34): Xaa is C or S
GXSRVVMNRYKKLIVNSSDDFYLVSIANLKTPAXTP

SEQ ID NO: 4006 - protein, 34 aa, Artificial Sequence
  Cyclic GFR-binding peptide
  MOD_RES (29)..(30): Xaa is C or S
VIMQYNKLIKPTKGILYLISIASLDQSVXXPSAS

SEQ ID NO: 4007 - protein, 27 aa, Artificial Sequence
  Cyclic GFR-binding peptide
  MOD_RES (26)..(27): Xaa is C or S
RHKRLVVKDYEDYYLMSTASLETPVXX

SEQ ID NO: 4008 - protein, 36 aa, Artificial Sequence
  Cyclic GFR-binding peptide
  MOD_RES (1)..(33)..(34): Xaa is C or S
XARVVMNRYKKLIVNSSDDFYLVSIANLQTPAXXPK

SEQ ID NO: 4009 - protein, 30 aa, Artificial Sequence
  Cyclic GFR-binding peptide
  MOD_RES (26)..(27): Xaa is C or S
RHKRLVKPKRGVYYLISTASLAQPVXXPAA

SEQ ID NO: 4010 - protein, 33 aa, Artificial Sequence
  Cyclic GFR-binding peptide
  MOD_RES (2)..(4): Xaa is C or S
HXGXSRVVMNYHYKLIVNSSDDKYLVSIPSLKT

SEQ ID NO: 4011 - protein, 30 aa, Artificial Sequence
  Cyclic GFR-binding peptide
HDELTYHYKLFIPKKRVIEKYLVSIPSLQV

SEQ ID NO: 4012 - protein, 23 aa, Artificial Sequence
  Cyclic GFR-binding peptide
VMERYKKLVVKDYEDFYLMSIAN

SEQ ID NO: 4013 - protein, 26 aa, Artificial Sequence
  Cyclic GFR-binding peptide
MNQYNKLIVNNSSDLYLVSIASLKTP

SEQ ID NO: 4014 - protein, 38 aa, Artificial Sequence
  Cyclic GFR-binding peptide
  MOD_RES (1)..(33)..(34): Xaa is C or S
XSRVVMNRHKRLIVNSSDDYYLVSTASLKTPAXXPKPV

SEQ ID NO: 4015 - protein, 32 aa, Artificial Sequence
  Cyclic GFR-binding peptide
HDELTRHKRLFIPKKRVIEYYLVSTASLQVQT

SEQ ID NO: 4016 - protein, 20 aa, Artificial Sequence
  Cyclic GFR-binding peptide
QYNKLVKPKRGVLYLISIAS

SEQ ID NO: 4017 - protein, 39 aa, Artificial Sequence
  Cyclic GFR-binding peptide
  MOD_RES (1)..(3): Xaa is C or S
XKXALHDELTRHKRLFIPKKRVIEYYLVSTASLQVQTPR

SEQ ID NO: 4018 - protein, 28 aa, Artificial Sequence
  Cyclic GFR-binding peptide
KVIMRYKKLIKPTKGIFYLISIANLDQS

SEQ ID NO: 4019 - protein, 29 aa, Artificial Sequence
  Cyclic GFR-binding peptide
  MOD_RES (28)..(29): Xaa is C or S
MNRHKRLIVNSSDDYYLVSTASLKTPAXX

SEQ ID NO: 4020 - protein, 34 aa, Artificial Sequence
  Cyclic GFR-binding peptide
  MOD_RES (30)..(30): Xaa is C or S
VVMNRHKRLIVNSSDDYYLVSTASLKTPAXTPKT

SEQ ID NO: 4021 - protein, 36 aa, Artificial Sequence
  Cyclic GFR-binding peptide
  MOD_RES (2)..(33)..(34): Xaa is C or S
KXSKVIMRHKRLIKPTKGIYYLISTASLDQSVXXPS

SEQ ID NO: 4022 - protein, 39 aa, Artificial Sequence
  Cyclic GFR-binding peptide
  MOD_RES (1)..(3)..(35)..(36): Xaa is C or S
XGXGEVVMERYKKLVVKDYEDFYLMSIANLETPVXXAKP

SEQ ID NO: 4023 - protein, 36 aa, Artificial Sequence
  Cyclic GFR-binding peptide
  MOD_RES (30)..(31): Xaa is C or S
RVIMRHKRLVKPKRGVYYLISTASLAQPVXXPAASA

SEQ ID NO: 4024 - protein, 31 aa, Artificial Sequence
  Cyclic GFR-binding peptide
  MOD_RES (2)..(2): Xaa is C or S
KXSKVIMQYNKLIKPTKGILYLISIASLDQS

SEQ ID NO: 4025 - protein, 33 aa, Artificial Sequence
  Cyclic GFR-binding peptide
  MOD_RES (1)..(1): Xaa is C or S
XALHDELTYHYKLFIPKKRVIEKYLVSIPSLQV

SEQ ID NO: 4026 - protein, 41 aa, Artificial Sequence
  Cyclic GFR-binding peptide
  MOD_RES (1)..(3)..(35)..(36): Xaa is C or S
XGXGEVVMDYHYKLVVKENEDKYLMSIPSLETPVXXAKPIK

SEQ ID NO: 4027 - protein, 32 aa, Artificial Sequence
  Cyclic GFR-binding peptide
  MOD_RES (27)..(28): Xaa is C or S
MYHYKLIKPTKGIKYLISIPSLDQSVXXPSAS

SEQ ID NO: 4028 - protein, 21 aa, Artificial Sequence
  Cyclic GFR-binding peptide
MRHKRLVKPTRGVYYLISTAS

SEQ ID NO: 4029 - protein, 22 aa, Artificial Sequence
  Cyclic GFR-binding peptide
RHKRLTPVGMDDYYLVSTASLK

SEQ ID NO: 4030 - protein, 26 aa, Artificial Sequence
  Cyclic GFR-binding peptide
AVSMGERYKKLTPVGMDDFYLVSIAN

SEQ ID NO: 4031 - protein, 26 aa, Artificial Sequence
  Cyclic GFR-binding peptide
  MOD_RES (26)..(26): Xaa is C or S
RHKRLIVNSSDDYYLVSTASLKTPAX

SEQ ID NO: 4032 - protein, 35 aa, Artificial Sequence
  Cyclic GFR-binding peptide
  MOD_RES (31)..(32): Xaa is C or S
VSMGERHKRLTPVGMDDYYLVSTASLKTPVXXAKG

SEQ ID NO: 4033 - protein, 38 aa, Artificial Sequence
  Cyclic GFR-binding peptide
  MOD_RES (32)..(33): Xaa is C or S
GEVVMDYHYKLVVKENEDKYLMSIPSLETPVXXAKPIK

SEQ ID NO: 4034 - protein, 27 aa, Artificial Sequence
  Cyclic GFR-binding peptide
HDELTYHYKLFIPKKRVIEKYLVSIPS

SEQ ID NO: 4035 - protein, 27 aa, Artificial Sequence
  Cyclic GFR-binding peptide
VVMDYHYKLVVKENEDKYLMSIPSLET

SEQ ID NO: 4036 - protein, 29 aa, Artificial Sequence
  Cyclic GFR-binding peptide
AKVVMNQYNKLIVNNSSDLYLVSIASLKT

SEQ ID NO: 4037 - protein, 20 aa, Artificial Sequence
  Cyclic GFR-binding peptide
YHYKLIVNSSDDKYLVSIPS

SEQ ID NO: 4038 - protein, 36 aa, Artificial Sequence
  Cyclic GFR-binding peptide
  MOD_RES (30)..(31): Xaa is C or S
RVIMYHYKLVKPKRGVKYLISIPSLAQPVXXPAASA

SEQ ID NO: 4039 - protein, 31 aa, Artificial Sequence
  Cyclic GFR-binding peptide
  MOD_RES (27)..(28): Xaa is C or S
NRHKRLIVNSSDDYYLVSTASLQTPAXXPKP

SEQ ID NO: 4040 - protein, 31 aa, Artificial Sequence
  Cyclic GFR-binding peptide
SRVVMNQYNKLIVNSSDDLYLVSIASLKTPA

SEQ ID NO: 4041 - protein, 28 aa, Artificial Sequence
  Cyclic GFR-binding peptide
  MOD_RES (28)..(28): Xaa is C or S
MDYHYKLVVKENEDKYLMSIPSLETPVX

SEQ ID NO: 4042 - protein, 41 aa, Artificial Sequence
  Cyclic GFR-binding peptide
  MOD_RES (37)..(37): Xaa is C or S
ALHDELTRYKKLFIPKKRVIEFYLVSIANLQVQTPRXQVNR

SEQ ID NO: 4043 - protein, 33 aa, Artificial Sequence
  Cyclic GFR-binding peptide
  MOD_RES (2)..(2): Xaa is C or S
KXALHDELTYHYKLFIPKKRVIEKYLVSIPSLQ

SEQ ID NO: 4044 - protein, 34 aa, Artificial Sequence
  Cyclic GFR-binding peptide
  MOD_RES (29)..(29): Xaa is C or S
VMNRHKRLIVNSSDDYYLVSTASLKTPAXTPKTV

SEQ ID NO: 4045 - protein, 33 aa, Artificial Sequence
  Cyclic GFR-binding peptide
  MOD_RES (27)..(28): Xaa is C or S
EYHYKLVVKDYEDKYLMSIPSLETPVXXAKPIS

SEQ ID NO: 4046 - protein, 32 aa, Artificial Sequence
  Cyclic GFR-binding peptide
  MOD_RES (28)..(29): Xaa is C or S
GEQYNKLTPVGMDDLYLVSIASLKTPVXXAKG

SEQ ID NO: 4047 - protein, 21 aa, Artificial Sequence
  Cyclic GFR-binding peptide
ERYKKLTPVGMDDFYLVSIAN

SEQ ID NO: 4048 - protein, 27 aa, Artificial Sequence
  Cyclic GFR-binding peptide
MGERHKRLTPVGMDDYYLVSTASLKTP

SEQ ID NO: 4049 - protein, 30 aa, Artificial Sequence
  Cyclic GFR-binding peptide
  MOD_RES (26)..(27): Xaa is C or S
RHKRLIVNSSDDYYLVSTASLQTPAXXPKP

SEQ ID NO: 4050 - protein, 36 aa, Artificial Sequence
  Cyclic GFR-binding peptide
ALHDELTYHYKLFIPKKRVIEKYLVSIPSLQVQTPR

SEQ ID NO: 4051 - protein, 29 aa, Artificial Sequence
  Cyclic GFR-binding peptide
  MOD_RES (1)..(1): Xaa is C or S
XARVVMNQYNKLIVNSSDDLYLVSIASLQ

SEQ ID NO: 4052 - protein, 33 aa, Artificial Sequence
  Cyclic GFR-binding peptide
  MOD_RES (29)..(29): Xaa is C or S
VMNYHYKLIVNSSDDKYLVSIPSLKTPAXTPKT

SEQ ID NO: 4053 - protein, 25 aa, Artificial Sequence
  Cyclic GFR-binding peptide
ELTYHYKLFIPKKRVIEKYLVSIPS

SEQ ID NO: 4054 - protein, 33 aa, Artificial Sequence
  Cyclic GFR-binding peptide
  MOD_RES (31)..(31): Xaa is C or S
RVVMNQYNKLIVNSSDDLYLVSIASLKTPAXTP

SEQ ID NO: 4055 - protein, 33 aa, Artificial Sequence
  Cyclic GFR-binding peptide
  MOD_RES (1)..(32)..(33): Xaa is C or S
XSRVIMQYNKLVKPKRGVLYLISIASLAQPVXX

SEQ ID NO: 4056 - protein, 28 aa, Artificial Sequence
  Cyclic GFR-binding peptide
VMNYHYKLIVNSSDDKYLVSIPSLQTPA

SEQ ID NO: 4057 - protein, 23 aa, Artificial Sequence
  Cyclic GFR-binding peptide
VMNRHKRLIVNSSDDYYLVSTAS

SEQ ID NO: 4058 - protein, 35 aa, Artificial Sequence
  Cyclic GFR-binding peptide
  MOD_RES (2)..(4): Xaa is C or S
RXGXEAVSMGEQYNKLTPVGMDDLYLVSIASLKTP

SEQ ID NO: 4059 - protein, 36 aa, Artificial Sequence
  Cyclic GFR-binding peptide
  MOD_RES (1)..(33)..(34): Xaa is C or S
XARVVMNQYNKLIVNSSDDLYLVSIASLQTPAXXPK

SEQ ID NO: 4060 - protein, 33 aa, Artificial Sequence
  Cyclic GFR-binding peptide
  MOD_RES (29)..(29): Xaa is C or S
VMNRHKRLIVNSSDDYYLVSTASLKTPAXTPKT

SEQ ID NO: 4061 - protein, 24 aa, Artificial Sequence
  Cyclic GFR-binding peptide
VVMNRHKRLIVNSSDDYYLVSTAS

SEQ ID NO: 4062 - protein, 27 aa, Artificial Sequence
  Cyclic GFR-binding peptide
SMGERYKKLTPVGMDDFYLVSIANLKT

SEQ ID NO: 4063 - protein, 40 aa, Artificial Sequence
  Cyclic GFR-binding peptide
  MOD_RES (1)..(3)..(35)..(36): Xaa is C or S
XGXARVVMNRHKRLIVNSSDDYYLVSTASLQTPAXXPKPV

SEQ ID NO: 4064 - protein, 36 aa, Artificial Sequence
  Cyclic GFR-binding peptide
  MOD_RES (33)..(33): Xaa is C or S
ELTRHKRLFIPKKRVIEYYLVSTASLQVQTPRXQVN

SEQ ID NO: 4065 - protein, 27 aa, Artificial Sequence
  Cyclic GFR-binding peptide
RYKKLFIPKKRVIEFYLVSIANLQVQT

SEQ ID NO: 4066 - protein, 31 aa, Artificial Sequence
  Cyclic GFR-binding peptide
  MOD_RES (28)..(29): Xaa is C or S
IMYHYKLVKPKRGVKYLISIPSLAQPVXXPA

SEQ ID NO: 4067 - protein, 31 aa, Artificial Sequence
  Cyclic GFR-binding peptide
  MOD_RES (2)..(4): Xaa is C or S
HXGXARVVMNRHKRLIVNSSDDYYLVSTASL

SEQ ID NO: 4068 - protein, 34 aa, Artificial Sequence
  Cyclic GFR-binding peptide
  MOD_RES (1)..(3)..(34): Xaa is C or S
XKXSRVIMRHKRLVKPKRGVYYLISTASLAQPVX

SEQ ID NO: 4069 - protein, 38 aa, Artificial Sequence
  Cyclic GFR-binding peptide
  MOD_RES (2)..(4)..(36)..(37): Xaa is C or S
HXGXSRVVMNRYKKLIVNSSDDFYLVSIANLKTPAXXP

SEQ ID NO: 4070 - protein, 34 aa, Artificial Sequence
  Cyclic GFR-binding peptide
  MOD_RES (1)..(3)..(34): Xaa is C or S
XKXSKVVMRYKKLVKPTRGVFYLISIANLDQPVX

SEQ ID NO: 4071 - protein, 21 aa, Artificial Sequence
  Cyclic GFR-binding peptide
YHYKLVKPKRGVKYLISIPSL

SEQ ID NO: 4072 - protein, 28 aa, Artificial Sequence
  Cyclic GFR-binding peptide
  MOD_RES (26)..(26): Xaa is C or S
RHKRLIVNSSDDYYLVSTASLKTPAXTP

SEQ ID NO: 4073 - protein, 30 aa, Artificial Sequence
  Cyclic GFR-binding peptide
  MOD_RES (27)..(28): Xaa is C or S
MQYNKLIKPTKGILYLISIASLDQSVXXPS

SEQ ID NO: 4074 - protein, 39 aa, Artificial Sequence
  Cyclic GFR-binding peptide
  MOD_RES (2)..(34)..(35): Xaa is C or S
GXARVVMNRYKKLIVNSSDDFYLVSIANLQTPAXXPKPV

SEQ ID NO: 4075 - protein, 22 aa, Artificial Sequence
  Cyclic GFR-binding peptide
MDYHYKLVVKENEDKYLMSIPS

SEQ ID NO: 4076 - protein, 36 aa, Artificial Sequence
  Cyclic GFR-binding peptide
  MOD_RES (2)..(4)..(35)..(36): Xaa is C or S
SXKXSKVIMYHYKLIKPTKGIKYLISIPSLDQSVXX

SEQ ID NO: 4077 - protein, 39 aa, Artificial Sequence
  Cyclic GFR-binding peptide
  MOD_RES (1)..(3)..(35): Xaa is C or S
XGXSRVVMNRYKKLIVNSSDDFYLVSIANLKTPAXTPKT

SEQ ID NO: 4078 - protein, 23 aa, Artificial Sequence
  Cyclic GFR-binding peptide
VMNYHYKLIVNSSDDKYLVSIPS

SEQ ID NO: 4079 - protein, 34 aa, Artificial Sequence
  Cyclic GFR-binding peptide
  MOD_RES (31)..(32): Xaa is C or S
KVVMNYHYKLIVNNSSDKYLVSIPSLKTPAXXAK

SEQ ID NO: 4080 - protein, 29 aa, Artificial Sequence
  Cyclic GFR-binding peptide
  MOD_RES (28)..(29): Xaa is C or S
MDQYNKLVVKENEDLYLMSIASLETPVXX

SEQ ID NO: 4081 - protein, 24 aa, Artificial Sequence
  Cyclic GFR-binding peptide
RHKRLIVNSSDDYYLVSTASLKTP

SEQ ID NO: 4082 - protein, 28 aa, Artificial Sequence
  Cyclic GFR-binding peptide
VMNRHKRLIVNSSDDYYLVSTASLQTPA

SEQ ID NO: 4083 - protein, 38 aa, Artificial Sequence
  Cyclic GFR-binding peptide
  MOD_RES (36)..(36): Xaa is C or S
LHDELTRHKRLFIPKKRVIEYYLVSTASLQVQTPRXQV

SEQ ID NO: 4084 - protein, 38 aa, Artificial Sequence
  Cyclic GFR-binding peptide
  MOD_RES (1)..(3): Xaa is C or S
XKXALHDELTRYKKLFIPKKRVIEFYLVSIANLQVQTP

SEQ ID NO: 4085 - protein, 30 aa, Artificial Sequence
  Cyclic GFR-binding peptide
  MOD_RES (1)..(1): Xaa is C or S
XAKVVMNYHYKLIVNNSSDKYLVSIPSLKT

SEQ ID NO: 4086 - protein, 40 aa, Artificial Sequence
  Cyclic GFR-binding peptide
  MOD_RES (1)..(3)..(35): Xaa is C or S
XGXSRVVMNRHKRLIVNSSDDYYLVSTASLKTPAXTPKTV

SEQ ID NO: 4087 - protein, 36 aa, Artificial Sequence
  Cyclic GFR-binding peptide
  MOD_RES (1)..(3)..(35)..(36): Xaa is C or S
XGXSRVVMNQYNKLIVNSSDDLYLVSIASLKTPAXX

SEQ ID NO: 4088 - protein, 26 aa, Artificial Sequence
  Cyclic GFR-binding peptide
ERYKKLVVKDYEDFYLMSIANLETPV

SEQ ID NO: 4089 - protein, 34 aa, Artificial Sequence
  Cyclic GFR-binding peptide
  MOD_RES (2)..(4): Xaa is C or S
EXKXALHDELTRYKKLFIPKKRVIEFYLVSIANL

SEQ ID NO: 4090 - protein, 37 aa, Artificial Sequence
  Cyclic GFR-binding peptide
  MOD_RES (2)..(34)..(35): Xaa is C or S
GXAKVVMNQYNKLIVNNSSDLYLVSIASLKTPAXXAK

SEQ ID NO: 4091 - protein, 31 aa, Artificial Sequence
  Cyclic GFR-binding peptide
  MOD_RES (27)..(28): Xaa is C or S
NYHYKLIVNNSSDKYLVSIPSLKTPAXXAKP

SEQ ID NO: 4092 - protein, 33 aa, Artificial Sequence
  Cyclic GFR-binding peptide
  MOD_RES (1)..(33): Xaa is C or S
XARVVMNYHYKLIVNSSDDKYLVSIPSLQTPAX

SEQ ID NO: 4093 - protein, 35 aa, Artificial Sequence
  Cyclic GFR-binding peptide
  MOD_RES (29)..(30): Xaa is C or S
VIMQYNKLVKPKRGVLYLISIASLAQPVXXPAASA

SEQ ID NO: 4094 - protein, 20 aa, Artificial Sequence
  Cyclic GFR-binding peptide
RYKKLVKPKRGVFYLISIAN

SEQ ID NO: 4095 - protein, 35 aa, Artificial Sequence
  Cyclic GFR-binding peptide
  MOD_RES (34)..(34): Xaa is C or S
DELTQYNKLFIPKKRVIELYLVSIASLQVQTPRXQ

SEQ ID NO: 4096 - protein, 38 aa, Artificial Sequence
  Cyclic GFR-binding peptide
  MOD_RES (1)..(3)..(36)..(37): Xaa is C or S
XGXEAVSMGEQYNKLTPVGMDDLYLVSIASLKTPVXXA

SEQ ID NO: 4097 - protein, 33 aa, Artificial Sequence
  Cyclic GFR-binding peptide
  MOD_RES (1)..(3): Xaa is C or S
XGXGEVVMEYHYKLVVKDYEDKYLMSIPSLETP

SEQ ID NO: 4098 - protein, 34 aa, Artificial Sequence
  Cyclic GFR-binding peptide
  MOD_RES (29)..(29): Xaa is C or S
VMNYHYKLIVNSSDDKYLVSIPSLKTPAXTPKTV

SEQ ID NO: 4099 - protein, 31 aa, Artificial Sequence
  Cyclic GFR-binding peptide
  MOD_RES (1)..(1): Xaa is C or S
XSKVIMRHKRLIKPTKGIYYLISTASLDQSV

SEQ ID NO: 4100 - protein, 31 aa, Artificial Sequence
  Cyclic GFR-binding peptide
  MOD_RES (27)..(27): Xaa is C or S
NQYNKLIVNSSDDLYLVSIASLKTPAXTPKT

SEQ ID NO: 4101 - protein, 37 aa, Artificial Sequence
  Cyclic GFR-binding peptide
  MOD_RES (1)..(3)..(35): Xaa is C or S
XGXSRVVMNQYNKLIVNSSDDLYLVSIASLKTPAXTP

SEQ ID NO: 4102 - protein, 36 aa, Artificial Sequence
  Cyclic GFR-binding peptide
  MOD_RES (1)..(32)..(33): Xaa is C or S
XSRVIMQYNKLVKPKRGVLYLISIASLAQPVXXPAA

SEQ ID NO: 4103 - protein, 34 aa, Artificial Sequence
  Cyclic GFR-binding peptide
  MOD_RES (31)..(32): Xaa is C or S
KVVMNQYNKLIVNNSSDLYLVSIASLKTPAXXAK

SEQ ID NO: 4104 - protein, 33 aa, Artificial Sequence
  Cyclic GFR-binding peptide
  MOD_RES (1)..(3): Xaa is C or S
XKXSKVIMRYKKLIKPTKGIFYLISIANLDQSV

SEQ ID NO: 4105 - protein, 29 aa, Artificial Sequence
  Cyclic GFR-binding peptide
  MOD_RES (1)..(1): Xaa is C or S
XGEVVMERYKKLVVKDYEDFYLMSIANLE

SEQ ID NO: 4106 - protein, 27 aa, Artificial Sequence
  Cyclic GFR-binding peptide
TYHYKLFIPKKRVIEKYLVSIPSLQVQ

SEQ ID NO: 4107 - protein, 32 aa, Artificial Sequence
  Cyclic GFR-binding peptide
  MOD_RES (1)..(1): Xaa is C or S
XEAVSMGERHKRLTPVGMDDYYLVSTASLKTP

SEQ ID NO: 4108 - protein, 37 aa, Artificial Sequence
  Cyclic GFR-binding peptide
  MOD_RES (2)..(34)..(35): Xaa is C or S
GXARVVMNQYNKLIVNSSDDLYLVSIASLQTPAXXPK

SEQ ID NO: 4109 - protein, 31 aa, Artificial Sequence
  Cyclic GFR-binding peptide
  MOD_RES (1)..(3): Xaa is C or S
XGXGEVVMDRHKRLVVKENEDYYLMSTASLE

SEQ ID NO: 4110 - protein, 31 aa, Artificial Sequence
  Cyclic GFR-binding peptide
  MOD_RES (1)..(3): Xaa is C or S
XKXSKVIMRYKKLIKPTKGIFYLISIANLDQ

SEQ ID NO: 4111 - protein, 34 aa, Artificial Sequence
  Cyclic GFR-binding peptide
  MOD_RES (2)..(2): Xaa is C or S
KXALHDELTYHYKLFIPKKRVIEKYLVSIPSLQV

SEQ ID NO: 4112 - protein, 31 aa, Artificial Sequence
  Cyclic GFR-binding peptide
  MOD_RES (2)..(2): Xaa is C or S
GXARVVMNRHKRLIVNSSDDYYLVSTASLQT

SEQ ID NO: 4113 - protein, 32 aa, Artificial Sequence
  Cyclic GFR-binding peptide
  MOD_RES (26)..(27): Xaa is C or S
YHYKLIVNNSSDKYLVSIPSLKTPAXXAKPVA

SEQ ID NO: 4114 - protein, 38 aa, Artificial Sequence
  Cyclic GFR-binding peptide
  MOD_RES (2)..(4)..(36)..(37): Xaa is C or S
HXGXSRVVMNQYNKLIVNSSDDLYLVSIASLKTPAXXP

SEQ ID NO: 4115 - protein, 28 aa, Artificial Sequence
  Cyclic GFR-binding peptide
VVMNQYNKLIVNSSDDLYLVSIASLKTP

SEQ ID NO: 4116 - protein, 27 aa, Artificial Sequence
  Cyclic GFR-binding peptide
VVMDRHKRLVVKENEDYYLMSTASLET

SEQ ID NO: 4117 - protein, 29 aa, Artificial Sequence
  Cyclic GFR-binding peptide
TYHYKLFIPKKRVIEKYLVSIPSLQVQTP

SEQ ID NO: 4118 - protein, 23 aa, Artificial Sequence
  Cyclic GFR-binding peptide
IMRYKKLIKPTKGIFYLISIANL

SEQ ID NO: 4119 - protein, 35 aa, Artificial Sequence
  Cyclic GFR-binding peptide
  MOD_RES (32)..(33): Xaa is C or S
SRVVMNYHYKLIVNSSDDKYLVSIPSLKTPAXXPK

SEQ ID NO: 4120 - protein, 29 aa, Artificial Sequence
  Cyclic GFR-binding peptide
  MOD_RES (26)..(27): Xaa is C or S
QYNKLIVNSSDDLYLVSIASLKTPAXXPK

SEQ ID NO: 4121 - protein, 31 aa, Artificial Sequence
  Cyclic GFR-binding peptide
  MOD_RES (1)..(1): Xaa is C or S
XSRVVMNRYKKLIVNSSDDFYLVSIANLKTP

SEQ ID NO: 4122 - protein, 27 aa, Artificial Sequence
  Cyclic GFR-binding peptide
MERHKRLVVKDYEDYYLMSTASLETPV

SEQ ID NO: 4123 - protein, 29 aa, Artificial Sequence
  Cyclic GFR-binding peptide
  MOD_RES (1)..(1): Xaa is C or S
XSRVVMNRHKRLIVNSSDDYYLVSTASLK

SEQ ID NO: 4124 - protein, 39 aa, Artificial Sequence
  Cyclic GFR-binding peptide
  MOD_RES (2)..(4)..(36)..(37): Xaa is C or S
RXGXGEVVMEQYNKLVVKDYEDLYLMSIASLETPVXXAK

SEQ ID NO: 4125 - protein, 34 aa, Artificial Sequence
  Cyclic GFR-binding peptide
  MOD_RES (2)..(2): Xaa is C or S
GXEAVSMGEQYNKLTPVGMDDLYLVSIASLKTPV

SEQ ID NO: 4126 - protein, 28 aa, Artificial Sequence
  Cyclic GFR-binding peptide
  MOD_RES (27)..(28): Xaa is C or S
MRHKRLVKPKRGVYYLISTASLAQPVXX

SEQ ID NO: 4127 - protein, 41 aa, Artificial Sequence
  Cyclic GFR-binding peptide
  MOD_RES (2)..(4)..(36)..(37): Xaa is C or S
HXGXAKVVMNRYKKLIVNNSSDFYLVSIANLKTPAXXAKPV

SEQ ID NO: 4128 - protein, 21 aa, Artificial Sequence
  Cyclic GFR-binding peptide
MRHKRLIKPTKGIYYLISTAS

SEQ ID NO: 4129 - protein, 33 aa, Artificial Sequence
  Cyclic GFR-binding peptide
  MOD_RES (2)..(2): Xaa is C or S
GXGEVVMDYHYKLVVKENEDKYLMSIPSLETPV

SEQ ID NO: 4130 - protein, 24 aa, Artificial Sequence
  Cyclic GFR-binding peptide
NYHYKLIVNNSSDKYLVSIPSLKT

SEQ ID NO: 4131 - protein, 38 aa, Artificial Sequence
  Cyclic GFR-binding peptide
  MOD_RES (1)..(3)..(34)..(35): Xaa is C or S
XKXSKVVMRYKKLVKPTRGVFYLISIANLDQPVXXPSA

SEQ ID NO: 4132 - protein, 22 aa, Artificial Sequence
  Cyclic GFR-binding peptide
GERHKRLTPVGMDDYYLVSTAS

SEQ ID NO: 4133 - protein, 28 aa, Artificial Sequence
  Cyclic GFR-binding peptide
QYNKLFIPKKRVIELYLVSIASLQVQTP

SEQ ID NO: 4134 - protein, 29 aa, Artificial Sequence
  Cyclic GFR-binding peptide
ELTYHYKLFIPKKRVIEKYLVSIPSLQVQ

SEQ ID NO: 4135 - protein, 32 aa, Artificial Sequence
  Cyclic GFR-binding peptide
  MOD_RES (26)..(27): Xaa is C or S
RYKKLTPVGMDDFYLVSIANLKTPVXXAKGVK

SEQ ID NO: 4136 - protein, 29 aa, Artificial Sequence
  Cyclic GFR-binding peptide
VVMDQYNKLVVKENEDLYLMSIASLETPV

SEQ ID NO: 4137 - protein, 27 aa, Artificial Sequence
  Cyclic GFR-binding peptide
  MOD_RES (27)..(27): Xaa is C or S
NRYKKLIVNSSDDFYLVSIANLQTPAX

SEQ ID NO: 4138 - protein, 40 aa, Artificial Sequence
  Cyclic GFR-binding peptide
  MOD_RES (1)..(3)..(35)..(36): Xaa is C or S
XGXGEVVMEYHYKLVVKDYEDKYLMSIPSLETPVXXAKPI

SEQ ID NO: 4139 - protein, 26 aa, Artificial Sequence
  Cyclic GFR-binding peptide
VMDQYNKLVVKENEDLYLMSIASLET

SEQ ID NO: 4140 - protein, 37 aa, Artificial Sequence
  Cyclic GFR-binding peptide
  MOD_RES (34)..(34): Xaa is C or S
DELTRHKRLFIPKKRVIEYYLVSTASLQVQTPRXQVN

SEQ ID NO: 4141 - protein, 31 aa, Artificial Sequence
  Cyclic GFR-binding peptide
  MOD_RES (27)..(28): Xaa is C or S
ERHKRLVVKDYEDYYLMSTASLETPVXXAKP

SEQ ID NO: 4142 - protein, 43 aa, Artificial Sequence
  Cyclic GFR-binding peptide
  MOD_RES (1)..(3)..(40): Xaa is C or S
XKXALHDELTQYNKLFIPKKRVIELYLVSIASLQVQTPRXQVN

SEQ ID NO: 4143 - protein, 36 aa, Artificial Sequence
  Cyclic GFR-binding peptide
  MOD_RES (1)..(33)..(34): Xaa is C or S
XSRVVMNRHKRLIVNSSDDYYLVSTASLKTPAXXPK

SEQ ID NO: 4144 - protein, 32 aa, Artificial Sequence
  Cyclic GFR-binding peptide
  MOD_RES (30)..(31): Xaa is C or S
KVVMYHYKLVKPTRGVKYLISIPSLDQPVXXP

SEQ ID NO: 4145 - protein, 32 aa, Artificial Sequence
  Cyclic GFR-binding peptide
  MOD_RES (28)..(29): Xaa is C or S
MDRYKKLVVKENEDFYLMSIANLETPVXXAKP

SEQ ID NO: 4146 - protein, 30 aa, Artificial Sequence
  Cyclic GFR-binding peptide
  MOD_RES (1)..(1): Xaa is C or S
XALHDELTRYKKLFIPKKRVIEFYLVSIAN

SEQ ID NO: 4147 - protein, 32 aa, Artificial Sequence
  Cyclic GFR-binding peptide
  MOD_RES (1)..(3): Xaa is C or S
XGXGEVVMDRYKKLVVKENEDFYLMSIANLET

SEQ ID NO: 4148 - protein, 34 aa, Artificial Sequence
  Cyclic GFR-binding peptide
  MOD_RES (29)..(30): Xaa is C or S
VMNYHYKLIVNSSDDKYLVSIPSLKTPAXXPKPV

SEQ ID NO: 4149 - protein, 33 aa, Artificial Sequence
  Cyclic GFR-binding peptide
  MOD_RES (30)..(31): Xaa is C or S
KVVMQYNKLVKPTRGVLYLISIASLDQPVXXPS

SEQ ID NO: 4150 - protein, 33 aa, Artificial Sequence
  Cyclic GFR-binding peptide
  MOD_RES (28)..(29): Xaa is C or S
MNQYNKLIVNSSDDLYLVSIASLQTPAXXPKPV

SEQ ID NO: 4151 - protein, 38 aa, Artificial Sequence
  Cyclic GFR-binding peptide
  MOD_RES (1)..(3)..(34)..(35): Xaa is C or S
XKXSKVIMRYKKLIKPTKGIFYLISIANLDQSVXXPSA

SEQ ID NO: 4152 - protein, 37 aa, Artificial Sequence
  Cyclic GFR-binding peptide
  MOD_RES (32)..(32): Xaa is C or S
SRVVMNYHYKLIVNSSDDKYLVSIPSLKTPAXTPKTV

SEQ ID NO: 4153 - protein, 26 aa, Artificial Sequence
  Cyclic GFR-binding peptide
LTRHKRLFIPKKRVIEYYLVSTASLQ

SEQ ID NO: 4154 - protein, 37 aa, Artificial Sequence
  Cyclic GFR-binding peptide
  MOD_RES (2)..(33)..(34): Xaa is C or S
KXSRVIMRHKRLVKPKRGVYYLISTASLAQPVXXPAA

SEQ ID NO: 4155 - protein, 23 aa, Artificial Sequence
  Cyclic GFR-binding peptide
YHYKLIVNSSDDKYLVSIPSLKT

SEQ ID NO: 4156 - protein, 37 aa, Artificial Sequence
  Cyclic GFR-binding peptide
  MOD_RES (1)..(3)..(35): Xaa is C or S
XGXSRVVMNYHYKLIVNSSDDKYLVSIPSLKTPAXTP

SEQ ID NO: 4157 - protein, 39 aa, Artificial Sequence
  Cyclic GFR-binding peptide
  MOD_RES (1)..(3)..(34)..(35): Xaa is C or S
XKXSKVVMRHKRLVKPTRGVYYLISTASLDQPVXXPSAS

SEQ ID NO: 4158 - protein, 31 aa, Artificial Sequence
  Cyclic GFR-binding peptide
  MOD_RES (1)..(1): Xaa is C or S
XSKVVMYHYKLVKPTRGVKYLISIPSLDQPV

SEQ ID NO: 4159 - protein, 27 aa, Artificial Sequence
  Cyclic GFR-binding peptide
VIMQYNKLIKPTKGILYLISIASLDQS

SEQ ID NO: 4160 - protein, 30 aa, Artificial Sequence
  Cyclic GFR-binding peptide
  MOD_RES (27)..(28): Xaa is C or S
NRYKKLIVNNSSDFYLVSIANLKTPAXXAK

SEQ ID NO: 4161 - protein, 28 aa, Artificial Sequence
  Cyclic GFR-binding peptide
  MOD_RES (26)..(27): Xaa is C or S
QYNKLVKPTRGVLYLISIASLDQPVXXP

SEQ ID NO: 4162 - protein, 34 aa, Artificial Sequence
  Cyclic GFR-binding peptide
  MOD_RES (29)..(30): Xaa is C or S
VMNRHKRLIVNSSDDYYLVSTASLKTPAXXPKPV

SEQ ID NO: 4163 - protein, 33 aa, Artificial Sequence
  Cyclic GFR-binding peptide
ALHDELTQYNKLFIPKKRVIELYLVSIASLQVQ

SEQ ID NO: 4164 - protein, 22 aa, Artificial Sequence
  Cyclic GFR-binding peptide
MDRHKRLVVKENEDYYLMSTAS

SEQ ID NO: 4165 - protein, 32 aa, Artificial Sequence
  Cyclic GFR-binding peptide
  MOD_RES (32)..(32): Xaa is C or S
GEVVMDRHKRLVVKENEDYYLMSTASLETPVX

SEQ ID NO: 4166 - protein, 29 aa, Artificial Sequence
  Cyclic GFR-binding peptide
  MOD_RES (26)..(27): Xaa is C or S
RYKKLTPVGMDDFYLVSIANLKTPVXXAK

SEQ ID NO: 4167 - protein, 27 aa, Artificial Sequence
  Cyclic GFR-binding peptide
  MOD_RES (1)..(1): Xaa is C or S
XSKVVMQYNKLVKPTRGVLYLISIASL

SEQ ID NO: 4168 - protein, 32 aa, Artificial Sequence
  Cyclic GFR-binding peptide
  MOD_RES (29)..(30): Xaa is C or S
VIMRHKRLVKPKRGVYYLISTASLAQPVXXPA

SEQ ID NO: 4169 - protein, 20 aa, Artificial Sequence
  Cyclic GFR-binding peptide
RYKKLIVNSSDDFYLVSIAN

SEQ ID NO: 4170 - protein, 31 aa, Artificial Sequence
  Cyclic GFR-binding peptide
GEVVMDRYKKLVVKENEDFYLMSIANLETPV

SEQ ID NO: 4171 - protein, 31 aa, Artificial Sequence
  Cyclic GFR-binding peptide
  MOD_RES (27)..(28): Xaa is C or S
MYHYKLIKPTKGIKYLISIPSLDQSVXXPSA

SEQ ID NO: 4172 - protein, 31 aa, Artificial Sequence
  Cyclic GFR-binding peptide
  MOD_RES (1)..(3): Xaa is C or S
XKXSKVVMRHKRLVKPTRGVYYLISTASLDQ

SEQ ID NO: 4173 - protein, 31 aa, Artificial Sequence
  Cyclic GFR-binding peptide
  MOD_RES (30)..(31): Xaa is C or S
SMGEQYNKLTPVGMDDLYLVSIASLKTPVXX

SEQ ID NO: 4174 - protein, 40 aa, Artificial Sequence
  Cyclic GFR-binding peptide
  MOD_RES (1)..(3)..(35)..(36): Xaa is C or S
XGXARVVMNQYNKLIVNSSDDLYLVSIASLQTPAXXPKPV

SEQ ID NO: 4175 - protein, 24 aa, Artificial Sequence
  Cyclic GFR-binding peptide
VMERHKRLVVKDYEDYYLMSTASL

SEQ ID NO: 4176 - protein, 28 aa, Artificial Sequence
  Cyclic GFR-binding peptide
EVVMDRHKRLVVKENEDYYLMSTASLET

SEQ ID NO: 4177 - protein, 28 aa, Artificial Sequence
  Cyclic GFR-binding peptide
VSMGERYKKLTPVGMDDFYLVSIANLKT

SEQ ID NO: 4178 - protein, 28 aa, Artificial Sequence
  Cyclic GFR-binding peptide
SRVVMNQYNKLIVNSSDDLYLVSIASLK

SEQ ID NO: 4179 - protein, 28 aa, Artificial Sequence
  Cyclic GFR-binding peptide
  MOD_RES (27)..(28): Xaa is C or S
NQYNKLIVNNSSDLYLVSIASLKTPAXX

SEQ ID NO: 4180 - protein, 31 aa, Artificial Sequence
  Cyclic GFR-binding peptide
  MOD_RES (29)..(29): Xaa is C or S
VMNQYNKLIVNSSDDLYLVSIASLKTPAXTP

SEQ ID NO: 4181 - protein, 39 aa, Artificial Sequence
  Cyclic GFR-binding peptide
  MOD_RES (1)..(3)..(34)..(35): Xaa is C or S
XKXSKVIMRHKRLIKPTKGIYYLISTASLDQSVXXPSAS

SEQ ID NO: 4182 - protein, 37 aa, Artificial Sequence
  Cyclic GFR-binding peptide
  MOD_RES (32)..(33): Xaa is C or S
ARVVMNRHKRLIVNSSDDYYLVSTASLQTPAXXPKPV

SEQ ID NO: 4183 - protein, 24 aa, Artificial Sequence
  Cyclic GFR-binding peptide
NRYKKLIVNSSDDFYLVSIANLQT

SEQ ID NO: 4184 - protein, 30 aa, Artificial Sequence
  Cyclic GFR-binding peptide
  MOD_RES (1)..(3): Xaa is C or S
XGXGEVVMDYHYKLVVKENEDKYLMSIPSL

SEQ ID NO: 4185 - protein, 32 aa, Artificial Sequence
  Cyclic GFR-binding peptide
  MOD_RES (1)..(3): Xaa is C or S
XKXSKVIMRYKKLIKPTKGIFYLISIANLDQS

SEQ ID NO: 4186 - protein, 29 aa, Artificial Sequence
  Cyclic GFR-binding peptide
  MOD_RES (1)..(1): Xaa is C or S
XGEVVMDRYKKLVVKENEDFYLMSIANLE

SEQ ID NO: 4187 - protein, 30 aa, Artificial Sequence
  Cyclic GFR-binding peptide
  MOD_RES (1)..(3): Xaa is C or S
XGXGEVVMDRHKRLVVKENEDYYLMSTASL

SEQ ID NO: 4188 - protein, 25 aa, Artificial Sequence
  Cyclic GFR-binding peptide
MGERHKRLTPVGMDDYYLVSTASLK

SEQ ID NO: 4189 - protein, 34 aa, Artificial Sequence
  Cyclic GFR-binding peptide
  MOD_RES (29)..(30): Xaa is C or S
MGERHKRLTPVGMDDYYLVSTASLKTPVXXAKGV

SEQ ID NO: 4190 - protein, 25 aa, Artificial Sequence
  Cyclic GFR-binding peptide
NYHYKLIVNNSSDKYLVSIPSLKTP

SEQ ID NO: 4191 - protein, 29 aa, Artificial Sequence
  Cyclic GFR-binding peptide
  MOD_RES (27)..(28): Xaa is C or S
NRHKRLIVNSSDDYYLVSTASLQTPAXXP

SEQ ID NO: 4192 - protein, 29 aa, Artificial Sequence
  Cyclic GFR-binding peptide
  MOD_RES (26)..(27): Xaa is C or S
RYKKLIKPTKGIFYLISIANLDQSVXXPS

SEQ ID NO: 4193 - protein, 36 aa, Artificial Sequence
  Cyclic GFR-binding peptide
  MOD_RES (1)..(33): Xaa is C or S
XSRVVMNRYKKLIVNSSDDFYLVSIANLKTPAXTPK

SEQ ID NO: 4194 - protein, 31 aa, Artificial Sequence
  Cyclic GFR-binding peptide
  MOD_RES (1)..(3): Xaa is C or S
XGXGEVVMDQYNKLVVKENEDLYLMSIASLE

SEQ ID NO: 4195 - protein, 40 aa, Artificial Sequence
  Cyclic GFR-binding peptide
  MOD_RES (2)..(34)..(35): Xaa is C or S
GXSRVVMNRHKRLIVNSSDDYYLVSTASLKTPAXXPKPVY

SEQ ID NO: 4196 - protein, 40 aa, Artificial Sequence
  Cyclic GFR-binding peptide
  MOD_RES (1)..(3)..(40): Xaa is C or S
XKXALHDELTRYKKLFIPKKRVIEFYLVSIANLQVQTPRX

SEQ ID NO: 4197 - protein, 37 aa, Artificial Sequence
  Cyclic GFR-binding peptide
  MOD_RES (1)..(3)..(34)..(35): Xaa is C or S
XKXSRVIMRHKRLVKPKRGVYYLISTASLAQPVXXPA

SEQ ID NO: 4198 - protein, 27 aa, Artificial Sequence
  Cyclic GFR-binding peptide
ELTQYNKLFIPKKRVIELYLVSIASLQ

SEQ ID NO: 4199 - protein, 36 aa, Artificial Sequence
  Cyclic GFR-binding peptide
  MOD_RES (2)..(33)..(34): Xaa is C or S
KXSKVIMRYKKLIKPTKGIFYLISIANLDQSVXXPS

SEQ ID NO: 4200 - protein, 42 aa, Artificial Sequence
  Cyclic GFR-binding peptide
  MOD_RES (1)..(38): Xaa is C or S
XALHDELTRHKRLFIPKKRVIEYYLVSTASLQVQTPRXQVNR

SEQ ID NO: 4201 - protein, 31 aa, Artificial Sequence
  Cyclic GFR-binding peptide
  MOD_RES (30)..(30): Xaa is C or S
VVMNRYKKLIVNSSDDFYLVSIANLKTPAXT

SEQ ID NO: 4202 - protein, 36 aa, Artificial Sequence
  Cyclic GFR-binding peptide
  MOD_RES (2)..(2): Xaa is C or S
KXALHDELTYHYKLFIPKKRVIEKYLVSIPSLQVQT

SEQ ID NO: 4203 - protein, 30 aa, Artificial Sequence
  Cyclic GFR-binding peptide
  MOD_RES (2)..(4): Xaa is C or S
RXGXGEVVMDRHKRLVVKENEDYYLMSTAS

SEQ ID NO: 4204 - protein, 32 aa, Artificial Sequence
  Cyclic GFR-binding peptide
  MOD_RES (1)..(32): Xaa is C or S
XSKVVMRYKKLVKPTRGVFYLISIANLDQPVX

SEQ ID NO: 4205 - protein, 31 aa, Artificial Sequence
  Cyclic GFR-binding peptide
  MOD_RES (27)..(28): Xaa is C or S
NRYKKLIVNSSDDFYLVSIANLKTPAXXPKP

SEQ ID NO: 4206 - protein, 27 aa, Artificial Sequence
  Cyclic GFR-binding peptide
  MOD_RES (27)..(27): Xaa is C or S
ERHKRLTPVGMDDYYLVSTASLKTPVX

SEQ ID NO: 4207 - protein, 34 aa, Artificial Sequence
  Cyclic GFR-binding peptide
  MOD_RES (30)..(31): Xaa is C or S
VVMNRHKRLIVNSSDDYYLVSTASLKTPAXXPKP

SEQ ID NO: 4208 - protein, 27 aa, Artificial Sequence
  Cyclic GFR-binding peptide
MEYHYKLVVKDYEDKYLMSIPSLETPV

SEQ ID NO: 4209 - protein, 31 aa, Artificial Sequence
  Cyclic GFR-binding peptide
  MOD_RES (31)..(31): Xaa is C or S
TRHKRLFIPKKRVIEYYLVSTASLQVQTPRX

SEQ ID NO: 4210 - protein, 32 aa, Artificial Sequence
  Cyclic GFR-binding peptide
  MOD_RES (2)..(4): Xaa is C or S
RXGXGEVVMEYHYKLVVKDYEDKYLMSIPSLE

SEQ ID NO: 4211 - protein, 31 aa, Artificial Sequence
  Cyclic GFR-binding peptide
  MOD_RES (2)..(4): Xaa is C or S
HXGXAKVVMNQYNKLIVNNSSDLYLVSIASL

SEQ ID NO: 4212 - protein, 32 aa, Artificial Sequence
  Cyclic GFR-binding peptide
  MOD_RES (31)..(32): Xaa is C or S
RVVMNRYKKLIVNSSDDFYLVSIANLKTPAXX

SEQ ID NO: 4213 - protein, 24 aa, Artificial Sequence
  Cyclic GFR-binding peptide
VMEYHYKLVVKDYEDKYLMSIPSL

SEQ ID NO: 4214 - protein, 31 aa, Artificial Sequence
  Cyclic GFR-binding peptide
  MOD_RES (28)..(29): Xaa is C or S
IMRHKRLVKPKRGVYYLISTASLAQPVXXPA

SEQ ID NO: 4215 - protein, 38 aa, Artificial Sequence
  Cyclic GFR-binding peptide
  MOD_RES (1)..(33)..(34): Xaa is C or S
XSRVVMNRYKKLIVNSSDDFYLVSIANLKTPAXXPKPV

SEQ ID NO: 4216 - protein, 28 aa, Artificial Sequence
  Cyclic GFR-binding peptide
  MOD_RES (1)..(1): Xaa is C or S
XGEVVMDYHYKLVVKENEDKYLMSIPSL

SEQ ID NO: 4217 - protein, 31 aa, Artificial Sequence
  Cyclic GFR-binding peptide
  MOD_RES (2)..(4): Xaa is C or S
RXGXGEVVMEYHYKLVVKDYEDKYLMSIPSL

SEQ ID NO: 4218 - protein, 31 aa, Artificial Sequence
  Cyclic GFR-binding peptide
  MOD_RES (1)..(1): Xaa is C or S
XGEVVMERHKRLVVKDYEDYYLMSTASLETP

SEQ ID NO: 4219 - protein, 28 aa, Artificial Sequence
  Cyclic GFR-binding peptide
  MOD_RES (28)..(28): Xaa is C or S
MDQYNKLVVKENEDLYLMSIASLETPVX

SEQ ID NO: 4220 - protein, 24 aa, Artificial Sequence
  Cyclic GFR-binding peptide
MRHKRLVKPKRGVYYLISTASLAQ

SEQ ID NO: 4221 - protein, 33 aa, Artificial Sequence
  Cyclic GFR-binding peptide
  MOD_RES (2)..(4): Xaa is C or S
HXGXARVVMNRHKRLIVNSSDDYYLVSTASLQT

SEQ ID NO: 4222 - protein, 30 aa, Artificial Sequence
  Cyclic GFR-binding peptide
  MOD_RES (1)..(1): Xaa is C or S
XARVVMNQYNKLIVNSSDDLYLVSIASLQT

SEQ ID NO: 4223 - protein, 31 aa, Artificial Sequence
  Cyclic GFR-binding peptide
  MOD_RES (26)..(26): Xaa is C or S
YHYKLIVNSSDDKYLVSIPSLKTPAXTPKTV

SEQ ID NO: 4224 - protein, 39 aa, Artificial Sequence
  Cyclic GFR-binding peptide
  MOD_RES (1)..(33)..(34): Xaa is C or S
XAKVVMNRYKKLIVNNSSDFYLVSIANLKTPAXXAKPVA

SEQ ID NO: 4225 - protein, 34 aa, Artificial Sequence
  Cyclic GFR-binding peptide
  MOD_RES (2)..(33)..(34): Xaa is C or S
KXSKVVMRYKKLVKPTRGVFYLISIANLDQPVXX

SEQ ID NO: 4226 - protein, 29 aa, Artificial Sequence
  Cyclic GFR-binding peptide
  MOD_RES (27)..(27): Xaa is C or S
NRHKRLIVNSSDDYYLVSTASLKTPAXTP

SEQ ID NO: 4227 - protein, 38 aa, Artificial Sequence
  Cyclic GFR-binding peptide
  MOD_RES (1)..(33)..(34): Xaa is C or S
XARVVMNQYNKLIVNSSDDLYLVSIASLQTPAXXPKPV

SEQ ID NO: 4228 - protein, 28 aa, Artificial Sequence
  Cyclic GFR-binding peptide
  MOD_RES (27)..(28): Xaa is C or S
NRHKRLIVNSSDDYYLVSTASLKTPAXX

SEQ ID NO: 4229 - protein, 25 aa, Artificial Sequence
  Cyclic GFR-binding peptide
IMYHYKLVKPKRGVKYLISIPSLAQ

SEQ ID NO: 4230 - protein, 32 aa, Artificial Sequence
  Cyclic GFR-binding peptide
  MOD_RES (30)..(31): Xaa is C or S
VVMNQYNKLIVNSSDDLYLVSIASLKTPAXXP

SEQ ID NO: 4231 - protein, 36 aa, Artificial Sequence
  Cyclic GFR-binding peptide
  MOD_RES (1)..(33)..(34): Xaa is C or S
XGEVVMEQYNKLVVKDYEDLYLMSIASLETPVXXAK

SEQ ID NO: 4232 - protein, 31 aa, Artificial Sequence
  Cyclic GFR-binding peptide
  MOD_RES (31)..(31): Xaa is C or S
EVVMDQYNKLVVKENEDLYLMSIASLETPVX

SEQ ID NO: 4233 - protein, 32 aa, Artificial Sequence
  Cyclic GFR-binding peptide
  MOD_RES (28)..(28): Xaa is C or S
MNRHKRLIVNSSDDYYLVSTASLKTPAXTPKT

SEQ ID NO: 4234 - protein, 34 aa, Artificial Sequence
  Cyclic GFR-binding peptide
  MOD_RES (2)..(34): Xaa is C or S
GXGEVVMDQYNKLVVKENEDLYLMSIASLETPVX

SEQ ID NO: 4235 - protein, 28 aa, Artificial Sequence
  Cyclic GFR-binding peptide
RVVMNRYKKLIVNSSDDFYLVSIANLQT

SEQ ID NO: 4236 - protein, 39 aa, Artificial Sequence
  Cyclic GFR-binding peptide
  MOD_RES (2)..(4)..(36)..(37): Xaa is C or S
HXGXAKVVMNQYNKLIVNNSSDLYLVSIASLKTPAXXAK

SEQ ID NO: 4237 - protein, 35 aa, Artificial Sequence
  Cyclic GFR-binding peptide
  MOD_RES (1)..(3)..(34)..(35): Xaa is C or S
XKXSKVVMQYNKLVKPTRGVLYLISIASLDQPVXX

SEQ ID NO: 4238 - protein, 38 aa, Artificial Sequence
  Cyclic GFR-binding peptide
  MOD_RES (2)..(4)..(35)..(36): Xaa is C or S
SXKXSRVIMRYKKLVKPKRGVFYLISIANLAQPVXXPA

SEQ ID NO: 4239 - protein, 34 aa, Artificial Sequence
  Cyclic GFR-binding peptide
  MOD_RES (1)..(33)..(34): Xaa is C or S
XAKVVMNRYKKLIVNNSSDFYLVSIANLKTPAXX

SEQ ID NO: 4240 - protein, 29 aa, Artificial Sequence
  Cyclic GFR-binding peptide
  MOD_RES (2)..(2): Xaa is C or S
GXGEVVMEQYNKLVVKDYEDLYLMSIASL

SEQ ID NO: 4241 - protein, 36 aa, Artificial Sequence
  Cyclic GFR-binding peptide
  MOD_RES (1)..(3)..(35)..(36): Xaa is C or S
XGXGEVVMDRYKKLVVKENEDFYLMSIANLETPVXX

SEQ ID NO: 4242 - protein, 30 aa, Artificial Sequence
  Cyclic GFR-binding peptide
ARVVMNRYKKLIVNSSDDFYLVSIANLQTP

SEQ ID NO: 4243 - protein, 36 aa, Artificial Sequence
  Cyclic GFR-binding peptide
  MOD_RES (30)..(31): Xaa is C or S
VVMDRHKRLVVKENEDYYLMSTASLETPVXXAKPIK

SEQ ID NO: 4244 - protein, 24 aa, Artificial Sequence
  Cyclic GFR-binding peptide
RHKRLIVNSSDDYYLVSTASLQTP

SEQ ID NO: 4245 - protein, 33 aa, Artificial Sequence
  Cyclic GFR-binding peptide
  MOD_RES (30)..(31): Xaa is C or S
VVMNRHKRLIVNSSDDYYLVSTASLQTPAXXPK

SEQ ID NO: 4246 - protein, 37 aa, Artificial Sequence
  Cyclic GFR-binding peptide
  MOD_RES (1)..(32)..(33): Xaa is C or S
XSRVIMRYKKLVKPKRGVFYLISIANLAQPVXXPAAS

SEQ ID NO: 4247 - protein, 29 aa, Artificial Sequence
  Cyclic GFR-binding peptide
  MOD_RES (2)..(4): Xaa is C or S
SXKXSKVVMQYNKLVKPTRGVLYLISIAS

SEQ ID NO: 4248 - protein, 37 aa, Artificial Sequence
  Cyclic GFR-binding peptide
  MOD_RES (35)..(35): Xaa is C or S
HDELTQYNKLFIPKKRVIELYLVSIASLQVQTPRXQV

SEQ ID NO: 4249 - protein, 25 aa, Artificial Sequence
  Cyclic GFR-binding peptide
MRYKKLVKPKRGVFYLISIANLAQP

SEQ ID NO: 4250 - protein, 25 aa, Artificial Sequence
  Cyclic GFR-binding peptide
QYNKLIVNNSSDLYLVSIASLKTPA

SEQ ID NO: 4251 - protein, 22 aa, Artificial Sequence
  Cyclic GFR-binding peptide
MNYHYKLIVNSSDDKYLVSIPS

SEQ ID NO: 4252 - protein, 37 aa, Artificial Sequence
  Cyclic GFR-binding peptide
  MOD_RES (35)..(35): Xaa is C or S
HDELTRHKRLFIPKKRVIEYYLVSTASLQVQTPRXQV

SEQ ID NO: 4253 - protein, 39 aa, Artificial Sequence
  Cyclic GFR-binding peptide
  MOD_RES (1)..(3)..(35)..(36): Xaa is C or S
XGXSRVVMNRHKRLIVNSSDDYYLVSTASLKTPAXXPKP

SEQ ID NO: 4254 - protein, 24 aa, Artificial Sequence
  Cyclic GFR-binding peptide
VMERYKKLVVKDYEDFYLMSIANL

SEQ ID NO: 4255 - protein, 29 aa, Artificial Sequence
  Cyclic GFR-binding peptide
  MOD_RES (1)..(1): Xaa is C or S
XGEVVMEQYNKLVVKDYEDLYLMSIASLE

SEQ ID NO: 4256 - protein, 37 aa, Artificial Sequence
  Cyclic GFR-binding peptide
  MOD_RES (32)..(33): Xaa is C or S
SRVVMNQYNKLIVNSSDDLYLVSIASLKTPAXXPKPV

SEQ ID NO: 4257 - protein, 35 aa, Artificial Sequence
  Cyclic GFR-binding peptide
  MOD_RES (30)..(30): Xaa is C or S
VVMNYHYKLIVNSSDDKYLVSIPSLKTPAXTPKTV

SEQ ID NO: 4258 - protein, 23 aa, Artificial Sequence
  Cyclic GFR-binding peptide
MRHKRLVKPKRGVYYLISTASLA

SEQ ID NO: 4259 - protein, 24 aa, Artificial Sequence
  Cyclic GFR-binding peptide
YHYKLIVNNSSDKYLVSIPSLKTP

SEQ ID NO: 4260 - protein, 22 aa, Artificial Sequence
  Cyclic GFR-binding peptide
IMQYNKLVKPKRGVLYLISIAS

SEQ ID NO: 4261 - protein, 33 aa, Artificial Sequence
  Cyclic GFR-binding peptide
  MOD_RES (31)..(32): Xaa is C or S
EVVMDYHYKLVVKENEDKYLMSIPSLETPVXXA

SEQ ID NO: 4262 - protein, 32 aa, Artificial Sequence
  Cyclic GFR-binding peptide
  MOD_RES (31)..(32): Xaa is C or S
EVVMDRYKKLVVKENEDFYLMSIANLETPVXX

SEQ ID NO: 4263 - protein, 33 aa, Artificial Sequence
  Cyclic GFR-binding peptide
  MOD_RES (27)..(28): Xaa is C or S
NQYNKLIVNSSDDLYLVSIASLQTPAXXPKPVT

SEQ ID NO: 4264 - protein, 30 aa, Artificial Sequence
  Cyclic GFR-binding peptide
DELTRHKRLFIPKKRVIEYYLVSTASLQVQ

SEQ ID NO: 4265 - protein, 35 aa, Artificial Sequence
  Cyclic GFR-binding peptide
  MOD_RES (1)..(3): Xaa is C or S
XGXEAVSMGERHKRLTPVGMDDYYLVSTASLKTPV

SEQ ID NO: 4266 - protein, 34 aa, Artificial Sequence
  Cyclic GFR-binding peptide
  MOD_RES (1)..(3): Xaa is C or S
XGXARVVMNRYKKLIVNSSDDFYLVSIANLQTPA

SEQ ID NO: 4267 - protein, 31 aa, Artificial Sequence
  Cyclic GFR-binding peptide
  MOD_RES (2)..(4): Xaa is C or S
SXKXSRVIMQYNKLVKPKRGVLYLISIASLA

SEQ ID NO: 4268 - protein, 27 aa, Artificial Sequence
  Cyclic GFR-binding peptide
TRHKRLFIPKKRVIEYYLVSTASLQVQ

SEQ ID NO: 4269 - protein, 37 aa, Artificial Sequence
  Cyclic GFR-binding peptide
  MOD_RES (1)..(1): Xaa is C or S
XALHDELTRYKKLFIPKKRVIEFYLVSIANLQVQTPR

SEQ ID NO: 4270 - protein, 40 aa, Artificial Sequence
  Cyclic GFR-binding peptide
  MOD_RES (1)..(3)..(34)..(35): Xaa is C or S
XKXSKVVMYHYKLVKPTRGVKYLISIPSLDQPVXXPSASA

SEQ ID NO: 4271 - protein, 29 aa, Artificial Sequence
  Cyclic GFR-binding peptide
  MOD_RES (27)..(28): Xaa is C or S
MRHKRLVKPTRGVYYLISTASLDQPVXXP

SEQ ID NO: 4272 - protein, 28 aa, Artificial Sequence
  Cyclic GFR-binding peptide
  MOD_RES (28)..(28): Xaa is C or S
IMQYNKLIKPTKGILYLISIASLDQSVX

SEQ ID NO: 4273 - protein, 39 aa, Artificial Sequence
  Cyclic GFR-binding peptide
  MOD_RES (2)..(34)..(35): Xaa is C or S
GXSRVVMNRYKKLIVNSSDDFYLVSIANLKTPAXXPKPV

SEQ ID NO: 4274 - protein, 24 aa, Artificial Sequence
  Cyclic GFR-binding peptide
VVMERYKKLVVKDYEDFYLMSIAN

SEQ ID NO: 4275 - protein, 29 aa, Artificial Sequence
  Cyclic GFR-binding peptide
DELTRYKKLFIPKKRVIEFYLVSIANLQV

SEQ ID NO: 4276 - protein, 30 aa, Artificial Sequence
  Cyclic GFR-binding peptide
  MOD_RES (29)..(30): Xaa is C or S
VIMYHYKLIKPTKGIKYLISIPSLDQSVXX

SEQ ID NO: 4277 - protein, 30 aa, Artificial Sequence
  Cyclic GFR-binding peptide
  MOD_RES (26)..(27): Xaa is C or S
RHKRLIVNSSDDYYLVSTASLKTPAXXPKP

SEQ ID NO: 4278 - protein, 25 aa, Artificial Sequence
  Cyclic GFR-binding peptide
EVVMDRHKRLVVKENEDYYLMSTAS

SEQ ID NO: 4279 - protein, 32 aa, Artificial Sequence
  Cyclic GFR-binding peptide
  MOD_RES (2)..(2): Xaa is C or S
GXGEVVMERHKRLVVKDYEDYYLMSTASLETP

SEQ ID NO: 4280 - protein, 29 aa, Artificial Sequence
  Cyclic GFR-binding peptide
  MOD_RES (1)..(3): Xaa is C or S
XKXSKVVMQYNKLVKPTRGVLYLISIASL

SEQ ID NO: 4281 - protein, 33 aa, Artificial Sequence
  Cyclic GFR-binding peptide
  MOD_RES (32)..(33): Xaa is C or S
GEVVMDQYNKLVVKENEDLYLMSIASLETPVXX

SEQ ID NO: 4282 - protein, 41 aa, Artificial Sequence
  Cyclic GFR-binding peptide
  MOD_RES (2)..(4)..(41): Xaa is C or S
EXKXALHDELTRYKKLFIPKKRVIEFYLVSIANLQVQTPRX

SEQ ID NO: 4283 - protein, 27 aa, Artificial Sequence
  Cyclic GFR-binding peptide
  MOD_RES (26)..(26): Xaa is C or S
RHKRLIVNSSDDYYLVSTASLKTPAXT

SEQ ID NO: 4284 - protein, 23 aa, Artificial Sequence
  Cyclic GFR-binding peptide
VMNRYKKLIVNNSSDFYLVSIAN

SEQ ID NO: 4285 - protein, 32 aa, Artificial Sequence
  Cyclic GFR-binding peptide
  MOD_RES (30)..(31): Xaa is C or S
VVMDRYKKLVVKENEDFYLMSIANLETPVXXA

SEQ ID NO: 4286 - protein, 33 aa, Artificial Sequence
  Cyclic GFR-binding peptide
  MOD_RES (29)..(30): Xaa is C or S
VMNYHYKLIVNSSDDKYLVSIPSLKTPAXXPKP

SEQ ID NO: 4287 - protein, 31 aa, Artificial Sequence
  Cyclic GFR-binding peptide
ELTRYKKLFIPKKRVIEFYLVSIANLQVQTP

SEQ ID NO: 4288 - protein, 37 aa, Artificial Sequence
  Cyclic GFR-binding peptide
  MOD_RES (31)..(32): Xaa is C or S
SKVVMRYKKLVKPTRGVFYLISIANLDQPVXXPSASA

SEQ ID NO: 4289 - protein, 35 aa, Artificial Sequence
  Cyclic GFR-binding peptide
  MOD_RES (1)..(3)..(35): Xaa is C or S
XGXGEVVMEQYNKLVVKDYEDLYLMSIASLETPVX

SEQ ID NO: 4290 - protein, 25 aa, Artificial Sequence
  Cyclic GFR-binding peptide
VIMYHYKLVKPKRGVKYLISIPSLA

SEQ ID NO: 4291 - protein, 32 aa, Artificial Sequence
  Cyclic GFR-binding peptide
  MOD_RES (26)..(27): Xaa is C or S
QYNKLTPVGMDDLYLVSIASLKTPVXXAKGVK

SEQ ID NO: 4292 - protein, 33 aa, Artificial Sequence
  Cyclic GFR-binding peptide
  MOD_RES (31)..(32): Xaa is C or S
SKVIMRYKKLIKPTKGIFYLISIANLDQSVXXP

SEQ ID NO: 4293 - protein, 29 aa, Artificial Sequence
  Cyclic GFR-binding peptide
  MOD_RES (1)..(3): Xaa is C or S
XKXSKVIMQYNKLIKPTKGILYLISIASL

SEQ ID NO: 4294 - protein, 37 aa, Artificial Sequence
  Cyclic GFR-binding peptide
  MOD_RES (1)..(3)..(35)..(36): Xaa is C or S
XGXGEVVMERYKKLVVKDYEDFYLMSIANLETPVXXA

SEQ ID NO: 4295 - protein, 34 aa, Artificial Sequence
  Cyclic GFR-binding peptide
  MOD_RES (1)..(3): Xaa is C or S
XGXSRVVMNRYKKLIVNSSDDFYLVSIANLKTPA

SEQ ID NO: 4296 - protein, 31 aa, Artificial Sequence
  Cyclic GFR-binding peptide
  MOD_RES (2)..(2): Xaa is C or S
GXSRVVMNRYKKLIVNSSDDFYLVSIANLKT

SEQ ID NO: 4297 - protein, 27 aa, Artificial Sequence
  Cyclic GFR-binding peptide
  MOD_RES (26)..(27): Xaa is C or S
YHYKLVKPKRGVKYLISIPSLAQPVXX

SEQ ID NO: 4298 - protein, 31 aa, Artificial Sequence
  Cyclic GFR-binding peptide
  MOD_RES (2)..(2): Xaa is C or S
GXGEVVMERYKKLVVKDYEDFYLMSIANLET

SEQ ID NO: 4299 - protein, 23 aa, Artificial Sequence
  Cyclic GFR-binding peptide
VMYHYKLVKPTRGVKYLISIPSL

SEQ ID NO: 4300 - protein, 30 aa, Artificial Sequence
  Cyclic GFR-binding peptide
  MOD_RES (30)..(30): Xaa is C or S
VVMNQYNKLIVNNSSDLYLVSIASLKTPAX

SEQ ID NO: 4301 - protein, 26 aa, Artificial Sequence
  Cyclic GFR-binding peptide
EVVMDRHKRLVVKENEDYYLMSTASL

SEQ ID NO: 4302 - protein, 32 aa, Artificial Sequence
  Cyclic GFR-binding peptide
  MOD_RES (32)..(32): Xaa is C or S
GEVVMEQYNKLVVKDYEDLYLMSIASLETPVX

SEQ ID NO: 4303 - protein, 32 aa, Artificial Sequence
  Cyclic GFR-binding peptide
  MOD_RES (27)..(27): Xaa is C or S
NYHYKLIVNSSDDKYLVSIPSLKTPAXTPKTV

SEQ ID NO: 4304 - protein, 34 aa, Artificial Sequence
  Cyclic GFR-binding peptide
  MOD_RES (30)..(31): Xaa is C or S
KVVMRYKKLVKPTRGVFYLISIANLDQPVXXPSA

SEQ ID NO: 4305 - protein, 29 aa, Artificial Sequence
  Cyclic GFR-binding peptide
LHDELTRYKKLFIPKKRVIEFYLVSIANL

SEQ ID NO: 4306 - protein, 34 aa, Artificial Sequence
  Cyclic GFR-binding peptide
  MOD_RES (31)..(32): Xaa is C or S
EVVMDRYKKLVVKENEDFYLMSIANLETPVXXAK

SEQ ID NO: 4307 - protein, 38 aa, Artificial Sequence
  Cyclic GFR-binding peptide
  MOD_RES (1)..(3)..(35)..(36): Xaa is C or S
XGXARVVMNRHKRLIVNSSDDYYLVSTASLQTPAXXPK

SEQ ID NO: 4308 - protein, 30 aa, Artificial Sequence
  Cyclic GFR-binding peptide
  MOD_RES (1)..(1): Xaa is C or S
XSKVVMRYKKLVKPTRGVFYLISIANLDQP

SEQ ID NO: 4309 - protein, 33 aa, Artificial Sequence
  Cyclic GFR-binding peptide
  MOD_RES (32)..(32): Xaa is C or S
LTQYNKLFIPKKRVIELYLVSIASLQVQTPRXQ

SEQ ID NO: 4310 - protein, 39 aa, Artificial Sequence
  Cyclic GFR-binding peptide
  MOD_RES (35)..(35): Xaa is C or S
HDELTQYNKLFIPKKRVIELYLVSIASLQVQTPRXQVNR

SEQ ID NO: 4311 - protein, 33 aa, Artificial Sequence
  Cyclic GFR-binding peptide
DELTRHKRLFIPKKRVIEYYLVSTASLQVQTPR

SEQ ID NO: 4312 - protein, 36 aa, Artificial Sequence
  Cyclic GFR-binding peptide
  MOD_RES (33)..(33): Xaa is C or S
ELTYHYKLFIPKKRVIEKYLVSIPSLQVQTPRXQVN

SEQ ID NO: 4313 - protein, 24 aa, Artificial Sequence
  Cyclic GFR-binding peptide
LTQYNKLFIPKKRVIELYLVSIAS

SEQ ID NO: 4314 - protein, 35 aa, Artificial Sequence
  Cyclic GFR-binding peptide
  MOD_RES (35)..(35): Xaa is C or S
HDELTRHKRLFIPKKRVIEYYLVSTASLQVQTPRX

SEQ ID NO: 4315 - protein, 28 aa, Artificial Sequence
  Cyclic GFR-binding peptide
  MOD_RES (1)..(1): Xaa is C or S
XAKVVMNRYKKLIVNNSSDFYLVSIANL

SEQ ID NO: 4316 - protein, 38 aa, Artificial Sequence
  Cyclic GFR-binding peptide
  MOD_RES (32)..(33): Xaa is C or S
SRVVMNYHYKLIVNSSDDKYLVSIPSLKTPAXXPKPVY

SEQ ID NO: 4317 - protein, 31 aa, Artificial Sequence
  Cyclic GFR-binding peptide
  MOD_RES (27)..(28): Xaa is C or S
NRHKRLIVNSSDDYYLVSTASLKTPAXXPKP

SEQ ID NO: 4318 - protein, 33 aa, Artificial Sequence
  Cyclic GFR-binding peptide
  MOD_RES (27)..(28): Xaa is C or S
DRYKKLVVKENEDFYLMSIANLETPVXXAKPIK

SEQ ID NO: 4319 - protein, 33 aa, Artificial Sequence
  Cyclic GFR-binding peptide
  MOD_RES (1)..(3): Xaa is C or S
XKXSKVIMQYNKLIKPTKGILYLISIASLDQSV

SEQ ID NO: 4320 - protein, 31 aa, Artificial Sequence
  Cyclic GFR-binding peptide
  MOD_RES (29)..(30): Xaa is C or S
VMNRHKRLIVNSSDDYYLVSTASLKTPAXXP

SEQ ID NO: 4321 - protein, 24 aa, Artificial Sequence
  Cyclic GFR-binding peptide
YHYKLVVKENEDKYLMSIPSLETP

SEQ ID NO: 4322 - protein, 29 aa, Artificial Sequence
  Cyclic GFR-binding peptide
  MOD_RES (1)..(1): Xaa is C or S
XSKVIMRHKRLIKPTKGIYYLISTASLDQ

SEQ ID NO: 4323 - protein, 30 aa, Artificial Sequence
  Cyclic GFR-binding peptide
  MOD_RES (26)..(27): Xaa is C or S
RYKKLVKPTRGVFYLISIANLDQPVXXPSA

SEQ ID NO: 4324 - protein, 39 aa, Artificial Sequence
  Cyclic GFR-binding peptide
  MOD_RES (1)..(3)..(34)..(35): Xaa is C or S
XKXSRVIMQYNKLVKPKRGVLYLISIASLAQPVXXPAAS

SEQ ID NO: 4325 - protein, 21 aa, Artificial Sequence
  Cyclic GFR-binding peptide
RYKKLIKPTKGIFYLISIANL

SEQ ID NO: 4326 - protein, 33 aa, Artificial Sequence
  Cyclic GFR-binding peptide
  MOD_RES (1)..(3): Xaa is C or S
XKXSKVIMYHYKLIKPTKGIKYLISIPSLDQSV

SEQ ID NO: 4327 - protein, 41 aa, Artificial Sequence
  Cyclic GFR-binding peptide
  MOD_RES (1)..(3)..(35)..(36): Xaa is C or S
XGXSRVVMNRHKRLIVNSSDDYYLVSTASLKTPAXXPKPVY

SEQ ID NO: 4328 - protein, 26 aa, Artificial Sequence
  Cyclic GFR-binding peptide
  MOD_RES (26)..(26): Xaa is C or S
YHYKLIVNSSDDKYLVSIPSLKTPAX

SEQ ID NO: 4329 - protein, 24 aa, Artificial Sequence
  Cyclic GFR-binding peptide
MNRHKRLIVNSSDDYYLVSTASLK

SEQ ID NO: 4330 - protein, 40 aa, Artificial Sequence
  Cyclic GFR-binding peptide
  MOD_RES (2)..(4)..(35)..(36): Xaa is C or S
SXKXSRVIMRYKKLVKPKRGVFYLISIANLAQPVXXPAAS

SEQ ID NO: 4331 - protein, 30 aa, Artificial Sequence
  Cyclic GFR-binding peptide
  MOD_RES (29)..(30): Xaa is C or S
VMEYHYKLVVKDYEDKYLMSIPSLETPVXX

SEQ ID NO: 4332 - protein, 29 aa, Artificial Sequence
  Cyclic GFR-binding peptide
  MOD_RES (1)..(3): Xaa is C or S
XKXSKVVMYHYKLVKPTRGVKYLISIPSL

SEQ ID NO: 4333 - protein, 33 aa, Artificial Sequence
  Cyclic GFR-binding peptide
  MOD_RES (2)..(4): Xaa is C or S
RXGXGEVVMERYKKLVVKDYEDFYLMSIANLET

SEQ ID NO: 4334 - protein, 31 aa, Artificial Sequence
  Cyclic GFR-binding peptide
  MOD_RES (1)..(3): Xaa is C or S
XGXSRVVMNRYKKLIVNSSDDFYLVSIANLK

SEQ ID NO: 4335 - protein, 23 aa, Artificial Sequence
  Cyclic GFR-binding peptide
NQYNKLIVNSSDDLYLVSIASLQ

SEQ ID NO: 4336 - protein, 25 aa, Artificial Sequence
  Cyclic GFR-binding peptide
VIMRYKKLVKPKRGVFYLISIANLA

SEQ ID NO: 4337 - protein, 32 aa, Artificial Sequence
  Cyclic GFR-binding peptide
  MOD_RES (30)..(31): Xaa is C or S
VVMNQYNKLIVNSSDDLYLVSIASLQTPAXXP

SEQ ID NO: 4338 - protein, 37 aa, Artificial Sequence
  Cyclic GFR-binding peptide
  MOD_RES (34)..(34): Xaa is C or S
DELTRYKKLFIPKKRVIEFYLVSIANLQVQTPRXQVN

SEQ ID NO: 4339 - protein, 20 aa, Artificial Sequence
  Cyclic GFR-binding peptide
RHKRLIVNSSDDYYLVSTAS

SEQ ID NO: 4340 - protein, 39 aa, Artificial Sequence
  Cyclic GFR-binding peptide
  MOD_RES (1)..(3)..(35)..(36): Xaa is C or S
XGXGEVVMDQYNKLVVKENEDLYLMSIASLETPVXXAKP

SEQ ID NO: 4341 - protein, 27 aa, Artificial Sequence
  Cyclic GFR-binding peptide
VVKDYEDQYNKLVVKDYEDLYLMSIAS

SEQ ID NO: 4342 - protein, 29 aa, Artificial Sequence
  Cyclic GFR-binding peptide
RVIMQYNKLVKPKRGVLYLISIASLAQPV

SEQ ID NO: 4343 - protein, 35 aa, Artificial Sequence
  Cyclic GFR-binding peptide
  MOD_RES (32)..(32): Xaa is C or S
SRVVMNYHYKLIVNSSDDKYLVSIPSLKTPAXTPK

SEQ ID NO: 4344 - protein, 36 aa, Artificial Sequence
  Cyclic GFR-binding peptide
  MOD_RES (2)..(4): Xaa is C or S
RXGXEAVSMGERHKRLTPVGMDDYYLVSTASLKTPV

SEQ ID NO: 4345 - protein, 30 aa, Artificial Sequence
  Cyclic GFR-binding peptide
  MOD_RES (1)..(3): Xaa is C or S
XGXARVVMNQYNKLIVNSSDDLYLVSIASL

SEQ ID NO: 4346 - protein, 33 aa, Artificial Sequence
  Cyclic GFR-binding peptide
  MOD_RES (31)..(32): Xaa is C or S
EVVMDQYNKLVVKENEDLYLMSIASLETPVXXA

SEQ ID NO: 4347 - protein, 28 aa, Artificial Sequence
  Cyclic GFR-binding peptide
SKVVMRYKKLVKPTRGVFYLISIANLDQ

SEQ ID NO: 4348 - protein, 31 aa, Artificial Sequence
  Cyclic GFR-binding peptide
  MOD_RES (30)..(31): Xaa is C or S
VVMNYHYKLIVNSSDDKYLVSIPSLQTPAXX

SEQ ID NO: 4349 - protein, 38 aa, Artificial Sequence
  Cyclic GFR-binding peptide
  MOD_RES (1)..(33)..(34): Xaa is C or S
XARVVMNRHKRLIVNSSDDYYLVSTASLQTPAXXPKPV

SEQ ID NO: 4350 - protein, 31 aa, Artificial Sequence
  Cyclic GFR-binding peptide
  MOD_RES (1)..(1): Xaa is C or S
XGEVVMEQYNKLVVKDYEDLYLMSIASLETP

SEQ ID NO: 4351 - protein, 30 aa, Artificial Sequence
  Cyclic GFR-binding peptide
SKVVMRHKRLVKPTRGVYYLISTASLDQPV

SEQ ID NO: 4352 - protein, 30 aa, Artificial Sequence
  Cyclic GFR-binding peptide
  MOD_RES (2)..(2): Xaa is C or S
GXARVVMNRYKKLIVNSSDDFYLVSIANLQ

SEQ ID NO: 4353 - protein, 33 aa, Artificial Sequence
  Cyclic GFR-binding peptide
  MOD_RES (2)..(4): Xaa is C or S
SXKXSRVIMRHKRLVKPKRGVYYLISTASLAQP

SEQ ID NO: 4354 - protein, 36 aa, Artificial Sequence
  Cyclic GFR-binding peptide
  MOD_RES (31)..(32): Xaa is C or S
SKVIMRHKRLIKPTKGIYYLISTASLDQSVXXPSAS

SEQ ID NO: 4355 - protein, 32 aa, Artificial Sequence
  Cyclic GFR-binding peptide
  MOD_RES (2)..(4): Xaa is C or S
HXGXARVVMNQYNKLIVNSSDDLYLVSIASLQ

SEQ ID NO: 4356 - protein, 22 aa, Artificial Sequence
  Cyclic GFR-binding peptide
GEQYNKLTPVGMDDLYLVSIAS

SEQ ID NO: 4357 - protein, 42 aa, Artificial Sequence
  Cyclic GFR-binding peptide
  MOD_RES (2)..(4)..(36)..(37): Xaa is C or S
RXGXGEVVMDYHYKLVVKENEDKYLMSIPSLETPVXXAKPIK

SEQ ID NO: 4358 - protein, 35 aa, Artificial Sequence
  Cyclic GFR-binding peptide
  MOD_RES (32)..(32): Xaa is C or S
LTQYNKLFIPKKRVIELYLVSIASLQVQTPRXQVN

SEQ ID NO: 4359 - protein, 32 aa, Artificial Sequence
  Cyclic GFR-binding peptide
  MOD_RES (2)..(4): Xaa is C or S
RXGXEAVSMGERYKKLTPVGMDDFYLVSIANL

SEQ ID NO: 4360 - protein, 29 aa, Artificial Sequence
  Cyclic GFR-binding peptide
RVVMNRYKKLIVNSSDDFYLVSIANLQTP

SEQ ID NO: 4361 - protein, 38 aa, Artificial Sequence
  Cyclic GFR-binding peptide
  MOD_RES (2)..(33)..(34): Xaa is C or S
KXSRVIMRHKRLVKPKRGVYYLISTASLAQPVXXPAAS

SEQ ID NO: 4362 - protein, 27 aa, Artificial Sequence
  Cyclic GFR-binding peptide
  MOD_RES (27)..(27): Xaa is C or S
NRHKRLIVNSSDDYYLVSTASLKTPAX

SEQ ID NO: 4363 - protein, 31 aa, Artificial Sequence
  Cyclic GFR-binding peptide
  MOD_RES (28)..(29): Xaa is C or S
IMRHKRLIKPTKGIYYLISTASLDQSVXXPS

SEQ ID NO: 4364 - protein, 31 aa, Artificial Sequence
  Cyclic GFR-binding peptide
  MOD_RES (29)..(30): Xaa is C or S
VIMRHKRLVKPKRGVYYLISTASLAQPVXXP

SEQ ID NO: 4365 - protein, 38 aa, Artificial Sequence
  Cyclic GFR-binding peptide
  MOD_RES (2)..(33)..(34): Xaa is C or S
KXSRVIMQYNKLVKPKRGVLYLISIASLAQPVXXPAAS

SEQ ID NO: 4366 - protein, 35 aa, Artificial Sequence
  Cyclic GFR-binding peptide
  MOD_RES (31)..(31): Xaa is C or S
RVVMNRHKRLIVNSSDDYYLVSTASLKTPAXTPKT

SEQ ID NO: 4367 - protein, 36 aa, Artificial Sequence
  Cyclic GFR-binding peptide
  MOD_RES (31)..(32): Xaa is C or S
SRVIMQYNKLVKPKRGVLYLISIASLAQPVXXPAAS

SEQ ID NO: 4368 - protein, 34 aa, Artificial Sequence
  Cyclic GFR-binding peptide
  MOD_RES (2)..(4): Xaa is C or S
HXGXARVVMNYHYKLIVNSSDDKYLVSIPSLQTP

SEQ ID NO: 4369 - protein, 38 aa, Artificial Sequence
  Cyclic GFR-binding peptide
  MOD_RES (34)..(34): Xaa is C or S
DELTYHYKLFIPKKRVIEKYLVSIPSLQVQTPRXQVNR

SEQ ID NO: 4370 - protein, 33 aa, Artificial Sequence
  Cyclic GFR-binding peptide
  MOD_RES (1)..(3): Xaa is C or S
XKXSRVIMYHYKLVKPKRGVKYLISIPSLAQPV

SEQ ID NO: 4371 - protein, 34 aa, Artificial Sequence
  Cyclic GFR-binding peptide
  MOD_RES (31)..(32): Xaa is C or S
RVVMNQYNKLIVNSSDDLYLVSIASLQTPAXXPK

SEQ ID NO: 4372 - protein, 30 aa, Artificial Sequence
  Cyclic GFR-binding peptide
LHDELTRYKKLFIPKKRVIEFYLVSIANLQ

SEQ ID NO: 4373 - protein, 35 aa, Artificial Sequence
  Cyclic GFR-binding peptide
  MOD_RES (35)..(35): Xaa is C or S
HDELTQYNKLFIPKKRVIELYLVSIASLQVQTPRX

SEQ ID NO: 4374 - protein, 29 aa, Artificial Sequence
  Cyclic GFR-binding peptide
KVIMRYKKLIKPTKGIFYLISIANLDQSV

SEQ ID NO: 4375 - protein, 39 aa, Artificial Sequence
  Cyclic GFR-binding peptide
  MOD_RES (2)..(4)..(35)..(36): Xaa is C or S
SXKXSKVIMYHYKLIKPTKGIKYLISIPSLDQSVXXPSA

SEQ ID NO: 4376 - protein, 32 aa, Artificial Sequence
  Cyclic GFR-binding peptide
  MOD_RES (28)..(29): Xaa is C or S
IMRYKKLVKPKRGVFYLISIANLAQPVXXPAA

SEQ ID NO: 4377 - protein, 29 aa, Artificial Sequence
  Cyclic GFR-binding peptide
  MOD_RES (26)..(27): Xaa is C or S
RHKRLVKPTRGVYYLISTASLDQPVXXPS

SEQ ID NO: 4378 - protein, 33 aa, Artificial Sequence
  Cyclic GFR-binding peptide
  MOD_RES (1)..(3): Xaa is C or S
XKXSRVIMRHKRLVKPKRGVYYLISTASLAQPV

SEQ ID NO: 4379 - protein, 29 aa, Artificial Sequence
  Cyclic GFR-binding peptide
  MOD_RES (29)..(29): Xaa is C or S
VMDQYNKLVVKENEDLYLMSIASLETPVX

SEQ ID NO: 4380 - protein, 33 aa, Artificial Sequence
  Cyclic GFR-binding peptide
  MOD_RES (2)..(4): Xaa is C or S
EXKXALHDELTRHKRLFIPKKRVIEYYLVSTAS

SEQ ID NO: 4381 - protein, 37 aa, Artificial Sequence
  Cyclic GFR-binding peptide
  MOD_RES (1)..(3)..(35)..(36): Xaa is C or S
XGXAKVVMNRYKKLIVNNSSDFYLVSIANLKTPAXXA

SEQ ID NO: 4382 - protein, 31 aa, Artificial Sequence
  Cyclic GFR-binding peptide
  MOD_RES (1)..(1): Xaa is C or S
XARVVMNRHKRLIVNSSDDYYLVSTASLQTP

SEQ ID NO: 4383 - protein, 22 aa, Artificial Sequence
  Cyclic GFR-binding peptide
VMRHKRLVKPTRGVYYLISTAS

SEQ ID NO: 4384 - protein, 37 aa, Artificial Sequence
  Cyclic GFR-binding peptide
  MOD_RES (31)..(32): Xaa is C or S
EVVMDQYNKLVVKENEDLYLMSIASLETPVXXAKPIK

SEQ ID NO: 4385 - protein, 32 aa, Artificial Sequence
  Cyclic GFR-binding peptide
  MOD_RES (1)..(1): Xaa is C or S
XARVVMNRHKRLIVNSSDDYYLVSTASLQTPA

SEQ ID NO: 4386 - protein, 33 aa, Artificial Sequence
  Cyclic GFR-binding peptide
  MOD_RES (28)..(29): Xaa is C or S
VMQYNKLVKPTRGVLYLISIASLDQPVXXPSAS

SEQ ID NO: 4387 - protein, 25 aa, Artificial Sequence
  Cyclic GFR-binding peptide
MYHYKLVKPTRGVKYLISIPSLDQP

SEQ ID NO: 4388 - protein, 27 aa, Artificial Sequence
  Cyclic GFR-binding peptide
EVVMEYHYKLVVKDYEDKYLMSIPSLE

SEQ ID NO: 4389 - protein, 31 aa, Artificial Sequence
  Cyclic GFR-binding peptide
  MOD_RES (29)..(30): Xaa is C or S
VMDRHKRLVVKENEDYYLMSTASLETPVXXA

SEQ ID NO: 4390 - protein, 29 aa, Artificial Sequence
  Cyclic GFR-binding peptide
VVMEYHYKLVVKDYEDKYLMSIPSLETPV

SEQ ID NO: 4391 - protein, 30 aa, Artificial Sequence
  Cyclic GFR-binding peptide
  MOD_RES (30)..(30): Xaa is C or S
KVVMRHKRLVKPTRGVYYLISTASLDQPVX

SEQ ID NO: 4392 - protein, 29 aa, Artificial Sequence
  Cyclic GFR-binding peptide
  MOD_RES (26)..(27): Xaa is C or S
QYNKLVKPKRGVLYLISIASLAQPVXXPA

SEQ ID NO: 4393 - protein, 27 aa, Artificial Sequence
  Cyclic GFR-binding peptide
HDELTRHKRLFIPKKRVIEYYLVSTAS

SEQ ID NO: 4394 - protein, 33 aa, Artificial Sequence
  Cyclic GFR-binding peptide
  MOD_RES (1)..(3): Xaa is C or S
XGXARVVMNQYNKLIVNSSDDLYLVSIASLQTP

SEQ ID NO: 4395 - protein, 33 aa, Artificial Sequence
  Cyclic GFR-binding peptide
  MOD_RES (1)..(3): Xaa is C or S
XGXGEVVMERYKKLVVKDYEDFYLMSIANLETP

SEQ ID NO: 4396 - protein, 31 aa, Artificial Sequence
  Cyclic GFR-binding peptide
  MOD_RES (31)..(31): Xaa is C or S
SKVVMRHKRLVKPTRGVYYLISTASLDQPVX

SEQ ID NO: 4397 - protein, 31 aa, Artificial Sequence
  Cyclic GFR-binding peptide
  MOD_RES (1)..(1): Xaa is C or S
XSRVVMNQYNKLIVNSSDDLYLVSIASLKTP

SEQ ID NO: 4398 - protein, 37 aa, Artificial Sequence
  Cyclic GFR-binding peptide
  MOD_RES (1)..(33)..(34): Xaa is C or S
XAKVVMNYHYKLIVNNSSDKYLVSIPSLKTPAXXAKP

SEQ ID NO: 4399 - protein, 31 aa, Artificial Sequence
  Cyclic GFR-binding peptide
  MOD_RES (29)..(30): Xaa is C or S
VIMQYNKLVKPKRGVLYLISIASLAQPVXXP

SEQ ID NO: 4400 - protein, 37 aa, Artificial Sequence
  Cyclic GFR-binding peptide
  MOD_RES (32)..(33): Xaa is C or S
GEVVMDRYKKLVVKENEDFYLMSIANLETPVXXAKPI

SEQ ID NO: 4401 - protein, 39 aa, Artificial Sequence
  Cyclic GFR-binding peptide
  MOD_RES (2)..(35)..(36): Xaa is C or S
GXEAVSMGERYKKLTPVGMDDFYLVSIANLKTPVXXAKG

SEQ ID NO: 4402 - protein, 33 aa, Artificial Sequence
  Cyclic GFR-binding peptide
  MOD_RES (1)..(32)..(33): Xaa is C or S
XSKVIMRYKKLIKPTKGIFYLISIANLDQSVXX

SEQ ID NO: 4403 - protein, 28 aa, Artificial Sequence
  Cyclic GFR-binding peptide
VVMNRYKKLIVNSSDDFYLVSIANLQTP

SEQ ID NO: 4404 - protein, 37 aa, Artificial Sequence
  Cyclic GFR-binding peptide
  MOD_RES (31)..(32): Xaa is C or S
EVVMDYHYKLVVKENEDKYLMSIPSLETPVXXAKPIK

SEQ ID NO: 4405 - protein, 36 aa, Artificial Sequence
  Cyclic GFR-binding peptide
  MOD_RES (2)..(34)..(35): Xaa is C or S
GXARVVMNRYKKLIVNSSDDFYLVSIANLQTPAXXP

SEQ ID NO: 4406 - protein, 28 aa, Artificial Sequence
  Cyclic GFR-binding peptide
ARVVMNQYNKLIVNSSDDLYLVSIASLQ

SEQ ID NO: 4407 - protein, 32 aa, Artificial Sequence
  Cyclic GFR-binding peptide
  MOD_RES (26)..(26): Xaa is C or S
QYNKLIVNSSDDLYLVSIASLKTPAXTPKTVH

SEQ ID NO: 4408 - protein, 33 aa, Artificial Sequence
  Cyclic GFR-binding peptide
  MOD_RES (2)..(33): Xaa is C or S
KXSRVIMQYNKLVKPKRGVLYLISIASLAQPVX

SEQ ID NO: 4409 - protein, 37 aa, Artificial Sequence
  Cyclic GFR-binding peptide
  MOD_RES (32)..(33): Xaa is C or S
GEVVMEQYNKLVVKDYEDLYLMSIASLETPVXXAKPI

SEQ ID NO: 4410 - protein, 34 aa, Artificial Sequence
  Cyclic GFR-binding peptide
  MOD_RES (29)..(30): Xaa is C or S
VIMRHKRLIKPTKGIYYLISTASLDQSVXXPSAS

SEQ ID NO: 4411 - protein, 35 aa, Artificial Sequence
  Cyclic GFR-binding peptide
  MOD_RES (1)..(3)..(34)..(35): Xaa is C or S
XKXSKVVMYHYKLVKPTRGVKYLISIPSLDQPVXX

SEQ ID NO: 4412 - protein, 28 aa, Artificial Sequence
  Cyclic GFR-binding peptide
SRVVMNRYKKLIVNSSDDFYLVSIANLK

SEQ ID NO: 4413 - protein, 41 aa, Artificial Sequence
  Cyclic GFR-binding peptide
  MOD_RES (2)..(4)..(36)..(37): Xaa is C or S
HXGXAKVVMNQYNKLIVNNSSDLYLVSIASLKTPAXXAKPV

SEQ ID NO: 4414 - protein, 39 aa, Artificial Sequence
  Cyclic GFR-binding peptide
  MOD_RES (1)..(33)..(34): Xaa is C or S
XARVVMNQYNKLIVNSSDDLYLVSIASLQTPAXXPKPVT

SEQ ID NO: 4415 - protein, 36 aa, Artificial Sequence
  Cyclic GFR-binding peptide
  MOD_RES (31)..(32): Xaa is C or S
SKVVMQYNKLVKPTRGVLYLISIASLDQPVXXPSAS

SEQ ID NO: 4416 - protein, 33 aa, Artificial Sequence
  Cyclic GFR-binding peptide
  MOD_RES (28)..(29): Xaa is C or S
IMQYNKLIKPTKGILYLISIASLDQSVXXPSAS

SEQ ID NO: 4417 - protein, 28 aa, Artificial Sequence
  Cyclic GFR-binding peptide
  MOD_RES (2)..(2): Xaa is C or S
KXSKVIMRYKKLIKPTKGIFYLISIANL

SEQ ID NO: 4418 - protein, 23 aa, Artificial Sequence
  Cyclic GFR-binding peptide
ERHKRLTPVGMDDYYLVSTASLK

SEQ ID NO: 4419 - protein, 26 aa, Artificial Sequence
  Cyclic GFR-binding peptide
  MOD_RES (26)..(26): Xaa is C or S
RHKRLVKPKRGVYYLISTASLAQPVX

SEQ ID NO: 4420 - protein, 37 aa, Artificial Sequence
  Cyclic GFR-binding peptide
  MOD_RES (31)..(32): Xaa is C or S
SRVIMQYNKLVKPKRGVLYLISIASLAQPVXXPAASA

SEQ ID NO: 4421 - protein, 24 aa, Artificial Sequence
  Cyclic GFR-binding peptide
SMGERYKKLTPVGMDDFYLVSIAN

SEQ ID NO: 4422 - protein, 28 aa, Artificial Sequence
  Cyclic GFR-binding peptide
  MOD_RES (28)..(28): Xaa is C or S
MNRHKRLIVNSSDDYYLVSTASLKTPAX

SEQ ID NO: 4423 - protein, 36 aa, Artificial Sequence
  Cyclic GFR-binding peptide
  MOD_RES (1)..(32)..(33): Xaa is C or S
XSRVIMRHKRLVKPKRGVYYLISTASLAQPVXXPAA

SEQ ID NO: 4424 - protein, 43 aa, Artificial Sequence
  Cyclic GFR-binding peptide
  MOD_RES (2)..(4)..(41): Xaa is C or S
EXKXALHDELTRHKRLFIPKKRVIEYYLVSTASLQVQTPRXQV

SEQ ID NO: 4425 - protein, 38 aa, Artificial Sequence
  Cyclic GFR-binding peptide
  MOD_RES (2)..(4)..(36)..(37): Xaa is C or S
RXGXGEVVMEYHYKLVVKDYEDKYLMSIPSLETPVXXA

SEQ ID NO: 4426 - protein, 39 aa, Artificial Sequence
  Cyclic GFR-binding peptide
  MOD_RES (2)..(4)..(35)..(36): Xaa is C or S
SXKXSKVVMQYNKLVKPTRGVLYLISIASLDQPVXXPSA

SEQ ID NO: 4427 - protein, 29 aa, Artificial Sequence
  Cyclic GFR-binding peptide
  MOD_RES (1)..(3): Xaa is C or S
XKXSRVIMRYKKLVKPKRGVFYLISIANL

SEQ ID NO: 4428 - protein, 33 aa, Artificial Sequence
  Cyclic GFR-binding peptide
  MOD_RES (33)..(33): Xaa is C or S
ELTYHYKLFIPKKRVIEKYLVSIPSLQVQTPRX

SEQ ID NO: 4429 - protein, 25 aa, Artificial Sequence
  Cyclic GFR-binding peptide
NRYKKLIVNSSDDFYLVSIANLKTP

SEQ ID NO: 4430 - protein, 28 aa, Artificial Sequence
  Cyclic GFR-binding peptide
  MOD_RES (1)..(3): Xaa is C or S
XKXSKVVMRYKKLVKPTRGVFYLISIAN

SEQ ID NO: 4431 - protein, 33 aa, Artificial Sequence
  Cyclic GFR-binding peptide
  MOD_RES (1)..(3): Xaa is C or S
XGXSRVVMNQYNKLIVNSSDDLYLVSIASLKTP

SEQ ID NO: 4432 - protein, 27 aa, Artificial Sequence
  Cyclic GFR-binding peptide
  MOD_RES (1)..(1): Xaa is C or S
XSKVIMQYNKLIKPTKGILYLISIASL

SEQ ID NO: 4433 - protein, 22 aa, Artificial Sequence
  Cyclic GFR-binding peptide
RYKKLVVKENEDFYLMSIANLE

SEQ ID NO: 4434 - protein, 32 aa, Artificial Sequence
  Cyclic GFR-binding peptide
  MOD_RES (32)..(32): Xaa is C or S
GEVVMDRYKKLVVKENEDFYLMSIANLETPVX

SEQ ID NO: 4435 - protein, 37 aa, Artificial Sequence
  Cyclic GFR-binding peptide
  MOD_RES (1)..(3)..(35)..(36): Xaa is C or S
XGXSRVVMNQYNKLIVNSSDDLYLVSIASLKTPAXXP

SEQ ID NO: 4436 - protein, 38 aa, Artificial Sequence
  Cyclic GFR-binding peptide
  MOD_RES (1)..(33)..(34): Xaa is C or S
XGEVVMDQYNKLVVKENEDLYLMSIASLETPVXXAKPI

SEQ ID NO: 4437 - protein, 27 aa, Artificial Sequence
  Cyclic GFR-binding peptide
  MOD_RES (26)..(27): Xaa is C or S
RHKRLVVKENEDYYLMSTASLETPVXX

SEQ ID NO: 4438 - protein, 38 aa, Artificial Sequence
  Cyclic GFR-binding peptide
  MOD_RES (2)..(34)..(35): Xaa is C or S
GXAKVVMNQYNKLIVNNSSDLYLVSIASLKTPAXXAKP

SEQ ID NO: 4439 - protein, 26 aa, Artificial Sequence
  Cyclic GFR-binding peptide
SKVVMQYNKLVKPTRGVLYLISIASL

SEQ ID NO: 4440 - protein, 33 aa, Artificial Sequence
  Cyclic GFR-binding peptide
  MOD_RES (31)..(31): Xaa is C or S
TRYKKLFIPKKRVIEFYLVSIANLQVQTPRXQV

SEQ ID NO: 4441 - protein, 31 aa, Artificial Sequence
  Cyclic GFR-binding peptide
  MOD_RES (2)..(4): Xaa is C or S
HXGXAKVVMNRYKKLIVNNSSDFYLVSIANL

SEQ ID NO: 4442 - protein, 29 aa, Artificial Sequence
  Cyclic GFR-binding peptide
  MOD_RES (1)..(1): Xaa is C or S
XSRVIMRHKRLVKPKRGVYYLISTASLAQ

SEQ ID NO: 4443 - protein, 24 aa, Artificial Sequence
  Cyclic GFR-binding peptide
NRHKRLIVNSSDDYYLVSTASLKT

SEQ ID NO: 4444 - protein, 30 aa, Artificial Sequence
  Cyclic GFR-binding peptide
SRVVMNRYKKLIVNSSDDFYLVSIANLKTP

SEQ ID NO: 4445 - protein, 24 aa, Artificial Sequence
  Cyclic GFR-binding peptide
VMRYKKLVKPTRGVFYLISIANLD

SEQ ID NO: 4446 - protein, 26 aa, Artificial Sequence
  Cyclic GFR-binding peptide
  MOD_RES (26)..(26): Xaa is C or S
QYNKLVKPKRGVLYLISIASLAQPVX

SEQ ID NO: 4447 - protein, 32 aa, Artificial Sequence
  Cyclic GFR-binding peptide
  MOD_RES (32)..(32): Xaa is C or S
GEVVMERYKKLVVKDYEDFYLMSIANLETPVX

SEQ ID NO: 4448 - protein, 28 aa, Artificial Sequence
  Cyclic GFR-binding peptide
  MOD_RES (27)..(28): Xaa is C or S
NRYKKLIVNSSDDFYLVSIANLKTPAXX

SEQ ID NO: 4449 - protein, 36 aa, Artificial Sequence
  Cyclic GFR-binding peptide
  MOD_RES (1)..(3)..(34)..(35): Xaa is C or S
XKXSKVIMQYNKLIKPTKGILYLISIASLDQSVXXP

SEQ ID NO: 4450 - protein, 29 aa, Artificial Sequence
  Cyclic GFR-binding peptide
EVVMEQYNKLVVKDYEDLYLMSIASLETP

SEQ ID NO: 4451 - protein, 36 aa, Artificial Sequence
  Cyclic GFR-binding peptide
  MOD_RES (1)..(3)..(34)..(35): Xaa is C or S
XKXSRVIMQYNKLVKPKRGVLYLISIASLAQPVXXP

SEQ ID NO: 4452 - protein, 36 aa, Artificial Sequence
  Cyclic GFR-binding peptide
  MOD_RES (1)..(3)..(36): Xaa is C or S
XGXEAVSMGERYKKLTPVGMDDFYLVSIANLKTPVX

SEQ ID NO: 4453 - protein, 40 aa, Artificial Sequence
  Cyclic GFR-binding peptide
  MOD_RES (2)..(34)..(35): Xaa is C or S
GXGEVVMERYKKLVVKDYEDFYLMSIANLETPVXXAKPIS

SEQ ID NO: 4454 - protein, 25 aa, Artificial Sequence
  Cyclic GFR-binding peptide
VMEYHYKLVVKDYEDKYLMSIPSLE

SEQ ID NO: 4455 - protein, 39 aa, Artificial Sequence
  Cyclic GFR-binding peptide
  MOD_RES (2)..(4)..(36)..(37): Xaa is C or S
HXGXSRVVMNRYKKLIVNSSDDFYLVSIANLKTPAXXPK

SEQ ID NO: 4456 - protein, 26 aa, Artificial Sequence
  Cyclic GFR-binding peptide
RVVMNRHKRLIVNSSDDYYLVSTASL

SEQ ID NO: 4457 - protein, 36 aa, Artificial Sequence
  Cyclic GFR-binding peptide
  MOD_RES (30)..(31): Xaa is C or S
KVVMRYKKLVKPTRGVFYLISIANLDQPVXXPSASA

SEQ ID NO: 4458 - protein, 28 aa, Artificial Sequence
  Cyclic GFR-binding peptide
LHDELTYHYKLFIPKKRVIEKYLVSIPS

SEQ ID NO: 4459 - protein, 30 aa, Artificial Sequence
  Cyclic GFR-binding peptide
  MOD_RES (29)..(30): Xaa is C or S
VIMQYNKLIKPTKGILYLISIASLDQSVXX

SEQ ID NO: 4460 - protein, 27 aa, Artificial Sequence
  Cyclic GFR-binding peptide
VMNQYNKLIVNSSDDLYLVSIASLQTP

SEQ ID NO: 4461 - protein, 28 aa, Artificial Sequence
  Cyclic GFR-binding peptide
GEVVMERHKRLVVKDYEDYYLMSTASLE

SEQ ID NO: 4462 - protein, 30 aa, Artificial Sequence
  Cyclic GFR-binding peptide
ARVVMNQYNKLIVNSSDDLYLVSIASLQTP

SEQ ID NO: 4463 - protein, 34 aa, Artificial Sequence
  Cyclic GFR-binding peptide
  MOD_RES (31)..(32): Xaa is C or S
RVVMNYHYKLIVNSSDDKYLVSIPSLQTPAXXPK

SEQ ID NO: 4464 - protein, 31 aa, Artificial Sequence
  Cyclic GFR-binding peptide
  MOD_RES (30)..(31): Xaa is C or S
VVMDRYKKLVVKENEDFYLMSIANLETPVXX

SEQ ID NO: 4465 - protein, 26 aa, Artificial Sequence
  Cyclic GFR-binding peptide
RVIMQYNKLVKPKRGVLYLISIASLA

SEQ ID NO: 4466 - protein, 35 aa, Artificial Sequence
  Cyclic GFR-binding peptide
  MOD_RES (2)..(33)..(34): Xaa is C or S
KXSKVIMRHKRLIKPTKGIYYLISTASLDQSVXXP

SEQ ID NO: 4467 - protein, 36 aa, Artificial Sequence
  Cyclic GFR-binding peptide
  MOD_RES (32)..(32): Xaa is C or S
LTRHKRLFIPKKRVIEYYLVSTASLQVQTPRXQVNR

SEQ ID NO: 4468 - protein, 27 aa, Artificial Sequence
  Cyclic GFR-binding peptide
KVVMYHYKLVKPTRGVKYLISIPSLDQ

SEQ ID NO: 4469 - protein, 31 aa, Artificial Sequence
  Cyclic GFR-binding peptide
  MOD_RES (29)..(30): Xaa is C or S
VVMYHYKLVKPTRGVKYLISIPSLDQPVXXP

SEQ ID NO: 4470 - protein, 30 aa, Artificial Sequence
  Cyclic GFR-binding peptide
  MOD_RES (27)..(28): Xaa is C or S
MQYNKLVKPKRGVLYLISIASLAQPVXXPA

SEQ ID NO: 4471 - protein, 20 aa, Artificial Sequence
  Cyclic GFR-binding peptide
QYNKLIKPTKGILYLISIAS

SEQ ID NO: 4472 - protein, 31 aa, Artificial Sequence
  Cyclic GFR-binding peptide
  MOD_RES (29)..(30): Xaa is C or S
VVMRHKRLVKPTRGVYYLISTASLDQPVXXP

SEQ ID NO: 4473 - protein, 25 aa, Artificial Sequence
  Cyclic GFR-binding peptide
VVMNYHYKLIVNSSDDKYLVSIPSL

SEQ ID NO: 4474 - protein, 30 aa, Artificial Sequence
  Cyclic GFR-binding peptide
RVVMNRHKRLIVNSSDDYYLVSTASLQTPA

SEQ ID NO: 4475 - protein, 29 aa, Artificial Sequence
  Cyclic GFR-binding peptide
  MOD_RES (2)..(2): Xaa is C or S
GXARVVMNRYKKLIVNSSDDFYLVSIANL

SEQ ID NO: 4476 - protein, 41 aa, Artificial Sequence
  Cyclic GFR-binding peptide
  MOD_RES (1)..(3)..(35)..(36): Xaa is C or S
XGXGEVVMERYKKLVVKDYEDFYLMSIANLETPVXXAKPIS

SEQ ID NO: 4477 - protein, 25 aa, Artificial Sequence
  Cyclic GFR-binding peptide
YHYKLVKPKRGVKYLISIPSLAQPV

SEQ ID NO: 4478 - protein, 36 aa, Artificial Sequence
  Cyclic GFR-binding peptide
  MOD_RES (31)..(32): Xaa is C or S
SKVVMYHYKLVKPTRGVKYLISIPSLDQPVXXPSAS

SEQ ID NO: 4479 - protein, 20 aa, Artificial Sequence
  Cyclic GFR-binding peptide
RHKRLIKPTKGIYYLISTAS

SEQ ID NO: 4480 - protein, 40 aa, Artificial Sequence
  Cyclic GFR-binding peptide
  MOD_RES (2)..(4)..(36)..(37): Xaa is C or S
HXGXAKVVMNRYKKLIVNNSSDFYLVSIANLKTPAXXAKP

SEQ ID NO: 4481 - protein, 37 aa, Artificial Sequence
  Cyclic GFR-binding peptide
  MOD_RES (1)..(32)..(33): Xaa is C or S
XSRVIMQYNKLVKPKRGVLYLISIASLAQPVXXPAAS

SEQ ID NO: 4482 - protein, 37 aa, Artificial Sequence
  Cyclic GFR-binding peptide
  MOD_RES (2)..(4)..(35)..(36): Xaa is C or S
SXKXSKVIMQYNKLIKPTKGILYLISIASLDQSVXXP

SEQ ID NO: 4483 - protein, 31 aa, Artificial Sequence
  Cyclic GFR-binding peptide
  MOD_RES (31)..(31): Xaa is C or S
SKVIMQYNKLIKPTKGILYLISIASLDQSVX

SEQ ID NO: 4484 - protein, 28 aa, Artificial Sequence
  Cyclic GFR-binding peptide
SRVIMRHKRLVKPKRGVYYLISTASLAQ

SEQ ID NO: 4485 - protein, 30 aa, Artificial Sequence
  Cyclic GFR-binding peptide
  MOD_RES (1)..(1): Xaa is C or S
XGEVVMEQYNKLVVKDYEDLYLMSIASLET

SEQ ID NO: 4486 - protein, 29 aa, Artificial Sequence
  Cyclic GFR-binding peptide
  MOD_RES (28)..(29): Xaa is C or S
IMQYNKLIKPTKGILYLISIASLDQSVXX

SEQ ID NO: 4487 - protein, 39 aa, Artificial Sequence
  Cyclic GFR-binding peptide
  MOD_RES (2)..(4)..(36)..(37): Xaa is C or S
RXGXGEVVMERYKKLVVKDYEDFYLMSIANLETPVXXAK

SEQ ID NO: 4488 - protein, 29 aa, Artificial Sequence
  Cyclic GFR-binding peptide
  MOD_RES (27)..(28): Xaa is C or S
MRHKRLIKPTKGIYYLISTASLDQSVXXP

SEQ ID NO: 4489 - protein, 25 aa, Artificial Sequence
  Cyclic GFR-binding peptide
RYKKLIVNSSDDFYLVSIANLKTPA

SEQ ID NO: 4490 - protein, 35 aa, Artificial Sequence
  Cyclic GFR-binding peptide
  MOD_RES (30)..(31): Xaa is C or S
VVMNRYKKLIVNSSDDFYLVSIANLQTPAXXPKPV

SEQ ID NO: 4491 - protein, 34 aa, Artificial Sequence
  Cyclic GFR-binding peptide
  MOD_RES (2)..(34): Xaa is C or S
GXSRVVMNQYNKLIVNSSDDLYLVSIASLKTPAX

SEQ ID NO: 4492 - protein, 32 aa, Artificial Sequence
  Cyclic GFR-binding peptide
  MOD_RES (26)..(27): Xaa is C or S
QYNKLVVKENEDLYLMSIASLETPVXXAKPIK

SEQ ID NO: 4493 - protein, 34 aa, Artificial Sequence
  Cyclic GFR-binding peptide
  MOD_RES (32)..(33): Xaa is C or S
GEVVMEYHYKLVVKDYEDKYLMSIPSLETPVXXA

SEQ ID NO: 4494 - protein, 29 aa, Artificial Sequence
  Cyclic GFR-binding peptide
  MOD_RES (1)..(1): Xaa is C or S
XAKVVMNQYNKLIVNNSSDLYLVSIASLK

SEQ ID NO: 4495 - protein, 37 aa, Artificial Sequence
  Cyclic GFR-binding peptide
  MOD_RES (31)..(32): Xaa is C or S
SKVIMRHKRLIKPTKGIYYLISTASLDQSVXXPSASA

SEQ ID NO: 4496 - protein, 24 aa, Artificial Sequence
  Cyclic GFR-binding peptide
RYKKLVVKDYEDFYLMSIANLETP

SEQ ID NO: 4497 - protein, 32 aa, Artificial Sequence
  Cyclic GFR-binding peptide
EAVSMGERYKKLTPVGMDDFYLVSIANLKTPV

SEQ ID NO: 4498 - protein, 31 aa, Artificial Sequence
  Cyclic GFR-binding peptide
  MOD_RES (31)..(31): Xaa is C or S
SKVIMYHYKLIKPTKGIKYLISIPSLDQSVX

SEQ ID NO: 4499 - protein, 37 aa, Artificial Sequence
  Cyclic GFR-binding peptide
  MOD_RES (1)..(3)..(34)..(35): Xaa is C or S
XKXSKVIMRYKKLIKPTKGIFYLISIANLDQSVXXPS

SEQ ID NO: 4500 - protein, 27 aa, Artificial Sequence
  Cyclic GFR-binding peptide
  MOD_RES (26)..(27): Xaa is C or S
YHYKLIVNSSDDKYLVSIPSLKTPAXX

SEQ ID NO: 4501 - protein, 27 aa, Artificial Sequence
  Cyclic GFR-binding peptide
  MOD_RES (1)..(1): Xaa is C or S
XSRVVMNQYNKLIVNSSDDLYLVSIAS

SEQ ID NO: 4502 - protein, 25 aa, Artificial Sequence
  Cyclic GFR-binding peptide
MGERYKKLTPVGMDDFYLVSIANLK

SEQ ID NO: 4503 - protein, 33 aa, Artificial Sequence
  Cyclic GFR-binding peptide
  MOD_RES (28)..(29): Xaa is C or S
MERYKKLVVKDYEDFYLMSIANLETPVXXAKPI

SEQ ID NO: 4504 - protein, 30 aa, Artificial Sequence
  Cyclic GFR-binding peptide
  MOD_RES (1)..(3): Xaa is C or S
XGXSRVVMNRHKRLIVNSSDDYYLVSTASL

SEQ ID NO: 4505 - protein, 27 aa, Artificial Sequence
  Cyclic GFR-binding peptide
  MOD_RES (1)..(1): Xaa is C or S
XSRVIMQYNKLVKPKRGVLYLISIASL

SEQ ID NO: 4506 - protein, 34 aa, Artificial Sequence
  Cyclic GFR-binding peptide
  MOD_RES (1)..(33)..(34): Xaa is C or S
XGEVVMDRHKRLVVKENEDYYLMSTASLETPVXX

SEQ ID NO: 4507 - protein, 33 aa, Artificial Sequence
  Cyclic GFR-binding peptide
  MOD_RES (27)..(28): Xaa is C or S
MQYNKLVKPKRGVLYLISIASLAQPVXXPAASA

SEQ ID NO: 4508 - protein, 30 aa, Artificial Sequence
  Cyclic GFR-binding peptide
  MOD_RES (30)..(30): Xaa is C or S
VVMNQYNKLIVNSSDDLYLVSIASLKTPAX

SEQ ID NO: 4509 - protein, 21 aa, Artificial Sequence
  Cyclic GFR-binding peptide
QYNKLTPVGMDDLYLVSIASL

SEQ ID NO: 4510 - protein, 24 aa, Artificial Sequence
  Cyclic GFR-binding peptide
KVIMQYNKLIKPTKGILYLISIAS

SEQ ID NO: 4511 - protein, 30 aa, Artificial Sequence
  Cyclic GFR-binding peptide
  MOD_RES (29)..(30): Xaa is C or S
MGERYKKLTPVGMDDFYLVSIANLKTPVXX

SEQ ID NO: 4512 - protein, 29 aa, Artificial Sequence
  Cyclic GFR-binding peptide
  MOD_RES (28)..(29): Xaa is C or S
VMQYNKLVKPTRGVLYLISIASLDQPVXX

SEQ ID NO: 4513 - protein, 34 aa, Artificial Sequence
  Cyclic GFR-binding peptide
  MOD_RES (32)..(33): Xaa is C or S
GEVVMDYHYKLVVKENEDKYLMSIPSLETPVXXA

SEQ ID NO: 4514 - protein, 34 aa, Artificial Sequence
  Cyclic GFR-binding peptide
  MOD_RES (1)..(3): Xaa is C or S
XGXGEVVMEYHYKLVVKDYEDKYLMSIPSLETPV

SEQ ID NO: 4515 - protein, 38 aa, Artificial Sequence
  Cyclic GFR-binding peptide
  MOD_RES (32)..(32): Xaa is C or S
SRVVMNYHYKLIVNSSDDKYLVSIPSLKTPAXTPKTVH

SEQ ID NO: 4516 - protein, 28 aa, Artificial Sequence
  Cyclic GFR-binding peptide
  MOD_RES (27)..(28): Xaa is C or S
MYHYKLIKPTKGIKYLISIPSLDQSVXX

SEQ ID NO: 4517 - protein, 30 aa, Artificial Sequence
  Cyclic GFR-binding peptide
  MOD_RES (28)..(29): Xaa is C or S
IMRHKRLIKPTKGIYYLISTASLDQSVXXP

SEQ ID NO: 4518 - protein, 32 aa, Artificial Sequence
  Cyclic GFR-binding peptide
  MOD_RES (28)..(29): Xaa is C or S
MNYHYKLIVNNSSDKYLVSIPSLKTPAXXAKP

SEQ ID NO: 4519 - protein, 33 aa, Artificial Sequence
  Cyclic GFR-binding peptide
  MOD_RES (2)..(4): Xaa is C or S
SXKXSKVVMRYKKLVKPTRGVFYLISIANLDQP

SEQ ID NO: 4520 - protein, 36 aa, Artificial Sequence
  Cyclic GFR-binding peptide
  MOD_RES (1)..(1): Xaa is C or S
XALHDELTRHKRLFIPKKRVIEYYLVSTASLQVQTP

SEQ ID NO: 4521 - protein, 24 aa, Artificial Sequence
  Cyclic GFR-binding peptide
KVVMYHYKLVKPTRGVKYLISIPS

SEQ ID NO: 4522 - protein, 32 aa, Artificial Sequence
  Cyclic GFR-binding peptide
  MOD_RES (1)..(3): Xaa is C or S
XGXSRVVMNQYNKLIVNSSDDLYLVSIASLKT

SEQ ID NO: 4523 - protein, 33 aa, Artificial Sequence
  Cyclic GFR-binding peptide
  MOD_RES (1)..(33): Xaa is C or S
XGEVVMERHKRLVVKDYEDYYLMSTASLETPVX

SEQ ID NO: 4524 - protein, 29 aa, Artificial Sequence
  Cyclic GFR-binding peptide
SKVVMRYKKLVKPTRGVFYLISIANLDQP

SEQ ID NO: 4525 - protein, 29 aa, Artificial Sequence
  Cyclic GFR-binding peptide
KVVMRHKRLVKPTRGVYYLISTASLDQPV

SEQ ID NO: 4526 - protein, 34 aa, Artificial Sequence
  Cyclic GFR-binding peptide
  MOD_RES (1)..(3)..(34): Xaa is C or S
XKXSKVVMQYNKLVKPTRGVLYLISIASLDQPVX

SEQ ID NO: 4527 - protein, 28 aa, Artificial Sequence
  Cyclic GFR-binding peptide
KVVMRHKRLVKPTRGVYYLISTASLDQP

SEQ ID NO: 4528 - protein, 39 aa, Artificial Sequence
  Cyclic GFR-binding peptide
  MOD_RES (2)..(33)..(34): Xaa is C or S
KXSKVVMRYKKLVKPTRGVFYLISIANLDQPVXXPSASA

SEQ ID NO: 4529 - protein, 41 aa, Artificial Sequence
  Cyclic GFR-binding peptide
  MOD_RES (2)..(4)..(35)..(36): Xaa is C or S
SXKXSRVIMYHYKLVKPKRGVKYLISIPSLAQPVXXPAASA

SEQ ID NO: 4530 - protein, 39 aa, Artificial Sequence
  Cyclic GFR-binding peptide
  MOD_RES (1)..(3): Xaa is C or S
XKXALHDELTRYKKLFIPKKRVIEFYLVSIANLQVQTPR

SEQ ID NO: 4531 - protein, 28 aa, Artificial Sequence
  Cyclic GFR-binding peptide
  MOD_RES (26)..(27): Xaa is C or S
RHKRLVVKENEDYYLMSTASLETPVXXA

SEQ ID NO: 4532 - protein, 32 aa, Artificial Sequence
  Cyclic GFR-binding peptide
  MOD_RES (29)..(30): Xaa is C or S
VIMQYNKLVKPKRGVLYLISIASLAQPVXXPA

SEQ ID NO: 4533 - protein, 36 aa, Artificial Sequence
  Cyclic GFR-binding peptide
  MOD_RES (1)..(33)..(34): Xaa is C or S
XARVVMNRHKRLIVNSSDDYYLVSTASLQTPAXXPK

SEQ ID NO: 4534 - protein, 31 aa, Artificial Sequence
  Cyclic GFR-binding peptide
  MOD_RES (28)..(29): Xaa is C or S
MDQYNKLVVKENEDLYLMSIASLETPVXXAK

SEQ ID NO: 4535 - protein, 30 aa, Artificial Sequence
  Cyclic GFR-binding peptide
EAVSMGEQYNKLTPVGMDDLYLVSIASLKT

SEQ ID NO: 4536 - protein, 36 aa, Artificial Sequence
  Cyclic GFR-binding peptide
  MOD_RES (31)..(32): Xaa is C or S
SRVIMYHYKLVKPKRGVKYLISIPSLAQPVXXPAAS

SEQ ID NO: 4537 - protein, 29 aa, Artificial Sequence
  Cyclic GFR-binding peptide
VVMNQYNKLIVNNSSDLYLVSIASLKTPA

SEQ ID NO: 4538 - protein, 30 aa, Artificial Sequence
  Cyclic GFR-binding peptide
  MOD_RES (30)..(30): Xaa is C or S
VVMEYHYKLVVKDYEDKYLMSIPSLETPVX

SEQ ID NO: 4539 - protein, 25 aa, Artificial Sequence
  Cyclic GFR-binding peptide
NRHKRLIVNSSDDYYLVSTASLKTP

SEQ ID NO: 4540 - protein, 35 aa, Artificial Sequence
  Cyclic GFR-binding peptide
  MOD_RES (1)..(3): Xaa is C or S
XKXALHDELTRYKKLFIPKKRVIEFYLVSIANLQV

SEQ ID NO: 4541 - protein, 33 aa, Artificial Sequence
  Cyclic GFR-binding peptide
  MOD_RES (29)..(30): Xaa is C or S
VVMYHYKLVKPTRGVKYLISIPSLDQPVXXPSA

SEQ ID NO: 4542 - protein, 28 aa, Artificial Sequence
  Cyclic GFR-binding peptide
VMDQYNKLVVKENEDLYLMSIASLETPV

SEQ ID NO: 4543 - protein, 33 aa, Artificial Sequence
  Cyclic GFR-binding peptide
  MOD_RES (32)..(33): Xaa is C or S
GEVVMDRHKRLVVKENEDYYLMSTASLETPVXX

SEQ ID NO: 4544 - protein, 26 aa, Artificial Sequence
  Cyclic GFR-binding peptide
ERHKRLTPVGMDDYYLVSTASLKTPV

SEQ ID NO: 4545 - protein, 32 aa, Artificial Sequence
  Cyclic GFR-binding peptide
  MOD_RES (26)..(27): Xaa is C or S
RHKRLVVKENEDYYLMSTASLETPVXXAKPIK

SEQ ID NO: 4546 - protein, 33 aa, Artificial Sequence
  Cyclic GFR-binding peptide
  MOD_RES (2)..(4): Xaa is C or S
HXGXAKVVMNYHYKLIVNNSSDKYLVSIPSLKT

SEQ ID NO: 4547 - protein, 31 aa, Artificial Sequence
  Cyclic GFR-binding peptide
  MOD_RES (1)..(3): Xaa is C or S
XGXARVVMNRYKKLIVNSSDDFYLVSIANLQ

SEQ ID NO: 4548 - protein, 30 aa, Artificial Sequence
  Cyclic GFR-binding peptide
  MOD_RES (27)..(28): Xaa is C or S
DQYNKLVVKENEDLYLMSIASLETPVXXAK

SEQ ID NO: 4549 - protein, 27 aa, Artificial Sequence
  Cyclic GFR-binding peptide
RVVMNRYKKLIVNSSDDFYLVSIANLQ

SEQ ID NO: 4550 - protein, 34 aa, Artificial Sequence
  Cyclic GFR-binding peptide
  MOD_RES (2)..(33)..(34): Xaa is C or S
KXSKVIMRHKRLIKPTKGIYYLISTASLDQSVXX

SEQ ID NO: 4551 - protein, 37 aa, Artificial Sequence
  Cyclic GFR-binding peptide
  MOD_RES (2)..(2): Xaa is C or S
KXALHDELTRYKKLFIPKKRVIEFYLVSIANLQVQTP

SEQ ID NO: 4552 - protein, 30 aa, Artificial Sequence
  Cyclic GFR-binding peptide
  MOD_RES (30)..(30): Xaa is C or S
RVIMQYNKLVKPKRGVLYLISIASLAQPVX

SEQ ID NO: 4553 - protein, 32 aa, Artificial Sequence
  Cyclic GFR-binding peptide
  MOD_RES (1)..(1): Xaa is C or S
XGEVVMEQYNKLVVKDYEDLYLMSIASLETPV

SEQ ID NO: 4554 - protein, 32 aa, Artificial Sequence
  Cyclic GFR-binding peptide
DELTRYKKLFIPKKRVIEFYLVSIANLQVQTP

SEQ ID NO: 4555 - protein, 33 aa, Artificial Sequence
  Cyclic GFR-binding peptide
  MOD_RES (29)..(30): Xaa is C or S
VVMRHKRLVKPTRGVYYLISTASLDQPVXXPSA

SEQ ID NO: 4556 - protein, 30 aa, Artificial Sequence
  Cyclic GFR-binding peptide
  MOD_RES (28)..(29): Xaa is C or S
MDRYKKLVVKENEDFYLMSIANLETPVXXA

SEQ ID NO: 4557 - protein, 27 aa, Artificial Sequence
  Cyclic GFR-binding peptide
SRVIMQYNKLVKPKRGVLYLISIASLA

SEQ ID NO: 4558 - protein, 32 aa, Artificial Sequence
  Cyclic GFR-binding peptide
  MOD_RES (28)..(29): Xaa is C or S
GERHKRLTPVGMDDYYLVSTASLKTPVXXAKG

SEQ ID NO: 4559 - protein, 28 aa, Artificial Sequence
  Cyclic GFR-binding peptide
  MOD_RES (27)..(28): Xaa is C or S
DQYNKLVVKENEDLYLMSIASLETPVXX

SEQ ID NO: 4560 - protein, 38 aa, Artificial Sequence
  Cyclic GFR-binding peptide
  MOD_RES (1)..(3)..(35)..(36): Xaa is C or S
XGXGEVVMDQYNKLVVKENEDLYLMSIASLETPVXXAK

SEQ ID NO: 4561 - protein, 34 aa, Artificial Sequence
  Cyclic GFR-binding peptide
  MOD_RES (29)..(29): Xaa is C or S
VMNRYKKLIVNSSDDFYLVSIANLKTPAXTPKTV

SEQ ID NO: 4562 - protein, 35 aa, Artificial Sequence
  Cyclic GFR-binding peptide
  MOD_RES (35)..(35): Xaa is C or S
HDELTYHYKLFIPKKRVIEKYLVSIPSLQVQTPRX

SEQ ID NO: 4563 - protein, 33 aa, Artificial Sequence
  Cyclic GFR-binding peptide
  MOD_RES (30)..(31): Xaa is C or S
VVMDRHKRLVVKENEDYYLMSTASLETPVXXAK

SEQ ID NO: 4564 - protein, 26 aa, Artificial Sequence
  Cyclic GFR-binding peptide
VMDRHKRLVVKENEDYYLMSTASLET

SEQ ID NO: 4565 - protein, 21 aa, Artificial Sequence
  Cyclic GFR-binding peptide
ERYKKLVVKDYEDFYLMSIAN

SEQ ID NO: 4566 - protein, 25 aa, Artificial Sequence
  Cyclic GFR-binding peptide
MQYNKLIKPTKGILYLISIASLDQS

SEQ ID NO: 4567 - protein, 37 aa, Artificial Sequence
  Cyclic GFR-binding peptide
  MOD_RES (32)..(33): Xaa is C or S
GEVVMDQYNKLVVKENEDLYLMSIASLETPVXXAKPI

SEQ ID NO: 4568 - protein, 33 aa, Artificial Sequence
  Cyclic GFR-binding peptide
  MOD_RES (29)..(30): Xaa is C or S
VMERYKKLVVKDYEDFYLMSIANLETPVXXAKP

SEQ ID NO: 4569 - protein, 29 aa, Artificial Sequence
  Cyclic GFR-binding peptide
  MOD_RES (28)..(29): Xaa is C or S
MDRHKRLVVKENEDYYLMSTASLETPVXX

SEQ ID NO: 4570 - protein, 36 aa, Artificial Sequence
  Cyclic GFR-binding peptide
  MOD_RES (1)..(33)..(34): Xaa is C or S
XSRVVMNQYNKLIVNSSDDLYLVSIASLKTPAXXPK

SEQ ID NO: 4571 - protein, 35 aa, Artificial Sequence
  Cyclic GFR-binding peptide
  MOD_RES (1)..(33)..(34): Xaa is C or S
XSRVVMNYHYKLIVNSSDDKYLVSIPSLKTPAXXP

SEQ ID NO: 4572 - protein, 23 aa, Artificial Sequence
  Cyclic GFR-binding peptide
VIMQYNKLIKPTKGILYLISIAS

SEQ ID NO: 4573 - protein, 29 aa, Artificial Sequence
  Cyclic GFR-binding peptide
EVVMEYHYKLVVKDYEDKYLMSIPSLETP

SEQ ID NO: 4574 - protein, 43 aa, Artificial Sequence
  Cyclic GFR-binding peptide
  MOD_RES (1)..(3)..(40): Xaa is C or S
XKXALHDELTYHYKLFIPKKRVIEKYLVSIPSLQVQTPRXQVN

SEQ ID NO: 4575 - protein, 27 aa, Artificial Sequence
  Cyclic GFR-binding peptide
  MOD_RES (26)..(26): Xaa is C or S
YHYKLIVNSSDDKYLVSIPSLKTPAXT

SEQ ID NO: 4576 - protein, 21 aa, Artificial Sequence
  Cyclic GFR-binding peptide
RYKKLVVKENEDFYLMSIANL

SEQ ID NO: 4577 - protein, 29 aa, Artificial Sequence
  Cyclic GFR-binding peptide
  MOD_RES (27)..(28): Xaa is C or S
MQYNKLVKPKRGVLYLISIASLAQPVXXP

SEQ ID NO: 4578 - protein, 30 aa, Artificial Sequence
  Cyclic GFR-binding peptide
  MOD_RES (28)..(29): Xaa is C or S
VMRHKRLVKPTRGVYYLISTASLDQPVXXP

SEQ ID NO: 4579 - protein, 31 aa, Artificial Sequence
  Cyclic GFR-binding peptide
ARVVMNRHKRLIVNSSDDYYLVSTASLQTPA

SEQ ID NO: 4580 - protein, 33 aa, Artificial Sequence
  Cyclic GFR-binding peptide
  MOD_RES (1)..(3): Xaa is C or S
XGXAKVVMNQYNKLIVNNSSDLYLVSIASLKTP

SEQ ID NO: 4581 - protein, 28 aa, Artificial Sequence
  Cyclic GFR-binding peptide
  MOD_RES (26)..(27): Xaa is C or S
RYKKLVVKDYEDFYLMSIANLETPVXXA

SEQ ID NO: 4582 - protein, 35 aa, Artificial Sequence
  Cyclic GFR-binding peptide
  MOD_RES (30)..(31): Xaa is C or S
RVIMRYKKLVKPKRGVFYLISIANLAQPVXXPAAS

SEQ ID NO: 4583 - protein, 27 aa, Artificial Sequence
  Cyclic GFR-binding peptide
  MOD_RES (27)..(27): Xaa is C or S
ERYKKLVVKDYEDFYLMSIANLETPVX

SEQ ID NO: 4584 - protein, 33 aa, Artificial Sequence
  Cyclic GFR-binding peptide
  MOD_RES (2)..(33): Xaa is C or S
KXSKVIMRHKRLIKPTKGIYYLISTASLDQSVX

SEQ ID NO: 4585 - protein, 21 aa, Artificial Sequence
  Cyclic GFR-binding peptide
YHYKLVVKDYEDKYLMSIPSL

SEQ ID NO: 4586 - protein, 20 aa, Artificial Sequence
  Cyclic GFR-binding peptide
QYNKLVVKENEDLYLMSIAS

SEQ ID NO: 4587 - protein, 38 aa, Artificial Sequence
  Cyclic GFR-binding peptide
  MOD_RES (1)..(3)..(35): Xaa is C or S
XGXSRVVMNYHYKLIVNSSDDKYLVSIPSLKTPAXTPK

SEQ ID NO: 4588 - protein, 34 aa, Artificial Sequence
  Cyclic GFR-binding peptide
  MOD_RES (1)..(3): Xaa is C or S
XKXALHDELTQYNKLFIPKKRVIELYLVSIASLQ

SEQ ID NO: 4589 - protein, 23 aa, Artificial Sequence
  Cyclic GFR-binding peptide
MERHKRLVVKDYEDYYLMSTASL

SEQ ID NO: 4590 - protein, 33 aa, Artificial Sequence
  Cyclic GFR-binding peptide
  MOD_RES (32)..(33): Xaa is C or S
GEVVMERHKRLVVKDYEDYYLMSTASLETPVXX

SEQ ID NO: 4591 - protein, 35 aa, Artificial Sequence
  Cyclic GFR-binding peptide
  MOD_RES (1)..(33): Xaa is C or S
XSRVVMNQYNKLIVNSSDDLYLVSIASLKTPAXTP

SEQ ID NO: 4592 - protein, 26 aa, Artificial Sequence
  Cyclic GFR-binding peptide
VIMQYNKLIKPTKGILYLISIASLDQ

SEQ ID NO: 4593 - protein, 33 aa, Artificial Sequence
  Cyclic GFR-binding peptide
  MOD_RES (27)..(28): Xaa is C or S
NQYNKLIVNSSDDLYLVSIASLKTPAXXPKPVY

SEQ ID NO: 4594 - protein, 29 aa, Artificial Sequence
  Cyclic GFR-binding peptide
  MOD_RES (29)..(29): Xaa is C or S
VVMRHKRLVKPTRGVYYLISTASLDQPVX

SEQ ID NO: 4595 - protein, 37 aa, Artificial Sequence
  Cyclic GFR-binding peptide
  MOD_RES (2)..(34)..(35): Xaa is C or S
GXAKVVMNRYKKLIVNNSSDFYLVSIANLKTPAXXAK

SEQ ID NO: 4596 - protein, 36 aa, Artificial Sequence
  Cyclic GFR-binding peptide
  MOD_RES (2)..(34)..(35): Xaa is C or S
GXSRVVMNYHYKLIVNSSDDKYLVSIPSLKTPAXXP

SEQ ID NO: 4597 - protein, 34 aa, Artificial Sequence
  Cyclic GFR-binding peptide
  MOD_RES (2)..(4): Xaa is C or S
SXKXSRVIMYHYKLVKPKRGVKYLISIPSLAQPV

SEQ ID NO: 4598 - protein, 35 aa, Artificial Sequence
  Cyclic GFR-binding peptide
  MOD_RES (1)..(32)..(33): Xaa is C or S
XSKVVMQYNKLVKPTRGVLYLISIASLDQPVXXPS

SEQ ID NO: 4599 - protein, 27 aa, Artificial Sequence
  Cyclic GFR-binding peptide
MDQYNKLVVKENEDLYLMSIASLETPV

SEQ ID NO: 4600 - protein, 38 aa, Artificial Sequence
  Cyclic GFR-binding peptide
  MOD_RES (1)..(32)..(33): Xaa is C or S
XSKVVMRHKRLVKPTRGVYYLISTASLDQPVXXPSASA

SEQ ID NO: 4601 - protein, 30 aa, Artificial Sequence
  Cyclic GFR-binding peptide
RVVMNRYKKLIVNSSDDFYLVSIANLKTPA

SEQ ID NO: 4602 - protein, 33 aa, Artificial Sequence
  Cyclic GFR-binding peptide
  MOD_RES (1)..(32)..(33): Xaa is C or S
XSKVIMQYNKLIKPTKGILYLISIASLDQSVXX

SEQ ID NO: 4603 - protein, 31 aa, Artificial Sequence
  Cyclic GFR-binding peptide
  MOD_RES (29)..(30): Xaa is C or S
MGERYKKLTPVGMDDFYLVSIANLKTPVXXA

SEQ ID NO: 4604 - protein, 26 aa, Artificial Sequence
  Cyclic GFR-binding peptide
NQYNKLIVNSSDDLYLVSIASLKTPA

SEQ ID NO: 4605 - protein, 31 aa, Artificial Sequence
  Cyclic GFR-binding peptide
ALHDELTRHKRLFIPKKRVIEYYLVSTASLQ

SEQ ID NO: 4606 - protein, 30 aa, Artificial Sequence
  Cyclic GFR-binding peptide
VSMGERHKRLTPVGMDDYYLVSTASLKTPV

SEQ ID NO: 4607 - protein, 28 aa, Artificial Sequence
  Cyclic GFR-binding peptide
  MOD_RES (28)..(28): Xaa is C or S
VMQYNKLVKPTRGVLYLISIASLDQPVX

SEQ ID NO: 4608 - protein, 31 aa, Artificial Sequence
  Cyclic GFR-binding peptide
  MOD_RES (26)..(27): Xaa is C or S
RYKKLVKPKRGVFYLISIANLAQPVXXPAAS

SEQ ID NO: 4609 - protein, 30 aa, Artificial Sequence
  Cyclic GFR-binding peptide
  MOD_RES (28)..(29): Xaa is C or S
MDQYNKLVVKENEDLYLMSIASLETPVXXA

SEQ ID NO: 4610 - protein, 21 aa, Artificial Sequence
  Cyclic GFR-binding peptide
YHYKLIVNNSSDKYLVSIPSL

SEQ ID NO: 4611 - protein, 36 aa, Artificial Sequence
  Cyclic GFR-binding peptide
  MOD_RES (2)..(4)..(35)..(36): Xaa is C or S
SXKXSKVVMRHKRLVKPTRGVYYLISTASLDQPVXX

SEQ ID NO: 4612 - protein, 26 aa, Artificial Sequence
  Cyclic GFR-binding peptide
AKVVMNQYNKLIVNNSSDLYLVSIAS

SEQ ID NO: 4613 - protein, 30 aa, Artificial Sequence
  Cyclic GFR-binding peptide
  MOD_RES (2)..(2): Xaa is C or S
GXGEVVMERYKKLVVKDYEDFYLMSIANLE

SEQ ID NO: 4614 - protein, 35 aa, Artificial Sequence
  Cyclic GFR-binding peptide
  MOD_RES (31)..(31): Xaa is C or S
TRYKKLFIPKKRVIEFYLVSIANLQVQTPRXQVNR

SEQ ID NO: 4615 - protein, 36 aa, Artificial Sequence
  Cyclic GFR-binding peptide
  MOD_RES (32)..(33): Xaa is C or S
AVSMGERHKRLTPVGMDDYYLVSTASLKTPVXXAKG

SEQ ID NO: 4616 - protein, 36 aa, Artificial Sequence
  Cyclic GFR-binding peptide
  MOD_RES (2)..(4)..(36): Xaa is C or S
HXGXSRVVMNYHYKLIVNSSDDKYLVSIPSLKTPAX

SEQ ID NO: 4617 - protein, 35 aa, Artificial Sequence
  Cyclic GFR-binding peptide
  MOD_RES (2)..(4): Xaa is C or S
RXGXGEVVMEQYNKLVVKDYEDLYLMSIASLETPV

SEQ ID NO: 4618 - protein, 24 aa, Artificial Sequence
  Cyclic GFR-binding peptide
YHYKLIVNSSDDKYLVSIPSLQTP

SEQ ID NO: 4619 - protein, 34 aa, Artificial Sequence
  Cyclic GFR-binding peptide
  MOD_RES (30)..(31): Xaa is C or S
VVMNRHKRLIVNSSDDYYLVSTASLQTPAXXPKP

SEQ ID NO: 4620 - protein, 31 aa, Artificial Sequence
  Cyclic GFR-binding peptide
  MOD_RES (29)..(30): Xaa is C or S
VVMRYKKLVKPTRGVFYLISIANLDQPVXXP

SEQ ID NO: 4621 - protein, 42 aa, Artificial Sequence
  Cyclic GFR-binding peptide
  MOD_RES (2)..(4)..(41): Xaa is C or S
EXKXALHDELTRHKRLFIPKKRVIEYYLVSTASLQVQTPRXQ

SEQ ID NO: 4622 - protein, 26 aa, Artificial Sequence
  Cyclic GFR-binding peptide
NRYKKLIVNSSDDFYLVSIANLKTPA

SEQ ID NO: 4623 - protein, 38 aa, Artificial Sequence
  Cyclic GFR-binding peptide
  MOD_RES (32)..(33): Xaa is C or S
ARVVMNRYKKLIVNSSDDFYLVSIANLQTPAXXPKPVT

SEQ ID NO: 4624 - protein, 30 aa, Artificial Sequence
  Cyclic GFR-binding peptide
  MOD_RES (30)..(30): Xaa is C or S
VVMERHKRLVVKDYEDYYLMSTASLETPVX

SEQ ID NO: 4625 - protein, 27 aa, Artificial Sequence
  Cyclic GFR-binding peptide
  MOD_RES (1)..(1): Xaa is C or S
XARVVMNQYNKLIVNSSDDLYLVSIAS

SEQ ID NO: 4626 - protein, 30 aa, Artificial Sequence
  Cyclic GFR-binding peptide
  MOD_RES (26)..(27): Xaa is C or S
QYNKLIVNSSDDLYLVSIASLKTPAXXPKP

SEQ ID NO: 4627 - protein, 27 aa, Artificial Sequence
  Cyclic GFR-binding peptide
RVIMYHYKLVKPKRGVKYLISIPSLAQ

SEQ ID NO: 4628 - protein, 32 aa, Artificial Sequence
  Cyclic GFR-binding peptide
  MOD_RES (26)..(26): Xaa is C or S
RYKKLIVNSSDDFYLVSIANLKTPAXTPKTVH

SEQ ID NO: 4629 - protein, 36 aa, Artificial Sequence
  Cyclic GFR-binding peptide
  MOD_RES (30)..(31): Xaa is C or S
VVMERYKKLVVKDYEDFYLMSIANLETPVXXAKPIS

SEQ ID NO: 4630 - protein, 24 aa, Artificial Sequence
  Cyclic GFR-binding peptide
NRYKKLIVNSSDDFYLVSIANLKT

SEQ ID NO: 4631 - protein, 26 aa, Artificial Sequence
  Cyclic GFR-binding peptide
VVMNQYNKLIVNSSDDLYLVSIASLK

SEQ ID NO: 4632 - protein, 33 aa, Artificial Sequence
  Cyclic GFR-binding peptide
  MOD_RES (2)..(4): Xaa is C or S
HXGXARVVMNYHYKLIVNSSDDKYLVSIPSLQT

SEQ ID NO: 4633 - protein, 26 aa, Artificial Sequence
  Cyclic GFR-binding peptide
TRHKRLFIPKKRVIEYYLVSTASLQV

SEQ ID NO: 4634 - protein, 38 aa, Artificial Sequence
  Cyclic GFR-binding peptide
  MOD_RES (2)..(4)..(35)..(36): Xaa is C or S
SXKXSKVVMRYKKLVKPTRGVFYLISIANLDQPVXXPS

SEQ ID NO: 4635 - protein, 24 aa, Artificial Sequence
  Cyclic GFR-binding peptide
RHKRLVVKENEDYYLMSTASLETP

SEQ ID NO: 4636 - protein, 33 aa, Artificial Sequence
  Cyclic GFR-binding peptide
  MOD_RES (29)..(30): Xaa is C or S
VMNRHKRLIVNSSDDYYLVSTASLKTPAXXPKP

SEQ ID NO: 4637 - protein, 34 aa, Artificial Sequence
  Cyclic GFR-binding peptide
  MOD_RES (2)..(4): Xaa is C or S
HXGXSRVVMNRYKKLIVNSSDDFYLVSIANLKTP

SEQ ID NO: 4638 - protein, 31 aa, Artificial Sequence
  Cyclic GFR-binding peptide
ALHDELTQYNKLFIPKKRVIELYLVSIASLQ

SEQ ID NO: 4639 - protein, 25 aa, Artificial Sequence
  Cyclic GFR-binding peptide
VSMGERYKKLTPVGMDDFYLVSIAN

SEQ ID NO: 4640 - protein, 31 aa, Artificial Sequence
  Cyclic GFR-binding peptide
  MOD_RES (27)..(28): Xaa is C or S
NRYKKLIVNSSDDFYLVSIANLQTPAXXPKP

SEQ ID NO: 4641 - protein, 33 aa, Artificial Sequence
  Cyclic GFR-binding peptide
  MOD_RES (31)..(31): Xaa is C or S
TYHYKLFIPKKRVIEKYLVSIPSLQVQTPRXQV

SEQ ID NO: 4642 - protein, 38 aa, Artificial Sequence
  Cyclic GFR-binding peptide
  MOD_RES (2)..(33)..(34): Xaa is C or S
KXSKVVMRYKKLVKPTRGVFYLISIANLDQPVXXPSAS

SEQ ID NO: 4643 - protein, 27 aa, Artificial Sequence
  Cyclic GFR-binding peptide
ARVVMNRHKRLIVNSSDDYYLVSTASL

SEQ ID NO: 4644 - protein, 34 aa, Artificial Sequence
  Cyclic GFR-binding peptide
  MOD_RES (31)..(32): Xaa is C or S
RVVMNRYKKLIVNSSDDFYLVSIANLKTPAXXPK

SEQ ID NO: 4645 - protein, 26 aa, Artificial Sequence
  Cyclic GFR-binding peptide
KVIMYHYKLIKPTKGIKYLISIPSLD

SEQ ID NO: 4646 - protein, 26 aa, Artificial Sequence
  Cyclic GFR-binding peptide
MDQYNKLVVKENEDLYLMSIASLETP

SEQ ID NO: 4647 - protein, 28 aa, Artificial Sequence
  Cyclic GFR-binding peptide
DELTRYKKLFIPKKRVIEFYLVSIANLQ

SEQ ID NO: 4648 - protein, 24 aa, Artificial Sequence
  Cyclic GFR-binding peptide
MYHYKLVKPTRGVKYLISIPSLDQ

SEQ ID NO: 4649 - protein, 36 aa, Artificial Sequence
  Cyclic GFR-binding peptide
  MOD_RES (1)..(3)..(35)..(36): Xaa is C or S
XGXGEVVMERHKRLVVKDYEDYYLMSTASLETPVXX

SEQ ID NO: 4650 - protein, 31 aa, Artificial Sequence
  Cyclic GFR-binding peptide
  MOD_RES (29)..(30): Xaa is C or S
VMERYKKLVVKDYEDFYLMSIANLETPVXXA

SEQ ID NO: 4651 - protein, 42 aa, Artificial Sequence
  Cyclic GFR-binding peptide
  MOD_RES (2)..(39): Xaa is C or S
KXALHDELTQYNKLFIPKKRVIELYLVSIASLQVQTPRXQVN

SEQ ID NO: 4652 - protein, 28 aa, Artificial Sequence
  Cyclic GFR-binding peptide
VVMRHKRLVKPTRGVYYLISTASLDQPV

SEQ ID NO: 4653 - protein, 34 aa, Artificial Sequence
  Cyclic GFR-binding peptide
ALHDELTYHYKLFIPKKRVIEKYLVSIPSLQVQT

SEQ ID NO: 4654 - protein, 33 aa, Artificial Sequence
  Cyclic GFR-binding peptide
  MOD_RES (28)..(29): Xaa is C or S
IMYHYKLIKPTKGIKYLISIPSLDQSVXXPSAS

SEQ ID NO: 4655 - protein, 30 aa, Artificial Sequence
  Cyclic GFR-binding peptide
  MOD_RES (28)..(29): Xaa is C or S
IMQYNKLVKPKRGVLYLISIASLAQPVXXP

SEQ ID NO: 4656 - protein, 35 aa, Artificial Sequence
  Cyclic GFR-binding peptide
  MOD_RES (2)..(34)..(35): Xaa is C or S
GXGEVVMDRYKKLVVKENEDFYLMSIANLETPVXX

SEQ ID NO: 4657 - protein, 32 aa, Artificial Sequence
  Cyclic GFR-binding peptide
  MOD_RES (30)..(31): Xaa is C or S
VVMDYHYKLVVKENEDKYLMSIPSLETPVXXA

SEQ ID NO: 4658 - protein, 27 aa, Artificial Sequence
  Cyclic GFR-binding peptide
SRVVMNRHKRLIVNSSDDYYLVSTASL

SEQ ID NO: 4659 - protein, 31 aa, Artificial Sequence
  Cyclic GFR-binding peptide
  MOD_RES (28)..(29): Xaa is C or S
MNRYKKLIVNSSDDFYLVSIANLKTPAXXPK

SEQ ID NO: 4660 - protein, 39 aa, Artificial Sequence
  Cyclic GFR-binding peptide
  MOD_RES (2)..(4)..(36)..(37): Xaa is C or S
HXGXSRVVMNRHKRLIVNSSDDYYLVSTASLKTPAXXPK

SEQ ID NO: 4661 - protein, 31 aa, Artificial Sequence
  Cyclic GFR-binding peptide
  MOD_RES (30)..(31): Xaa is C or S
RVIMQYNKLVKPKRGVLYLISIASLAQPVXX

SEQ ID NO: 4662 - protein, 31 aa, Artificial Sequence
  Cyclic GFR-binding peptide
  MOD_RES (31)..(31): Xaa is C or S
SKVVMYHYKLVKPTRGVKYLISIPSLDQPVX

SEQ ID NO: 4663 - protein, 31 aa, Artificial Sequence
  Cyclic GFR-binding peptide
  MOD_RES (28)..(29): Xaa is C or S
IMQYNKLVKPKRGVLYLISIASLAQPVXXPA

SEQ ID NO: 4664 - protein, 27 aa, Artificial Sequence
  Cyclic GFR-binding peptide
  MOD_RES (2)..(2): Xaa is C or S
KXSKVVMYHYKLVKPTRGVKYLISIPS

SEQ ID NO: 4665 - protein, 31 aa, Artificial Sequence
  Cyclic GFR-binding peptide
  MOD_RES (2)..(2): Xaa is C or S
GXAKVVMNRYKKLIVNNSSDFYLVSIANLKT

SEQ ID NO: 4666 - protein, 34 aa, Artificial Sequence
  Cyclic GFR-binding peptide
  MOD_RES (31)..(31): Xaa is C or S
TQYNKLFIPKKRVIELYLVSIASLQVQTPRXQVN

SEQ ID NO: 4667 - protein, 27 aa, Artificial Sequence
  Cyclic GFR-binding peptide
  MOD_RES (1)..(1): Xaa is C or S
XGEVVMDRHKRLVVKENEDYYLMSTAS

SEQ ID NO: 4668 - protein, 39 aa, Artificial Sequence
  Cyclic GFR-binding peptide
  MOD_RES (1)..(3)..(35)..(36): Xaa is C or S
XGXAKVVMNRYKKLIVNNSSDFYLVSIANLKTPAXXAKP

SEQ ID NO: 4669 - protein, 23 aa, Artificial Sequence
  Cyclic GFR-binding peptide
MYHYKLVKPTRGVKYLISIPSLD

SEQ ID NO: 4670 - protein, 33 aa, Artificial Sequence
  Cyclic GFR-binding peptide
  MOD_RES (31)..(32): Xaa is C or S
SRVIMRHKRLVKPKRGVYYLISTASLAQPVXXP

SEQ ID NO: 4671 - protein, 37 aa, Artificial Sequence
  Cyclic GFR-binding peptide
  MOD_RES (1)..(3)..(34)..(35): Xaa is C or S
XKXSKVVMRYKKLVKPTRGVFYLISIANLDQPVXXPS

SEQ ID NO: 4672 - protein, 31 aa, Artificial Sequence
  Cyclic GFR-binding peptide
  MOD_RES (2)..(2): Xaa is C or S
GXARVVMNQYNKLIVNSSDDLYLVSIASLQT

SEQ ID NO: 4673 - protein, 27 aa, Artificial Sequence
  Cyclic GFR-binding peptide
  MOD_RES (26)..(27): Xaa is C or S
RYKKLVVKDYEDFYLMSIANLETPVXX

SEQ ID NO: 4674 - protein, 39 aa, Artificial Sequence
  Cyclic GFR-binding peptide
  MOD_RES (1)..(38): Xaa is C or S
XALHDELTYHYKLFIPKKRVIEKYLVSIPSLQVQTPRXQ

SEQ ID NO: 4675 - protein, 37 aa, Artificial Sequence
  Cyclic GFR-binding peptide
  MOD_RES (1)..(3)..(36)..(37): Xaa is C or S
XGXEAVSMGEQYNKLTPVGMDDLYLVSIASLKTPVXX

SEQ ID NO: 4676 - protein, 35 aa, Artificial Sequence
  Cyclic GFR-binding peptide
  MOD_RES (1)..(33)..(34): Xaa is C or S
XGEVVMDQYNKLVVKENEDLYLMSIASLETPVXXA

SEQ ID NO: 4677 - protein, 33 aa, Artificial Sequence
  Cyclic GFR-binding peptide
  MOD_RES (28)..(29): Xaa is C or S
MNYHYKLIVNSSDDKYLVSIPSLQTPAXXPKPV

SEQ ID NO: 4678 - protein, 27 aa, Artificial Sequence
  Cyclic GFR-binding peptide
SRVIMYHYKLVKPKRGVKYLISIPSLA

SEQ ID NO: 4679 - protein, 24 aa, Artificial Sequence
  Cyclic GFR-binding peptide
RVIMQYNKLVKPKRGVLYLISIAS

SEQ ID NO: 4680 - protein, 29 aa, Artificial Sequence
  Cyclic GFR-binding peptide
  MOD_RES (2)..(4): Xaa is C or S
SXKXSKVIMQYNKLIKPTKGILYLISIAS

SEQ ID NO: 4681 - protein, 37 aa, Artificial Sequence
  Cyclic GFR-binding peptide
  MOD_RES (1)..(32)..(33): Xaa is C or S
XSKVIMYHYKLIKPTKGIKYLISIPSLDQSVXXPSAS

SEQ ID NO: 4682 - protein, 22 aa, Artificial Sequence
  Cyclic GFR-binding peptide
YHYKLVKPKRGVKYLISIPSLA

SEQ ID NO: 4683 - protein, 37 aa, Artificial Sequence
  Cyclic GFR-binding peptide
  MOD_RES (2)..(4)..(37): Xaa is C or S
RXGXEAVSMGEQYNKLTPVGMDDLYLVSIASLKTPVX

SEQ ID NO: 4684 - protein, 30 aa, Artificial Sequence
  Cyclic GFR-binding peptide
AVSMGEQYNKLTPVGMDDLYLVSIASLKTP

SEQ ID NO: 4685 - protein, 33 aa, Artificial Sequence
  Cyclic GFR-binding peptide
  MOD_RES (29)..(29): Xaa is C or S
VMNQYNKLIVNSSDDLYLVSIASLKTPAXTPKT

SEQ ID NO: 4686 - protein, 37 aa, Artificial Sequence
  Cyclic GFR-binding peptide
  MOD_RES (31)..(32): Xaa is C or S
SRVIMYHYKLVKPKRGVKYLISIPSLAQPVXXPAASA

SEQ ID NO: 4687 - protein, 36 aa, Artificial Sequence
  Cyclic GFR-binding peptide
  MOD_RES (2)..(34)..(35): Xaa is C or S
GXGEVVMERHKRLVVKDYEDYYLMSTASLETPVXXA

SEQ ID NO: 4688 - protein, 36 aa, Artificial Sequence
  Cyclic GFR-binding peptide
  MOD_RES (30)..(31): Xaa is C or S
VVMNQYNKLIVNSSDDLYLVSIASLKTPAXXPKPVY

SEQ ID NO: 4689 - protein, 40 aa, Artificial Sequence
  Cyclic GFR-binding peptide
  MOD_RES (2)..(4): Xaa is C or S
EXKXALHDELTYHYKLFIPKKRVIEKYLVSIPSLQVQTPR

SEQ ID NO: 4690 - protein, 28 aa, Artificial Sequence
  Cyclic GFR-binding peptide
  MOD_RES (1)..(1): Xaa is C or S
XEAVSMGERHKRLTPVGMDDYYLVSTAS

SEQ ID NO: 4691 - protein, 26 aa, Artificial Sequence
  Cyclic GFR-binding peptide
NYHYKLIVNNSSDKYLVSIPSLKTPA

SEQ ID NO: 4692 - protein, 31 aa, Artificial Sequence
  Cyclic GFR-binding peptide
  MOD_RES (29)..(30): Xaa is C or S
VMNYHYKLIVNSSDDKYLVSIPSLKTPAXXP

SEQ ID NO: 4693 - protein, 28 aa, Artificial Sequence
  Cyclic GFR-binding peptide
AVSMGEQYNKLTPVGMDDLYLVSIASLK

SEQ ID NO: 4694 - protein, 27 aa, Artificial Sequence
  Cyclic GFR-binding peptide
SKVIMRHKRLIKPTKGIYYLISTASLD

SEQ ID NO: 4695 - protein, 34 aa, Artificial Sequence
  Cyclic GFR-binding peptide
  MOD_RES (1)..(33): Xaa is C or S
XSRVVMNRHKRLIVNSSDDYYLVSTASLKTPAXT

SEQ ID NO: 4696 - protein, 32 aa, Artificial Sequence
  Cyclic GFR-binding peptide
  MOD_RES (2)..(4): Xaa is C or S
RXGXGEVVMDRYKKLVVKENEDFYLMSIANLE

SEQ ID NO: 4697 - protein, 33 aa, Artificial Sequence
  Cyclic GFR-binding peptide
  MOD_RES (32)..(32): Xaa is C or S
SRVVMNYHYKLIVNSSDDKYLVSIPSLKTPAXT

SEQ ID NO: 4698 - protein, 33 aa, Artificial Sequence
  Cyclic GFR-binding peptide
  MOD_RES (31)..(32): Xaa is C or S
RVVMNYHYKLIVNSSDDKYLVSIPSLKTPAXXP

SEQ ID NO: 4699 - protein, 40 aa, Artificial Sequence
  Cyclic GFR-binding peptide
  MOD_RES (2)..(4)..(37)..(38): Xaa is C or S
RXGXEAVSMGERHKRLTPVGMDDYYLVSTASLKTPVXXAK

SEQ ID NO: 4700 - protein, 32 aa, Artificial Sequence
  Cyclic GFR-binding peptide
  MOD_RES (32)..(32): Xaa is C or S
SRVVMNQYNKLIVNSSDDLYLVSIASLKTPAX

SEQ ID NO: 4701 - protein, 28 aa, Artificial Sequence
  Cyclic GFR-binding peptide
  MOD_RES (28)..(28): Xaa is C or S
MDRYKKLVVKENEDFYLMSIANLETPVX

SEQ ID NO: 4702 - protein, 23 aa, Artificial Sequence
  Cyclic GFR-binding peptide
MDQYNKLVVKENEDLYLMSIASL

SEQ ID NO: 4703 - protein, 36 aa, Artificial Sequence
  Cyclic GFR-binding peptide
  MOD_RES (32)..(32): Xaa is C or S
SRVVMNRHKRLIVNSSDDYYLVSTASLKTPAXTPKT

SEQ ID NO: 4704 - protein, 32 aa, Artificial Sequence
  Cyclic GFR-binding peptide
  MOD_RES (32)..(32): Xaa is C or S
GEVVMDQYNKLVVKENEDLYLMSIASLETPVX

SEQ ID NO: 4705 - protein, 30 aa, Artificial Sequence
  Cyclic GFR-binding peptide
  MOD_RES (28)..(29): Xaa is C or S
MNYHYKLIVNSSDDKYLVSIPSLQTPAXXP

SEQ ID NO: 4706 - protein, 30 aa, Artificial Sequence
  Cyclic GFR-binding peptide
  MOD_RES (1)..(1): Xaa is C or S
XSKVVMQYNKLVKPTRGVLYLISIASLDQP

SEQ ID NO: 4707 - protein, 28 aa, Artificial Sequence
  Cyclic GFR-binding peptide
RVIMRHKRLVKPKRGVYYLISTASLAQP

SEQ ID NO: 4708 - protein, 27 aa, Artificial Sequence
  Cyclic GFR-binding peptide
VVMERYKKLVVKDYEDFYLMSIANLET

SEQ ID NO: 4709 - protein, 37 aa, Artificial Sequence
  Cyclic GFR-binding peptide
  MOD_RES (31)..(32): Xaa is C or S
SKVIMYHYKLIKPTKGIKYLISIPSLDQSVXXPSASA

SEQ ID NO: 4710 - protein, 32 aa, Artificial Sequence
  Cyclic GFR-binding peptide
  MOD_RES (1)..(1): Xaa is C or S
XALHDELTYHYKLFIPKKRVIEKYLVSIPSLQ

SEQ ID NO: 4711 - protein, 35 aa, Artificial Sequence
  Cyclic GFR-binding peptide
  MOD_RES (1)..(3)..(35): Xaa is C or S
XGXSRVVMNYHYKLIVNSSDDKYLVSIPSLKTPAX

SEQ ID NO: 4712 - protein, 29 aa, Artificial Sequence
  Cyclic GFR-binding peptide
  MOD_RES (26)..(27): Xaa is C or S
RHKRLVKPKRGVYYLISTASLAQPVXXPA

SEQ ID NO: 4713 - protein, 37 aa, Artificial Sequence
  Cyclic GFR-binding peptide
  MOD_RES (35)..(35): Xaa is C or S
HDELTYHYKLFIPKKRVIEKYLVSIPSLQVQTPRXQV

SEQ ID NO: 4714 - protein, 38 aa, Artificial Sequence
  Cyclic GFR-binding peptide
  MOD_RES (2)..(4)..(37)..(38): Xaa is C or S
RXGXEAVSMGERYKKLTPVGMDDFYLVSIANLKTPVXX

SEQ ID NO: 4715 - protein, 42 aa, Artificial Sequence
  Cyclic GFR-binding peptide
  MOD_RES (1)..(3)..(36)..(37): Xaa is C or S
XGXEAVSMGEQYNKLTPVGMDDLYLVSIASLKTPVXXAKGVK

SEQ ID NO: 4716 - protein, 23 aa, Artificial Sequence
  Cyclic GFR-binding peptide
QYNKLVVKENEDLYLMSIASLET

SEQ ID NO: 4717 - protein, 34 aa, Artificial Sequence
  Cyclic GFR-binding peptide
  MOD_RES (32)..(33): Xaa is C or S
ARVVMNRHKRLIVNSSDDYYLVSTASLQTPAXXP

SEQ ID NO: 4718 - protein, 27 aa, Artificial Sequence
  Cyclic GFR-binding peptide
HDELTRYKKLFIPKKRVIEFYLVSIAN

SEQ ID NO: 4719 - protein, 30 aa, Artificial Sequence
  Cyclic GFR-binding peptide
  MOD_RES (29)..(30): Xaa is C or S
VMERHKRLVVKDYEDYYLMSTASLETPVXX

SEQ ID NO: 4720 - protein, 23 aa, Artificial Sequence
  Cyclic GFR-binding peptide
VMNQYNKLIVNSSDDLYLVSIAS

SEQ ID NO: 4721 - protein, 37 aa, Artificial Sequence
  Cyclic GFR-binding peptide
  MOD_RES (32)..(33): Xaa is C or S
GEVVMERYKKLVVKDYEDFYLMSIANLETPVXXAKPI

SEQ ID NO: 4722 - protein, 36 aa, Artificial Sequence
  Cyclic GFR-binding peptide
  MOD_RES (2)..(4): Xaa is C or S
EXKXALHDELTRHKRLFIPKKRVIEYYLVSTASLQV

SEQ ID NO: 4723 - protein, 43 aa, Artificial Sequence
  Cyclic GFR-binding peptide
  MOD_RES (1)..(3)..(40): Xaa is C or S
XKXALHDELTRHKRLFIPKKRVIEYYLVSTASLQVQTPRXQVN

SEQ ID NO: 4724 - protein, 33 aa, Artificial Sequence
  Cyclic GFR-binding peptide
  MOD_RES (1)..(3): Xaa is C or S
XGXAKVVMNYHYKLIVNNSSDKYLVSIPSLKTP

SEQ ID NO: 4725 - protein, 23 aa, Artificial Sequence
  Cyclic GFR-binding peptide
YHYKLVVKDYEDKYLMSIPSLET

SEQ ID NO: 4726 - protein, 31 aa, Artificial Sequence
  Cyclic GFR-binding peptide
LTQYNKLFIPKKRVIELYLVSIASLQVQTPR

SEQ ID NO: 4727 - protein, 31 aa, Artificial Sequence
  Cyclic GFR-binding peptide
  MOD_RES (1)..(3): Xaa is C or S
XGXAKVVMNRYKKLIVNNSSDFYLVSIANLK

SEQ ID NO: 4728 - protein, 31 aa, Artificial Sequence
  Cyclic GFR-binding peptide
  MOD_RES (2)..(2): Xaa is C or S
GXAKVVMNYHYKLIVNNSSDKYLVSIPSLKT

SEQ ID NO: 4729 - protein, 30 aa, Artificial Sequence
  Cyclic GFR-binding peptide
  MOD_RES (2)..(4): Xaa is C or S
HXGXAKVVMNRYKKLIVNNSSDFYLVSIAN

SEQ ID NO: 4730 - protein, 32 aa, Artificial Sequence
  Cyclic GFR-binding peptide
  MOD_RES (30)..(31): Xaa is C or S
VVMDRHKRLVVKENEDYYLMSTASLETPVXXA

SEQ ID NO: 4731 - protein, 32 aa, Artificial Sequence
  Cyclic GFR-binding peptide
  MOD_RES (2)..(2): Xaa is C or S
GXGEVVMDYHYKLVVKENEDKYLMSIPSLETP

SEQ ID NO: 4732 - protein, 30 aa, Artificial Sequence
  Cyclic GFR-binding peptide
  MOD_RES (26)..(27): Xaa is C or S
RYKKLIVNSSDDFYLVSIANLKTPAXXPKP

SEQ ID NO: 4733 - protein, 42 aa, Artificial Sequence
  Cyclic GFR-binding peptide
  MOD_RES (2)..(4)..(36)..(37): Xaa is C or S
RXGXGEVVMERHKRLVVKDYEDYYLMSTASLETPVXXAKPIS

SEQ ID NO: 4734 - protein, 39 aa, Artificial Sequence
  Cyclic GFR-binding peptide
  MOD_RES (2)..(39): Xaa is C or S
KXALHDELTQYNKLFIPKKRVIELYLVSIASLQVQTPRX

SEQ ID NO: 4735 - protein, 31 aa, Artificial Sequence
  Cyclic GFR-binding peptide
  MOD_RES (29)..(30): Xaa is C or S
VMDYHYKLVVKENEDKYLMSIPSLETPVXXA

SEQ ID NO: 4736 - protein, 40 aa, Artificial Sequence
  Cyclic GFR-binding peptide
  MOD_RES (2)..(34)..(35): Xaa is C or S
GXSRVVMNQYNKLIVNSSDDLYLVSIASLKTPAXXPKPVY

SEQ ID NO: 4737 - protein, 30 aa, Artificial Sequence
  Cyclic GFR-binding peptide
  MOD_RES (29)..(29): Xaa is C or S
VMNQYNKLIVNSSDDLYLVSIASLKTPAXT

SEQ ID NO: 4738 - protein, 31 aa, Artificial Sequence
  Cyclic GFR-binding peptide
LHDELTRYKKLFIPKKRVIEFYLVSIANLQV

SEQ ID NO: 4739 - protein, 30 aa, Artificial Sequence
  Cyclic GFR-binding peptide
ELTRHKRLFIPKKRVIEYYLVSTASLQVQT

SEQ ID NO: 4740 - protein, 35 aa, Artificial Sequence
  Cyclic GFR-binding peptide
  MOD_RES (1)..(3)..(35): Xaa is C or S
XGXARVVMNQYNKLIVNSSDDLYLVSIASLQTPAX

SEQ ID NO: 4741 - protein, 33 aa, Artificial Sequence
  Cyclic GFR-binding peptide
  MOD_RES (2)..(4): Xaa is C or S
SXKXSKVIMRYKKLIKPTKGIFYLISIANLDQS

SEQ ID NO: 4742 - protein, 29 aa, Artificial Sequence
  Cyclic GFR-binding peptide
  MOD_RES (2)..(2): Xaa is C or S
GXEAVSMGEQYNKLTPVGMDDLYLVSIAS

SEQ ID NO: 4743 - protein, 37 aa, Artificial Sequence
  Cyclic GFR-binding peptide
  MOD_RES (33)..(33): Xaa is C or S
ELTRYKKLFIPKKRVIEFYLVSIANLQVQTPRXQVNR

SEQ ID NO: 4744 - protein, 22 aa, Artificial Sequence
  Cyclic GFR-binding peptide
ERHKRLTPVGMDDYYLVSTASL

SEQ ID NO: 4745 - protein, 26 aa, Artificial Sequence
  Cyclic GFR-binding peptide
MRYKKLIKPTKGIFYLISIANLDQSV

SEQ ID NO: 4746 - protein, 29 aa, Artificial Sequence
  Cyclic GFR-binding peptide
VVMNYHYKLIVNSSDDKYLVSIPSLQTPA

SEQ ID NO: 4747 - protein, 26 aa, Artificial Sequence
  Cyclic GFR-binding peptide
KVIMRHKRLIKPTKGIYYLISTASLD

SEQ ID NO: 4748 - protein, 32 aa, Artificial Sequence
  Cyclic GFR-binding peptide
  MOD_RES (30)..(31): Xaa is C or S
KVIMRYKKLIKPTKGIFYLISIANLDQSVXXP

SEQ ID NO: 4749 - protein, 36 aa, Artificial Sequence
  Cyclic GFR-binding peptide
  MOD_RES (31)..(32): Xaa is C or S
EVVMERYKKLVVKDYEDFYLMSIANLETPVXXAKPI

SEQ ID NO: 4750 - protein, 40 aa, Artificial Sequence
  Cyclic GFR-binding peptide
  MOD_RES (1)..(34)..(35): Xaa is C or S
XEAVSMGERHKRLTPVGMDDYYLVSTASLKTPVXXAKGVK

SEQ ID NO: 4751 - protein, 20 aa, Artificial Sequence
  Cyclic GFR-binding peptide
YHYKLIVNNSSDKYLVSIPS

SEQ ID NO: 4752 - protein, 24 aa, Artificial Sequence
  Cyclic GFR-binding peptide
QYNKLIVNSSDDLYLVSIASLKTP

SEQ ID NO: 4753 - protein, 23 aa, Artificial Sequence
  Cyclic GFR-binding peptide
IMYHYKLIKPTKGIKYLISIPSL

SEQ ID NO: 4754 - protein, 33 aa, Artificial Sequence
  Cyclic GFR-binding peptide
  MOD_RES (30)..(31): Xaa is C or S
VVMNQYNKLIVNNSSDLYLVSIASLKTPAXXAK

SEQ ID NO: 4755 - protein, 31 aa, Artificial Sequence
  Cyclic GFR-binding peptide
  MOD_RES (26)..(27): Xaa is C or S
RYKKLIVNSSDDFYLVSIANLKTPAXXPKPV

SEQ ID NO: 4756 - protein, 24 aa, Artificial Sequence
  Cyclic GFR-binding peptide
VMNYHYKLIVNSSDDKYLVSIPSL

SEQ ID NO: 4757 - protein, 36 aa, Artificial Sequence
  Cyclic GFR-binding peptide
  MOD_RES (31)..(32): Xaa is C or S
SKVIMYHYKLIKPTKGIKYLISIPSLDQSVXXPSAS

SEQ ID NO: 4758 - protein, 28 aa, Artificial Sequence
  Cyclic GFR-binding peptide
EVVMEYHYKLVVKDYEDKYLMSIPSLET

SEQ ID NO: 4759 - protein, 32 aa, Artificial Sequence
  Cyclic GFR-binding peptide
ELTRHKRLFIPKKRVIEYYLVSTASLQVQTPR

SEQ ID NO: 4760 - protein, 42 aa, Artificial Sequence
  Cyclic GFR-binding peptide
  MOD_RES (2)..(4)..(36)..(37): Xaa is C or S
HXGXAKVVMNQYNKLIVNNSSDLYLVSIASLKTPAXXAKPVA

SEQ ID NO: 4761 - protein, 27 aa, Artificial Sequence
  Cyclic GFR-binding peptide
  MOD_RES (27)..(27): Xaa is C or S
NRYKKLIVNSSDDFYLVSIANLKTPAX

SEQ ID NO: 4762 - protein, 36 aa, Artificial Sequence
  Cyclic GFR-binding peptide
  MOD_RES (1)..(33)..(34): Xaa is C or S
XAKVVMNRYKKLIVNNSSDFYLVSIANLKTPAXXAK

SEQ ID NO: 4763 - protein, 29 aa, Artificial Sequence
  Cyclic GFR-binding peptide
ALHDELTQYNKLFIPKKRVIELYLVSIAS

SEQ ID NO: 4764 - protein, 28 aa, Artificial Sequence
  Cyclic GFR-binding peptide
  MOD_RES (1)..(1): Xaa is C or S
XSKVIMYHYKLIKPTKGIKYLISIPSLD

SEQ ID NO: 4765 - protein, 28 aa, Artificial Sequence
  Cyclic GFR-binding peptide
RVVMNYHYKLIVNSSDDKYLVSIPSLQT

SEQ ID NO: 4766 - protein, 28 aa, Artificial Sequence
  Cyclic GFR-binding peptide
VMNRYKKLIVNNSSDFYLVSIANLKTPA

SEQ ID NO: 4767 - protein, 35 aa, Artificial Sequence
  Cyclic GFR-binding peptide
  MOD_RES (31)..(31): Xaa is C or S
RVVMNYHYKLIVNSSDDKYLVSIPSLKTPAXTPKT

SEQ ID NO: 4768 - protein, 35 aa, Artificial Sequence
  Cyclic GFR-binding peptide
  MOD_RES (1)..(3)..(34)..(35): Xaa is C or S
XKXSKVIMQYNKLIKPTKGILYLISIASLDQSVXX

SEQ ID NO: 4769 - protein, 31 aa, Artificial Sequence
  Cyclic GFR-binding peptide
  MOD_RES (31)..(31): Xaa is C or S
EVVMDRHKRLVVKENEDYYLMSTASLETPVX

SEQ ID NO: 4770 - protein, 28 aa, Artificial Sequence
  Cyclic GFR-binding peptide
  MOD_RES (26)..(27): Xaa is C or S
YHYKLVVKENEDKYLMSIPSLETPVXXA

SEQ ID NO: 4771 - protein, 28 aa, Artificial Sequence
  Cyclic GFR-binding peptide
KVVMNRYKKLIVNNSSDFYLVSIANLKT

SEQ ID NO: 4772 - protein, 37 aa, Artificial Sequence
  Cyclic GFR-binding peptide
  MOD_RES (2)..(4)..(36)..(37): Xaa is C or S
HXGXARVVMNRHKRLIVNSSDDYYLVSTASLQTPAXX

SEQ ID NO: 4773 - protein, 29 aa, Artificial Sequence
  Cyclic GFR-binding peptide
  MOD_RES (27)..(27): Xaa is C or S
NRYKKLIVNSSDDFYLVSIANLKTPAXTP

SEQ ID NO: 4774 - protein, 25 aa, Artificial Sequence
  Cyclic GFR-binding peptide
VMRYKKLVKPTRGVFYLISIANLDQ

SEQ ID NO: 4775 - protein, 36 aa, Artificial Sequence
  Cyclic GFR-binding peptide
  MOD_RES (2)..(34)..(35): Xaa is C or S
GXGEVVMDYHYKLVVKENEDKYLMSIPSLETPVXXA

SEQ ID NO: 4776 - protein, 30 aa, Artificial Sequence
  Cyclic GFR-binding peptide
VSMGEQYNKLTPVGMDDLYLVSIASLKTPV

SEQ ID NO: 4777 - protein, 31 aa, Artificial Sequence
  Cyclic GFR-binding peptide
  MOD_RES (1)..(3): Xaa is C or S
XKXSKVIMYHYKLIKPTKGIKYLISIPSLDQ

SEQ ID NO: 4778 - protein, 35 aa, Artificial Sequence
  Cyclic GFR-binding peptide
  MOD_RES (30)..(31): Xaa is C or S
VVMNRYKKLIVNSSDDFYLVSIANLKTPAXXPKPV

SEQ ID NO: 4779 - protein, 27 aa, Artificial Sequence
  Cyclic GFR-binding peptide
  MOD_RES (26)..(27): Xaa is C or S
RHKRLVKPKRGVYYLISTASLAQPVXX

SEQ ID NO: 4780 - protein, 35 aa, Artificial Sequence
  Cyclic GFR-binding peptide
  MOD_RES (32)..(33): Xaa is C or S
GEVVMEQYNKLVVKDYEDLYLMSIASLETPVXXAK

SEQ ID NO: 4781 - protein, 29 aa, Artificial Sequence
  Cyclic GFR-binding peptide
  MOD_RES (2)..(2): Xaa is C or S
KXSKVVMYHYKLVKPTRGVKYLISIPSLD

SEQ ID NO: 4782 - protein, 26 aa, Artificial Sequence
  Cyclic GFR-binding peptide
EQYNKLVVKDYEDLYLMSIASLETPV

SEQ ID NO: 4783 - protein, 38 aa, Artificial Sequence
  Cyclic GFR-binding peptide
  MOD_RES (32)..(33): Xaa is C or S
AKVVMNRYKKLIVNNSSDFYLVSIANLKTPAXXAKPVA

SEQ ID NO: 4784 - protein, 32 aa, Artificial Sequence
  Cyclic GFR-binding peptide
  MOD_RES (1)..(1): Xaa is C or S
XGEVVMDRHKRLVVKENEDYYLMSTASLETPV

SEQ ID NO: 4785 - protein, 32 aa, Artificial Sequence
  Cyclic GFR-binding peptide
HDELTRYKKLFIPKKRVIEFYLVSIANLQVQT

SEQ ID NO: 4786 - protein, 37 aa, Artificial Sequence
  Cyclic GFR-binding peptide
  MOD_RES (31)..(32): Xaa is C or S
SKVVMYHYKLVKPTRGVKYLISIPSLDQPVXXPSASA

SEQ ID NO: 4787 - protein, 27 aa, Artificial Sequence
  Cyclic GFR-binding peptide
EAVSMGERHKRLTPVGMDDYYLVSTAS

SEQ ID NO: 4788 - protein, 35 aa, Artificial Sequence
  Cyclic GFR-binding peptide
  MOD_RES (1)..(3)..(35): Xaa is C or S
XGXAKVVMNYHYKLIVNNSSDKYLVSIPSLKTPAX

SEQ ID NO: 4789 - protein, 29 aa, Artificial Sequence
  Cyclic GFR-binding peptide
  MOD_RES (26)..(27): Xaa is C or S
QYNKLVKPTRGVLYLISIASLDQPVXXPS

SEQ ID NO: 4790 - protein, 24 aa, Artificial Sequence
  Cyclic GFR-binding peptide
MRYKKLVKPKRGVFYLISIANLAQ

SEQ ID NO: 4791 - protein, 34 aa, Artificial Sequence
  Cyclic GFR-binding peptide
  MOD_RES (28)..(29): Xaa is C or S
MNQYNKLIVNSSDDLYLVSIASLQTPAXXPKPVT

SEQ ID NO: 4792 - protein, 27 aa, Artificial Sequence
  Cyclic GFR-binding peptide
EVVMEQYNKLVVKDYEDLYLMSIASLE

SEQ ID NO: 4793 - protein, 35 aa, Artificial Sequence
  Cyclic GFR-binding peptide
  MOD_RES (32)..(33): Xaa is C or S
GEVVMDQYNKLVVKENEDLYLMSIASLETPVXXAK

SEQ ID NO: 4794 - protein, 39 aa, Artificial Sequence
  Cyclic GFR-binding peptide
  MOD_RES (2)..(4)..(36): Xaa is C or S
HXGXSRVVMNRHKRLIVNSSDDYYLVSTASLKTPAXTPK

SEQ ID NO: 4795 - protein, 33 aa, Artificial Sequence
  Cyclic GFR-binding peptide
  MOD_RES (28)..(28): Xaa is C or S
MNQYNKLIVNSSDDLYLVSIASLKTPAXTPKTV

SEQ ID NO: 4796 - protein, 20 aa, Artificial Sequence
  Cyclic GFR-binding peptide
YHYKLVVKDYEDKYLMSIPS

SEQ ID NO: 4797 - protein, 38 aa, Artificial Sequence
  Cyclic GFR-binding peptide
  MOD_RES (2)..(4)..(36)..(37): Xaa is C or S
HXGXARVVMNQYNKLIVNSSDDLYLVSIASLQTPAXXP

SEQ ID NO: 4798 - protein, 23 aa, Artificial Sequence
  Cyclic GFR-binding peptide
VMNYHYKLIVNNSSDKYLVSIPS

SEQ ID NO: 4799 - protein, 37 aa, Artificial Sequence
  Cyclic GFR-binding peptide
  MOD_RES (36)..(36): Xaa is C or S
LHDELTQYNKLFIPKKRVIELYLVSIASLQVQTPRXQ

SEQ ID NO: 4800 - protein, 38 aa, Artificial Sequence
  Cyclic GFR-binding peptide
  MOD_RES (36)..(36): Xaa is C or S
LHDELTYHYKLFIPKKRVIEKYLVSIPSLQVQTPRXQV

SEQ ID NO: 4801 - protein, 33 aa, Artificial Sequence
  Cyclic GFR-binding peptide
  MOD_RES (28)..(29): Xaa is C or S
IMRHKRLVKPKRGVYYLISTASLAQPVXXPAAS

SEQ ID NO: 4802 - protein, 26 aa, Artificial Sequence
  Cyclic GFR-binding peptide
  MOD_RES (26)..(26): Xaa is C or S
RYKKLTPVGMDDFYLVSIANLKTPVX

SEQ ID NO: 4803 - protein, 41 aa, Artificial Sequence
  Cyclic GFR-binding peptide
  MOD_RES (2)..(35)..(36): Xaa is C or S
GXEAVSMGERHKRLTPVGMDDYYLVSTASLKTPVXXAKGVK

SEQ ID NO: 4804 - protein, 33 aa, Artificial Sequence
  Cyclic GFR-binding peptide
  MOD_RES (2)..(2): Xaa is C or S
GXGEVVMEQYNKLVVKDYEDLYLMSIASLETPV

SEQ ID NO: 4805 - protein, 36 aa, Artificial Sequence
  Cyclic GFR-binding peptide
  MOD_RES (1)..(32)..(33): Xaa is C or S
XSKVVMRYKKLVKPTRGVFYLISIANLDQPVXXPSA

SEQ ID NO: 4806 - protein, 27 aa, Artificial Sequence
  Cyclic GFR-binding peptide
RVVMNRHKRLIVNSSDDYYLVSTASLK

SEQ ID NO: 4807 - protein, 23 aa, Artificial Sequence
  Cyclic GFR-binding peptide
MRYKKLVKPKRGVFYLISIANLA

SEQ ID NO: 4808 - protein, 29 aa, Artificial Sequence
  Cyclic GFR-binding peptide
VVMNRHKRLIVNSSDDYYLVSTASLQTPA

SEQ ID NO: 4809 - protein, 31 aa, Artificial Sequence
  Cyclic GFR-binding peptide
SRVVMNRHKRLIVNSSDDYYLVSTASLKTPA

SEQ ID NO: 4810 - protein, 30 aa, Artificial Sequence
  Cyclic GFR-binding peptide
  MOD_RES (26)..(27): Xaa is C or S
YHYKLIVNSSDDKYLVSIPSLQTPAXXPKP

SEQ ID NO: 4811 - protein, 32 aa, Artificial Sequence
  Cyclic GFR-binding peptide
  MOD_RES (28)..(29): Xaa is C or S
MNQYNKLIVNNSSDLYLVSIASLKTPAXXAKP

SEQ ID NO: 4812 - protein, 27 aa, Artificial Sequence
  Cyclic GFR-binding peptide
VVMNRHKRLIVNSSDDYYLVSTASLKT

SEQ ID NO: 4813 - protein, 30 aa, Artificial Sequence
  Cyclic GFR-binding peptide
  MOD_RES (2)..(4): Xaa is C or S
HXGXARVVMNQYNKLIVNSSDDLYLVSIAS

SEQ ID NO: 4814 - protein, 34 aa, Artificial Sequence
  Cyclic GFR-binding peptide
  MOD_RES (30)..(31): Xaa is C or S
KVIMQYNKLIKPTKGILYLISIASLDQSVXXPSA

SEQ ID NO: 4815 - protein, 37 aa, Artificial Sequence
  Cyclic GFR-binding peptide
  MOD_RES (2)..(4)..(36)..(37): Xaa is C or S
RXGXGEVVMEYHYKLVVKDYEDKYLMSIPSLETPVXX

SEQ ID NO: 4816 - protein, 33 aa, Artificial Sequence
  Cyclic GFR-binding peptide
  MOD_RES (29)..(30): Xaa is C or S
MGERYKKLTPVGMDDFYLVSIANLKTPVXXAKG

SEQ ID NO: 4817 - protein, 26 aa, Artificial Sequence
  Cyclic GFR-binding peptide
MGERYKKLTPVGMDDFYLVSIANLKT

SEQ ID NO: 4818 - protein, 29 aa, Artificial Sequence
  Cyclic GFR-binding peptide
  MOD_RES (27)..(28): Xaa is C or S
NRYKKLIVNSSDDFYLVSIANLQTPAXXP

SEQ ID NO: 4819 - protein, 33 aa, Artificial Sequence
  Cyclic GFR-binding peptide
  MOD_RES (30)..(31): Xaa is C or S
VVMERYKKLVVKDYEDFYLMSIANLETPVXXAK

SEQ ID NO: 4820 - protein, 35 aa, Artificial Sequence
  Cyclic GFR-binding peptide
  MOD_RES (31)..(31): Xaa is C or S
RVVMNQYNKLIVNSSDDLYLVSIASLKTPAXTPKT

SEQ ID NO: 4821 - protein, 30 aa, Artificial Sequence
  Cyclic GFR-binding peptide
EVVMERYKKLVVKDYEDFYLMSIANLETPV

SEQ ID NO: 4822 - protein, 28 aa, Artificial Sequence
  Cyclic GFR-binding peptide
RVVMNQYNKLIVNSSDDLYLVSIASLQT

SEQ ID NO: 4823 - protein, 24 aa, Artificial Sequence
  Cyclic GFR-binding peptide
VMNRHKRLIVNSSDDYYLVSTASL

SEQ ID NO: 4824 - protein, 39 aa, Artificial Sequence
  Cyclic GFR-binding peptide
  MOD_RES (2)..(34)..(35): Xaa is C or S
GXGEVVMEQYNKLVVKDYEDLYLMSIASLETPVXXAKPI

SEQ ID NO: 4825 - protein, 35 aa, Artificial Sequence
  Cyclic GFR-binding peptide
  MOD_RES (1)..(32)..(33): Xaa is C or S
XSRVIMRHKRLVKPKRGVYYLISTASLAQPVXXPA

SEQ ID NO: 4826 - protein, 32 aa, Artificial Sequence
  Cyclic GFR-binding peptide
  MOD_RES (26)..(27): Xaa is C or S
RHKRLTPVGMDDYYLVSTASLKTPVXXAKGVK

SEQ ID NO: 4827 - protein, 34 aa, Artificial Sequence
  Cyclic GFR-binding peptide
  MOD_RES (2)..(34): Xaa is C or S
GXARVVMNYHYKLIVNSSDDKYLVSIPSLQTPAX

SEQ ID NO: 4828 - protein, 28 aa, Artificial Sequence
  Cyclic GFR-binding peptide
  MOD_RES (1)..(1): Xaa is C or S
XARVVMNRYKKLIVNSSDDFYLVSIANL

SEQ ID NO: 4829 - protein, 31 aa, Artificial Sequence
  Cyclic GFR-binding peptide
  MOD_RES (1)..(1): Xaa is C or S
XSRVIMRHKRLVKPKRGVYYLISTASLAQPV

SEQ ID NO: 4830 - protein, 35 aa, Artificial Sequence
  Cyclic GFR-binding peptide
  MOD_RES (1)..(3): Xaa is C or S
XGXEAVSMGERYKKLTPVGMDDFYLVSIANLKTPV

SEQ ID NO: 4831 - protein, 26 aa, Artificial Sequence
  Cyclic GFR-binding peptide
VMNQYNKLIVNNSSDLYLVSIASLKT

SEQ ID NO: 4832 - protein, 36 aa, Artificial Sequence
  Cyclic GFR-binding peptide
  MOD_RES (31)..(32): Xaa is C or S
SKVIMQYNKLIKPTKGILYLISIASLDQSVXXPSAS

SEQ ID NO: 4833 - protein, 30 aa, Artificial Sequence
  Cyclic GFR-binding peptide
  MOD_RES (29)..(30): Xaa is C or S
VMERYKKLVVKDYEDFYLMSIANLETPVXX

SEQ ID NO: 4834 - protein, 37 aa, Artificial Sequence
  Cyclic GFR-binding peptide
  MOD_RES (31)..(31): Xaa is C or S
RVVMNRHKRLIVNSSDDYYLVSTASLKTPAXTPKTVH

SEQ ID NO: 4835 - protein, 35 aa, Artificial Sequence
  Cyclic GFR-binding peptide
  MOD_RES (32)..(33): Xaa is C or S
ARVVMNRYKKLIVNSSDDFYLVSIANLQTPAXXPK

SEQ ID NO: 4836 - protein, 32 aa, Artificial Sequence
  Cyclic GFR-binding peptide
  MOD_RES (31)..(32): Xaa is C or S
SKVIMRYKKLIKPTKGIFYLISIANLDQSVXX

SEQ ID NO: 4837 - protein, 36 aa, Artificial Sequence
  Cyclic GFR-binding peptide
  MOD_RES (1)..(3)..(36): Xaa is C or S
XGXEAVSMGERHKRLTPVGMDDYYLVSTASLKTPVX

SEQ ID NO: 4838 - protein, 28 aa, Artificial Sequence
  Cyclic GFR-binding peptide
  MOD_RES (27)..(28): Xaa is C or S
MQYNKLVKPTRGVLYLISIASLDQPVXX

SEQ ID NO: 4839 - protein, 28 aa, Artificial Sequence
  Cyclic GFR-binding peptide
HDELTRYKKLFIPKKRVIEFYLVSIANL

SEQ ID NO: 4840 - protein, 26 aa, Artificial Sequence
  Cyclic GFR-binding peptide
SRVVMNYHYKLIVNSSDDKYLVSIPS

SEQ ID NO: 4841 - protein, 33 aa, Artificial Sequence
  Cyclic GFR-binding peptide
  MOD_RES (1)..(3): Xaa is C or S
XKXSKVVMYHYKLVKPTRGVKYLISIPSLDQPV

SEQ ID NO: 4842 - protein, 22 aa, Artificial Sequence
  Cyclic GFR-binding peptide
QYNKLIVNSSDDLYLVSIASLQ

SEQ ID NO: 4843 - protein, 41 aa, Artificial Sequence
  Cyclic GFR-binding peptide
  MOD_RES (2)..(4)..(36)..(37): Xaa is C or S
HXGXSRVVMNYHYKLIVNSSDDKYLVSIPSLKTPAXXPKPV

SEQ ID NO: 4844 - protein, 31 aa, Artificial Sequence
  Cyclic GFR-binding peptide
  MOD_RES (30)..(31): Xaa is C or S
VVMNYHYKLIVNSSDDKYLVSIPSLKTPAXX

SEQ ID NO: 4845 - protein, 26 aa, Artificial Sequence
  Cyclic GFR-binding peptide
SKVVMYHYKLVKPTRGVKYLISIPSL

SEQ ID NO: 4846 - protein, 26 aa, Artificial Sequence
  Cyclic GFR-binding peptide
ARVVMNYHYKLIVNSSDDKYLVSIPS

SEQ ID NO: 4847 - protein, 22 aa, Artificial Sequence
  Cyclic GFR-binding peptide
MNQYNKLIVNSSDDLYLVSIAS

SEQ ID NO: 4848 - protein, 27 aa, Artificial Sequence
  Cyclic GFR-binding peptide
  MOD_RES (26)..(27): Xaa is C or S
QYNKLIVNSSDDLYLVSIASLQTPAXX

SEQ ID NO: 4849 - protein, 31 aa, Artificial Sequence
  Cyclic GFR-binding peptide
  MOD_RES (26)..(27): Xaa is C or S
YHYKLIVNSSDDKYLVSIPSLQTPAXXPKPV

SEQ ID NO: 4850 - protein, 37 aa, Artificial Sequence
  Cyclic GFR-binding peptide
  MOD_RES (2)..(34)..(35): Xaa is C or S
GXARVVMNRHKRLIVNSSDDYYLVSTASLQTPAXXPK

SEQ ID NO: 4851 - protein, 34 aa, Artificial Sequence
  Cyclic GFR-binding peptide
  MOD_RES (33)..(34): Xaa is C or S
EAVSMGERHKRLTPVGMDDYYLVSTASLKTPVXX

SEQ ID NO: 4852 - protein, 28 aa, Artificial Sequence
  Cyclic GFR-binding peptide
  MOD_RES (26)..(27): Xaa is C or S
YHYKLIKPTKGIKYLISIPSLDQSVXXP

SEQ ID NO: 4853 - protein, 40 aa, Artificial Sequence
  Cyclic GFR-binding peptide
  MOD_RES (2)..(4)..(36): Xaa is C or S
HXGXSRVVMNRHKRLIVNSSDDYYLVSTASLKTPAXTPKT

SEQ ID NO: 4854 - protein, 24 aa, Artificial Sequence
  Cyclic GFR-binding peptide
TYHYKLFIPKKRVIEKYLVSIPSL

SEQ ID NO: 4855 - protein, 30 aa, Artificial Sequence
  Cyclic GFR-binding peptide
  MOD_RES (26)..(27): Xaa is C or S
RYKKLVKPKRGVFYLISIANLAQPVXXPAA

SEQ ID NO: 4856 - protein, 37 aa, Artificial Sequence
  Cyclic GFR-binding peptide
  MOD_RES (32)..(33): Xaa is C or S
ARVVMNQYNKLIVNSSDDLYLVSIASLQTPAXXPKPV

SEQ ID NO: 4857 - protein, 27 aa, Artificial Sequence
  Cyclic GFR-binding peptide
VMEQYNKLVVKDYEDLYLMSIASLETP

SEQ ID NO: 4858 - protein, 37 aa, Artificial Sequence
  Cyclic GFR-binding peptide
  MOD_RES (32)..(33): Xaa is C or S
SRVVMNRYKKLIVNSSDDFYLVSIANLKTPAXXPKPV

SEQ ID NO: 4859 - protein, 30 aa, Artificial Sequence
  Cyclic GFR-binding peptide
  MOD_RES (30)..(30): Xaa is C or S
KVIMRYKKLIKPTKGIFYLISIANLDQSVX

SEQ ID NO: 4860 - protein, 33 aa, Artificial Sequence
  Cyclic GFR-binding peptide
  MOD_RES (30)..(31): Xaa is C or S
RVIMQYNKLVKPKRGVLYLISIASLAQPVXXPA

SEQ ID NO: 4861 - protein, 32 aa, Artificial Sequence
  Cyclic GFR-binding peptide
  MOD_RES (2)..(2): Xaa is C or S
GXSRVVMNRHKRLIVNSSDDYYLVSTASLKTP

SEQ ID NO: 4862 - protein, 33 aa, Artificial Sequence
  Cyclic GFR-binding peptide
  MOD_RES (30)..(31): Xaa is C or S
KVIMRHKRLIKPTKGIYYLISTASLDQSVXXPS

SEQ ID NO: 4863 - protein, 25 aa, Artificial Sequence
  Cyclic GFR-binding peptide
TYHYKLFIPKKRVIEKYLVSIPSLQ

SEQ ID NO: 4864 - protein, 27 aa, Artificial Sequence
  Cyclic GFR-binding peptide
  MOD_RES (26)..(27): Xaa is C or S
YHYKLVVKENEDKYLMSIPSLETPVXX

SEQ ID NO: 4865 - protein, 38 aa, Artificial Sequence
  Cyclic GFR-binding peptide
  MOD_RES (2)..(34)..(35): Xaa is C or S
GXGEVVMERYKKLVVKDYEDFYLMSIANLETPVXXAKP

SEQ ID NO: 4866 - protein, 32 aa, Artificial Sequence
  Cyclic GFR-binding peptide
  MOD_RES (1)..(1): Xaa is C or S
XAKVVMNRYKKLIVNNSSDFYLVSIANLKTPA

SEQ ID NO: 4867 - protein, 27 aa, Artificial Sequence
  Cyclic GFR-binding peptide
  MOD_RES (26)..(27): Xaa is C or S
RYKKLIVNSSDDFYLVSIANLQTPAXX

SEQ ID NO: 4868 - protein, 31 aa, Artificial Sequence
  Cyclic GFR-binding peptide
  MOD_RES (30)..(31): Xaa is C or S
VVMNRHKRLIVNSSDDYYLVSTASLKTPAXX

SEQ ID NO: 4869 - protein, 24 aa, Artificial Sequence
  Cyclic GFR-binding peptide
IMRYKKLIKPTKGIFYLISIANLD

SEQ ID NO: 4870 - protein, 28 aa, Artificial Sequence
  Cyclic GFR-binding peptide
  MOD_RES (26)..(27): Xaa is C or S
QYNKLTPVGMDDLYLVSIASLKTPVXXA

SEQ ID NO: 4871 - protein, 27 aa, Artificial Sequence
  Cyclic GFR-binding peptide
VVMNYHYKLIVNSSDDKYLVSIPSLKT

SEQ ID NO: 4872 - protein, 37 aa, Artificial Sequence
  Cyclic GFR-binding peptide
  MOD_RES (31)..(32): Xaa is C or S
SKVIMQYNKLIKPTKGILYLISIASLDQSVXXPSASA

SEQ ID NO: 4873 - protein, 32 aa, Artificial Sequence
  Cyclic GFR-binding peptide
  MOD_RES (1)..(32): Xaa is C or S
XSRVIMYHYKLVKPKRGVKYLISIPSLAQPVX

SEQ ID NO: 4874 - protein, 29 aa, Artificial Sequence
  Cyclic GFR-binding peptide
  MOD_RES (29)..(29): Xaa is C or S
VMNRYKKLIVNNSSDFYLVSIANLKTPAX

SEQ ID NO: 4875 - protein, 29 aa, Artificial Sequence
  Cyclic GFR-binding peptide
  MOD_RES (27)..(28): Xaa is C or S
MRYKKLVKPTRGVFYLISIANLDQPVXXP

SEQ ID NO: 4876 - protein, 34 aa, Artificial Sequence
  Cyclic GFR-binding peptide
  MOD_RES (28)..(29): Xaa is C or S
MNYHYKLIVNSSDDKYLVSIPSLKTPAXXPKPVY

SEQ ID NO: 4877 - protein, 30 aa, Artificial Sequence
  Cyclic GFR-binding peptide
  MOD_RES (30)..(30): Xaa is C or S
VVMNYHYKLIVNSSDDKYLVSIPSLQTPAX

SEQ ID NO: 4878 - protein, 42 aa, Artificial Sequence
  Cyclic GFR-binding peptide
  MOD_RES (2)..(39): Xaa is C or S
KXALHDELTRHKRLFIPKKRVIEYYLVSTASLQVQTPRXQVN

SEQ ID NO: 4879 - protein, 34 aa, Artificial Sequence
  Cyclic GFR-binding peptide
  MOD_RES (28)..(29): Xaa is C or S
IMRYKKLIKPTKGIFYLISIANLDQSVXXPSASA

SEQ ID NO: 4880 - protein, 31 aa, Artificial Sequence
  Cyclic GFR-binding peptide
  MOD_RES (2)..(4): Xaa is C or S
RXGXGEVVMDQYNKLVVKENEDLYLMSIASL

SEQ ID NO: 4881 - protein, 39 aa, Artificial Sequence
  Cyclic GFR-binding peptide
  MOD_RES (1)..(33)..(34): Xaa is C or S
XGEVVMDRYKKLVVKENEDFYLMSIANLETPVXXAKPIK

SEQ ID NO: 4882 - protein, 36 aa, Artificial Sequence
  Cyclic GFR-binding peptide
  MOD_RES (2)..(4)..(35)..(36): Xaa is C or S
SXKXSRVIMRYKKLVKPKRGVFYLISIANLAQPVXX

SEQ ID NO: 4883 - protein, 30 aa, Artificial Sequence
  Cyclic GFR-binding peptide
  MOD_RES (30)..(30): Xaa is C or S
VVMNRHKRLIVNSSDDYYLVSTASLQTPAX

SEQ ID NO: 4884 - protein, 29 aa, Artificial Sequence
  Cyclic GFR-binding peptide
  MOD_RES (2)..(2): Xaa is C or S
KXSRVIMRHKRLVKPKRGVYYLISTASLA

SEQ ID NO: 4885 - protein, 21 aa, Artificial Sequence
  Cyclic GFR-binding peptide
MRYKKLIKPTKGIFYLISIAN

SEQ ID NO: 4886 - protein, 33 aa, Artificial Sequence
  Cyclic GFR-binding peptide
  MOD_RES (30)..(31): Xaa is C or S
KVIMYHYKLIKPTKGIKYLISIPSLDQSVXXPS

SEQ ID NO: 4887 - protein, 30 aa, Artificial Sequence
  Cyclic GFR-binding peptide
AVSMGERYKKLTPVGMDDFYLVSIANLKTP

SEQ ID NO: 4888 - protein, 31 aa, Artificial Sequence
  Cyclic GFR-binding peptide
  MOD_RES (31)..(31): Xaa is C or S
SKVVMQYNKLVKPTRGVLYLISIASLDQPVX

SEQ ID NO: 4889 - protein, 38 aa, Artificial Sequence
  Cyclic GFR-binding peptide
  MOD_RES (32)..(33): Xaa is C or S
AKVVMNQYNKLIVNNSSDLYLVSIASLKTPAXXAKPVA

SEQ ID NO: 4890 - protein, 21 aa, Artificial Sequence
  Cyclic GFR-binding peptide
DQYNKLVVKENEDLYLMSIAS

SEQ ID NO: 4891 - protein, 31 aa, Artificial Sequence
  Cyclic GFR-binding peptide
  MOD_RES (28)..(29): Xaa is C or S
MNQYNKLIVNSSDDLYLVSIASLKTPAXXPK

SEQ ID NO: 4892 - protein, 29 aa, Artificial Sequence
  Cyclic GFR-binding peptide
  MOD_RES (2)..(2): Xaa is C or S
GXARVVMNQYNKLIVNSSDDLYLVSIASL

SEQ ID NO: 4893 - protein, 36 aa, Artificial Sequence
  Cyclic GFR-binding peptide
  MOD_RES (2)..(34)..(35): Xaa is C or S
GXGEVVMDRYKKLVVKENEDFYLMSIANLETPVXXA

SEQ ID NO: 4894 - protein, 28 aa, Artificial Sequence
  Cyclic GFR-binding peptide
  MOD_RES (1)..(1): Xaa is C or S
XSKVVMQYNKLVKPTRGVLYLISIASLD

SEQ ID NO: 4895 - protein, 36 aa, Artificial Sequence
  Cyclic GFR-binding peptide
  MOD_RES (1)..(33)..(34): Xaa is C or S
XGEVVMERHKRLVVKDYEDYYLMSTASLETPVXXAK

SEQ ID NO: 4896 - protein, 38 aa, Artificial Sequence
  Cyclic GFR-binding peptide
  MOD_RES (2)..(4)..(36)..(37): Xaa is C or S
RXGXGEVVMDQYNKLVVKENEDLYLMSIASLETPVXXA

SEQ ID NO: 4897 - protein, 28 aa, Artificial Sequence
  Cyclic GFR-binding peptide
  MOD_RES (2)..(2): Xaa is C or S
GXGEVVMDRHKRLVVKENEDYYLMSTAS

SEQ ID NO: 4898 - protein, 35 aa, Artificial Sequence
  Cyclic GFR-binding peptide
  MOD_RES (1)..(3)..(35): Xaa is C or S
XGXARVVMNYHYKLIVNSSDDKYLVSIPSLQTPAX

SEQ ID NO: 4899 - protein, 34 aa, Artificial Sequence
  Cyclic GFR-binding peptide
  MOD_RES (2)..(34): Xaa is C or S
GXSRVVMNRYKKLIVNSSDDFYLVSIANLKTPAX

SEQ ID NO: 4900 - protein, 22 aa, Artificial Sequence
  Cyclic GFR-binding peptide
QYNKLIKPTKGILYLISIASLD

SEQ ID NO: 4901 - protein, 35 aa, Artificial Sequence
  Cyclic GFR-binding peptide
  MOD_RES (2)..(4): Xaa is C or S
HXGXSRVVMNYHYKLIVNSSDDKYLVSIPSLKTPA

SEQ ID NO: 4902 - protein, 30 aa, Artificial Sequence
  Cyclic GFR-binding peptide
  MOD_RES (2)..(4): Xaa is C or S
HXGXAKVVMNRHKRLIVNNSSDYYLVSTAS

SEQ ID NO: 4903 - protein, 27 aa, Artificial Sequence
  Cyclic GFR-binding peptide
  MOD_RES (1)..(1): Xaa is C or S
XSRVIMRYKKLVKPKRGVFYLISIANL

SEQ ID NO: 4904 - protein, 24 aa, Artificial Sequence
  Cyclic GFR-binding peptide
VIMYHYKLVKPKRGVKYLISIPSL

SEQ ID NO: 4905 - protein, 41 aa, Artificial Sequence
  Cyclic GFR-binding peptide
  MOD_RES (2)..(4)..(36): Xaa is C or S
HXGXSRVVMNYHYKLIVNSSDDKYLVSIPSLKTPAXTPKTV

SEQ ID NO: 4906 - protein, 22 aa, Artificial Sequence
  Cyclic GFR-binding peptide
GERYKKLTPVGMDDFYLVSIAN

SEQ ID NO: 4907 - protein, 40 aa, Artificial Sequence
  Cyclic GFR-binding peptide
  MOD_RES (2)..(39): Xaa is C or S
KXALHDELTRYKKLFIPKKRVIEFYLVSIANLQVQTPRXQ

SEQ ID NO: 4908 - protein, 30 aa, Artificial Sequence
  Cyclic GFR-binding peptide
  MOD_RES (28)..(28): Xaa is C or S
MNYHYKLIVNSSDDKYLVSIPSLKTPAXTP

SEQ ID NO: 4909 - protein, 31 aa, Artificial Sequence
  Cyclic GFR-binding peptide
  MOD_RES (2)..(4): Xaa is C or S
RXGXGEVVMERHKRLVVKDYEDYYLMSTASL

SEQ ID NO: 4910 - protein, 34 aa, Artificial Sequence
  Cyclic GFR-binding peptide
  MOD_RES (32)..(33): Xaa is C or S
AVSMGERYKKLTPVGMDDFYLVSIANLKTPVXXA

SEQ ID NO: 4911 - protein, 26 aa, Artificial Sequence
  Cyclic GFR-binding peptide
VIMYHYKLVKPKRGVKYLISIPSLAQ

SEQ ID NO: 4912 - protein, 36 aa, Artificial Sequence
  Cyclic GFR-binding peptide
  MOD_RES (1)..(33)..(34): Xaa is C or S
XGEVVMDRHKRLVVKENEDYYLMSTASLETPVXXAK

SEQ ID NO: 4913 - protein, 32 aa, Artificial Sequence
  Cyclic GFR-binding peptide
  MOD_RES (28)..(29): Xaa is C or S
MDRHKRLVVKENEDYYLMSTASLETPVXXAKP

SEQ ID NO: 4914 - protein, 30 aa, Artificial Sequence
  Cyclic GFR-binding peptide
  MOD_RES (2)..(2): Xaa is C or S
GXEAVSMGERYKKLTPVGMDDFYLVSIANL

SEQ ID NO: 4915 - protein, 32 aa, Artificial Sequence
  Cyclic GFR-binding peptide
  MOD_RES (29)..(30): Xaa is C or S
VMNQYNKLIVNSSDDLYLVSIASLQTPAXXPK

SEQ ID NO: 4916 - protein, 29 aa, Artificial Sequence
  Cyclic GFR-binding peptide
LTQYNKLFIPKKRVIELYLVSIASLQVQT

SEQ ID NO: 4917 - protein, 37 aa, Artificial Sequence
  Cyclic GFR-binding peptide
  MOD_RES (1)..(32)..(33): Xaa is C or S
XSKVIMRHKRLIKPTKGIYYLISTASLDQSVXXPSAS

SEQ ID NO: 4918 - protein, 31 aa, Artificial Sequence
  Cyclic GFR-binding peptide
  MOD_RES (28)..(29): Xaa is C or S
IMRYKKLVKPKRGVFYLISIANLAQPVXXPA

SEQ ID NO: 4919 - protein, 32 aa, Artificial Sequence
  Cyclic GFR-binding peptide
  MOD_RES (31)..(32): Xaa is C or S
SRVIMRYKKLVKPKRGVFYLISIANLAQPVXX

SEQ ID NO: 4920 - protein, 32 aa, Artificial Sequence
  Cyclic GFR-binding peptide
  MOD_RES (1)..(3): Xaa is C or S
XKXSRVIMRYKKLVKPKRGVFYLISIANLAQP

SEQ ID NO: 4921 - protein, 30 aa, Artificial Sequence
  Cyclic GFR-binding peptide
RVVMNQYNKLIVNSSDDLYLVSIASLQTPA

SEQ ID NO: 4922 - protein, 35 aa, Artificial Sequence
  Cyclic GFR-binding peptide
  MOD_RES (2)..(34)..(35): Xaa is C or S
GXGEVVMDYHYKLVVKENEDKYLMSIPSLETPVXX

SEQ ID NO: 4923 - protein, 31 aa, Artificial Sequence
  Cyclic GFR-binding peptide
  MOD_RES (26)..(27): Xaa is C or S
QYNKLVKPKRGVLYLISIASLAQPVXXPAAS

SEQ ID NO: 4924 - protein, 35 aa, Artificial Sequence
  Cyclic GFR-binding peptide
  MOD_RES (30)..(30): Xaa is C or S
VVMNRHKRLIVNSSDDYYLVSTASLKTPAXTPKTV

SEQ ID NO: 4925 - protein, 34 aa, Artificial Sequence
  Cyclic GFR-binding peptide
  MOD_RES (28)..(29): Xaa is C or S
VMRYKKLVKPTRGVFYLISIANLDQPVXXPSASA

SEQ ID NO: 4926 - protein, 34 aa, Artificial Sequence
  Cyclic GFR-binding peptide
  MOD_RES (1)..(3)..(34): Xaa is C or S
XKXSKVVMYHYKLVKPTRGVKYLISIPSLDQPVX

SEQ ID NO: 4927 - protein, 38 aa, Artificial Sequence
  Cyclic GFR-binding peptide
  MOD_RES (1)..(34)..(35): Xaa is C or S
XEAVSMGERHKRLTPVGMDDYYLVSTASLKTPVXXAKG

SEQ ID NO: 4928 - protein, 32 aa, Artificial Sequence
  Cyclic GFR-binding peptide
  MOD_RES (29)..(30): Xaa is C or S
VMDRYKKLVVKENEDFYLMSIANLETPVXXAK

SEQ ID NO: 4929 - protein, 29 aa, Artificial Sequence
  Cyclic GFR-binding peptide
  MOD_RES (1)..(3): Xaa is C or S
XGXGEVVMDQYNKLVVKENEDLYLMSIAS

SEQ ID NO: 4930 - protein, 32 aa, Artificial Sequence
  Cyclic GFR-binding peptide
  MOD_RES (1)..(1): Xaa is C or S
XGEVVMERHKRLVVKDYEDYYLMSTASLETPV

SEQ ID NO: 4931 - protein, 30 aa, Artificial Sequence
  Cyclic GFR-binding peptide
HDELTRYKKLFIPKKRVIEFYLVSIANLQV

SEQ ID NO: 4932 - protein, 28 aa, Artificial Sequence
  Cyclic GFR-binding peptide
VIMQYNKLVKPKRGVLYLISIASLAQPV

SEQ ID NO: 4933 - protein, 22 aa, Artificial Sequence
  Cyclic GFR-binding peptide
MERYKKLVVKDYEDFYLMSIAN

SEQ ID NO: 4934 - protein, 33 aa, Artificial Sequence
  Cyclic GFR-binding peptide
  MOD_RES (30)..(31): Xaa is C or S
VVMNYHYKLIVNSSDDKYLVSIPSLQTPAXXPK

SEQ ID NO: 4935 - protein, 32 aa, Artificial Sequence
  Cyclic GFR-binding peptide
  MOD_RES (2)..(2): Xaa is C or S
GXAKVVMNQYNKLIVNNSSDLYLVSIASLKTP

SEQ ID NO: 4936 - protein, 31 aa, Artificial Sequence
  Cyclic GFR-binding peptide
  MOD_RES (1)..(1): Xaa is C or S
XAKVVMNYHYKLIVNNSSDKYLVSIPSLKTP

SEQ ID NO: 4937 - protein, 28 aa, Artificial Sequence
  Cyclic GFR-binding peptide
VVMNQYNKLIVNNSSDLYLVSIASLKTP

SEQ ID NO: 4938 - protein, 29 aa, Artificial Sequence
  Cyclic GFR-binding peptide
  MOD_RES (1)..(3): Xaa is C or S
XGXGEVVMEYHYKLVVKDYEDKYLMSIPS

SEQ ID NO: 4939 - protein, 40 aa, Artificial Sequence
  Cyclic GFR-binding peptide
  MOD_RES (2)..(4): Xaa is C or S
EXKXALHDELTRYKKLFIPKKRVIEFYLVSIANLQVQTPR

SEQ ID NO: 4940 - protein, 38 aa, Artificial Sequence
  Cyclic GFR-binding peptide
  MOD_RES (1)..(32)..(33): Xaa is C or S
XSKVVMYHYKLVKPTRGVKYLISIPSLDQPVXXPSASA

SEQ ID NO: 4941 - protein, 32 aa, Artificial Sequence
  Cyclic GFR-binding peptide
  MOD_RES (27)..(28): Xaa is C or S
NYHYKLIVNSSDDKYLVSIPSLQTPAXXPKPV

SEQ ID NO: 4942 - protein, 24 aa, Artificial Sequence
  Cyclic GFR-binding peptide
VMQYNKLVKPTRGVLYLISIASLD

SEQ ID NO: 4943 - protein, 22 aa, Artificial Sequence
  Cyclic GFR-binding peptide
RYKKLIVNSSDDFYLVSIANLQ

SEQ ID NO: 4944 - protein, 26 aa, Artificial Sequence
  Cyclic GFR-binding peptide
VIMRHKRLVKPKRGVYYLISTASLAQ

SEQ ID NO: 4945 - protein, 26 aa, Artificial Sequence
  Cyclic GFR-binding peptide
EVVMDQYNKLVVKENEDLYLMSIASL

SEQ ID NO: 4946 - protein, 36 aa, Artificial Sequence
  Cyclic GFR-binding peptide
  MOD_RES (2)..(33)..(34): Xaa is C or S
KXSKVVMRYKKLVKPTRGVFYLISIANLDQPVXXPS

SEQ ID NO: 4947 - protein, 37 aa, Artificial Sequence
  Cyclic GFR-binding peptide
  MOD_RES (1)..(32)..(33): Xaa is C or S
XSKVVMYHYKLVKPTRGVKYLISIPSLDQPVXXPSAS

SEQ ID NO: 4948 - protein, 25 aa, Artificial Sequence
  Cyclic GFR-binding peptide
VMERYKKLVVKDYEDFYLMSIANLE

SEQ ID NO: 4949 - protein, 32 aa, Artificial Sequence
  Cyclic GFR-binding peptide
EAVSMGEQYNKLTPVGMDDLYLVSIASLKTPV

SEQ ID NO: 4950 - protein, 31 aa, Artificial Sequence
  Cyclic GFR-binding peptide
  MOD_RES (2)..(4): Xaa is C or S
SXKXSKVIMYHYKLIKPTKGIKYLISIPSLD

SEQ ID NO: 4951 - protein, 23 aa, Artificial Sequence
  Cyclic GFR-binding peptide
YHYKLFIPKKRVIEKYLVSIPSL

SEQ ID NO: 4952 - protein, 24 aa, Artificial Sequence
  Cyclic GFR-binding peptide
VIMRHKRLVKPKRGVYYLISTASL

SEQ ID NO: 4953 - protein, 38 aa, Artificial Sequence
  Cyclic GFR-binding peptide
  MOD_RES (1)..(38): Xaa is C or S
XALHDELTQYNKLFIPKKRVIELYLVSIASLQVQTPRX

SEQ ID NO: 4954 - protein, 25 aa, Artificial Sequence
  Cyclic GFR-binding peptide
VMNYHYKLIVNSSDDKYLVSIPSLQ

SEQ ID NO: 4955 - protein, 35 aa, Artificial Sequence
  Cyclic GFR-binding peptide
  MOD_RES (1)..(3)..(35): Xaa is C or S
XGXAKVVMNQYNKLIVNNSSDLYLVSIASLKTPAX

SEQ ID NO: 4956 - protein, 28 aa, Artificial Sequence
  Cyclic GFR-binding peptide
EVVMEQYNKLVVKDYEDLYLMSIASLET

SEQ ID NO: 4957 - protein, 26 aa, Artificial Sequence
  Cyclic GFR-binding peptide
VVMNYHYKLIVNSSDDKYLVSIPSLQ

SEQ ID NO: 4958 - protein, 38 aa, Artificial Sequence
  Cyclic GFR-binding peptide
  MOD_RES (1)..(3)..(35)..(36): Xaa is C or S
XGXSRVVMNRHKRLIVNSSDDYYLVSTASLKTPAXXPK

SEQ ID NO: 4959 - protein, 35 aa, Artificial Sequence
  Cyclic GFR-binding peptide
  MOD_RES (1)..(32)..(33): Xaa is C or S
XSKVVMRYKKLVKPTRGVFYLISIANLDQPVXXPS

SEQ ID NO: 4960 - protein, 25 aa, Artificial Sequence
  Cyclic GFR-binding peptide
VMNRHKRLIVNSSDDYYLVSTASLQ

SEQ ID NO: 4961 - protein, 36 aa, Artificial Sequence
  Cyclic GFR-binding peptide
  MOD_RES (32)..(33): Xaa is C or S
SRVVMNYHYKLIVNSSDDKYLVSIPSLKTPAXXPKP

SEQ ID NO: 4962 - protein, 41 aa, Artificial Sequence
  Cyclic GFR-binding peptide
  MOD_RES (1)..(3)..(35): Xaa is C or S
XGXSRVVMNYHYKLIVNSSDDKYLVSIPSLKTPAXTPKTVH

SEQ ID NO: 4963 - protein, 38 aa, Artificial Sequence
  Cyclic GFR-binding peptide
  MOD_RES (1)..(33)..(34): Xaa is C or S
XGEVVMDYHYKLVVKENEDKYLMSIPSLETPVXXAKPI

SEQ ID NO: 4964 - protein, 33 aa, Artificial Sequence
  Cyclic GFR-binding peptide
  MOD_RES (28)..(29): Xaa is C or S
MNRYKKLIVNSSDDFYLVSIANLKTPAXXPKPV

SEQ ID NO: 4965 - protein, 26 aa, Artificial Sequence
  Cyclic GFR-binding peptide
  MOD_RES (26)..(26): Xaa is C or S
RHKRLVKPTRGVYYLISTASLDQPVX

SEQ ID NO: 4966 - protein, 36 aa, Artificial Sequence
  Cyclic GFR-binding peptide
  MOD_RES (33)..(34): Xaa is C or S
EAVSMGERYKKLTPVGMDDFYLVSIANLKTPVXXAK

SEQ ID NO: 4967 - protein, 24 aa, Artificial Sequence
  Cyclic GFR-binding peptide
MQYNKLIKPTKGILYLISIASLDQ

SEQ ID NO: 4968 - protein, 33 aa, Artificial Sequence
  Cyclic GFR-binding peptide
  MOD_RES (30)..(31): Xaa is C or S
VVMNQYNKLIVNSSDDLYLVSIASLKTPAXXPK

SEQ ID NO: 4969 - protein, 31 aa, Artificial Sequence
  Cyclic GFR-binding peptide
  MOD_RES (1)..(1): Xaa is C or S
XAKVVMNRYKKLIVNNSSDFYLVSIANLKTP

SEQ ID NO: 4970 - protein, 37 aa, Artificial Sequence
  Cyclic GFR-binding peptide
  MOD_RES (2)..(34)..(35): Xaa is C or S
GXGEVVMDRHKRLVVKENEDYYLMSTASLETPVXXAK

SEQ ID NO: 4971 - protein, 31 aa, Artificial Sequence
  Cyclic GFR-binding peptide
  MOD_RES (1)..(1): Xaa is C or S
XSKVIMYHYKLIKPTKGIKYLISIPSLDQSV

SEQ ID NO: 4972 - protein, 39 aa, Artificial Sequence
  Cyclic GFR-binding peptide
  MOD_RES (37)..(37): Xaa is C or S
ALHDELTQYNKLFIPKKRVIELYLVSIASLQVQTPRXQV

SEQ ID NO: 4973 - protein, 21 aa, Artificial Sequence
  Cyclic GFR-binding peptide
YHYKLIVNSSDDKYLVSIPSL

SEQ ID NO: 4974 - protein, 26 aa, Artificial Sequence
  Cyclic GFR-binding peptide
RVVMNYHYKLIVNSSDDKYLVSIPSL

SEQ ID NO: 4975 - protein, 26 aa, Artificial Sequence
  Cyclic GFR-binding peptide
  MOD_RES (26)..(26): Xaa is C or S
RYKKLIKPTKGIFYLISIANLDQSVX

SEQ ID NO: 4976 - protein, 26 aa, Artificial Sequence
  Cyclic GFR-binding peptide
  MOD_RES (26)..(26): Xaa is C or S
QYNKLTPVGMDDLYLVSIASLKTPVX

SEQ ID NO: 4977 - protein, 32 aa, Artificial Sequence
  Cyclic GFR-binding peptide
  MOD_RES (28)..(29): Xaa is C or S
VMRYKKLVKPTRGVFYLISIANLDQPVXXPSA

SEQ ID NO: 4978 - protein, 39 aa, Artificial Sequence
  Cyclic GFR-binding peptide
  MOD_RES (37)..(37): Xaa is C or S
ALHDELTRHKRLFIPKKRVIEYYLVSTASLQVQTPRXQV

SEQ ID NO: 4979 - protein, 26 aa, Artificial Sequence
  Cyclic GFR-binding peptide
MYHYKLVKPKRGVKYLISIPSLAQPV

SEQ ID NO: 4980 - protein, 30 aa, Artificial Sequence
  Cyclic GFR-binding peptide
  MOD_RES (1)..(3): Xaa is C or S
XGXAKVVMNRYKKLIVNNSSDFYLVSIANL

SEQ ID NO: 4981 - protein, 39 aa, Artificial Sequence
  Cyclic GFR-binding peptide
  MOD_RES (36)..(36): Xaa is C or S
LHDELTRHKRLFIPKKRVIEYYLVSTASLQVQTPRXQVN

SEQ ID NO: 4982 - protein, 25 aa, Artificial Sequence
  Cyclic GFR-binding peptide
MERHKRLVVKDYEDYYLMSTASLET

SEQ ID NO: 4983 - protein, 26 aa, Artificial Sequence
  Cyclic GFR-binding peptide
GEVVMEYHYKLVVKDYEDKYLMSIPS

SEQ ID NO: 4984 - protein, 34 aa, Artificial Sequence
  Cyclic GFR-binding peptide
  MOD_RES (28)..(29): Xaa is C or S
MNRHKRLIVNSSDDYYLVSTASLQTPAXXPKPVT

SEQ ID NO: 4985 - protein, 34 aa, Artificial Sequence
  Cyclic GFR-binding peptide
  MOD_RES (1)..(3): Xaa is C or S
XGXGEVVMDQYNKLVVKENEDLYLMSIASLETPV

SEQ ID NO: 4986 - protein, 32 aa, Artificial Sequence
  Cyclic GFR-binding peptide
  MOD_RES (31)..(32): Xaa is C or S
SRVIMQYNKLVKPKRGVLYLISIASLAQPVXX

SEQ ID NO: 4987 - protein, 33 aa, Artificial Sequence
  Cyclic GFR-binding peptide
  MOD_RES (1)..(3): Xaa is C or S
XGXARVVMNYHYKLIVNSSDDKYLVSIPSLQTP

SEQ ID NO: 4988 - protein, 40 aa, Artificial Sequence
  Cyclic GFR-binding peptide
  MOD_RES (1)..(3)..(35)..(36): Xaa is C or S
XGXAKVVMNQYNKLIVNNSSDLYLVSIASLKTPAXXAKPV

SEQ ID NO: 4989 - protein, 28 aa, Artificial Sequence
  Cyclic GFR-binding peptide
VMNRHKRLIVNSSDDYYLVSTASLKTPA

SEQ ID NO: 4990 - protein, 29 aa, Artificial Sequence
  Cyclic GFR-binding peptide
  MOD_RES (1)..(3): Xaa is C or S
XKXSRVIMRHKRLVKPKRGVYYLISTASL

SEQ ID NO: 4991 - protein, 35 aa, Artificial Sequence
  Cyclic GFR-binding peptide
  MOD_RES (2)..(34)..(35): Xaa is C or S
GXAKVVMNRYKKLIVNNSSDFYLVSIANLKTPAXX

SEQ ID NO: 4992 - protein, 40 aa, Artificial Sequence
  Cyclic GFR-binding peptide
  MOD_RES (2)..(4)..(35)..(36): Xaa is C or S
SXKXSRVIMQYNKLVKPKRGVLYLISIASLAQPVXXPAAS

SEQ ID NO: 4993 - protein, 30 aa, Artificial Sequence
  Cyclic GFR-binding peptide
  MOD_RES (2)..(2): Xaa is C or S
KXSKVIMRHKRLIKPTKGIYYLISTASLDQ

SEQ ID NO: 4994 - protein, 27 aa, Artificial Sequence
  Cyclic GFR-binding peptide
  MOD_RES (26)..(27): Xaa is C or S
RYKKLVVKENEDFYLMSIANLETPVXX

SEQ ID NO: 4995 - protein, 37 aa, Artificial Sequence
  Cyclic GFR-binding peptide
  MOD_RES (31)..(32): Xaa is C or S
SKVIMRYKKLIKPTKGIFYLISIANLDQSVXXPSASA

SEQ ID NO: 4996 - protein, 36 aa, Artificial Sequence
  Cyclic GFR-binding peptide
  MOD_RES (30)..(31): Xaa is C or S
VVMDQYNKLVVKENEDLYLMSIASLETPVXXAKPIK

SEQ ID NO: 4997 - protein, 41 aa, Artificial Sequence
  Cyclic GFR-binding peptide
  MOD_RES (2)..(4)..(35)..(36): Xaa is C or S
SXKXSRVIMQYNKLVKPKRGVLYLISIASLAQPVXXPAASA

SEQ ID NO: 4998 - protein, 26 aa, Artificial Sequence
  Cyclic GFR-binding peptide
SKVVMRYKKLVKPTRGVFYLISIANL

SEQ ID NO: 4999 - protein, 32 aa, Artificial Sequence
  Cyclic GFR-binding peptide
  MOD_RES (29)..(30): Xaa is C or S
VMNYHYKLIVNSSDDKYLVSIPSLQTPAXXPK

SEQ ID NO: 5000 - protein, 35 aa, Artificial Sequence
  Cyclic GFR-binding peptide
  MOD_RES (33)..(34): Xaa is C or S
EAVSMGEQYNKLTPVGMDDLYLVSIASLKTPVXXA

SEQ ID NO: 5001 - protein, 32 aa, Artificial Sequence
  Cyclic GFR-binding peptide
  MOD_RES (30)..(31): Xaa is C or S
VVMNRHKRLIVNSSDDYYLVSTASLKTPAXXP

SEQ ID NO: 5002 - protein, 30 aa, Artificial Sequence
  Cyclic GFR-binding peptide
  MOD_RES (2)..(2): Xaa is C or S
GXARVVMNRHKRLIVNSSDDYYLVSTASLQ

SEQ ID NO: 5003 - protein, 25 aa, Artificial Sequence
  Cyclic GFR-binding peptide
MEYHYKLVVKDYEDKYLMSIPSLET

SEQ ID NO: 5004 - protein, 27 aa, Artificial Sequence
  Cyclic GFR-binding peptide
VSMGERYKKLTPVGMDDFYLVSIANLK

SEQ ID NO: 5005 - protein, 36 aa, Artificial Sequence
  Cyclic GFR-binding peptide
  MOD_RES (1)..(32)..(33): Xaa is C or S
XSKVVMQYNKLVKPTRGVLYLISIASLDQPVXXPSA

SEQ ID NO: 5006 - protein, 32 aa, Artificial Sequence
  Cyclic GFR-binding peptide
  MOD_RES (2)..(4): Xaa is C or S
HXGXAKVVMNRYKKLIVNNSSDFYLVSIANLK

SEQ ID NO: 5007 - protein, 35 aa, Artificial Sequence
  Cyclic GFR-binding peptide
  MOD_RES (2)..(34)..(35): Xaa is C or S
GXGEVVMERHKRLVVKDYEDYYLMSTASLETPVXX

SEQ ID NO: 5008 - protein, 35 aa, Artificial Sequence
  Cyclic GFR-binding peptide
  MOD_RES (2)..(4)..(35): Xaa is C or S
SXKXSKVVMYHYKLVKPTRGVKYLISIPSLDQPVX

SEQ ID NO: 5009 - protein, 35 aa, Artificial Sequence
  Cyclic GFR-binding peptide
  MOD_RES (34)..(34): Xaa is C or S
DELTRYKKLFIPKKRVIEFYLVSIANLQVQTPRXQ

SEQ ID NO: 5010 - protein, 26 aa, Artificial Sequence
  Cyclic GFR-binding peptide
ELTRYKKLFIPKKRVIEFYLVSIANL

SEQ ID NO: 5011 - protein, 33 aa, Artificial Sequence
  Cyclic GFR-binding peptide
  MOD_RES (2)..(4): Xaa is C or S
HXGXSRVVMNQYNKLIVNSSDDLYLVSIASLKT

SEQ ID NO: 5012 - protein, 31 aa, Artificial Sequence
  Cyclic GFR-binding peptide
  MOD_RES (31)..(31): Xaa is C or S
RVVMNQYNKLIVNSSDDLYLVSIASLQTPAX

SEQ ID NO: 5013 - protein, 30 aa, Artificial Sequence
  Cyclic GFR-binding peptide
  MOD_RES (29)..(30): Xaa is C or S
VMNQYNKLIVNSSDDLYLVSIASLKTPAXX

SEQ ID NO: 5014 - protein, 22 aa, Artificial Sequence
  Cyclic GFR-binding peptide
ERYKKLTPVGMDDFYLVSIANL

SEQ ID NO: 5015 - protein, 30 aa, Artificial Sequence
  Cyclic GFR-binding peptide
  MOD_RES (27)..(28): Xaa is C or S
MRHKRLIKPTKGIYYLISTASLDQSVXXPS

SEQ ID NO: 5016 - protein, 30 aa, Artificial Sequence
  Cyclic GFR-binding peptide
ELTRYKKLFIPKKRVIEFYLVSIANLQVQT

SEQ ID NO: 5017 - protein, 35 aa, Artificial Sequence
  Cyclic GFR-binding peptide
  MOD_RES (30)..(31): Xaa is C or S
SMGERHKRLTPVGMDDYYLVSTASLKTPVXXAKGV

SEQ ID NO: 5018 - protein, 29 aa, Artificial Sequence
  Cyclic GFR-binding peptide
  MOD_RES (1)..(3): Xaa is C or S
XGXAKVVMNYHYKLIVNNSSDKYLVSIPS

SEQ ID NO: 5019 - protein, 25 aa, Artificial Sequence
  Cyclic GFR-binding peptide
RVVMNQYNKLIVNSSDDLYLVSIAS

SEQ ID NO: 5020 - protein, 34 aa, Artificial Sequence
  Cyclic GFR-binding peptide
  MOD_RES (1)..(3)..(34): Xaa is C or S
XKXSRVIMYHYKLVKPKRGVKYLISIPSLAQPVX

SEQ ID NO: 5021 - protein, 35 aa, Artificial Sequence
  Cyclic GFR-binding peptide
  MOD_RES (2)..(4): Xaa is C or S
HXGXSRVVMNQYNKLIVNSSDDLYLVSIASLKTPA

SEQ ID NO: 5022 - protein, 24 aa, Artificial Sequence
  Cyclic GFR-binding peptide
RHKRLVKPKRGVYYLISTASLAQP

SEQ ID NO: 5023 - protein, 36 aa, Artificial Sequence
  Cyclic GFR-binding peptide
  MOD_RES (2)..(33)..(34): Xaa is C or S
KXSRVIMRHKRLVKPKRGVYYLISTASLAQPVXXPA

SEQ ID NO: 5024 - protein, 23 aa, Artificial Sequence
  Cyclic GFR-binding peptide
VMEQYNKLVVKDYEDLYLMSIAS

SEQ ID NO: 5025 - protein, 40 aa, Artificial Sequence
  Cyclic GFR-binding peptide
  MOD_RES (2)..(4)..(36): Xaa is C or S
HXGXSRVVMNRYKKLIVNSSDDFYLVSIANLKTPAXTPKT

SEQ ID NO: 5026 - protein, 35 aa, Artificial Sequence
  Cyclic GFR-binding peptide
  MOD_RES (31)..(32): Xaa is C or S
RVVMNRHKRLIVNSSDDYYLVSTASLKTPAXXPKP

SEQ ID NO: 5027 - protein, 32 aa, Artificial Sequence
  Cyclic GFR-binding peptide
  MOD_RES (31)..(31): Xaa is C or S
TYHYKLFIPKKRVIEKYLVSIPSLQVQTPRXQ

SEQ ID NO: 5028 - protein, 37 aa, Artificial Sequence
  Cyclic GFR-binding peptide
  MOD_RES (32)..(33): Xaa is C or S
AVSMGERHKRLTPVGMDDYYLVSTASLKTPVXXAKGV

SEQ ID NO: 5029 - protein, 25 aa, Artificial Sequence
  Cyclic GFR-binding peptide
MNQYNKLIVNNSSDLYLVSIASLKT

SEQ ID NO: 5030 - protein, 39 aa, Artificial Sequence
  Cyclic GFR-binding peptide
  MOD_RES (2)..(4)..(37)..(38): Xaa is C or S
RXGXEAVSMGERYKKLTPVGMDDFYLVSIANLKTPVXXA

SEQ ID NO: 5031 - protein, 30 aa, Artificial Sequence
  Cyclic GFR-binding peptide
LHDELTRHKRLFIPKKRVIEYYLVSTASLQ

SEQ ID NO: 5032 - protein, 38 aa, Artificial Sequence
  Cyclic GFR-binding peptide
  MOD_RES (1)..(3)..(35)..(36): Xaa is C or S
XGXGEVVMDRYKKLVVKENEDFYLMSIANLETPVXXAK

SEQ ID NO: 5033 - protein, 21 aa, Artificial Sequence
  Cyclic GFR-binding peptide
NQYNKLIVNSSDDLYLVSIAS

SEQ ID NO: 5034 - protein, 37 aa, Artificial Sequence
  Cyclic GFR-binding peptide
  MOD_RES (1)..(34)..(35): Xaa is C or S
XEAVSMGERYKKLTPVGMDDFYLVSIANLKTPVXXAK

SEQ ID NO: 5035 - protein, 34 aa, Artificial Sequence
  Cyclic GFR-binding peptide
  MOD_RES (29)..(30): Xaa is C or S
VIMRYKKLIKPTKGIFYLISIANLDQSVXXPSAS

SEQ ID NO: 5036 - protein, 36 aa, Artificial Sequence
  Cyclic GFR-binding peptide
  MOD_RES (2)..(4)..(36): Xaa is C or S
RXGXGEVVMEYHYKLVVKDYEDKYLMSIPSLETPVX

SEQ ID NO: 5037 - protein, 40 aa, Artificial Sequence
  Cyclic GFR-binding peptide
  MOD_RES (1)..(3)..(35)..(36): Xaa is C or S
XGXGEVVMERYKKLVVKDYEDFYLMSIANLETPVXXAKPI

SEQ ID NO: 5038 - protein, 39 aa, Artificial Sequence
  Cyclic GFR-binding peptide
  MOD_RES (2)..(33)..(34): Xaa is C or S
KXSKVIMQYNKLIKPTKGILYLISIASLDQSVXXPSASA

SEQ ID NO: 5039 - protein, 35 aa, Artificial Sequence
  Cyclic GFR-binding peptide
  MOD_RES (29)..(29): Xaa is C or S
VMNQYNKLIVNSSDDLYLVSIASLKTPAXTPKTVH

SEQ ID NO: 5040 - protein, 36 aa, Artificial Sequence
  Cyclic GFR-binding peptide
  MOD_RES (35)..(35): Xaa is C or S
HDELTQYNKLFIPKKRVIELYLVSIASLQVQTPRXQ

SEQ ID NO: 5041 - protein, 32 aa, Artificial Sequence
  Cyclic GFR-binding peptide
  MOD_RES (2)..(2): Xaa is C or S
KXSKVVMYHYKLVKPTRGVKYLISIPSLDQPV

SEQ ID NO: 5042 - protein, 30 aa, Artificial Sequence
  Cyclic GFR-binding peptide
  MOD_RES (26)..(27): Xaa is C or S
QYNKLVKPTRGVLYLISIASLDQPVXXPSA

SEQ ID NO: 5043 - protein, 27 aa, Artificial Sequence
  Cyclic GFR-binding peptide
VVMDRYKKLVVKENEDFYLMSIANLET

SEQ ID NO: 5044 - protein, 35 aa, Artificial Sequence
  Cyclic GFR-binding peptide
  MOD_RES (2)..(4)..(35): Xaa is C or S
SXKXSRVIMQYNKLVKPKRGVLYLISIASLAQPVX

SEQ ID NO: 5045 - protein, 38 aa, Artificial Sequence
  Cyclic GFR-binding peptide
  MOD_RES (32)..(33): Xaa is C or S
GEVVMDRHKRLVVKENEDYYLMSTASLETPVXXAKPIK

SEQ ID NO: 5046 - protein, 36 aa, Artificial Sequence
  Cyclic GFR-binding peptide
  MOD_RES (1)..(32)..(33): Xaa is C or S
XSKVIMRHKRLIKPTKGIYYLISTASLDQSVXXPSA

SEQ ID NO: 5047 - protein, 29 aa, Artificial Sequence
  Cyclic GFR-binding peptide
  MOD_RES (27)..(28): Xaa is C or S
MYHYKLVKPKRGVKYLISIPSLAQPVXXP

SEQ ID NO: 5048 - protein, 28 aa, Artificial Sequence
  Cyclic GFR-binding peptide
  MOD_RES (2)..(2): Xaa is C or S
KXSRVIMQYNKLVKPKRGVLYLISIASL

SEQ ID NO: 5049 - protein, 33 aa, Artificial Sequence
  Cyclic GFR-binding peptide
  MOD_RES (32)..(32): Xaa is C or S
SRVVMNRYKKLIVNSSDDFYLVSIANLKTPAXT

SEQ ID NO: 5050 - protein, 26 aa, Artificial Sequence
  Cyclic GFR-binding peptide
EVVMERHKRLVVKDYEDYYLMSTASL

SEQ ID NO: 5051 - protein, 31 aa, Artificial Sequence
  Cyclic GFR-binding peptide
  MOD_RES (2)..(4): Xaa is C or S
SXKXSKVIMQYNKLIKPTKGILYLISIASLD

SEQ ID NO: 5052 - protein, 38 aa, Artificial Sequence
  Cyclic GFR-binding peptide
  MOD_RES (32)..(33): Xaa is C or S
SRVVMNRYKKLIVNSSDDFYLVSIANLKTPAXXPKPVY

SEQ ID NO: 5053 - protein, 29 aa, Artificial Sequence
  Cyclic GFR-binding peptide
ARVVMNRYKKLIVNSSDDFYLVSIANLQT

SEQ ID NO: 5054 - protein, 29 aa, Artificial Sequence
  Cyclic GFR-binding peptide
  MOD_RES (28)..(29): Xaa is C or S
VMRHKRLVKPTRGVYYLISTASLDQPVXX

SEQ ID NO: 5055 - protein, 43 aa, Artificial Sequence
  Cyclic GFR-binding peptide
  MOD_RES (2)..(4)..(41): Xaa is C or S
EXKXALHDELTQYNKLFIPKKRVIELYLVSIASLQVQTPRXQV

SEQ ID NO: 5056 - protein, 40 aa, Artificial Sequence
  Cyclic GFR-binding peptide
  MOD_RES (2)..(34)..(35): Xaa is C or S
GXGEVVMDRHKRLVVKENEDYYLMSTASLETPVXXAKPIK

SEQ ID NO: 5057 - protein, 33 aa, Artificial Sequence
  Cyclic GFR-binding peptide
  MOD_RES (1)..(3): Xaa is C or S
XGXSRVVMNRYKKLIVNSSDDFYLVSIANLKTP

SEQ ID NO: 5058 - protein, 36 aa, Artificial Sequence
  Cyclic GFR-binding peptide
  MOD_RES (30)..(31): Xaa is C or S
VVMNRYKKLIVNSSDDFYLVSIANLKTPAXXPKPVY

SEQ ID NO: 5059 - protein, 34 aa, Artificial Sequence
  Cyclic GFR-binding peptide
  MOD_RES (28)..(29): Xaa is C or S
IMYHYKLVKPKRGVKYLISIPSLAQPVXXPAASA

SEQ ID NO: 5060 - protein, 27 aa, Artificial Sequence
  Cyclic GFR-binding peptide
KVIMRHKRLIKPTKGIYYLISTASLDQ

SEQ ID NO: 5061 - protein, 41 aa, Artificial Sequence
  Cyclic GFR-binding peptide
  MOD_RES (2)..(4)..(36)..(37): Xaa is C or S
RXGXGEVVMERHKRLVVKDYEDYYLMSTASLETPVXXAKPI

SEQ ID NO: 5062 - protein, 29 aa, Artificial Sequence
  Cyclic GFR-binding peptide
  MOD_RES (2)..(4): Xaa is C or S
SXKXSRVIMYHYKLVKPKRGVKYLISIPS

SEQ ID NO: 5063 - protein, 34 aa, Artificial Sequence
  Cyclic GFR-binding peptide
  MOD_RES (29)..(30): Xaa is C or S
VMNQYNKLIVNNSSDLYLVSIASLKTPAXXAKPV

SEQ ID NO: 5064 - protein, 35 aa, Artificial Sequence
  Cyclic GFR-binding peptide
  MOD_RES (1)..(33)..(34): Xaa is C or S
XSRVVMNQYNKLIVNSSDDLYLVSIASLKTPAXXP

SEQ ID NO: 5065 - protein, 31 aa, Artificial Sequence
  Cyclic GFR-binding peptide
LTYHYKLFIPKKRVIEKYLVSIPSLQVQTPR

SEQ ID NO: 5066 - protein, 39 aa, Artificial Sequence
  Cyclic GFR-binding peptide
  MOD_RES (2)..(34)..(35): Xaa is C or S
GXSRVVMNYHYKLIVNSSDDKYLVSIPSLKTPAXXPKPV

SEQ ID NO: 5067 - protein, 30 aa, Artificial Sequence
  Cyclic GFR-binding peptide
GEVVMDQYNKLVVKENEDLYLMSIASLETP

SEQ ID NO: 5068 - protein, 23 aa, Artificial Sequence
  Cyclic GFR-binding peptide
YHYKLIKPTKGIKYLISIPSLDQ

SEQ ID NO: 5069 - protein, 42 aa, Artificial Sequence
  Cyclic GFR-binding peptide
  MOD_RES (1)..(3)..(40): Xaa is C or S
XKXALHDELTQYNKLFIPKKRVIELYLVSIASLQVQTPRXQV

SEQ ID NO: 5070 - protein, 42 aa, Artificial Sequence
  Cyclic GFR-binding peptide
  MOD_RES (2)..(4)..(36)..(37): Xaa is C or S
HXGXARVVMNQYNKLIVNSSDDLYLVSIASLQTPAXXPKPVT

SEQ ID NO: 5071 - protein, 26 aa, Artificial Sequence
  Cyclic GFR-binding peptide
VVMNRYKKLIVNSSDDFYLVSIANLK

SEQ ID NO: 5072 - protein, 26 aa, Artificial Sequence
  Cyclic GFR-binding peptide
MYHYKLIKPTKGIKYLISIPSLDQSV

SEQ ID NO: 5073 - protein, 35 aa, Artificial Sequence
  Cyclic GFR-binding peptide
  MOD_RES (1)..(3)..(35): Xaa is C or S
XGXGEVVMDRYKKLVVKENEDFYLMSIANLETPVX

SEQ ID NO: 5074 - protein, 31 aa, Artificial Sequence
  Cyclic GFR-binding peptide
  MOD_RES (31)..(31): Xaa is C or S
RVVMNRHKRLIVNSSDDYYLVSTASLKTPAX

SEQ ID NO: 5075 - protein, 33 aa, Artificial Sequence
  Cyclic GFR-binding peptide
  MOD_RES (31)..(32): Xaa is C or S
EVVMEYHYKLVVKDYEDKYLMSIPSLETPVXXA

SEQ ID NO: 5076 - protein, 39 aa, Artificial Sequence
  Cyclic GFR-binding peptide
  MOD_RES (2)..(33)..(34): Xaa is C or S
KXSKVVMQYNKLVKPTRGVLYLISIASLDQPVXXPSASA

SEQ ID NO: 5077 - protein, 36 aa, Artificial Sequence
  Cyclic GFR-binding peptide
  MOD_RES (1)..(3)..(35): Xaa is C or S
XGXSRVVMNRHKRLIVNSSDDYYLVSTASLKTPAXT

SEQ ID NO: 5078 - protein, 32 aa, Artificial Sequence
  Cyclic GFR-binding peptide
  MOD_RES (31)..(32): Xaa is C or S
SRVIMYHYKLVKPKRGVKYLISIPSLAQPVXX

SEQ ID NO: 5079 - protein, 27 aa, Artificial Sequence
  Cyclic GFR-binding peptide
EVVMDQYNKLVVKENEDLYLMSIASLE

SEQ ID NO: 5080 - protein, 29 aa, Artificial Sequence
  Cyclic GFR-binding peptide
  MOD_RES (1)..(1): Xaa is C or S
XGEVVMDQYNKLVVKENEDLYLMSIASLE

SEQ ID NO: 5081 - protein, 32 aa, Artificial Sequence
  Cyclic GFR-binding peptide
  MOD_RES (30)..(30): Xaa is C or S
VVMNQYNKLIVNSSDDLYLVSIASLKTPAXTP

SEQ ID NO: 5082 - protein, 25 aa, Artificial Sequence
  Cyclic GFR-binding peptide
RVVMNYHYKLIVNSSDDKYLVSIPS

SEQ ID NO: 5083 - protein, 28 aa, Artificial Sequence
  Cyclic GFR-binding peptide
RVVMNRYKKLIVNSSDDFYLVSIANLKT

SEQ ID NO: 5084 - protein, 34 aa, Artificial Sequence
  Cyclic GFR-binding peptide
  MOD_RES (1)..(3): Xaa is C or S
XGXARVVMNQYNKLIVNSSDDLYLVSIASLQTPA

SEQ ID NO: 5085 - protein, 25 aa, Artificial Sequence
  Cyclic GFR-binding peptide
DRYKKLVVKENEDFYLMSIANLETP

SEQ ID NO: 5086 - protein, 29 aa, Artificial Sequence
  Cyclic GFR-binding peptide
  MOD_RES (27)..(28): Xaa is C or S
NQYNKLIVNSSDDLYLVSIASLQTPAXXP

SEQ ID NO: 5087 - protein, 20 aa, Artificial Sequence
  Cyclic GFR-binding peptide
RYKKLIKPTKGIFYLISIAN

SEQ ID NO: 5088 - protein, 34 aa, Artificial Sequence
  Cyclic GFR-binding peptide
  MOD_RES (28)..(29): Xaa is C or S
IMRHKRLVKPKRGVYYLISTASLAQPVXXPAASA

SEQ ID NO: 5089 - protein, 37 aa, Artificial Sequence
  Cyclic GFR-binding peptide
  MOD_RES (32)..(33): Xaa is C or S
ARVVMNYHYKLIVNSSDDKYLVSIPSLQTPAXXPKPV

SEQ ID NO: 5090 - protein, 33 aa, Artificial Sequence
  Cyclic GFR-binding peptide
  MOD_RES (1)..(3): Xaa is C or S
XGXGEVVMERHKRLVVKDYEDYYLMSTASLETP

SEQ ID NO: 5091 - protein, 35 aa, Artificial Sequence
  Cyclic GFR-binding peptide
  MOD_RES (2)..(4): Xaa is C or S
RXGXGEVVMDRYKKLVVKENEDFYLMSIANLETPV

SEQ ID NO: 5092 - protein, 20 aa, Artificial Sequence
  Cyclic GFR-binding peptide
RHKRLVVKENEDYYLMSTAS

SEQ ID NO: 5093 - protein, 38 aa, Artificial Sequence
  Cyclic GFR-binding peptide
  MOD_RES (2)..(4)..(35)..(36): Xaa is C or S
SXKXSKVIMRHKRLIKPTKGIYYLISTASLDQSVXXPS

SEQ ID NO: 5094 - protein, 36 aa, Artificial Sequence
  Cyclic GFR-binding peptide
  MOD_RES (31)..(32): Xaa is C or S
SRVIMRYKKLVKPKRGVFYLISIANLAQPVXXPAAS

SEQ ID NO: 5095 - protein, 32 aa, Artificial Sequence
  Cyclic GFR-binding peptide
  MOD_RES (27)..(28): Xaa is C or S
NRHKRLIVNSSDDYYLVSTASLQTPAXXPKPV

SEQ ID NO: 5096 - protein, 22 aa, Artificial Sequence
  Cyclic GFR-binding peptide
MRYKKLIKPTKGIFYLISIANL

SEQ ID NO: 5097 - protein, 29 aa, Artificial Sequence
  Cyclic GFR-binding peptide
VVMNYHYKLIVNSSDDKYLVSIPSLKTPA

SEQ ID NO: 5098 - protein, 32 aa, Artificial Sequence
  Cyclic GFR-binding peptide
  MOD_RES (2)..(4): Xaa is C or S
HXGXARVVMNRHKRLIVNSSDDYYLVSTASLQ

SEQ ID NO: 5099 - protein, 30 aa, Artificial Sequence
  Cyclic GFR-binding peptide
  MOD_RES (26)..(27): Xaa is C or S
YHYKLIKPTKGIKYLISIPSLDQSVXXPSA

SEQ ID NO: 5100 - protein, 32 aa, Artificial Sequence
  Cyclic GFR-binding peptide
  MOD_RES (26)..(27): Xaa is C or S
RYKKLIVNSSDDFYLVSIANLQTPAXXPKPVT

SEQ ID NO: 5101 - protein, 33 aa, Artificial Sequence
  Cyclic GFR-binding peptide
  MOD_RES (32)..(33): Xaa is C or S
ARVVMNYHYKLIVNSSDDKYLVSIPSLQTPAXX

SEQ ID NO: 5102 - protein, 38 aa, Artificial Sequence
  Cyclic GFR-binding peptide
  MOD_RES (2)..(34)..(35): Xaa is C or S
GXARVVMNRHKRLIVNSSDDYYLVSTASLQTPAXXPKP

SEQ ID NO: 5103 - protein, 31 aa, Artificial Sequence
  Cyclic GFR-binding peptide
  MOD_RES (31)..(31): Xaa is C or S
RVVMNYHYKLIVNSSDDKYLVSIPSLQTPAX

SEQ ID NO: 5104 - protein, 39 aa, Artificial Sequence
  Cyclic GFR-binding peptide
  MOD_RES (2)..(4)..(36)..(37): Xaa is C or S
HXGXAKVVMNRYKKLIVNNSSDFYLVSIANLKTPAXXAK

SEQ ID NO: 5105 - protein, 38 aa, Artificial Sequence
  Cyclic GFR-binding peptide
  MOD_RES (1)..(33)..(34): Xaa is C or S
XGEVVMDRYKKLVVKENEDFYLMSIANLETPVXXAKPI

SEQ ID NO: 5106 - protein, 28 aa, Artificial Sequence
  Cyclic GFR-binding peptide
VMNRYKKLIVNSSDDFYLVSIANLQTPA

SEQ ID NO: 5107 - protein, 23 aa, Artificial Sequence
  Cyclic GFR-binding peptide
VMRYKKLVKPTRGVFYLISIANL

SEQ ID NO: 5108 - protein, 34 aa, Artificial Sequence
  Cyclic GFR-binding peptide
  MOD_RES (32)..(32): Xaa is C or S
LTRHKRLFIPKKRVIEYYLVSTASLQVQTPRXQV

SEQ ID NO: 5109 - protein, 32 aa, Artificial Sequence
  Cyclic GFR-binding peptide
  MOD_RES (2)..(2): Xaa is C or S
KXSKVVMRYKKLVKPTRGVFYLISIANLDQPV

SEQ ID NO: 5110 - protein, 25 aa, Artificial Sequence
  Cyclic GFR-binding peptide
KVIMRHKRLIKPTKGIYYLISTASL

SEQ ID NO: 5111 - protein, 25 aa, Artificial Sequence
  Cyclic GFR-binding peptide
EVVMERHKRLVVKDYEDYYLMSTAS

SEQ ID NO: 5112 - protein, 38 aa, Artificial Sequence
  Cyclic GFR-binding peptide
  MOD_RES (2)..(33)..(34): Xaa is C or S
KXSKVIMYHYKLIKPTKGIKYLISIPSLDQSVXXPSAS

SEQ ID NO: 5113 - protein, 32 aa, Artificial Sequence
  Cyclic GFR-binding peptide
  MOD_RES (28)..(29): Xaa is C or S
IMRHKRLVKPKRGVYYLISTASLAQPVXXPAA

SEQ ID NO: 5114 - protein, 25 aa, Artificial Sequence
  Cyclic GFR-binding peptide
GEQYNKLTPVGMDDLYLVSIASLKT

SEQ ID NO: 5115 - protein, 27 aa, Artificial Sequence
  Cyclic GFR-binding peptide
  MOD_RES (27)..(27): Xaa is C or S
NQYNKLIVNNSSDLYLVSIASLKTPAX

SEQ ID NO: 5116 - protein, 33 aa, Artificial Sequence
  Cyclic GFR-binding peptide
  MOD_RES (30)..(30): Xaa is C or S
QYNKLFIPKKRVIELYLVSIASLQVQTPRXQVN

SEQ ID NO: 5117 - protein, 21 aa, Artificial Sequence
  Cyclic GFR-binding peptide
EQYNKLTPVGMDDLYLVSIAS

SEQ ID NO: 5118 - protein, 39 aa, Artificial Sequence
  Cyclic GFR-binding peptide
  MOD_RES (2)..(4): Xaa is C or S
EXKXALHDELTYHYKLFIPKKRVIEKYLVSIPSLQVQTP

SEQ ID NO: 5119 - protein, 37 aa, Artificial Sequence
  Cyclic GFR-binding peptide
  MOD_RES (34)..(34): Xaa is C or S
DELTQYNKLFIPKKRVIELYLVSIASLQVQTPRXQVN

SEQ ID NO: 5120 - protein, 35 aa, Artificial Sequence
  Cyclic GFR-binding peptide
  MOD_RES (1)..(1): Xaa is C or S
XALHDELTRHKRLFIPKKRVIEYYLVSTASLQVQT

SEQ ID NO: 5121 - protein, 22 aa, Artificial Sequence
  Cyclic GFR-binding peptide
NRYKKLIVNSSDDFYLVSIANL

SEQ ID NO: 5122 - protein, 30 aa, Artificial Sequence
  Cyclic GFR-binding peptide
  MOD_RES (1)..(1): Xaa is C or S
XARVVMNRYKKLIVNSSDDFYLVSIANLQT

SEQ ID NO: 5123 - protein, 30 aa, Artificial Sequence
  Cyclic GFR-binding peptide
  MOD_RES (1)..(3): Xaa is C or S
XGXEAVSMGERYKKLTPVGMDDFYLVSIAN

SEQ ID NO: 5124 - protein, 28 aa, Artificial Sequence
  Cyclic GFR-binding peptide
VVMQYNKLVKPTRGVLYLISIASLDQPV

SEQ ID NO: 5125 - protein, 33 aa, Artificial Sequence
  Cyclic GFR-binding peptide
  MOD_RES (1)..(33): Xaa is C or S
XAKVVMNYHYKLIVNNSSDKYLVSIPSLKTPAX

SEQ ID NO: 5126 - protein, 30 aa, Artificial Sequence
  Cyclic GFR-binding peptide
EVVMDRHKRLVVKENEDYYLMSTASLETPV

SEQ ID NO: 5127 - protein, 31 aa, Artificial Sequence
  Cyclic GFR-binding peptide
  MOD_RES (1)..(3): Xaa is C or S
XGXARVVMNRHKRLIVNSSDDYYLVSTASLQ

SEQ ID NO: 5128 - protein, 27 aa, Artificial Sequence
  Cyclic GFR-binding peptide
VVMNRYKKLIVNNSSDFYLVSIANLKT

SEQ ID NO: 5129 - protein, 22 aa, Artificial Sequence
  Cyclic GFR-binding peptide
QYNKLIVNNSSDLYLVSIASLK

SEQ ID NO: 5130 - protein, 38 aa, Artificial Sequence
  Cyclic GFR-binding peptide
  MOD_RES (1)..(3): Xaa is C or S
XKXALHDELTYHYKLFIPKKRVIEKYLVSIPSLQVQTP

SEQ ID NO: 5131 - protein, 26 aa, Artificial Sequence
  Cyclic GFR-binding peptide
  MOD_RES (26)..(26): Xaa is C or S
QYNKLIVNNSSDLYLVSIASLKTPAX

SEQ ID NO: 5132 - protein, 32 aa, Artificial Sequence
  Cyclic GFR-binding peptide
  MOD_RES (2)..(4): Xaa is C or S
SXKXSRVIMRYKKLVKPKRGVFYLISIANLAQ

SEQ ID NO: 5133 - protein, 28 aa, Artificial Sequence
  Cyclic GFR-binding peptide
KVVMYHYKLVKPTRGVKYLISIPSLDQP

SEQ ID NO: 5134 - protein, 33 aa, Artificial Sequence
  Cyclic GFR-binding peptide
  MOD_RES (1)..(33): Xaa is C or S
XGEVVMERYKKLVVKDYEDFYLMSIANLETPVX

SEQ ID NO: 5135 - protein, 26 aa, Artificial Sequence
  Cyclic GFR-binding peptide
NRHKRLIVNSSDDYYLVSTASLKTPA

SEQ ID NO: 5136 - protein, 25 aa, Artificial Sequence
  Cyclic GFR-binding peptide
IMQYNKLIKPTKGILYLISIASLDQ

SEQ ID NO: 5137 - protein, 28 aa, Artificial Sequence
  Cyclic GFR-binding peptide
VVMNQYNKLIVNSSDDLYLVSIASLQTP

SEQ ID NO: 5138 - protein, 27 aa, Artificial Sequence
  Cyclic GFR-binding peptide
VMNRYKKLIVNSSDDFYLVSIANLKTP

SEQ ID NO: 5139 - protein, 32 aa, Artificial Sequence
  Cyclic GFR-binding peptide
  MOD_RES (2)..(4): Xaa is C or S
RXGXGEVVMERHKRLVVKDYEDYYLMSTASLE

SEQ ID NO: 5140 - protein, 35 aa, Artificial Sequence
  Cyclic GFR-binding peptide
  MOD_RES (29)..(30): Xaa is C or S
VVMRHKRLVKPTRGVYYLISTASLDQPVXXPSASA

SEQ ID NO: 5141 - protein, 27 aa, Artificial Sequence
  Cyclic GFR-binding peptide
  MOD_RES (1)..(1): Xaa is C or S
XSKVVMRHKRLVKPTRGVYYLISTASL

SEQ ID NO: 5142 - protein, 25 aa, Artificial Sequence
  Cyclic GFR-binding peptide
KVVMNYHYKLIVNNSSDKYLVSIPS

SEQ ID NO: 5143 - protein, 22 aa, Artificial Sequence
  Cyclic GFR-binding peptide
VMQYNKLVKPTRGVLYLISIAS

SEQ ID NO: 5144 - protein, 40 aa, Artificial Sequence
  Cyclic GFR-binding peptide
  MOD_RES (1)..(3)..(34)..(35): Xaa is C or S
XKXSRVIMRHKRLVKPKRGVYYLISTASLAQPVXXPAASA

SEQ ID NO: 5145 - protein, 39 aa, Artificial Sequence
  Cyclic GFR-binding peptide
  MOD_RES (1)..(33): Xaa is C or S
XSRVVMNRHKRLIVNSSDDYYLVSTASLKTPAXTPKTVH

SEQ ID NO: 5146 - protein, 24 aa, Artificial Sequence
  Cyclic GFR-binding peptide
TRYKKLFIPKKRVIEFYLVSIANL

SEQ ID NO: 5147 - protein, 31 aa, Artificial Sequence
  Cyclic GFR-binding peptide
  MOD_RES (26)..(27): Xaa is C or S
RYKKLIVNNSSDFYLVSIANLKTPAXXAKPV

SEQ ID NO: 5148 - protein, 23 aa, Artificial Sequence
  Cyclic GFR-binding peptide
VMERHKRLVVKDYEDYYLMSTAS

SEQ ID NO: 5149 - protein, 32 aa, Artificial Sequence
  Cyclic GFR-binding peptide
  MOD_RES (27)..(28): Xaa is C or S
ERYKKLTPVGMDDFYLVSIANLKTPVXXAKGV

SEQ ID NO: 5150 - protein, 30 aa, Artificial Sequence
  Cyclic GFR-binding peptide
  MOD_RES (1)..(1): Xaa is C or S
XARVVMNYHYKLIVNSSDDKYLVSIPSLQT

SEQ ID NO: 5151 - protein, 30 aa, Artificial Sequence
  Cyclic GFR-binding peptide
  MOD_RES (27)..(28): Xaa is C or S
MYHYKLVKPTRGVKYLISIPSLDQPVXXPS

SEQ ID NO: 5152 - protein, 39 aa, Artificial Sequence
  Cyclic GFR-binding peptide
  MOD_RES (2)..(4): Xaa is C or S
EXKXALHDELTQYNKLFIPKKRVIELYLVSIASLQVQTP

SEQ ID NO: 5153 - protein, 30 aa, Artificial Sequence
  Cyclic GFR-binding peptide
  MOD_RES (27)..(28): Xaa is C or S
NQYNKLIVNSSDDLYLVSIASLQTPAXXPK

SEQ ID NO: 5154 - protein, 31 aa, Artificial Sequence
  Cyclic GFR-binding peptide
  MOD_RES (31)..(31): Xaa is C or S
SKVVMRYKKLVKPTRGVFYLISIANLDQPVX

SEQ ID NO: 5155 - protein, 34 aa, Artificial Sequence
  Cyclic GFR-binding peptide
  MOD_RES (30)..(31): Xaa is C or S
VVMNQYNKLIVNNSSDLYLVSIASLKTPAXXAKP

SEQ ID NO: 5156 - protein, 40 aa, Artificial Sequence
  Cyclic GFR-binding peptide
  MOD_RES (2)..(4): Xaa is C or S
EXKXALHDELTRHKRLFIPKKRVIEYYLVSTASLQVQTPR

SEQ ID NO: 5157 - protein, 25 aa, Artificial Sequence
  Cyclic GFR-binding peptide
YHYKLIVNNSSDKYLVSIPSLKTPA

SEQ ID NO: 5158 - protein, 25 aa, Artificial Sequence
  Cyclic GFR-binding peptide
KVVMQYNKLVKPTRGVLYLISIASL

SEQ ID NO: 5159 - protein, 25 aa, Artificial Sequence
  Cyclic GFR-binding peptide
YHYKLIVNSSDDKYLVSIPSLQTPA

SEQ ID NO: 5160 - protein, 35 aa, Artificial Sequence
  Cyclic GFR-binding peptide
  MOD_RES (2)..(34)..(35): Xaa is C or S
GXGEVVMDQYNKLVVKENEDLYLMSIASLETPVXX

SEQ ID NO: 5161 - protein, 38 aa, Artificial Sequence
  Cyclic GFR-binding peptide
  MOD_RES (1)..(3)..(35)..(36): Xaa is C or S
XGXGEVVMERYKKLVVKDYEDFYLMSIANLETPVXXAK

SEQ ID NO: 5162 - protein, 33 aa, Artificial Sequence
  Cyclic GFR-binding peptide
  MOD_RES (27)..(28): Xaa is C or S
MYHYKLVKPTRGVKYLISIPSLDQPVXXPSASA

SEQ ID NO: 5163 - protein, 29 aa, Artificial Sequence
  Cyclic GFR-binding peptide
  MOD_RES (2)..(2): Xaa is C or S
GXARVVMNRHKRLIVNSSDDYYLVSTASL

SEQ ID NO: 5164 - protein, 26 aa, Artificial Sequence
  Cyclic GFR-binding peptide
IMRYKKLIKPTKGIFYLISIANLDQS

SEQ ID NO: 5165 - protein, 29 aa, Artificial Sequence
  Cyclic GFR-binding peptide
  MOD_RES (29)..(29): Xaa is C or S
VVMRYKKLVKPTRGVFYLISIANLDQPVX

SEQ ID NO: 5166 - protein, 30 aa, Artificial Sequence
  Cyclic GFR-binding peptide
  MOD_RES (2)..(4): Xaa is C or S
SXKXSKVIMRHKRLIKPTKGIYYLISTASL

SEQ ID NO: 5167 - protein, 39 aa, Artificial Sequence
  Cyclic GFR-binding peptide
  MOD_RES (2)..(4)..(36): Xaa is C or S
HXGXSRVVMNYHYKLIVNSSDDKYLVSIPSLKTPAXTPK

SEQ ID NO: 5168 - protein, 32 aa, Artificial Sequence
  Cyclic GFR-binding peptide
  MOD_RES (31)..(32): Xaa is C or S
RVVMNYHYKLIVNSSDDKYLVSIPSLKTPAXX

SEQ ID NO: 5169 - protein, 28 aa, Artificial Sequence
  Cyclic GFR-binding peptide
  MOD_RES (2)..(2): Xaa is C or S
GXARVVMNRHKRLIVNSSDDYYLVSTAS

SEQ ID NO: 5170 - protein, 33 aa, Artificial Sequence
  Cyclic GFR-binding peptide
  MOD_RES (32)..(33): Xaa is C or S
AKVVMNRYKKLIVNNSSDFYLVSIANLKTPAXX

SEQ ID NO: 5171 - protein, 32 aa, Artificial Sequence
  Cyclic GFR-binding peptide
  MOD_RES (31)..(32): Xaa is C or S
SKVVMRYKKLVKPTRGVFYLISIANLDQPVXX

SEQ ID NO: 5172 - protein, 30 aa, Artificial Sequence
  Cyclic GFR-binding peptide
  MOD_RES (1)..(3): Xaa is C or S
XGXSRVVMNQYNKLIVNSSDDLYLVSIASL

SEQ ID NO: 5173 - protein, 39 aa, Artificial Sequence
  Cyclic GFR-binding peptide
  MOD_RES (1)..(3)..(35)..(36): Xaa is C or S
XGXGEVVMEYHYKLVVKDYEDKYLMSIPSLETPVXXAKP

SEQ ID NO: 5174 - protein, 35 aa, Artificial Sequence
  Cyclic GFR-binding peptide
  MOD_RES (30)..(31): Xaa is C or S
VVMNRHKRLIVNSSDDYYLVSTASLQTPAXXPKPV

SEQ ID NO: 5175 - protein, 27 aa, Artificial Sequence
  Cyclic GFR-binding peptide
IMRHKRLVKPKRGVYYLISTASLAQPV

SEQ ID NO: 5176 - protein, 34 aa, Artificial Sequence
  Cyclic GFR-binding peptide
  MOD_RES (32)..(33): Xaa is C or S
AVSMGERHKRLTPVGMDDYYLVSTASLKTPVXXA

SEQ ID NO: 5177 - protein, 34 aa, Artificial Sequence
  Cyclic GFR-binding peptide
  MOD_RES (1)..(3)..(34): Xaa is C or S
XKXSKVIMQYNKLIKPTKGILYLISIASLDQSVX

SEQ ID NO: 5178 - protein, 33 aa, Artificial Sequence
  Cyclic GFR-binding peptide
  MOD_RES (31)..(32): Xaa is C or S
SKVIMYHYKLIKPTKGIKYLISIPSLDQSVXXP

SEQ ID NO: 5179 - protein, 25 aa, Artificial Sequence
  Cyclic GFR-binding peptide
VVMQYNKLVKPTRGVLYLISIASLD

SEQ ID NO: 5180 - protein, 37 aa, Artificial Sequence
  Cyclic GFR-binding peptide
  MOD_RES (31)..(32): Xaa is C or S
SKVVMQYNKLVKPTRGVLYLISIASLDQPVXXPSASA

SEQ ID NO: 5181 - protein, 31 aa, Artificial Sequence
  Cyclic GFR-binding peptide
  MOD_RES (2)..(4): Xaa is C or S
HXGXAKVVMNYHYKLIVNNSSDKYLVSIPSL

SEQ ID NO: 5182 - protein, 41 aa, Artificial Sequence
  Cyclic GFR-binding peptide
  MOD_RES (1)..(3)..(35)..(36): Xaa is C or S
XGXARVVMNRYKKLIVNSSDDFYLVSIANLQTPAXXPKPVT

SEQ ID NO: 5183 - protein, 27 aa, Artificial Sequence
  Cyclic GFR-binding peptide
MNRYKKLIVNNSSDFYLVSIANLKTPA

SEQ ID NO: 5184 - protein, 32 aa, Artificial Sequence
  Cyclic GFR-binding peptide
  MOD_RES (2)..(4): Xaa is C or S
SXKXSKVVMRHKRLVKPTRGVYYLISTASLDQ

SEQ ID NO: 5185 - protein, 32 aa, Artificial Sequence
  Cyclic GFR-binding peptide
  MOD_RES (2)..(4): Xaa is C or S
RXGXGEVVMDRHKRLVVKENEDYYLMSTASLE

SEQ ID NO: 5186 - protein, 34 aa, Artificial Sequence
  Cyclic GFR-binding peptide
  MOD_RES (1)..(3): Xaa is C or S
XGXGEVVMEQYNKLVVKDYEDLYLMSIASLETPV

SEQ ID NO: 5187 - protein, 35 aa, Artificial Sequence
  Cyclic GFR-binding peptide
  MOD_RES (32)..(33): Xaa is C or S
GEVVMDYHYKLVVKENEDKYLMSIPSLETPVXXAK

SEQ ID NO: 5188 - protein, 26 aa, Artificial Sequence
  Cyclic GFR-binding peptide
MYHYKLVKPTRGVKYLISIPSLDQPV

SEQ ID NO: 5189 - protein, 35 aa, Artificial Sequence
  Cyclic GFR-binding peptide
  MOD_RES (31)..(32): Xaa is C or S
RVVMNYHYKLIVNSSDDKYLVSIPSLQTPAXXPKP

SEQ ID NO: 5190 - protein, 37 aa, Artificial Sequence
  Cyclic GFR-binding peptide
  MOD_RES (1)..(3)..(35)..(36): Xaa is C or S
XGXARVVMNRHKRLIVNSSDDYYLVSTASLQTPAXXP

SEQ ID NO: 5191 - protein, 27 aa, Artificial Sequence
  Cyclic GFR-binding peptide
TRYKKLFIPKKRVIEFYLVSIANLQVQ

SEQ ID NO: 5192 - protein, 24 aa, Artificial Sequence
  Cyclic GFR-binding peptide
VIMYHYKLIKPTKGIKYLISIPSL

SEQ ID NO: 5193 - protein, 26 aa, Artificial Sequence
  Cyclic GFR-binding peptide
  MOD_RES (26)..(26): Xaa is C or S
QYNKLIVNSSDDLYLVSIASLQTPAX

SEQ ID NO: 5194 - protein, 30 aa, Artificial Sequence
  Cyclic GFR-binding peptide
  MOD_RES (27)..(27): Xaa is C or S
NRHKRLIVNSSDDYYLVSTASLKTPAXTPK

SEQ ID NO: 5195 - protein, 33 aa, Artificial Sequence
  Cyclic GFR-binding peptide
  MOD_RES (31)..(32): Xaa is C or S
SKVIMQYNKLIKPTKGILYLISIASLDQSVXXP

SEQ ID NO: 5196 - protein, 28 aa, Artificial Sequence
  Cyclic GFR-binding peptide
AKVVMNYHYKLIVNNSSDKYLVSIPSLK

SEQ ID NO: 5197 - protein, 35 aa, Artificial Sequence
  Cyclic GFR-binding peptide
  MOD_RES (33)..(34): Xaa is C or S
EAVSMGERYKKLTPVGMDDFYLVSIANLKTPVXXA

SEQ ID NO: 5198 - protein, 35 aa, Artificial Sequence
  Cyclic GFR-binding peptide
  MOD_RES (30)..(31): Xaa is C or S
KVIMQYNKLIKPTKGILYLISIASLDQSVXXPSAS

SEQ ID NO: 5199 - protein, 33 aa, Artificial Sequence
  Cyclic GFR-binding peptide
  MOD_RES (1)..(33): Xaa is C or S
XAKVVMNRYKKLIVNNSSDFYLVSIANLKTPAX

SEQ ID NO: 5200 - protein, 27 aa, Artificial Sequence
  Cyclic GFR-binding peptide
SMGERHKRLTPVGMDDYYLVSTASLKT

SEQ ID NO: 5201 - protein, 36 aa, Artificial Sequence
  Cyclic GFR-binding peptide
  MOD_RES (1)..(3)..(35): Xaa is C or S
XGXSRVVMNQYNKLIVNSSDDLYLVSIASLKTPAXT

SEQ ID NO: 5202 - protein, 33 aa, Artificial Sequence
  Cyclic GFR-binding peptide
  MOD_RES (1)..(3): Xaa is C or S
XGXGEVVMEQYNKLVVKDYEDLYLMSIASLETP

SEQ ID NO: 5203 - protein, 29 aa, Artificial Sequence
  Cyclic GFR-binding peptide
VVMNQYNKLIVNSSDDLYLVSIASLKTPA

SEQ ID NO: 5204 - protein, 26 aa, Artificial Sequence
  Cyclic GFR-binding peptide
VMERYKKLVVKDYEDFYLMSIANLET

SEQ ID NO: 5205 - protein, 25 aa, Artificial Sequence
  Cyclic GFR-binding peptide
ELTRHKRLFIPKKRVIEYYLVSTAS

SEQ ID NO: 5206 - protein, 25 aa, Artificial Sequence
  Cyclic GFR-binding peptide
VVMNRYKKLIVNSSDDFYLVSIANL

SEQ ID NO: 5207 - protein, 33 aa, Artificial Sequence
  Cyclic GFR-binding peptide
  MOD_RES (27)..(28): Xaa is C or S
MRYKKLVKPTRGVFYLISIANLDQPVXXPSASA

SEQ ID NO: 5208 - protein, 35 aa, Artificial Sequence
  Cyclic GFR-binding peptide
  MOD_RES (33)..(33): Xaa is C or S
ELTQYNKLFIPKKRVIELYLVSIASLQVQTPRXQV

SEQ ID NO: 5209 - protein, 29 aa, Artificial Sequence
  Cyclic GFR-binding peptide
  MOD_RES (1)..(1): Xaa is C or S
XSRVIMYHYKLVKPKRGVKYLISIPSLAQ

SEQ ID NO: 5210 - protein, 25 aa, Artificial Sequence
  Cyclic GFR-binding peptide
LTRYKKLFIPKKRVIEFYLVSIANL

SEQ ID NO: 5211 - protein, 21 aa, Artificial Sequence
  Cyclic GFR-binding peptide
EYHYKLVVKDYEDKYLMSIPS

SEQ ID NO: 5212 - protein, 24 aa, Artificial Sequence
  Cyclic GFR-binding peptide
DRYKKLVVKENEDFYLMSIANLET

SEQ ID NO: 5213 - protein, 41 aa, Artificial Sequence
  Cyclic GFR-binding peptide
  MOD_RES (2)..(4)..(36): Xaa is C or S
HXGXSRVVMNQYNKLIVNSSDDLYLVSIASLKTPAXTPKTV

SEQ ID NO: 5214 - protein, 37 aa, Artificial Sequence
  Cyclic GFR-binding peptide
  MOD_RES (2)..(34)..(35): Xaa is C or S
GXARVVMNRYKKLIVNSSDDFYLVSIANLQTPAXXPK

SEQ ID NO: 5215 - protein, 39 aa, Artificial Sequence
  Cyclic GFR-binding peptide
  MOD_RES (2)..(34)..(35): Xaa is C or S
GXSRVVMNQYNKLIVNSSDDLYLVSIASLKTPAXXPKPV

SEQ ID NO: 5216 - protein, 28 aa, Artificial Sequence
  Cyclic GFR-binding peptide
  MOD_RES (2)..(2): Xaa is C or S
KXSKVVMRHKRLVKPTRGVYYLISTASL

SEQ ID NO: 5217 - protein, 36 aa, Artificial Sequence
  Cyclic GFR-binding peptide
  MOD_RES (30)..(31): Xaa is C or S
RVIMRYKKLVKPKRGVFYLISIANLAQPVXXPAASA

SEQ ID NO: 5218 - protein, 33 aa, Artificial Sequence
  Cyclic GFR-binding peptide
  MOD_RES (30)..(31): Xaa is C or S
VVMNYHYKLIVNSSDDKYLVSIPSLKTPAXXPK

SEQ ID NO: 5219 - protein, 28 aa, Artificial Sequence
  Cyclic GFR-binding peptide
VMNQYNKLIVNSSDDLYLVSIASLKTPA

SEQ ID NO: 5220 - protein, 40 aa, Artificial Sequence
  Cyclic GFR-binding peptide
  MOD_RES (1)..(3)..(35)..(36): Xaa is C or S
XGXSRVVMNRHKRLIVNSSDDYYLVSTASLKTPAXXPKPV

SEQ ID NO: 5221 - protein, 21 aa, Artificial Sequence
  Cyclic GFR-binding peptide
RHKRLTPVGMDDYYLVSTASL

SEQ ID NO: 5222 - protein, 40 aa, Artificial Sequence
  Cyclic GFR-binding peptide
  MOD_RES (2)..(4)..(35)..(36): Xaa is C or S
SXKXSKVIMQYNKLIKPTKGILYLISIASLDQSVXXPSAS

SEQ ID NO: 5223 - protein, 35 aa, Artificial Sequence
  Cyclic GFR-binding peptide
  MOD_RES (31)..(32): Xaa is C or S
RVVMNQYNKLIVNSSDDLYLVSIASLQTPAXXPKP

SEQ ID NO: 5224 - protein, 36 aa, Artificial Sequence
  Cyclic GFR-binding peptide
  MOD_RES (31)..(32): Xaa is C or S
SRVIMRHKRLVKPKRGVYYLISTASLAQPVXXPAAS

SEQ ID NO: 5225 - protein, 32 aa, Artificial Sequence
  Cyclic GFR-binding peptide
  MOD_RES (29)..(30): Xaa is C or S
VMDRHKRLVVKENEDYYLMSTASLETPVXXAK

SEQ ID NO: 5226 - protein, 31 aa, Artificial Sequence
  Cyclic GFR-binding peptide
  MOD_RES (26)..(26): Xaa is C or S
QYNKLIVNSSDDLYLVSIASLKTPAXTPKTV

SEQ ID NO: 5227 - protein, 30 aa, Artificial Sequence
  Cyclic GFR-binding peptide
  MOD_RES (26)..(27): Xaa is C or S
RHKRLVVKDYEDYYLMSTASLETPVXXAKP

SEQ ID NO: 5228 - protein, 36 aa, Artificial Sequence
  Cyclic GFR-binding peptide
  MOD_RES (31)..(32): Xaa is C or S
EVVMDQYNKLVVKENEDLYLMSIASLETPVXXAKPI

SEQ ID NO: 5229 - protein, 40 aa, Artificial Sequence
  Cyclic GFR-binding peptide
  MOD_RES (1)..(3)..(40): Xaa is C or S
XKXALHDELTYHYKLFIPKKRVIEKYLVSIPSLQVQTPRX

SEQ ID NO: 5230 - protein, 37 aa, Artificial Sequence
  Cyclic GFR-binding peptide
  MOD_RES (2)..(4)..(35)..(36): Xaa is C or S
SXKXSRVIMYHYKLVKPKRGVKYLISIPSLAQPVXXP

SEQ ID NO: 5231 - protein, 23 aa, Artificial Sequence
  Cyclic GFR-binding peptide
VMDQYNKLVVKENEDLYLMSIAS

SEQ ID NO: 5232 - protein, 30 aa, Artificial Sequence
  Cyclic GFR-binding peptide
  MOD_RES (28)..(29): Xaa is C or S
MEYHYKLVVKDYEDKYLMSIPSLETPVXXA

SEQ ID NO: 5233 - protein, 28 aa, Artificial Sequence
  Cyclic GFR-binding peptide
  MOD_RES (1)..(3): Xaa is C or S
XKXSRVIMRHKRLVKPKRGVYYLISTAS

SEQ ID NO: 5234 - protein, 30 aa, Artificial Sequence
  Cyclic GFR-binding peptide
  MOD_RES (1)..(1): Xaa is C or S
XSRVIMRHKRLVKPKRGVYYLISTASLAQP

SEQ ID NO: 5235 - protein, 25 aa, Artificial Sequence
  Cyclic GFR-binding peptide
LTRHKRLFIPKKRVIEYYLVSTASL

SEQ ID NO: 5236 - protein, 28 aa, Artificial Sequence
  Cyclic GFR-binding peptide
KVIMRHKRLIKPTKGIYYLISTASLDQS

SEQ ID NO: 5237 - protein, 30 aa, Artificial Sequence
  Cyclic GFR-binding peptide
  MOD_RES (29)..(30): Xaa is C or S
VMNRYKKLIVNSSDDFYLVSIANLQTPAXX

SEQ ID NO: 5238 - protein, 30 aa, Artificial Sequence
  Cyclic GFR-binding peptide
GEVVMEYHYKLVVKDYEDKYLMSIPSLETP

SEQ ID NO: 5239 - protein, 22 aa, Artificial Sequence
  Cyclic GFR-binding peptide
DRYKKLVVKENEDFYLMSIANL

SEQ ID NO: 5240 - protein, 35 aa, Artificial Sequence
  Cyclic GFR-binding peptide
  MOD_RES (32)..(33): Xaa is C or S
AKVVMNYHYKLIVNNSSDKYLVSIPSLKTPAXXAK

SEQ ID NO: 5241 - protein, 44 aa, Artificial Sequence
  Cyclic GFR-binding peptide
  MOD_RES (1)..(3)..(40): Xaa is C or S
XKXALHDELTYHYKLFIPKKRVIEKYLVSIPSLQVQTPRXQVNR

SEQ ID NO: 5242 - protein, 30 aa, Artificial Sequence
  Cyclic GFR-binding peptide
HDELTQYNKLFIPKKRVIELYLVSIASLQV

SEQ ID NO: 5243 - protein, 32 aa, Artificial Sequence
  Cyclic GFR-binding peptide
  MOD_RES (29)..(30): Xaa is C or S
MGERHKRLTPVGMDDYYLVSTASLKTPVXXAK

SEQ ID NO: 5244 - protein, 31 aa, Artificial Sequence
  Cyclic GFR-binding peptide
  MOD_RES (30)..(31): Xaa is C or S
VVMDQYNKLVVKENEDLYLMSIASLETPVXX

SEQ ID NO: 5245 - protein, 36 aa, Artificial Sequence
  Cyclic GFR-binding peptide
  MOD_RES (1)..(33)..(34): Xaa is C or S
XGEVVMDQYNKLVVKENEDLYLMSIASLETPVXXAK

SEQ ID NO: 5246 - protein, 30 aa, Artificial Sequence
  Cyclic GFR-binding peptide
  MOD_RES (29)..(30): Xaa is C or S
VVMYHYKLVKPTRGVKYLISIPSLDQPVXX

SEQ ID NO: 5247 - protein, 32 aa, Artificial Sequence
  Cyclic GFR-binding peptide
  MOD_RES (28)..(29): Xaa is C or S
MNRYKKLIVNNSSDFYLVSIANLKTPAXXAKP

SEQ ID NO: 5248 - protein, 39 aa, Artificial Sequence
  Cyclic GFR-binding peptide
  MOD_RES (2)..(4)..(35)..(36): Xaa is C or S
SXKXSKVVMYHYKLVKPTRGVKYLISIPSLDQPVXXPSA

SEQ ID NO: 5249 - protein, 35 aa, Artificial Sequence
  Cyclic GFR-binding peptide
  MOD_RES (31)..(31): Xaa is C or S
TQYNKLFIPKKRVIELYLVSIASLQVQTPRXQVNR

SEQ ID NO: 5250 - protein, 37 aa, Artificial Sequence
  Cyclic GFR-binding peptide
  MOD_RES (2)..(4)..(36)..(37): Xaa is C or S
HXGXSRVVMNQYNKLIVNSSDDLYLVSIASLKTPAXX

SEQ ID NO: 5251 - protein, 29 aa, Artificial Sequence
  Cyclic GFR-binding peptide
EVVMDRYKKLVVKENEDFYLMSIANLETP

SEQ ID NO: 5252 - protein, 33 aa, Artificial Sequence
  Cyclic GFR-binding peptide
  MOD_RES (28)..(29): Xaa is C or S
MNRYKKLIVNNSSDFYLVSIANLKTPAXXAKPV

SEQ ID NO: 5253 - protein, 23 aa, Artificial Sequence
  Cyclic GFR-binding peptide
RHKRLFIPKKRVIEYYLVSTASL

SEQ ID NO: 5254 - protein, 31 aa, Artificial Sequence
  Cyclic GFR-binding peptide
  MOD_RES (31)..(31): Xaa is C or S
KVVMNRYKKLIVNNSSDFYLVSIANLKTPAX

SEQ ID NO: 5255 - protein, 28 aa, Artificial Sequence
  Cyclic GFR-binding peptide
  MOD_RES (1)..(1): Xaa is C or S
XSKVVMRYKKLVKPTRGVFYLISIANLD

SEQ ID NO: 5256 - protein, 38 aa, Artificial Sequence
  Cyclic GFR-binding peptide
  MOD_RES (2)..(4)..(37)..(38): Xaa is C or S
RXGXEAVSMGERHKRLTPVGMDDYYLVSTASLKTPVXX

SEQ ID NO: 5257 - protein, 41 aa, Artificial Sequence
  Cyclic GFR-binding peptide
  MOD_RES (1)..(3)..(35)..(36): Xaa is C or S
XGXAKVVMNQYNKLIVNNSSDLYLVSIASLKTPAXXAKPVA

SEQ ID NO: 5258 - protein, 34 aa, Artificial Sequence
  Cyclic GFR-binding peptide
  MOD_RES (2)..(4): Xaa is C or S
SXKXSKVIMRHKRLIKPTKGIYYLISTASLDQSV

SEQ ID NO: 5259 - protein, 29 aa, Artificial Sequence
  Cyclic GFR-binding peptide
  MOD_RES (2)..(4): Xaa is C or S
SXKXSKVIMYHYKLIKPTKGIKYLISIPS

SEQ ID NO: 5260 - protein, 34 aa, Artificial Sequence
  Cyclic GFR-binding peptide
  MOD_RES (1)..(32)..(33): Xaa is C or S
XSKVVMRHKRLVKPTRGVYYLISTASLDQPVXXP

SEQ ID NO: 5261 - protein, 31 aa, Artificial Sequence
  Cyclic GFR-binding peptide
  MOD_RES (1)..(3): Xaa is C or S
XKXSKVIMQYNKLIKPTKGILYLISIASLDQ

SEQ ID NO: 5262 - protein, 33 aa, Artificial Sequence
  Cyclic GFR-binding peptide
  MOD_RES (2)..(4): Xaa is C or S
RXGXEAVSMGERYKKLTPVGMDDFYLVSIANLK

SEQ ID NO: 5263 - protein, 31 aa, Artificial Sequence
  Cyclic GFR-binding peptide
  MOD_RES (26)..(27): Xaa is C or S
QYNKLTPVGMDDLYLVSIASLKTPVXXAKGV

SEQ ID NO: 5264 - protein, 39 aa, Artificial Sequence
  Cyclic GFR-binding peptide
  MOD_RES (1)..(3)..(35)..(36): Xaa is C or S
XGXGEVVMDYHYKLVVKENEDKYLMSIPSLETPVXXAKP

SEQ ID NO: 5265 - protein, 30 aa, Artificial Sequence
  Cyclic GFR-binding peptide
  MOD_RES (28)..(29): Xaa is C or S
MERHKRLVVKDYEDYYLMSTASLETPVXXA

SEQ ID NO: 5266 - protein, 23 aa, Artificial Sequence
  Cyclic GFR-binding peptide
YHYKLIVNNSSDKYLVSIPSLKT

SEQ ID NO: 5267 - protein, 32 aa, Artificial Sequence
  Cyclic GFR-binding peptide
  MOD_RES (26)..(27): Xaa is C or S
QYNKLIVNSSDDLYLVSIASLKTPAXXPKPVY

SEQ ID NO: 5268 - protein, 33 aa, Artificial Sequence
  Cyclic GFR-binding peptide
  MOD_RES (30)..(31): Xaa is C or S
VVMDQYNKLVVKENEDLYLMSIASLETPVXXAK

SEQ ID NO: 5269 - protein, 24 aa, Artificial Sequence
  Cyclic GFR-binding peptide
MNRYKKLIVNNSSDFYLVSIANLK

SEQ ID NO: 5270 - protein, 24 aa, Artificial Sequence
  Cyclic GFR-binding peptide
RHKRLIKPTKGIYYLISTASLDQS

SEQ ID NO: 5271 - protein, 28 aa, Artificial Sequence
  Cyclic GFR-binding peptide
VVMERYKKLVVKDYEDFYLMSIANLETP

SEQ ID NO: 5272 - protein, 38 aa, Artificial Sequence
  Cyclic GFR-binding peptide
  MOD_RES (1)..(33)..(34): Xaa is C or S
XGEVVMEQYNKLVVKDYEDLYLMSIASLETPVXXAKPI

SEQ ID NO: 5273 - protein, 33 aa, Artificial Sequence
  Cyclic GFR-binding peptide
  MOD_RES (1)..(33): Xaa is C or S
XGEVVMDRHKRLVVKENEDYYLMSTASLETPVX

SEQ ID NO: 5274 - protein, 29 aa, Artificial Sequence
  Cyclic GFR-binding peptide
  MOD_RES (2)..(2): Xaa is C or S
GXGEVVMERYKKLVVKDYEDFYLMSIANL

SEQ ID NO: 5275 - protein, 30 aa, Artificial Sequence
  Cyclic GFR-binding peptide
  MOD_RES (26)..(27): Xaa is C or S
QYNKLVVKDYEDLYLMSIASLETPVXXAKP

SEQ ID NO: 5276 - protein, 24 aa, Artificial Sequence
  Cyclic GFR-binding peptide
MEQYNKLVVKDYEDLYLMSIASLE

SEQ ID NO: 5277 - protein, 30 aa, Artificial Sequence
  Cyclic GFR-binding peptide
  MOD_RES (1)..(1): Xaa is C or S
XSRVVMNRHKRLIVNSSDDYYLVSTASLKT

SEQ ID NO: 5278 - protein, 33 aa, Artificial Sequence
  Cyclic GFR-binding peptide
  MOD_RES (27)..(28): Xaa is C or S
NRHKRLIVNSSDDYYLVSTASLKTPAXXPKPVY

SEQ ID NO: 5279 - protein, 44 aa, Artificial Sequence
  Cyclic GFR-binding peptide
  MOD_RES (2)..(4)..(41): Xaa is C or S
EXKXALHDELTYHYKLFIPKKRVIEKYLVSIPSLQVQTPRXQVN

SEQ ID NO: 5280 - protein, 32 aa, Artificial Sequence
  Cyclic GFR-binding peptide
ELTQYNKLFIPKKRVIELYLVSIASLQVQTPR

SEQ ID NO: 5281 - protein, 33 aa, Artificial Sequence
  Cyclic GFR-binding peptide
  MOD_RES (1)..(3): Xaa is C or S
XKXALHDELTYHYKLFIPKKRVIEKYLVSIPSL

SEQ ID NO: 5282 - protein, 32 aa, Artificial Sequence
  Cyclic GFR-binding peptide
  MOD_RES (31)..(32): Xaa is C or S
RVVMNQYNKLIVNSSDDLYLVSIASLKTPAXX

SEQ ID NO: 5283 - protein, 29 aa, Artificial Sequence
  Cyclic GFR-binding peptide
  MOD_RES (2)..(2): Xaa is C or S
KXSKVIMRHKRLIKPTKGIYYLISTASLD

SEQ ID NO: 5284 - protein, 23 aa, Artificial Sequence
  Cyclic GFR-binding peptide
TRHKRLFIPKKRVIEYYLVSTAS

SEQ ID NO: 5285 - protein, 33 aa, Artificial Sequence
  Cyclic GFR-binding peptide
  MOD_RES (31)..(32): Xaa is C or S
EVVMEQYNKLVVKDYEDLYLMSIASLETPVXXA

SEQ ID NO: 5286 - protein, 35 aa, Artificial Sequence
  Cyclic GFR-binding peptide
  MOD_RES (30)..(31): Xaa is C or S
VVMDQYNKLVVKENEDLYLMSIASLETPVXXAKPI

SEQ ID NO: 5287 - protein, 30 aa, Artificial Sequence
  Cyclic GFR-binding peptide
  MOD_RES (30)..(30): Xaa is C or S
VVMNYHYKLIVNSSDDKYLVSIPSLKTPAX

SEQ ID NO: 5288 - protein, 24 aa, Artificial Sequence
  Cyclic GFR-binding peptide
QYNKLIKPTKGILYLISIASLDQS

SEQ ID NO: 5289 - protein, 34 aa, Artificial Sequence
  Cyclic GFR-binding peptide
  MOD_RES (2)..(4): Xaa is C or S
RXGXGEVVMDQYNKLVVKENEDLYLMSIASLETP

SEQ ID NO: 5290 - protein, 39 aa, Artificial Sequence
  Cyclic GFR-binding peptide
  MOD_RES (2)..(39): Xaa is C or S
KXALHDELTYHYKLFIPKKRVIEKYLVSIPSLQVQTPRX

SEQ ID NO: 5291 - protein, 34 aa, Artificial Sequence
  Cyclic GFR-binding peptide
  MOD_RES (2)..(34): Xaa is C or S
GXGEVVMEYHYKLVVKDYEDKYLMSIPSLETPVX

SEQ ID NO: 5292 - protein, 33 aa, Artificial Sequence
  Cyclic GFR-binding peptide
  MOD_RES (1)..(32)..(33): Xaa is C or S
XSKVVMRHKRLVKPTRGVYYLISTASLDQPVXX

SEQ ID NO: 5293 - protein, 23 aa, Artificial Sequence
  Cyclic GFR-binding peptide
QYNKLIVNNSSDLYLVSIASLKT

SEQ ID NO: 5294 - protein, 26 aa, Artificial Sequence
  Cyclic GFR-binding peptide
ELTQYNKLFIPKKRVIELYLVSIASL

SEQ ID NO: 5295 - protein, 34 aa, Artificial Sequence
  Cyclic GFR-binding peptide
  MOD_RES (2)..(34): Xaa is C or S
GXAKVVMNQYNKLIVNNSSDLYLVSIASLKTPAX

SEQ ID NO: 5296 - protein, 32 aa, Artificial Sequence
  Cyclic GFR-binding peptide
  MOD_RES (1)..(3): Xaa is C or S
XGXEAVSMGERYKKLTPVGMDDFYLVSIANLK

SEQ ID NO: 5297 - protein, 30 aa, Artificial Sequence
  Cyclic GFR-binding peptide
LTRHKRLFIPKKRVIEYYLVSTASLQVQTP

SEQ ID NO: 5298 - protein, 34 aa, Artificial Sequence
  Cyclic GFR-binding peptide
  MOD_RES (31)..(32): Xaa is C or S
EVVMDQYNKLVVKENEDLYLMSIASLETPVXXAK

SEQ ID NO: 5299 - protein, 36 aa, Artificial Sequence
  Cyclic GFR-binding peptide
  MOD_RES (32)..(33): Xaa is C or S
SRVVMNRYKKLIVNSSDDFYLVSIANLKTPAXXPKP

SEQ ID NO: 5300 - protein, 31 aa, Artificial Sequence
  Cyclic GFR-binding peptide
  MOD_RES (1)..(1): Xaa is C or S
XSKVIMRYKKLIKPTKGIFYLISIANLDQSV

SEQ ID NO: 5301 - protein, 25 aa, Artificial Sequence
  Cyclic GFR-binding peptide
RHKRLFIPKKRVIEYYLVSTASLQV

SEQ ID NO: 5302 - protein, 24 aa, Artificial Sequence
  Cyclic GFR-binding peptide
NQYNKLIVNSSDDLYLVSIASLKT

SEQ ID NO: 5303 - protein, 41 aa, Artificial Sequence
  Cyclic GFR-binding peptide
  MOD_RES (2)..(4)..(37)..(38): Xaa is C or S
RXGXEAVSMGEQYNKLTPVGMDDLYLVSIASLKTPVXXAKG

SEQ ID NO: 5304 - protein, 29 aa, Artificial Sequence
  Cyclic GFR-binding peptide
  MOD_RES (27)..(28): Xaa is C or S
MRYKKLVKPKRGVFYLISIANLAQPVXXP

SEQ ID NO: 5305 - protein, 28 aa, Artificial Sequence
  Cyclic GFR-binding peptide
RVIMQYNKLVKPKRGVLYLISIASLAQP

SEQ ID NO: 5306 - protein, 25 aa, Artificial Sequence
  Cyclic GFR-binding peptide
QYNKLVVKENEDLYLMSIASLETPV

SEQ ID NO: 5307 - protein, 28 aa, Artificial Sequence
  Cyclic GFR-binding peptide
  MOD_RES (27)..(28): Xaa is C or S
MQYNKLIKPTKGILYLISIASLDQSVXX

SEQ ID NO: 5308 - protein, 26 aa, Artificial Sequence
  Cyclic GFR-binding peptide
VVMNQYNKLIVNSSDDLYLVSIASLQ

SEQ ID NO: 5309 - protein, 27 aa, Artificial Sequence
  Cyclic GFR-binding peptide
VIMRYKKLIKPTKGIFYLISIANLDQS

SEQ ID NO: 5310 - protein, 25 aa, Artificial Sequence
  Cyclic GFR-binding peptide
SKVIMRYKKLIKPTKGIFYLISIAN

SEQ ID NO: 5311 - protein, 28 aa, Artificial Sequence
  Cyclic GFR-binding peptide
RHKRLFIPKKRVIEYYLVSTASLQVQTP

SEQ ID NO: 5312 - protein, 31 aa, Artificial Sequence
  Cyclic GFR-binding peptide
  MOD_RES (31)..(31): Xaa is C or S
SRVIMYHYKLVKPKRGVKYLISIPSLAQPVX

SEQ ID NO: 5313 - protein, 27 aa, Artificial Sequence
  Cyclic GFR-binding peptide
RVIMRHKRLVKPKRGVYYLISTASLAQ

SEQ ID NO: 5314 - protein, 37 aa, Artificial Sequence
  Cyclic GFR-binding peptide
  MOD_RES (31)..(32): Xaa is C or S
SKVVMRHKRLVKPTRGVYYLISTASLDQPVXXPSASA

SEQ ID NO: 5315 - protein, 32 aa, Artificial Sequence
  Cyclic GFR-binding peptide
  MOD_RES (30)..(30): Xaa is C or S
QYNKLFIPKKRVIELYLVSIASLQVQTPRXQV

SEQ ID NO: 5316 - protein, 35 aa, Artificial Sequence
  Cyclic GFR-binding peptide
  MOD_RES (30)..(31): Xaa is C or S
VVMEQYNKLVVKDYEDLYLMSIASLETPVXXAKPI

SEQ ID NO: 5317 - protein, 36 aa, Artificial Sequence
  Cyclic GFR-binding peptide
  MOD_RES (1)..(33): Xaa is C or S
XSRVVMNRHKRLIVNSSDDYYLVSTASLKTPAXTPK

SEQ ID NO: 5318 - protein, 37 aa, Artificial Sequence
  Cyclic GFR-binding peptide
  MOD_RES (2)..(33)..(34): Xaa is C or S
KXSRVIMQYNKLVKPKRGVLYLISIASLAQPVXXPAA

SEQ ID NO: 5319 - protein, 24 aa, Artificial Sequence
  Cyclic GFR-binding peptide
IMYHYKLVKPKRGVKYLISIPSLA

SEQ ID NO: 5320 - protein, 33 aa, Artificial Sequence
  Cyclic GFR-binding peptide
DELTYHYKLFIPKKRVIEKYLVSIPSLQVQTPR

SEQ ID NO: 5321 - protein, 32 aa, Artificial Sequence
  Cyclic GFR-binding peptide
  MOD_RES (31)..(32): Xaa is C or S
RVVMNRHKRLIVNSSDDYYLVSTASLKTPAXX

SEQ ID NO: 5322 - protein, 31 aa, Artificial Sequence
  Cyclic GFR-binding peptide
  MOD_RES (26)..(27): Xaa is C or S
RHKRLTPVGMDDYYLVSTASLKTPVXXAKGV

SEQ ID NO: 5323 - protein, 38 aa, Artificial Sequence
  Cyclic GFR-binding peptide
  MOD_RES (1)..(33)..(34): Xaa is C or S
XSRVVMNQYNKLIVNSSDDLYLVSIASLKTPAXXPKPV

SEQ ID NO: 5324 - protein, 34 aa, Artificial Sequence
  Cyclic GFR-binding peptide
  MOD_RES (28)..(29): Xaa is C or S
IMYHYKLIKPTKGIKYLISIPSLDQSVXXPSASA

SEQ ID NO: 5325 - protein, 28 aa, Artificial Sequence
  Cyclic GFR-binding peptide
SKVVMQYNKLVKPTRGVLYLISIASLDQ

SEQ ID NO: 5326 - protein, 31 aa, Artificial Sequence
  Cyclic GFR-binding peptide
  MOD_RES (2)..(2): Xaa is C or S
GXGEVVMDQYNKLVVKENEDLYLMSIASLET

SEQ ID NO: 5327 - protein, 38 aa, Artificial Sequence
  Cyclic GFR-binding peptide
  MOD_RES (2)..(4)..(37)..(38): Xaa is C or S
RXGXEAVSMGEQYNKLTPVGMDDLYLVSIASLKTPVXX

SEQ ID NO: 5328 - protein, 32 aa, Artificial Sequence
  Cyclic GFR-binding peptide
  MOD_RES (1)..(3): Xaa is C or S
XKXSRVIMRHKRLVKPKRGVYYLISTASLAQP

SEQ ID NO: 5329 - protein, 26 aa, Artificial Sequence
  Cyclic GFR-binding peptide
  MOD_RES (26)..(26): Xaa is C or S
RHKRLTPVGMDDYYLVSTASLKTPVX

SEQ ID NO: 5330 - protein, 27 aa, Artificial Sequence
  Cyclic GFR-binding peptide
  MOD_RES (27)..(27): Xaa is C or S
EQYNKLVVKDYEDLYLMSIASLETPVX

SEQ ID NO: 5331 - protein, 26 aa, Artificial Sequence
  Cyclic GFR-binding peptide
GEVVMDQYNKLVVKENEDLYLMSIAS

SEQ ID NO: 5332 - protein, 28 aa, Artificial Sequence
  Cyclic GFR-binding peptide
  MOD_RES (2)..(2): Xaa is C or S
GXGEVVMDYHYKLVVKENEDKYLMSIPS

SEQ ID NO: 5333 - protein, 34 aa, Artificial Sequence
  Cyclic GFR-binding peptide
  MOD_RES (2)..(34): Xaa is C or S
GXAKVVMNYHYKLIVNNSSDKYLVSIPSLKTPAX

SEQ ID NO: 5334 - protein, 29 aa, Artificial Sequence
  Cyclic GFR-binding peptide
  MOD_RES (29)..(29): Xaa is C or S
VMERHKRLVVKDYEDYYLMSTASLETPVX

SEQ ID NO: 5335 - protein, 28 aa, Artificial Sequence
  Cyclic GFR-binding peptide
HDELTRHKRLFIPKKRVIEYYLVSTASL

SEQ ID NO: 5336 - protein, 36 aa, Artificial Sequence
  Cyclic GFR-binding peptide
  MOD_RES (2)..(4)..(35)..(36): Xaa is C or S
SXKXSKVIMRHKRLIKPTKGIYYLISTASLDQSVXX

SEQ ID NO: 5337 - protein, 36 aa, Artificial Sequence
  Cyclic GFR-binding peptide
  MOD_RES (31)..(32): Xaa is C or S
EVVMDYHYKLVVKENEDKYLMSIPSLETPVXXAKPI

SEQ ID NO: 5338 - protein, 38 aa, Artificial Sequence
  Cyclic GFR-binding peptide
  MOD_RES (2)..(34)..(35): Xaa is C or S
GXGEVVMDRHKRLVVKENEDYYLMSTASLETPVXXAKP

SEQ ID NO: 5339 - protein, 34 aa, Artificial Sequence
  Cyclic GFR-binding peptide
  MOD_RES (30)..(31): Xaa is C or S
VVMEYHYKLVVKDYEDKYLMSIPSLETPVXXAKP

SEQ ID NO: 5340 - protein, 36 aa, Artificial Sequence
  Cyclic GFR-binding peptide
  MOD_RES (32)..(33): Xaa is C or S
ARVVMNRHKRLIVNSSDDYYLVSTASLQTPAXXPKP

SEQ ID NO: 5341 - protein, 32 aa, Artificial Sequence
  Cyclic GFR-binding peptide
  MOD_RES (31)..(32): Xaa is C or S
RVVMNQYNKLIVNSSDDLYLVSIASLQTPAXX

SEQ ID NO: 5342 - protein, 33 aa, Artificial Sequence
  Cyclic GFR-binding peptide
  MOD_RES (28)..(28): Xaa is C or S
MNYHYKLIVNSSDDKYLVSIPSLKTPAXTPKTV

SEQ ID NO: 5343 - protein, 33 aa, Artificial Sequence
  Cyclic GFR-binding peptide
  MOD_RES (30)..(30): Xaa is C or S
RYKKLFIPKKRVIEFYLVSIANLQVQTPRXQVN

SEQ ID NO: 5344 - protein, 32 aa, Artificial Sequence
  Cyclic GFR-binding peptide
  MOD_RES (2)..(2): Xaa is C or S
GXGEVVMDRHKRLVVKENEDYYLMSTASLETP

SEQ ID NO: 5345 - protein, 32 aa, Artificial Sequence
  Cyclic GFR-binding peptide
  MOD_RES (1)..(3): Xaa is C or S
XKXSKVVMRYKKLVKPTRGVFYLISIANLDQP

SEQ ID NO: 5346 - protein, 30 aa, Artificial Sequence
  Cyclic GFR-binding peptide
  MOD_RES (30)..(30): Xaa is C or S
KVIMRHKRLIKPTKGIYYLISTASLDQSVX

SEQ ID NO: 5347 - protein, 34 aa, Artificial Sequence
  Cyclic GFR-binding peptide
  MOD_RES (1)..(3): Xaa is C or S
XGXAKVVMNYHYKLIVNNSSDKYLVSIPSLKTPA

SEQ ID NO: 5348 - protein, 32 aa, Artificial Sequence
  Cyclic GFR-binding peptide
  MOD_RES (26)..(27): Xaa is C or S
YHYKLVKPKRGVKYLISIPSLAQPVXXPAASA

SEQ ID NO: 5349 - protein, 31 aa, Artificial Sequence
  Cyclic GFR-binding peptide
  MOD_RES (2)..(2): Xaa is C or S
GXGEVVMDYHYKLVVKENEDKYLMSIPSLET

SEQ ID NO: 5350 - protein, 31 aa, Artificial Sequence
  Cyclic GFR-binding peptide
  MOD_RES (1)..(1): Xaa is C or S
XALHDELTYHYKLFIPKKRVIEKYLVSIPSL

SEQ ID NO: 5351 - protein, 36 aa, Artificial Sequence
  Cyclic GFR-binding peptide
  MOD_RES (34)..(34): Xaa is C or S
DELTQYNKLFIPKKRVIELYLVSIASLQVQTPRXQV

SEQ ID NO: 5352 - protein, 30 aa, Artificial Sequence
  Cyclic GFR-binding peptide
  MOD_RES (29)..(30): Xaa is C or S
VMNYHYKLIVNSSDDKYLVSIPSLKTPAXX

SEQ ID NO: 5353 - protein, 34 aa, Artificial Sequence
  Cyclic GFR-binding peptide
  MOD_RES (31)..(32): Xaa is C or S
SRVIMRHKRLVKPKRGVYYLISTASLAQPVXXPA

SEQ ID NO: 5354 - protein, 38 aa, Artificial Sequence
  Cyclic GFR-binding peptide
  MOD_RES (2)..(4): Xaa is C or S
EXKXALHDELTYHYKLFIPKKRVIEKYLVSIPSLQVQT

SEQ ID NO: 5355 - protein, 31 aa, Artificial Sequence
  Cyclic GFR-binding peptide
  MOD_RES (30)..(31): Xaa is C or S
KVIMRYKKLIKPTKGIFYLISIANLDQSVXX

SEQ ID NO: 5356 - protein, 33 aa, Artificial Sequence
  Cyclic GFR-binding peptide
  MOD_RES (29)..(30): Xaa is C or S
VVMRYKKLVKPTRGVFYLISIANLDQPVXXPSA

SEQ ID NO: 5357 - protein, 31 aa, Artificial Sequence
  Cyclic GFR-binding peptide
  MOD_RES (27)..(27): Xaa is C or S
NYHYKLIVNSSDDKYLVSIPSLKTPAXTPKT

SEQ ID NO: 5358 - protein, 29 aa, Artificial Sequence
  Cyclic GFR-binding peptide
EAVSMGERHKRLTPVGMDDYYLVSTASLK

SEQ ID NO: 5359 - protein, 33 aa, Artificial Sequence
  Cyclic GFR-binding peptide
  MOD_RES (2)..(4): Xaa is C or S
SXKXSKVVMYHYKLVKPTRGVKYLISIPSLDQP

SEQ ID NO: 5360 - protein, 35 aa, Artificial Sequence
  Cyclic GFR-binding peptide
LHDELTRHKRLFIPKKRVIEYYLVSTASLQVQTPR

SEQ ID NO: 5361 - protein, 26 aa, Artificial Sequence
  Cyclic GFR-binding peptide
  MOD_RES (26)..(26): Xaa is C or S
RHKRLIVNSSDDYYLVSTASLQTPAX

SEQ ID NO: 5362 - protein, 26 aa, Artificial Sequence
  Cyclic GFR-binding peptide
  MOD_RES (26)..(26): Xaa is C or S
YHYKLIVNNSSDKYLVSIPSLKTPAX

SEQ ID NO: 5363 - protein, 31 aa, Artificial Sequence
  Cyclic GFR-binding peptide
  MOD_RES (1)..(3): Xaa is C or S
XGXGEVVMDRYKKLVVKENEDFYLMSIANLE

SEQ ID NO: 5364 - protein, 33 aa, Artificial Sequence
  Cyclic GFR-binding peptide
  MOD_RES (28)..(29): Xaa is C or S
GERHKRLTPVGMDDYYLVSTASLKTPVXXAKGV

SEQ ID NO: 5365 - protein, 25 aa, Artificial Sequence
  Cyclic GFR-binding peptide
DYHYKLVVKENEDKYLMSIPSLETP

SEQ ID NO: 5366 - protein, 37 aa, Artificial Sequence
  Cyclic GFR-binding peptide
  MOD_RES (1)..(33)..(34): Xaa is C or S
XARVVMNYHYKLIVNSSDDKYLVSIPSLQTPAXXPKP

SEQ ID NO: 5367 - protein, 26 aa, Artificial Sequence
  Cyclic GFR-binding peptide
MNRHKRLIVNSSDDYYLVSTASLKTP

SEQ ID NO: 5368 - protein, 32 aa, Artificial Sequence
  Cyclic GFR-binding peptide
  MOD_RES (1)..(3): Xaa is C or S
XGXGEVVMEYHYKLVVKDYEDKYLMSIPSLET

SEQ ID NO: 5369 - protein, 37 aa, Artificial Sequence
  Cyclic GFR-binding peptide
  MOD_RES (1)..(1): Xaa is C or S
XALHDELTQYNKLFIPKKRVIELYLVSIASLQVQTPR

SEQ ID NO: 5370 - protein, 30 aa, Artificial Sequence
  Cyclic GFR-binding peptide
  MOD_RES (2)..(2): Xaa is C or S
KXSRVIMRHKRLVKPKRGVYYLISTASLAQ

SEQ ID NO: 5371 - protein, 30 aa, Artificial Sequence
  Cyclic GFR-binding peptide
  MOD_RES (26)..(27): Xaa is C or S
RHKRLIKPTKGIYYLISTASLDQSVXXPSA

SEQ ID NO: 5372 - protein, 34 aa, Artificial Sequence
  Cyclic GFR-binding peptide
  MOD_RES (32)..(33): Xaa is C or S
SRVVMNYHYKLIVNSSDDKYLVSIPSLKTPAXXP

SEQ ID NO: 5373 - protein, 22 aa, Artificial Sequence
  Cyclic GFR-binding peptide
RHKRLIVNSSDDYYLVSTASLQ

SEQ ID NO: 5374 - protein, 22 aa, Artificial Sequence
  Cyclic GFR-binding peptide
YHYKLIVNNSSDKYLVSIPSLK

SEQ ID NO: 5375 - protein, 35 aa, Artificial Sequence
  Cyclic GFR-binding peptide
  MOD_RES (2)..(4): Xaa is C or S
HXGXARVVMNYHYKLIVNSSDDKYLVSIPSLQTPA

SEQ ID NO: 5376 - protein, 34 aa, Artificial Sequence
  Cyclic GFR-binding peptide
  MOD_RES (32)..(32): Xaa is C or S
SRVVMNRHKRLIVNSSDDYYLVSTASLKTPAXTP

SEQ ID NO: 5377 - protein, 31 aa, Artificial Sequence
  Cyclic GFR-binding peptide
  MOD_RES (29)..(30): Xaa is C or S
VMNQYNKLIVNSSDDLYLVSIASLQTPAXXP

SEQ ID NO: 5378 - protein, 32 aa, Artificial Sequence
  Cyclic GFR-binding peptide
  MOD_RES (2)..(2): Xaa is C or S
GXARVVMNRYKKLIVNSSDDFYLVSIANLQTP

SEQ ID NO: 5379 - protein, 29 aa, Artificial Sequence
  Cyclic GFR-binding peptide
  MOD_RES (28)..(29): Xaa is C or S
MNQYNKLIVNNSSDLYLVSIASLKTPAXX

SEQ ID NO: 5380 - protein, 32 aa, Artificial Sequence
  Cyclic GFR-binding peptide
  MOD_RES (31)..(32): Xaa is C or S
KVVMNYHYKLIVNNSSDKYLVSIPSLKTPAXX

SEQ ID NO: 5381 - protein, 31 aa, Artificial Sequence
  Cyclic GFR-binding peptide
  MOD_RES (1)..(1): Xaa is C or S
XEAVSMGEQYNKLTPVGMDDLYLVSIASLKT

SEQ ID NO: 5382 - protein, 35 aa, Artificial Sequence
  Cyclic GFR-binding peptide
  MOD_RES (32)..(32): Xaa is C or S
SRVVMNRYKKLIVNSSDDFYLVSIANLKTPAXTPK

SEQ ID NO: 5383 - protein, 25 aa, Artificial Sequence
  Cyclic GFR-binding peptide
KVVMRHKRLVKPTRGVYYLISTASL

SEQ ID NO: 5384 - protein, 31 aa, Artificial Sequence
  Cyclic GFR-binding peptide
  MOD_RES (26)..(27): Xaa is C or S
YHYKLIVNNSSDKYLVSIPSLKTPAXXAKPV

SEQ ID NO: 5385 - protein, 35 aa, Artificial Sequence
  Cyclic GFR-binding peptide
  MOD_RES (31)..(32): Xaa is C or S
RVVMNRYKKLIVNSSDDFYLVSIANLKTPAXXPKP

SEQ ID NO: 5386 - protein, 41 aa, Artificial Sequence
  Cyclic GFR-binding peptide
  MOD_RES (2)..(4)..(36)..(37): Xaa is C or S
RXGXGEVVMDRHKRLVVKENEDYYLMSTASLETPVXXAKPI

SEQ ID NO: 5387 - protein, 31 aa, Artificial Sequence
  Cyclic GFR-binding peptide
  MOD_RES (28)..(29): Xaa is C or S
MNRYKKLIVNNSSDFYLVSIANLKTPAXXAK

SEQ ID NO: 5388 - protein, 35 aa, Artificial Sequence
  Cyclic GFR-binding peptide
  MOD_RES (32)..(32): Xaa is C or S
LTYHYKLFIPKKRVIEKYLVSIPSLQVQTPRXQVN

SEQ ID NO: 5389 - protein, 39 aa, Artificial Sequence
  Cyclic GFR-binding peptide
  MOD_RES (1)..(3)..(36)..(37): Xaa is C or S
XGXEAVSMGERYKKLTPVGMDDFYLVSIANLKTPVXXAK

SEQ ID NO: 5390 - protein, 33 aa, Artificial Sequence
  Cyclic GFR-binding peptide
  MOD_RES (2)..(2): Xaa is C or S
GXEAVSMGEQYNKLTPVGMDDLYLVSIASLKTP

SEQ ID NO: 5391 - protein, 34 aa, Artificial Sequence
  Cyclic GFR-binding peptide
HDELTQYNKLFIPKKRVIELYLVSIASLQVQTPR

SEQ ID NO: 5392 - protein, 21 aa, Artificial Sequence
  Cyclic GFR-binding peptide
QYNKLVKPKRGVLYLISIASL

SEQ ID NO: 5393 - protein, 32 aa, Artificial Sequence
  Cyclic GFR-binding peptide
  MOD_RES (31)..(32): Xaa is C or S
VSMGEQYNKLTPVGMDDLYLVSIASLKTPVXX

SEQ ID NO: 5394 - protein, 26 aa, Artificial Sequence
  Cyclic GFR-binding peptide
MRYKKLVKPKRGVFYLISIANLAQPV

SEQ ID NO: 5395 - protein, 21 aa, Artificial Sequence
  Cyclic GFR-binding peptide
MYHYKLVKPTRGVKYLISIPS

SEQ ID NO: 5396 - protein, 22 aa, Artificial Sequence
  Cyclic GFR-binding peptide
MYHYKLIKPTKGIKYLISIPSL

SEQ ID NO: 5397 - protein, 36 aa, Artificial Sequence
  Cyclic GFR-binding peptide
  MOD_RES (2)..(2): Xaa is C or S
KXALHDELTRHKRLFIPKKRVIEYYLVSTASLQVQT

SEQ ID NO: 5398 - protein, 22 aa, Artificial Sequence
  Cyclic GFR-binding peptide
EQYNKLVVKDYEDLYLMSIASL

SEQ ID NO: 5399 - protein, 31 aa, Artificial Sequence
  Cyclic GFR-binding peptide
ALHDELTYHYKLFIPKKRVIEKYLVSIPSLQ

SEQ ID NO: 5400 - protein, 32 aa, Artificial Sequence
  Cyclic GFR-binding peptide
  MOD_RES (26)..(27): Xaa is C or S
RHKRLIVNSSDDYYLVSTASLQTPAXXPKPVT

SEQ ID NO: 5401 - protein, 26 aa, Artificial Sequence
  Cyclic GFR-binding peptide
  MOD_RES (26)..(26): Xaa is C or S
YHYKLVKPTRGVKYLISIPSLDQPVX

SEQ ID NO: 5402 - protein, 23 aa, Artificial Sequence
  Cyclic GFR-binding peptide
RHKRLIVNSSDDYYLVSTASLQT

SEQ ID NO: 5403 - protein, 32 aa, Artificial Sequence
  Cyclic GFR-binding peptide
  MOD_RES (32)..(32): Xaa is C or S
SRVVMNRHKRLIVNSSDDYYLVSTASLKTPAX

SEQ ID NO: 5404 - protein, 23 aa, Artificial Sequence
  Cyclic GFR-binding peptide
RHKRLIKPTKGIYYLISTASLDQ

SEQ ID NO: 5405 - protein, 32 aa, Artificial Sequence
  Cyclic GFR-binding peptide
  MOD_RES (31)..(32): Xaa is C or S
RVVMNYHYKLIVNSSDDKYLVSIPSLQTPAXX

SEQ ID NO: 5406 - protein, 30 aa, Artificial Sequence
  Cyclic GFR-binding peptide
  MOD_RES (1)..(3): Xaa is C or S
XKXSKVVMQYNKLVKPTRGVLYLISIASLD

SEQ ID NO: 5407 - protein, 32 aa, Artificial Sequence
  Cyclic GFR-binding peptide
  MOD_RES (27)..(28): Xaa is C or S
MRHKRLIKPTKGIYYLISTASLDQSVXXPSAS

SEQ ID NO: 5408 - protein, 24 aa, Artificial Sequence
  Cyclic GFR-binding peptide
VVMNYHYKLIVNSSDDKYLVSIPS

SEQ ID NO: 5409 - protein, 33 aa, Artificial Sequence
  Cyclic GFR-binding peptide
  MOD_RES (27)..(28): Xaa is C or S
EQYNKLVVKDYEDLYLMSIASLETPVXXAKPIS

SEQ ID NO: 5410 - protein, 35 aa, Artificial Sequence
  Cyclic GFR-binding peptide
  MOD_RES (2)..(4): Xaa is C or S
RXGXEAVSMGERYKKLTPVGMDDFYLVSIANLKTP

SEQ ID NO: 5411 - protein, 35 aa, Artificial Sequence
  Cyclic GFR-binding peptide
  MOD_RES (30)..(30): Xaa is C or S
VVMNRYKKLIVNSSDDFYLVSIANLKTPAXTPKTV

SEQ ID NO: 5412 - protein, 32 aa, Artificial Sequence
  Cyclic GFR-binding peptide
  MOD_RES (1)..(32): Xaa is C or S
XSKVIMYHYKLIKPTKGIKYLISIPSLDQSVX

SEQ ID NO: 5413 - protein, 29 aa, Artificial Sequence
  Cyclic GFR-binding peptide
GEVVMERHKRLVVKDYEDYYLMSTASLET

SEQ ID NO: 5414 - protein, 33 aa, Artificial Sequence
  Cyclic GFR-binding peptide
  MOD_RES (1)..(3): Xaa is C or S
XGXGEVVMDQYNKLVVKENEDLYLMSIASLETP

SEQ ID NO: 5415 - protein, 20 aa, Artificial Sequence
  Cyclic GFR-binding peptide
RHKRLVVKDYEDYYLMSTAS

SEQ ID NO: 5416 - protein, 30 aa, Artificial Sequence
  Cyclic GFR-binding peptide
  MOD_RES (2)..(4): Xaa is C or S
SXKXSKVIMQYNKLIKPTKGILYLISIASL

SEQ ID NO: 5417 - protein, 29 aa, Artificial Sequence
  Cyclic GFR-binding peptide
  MOD_RES (28)..(28): Xaa is C or S
MNYHYKLIVNSSDDKYLVSIPSLKTPAXT

SEQ ID NO: 5418 - protein, 26 aa, Artificial Sequence
  Cyclic GFR-binding peptide
IMRHKRLVKPKRGVYYLISTASLAQP

SEQ ID NO: 5419 - protein, 25 aa, Artificial Sequence
  Cyclic GFR-binding peptide
VIMRYKKLIKPTKGIFYLISIANLD

SEQ ID NO: 5420 - protein, 29 aa, Artificial Sequence
  Cyclic GFR-binding peptide
  MOD_RES (29)..(29): Xaa is C or S
VIMRYKKLIKPTKGIFYLISIANLDQSVX

SEQ ID NO: 5421 - protein, 26 aa, Artificial Sequence
  Cyclic GFR-binding peptide
VMRYKKLVKPTRGVFYLISIANLDQP

SEQ ID NO: 5422 - protein, 24 aa, Artificial Sequence
  Cyclic GFR-binding peptide
EQYNKLVVKDYEDLYLMSIASLET

SEQ ID NO: 5423 - protein, 35 aa, Artificial Sequence
  Cyclic GFR-binding peptide
  MOD_RES (31)..(32): Xaa is C or S
SKVIMYHYKLIKPTKGIKYLISIPSLDQSVXXPSA

SEQ ID NO: 5424 - protein, 30 aa, Artificial Sequence
  Cyclic GFR-binding peptide
SRVVMNYHYKLIVNSSDDKYLVSIPSLKTP

SEQ ID NO: 5425 - protein, 28 aa, Artificial Sequence
  Cyclic GFR-binding peptide
  MOD_RES (26)..(27): Xaa is C or S
RYKKLIVNNSSDFYLVSIANLKTPAXXA

SEQ ID NO: 5426 - protein, 29 aa, Artificial Sequence
  Cyclic GFR-binding peptide
DELTYHYKLFIPKKRVIEKYLVSIPSLQV

SEQ ID NO: 5427 - protein, 29 aa, Artificial Sequence
  Cyclic GFR-binding peptide
  MOD_RES (26)..(26): Xaa is C or S
QYNKLIVNSSDDLYLVSIASLKTPAXTPK

SEQ ID NO: 5428 - protein, 31 aa, Artificial Sequence
  Cyclic GFR-binding peptide
ARVVMNQYNKLIVNSSDDLYLVSIASLQTPA

SEQ ID NO: 5429 - protein, 23 aa, Artificial Sequence
  Cyclic GFR-binding peptide
NQYNKLIVNNSSDLYLVSIASLK

SEQ ID NO: 5430 - protein, 29 aa, Artificial Sequence
  Cyclic GFR-binding peptide
  MOD_RES (29)..(29): Xaa is C or S
VMNRYKKLIVNSSDDFYLVSIANLKTPAX

SEQ ID NO: 5431 - protein, 30 aa, Artificial Sequence
  Cyclic GFR-binding peptide
  MOD_RES (29)..(29): Xaa is C or S
VMNYHYKLIVNSSDDKYLVSIPSLKTPAXT

SEQ ID NO: 5432 - protein, 33 aa, Artificial Sequence
  Cyclic GFR-binding peptide
  MOD_RES (1)..(33): Xaa is C or S
XARVVMNRHKRLIVNSSDDYYLVSTASLQTPAX

SEQ ID NO: 5433 - protein, 27 aa, Artificial Sequence
  Cyclic GFR-binding peptide
IMYHYKLVKPKRGVKYLISIPSLAQPV

SEQ ID NO: 5434 - protein, 28 aa, Artificial Sequence
  Cyclic GFR-binding peptide
  MOD_RES (26)..(27): Xaa is C or S
RYKKLVKPTRGVFYLISIANLDQPVXXP

SEQ ID NO: 5435 - protein, 34 aa, Artificial Sequence
  Cyclic GFR-binding peptide
  MOD_RES (2)..(4): Xaa is C or S
SXKXSKVVMRYKKLVKPTRGVFYLISIANLDQPV

SEQ ID NO: 5436 - protein, 27 aa, Artificial Sequence
  Cyclic GFR-binding peptide
ARVVMNYHYKLIVNSSDDKYLVSIPSL

SEQ ID NO: 5437 - protein, 32 aa, Artificial Sequence
  Cyclic GFR-binding peptide
  MOD_RES (29)..(30): Xaa is C or S
VVMYHYKLVKPTRGVKYLISIPSLDQPVXXPS

SEQ ID NO: 5438 - protein, 34 aa, Artificial Sequence
  Cyclic GFR-binding peptide
  MOD_RES (30)..(30): Xaa is C or S
RHKRLFIPKKRVIEYYLVSTASLQVQTPRXQVNR

SEQ ID NO: 5439 - protein, 37 aa, Artificial Sequence
  Cyclic GFR-binding peptide
  MOD_RES (1)..(3): Xaa is C or S
XKXALHDELTYHYKLFIPKKRVIEKYLVSIPSLQVQT

SEQ ID NO: 5440 - protein, 27 aa, Artificial Sequence
  Cyclic GFR-binding peptide
KVVMQYNKLVKPTRGVLYLISIASLDQ

SEQ ID NO: 5441 - protein, 37 aa, Artificial Sequence
  Cyclic GFR-binding peptide
  MOD_RES (1)..(3)..(35)..(36): Xaa is C or S
XGXSRVVMNYHYKLIVNSSDDKYLVSIPSLKTPAXXP

SEQ ID NO: 5442 - protein, 33 aa, Artificial Sequence
  Cyclic GFR-binding peptide
  MOD_RES (30)..(31): Xaa is C or S
VVMNRYKKLIVNSSDDFYLVSIANLQTPAXXPK

SEQ ID NO: 5443 - protein, 30 aa, Artificial Sequence
  Cyclic GFR-binding peptide
  MOD_RES (1)..(3): Xaa is C or S
XGXGEVVMERYKKLVVKDYEDFYLMSIANL

SEQ ID NO: 5444 - protein, 37 aa, Artificial Sequence
  Cyclic GFR-binding peptide
  MOD_RES (1)..(33)..(34): Xaa is C or S
XSRVVMNRHKRLIVNSSDDYYLVSTASLKTPAXXPKP

SEQ ID NO: 5445 - protein, 25 aa, Artificial Sequence
  Cyclic GFR-binding peptide
VMYHYKLVKPTRGVKYLISIPSLDQ

SEQ ID NO: 5446 - protein, 24 aa, Artificial Sequence
  Cyclic GFR-binding peptide
IMRHKRLVKPKRGVYYLISTASLA

SEQ ID NO: 5447 - protein, 32 aa, Artificial Sequence
  Cyclic GFR-binding peptide
  MOD_RES (31)..(32): Xaa is C or S
SKVVMRHKRLVKPTRGVYYLISTASLDQPVXX

SEQ ID NO: 5448 - protein, 27 aa, Artificial Sequence
  Cyclic GFR-binding peptide
SRVVMNYHYKLIVNSSDDKYLVSIPSL

SEQ ID NO: 5449 - protein, 40 aa, Artificial Sequence
  Cyclic GFR-binding peptide
  MOD_RES (1)..(3)..(35)..(36): Xaa is C or S
XGXARVVMNYHYKLIVNSSDDKYLVSIPSLQTPAXXPKPV

SEQ ID NO: 5450 - protein, 36 aa, Artificial Sequence
  Cyclic GFR-binding peptide
  MOD_RES (31)..(32): Xaa is C or S
EVVMEQYNKLVVKDYEDLYLMSIASLETPVXXAKPI

SEQ ID NO: 5451 - protein, 27 aa, Artificial Sequence
  Cyclic GFR-binding peptide
MGERYKKLTPVGMDDFYLVSIANLKTP

SEQ ID NO: 5452 - protein, 33 aa, Artificial Sequence
  Cyclic GFR-binding peptide
  MOD_RES (29)..(30): Xaa is C or S
VIMQYNKLVKPKRGVLYLISIASLAQPVXXPAA

SEQ ID NO: 5453 - protein, 33 aa, Artificial Sequence
  Cyclic GFR-binding peptide
  MOD_RES (28)..(29): Xaa is C or S
MNRYKKLIVNSSDDFYLVSIANLQTPAXXPKPV

SEQ ID NO: 5454 - protein, 23 aa, Artificial Sequence
  Cyclic GFR-binding peptide
MRHKRLIKPTKGIYYLISTASLD

SEQ ID NO: 5455 - protein, 40 aa, Artificial Sequence
  Cyclic GFR-binding peptide
  MOD_RES (1)..(38): Xaa is C or S
XALHDELTYHYKLFIPKKRVIEKYLVSIPSLQVQTPRXQV

SEQ ID NO: 5456 - protein, 26 aa, Artificial Sequence
  Cyclic GFR-binding peptide
SKVIMRYKKLIKPTKGIFYLISIANL

SEQ ID NO: 5457 - protein, 26 aa, Artificial Sequence
  Cyclic GFR-binding peptide
IMYHYKLVKPKRGVKYLISIPSLAQP

SEQ ID NO: 5458 - protein, 32 aa, Artificial Sequence
  Cyclic GFR-binding peptide
  MOD_RES (2)..(4): Xaa is C or S
RXGXEAVSMGEQYNKLTPVGMDDLYLVSIASL

SEQ ID NO: 5459 - protein, 29 aa, Artificial Sequence
  Cyclic GFR-binding peptide
  MOD_RES (28)..(29): Xaa is C or S
IMRHKRLIKPTKGIYYLISTASLDQSVXX

SEQ ID NO: 5460 - protein, 28 aa, Artificial Sequence
  Cyclic GFR-binding peptide
  MOD_RES (2)..(2): Xaa is C or S
GXGEVVMDQYNKLVVKENEDLYLMSIAS

SEQ ID NO: 5461 - protein, 31 aa, Artificial Sequence
  Cyclic GFR-binding peptide
  MOD_RES (28)..(29): Xaa is C or S
MDRHKRLVVKENEDYYLMSTASLETPVXXAK

SEQ ID NO: 5462 - protein, 34 aa, Artificial Sequence
  Cyclic GFR-binding peptide
  MOD_RES (28)..(29): Xaa is C or S
MNRYKKLIVNSSDDFYLVSIANLKTPAXXPKPVY

SEQ ID NO: 5463 - protein, 36 aa, Artificial Sequence
  Cyclic GFR-binding peptide
  MOD_RES (30)..(30): Xaa is C or S
VVMNYHYKLIVNSSDDKYLVSIPSLKTPAXTPKTVH

SEQ ID NO: 5464 - protein, 28 aa, Artificial Sequence
  Cyclic GFR-binding peptide
  MOD_RES (28)..(28): Xaa is C or S
IMRHKRLIKPTKGIYYLISTASLDQSVX

SEQ ID NO: 5465 - protein, 31 aa, Artificial Sequence
  Cyclic GFR-binding peptide
  MOD_RES (29)..(30): Xaa is C or S
MGERHKRLTPVGMDDYYLVSTASLKTPVXXA

SEQ ID NO: 5466 - protein, 33 aa, Artificial Sequence
  Cyclic GFR-binding peptide
  MOD_RES (30)..(31): Xaa is C or S
RVIMYHYKLVKPKRGVKYLISIPSLAQPVXXPA

SEQ ID NO: 5467 - protein, 34 aa, Artificial Sequence
  Cyclic GFR-binding peptide
  MOD_RES (33)..(33): Xaa is C or S
ELTRYKKLFIPKKRVIEFYLVSIANLQVQTPRXQ

SEQ ID NO: 5468 - protein, 35 aa, Artificial Sequence
  Cyclic GFR-binding peptide
  MOD_RES (2)..(33)..(34): Xaa is C or S
KXSKVVMQYNKLVKPTRGVLYLISIASLDQPVXXP

SEQ ID NO: 5469 - protein, 31 aa, Artificial Sequence
  Cyclic GFR-binding peptide
  MOD_RES (2)..(2): Xaa is C or S
GXAKVVMNQYNKLIVNNSSDLYLVSIASLKT

SEQ ID NO: 5470 - protein, 32 aa, Artificial Sequence
  Cyclic GFR-binding peptide
  MOD_RES (1)..(3): Xaa is C or S
XGXGEVVMDYHYKLVVKENEDKYLMSIPSLET

SEQ ID NO: 5471 - protein, 23 aa, Artificial Sequence
  Cyclic GFR-binding peptide
DRHKRLVVKENEDYYLMSTASLE

SEQ ID NO: 5472 - protein, 34 aa, Artificial Sequence
  Cyclic GFR-binding peptide
  MOD_RES (1)..(32)..(33): Xaa is C or S
XSKVIMYHYKLIKPTKGIKYLISIPSLDQSVXXP

SEQ ID NO: 5473 - protein, 32 aa, Artificial Sequence
  Cyclic GFR-binding peptide
  MOD_RES (26)..(27): Xaa is C or S
YHYKLVVKENEDKYLMSIPSLETPVXXAKPIK

SEQ ID NO: 5474 - protein, 26 aa, Artificial Sequence
  Cyclic GFR-binding peptide
VMDRYKKLVVKENEDFYLMSIANLET

SEQ ID NO: 5475 - protein, 28 aa, Artificial Sequence
  Cyclic GFR-binding peptide
  MOD_RES (27)..(28): Xaa is C or S
NRYKKLIVNSSDDFYLVSIANLQTPAXX

SEQ ID NO: 5476 - protein, 31 aa, Artificial Sequence
  Cyclic GFR-binding peptide
  MOD_RES (31)..(31): Xaa is C or S
VSMGEQYNKLTPVGMDDLYLVSIASLKTPVX

SEQ ID NO: 5477 - protein, 27 aa, Artificial Sequence
  Cyclic GFR-binding peptide
VMNRYKKLIVNNSSDFYLVSIANLKTP

SEQ ID NO: 5478 - protein, 31 aa, Artificial Sequence
  Cyclic GFR-binding peptide
GEVVMEQYNKLVVKDYEDLYLMSIASLETPV

SEQ ID NO: 5479 - protein, 32 aa, Artificial Sequence
  Cyclic GFR-binding peptide
  MOD_RES (31)..(32): Xaa is C or S
KVVMNQYNKLIVNNSSDLYLVSIASLKTPAXX

SEQ ID NO: 5480 - protein, 22 aa, Artificial Sequence
  Cyclic GFR-binding peptide
IMYHYKLVKPKRGVKYLISIPS

SEQ ID NO: 5481 - protein, 37 aa, Artificial Sequence
  Cyclic GFR-binding peptide
  MOD_RES (33)..(34): Xaa is C or S
EAVSMGEQYNKLTPVGMDDLYLVSIASLKTPVXXAKG

SEQ ID NO: 5482 - protein, 30 aa, Artificial Sequence
  Cyclic GFR-binding peptide
  MOD_RES (29)..(30): Xaa is C or S
VMDQYNKLVVKENEDLYLMSIASLETPVXX

SEQ ID NO: 5483 - protein, 33 aa, Artificial Sequence
  Cyclic GFR-binding peptide
  MOD_RES (1)..(33): Xaa is C or S
XGEVVMEYHYKLVVKDYEDKYLMSIPSLETPVX

SEQ ID NO: 5484 - protein, 32 aa, Artificial Sequence
  Cyclic GFR-binding peptide
  MOD_RES (27)..(28): Xaa is C or S
MYHYKLVKPKRGVKYLISIPSLAQPVXXPAAS

SEQ ID NO: 5485 - protein, 27 aa, Artificial Sequence
  Cyclic GFR-binding peptide
  MOD_RES (27)..(27): Xaa is C or S
MYHYKLIKPTKGIKYLISIPSLDQSVX

SEQ ID NO: 5486 - protein, 27 aa, Artificial Sequence
  Cyclic GFR-binding peptide
  MOD_RES (26)..(27): Xaa is C or S
RHKRLIVNSSDDYYLVSTASLKTPAXX

SEQ ID NO: 5487 - protein, 34 aa, Artificial Sequence
  Cyclic GFR-binding peptide
  MOD_RES (30)..(31): Xaa is C or S
SMGEQYNKLTPVGMDDLYLVSIASLKTPVXXAKG

SEQ ID NO: 5488 - protein, 29 aa, Artificial Sequence
  Cyclic GFR-binding peptide
  MOD_RES (29)..(29): Xaa is C or S
VIMYHYKLVKPKRGVKYLISIPSLAQPVX

SEQ ID NO: 5489 - protein, 33 aa, Artificial Sequence
  Cyclic GFR-binding peptide
  MOD_RES (1)..(3): Xaa is C or S
XGXGEVVMDRHKRLVVKENEDYYLMSTASLETP

SEQ ID NO: 5490 - protein, 26 aa, Artificial Sequence
  Cyclic GFR-binding peptide
VMNRYKKLIVNSSDDFYLVSIANLQT

SEQ ID NO: 5491 - protein, 31 aa, Artificial Sequence
  Cyclic GFR-binding peptide
  MOD_RES (27)..(28): Xaa is C or S
EQYNKLTPVGMDDLYLVSIASLKTPVXXAKG

SEQ ID NO: 5492 - protein, 31 aa, Artificial Sequence
  Cyclic GFR-binding peptide
  MOD_RES (1)..(3): Xaa is C or S
XKXSKVVMYHYKLVKPTRGVKYLISIPSLDQ

SEQ ID NO: 5493 - protein, 34 aa, Artificial Sequence
  Cyclic GFR-binding peptide
  MOD_RES (1)..(33)..(34): Xaa is C or S
XGEVVMEQYNKLVVKDYEDLYLMSIASLETPVXX

SEQ ID NO: 5494 - protein, 32 aa, Artificial Sequence
  Cyclic GFR-binding peptide
  MOD_RES (29)..(30): Xaa is C or S
VIMYHYKLVKPKRGVKYLISIPSLAQPVXXPA

SEQ ID NO: 5495 - protein, 28 aa, Artificial Sequence
  Cyclic GFR-binding peptide
  MOD_RES (26)..(27): Xaa is C or S
YHYKLIVNNSSDKYLVSIPSLKTPAXXA

SEQ ID NO: 5496 - protein, 32 aa, Artificial Sequence
  Cyclic GFR-binding peptide
  MOD_RES (1)..(3): Xaa is C or S
XKXALHDELTQYNKLFIPKKRVIELYLVSIAS

SEQ ID NO: 5497 - protein, 34 aa, Artificial Sequence
  Cyclic GFR-binding peptide
  MOD_RES (2)..(4): Xaa is C or S
EXKXALHDELTYHYKLFIPKKRVIEKYLVSIPSL

SEQ ID NO: 5498 - protein, 40 aa, Artificial Sequence
  Cyclic GFR-binding peptide
  MOD_RES (2)..(4)..(36)..(37): Xaa is C or S
HXGXARVVMNRHKRLIVNSSDDYYLVSTASLQTPAXXPKP

SEQ ID NO: 5499 - protein, 35 aa, Artificial Sequence
  Cyclic GFR-binding peptide
  MOD_RES (29)..(30): Xaa is C or S
VMNYHYKLIVNSSDDKYLVSIPSLQTPAXXPKPVT

SEQ ID NO: 5500 - protein, 39 aa, Artificial Sequence
  Cyclic GFR-binding peptide
  MOD_RES (2)..(4)..(36)..(37): Xaa is C or S
HXGXARVVMNYHYKLIVNSSDDKYLVSIPSLQTPAXXPK

SEQ ID NO: 5501 - protein, 24 aa, Artificial Sequence
  Cyclic GFR-binding peptide
LTYHYKLFIPKKRVIEKYLVSIPS

SEQ ID NO: 5502 - protein, 34 aa, Artificial Sequence
  Cyclic GFR-binding peptide
  MOD_RES (33)..(33): Xaa is C or S
ELTQYNKLFIPKKRVIELYLVSIASLQVQTPRXQ

SEQ ID NO: 5503 - protein, 34 aa, Artificial Sequence
  Cyclic GFR-binding peptide
  MOD_RES (1)..(33)..(34): Xaa is C or S
XARVVMNRHKRLIVNSSDDYYLVSTASLQTPAXX

SEQ ID NO: 5504 - protein, 24 aa, Artificial Sequence
  Cyclic GFR-binding peptide
TQYNKLFIPKKRVIELYLVSIASL

SEQ ID NO: 5505 - protein, 29 aa, Artificial Sequence
  Cyclic GFR-binding peptide
  MOD_RES (2)..(2): Xaa is C or S
KXSKVIMYHYKLIKPTKGIKYLISIPSLD

SEQ ID NO: 5506 - protein, 38 aa, Artificial Sequence
  Cyclic GFR-binding peptide
  MOD_RES (2)..(2): Xaa is C or S
KXALHDELTYHYKLFIPKKRVIEKYLVSIPSLQVQTPR

SEQ ID NO: 5507 - protein, 23 aa, Artificial Sequence
  Cyclic GFR-binding peptide
QYNKLVKPKRGVLYLISIASLAQ

SEQ ID NO: 5508 - protein, 29 aa, Artificial Sequence
  Cyclic GFR-binding peptide
  MOD_RES (27)..(28): Xaa is C or S
MYHYKLVKPTRGVKYLISIPSLDQPVXXP

SEQ ID NO: 5509 - protein, 33 aa, Artificial Sequence
  Cyclic GFR-binding peptide
  MOD_RES (28)..(29): Xaa is C or S
VMRYKKLVKPTRGVFYLISIANLDQPVXXPSAS

SEQ ID NO: 5510 - protein, 31 aa, Artificial Sequence
  Cyclic GFR-binding peptide
  MOD_RES (30)..(31): Xaa is C or S
VVMERHKRLVVKDYEDYYLMSTASLETPVXX

SEQ ID NO: 5511 - protein, 29 aa, Artificial Sequence
  Cyclic GFR-binding peptide
  MOD_RES (28)..(29): Xaa is C or S
IMQYNKLVKPKRGVLYLISIASLAQPVXX

SEQ ID NO: 5512 - protein, 31 aa, Artificial Sequence
  Cyclic GFR-binding peptide
  MOD_RES (1)..(1): Xaa is C or S
XGEVVMDQYNKLVVKENEDLYLMSIASLETP

SEQ ID NO: 5513 - protein, 38 aa, Artificial Sequence
  Cyclic GFR-binding peptide
  MOD_RES (2)..(33)..(34): Xaa is C or S
KXSKVIMRYKKLIKPTKGIFYLISIANLDQSVXXPSAS

SEQ ID NO: 5514 - protein, 29 aa, Artificial Sequence
  Cyclic GFR-binding peptide
  MOD_RES (27)..(28): Xaa is C or S
NQYNKLIVNNSSDLYLVSIASLKTPAXXA

SEQ ID NO: 5515 - protein, 32 aa, Artificial Sequence
  Cyclic GFR-binding peptide
  MOD_RES (32)..(32): Xaa is C or S
LTQYNKLFIPKKRVIELYLVSIASLQVQTPRX

SEQ ID NO: 5516 - protein, 25 aa, Artificial Sequence
  Cyclic GFR-binding peptide
SRVIMRYKKLVKPKRGVFYLISIAN

SEQ ID NO: 5517 - protein, 29 aa, Artificial Sequence
  Cyclic GFR-binding peptide
  MOD_RES (29)..(29): Xaa is C or S
MGEQYNKLTPVGMDDLYLVSIASLKTPVX

SEQ ID NO: 5518 - protein, 27 aa, Artificial Sequence
  Cyclic GFR-binding peptide
AVSMGERHKRLTPVGMDDYYLVSTASL

SEQ ID NO: 5519 - protein, 28 aa, Artificial Sequence
  Cyclic GFR-binding peptide
  MOD_RES (28)..(28): Xaa is C or S
MNQYNKLIVNNSSDLYLVSIASLKTPAX

SEQ ID NO: 5520 - protein, 28 aa, Artificial Sequence
  Cyclic GFR-binding peptide
  MOD_RES (27)..(27): Xaa is C or S
NQYNKLIVNSSDDLYLVSIASLKTPAXT

SEQ ID NO: 5521 - protein, 36 aa, Artificial Sequence
  Cyclic GFR-binding peptide
  MOD_RES (2)..(4)..(36): Xaa is C or S
RXGXGEVVMERYKKLVVKDYEDFYLMSIANLETPVX

SEQ ID NO: 5522 - protein, 31 aa, Artificial Sequence
  Cyclic GFR-binding peptide
  MOD_RES (1)..(3): Xaa is C or S
XGXGEVVMERYKKLVVKDYEDFYLMSIANLE

SEQ ID NO: 5523 - protein, 36 aa, Artificial Sequence
  Cyclic GFR-binding peptide
  MOD_RES (31)..(31): Xaa is C or S
RVVMNRHKRLIVNSSDDYYLVSTASLKTPAXTPKTV

SEQ ID NO: 5524 - protein, 37 aa, Artificial Sequence
  Cyclic GFR-binding peptide
  MOD_RES (2)..(33)..(34): Xaa is C or S
KXSRVIMRYKKLVKPKRGVFYLISIANLAQPVXXPAA

SEQ ID NO: 5525 - protein, 25 aa, Artificial Sequence
  Cyclic GFR-binding peptide
KVVMNQYNKLIVNNSSDLYLVSIAS

SEQ ID NO: 5526 - protein, 34 aa, Artificial Sequence
  Cyclic GFR-binding peptide
  MOD_RES (31)..(32): Xaa is C or S
SRVIMRYKKLVKPKRGVFYLISIANLAQPVXXPA

SEQ ID NO: 5527 - protein, 37 aa, Artificial Sequence
  Cyclic GFR-binding peptide
  MOD_RES (31)..(32): Xaa is C or S
RVVMNRYKKLIVNSSDDFYLVSIANLQTPAXXPKPVT

SEQ ID NO: 5528 - protein, 30 aa, Artificial Sequence
  Cyclic GFR-binding peptide
  MOD_RES (2)..(2): Xaa is C or S
KXSRVIMRYKKLVKPKRGVFYLISIANLAQ

SEQ ID NO: 5529 - protein, 30 aa, Artificial Sequence
  Cyclic GFR-binding peptide
  MOD_RES (1)..(1): Xaa is C or S
XGEVVMDRHKRLVVKENEDYYLMSTASLET

SEQ ID NO: 5530 - protein, 27 aa, Artificial Sequence
  Cyclic GFR-binding peptide
  MOD_RES (26)..(27): Xaa is C or S
RHKRLIKPTKGIYYLISTASLDQSVXX

SEQ ID NO: 5531 - protein, 40 aa, Artificial Sequence
  Cyclic GFR-binding peptide
  MOD_RES (2)..(4)..(36)..(37): Xaa is C or S
HXGXARVVMNQYNKLIVNSSDDLYLVSIASLQTPAXXPKP

SEQ ID NO: 5532 - protein, 24 aa, Artificial Sequence
  Cyclic GFR-binding peptide
VMNQYNKLIVNNSSDLYLVSIASL

SEQ ID NO: 5533 - protein, 29 aa, Artificial Sequence
  Cyclic GFR-binding peptide
  MOD_RES (26)..(27): Xaa is C or S
YHYKLVKPKRGVKYLISIPSLAQPVXXPA

SEQ ID NO: 5534 - protein, 32 aa, Artificial Sequence
  Cyclic GFR-binding peptide
  MOD_RES (1)..(32): Xaa is C or S
XSKVVMRHKRLVKPTRGVYYLISTASLDQPVX

SEQ ID NO: 5535 - protein, 24 aa, Artificial Sequence
  Cyclic GFR-binding peptide
MYHYKLVKPKRGVKYLISIPSLAQ

SEQ ID NO: 5536 - protein, 33 aa, Artificial Sequence
  Cyclic GFR-binding peptide
  MOD_RES (30)..(31): Xaa is C or S
KVVMRYKKLVKPTRGVFYLISIANLDQPVXXPS

SEQ ID NO: 5537 - protein, 26 aa, Artificial Sequence
  Cyclic GFR-binding peptide
MNYHYKLIVNSSDDKYLVSIPSLQTP

SEQ ID NO: 5538 - protein, 30 aa, Artificial Sequence
  Cyclic GFR-binding peptide
  MOD_RES (27)..(28): Xaa is C or S
NYHYKLIVNSSDDKYLVSIPSLKTPAXXPK

SEQ ID NO: 5539 - protein, 33 aa, Artificial Sequence
  Cyclic GFR-binding peptide
  MOD_RES (29)..(30): Xaa is C or S
VIMRHKRLIKPTKGIYYLISTASLDQSVXXPSA

SEQ ID NO: 5540 - protein, 26 aa, Artificial Sequence
  Cyclic GFR-binding peptide
VMNQYNKLIVNSSDDLYLVSIASLKT

SEQ ID NO: 5541 - protein, 29 aa, Artificial Sequence
  Cyclic GFR-binding peptide
  MOD_RES (26)..(26): Xaa is C or S
RYKKLIVNSSDDFYLVSIANLKTPAXTPK

SEQ ID NO: 5542 - protein, 31 aa, Artificial Sequence
  Cyclic GFR-binding peptide
HDELTQYNKLFIPKKRVIELYLVSIASLQVQ

SEQ ID NO: 5543 - protein, 23 aa, Artificial Sequence
  Cyclic GFR-binding peptide
VVMRHKRLVKPTRGVYYLISTAS

SEQ ID NO: 5544 - protein, 23 aa, Artificial Sequence
  Cyclic GFR-binding peptide
VMDRHKRLVVKENEDYYLMSTAS

SEQ ID NO: 5545 - protein, 31 aa, Artificial Sequence
  Cyclic GFR-binding peptide
  MOD_RES (1)..(1): Xaa is C or S
XSKVVMRHKRLVKPTRGVYYLISTASLDQPV

SEQ ID NO: 5546 - protein, 41 aa, Artificial Sequence
  Cyclic GFR-binding peptide
  MOD_RES (2)..(4)..(35)..(36): Xaa is C or S
SXKXSKVIMRYKKLIKPTKGIFYLISIANLDQSVXXPSASA

SEQ ID NO: 5547 - protein, 28 aa, Artificial Sequence
  Cyclic GFR-binding peptide
SKVVMYHYKLVKPTRGVKYLISIPSLDQ

SEQ ID NO: 5548 - protein, 31 aa, Artificial Sequence
  Cyclic GFR-binding peptide
  MOD_RES (29)..(30): Xaa is C or S
VIMRYKKLVKPKRGVFYLISIANLAQPVXXP

SEQ ID NO: 5549 - protein, 33 aa, Artificial Sequence
  Cyclic GFR-binding peptide
  MOD_RES (30)..(30): Xaa is C or S
VVMNQYNKLIVNSSDDLYLVSIASLKTPAXTPK

SEQ ID NO: 5550 - protein, 30 aa, Artificial Sequence
  Cyclic GFR-binding peptide
  MOD_RES (1)..(3): Xaa is C or S
XGXGEVVMDRYKKLVVKENEDFYLMSIANL

SEQ ID NO: 5551 - protein, 39 aa, Artificial Sequence
  Cyclic GFR-binding peptide
  MOD_RES (2)..(4)..(35)..(36): Xaa is C or S
SXKXSRVIMRYKKLVKPKRGVFYLISIANLAQPVXXPAA

SEQ ID NO: 5552 - protein, 28 aa, Artificial Sequence
  Cyclic GFR-binding peptide
  MOD_RES (28)..(28): Xaa is C or S
IMQYNKLVKPKRGVLYLISIASLAQPVX

SEQ ID NO: 5553 - protein, 21 aa, Artificial Sequence
  Cyclic GFR-binding peptide
MRHKRLVKPKRGVYYLISTAS

SEQ ID NO: 5554 - protein, 34 aa, Artificial Sequence
  Cyclic GFR-binding peptide
  MOD_RES (1)..(3): Xaa is C or S
XKXALHDELTYHYKLFIPKKRVIEKYLVSIPSLQ

SEQ ID NO: 5555 - protein, 36 aa, Artificial Sequence
  Cyclic GFR-binding peptide
  MOD_RES (1)..(3)..(35)..(36): Xaa is C or S
XGXAKVVMNQYNKLIVNNSSDLYLVSIASLKTPAXX

SEQ ID NO: 5556 - protein, 22 aa, Artificial Sequence
  Cyclic GFR-binding peptide
RHKRLIKPTKGIYYLISTASLD

SEQ ID NO: 5557 - protein, 33 aa, Artificial Sequence
  Cyclic GFR-binding peptide
  MOD_RES (27)..(28): Xaa is C or S
NYHYKLIVNNSSDKYLVSIPSLKTPAXXAKPVA

SEQ ID NO: 5558 - protein, 29 aa, Artificial Sequence
  Cyclic GFR-binding peptide
VVMNRYKKLIVNSSDDFYLVSIANLQTPA

SEQ ID NO: 5559 - protein, 37 aa, Artificial Sequence
  Cyclic GFR-binding peptide
  MOD_RES (2)..(4): Xaa is C or S
EXKXALHDELTYHYKLFIPKKRVIEKYLVSIPSLQVQ

SEQ ID NO: 5560 - protein, 27 aa, Artificial Sequence
  Cyclic GFR-binding peptide
VSMGERHKRLTPVGMDDYYLVSTASLK

SEQ ID NO: 5561 - protein, 33 aa, Artificial Sequence
  Cyclic GFR-binding peptide
  MOD_RES (2)..(2): Xaa is C or S
GXARVVMNQYNKLIVNSSDDLYLVSIASLQTPA

SEQ ID NO: 5562 - protein, 33 aa, Artificial Sequence
  Cyclic GFR-binding peptide
  MOD_RES (30)..(31): Xaa is C or S
VVMERHKRLVVKDYEDYYLMSTASLETPVXXAK

SEQ ID NO: 5563 - protein, 25 aa, Artificial Sequence
  Cyclic GFR-binding peptide
QYNKLVVKDYEDLYLMSIASLETPV

SEQ ID NO: 5564 - protein, 25 aa, Artificial Sequence
  Cyclic GFR-binding peptide
EQYNKLVVKDYEDLYLMSIASLETP

SEQ ID NO: 5565 - protein, 29 aa, Artificial Sequence
  Cyclic GFR-binding peptide
  MOD_RES (26)..(27): Xaa is C or S
RYKKLIVNSSDDFYLVSIANLKTPAXXPK

SEQ ID NO: 5566 - protein, 40 aa, Artificial Sequence
  Cyclic GFR-binding peptide
  MOD_RES (1)..(3)..(35)..(36): Xaa is C or S
XGXGEVVMDRYKKLVVKENEDFYLMSIANLETPVXXAKPI

SEQ ID NO: 5567 - protein, 28 aa, Artificial Sequence
  Cyclic GFR-binding peptide
VVMNRYKKLIVNSSDDFYLVSIANLKTP

SEQ ID NO: 5568 - protein, 39 aa, Artificial Sequence
  Cyclic GFR-binding peptide
  MOD_RES (1)..(34)..(35): Xaa is C or S
XEAVSMGERHKRLTPVGMDDYYLVSTASLKTPVXXAKGV

SEQ ID NO: 5569 - protein, 32 aa, Artificial Sequence
  Cyclic GFR-binding peptide
  MOD_RES (28)..(29): Xaa is C or S
IMYHYKLIKPTKGIKYLISIPSLDQSVXXPSA

SEQ ID NO: 5570 - protein, 32 aa, Artificial Sequence
  Cyclic GFR-binding peptide
  MOD_RES (2)..(4): Xaa is C or S
RXGXEAVSMGERHKRLTPVGMDDYYLVSTASL

SEQ ID NO: 5571 - protein, 27 aa, Artificial Sequence
  Cyclic GFR-binding peptide
EVVMDRHKRLVVKENEDYYLMSTASLE

SEQ ID NO: 5572 - protein, 34 aa, Artificial Sequence
  Cyclic GFR-binding peptide
  MOD_RES (31)..(32): Xaa is C or S
EVVMDYHYKLVVKENEDKYLMSIPSLETPVXXAK

SEQ ID NO: 5573 - protein, 39 aa, Artificial Sequence
  Cyclic GFR-binding peptide
  MOD_RES (2)..(34)..(35): Xaa is C or S
GXGEVVMERHKRLVVKDYEDYYLMSTASLETPVXXAKPI

SEQ ID NO: 5574 - protein, 30 aa, Artificial Sequence
  Cyclic GFR-binding peptide
  MOD_RES (2)..(4): Xaa is C or S
HXGXSRVVMNRYKKLIVNSSDDFYLVSIAN

SEQ ID NO: 5575 - protein, 31 aa, Artificial Sequence
  Cyclic GFR-binding peptide
  MOD_RES (2)..(2): Xaa is C or S
GXSRVVMNRHKRLIVNSSDDYYLVSTASLKT

SEQ ID NO: 5576 - protein, 29 aa, Artificial Sequence
  Cyclic GFR-binding peptide
  MOD_RES (27)..(28): Xaa is C or S
NRYKKLIVNSSDDFYLVSIANLKTPAXXP

SEQ ID NO: 5577 - protein, 26 aa, Artificial Sequence
  Cyclic GFR-binding peptide
  MOD_RES (26)..(26): Xaa is C or S
YHYKLVKPKRGVKYLISIPSLAQPVX

SEQ ID NO: 5578 - protein, 30 aa, Artificial Sequence
  Cyclic GFR-binding peptide
SRVVMNQYNKLIVNSSDDLYLVSIASLKTP

SEQ ID NO: 5579 - protein, 21 aa, Artificial Sequence
  Cyclic GFR-binding peptide
RHKRLVKPTRGVYYLISTASL

SEQ ID NO: 5580 - protein, 31 aa, Artificial Sequence
  Cyclic GFR-binding peptide
  MOD_RES (1)..(3): Xaa is C or S
XKXSRVIMRYKKLVKPKRGVFYLISIANLAQ

SEQ ID NO: 5581 - protein, 25 aa, Artificial Sequence
  Cyclic GFR-binding peptide
RVVMNRHKRLIVNSSDDYYLVSTAS

SEQ ID NO: 5582 - protein, 24 aa, Artificial Sequence
  Cyclic GFR-binding peptide
EQYNKLTPVGMDDLYLVSIASLKT

SEQ ID NO: 5583 - protein, 22 aa, Artificial Sequence
  Cyclic GFR-binding peptide
MQYNKLVKPTRGVLYLISIASL

SEQ ID NO: 5584 - protein, 32 aa, Artificial Sequence
  Cyclic GFR-binding peptide
  MOD_RES (29)..(30): Xaa is C or S
VMERHKRLVVKDYEDYYLMSTASLETPVXXAK

SEQ ID NO: 5585 - protein, 36 aa, Artificial Sequence
  Cyclic GFR-binding peptide
  MOD_RES (31)..(32): Xaa is C or S
EVVMEYHYKLVVKDYEDKYLMSIPSLETPVXXAKPI

SEQ ID NO: 5586 - protein, 30 aa, Artificial Sequence
  Cyclic GFR-binding peptide
  MOD_RES (1)..(1): Xaa is C or S
XARVVMNRHKRLIVNSSDDYYLVSTASLQT

SEQ ID NO: 5587 - protein, 24 aa, Artificial Sequence
  Cyclic GFR-binding peptide
IMRHKRLIKPTKGIYYLISTASLD

SEQ ID NO: 5588 - protein, 28 aa, Artificial Sequence
  Cyclic GFR-binding peptide
  MOD_RES (26)..(27): Xaa is C or S
RHKRLTPVGMDDYYLVSTASLKTPVXXA

SEQ ID NO: 5589 - protein, 34 aa, Artificial Sequence
  Cyclic GFR-binding peptide
  MOD_RES (30)..(31): Xaa is C or S
KVVMRHKRLVKPTRGVYYLISTASLDQPVXXPSA

SEQ ID NO: 5590 - protein, 26 aa, Artificial Sequence
  Cyclic GFR-binding peptide
MNRHKRLIVNSSDDYYLVSTASLQTP

SEQ ID NO: 5591 - protein, 33 aa, Artificial Sequence
  Cyclic GFR-binding peptide
  MOD_RES (1)..(3): Xaa is C or S
XKXSKVVMRYKKLVKPTRGVFYLISIANLDQPV

SEQ ID NO: 5592 - protein, 29 aa, Artificial Sequence
  Cyclic GFR-binding peptide
  MOD_RES (29)..(29): Xaa is C or S
MGERYKKLTPVGMDDFYLVSIANLKTPVX

SEQ ID NO: 5593 - protein, 29 aa, Artificial Sequence
  Cyclic GFR-binding peptide
  MOD_RES (2)..(2): Xaa is C or S
GXGEVVMDYHYKLVVKENEDKYLMSIPSL

SEQ ID NO: 5594 - protein, 34 aa, Artificial Sequence
  Cyclic GFR-binding peptide
  MOD_RES (28)..(29): Xaa is C or S
MDRHKRLVVKENEDYYLMSTASLETPVXXAKPIK

SEQ ID NO: 5595 - protein, 32 aa, Artificial Sequence
  Cyclic GFR-binding peptide
  MOD_RES (29)..(29): Xaa is C or S
VMNRHKRLIVNSSDDYYLVSTASLKTPAXTPK

SEQ ID NO: 5596 - protein, 30 aa, Artificial Sequence
  Cyclic GFR-binding peptide
  MOD_RES (2)..(2): Xaa is C or S
KXSRVIMYHYKLVKPKRGVKYLISIPSLAQ

SEQ ID NO: 5597 - protein, 28 aa, Artificial Sequence
  Cyclic GFR-binding peptide
  MOD_RES (28)..(28): Xaa is C or S
VMRHKRLVKPTRGVYYLISTASLDQPVX

SEQ ID NO: 5598 - protein, 40 aa, Artificial Sequence
  Cyclic GFR-binding peptide
  MOD_RES (2)..(4)..(36)..(37): Xaa is C or S
RXGXGEVVMEQYNKLVVKDYEDLYLMSIASLETPVXXAKP

SEQ ID NO: 5599 - protein, 41 aa, Artificial Sequence
  Cyclic GFR-binding peptide
  MOD_RES (2)..(4)..(36)..(37): Xaa is C or S
HXGXARVVMNYHYKLIVNSSDDKYLVSIPSLQTPAXXPKPV

SEQ ID NO: 5600 - protein, 36 aa, Artificial Sequence
  Cyclic GFR-binding peptide
  MOD_RES (30)..(31): Xaa is C or S
VVMNQYNKLIVNNSSDLYLVSIASLKTPAXXAKPVA

SEQ ID NO: 5601 - protein, 35 aa, Artificial Sequence
  Cyclic GFR-binding peptide
  MOD_RES (29)..(30): Xaa is C or S
VIMYHYKLIKPTKGIKYLISIPSLDQSVXXPSASA

SEQ ID NO: 5602 - protein, 27 aa, Artificial Sequence
  Cyclic GFR-binding peptide
MDRHKRLVVKENEDYYLMSTASLETPV

SEQ ID NO: 5603 - protein, 27 aa, Artificial Sequence
  Cyclic GFR-binding peptide
  MOD_RES (27)..(27): Xaa is C or S
MRYKKLVKPTRGVFYLISIANLDQPVX

SEQ ID NO: 5604 - protein, 39 aa, Artificial Sequence
  Cyclic GFR-binding peptide
  MOD_RES (1)..(3)..(35): Xaa is C or S
XGXSRVVMNQYNKLIVNSSDDLYLVSIASLKTPAXTPKT

SEQ ID NO: 5605 - protein, 33 aa, Artificial Sequence
  Cyclic GFR-binding peptide
  MOD_RES (29)..(30): Xaa is C or S
VVMQYNKLVKPTRGVLYLISIASLDQPVXXPSA

SEQ ID NO: 5606 - protein, 34 aa, Artificial Sequence
  Cyclic GFR-binding peptide
  MOD_RES (28)..(29): Xaa is C or S
MDYHYKLVVKENEDKYLMSIPSLETPVXXAKPIK

SEQ ID NO: 5607 - protein, 25 aa, Artificial Sequence
  Cyclic GFR-binding peptide
MYHYKLVKPKRGVKYLISIPSLAQP

SEQ ID NO: 5608 - protein, 29 aa, Artificial Sequence
  Cyclic GFR-binding peptide
  MOD_RES (26)..(27): Xaa is C or S
YHYKLIVNSSDDKYLVSIPSLQTPAXXPK

SEQ ID NO: 5609 - protein, 33 aa, Artificial Sequence
  Cyclic GFR-binding peptide
  MOD_RES (2)..(2): Xaa is C or S
GXSRVVMNQYNKLIVNSSDDLYLVSIASLKTPA

SEQ ID NO: 5610 - protein, 30 aa, Artificial Sequence
  Cyclic GFR-binding peptide
  MOD_RES (28)..(29): Xaa is C or S
IMRHKRLVKPKRGVYYLISTASLAQPVXXP

SEQ ID NO: 5611 - protein, 36 aa, Artificial Sequence
  Cyclic GFR-binding peptide
  MOD_RES (1)..(3)..(35)..(36): Xaa is C or S
XGXARVVMNRHKRLIVNSSDDYYLVSTASLQTPAXX

SEQ ID NO: 5612 - protein, 22 aa, Artificial Sequence
  Cyclic GFR-binding peptide
MERHKRLVVKDYEDYYLMSTAS

SEQ ID NO: 5613 - protein, 26 aa, Artificial Sequence
  Cyclic GFR-binding peptide
SKVVMRHKRLVKPTRGVYYLISTASL

SEQ ID NO: 5614 - protein, 30 aa, Artificial Sequence
  Cyclic GFR-binding peptide
  MOD_RES (2)..(2): Xaa is C or S
GXGEVVMEQYNKLVVKDYEDLYLMSIASLE

SEQ ID NO: 5615 - protein, 28 aa, Artificial Sequence
  Cyclic GFR-binding peptide
  MOD_RES (2)..(2): Xaa is C or S
GXARVVMNRYKKLIVNSSDDFYLVSIAN

SEQ ID NO: 5616 - protein, 33 aa, Artificial Sequence
  Cyclic GFR-binding peptide
  MOD_RES (30)..(31): Xaa is C or S
SMGEQYNKLTPVGMDDLYLVSIASLKTPVXXAK

SEQ ID NO: 5617 - protein, 32 aa, Artificial Sequence
  Cyclic GFR-binding peptide
  MOD_RES (30)..(31): Xaa is C or S
KVIMYHYKLIKPTKGIKYLISIPSLDQSVXXP

SEQ ID NO: 5618 - protein, 38 aa, Artificial Sequence
  Cyclic GFR-binding peptide
  MOD_RES (1)..(33)..(34): Xaa is C or S
XGEVVMDRHKRLVVKENEDYYLMSTASLETPVXXAKPI

SEQ ID NO: 5619 - protein, 31 aa, Artificial Sequence
  Cyclic GFR-binding peptide
  MOD_RES (31)..(31): Xaa is C or S
RVVMNRYKKLIVNSSDDFYLVSIANLKTPAX

SEQ ID NO: 5620 - protein, 40 aa, Artificial Sequence
  Cyclic GFR-binding peptide
  MOD_RES (37)..(37): Xaa is C or S
ALHDELTYHYKLFIPKKRVIEKYLVSIPSLQVQTPRXQVN

SEQ ID NO: 5621 - protein, 30 aa, Artificial Sequence
  Cyclic GFR-binding peptide
EAVSMGERYKKLTPVGMDDFYLVSIANLKT

SEQ ID NO: 5622 - protein, 37 aa, Artificial Sequence
  Cyclic GFR-binding peptide
  MOD_RES (1)..(3)..(35): Xaa is C or S
XGXSRVVMNRHKRLIVNSSDDYYLVSTASLKTPAXTP

SEQ ID NO: 5623 - protein, 33 aa, Artificial Sequence
  Cyclic GFR-binding peptide
  MOD_RES (2)..(33): Xaa is C or S
KXSKVIMQYNKLIKPTKGILYLISIASLDQSVX

SEQ ID NO: 5624 - protein, 31 aa, Artificial Sequence
  Cyclic GFR-binding peptide
  MOD_RES (31)..(31): Xaa is C or S
TQYNKLFIPKKRVIELYLVSIASLQVQTPRX

SEQ ID NO: 5625 - protein, 32 aa, Artificial Sequence
  Cyclic GFR-binding peptide
  MOD_RES (28)..(29): Xaa is C or S
IMRHKRLIKPTKGIYYLISTASLDQSVXXPSA

SEQ ID NO: 5626 - protein, 31 aa, Artificial Sequence
  Cyclic GFR-binding peptide
  MOD_RES (30)..(31): Xaa is C or S
VVMNYHYKLIVNNSSDKYLVSIPSLKTPAXX

SEQ ID NO: 5627 - protein, 24 aa, Artificial Sequence
  Cyclic GFR-binding peptide
YHYKLVKPKRGVKYLISIPSLAQP

SEQ ID NO: 5628 - protein, 27 aa, Artificial Sequence
  Cyclic GFR-binding peptide
LTYHYKLFIPKKRVIEKYLVSIPSLQV

SEQ ID NO: 5629 - protein, 35 aa, Artificial Sequence
  Cyclic GFR-binding peptide
  MOD_RES (1)..(3)..(35): Xaa is C or S
XGXGEVVMERYKKLVVKDYEDFYLMSIANLETPVX

SEQ ID NO: 5630 - protein, 33 aa, Artificial Sequence
  Cyclic GFR-binding peptide
  MOD_RES (28)..(29): Xaa is C or S
IMRYKKLIKPTKGIFYLISIANLDQSVXXPSAS

SEQ ID NO: 5631 - protein, 30 aa, Artificial Sequence
  Cyclic GFR-binding peptide
  MOD_RES (29)..(30): Xaa is C or S
VVMQYNKLVKPTRGVLYLISIASLDQPVXX

SEQ ID NO: 5632 - protein, 30 aa, Artificial Sequence
  Cyclic GFR-binding peptide
  MOD_RES (1)..(1): Xaa is C or S
XAKVVMNQYNKLIVNNSSDLYLVSIASLKT

SEQ ID NO: 5633 - protein, 31 aa, Artificial Sequence
  Cyclic GFR-binding peptide
HDELTYHYKLFIPKKRVIEKYLVSIPSLQVQ

SEQ ID NO: 5634 - protein, 26 aa, Artificial Sequence
  Cyclic GFR-binding peptide
  MOD_RES (26)..(26): Xaa is C or S
YHYKLIVNSSDDKYLVSIPSLQTPAX

SEQ ID NO: 5635 - protein, 26 aa, Artificial Sequence
  Cyclic GFR-binding peptide
VVMEYHYKLVVKDYEDKYLMSIPSLE

SEQ ID NO: 5636 - protein, 27 aa, Artificial Sequence
  Cyclic GFR-binding peptide
  MOD_RES (27)..(27): Xaa is C or S
NYHYKLIVNSSDDKYLVSIPSLQTPAX

SEQ ID NO: 5637 - protein, 37 aa, Artificial Sequence
  Cyclic GFR-binding peptide
  MOD_RES (2)..(34)..(35): Xaa is C or S
GXGEVVMDRYKKLVVKENEDFYLMSIANLETPVXXAK

SEQ ID NO: 5638 - protein, 27 aa, Artificial Sequence
  Cyclic GFR-binding peptide
VMDRYKKLVVKENEDFYLMSIANLETP

SEQ ID NO: 5639 - protein, 34 aa, Artificial Sequence
  Cyclic GFR-binding peptide
  MOD_RES (2)..(2): Xaa is C or S
KXALHDELTRYKKLFIPKKRVIEFYLVSIANLQV

SEQ ID NO: 5640 - protein, 26 aa, Artificial Sequence
  Cyclic GFR-binding peptide
MNQYNKLIVNSSDDLYLVSIASLQTP

SEQ ID NO: 5641 - protein, 29 aa, Artificial Sequence
  Cyclic GFR-binding peptide
  MOD_RES (26)..(27): Xaa is C or S
YHYKLIVNSSDDKYLVSIPSLKTPAXXPK

SEQ ID NO: 5642 - protein, 32 aa, Artificial Sequence
  Cyclic GFR-binding peptide
  MOD_RES (30)..(30): Xaa is C or S
RYKKLFIPKKRVIEFYLVSIANLQVQTPRXQV

SEQ ID NO: 5643 - protein, 27 aa, Artificial Sequence
  Cyclic GFR-binding peptide
  MOD_RES (1)..(1): Xaa is C or S
XSKVIMRYKKLIKPTKGIFYLISIANL

SEQ ID NO: 5644 - protein, 35 aa, Artificial Sequence
  Cyclic GFR-binding peptide
  MOD_RES (1)..(32)..(33): Xaa is C or S
XSRVIMRYKKLVKPKRGVFYLISIANLAQPVXXPA

SEQ ID NO: 5645 - protein, 29 aa, Artificial Sequence
  Cyclic GFR-binding peptide
  MOD_RES (26)..(27): Xaa is C or S
YHYKLVVKENEDKYLMSIPSLETPVXXAK

SEQ ID NO: 5646 - protein, 35 aa, Artificial Sequence
  Cyclic GFR-binding peptide
  MOD_RES (2)..(33)..(34): Xaa is C or S
KXSKVVMRYKKLVKPTRGVFYLISIANLDQPVXXP

SEQ ID NO: 5647 - protein, 35 aa, Artificial Sequence
  Cyclic GFR-binding peptide
  MOD_RES (31)..(32): Xaa is C or S
VSMGEQYNKLTPVGMDDLYLVSIASLKTPVXXAKG

SEQ ID NO: 5648 - protein, 32 aa, Artificial Sequence
  Cyclic GFR-binding peptide
  MOD_RES (30)..(30): Xaa is C or S
VVMNRHKRLIVNSSDDYYLVSTASLKTPAXTP

SEQ ID NO: 5649 - protein, 36 aa, Artificial Sequence
  Cyclic GFR-binding peptide
  MOD_RES (1)..(33)..(34): Xaa is C or S
XAKVVMNQYNKLIVNNSSDLYLVSIASLKTPAXXAK

SEQ ID NO: 5650 - protein, 22 aa, Artificial Sequence
  Cyclic GFR-binding peptide
VMYHYKLVKPTRGVKYLISIPS

SEQ ID NO: 5651 - protein, 28 aa, Artificial Sequence
  Cyclic GFR-binding peptide
  MOD_RES (2)..(2): Xaa is C or S
GXGEVVMEYHYKLVVKDYEDKYLMSIPS

SEQ ID NO: 5652 - protein, 30 aa, Artificial Sequence
  Cyclic GFR-binding peptide
EVVMDQYNKLVVKENEDLYLMSIASLETPV

SEQ ID NO: 5653 - protein, 34 aa, Artificial Sequence
  Cyclic GFR-binding peptide
HDELTYHYKLFIPKKRVIEKYLVSIPSLQVQTPR

SEQ ID NO: 5654 - protein, 33 aa, Artificial Sequence
  Cyclic GFR-binding peptide
  MOD_RES (27)..(28): Xaa is C or S
ERHKRLTPVGMDDYYLVSTASLKTPVXXAKGVK

SEQ ID NO: 5655 - protein, 26 aa, Artificial Sequence
  Cyclic GFR-binding peptide
  MOD_RES (1)..(1): Xaa is C or S
XSKVIMYHYKLIKPTKGIKYLISIPS

SEQ ID NO: 5656 - protein, 41 aa, Artificial Sequence
  Cyclic GFR-binding peptide
  MOD_RES (2)..(4)..(35)..(36): Xaa is C or S
SXKXSKVVMRHKRLVKPTRGVYYLISTASLDQPVXXPSASA

SEQ ID NO: 5657 - protein, 31 aa, Artificial Sequence
  Cyclic GFR-binding peptide
GEVVMERYKKLVVKDYEDFYLMSIANLETPV

SEQ ID NO: 5658 - protein, 27 aa, Artificial Sequence
  Cyclic GFR-binding peptide
EAVSMGERYKKLTPVGMDDFYLVSIAN

SEQ ID NO: 5659 - protein, 32 aa, Artificial Sequence
  Cyclic GFR-binding peptide
  MOD_RES (30)..(31): Xaa is C or S
KVVMRYKKLVKPTRGVFYLISIANLDQPVXXP

SEQ ID NO: 5660 - protein, 28 aa, Artificial Sequence
  Cyclic GFR-binding peptide
LTQYNKLFIPKKRVIELYLVSIASLQVQ

SEQ ID NO: 5661 - protein, 25 aa, Artificial Sequence
  Cyclic GFR-binding peptide
IMYHYKLIKPTKGIKYLISIPSLDQ

SEQ ID NO: 5662 - protein, 28 aa, Artificial Sequence
  Cyclic GFR-binding peptide
  MOD_RES (26)..(27): Xaa is C or S
YHYKLVKPTRGVKYLISIPSLDQPVXXP

SEQ ID NO: 5663 - protein, 23 aa, Artificial Sequence
  Cyclic GFR-binding peptide
QYNKLIKPTKGILYLISIASLDQ

SEQ ID NO: 5664 - protein, 25 aa, Artificial Sequence
  Cyclic GFR-binding peptide
MERYKKLVVKDYEDFYLMSIANLET

SEQ ID NO: 5665 - protein, 23 aa, Artificial Sequence
  Cyclic GFR-binding peptide
VMDRYKKLVVKENEDFYLMSIAN

SEQ ID NO: 5666 - protein, 38 aa, Artificial Sequence
  Cyclic GFR-binding peptide
  MOD_RES (2)..(4)..(35)..(36): Xaa is C or S
SXKXSRVIMYHYKLVKPKRGVKYLISIPSLAQPVXXPA

SEQ ID NO: 5667 - protein, 28 aa, Artificial Sequence
  Cyclic GFR-binding peptide
  MOD_RES (2)..(2): Xaa is C or S
GXGEVVMEQYNKLVVKDYEDLYLMSIAS

SEQ ID NO: 5668 - protein, 35 aa, Artificial Sequence
  Cyclic GFR-binding peptide
  MOD_RES (2)..(4): Xaa is C or S
RXGXGEVVMDQYNKLVVKENEDLYLMSIASLETPV

SEQ ID NO: 5669 - protein, 37 aa, Artificial Sequence
  Cyclic GFR-binding peptide
  MOD_RES (32)..(33): Xaa is C or S
SRVVMNRHKRLIVNSSDDYYLVSTASLKTPAXXPKPV

SEQ ID NO: 5670 - protein, 32 aa, Artificial Sequence
  Cyclic GFR-binding peptide
  MOD_RES (32)..(32): Xaa is C or S
AVSMGERYKKLTPVGMDDFYLVSIANLKTPVX

SEQ ID NO: 5671 - protein, 37 aa, Artificial Sequence
  Cyclic GFR-binding peptide
  MOD_RES (33)..(33): Xaa is C or S
ELTQYNKLFIPKKRVIELYLVSIASLQVQTPRXQVNR

SEQ ID NO: 5672 - protein, 27 aa, Artificial Sequence
  Cyclic GFR-binding peptide
  MOD_RES (26)..(27): Xaa is C or S
RYKKLIVNSSDDFYLVSIANLKTPAXX

SEQ ID NO: 5673 - protein, 39 aa, Artificial Sequence
  Cyclic GFR-binding peptide
  MOD_RES (2)..(34)..(35): Xaa is C or S
GXGEVVMDRYKKLVVKENEDFYLMSIANLETPVXXAKPI

SEQ ID NO: 5674 - protein, 32 aa, Artificial Sequence
  Cyclic GFR-binding peptide
  MOD_RES (27)..(28): Xaa is C or S
NYHYKLIVNSSDDKYLVSIPSLKTPAXXPKPV

SEQ ID NO: 5675 - protein, 29 aa, Artificial Sequence
  Cyclic GFR-binding peptide
ALHDELTYHYKLFIPKKRVIEKYLVSIPS

SEQ ID NO: 5676 - protein, 37 aa, Artificial Sequence
  Cyclic GFR-binding peptide
  MOD_RES (1)..(33)..(34): Xaa is C or S
XSRVVMNYHYKLIVNSSDDKYLVSIPSLKTPAXXPKP

SEQ ID NO: 5677 - protein, 36 aa, Artificial Sequence
  Cyclic GFR-binding peptide
  MOD_RES (1)..(3)..(35)..(36): Xaa is C or S
XGXGEVVMDYHYKLVVKENEDKYLMSIPSLETPVXX

SEQ ID NO: 5678 - protein, 33 aa, Artificial Sequence
  Cyclic GFR-binding peptide
  MOD_RES (28)..(29): Xaa is C or S
MNRHKRLIVNSSDDYYLVSTASLKTPAXXPKPV

SEQ ID NO: 5679 - protein, 29 aa, Artificial Sequence
  Cyclic GFR-binding peptide
  MOD_RES (29)..(29): Xaa is C or S
VMDRHKRLVVKENEDYYLMSTASLETPVX

SEQ ID NO: 5680 - protein, 32 aa, Artificial Sequence
  Cyclic GFR-binding peptide
  MOD_RES (28)..(29): Xaa is C or S
VMYHYKLVKPTRGVKYLISIPSLDQPVXXPSA

SEQ ID NO: 5681 - protein, 27 aa, Artificial Sequence
  Cyclic GFR-binding peptide
  MOD_RES (1)..(1): Xaa is C or S
XGEVVMDRYKKLVVKENEDFYLMSIAN

SEQ ID NO: 5682 - protein, 33 aa, Artificial Sequence
  Cyclic GFR-binding peptide
  MOD_RES (33)..(33): Xaa is C or S
EAVSMGERHKRLTPVGMDDYYLVSTASLKTPVX

SEQ ID NO: 5683 - protein, 35 aa, Artificial Sequence
  Cyclic GFR-binding peptide
  MOD_RES (31)..(32): Xaa is C or S
SKVVMRYKKLVKPTRGVFYLISIANLDQPVXXPSA

SEQ ID NO: 5684 - protein, 27 aa, Artificial Sequence
  Cyclic GFR-binding peptide
KVIMQYNKLIKPTKGILYLISIASLDQ

SEQ ID NO: 5685 - protein, 36 aa, Artificial Sequence
  Cyclic GFR-binding peptide
  MOD_RES (2)..(4)..(36): Xaa is C or S
HXGXARVVMNRHKRLIVNSSDDYYLVSTASLQTPAX

SEQ ID NO: 5686 - protein, 38 aa, Artificial Sequence
  Cyclic GFR-binding peptide
  MOD_RES (35)..(35): Xaa is C or S
HDELTQYNKLFIPKKRVIELYLVSIASLQVQTPRXQVN

SEQ ID NO: 5687 - protein, 31 aa, Artificial Sequence
  Cyclic GFR-binding peptide
  MOD_RES (27)..(28): Xaa is C or S
EQYNKLVVKDYEDLYLMSIASLETPVXXAKP

SEQ ID NO: 5688 - protein, 31 aa, Artificial Sequence
  Cyclic GFR-binding peptide
  MOD_RES (2)..(4): Xaa is C or S
RXGXGEVVMDRYKKLVVKENEDFYLMSIANL

SEQ ID NO: 5689 - protein, 25 aa, Artificial Sequence
  Cyclic GFR-binding peptide
EQYNKLTPVGMDDLYLVSIASLKTP

SEQ ID NO: 5690 - protein, 28 aa, Artificial Sequence
  Cyclic GFR-binding peptide
  MOD_RES (27)..(28): Xaa is C or S
NYHYKLIVNSSDDKYLVSIPSLQTPAXX

SEQ ID NO: 5691 - protein, 38 aa, Artificial Sequence
  Cyclic GFR-binding peptide
  MOD_RES (2)..(33)..(34): Xaa is C or S
KXSKVIMQYNKLIKPTKGILYLISIASLDQSVXXPSAS

SEQ ID NO: 5692 - protein, 35 aa, Artificial Sequence
  Cyclic GFR-binding peptide
  MOD_RES (29)..(30): Xaa is C or S
VMERYKKLVVKDYEDFYLMSIANLETPVXXAKPIS

SEQ ID NO: 5693 - protein, 25 aa, Artificial Sequence
  Cyclic GFR-binding peptide
VMDQYNKLVVKENEDLYLMSIASLE

SEQ ID NO: 5694 - protein, 25 aa, Artificial Sequence
  Cyclic GFR-binding peptide
SKVIMRHKRLIKPTKGIYYLISTAS

SEQ ID NO: 5695 - protein, 32 aa, Artificial Sequence
  Cyclic GFR-binding peptide
  MOD_RES (29)..(30): Xaa is C or S
VIMQYNKLIKPTKGILYLISIASLDQSVXXPS

SEQ ID NO: 5696 - protein, 33 aa, Artificial Sequence
  Cyclic GFR-binding peptide
  MOD_RES (28)..(29): Xaa is C or S
MNYHYKLIVNNSSDKYLVSIPSLKTPAXXAKPV

SEQ ID NO: 5697 - protein, 31 aa, Artificial Sequence
  Cyclic GFR-binding peptide
  MOD_RES (31)..(31): Xaa is C or S
EVVMDYHYKLVVKENEDKYLMSIPSLETPVX

SEQ ID NO: 5698 - protein, 30 aa, Artificial Sequence
  Cyclic GFR-binding peptide
  MOD_RES (30)..(30): Xaa is C or S
RYKKLFIPKKRVIEFYLVSIANLQVQTPRX

SEQ ID NO: 5699 - protein, 34 aa, Artificial Sequence
  Cyclic GFR-binding peptide
  MOD_RES (1)..(33)..(34): Xaa is C or S
XGEVVMEYHYKLVVKDYEDKYLMSIPSLETPVXX

SEQ ID NO: 5700 - protein, 26 aa, Artificial Sequence
  Cyclic GFR-binding peptide
  MOD_RES (26)..(26): Xaa is C or S
RYKKLIVNNSSDFYLVSIANLKTPAX

SEQ ID NO: 5701 - protein, 43 aa, Artificial Sequence
  Cyclic GFR-binding peptide
  MOD_RES (2)..(4)..(37)..(38): Xaa is C or S
RXGXEAVSMGERHKRLTPVGMDDYYLVSTASLKTPVXXAKGVK

SEQ ID NO: 5702 - protein, 33 aa, Artificial Sequence
  Cyclic GFR-binding peptide
DELTRYKKLFIPKKRVIEFYLVSIANLQVQTPR

SEQ ID NO: 5703 - protein, 35 aa, Artificial Sequence
  Cyclic GFR-binding peptide
  MOD_RES (30)..(31): Xaa is C or S
SMGEQYNKLTPVGMDDLYLVSIASLKTPVXXAKGV

SEQ ID NO: 5704 - protein, 41 aa, Artificial Sequence
  Cyclic GFR-binding peptide
  MOD_RES (1)..(3)..(35)..(36): Xaa is C or S
XGXAKVVMNRYKKLIVNNSSDFYLVSIANLKTPAXXAKPVA

SEQ ID NO: 5705 - protein, 28 aa, Artificial Sequence
  Cyclic GFR-binding peptide
  MOD_RES (27)..(28): Xaa is C or S
EYHYKLVVKDYEDKYLMSIPSLETPVXX

SEQ ID NO: 5706 - protein, 30 aa, Artificial Sequence
  Cyclic GFR-binding peptide
  MOD_RES (29)..(30): Xaa is C or S
VMNRHKRLIVNSSDDYYLVSTASLQTPAXX

SEQ ID NO: 5707 - protein, 31 aa, Artificial Sequence
  Cyclic GFR-binding peptide
  MOD_RES (26)..(27): Xaa is C or S
RYKKLIVNSSDDFYLVSIANLQTPAXXPKPV

SEQ ID NO: 5708 - protein, 39 aa, Artificial Sequence
  Cyclic GFR-binding peptide
  MOD_RES (2)..(4)..(35)..(36): Xaa is C or S
SXKXSKVIMRYKKLIKPTKGIFYLISIANLDQSVXXPSA

SEQ ID NO: 5709 - protein, 22 aa, Artificial Sequence
  Cyclic GFR-binding peptide
RYKKLIVNNSSDFYLVSIANLK

SEQ ID NO: 5710 - protein, 38 aa, Artificial Sequence
  Cyclic GFR-binding peptide
  MOD_RES (2)..(4)..(36)..(37): Xaa is C or S
HXGXARVVMNRYKKLIVNSSDDFYLVSIANLQTPAXXP

SEQ ID NO: 5711 - protein, 28 aa, Artificial Sequence
  Cyclic GFR-binding peptide
  MOD_RES (1)..(1): Xaa is C or S
XGEVVMDRHKRLVVKENEDYYLMSTASL

SEQ ID NO: 5712 - protein, 33 aa, Artificial Sequence
  Cyclic GFR-binding peptide
  MOD_RES (2)..(2): Xaa is C or S
GXSRVVMNYHYKLIVNSSDDKYLVSIPSLKTPA

SEQ ID NO: 5713 - protein, 26 aa, Artificial Sequence
  Cyclic GFR-binding peptide
QYNKLFIPKKRVIELYLVSIASLQVQ

SEQ ID NO: 5714 - protein, 30 aa, Artificial Sequence
  Cyclic GFR-binding peptide
LTQYNKLFIPKKRVIELYLVSIASLQVQTP

SEQ ID NO: 5715 - protein, 31 aa, Artificial Sequence
  Cyclic GFR-binding peptide
  MOD_RES (1)..(3): Xaa is C or S
XGXARVVMNYHYKLIVNSSDDKYLVSIPSLQ

SEQ ID NO: 5716 - protein, 32 aa, Artificial Sequence
  Cyclic GFR-binding peptide
  MOD_RES (27)..(28): Xaa is C or S
ERHKRLVVKDYEDYYLMSTASLETPVXXAKPI

SEQ ID NO: 5717 - protein, 37 aa, Artificial Sequence
  Cyclic GFR-binding peptide
  MOD_RES (32)..(33): Xaa is C or S
AKVVMNQYNKLIVNNSSDLYLVSIASLKTPAXXAKPV

SEQ ID NO: 5718 - protein, 21 aa, Artificial Sequence
  Cyclic GFR-binding peptide
RYKKLVVKDYEDFYLMSIANL

SEQ ID NO: 5719 - protein, 27 aa, Artificial Sequence
  Cyclic GFR-binding peptide
  MOD_RES (26)..(27): Xaa is C or S
YHYKLIKPTKGIKYLISIPSLDQSVXX

SEQ ID NO: 5720 - protein, 36 aa, Artificial Sequence
  Cyclic GFR-binding peptide
  MOD_RES (31)..(32): Xaa is C or S
EVVMDRHKRLVVKENEDYYLMSTASLETPVXXAKPI

SEQ ID NO: 5721 - protein, 35 aa, Artificial Sequence
  Cyclic GFR-binding peptide
  MOD_RES (2)..(4): Xaa is C or S
HXGXARVVMNRYKKLIVNSSDDFYLVSIANLQTPA

SEQ ID NO: 5722 - protein, 42 aa, Artificial Sequence
  Cyclic GFR-binding peptide
  MOD_RES (2)..(4)..(36)..(37): Xaa is C or S
HXGXARVVMNRHKRLIVNSSDDYYLVSTASLQTPAXXPKPVT

SEQ ID NO: 5723 - protein, 31 aa, Artificial Sequence
  Cyclic GFR-binding peptide
  MOD_RES (31)..(31): Xaa is C or S
VSMGERYKKLTPVGMDDFYLVSIANLKTPVX

SEQ ID NO: 5724 - protein, 34 aa, Artificial Sequence
  Cyclic GFR-binding peptide
  MOD_RES (29)..(30): Xaa is C or S
VMNRYKKLIVNSSDDFYLVSIANLQTPAXXPKPV

SEQ ID NO: 5725 - protein, 20 aa, Artificial Sequence
  Cyclic GFR-binding peptide
QYNKLVVKDYEDLYLMSIAS

SEQ ID NO: 5726 - protein, 35 aa, Artificial Sequence
  Cyclic GFR-binding peptide
  MOD_RES (30)..(31): Xaa is C or S
VVMNQYNKLIVNSSDDLYLVSIASLQTPAXXPKPV

SEQ ID NO: 5727 - protein, 33 aa, Artificial Sequence
  Cyclic GFR-binding peptide
  MOD_RES (2)..(4): Xaa is C or S
HXGXARVVMNRYKKLIVNSSDDFYLVSIANLQT

SEQ ID NO: 5728 - protein, 35 aa, Artificial Sequence
  Cyclic GFR-binding peptide
  MOD_RES (31)..(32): Xaa is C or S
RVVMNRHKRLIVNSSDDYYLVSTASLQTPAXXPKP

SEQ ID NO: 5729 - protein, 37 aa, Artificial Sequence
  Cyclic GFR-binding peptide
  MOD_RES (1)..(3)..(35)..(36): Xaa is C or S
XGXGEVVMEYHYKLVVKDYEDKYLMSIPSLETPVXXA

SEQ ID NO: 5730 - protein, 25 aa, Artificial Sequence
  Cyclic GFR-binding peptide
ERHKRLVVKDYEDYYLMSTASLETP

SEQ ID NO: 5731 - protein, 27 aa, Artificial Sequence
  Cyclic GFR-binding peptide
VKPTRGVQYNKLVKPTRGVLYLISIAS

SEQ ID NO: 5732 - protein, 33 aa, Artificial Sequence
  Cyclic GFR-binding peptide
  MOD_RES (27)..(28): Xaa is C or S
DRHKRLVVKENEDYYLMSTASLETPVXXAKPIK

SEQ ID NO: 5733 - protein, 30 aa, Artificial Sequence
  Cyclic GFR-binding peptide
  MOD_RES (30)..(30): Xaa is C or S
VVMNRYKKLIVNSSDDFYLVSIANLKTPAX

SEQ ID NO: 5734 - protein, 29 aa, Artificial Sequence
  Cyclic GFR-binding peptide
  MOD_RES (1)..(1): Xaa is C or S
XGEVVMERHKRLVVKDYEDYYLMSTASLE

SEQ ID NO: 5735 - protein, 34 aa, Artificial Sequence
  Cyclic GFR-binding peptide
  MOD_RES (31)..(32): Xaa is C or S
SRVIMYHYKLVKPKRGVKYLISIPSLAQPVXXPA

SEQ ID NO: 5736 - protein, 33 aa, Artificial Sequence
  Cyclic GFR-binding peptide
  MOD_RES (32)..(33): Xaa is C or S
AVSMGEQYNKLTPVGMDDLYLVSIASLKTPVXX

SEQ ID NO: 5737 - protein, 30 aa, Artificial Sequence
  Cyclic GFR-binding peptide
  MOD_RES (26)..(27): Xaa is C or S
QYNKLIKPTKGILYLISIASLDQSVXXPSA

SEQ ID NO: 5738 - protein, 37 aa, Artificial Sequence
  Cyclic GFR-binding peptide
  MOD_RES (31)..(32): Xaa is C or S
VSMGEQYNKLTPVGMDDLYLVSIASLKTPVXXAKGVK

SEQ ID NO: 5739 - protein, 34 aa, Artificial Sequence
  Cyclic GFR-binding peptide
LHDELTRHKRLFIPKKRVIEYYLVSTASLQVQTP

SEQ ID NO: 5740 - protein, 30 aa, Artificial Sequence
  Cyclic GFR-binding peptide
ARVVMNRHKRLIVNSSDDYYLVSTASLQTP

SEQ ID NO: 5741 - protein, 31 aa, Artificial Sequence
  Cyclic GFR-binding peptide
  MOD_RES (27)..(28): Xaa is C or S
MYHYKLVKPKRGVKYLISIPSLAQPVXXPAA

SEQ ID NO: 5742 - protein, 33 aa, Artificial Sequence
  Cyclic GFR-binding peptide
  MOD_RES (31)..(31): Xaa is C or S
RVVMNRYKKLIVNSSDDFYLVSIANLKTPAXTP

SEQ ID NO: 5743 - protein, 26 aa, Artificial Sequence
  Cyclic GFR-binding peptide
EVVMEQYNKLVVKDYEDLYLMSIASL

SEQ ID NO: 5744 - protein, 24 aa, Artificial Sequence
  Cyclic GFR-binding peptide
VVMRYKKLVKPTRGVFYLISIANL

SEQ ID NO: 5745 - protein, 32 aa, Artificial Sequence
  Cyclic GFR-binding peptide
  MOD_RES (31)..(31): Xaa is C or S
TRYKKLFIPKKRVIEFYLVSIANLQVQTPRXQ

SEQ ID NO: 5746 - protein, 21 aa, Artificial Sequence
  Cyclic GFR-binding peptide
RHKRLVKPKRGVYYLISTASL

SEQ ID NO: 5747 - protein, 28 aa, Artificial Sequence
  Cyclic GFR-binding peptide
  MOD_RES (1)..(1): Xaa is C or S
XARVVMNQYNKLIVNSSDDLYLVSIASL

SEQ ID NO: 5748 - protein, 33 aa, Artificial Sequence
  Cyclic GFR-binding peptide
  MOD_RES (2)..(4): Xaa is C or S
EXKXALHDELTYHYKLFIPKKRVIEKYLVSIPS

SEQ ID NO: 5749 - protein, 32 aa, Artificial Sequence
  Cyclic GFR-binding peptide
  MOD_RES (32)..(32): Xaa is C or S
AVSMGEQYNKLTPVGMDDLYLVSIASLKTPVX

SEQ ID NO: 5750 - protein, 29 aa, Artificial Sequence
  Cyclic GFR-binding peptide
EVVMDRHKRLVVKENEDYYLMSTASLETP

SEQ ID NO: 5751 - protein, 32 aa, Artificial Sequence
  Cyclic GFR-binding peptide
  MOD_RES (1)..(3): Xaa is C or S
XGXSRVVMNRHKRLIVNSSDDYYLVSTASLKT

SEQ ID NO: 5752 - protein, 23 aa, Artificial Sequence
  Cyclic GFR-binding peptide
MNYHYKLIVNSSDDKYLVSIPSL

SEQ ID NO: 5753 - protein, 25 aa, Artificial Sequence
  Cyclic GFR-binding peptide
RYKKLVVKDYEDFYLMSIANLETPV

SEQ ID NO: 5754 - protein, 29 aa, Artificial Sequence
  Cyclic GFR-binding peptide
SRVIMYHYKLVKPKRGVKYLISIPSLAQP

SEQ ID NO: 5755 - protein, 34 aa, Artificial Sequence
  Cyclic GFR-binding peptide
  MOD_RES (1)..(33)..(34): Xaa is C or S
XGEVVMERYKKLVVKDYEDFYLMSIANLETPVXX

SEQ ID NO: 5756 - protein, 36 aa, Artificial Sequence
  Cyclic GFR-binding peptide
  MOD_RES (1)..(32)..(33): Xaa is C or S
XSKVVMYHYKLVKPTRGVKYLISIPSLDQPVXXPSA

SEQ ID NO: 5757 - protein, 28 aa, Artificial Sequence
  Cyclic GFR-binding peptide
  MOD_RES (27)..(28): Xaa is C or S
DRHKRLVVKENEDYYLMSTASLETPVXX

SEQ ID NO: 5758 - protein, 25 aa, Artificial Sequence
  Cyclic GFR-binding peptide
MQYNKLVKPTRGVLYLISIASLDQP

SEQ ID NO: 5759 - protein, 25 aa, Artificial Sequence
  Cyclic GFR-binding peptide
VVMEYHYKLVVKDYEDKYLMSIPSL

SEQ ID NO: 5760 - protein, 31 aa, Artificial Sequence
  Cyclic GFR-binding peptide
LTRHKRLFIPKKRVIEYYLVSTASLQVQTPR

SEQ ID NO: 5761 - protein, 30 aa, Artificial Sequence
  Cyclic GFR-binding peptide
  MOD_RES (2)..(4): Xaa is C or S
HXGXARVVMNRYKKLIVNSSDDFYLVSIAN

SEQ ID NO: 5762 - protein, 37 aa, Artificial Sequence
  Cyclic GFR-binding peptide
  MOD_RES (2)..(33)..(34): Xaa is C or S
KXSKVVMRYKKLVKPTRGVFYLISIANLDQPVXXPSA

SEQ ID NO: 5763 - protein, 35 aa, Artificial Sequence
  Cyclic GFR-binding peptide
  MOD_RES (33)..(33): Xaa is C or S
ELTRYKKLFIPKKRVIEFYLVSIANLQVQTPRXQV

SEQ ID NO: 5764 - protein, 35 aa, Artificial Sequence
  Cyclic GFR-binding peptide
  MOD_RES (1)..(3): Xaa is C or S
XKXALHDELTRHKRLFIPKKRVIEYYLVSTASLQV

SEQ ID NO: 5765 - protein, 36 aa, Artificial Sequence
  Cyclic GFR-binding peptide
  MOD_RES (2)..(35)..(36): Xaa is C or S
GXEAVSMGERYKKLTPVGMDDFYLVSIANLKTPVXX

SEQ ID NO: 5766 - protein, 30 aa, Artificial Sequence
  Cyclic GFR-binding peptide
ALHDELTYHYKLFIPKKRVIEKYLVSIPSL

SEQ ID NO: 5767 - protein, 27 aa, Artificial Sequence
  Cyclic GFR-binding peptide
EVVMDRYKKLVVKENEDFYLMSIANLE

SEQ ID NO: 5768 - protein, 41 aa, Artificial Sequence
  Cyclic GFR-binding peptide
  MOD_RES (2)..(4)..(37)..(38): Xaa is C or S
RXGXEAVSMGERHKRLTPVGMDDYYLVSTASLKTPVXXAKG

SEQ ID NO: 5769 - protein, 31 aa, Artificial Sequence
  Cyclic GFR-binding peptide
  MOD_RES (2)..(2): Xaa is C or S
KXSKVVMRHKRLVKPTRGVYYLISTASLDQP

SEQ ID NO: 5770 - protein, 25 aa, Artificial Sequence
  Cyclic GFR-binding peptide
NQYNKLIVNSSDDLYLVSIASLKTP

SEQ ID NO: 5771 - protein, 30 aa, Artificial Sequence
  Cyclic GFR-binding peptide
  MOD_RES (30)..(30): Xaa is C or S
VVMNRYKKLIVNSSDDFYLVSIANLQTPAX

SEQ ID NO: 5772 - protein, 24 aa, Artificial Sequence
  Cyclic GFR-binding peptide
GEQYNKLTPVGMDDLYLVSIASLK

SEQ ID NO: 5773 - protein, 42 aa, Artificial Sequence
  Cyclic GFR-binding peptide
  MOD_RES (2)..(4)..(41): Xaa is C or S
EXKXALHDELTQYNKLFIPKKRVIELYLVSIASLQVQTPRXQ

SEQ ID NO: 5774 - protein, 27 aa, Artificial Sequence
  Cyclic GFR-binding peptide
  MOD_RES (2)..(2): Xaa is C or S
KXSRVIMQYNKLVKPKRGVLYLISIAS

SEQ ID NO: 5775 - protein, 35 aa, Artificial Sequence
  Cyclic GFR-binding peptide
  MOD_RES (2)..(33)..(34): Xaa is C or S
KXSKVVMYHYKLVKPTRGVKYLISIPSLDQPVXXP

SEQ ID NO: 5776 - protein, 32 aa, Artificial Sequence
  Cyclic GFR-binding peptide
  MOD_RES (31)..(31): Xaa is C or S
RVVMNRYKKLIVNSSDDFYLVSIANLKTPAXT

SEQ ID NO: 5777 - protein, 31 aa, Artificial Sequence
  Cyclic GFR-binding peptide
  MOD_RES (30)..(30): Xaa is C or S
VVMNYHYKLIVNSSDDKYLVSIPSLKTPAXT

SEQ ID NO: 5778 - protein, 32 aa, Artificial Sequence
  Cyclic GFR-binding peptide
  MOD_RES (1)..(32): Xaa is C or S
XSKVIMRYKKLIKPTKGIFYLISIANLDQSVX

SEQ ID NO: 5779 - protein, 38 aa, Artificial Sequence
  Cyclic GFR-binding peptide
  MOD_RES (32)..(33): Xaa is C or S
GEVVMEQYNKLVVKDYEDLYLMSIASLETPVXXAKPIS

SEQ ID NO: 5780 - protein, 24 aa, Artificial Sequence
  Cyclic GFR-binding peptide
KVIMRYKKLIKPTKGIFYLISIAN

SEQ ID NO: 5781 - protein, 36 aa, Artificial Sequence
  Cyclic GFR-binding peptide
  MOD_RES (2)..(34)..(35): Xaa is C or S
GXGEVVMDRHKRLVVKENEDYYLMSTASLETPVXXA

SEQ ID NO: 5782 - protein, 21 aa, Artificial Sequence
  Cyclic GFR-binding peptide
MRYKKLVKPTRGVFYLISIAN

SEQ ID NO: 5783 - protein, 40 aa, Artificial Sequence
  Cyclic GFR-binding peptide
  MOD_RES (1)..(3)..(35): Xaa is C or S
XGXSRVVMNQYNKLIVNSSDDLYLVSIASLKTPAXTPKTV

SEQ ID NO: 5784 - protein, 31 aa, Artificial Sequence
  Cyclic GFR-binding peptide
  MOD_RES (30)..(31): Xaa is C or S
KVVMRYKKLVKPTRGVFYLISIANLDQPVXX

SEQ ID NO: 5785 - protein, 23 aa, Artificial Sequence
  Cyclic GFR-binding peptide
VMRHKRLVKPTRGVYYLISTASL

SEQ ID NO: 5786 - protein, 25 aa, Artificial Sequence
  Cyclic GFR-binding peptide
MRHKRLIKPTKGIYYLISTASLDQS

SEQ ID NO: 5787 - protein, 22 aa, Artificial Sequence
  Cyclic GFR-binding peptide
YHYKLIVNSSDDKYLVSIPSLQ

SEQ ID NO: 5788 - protein, 31 aa, Artificial Sequence
  Cyclic GFR-binding peptide
  MOD_RES (2)..(4): Xaa is C or S
HXGXSRVVMNRHKRLIVNSSDDYYLVSTASL

SEQ ID NO: 5789 - protein, 27 aa, Artificial Sequence
  Cyclic GFR-binding peptide
  MOD_RES (26)..(27): Xaa is C or S
QYNKLIVNNSSDLYLVSIASLKTPAXX

SEQ ID NO: 5790 - protein, 29 aa, Artificial Sequence
  Cyclic GFR-binding peptide
EAVSMGEQYNKLTPVGMDDLYLVSIASLK

SEQ ID NO: 5791 - protein, 37 aa, Artificial Sequence
  Cyclic GFR-binding peptide
  MOD_RES (33)..(34): Xaa is C or S
EAVSMGERHKRLTPVGMDDYYLVSTASLKTPVXXAKG

SEQ ID NO: 5792 - protein, 40 aa, Artificial Sequence
  Cyclic GFR-binding peptide
  MOD_RES (2)..(4): Xaa is C or S
EXKXALHDELTQYNKLFIPKKRVIELYLVSIASLQVQTPR

SEQ ID NO: 5793 - protein, 39 aa, Artificial Sequence
  Cyclic GFR-binding peptide
  MOD_RES (2)..(4)..(36)..(37): Xaa is C or S
RXGXGEVVMDRHKRLVVKENEDYYLMSTASLETPVXXAK

SEQ ID NO: 5794 - protein, 39 aa, Artificial Sequence
  Cyclic GFR-binding peptide
  MOD_RES (1)..(33)..(34): Xaa is C or S
XSRVVMNRHKRLIVNSSDDYYLVSTASLKTPAXXPKPVY

SEQ ID NO: 5795 - protein, 25 aa, Artificial Sequence
  Cyclic GFR-binding peptide
KVIMQYNKLIKPTKGILYLISIASL

SEQ ID NO: 5796 - protein, 38 aa, Artificial Sequence
  Cyclic GFR-binding peptide
  MOD_RES (2)..(4): Xaa is C or S
EXKXALHDELTRHKRLFIPKKRVIEYYLVSTASLQVQT

SEQ ID NO: 5797 - protein, 23 aa, Artificial Sequence
  Cyclic GFR-binding peptide
VIMYHYKLVKPKRGVKYLISIPS

SEQ ID NO: 5798 - protein, 29 aa, Artificial Sequence
  Cyclic GFR-binding peptide
  MOD_RES (1)..(1): Xaa is C or S
XSRVVMNQYNKLIVNSSDDLYLVSIASLK

SEQ ID NO: 5799 - protein, 23 aa, Artificial Sequence
  Cyclic GFR-binding peptide
YHYKLIVNSSDDKYLVSIPSLQT

SEQ ID NO: 5800 - protein, 30 aa, Artificial Sequence
  Cyclic GFR-binding peptide
  MOD_RES (1)..(1): Xaa is C or S
XGEVVMDYHYKLVVKENEDKYLMSIPSLET

SEQ ID NO: 5801 - protein, 42 aa, Artificial Sequence
  Cyclic GFR-binding peptide
  MOD_RES (2)..(4)..(36)..(37): Xaa is C or S
RXGXGEVVMEQYNKLVVKDYEDLYLMSIASLETPVXXAKPIS

SEQ ID NO: 5802 - protein, 25 aa, Artificial Sequence
  Cyclic GFR-binding peptide
VMNRYKKLIVNNSSDFYLVSIANLK

SEQ ID NO: 5803 - protein, 32 aa, Artificial Sequence
  Cyclic GFR-binding peptide
  MOD_RES (1)..(32): Xaa is C or S
XSKVVMQYNKLVKPTRGVLYLISIASLDQPVX

SEQ ID NO: 5804 - protein, 31 aa, Artificial Sequence
  Cyclic GFR-binding peptide
  MOD_RES (1)..(1): Xaa is C or S
XSRVVMNRHKRLIVNSSDDYYLVSTASLKTP

SEQ ID NO: 5805 - protein, 37 aa, Artificial Sequence
  Cyclic GFR-binding peptide
  MOD_RES (32)..(33): Xaa is C or S
GEVVMDRHKRLVVKENEDYYLMSTASLETPVXXAKPI

SEQ ID NO: 5806 - protein, 33 aa, Artificial Sequence
  Cyclic GFR-binding peptide
  MOD_RES (30)..(31): Xaa is C or S
VVMNRYKKLIVNNSSDFYLVSIANLKTPAXXAK

SEQ ID NO: 5807 - protein, 26 aa, Artificial Sequence
  Cyclic GFR-binding peptide
VMNYHYKLIVNSSDDKYLVSIPSLKT

SEQ ID NO: 5808 - protein, 33 aa, Artificial Sequence
  Cyclic GFR-binding peptide
  MOD_RES (2)..(4): Xaa is C or S
SXKXSRVIMQYNKLVKPKRGVLYLISIASLAQP

SEQ ID NO: 5809 - protein, 24 aa, Artificial Sequence
  Cyclic GFR-binding peptide
VMNYHYKLIVNNSSDKYLVSIPSL

SEQ ID NO: 5810 - protein, 26 aa, Artificial Sequence
  Cyclic GFR-binding peptide
  MOD_RES (26)..(26): Xaa is C or S
RHKRLIKPTKGIYYLISTASLDQSVX

SEQ ID NO: 5811 - protein, 39 aa, Artificial Sequence
  Cyclic GFR-binding peptide
  MOD_RES (1)..(3)..(36)..(37): Xaa is C or S
XGXEAVSMGEQYNKLTPVGMDDLYLVSIASLKTPVXXAK

SEQ ID NO: 5812 - protein, 34 aa, Artificial Sequence
  Cyclic GFR-binding peptide
  MOD_RES (29)..(30): Xaa is C or S
VMNQYNKLIVNSSDDLYLVSIASLKTPAXXPKPV

SEQ ID NO: 5813 - protein, 31 aa, Artificial Sequence
  Cyclic GFR-binding peptide
  MOD_RES (2)..(4): Xaa is C or S
RXGXEAVSMGEQYNKLTPVGMDDLYLVSIAS

SEQ ID NO: 5814 - protein, 34 aa, Artificial Sequence
  Cyclic GFR-binding peptide
HDELTRHKRLFIPKKRVIEYYLVSTASLQVQTPR

SEQ ID NO: 5815 - protein, 35 aa, Artificial Sequence
  Cyclic GFR-binding peptide
  MOD_RES (30)..(31): Xaa is C or S
KVIMRHKRLIKPTKGIYYLISTASLDQSVXXPSAS

SEQ ID NO: 5816 - protein, 34 aa, Artificial Sequence
  Cyclic GFR-binding peptide
  MOD_RES (1)..(3): Xaa is C or S
XGXGEVVMERHKRLVVKDYEDYYLMSTASLETPV

SEQ ID NO: 5817 - protein, 27 aa, Artificial Sequence
  Cyclic GFR-binding peptide
  MOD_RES (26)..(27): Xaa is C or S
QYNKLVVKENEDLYLMSIASLETPVXX

SEQ ID NO: 5818 - protein, 26 aa, Artificial Sequence
  Cyclic GFR-binding peptide
  MOD_RES (26)..(26): Xaa is C or S
QYNKLVVKENEDLYLMSIASLETPVX

SEQ ID NO: 5819 - protein, 28 aa, Artificial Sequence
  Cyclic GFR-binding peptide
VMNRYKKLIVNSSDDFYLVSIANLKTPA

SEQ ID NO: 5820 - protein, 34 aa, Artificial Sequence
  Cyclic GFR-binding peptide
  MOD_RES (28)..(29): Xaa is C or S
IMRYKKLVKPKRGVFYLISIANLAQPVXXPAASA

SEQ ID NO: 5821 - protein, 31 aa, Artificial Sequence
  Cyclic GFR-binding peptide
  MOD_RES (1)..(1): Xaa is C or S
XSKVIMQYNKLIKPTKGILYLISIASLDQSV

SEQ ID NO: 5822 - protein, 30 aa, Artificial Sequence
  Cyclic GFR-binding peptide
  MOD_RES (26)..(27): Xaa is C or S
YHYKLVKPTRGVKYLISIPSLDQPVXXPSA

SEQ ID NO: 5823 - protein, 30 aa, Artificial Sequence
  Cyclic GFR-binding peptide
  MOD_RES (29)..(30): Xaa is C or S
MGEQYNKLTPVGMDDLYLVSIASLKTPVXX

SEQ ID NO: 5824 - protein, 36 aa, Artificial Sequence
  Cyclic GFR-binding peptide
  MOD_RES (2)..(34)..(35): Xaa is C or S
GXAKVVMNQYNKLIVNNSSDLYLVSIASLKTPAXXA

SEQ ID NO: 5825 - protein, 39 aa, Artificial Sequence
  Cyclic GFR-binding peptide
  MOD_RES (1)..(33)..(34): Xaa is C or S
XGEVVMDRHKRLVVKENEDYYLMSTASLETPVXXAKPIK

SEQ ID NO: 5826 - protein, 30 aa, Artificial Sequence
  Cyclic GFR-binding peptide
  MOD_RES (27)..(28): Xaa is C or S
DRHKRLVVKENEDYYLMSTASLETPVXXAK

SEQ ID NO: 5827 - protein, 34 aa, Artificial Sequence
  Cyclic GFR-binding peptide
  MOD_RES (2)..(4): Xaa is C or S
SXKXSKVIMQYNKLIKPTKGILYLISIASLDQSV

SEQ ID NO: 5828 - protein, 34 aa, Artificial Sequence
  Cyclic GFR-binding peptide
  MOD_RES (29)..(30): Xaa is C or S
VVMYHYKLVKPTRGVKYLISIPSLDQPVXXPSAS

SEQ ID NO: 5829 - protein, 30 aa, Artificial Sequence
  Cyclic GFR-binding peptide
SRVIMRYKKLVKPKRGVFYLISIANLAQPV

SEQ ID NO: 5830 - protein, 25 aa, Artificial Sequence
  Cyclic GFR-binding peptide
VVMNQYNKLIVNSSDDLYLVSIASL

SEQ ID NO: 5831 - protein, 23 aa, Artificial Sequence
  Cyclic GFR-binding peptide
RYKKLTPVGMDDFYLVSIANLKT

SEQ ID NO: 5832 - protein, 23 aa, Artificial Sequence
  Cyclic GFR-binding peptide
RYKKLIVNSSDDFYLVSIANLKT

SEQ ID NO: 5833 - protein, 38 aa, Artificial Sequence
  Cyclic GFR-binding peptide
  MOD_RES (2)..(33)..(34): Xaa is C or S
KXSKVVMQYNKLVKPTRGVLYLISIASLDQPVXXPSAS

SEQ ID NO: 5834 - protein, 38 aa, Artificial Sequence
  Cyclic GFR-binding peptide
  MOD_RES (32)..(33): Xaa is C or S
ARVVMNYHYKLIVNSSDDKYLVSIPSLQTPAXXPKPVT

SEQ ID NO: 5835 - protein, 33 aa, Artificial Sequence
  Cyclic GFR-binding peptide
  MOD_RES (2)..(4): Xaa is C or S
RXGXGEVVMDRYKKLVVKENEDFYLMSIANLET

SEQ ID NO: 5836 - protein, 38 aa, Artificial Sequence
  Cyclic GFR-binding peptide
  MOD_RES (1)..(3)..(34)..(35): Xaa is C or S
XKXSKVIMQYNKLIKPTKGILYLISIASLDQSVXXPSA

SEQ ID NO: 5837 - protein, 31 aa, Artificial Sequence
  Cyclic GFR-binding peptide
SRVVMNYHYKLIVNSSDDKYLVSIPSLKTPA

SEQ ID NO: 5838 - protein, 35 aa, Artificial Sequence
  Cyclic GFR-binding peptide
  MOD_RES (1)..(32)..(33): Xaa is C or S
XSRVIMQYNKLVKPKRGVLYLISIASLAQPVXXPA

SEQ ID NO: 5839 - protein, 28 aa, Artificial Sequence
  Cyclic GFR-binding peptide
  MOD_RES (1)..(3): Xaa is C or S
XKXSKVVMYHYKLVKPTRGVKYLISIPS

SEQ ID NO: 5840 - protein, 21 aa, Artificial Sequence
  Cyclic GFR-binding peptide
RHKRLVVKENEDYYLMSTASL

SEQ ID NO: 5841 - protein, 29 aa, Artificial Sequence
  Cyclic GFR-binding peptide
VVMNRYKKLIVNSSDDFYLVSIANLKTPA

SEQ ID NO: 5842 - protein, 31 aa, Artificial Sequence
  Cyclic GFR-binding peptide
  MOD_RES (26)..(27): Xaa is C or S
RYKKLTPVGMDDFYLVSIANLKTPVXXAKGV

SEQ ID NO: 5843 - protein, 40 aa, Artificial Sequence
  Cyclic GFR-binding peptide
  MOD_RES (2)..(4)..(36)..(37): Xaa is C or S
RXGXGEVVMDYHYKLVVKENEDKYLMSIPSLETPVXXAKP

SEQ ID NO: 5844 - protein, 23 aa, Artificial Sequence
  Cyclic GFR-binding peptide
MDRHKRLVVKENEDYYLMSTASL

SEQ ID NO: 5845 - protein, 34 aa, Artificial Sequence
  Cyclic GFR-binding peptide
  MOD_RES (32)..(33): Xaa is C or S
ARVVMNRYKKLIVNSSDDFYLVSIANLQTPAXXP

SEQ ID NO: 5846 - protein, 21 aa, Artificial Sequence
  Cyclic GFR-binding peptide
NQYNKLIVNNSSDLYLVSIAS

SEQ ID NO: 5847 - protein, 36 aa, Artificial Sequence
  Cyclic GFR-binding peptide
  MOD_RES (2)..(2): Xaa is C or S
KXALHDELTQYNKLFIPKKRVIELYLVSIASLQVQT

SEQ ID NO: 5848 - protein, 38 aa, Artificial Sequence
  Cyclic GFR-binding peptide
  MOD_RES (2)..(4)..(36)..(37): Xaa is C or S
HXGXARVVMNYHYKLIVNSSDDKYLVSIPSLQTPAXXP

SEQ ID NO: 5849 - protein, 34 aa, Artificial Sequence
  Cyclic GFR-binding peptide
  MOD_RES (34)..(34): Xaa is C or S
DELTQYNKLFIPKKRVIELYLVSIASLQVQTPRX

SEQ ID NO: 5850 - protein, 34 aa, Artificial Sequence
  Cyclic GFR-binding peptide
  MOD_RES (2)..(34): Xaa is C or S
GXSRVVMNRHKRLIVNSSDDYYLVSTASLKTPAX

SEQ ID NO: 5851 - protein, 27 aa, Artificial Sequence
  Cyclic GFR-binding peptide
EAVSMGEQYNKLTPVGMDDLYLVSIAS

SEQ ID NO: 5852 - protein, 33 aa, Artificial Sequence
  Cyclic GFR-binding peptide
  MOD_RES (2)..(2): Xaa is C or S
GXGEVVMDQYNKLVVKENEDLYLMSIASLETPV

SEQ ID NO: 5853 - protein, 32 aa, Artificial Sequence
  Cyclic GFR-binding peptide
  MOD_RES (1)..(3): Xaa is C or S
XGXARVVMNRHKRLIVNSSDDYYLVSTASLQT

SEQ ID NO: 5854 - protein, 25 aa, Artificial Sequence
  Cyclic GFR-binding peptide
YHYKLVVKENEDKYLMSIPSLETPV

SEQ ID NO: 5855 - protein, 36 aa, Artificial Sequence
  Cyclic GFR-binding peptide
  MOD_RES (31)..(31): Xaa is C or S
RVVMNRYKKLIVNSSDDFYLVSIANLKTPAXTPKTV

SEQ ID NO: 5856 - protein, 28 aa, Artificial Sequence
  Cyclic GFR-binding peptide
  MOD_RES (28)..(28): Xaa is C or S
IMRHKRLVKPKRGVYYLISTASLAQPVX

SEQ ID NO: 5857 - protein, 39 aa, Artificial Sequence
  Cyclic GFR-binding peptide
  MOD_RES (1)..(33): Xaa is C or S
XSRVVMNYHYKLIVNSSDDKYLVSIPSLKTPAXTPKTVH

SEQ ID NO: 5858 - protein, 39 aa, Artificial Sequence
  Cyclic GFR-binding peptide
  MOD_RES (2)..(4)..(36)..(37): Xaa is C or S
RXGXGEVVMEYHYKLVVKDYEDKYLMSIPSLETPVXXAK

SEQ ID NO: 5859 - protein, 45 aa, Artificial Sequence
  Cyclic GFR-binding peptide
  MOD_RES (2)..(4)..(41): Xaa is C or S
EXKXALHDELTYHYKLFIPKKRVIEKYLVSIPSLQVQTPRXQVNR

SEQ ID NO: 5860 - protein, 34 aa, Artificial Sequence
  Cyclic GFR-binding peptide
  MOD_RES (31)..(32): Xaa is C or S
SRVIMQYNKLVKPKRGVLYLISIASLAQPVXXPA

SEQ ID NO: 5861 - protein, 24 aa, Artificial Sequence
  Cyclic GFR-binding peptide
GERYKKLTPVGMDDFYLVSIANLK

SEQ ID NO: 5862 - protein, 25 aa, Artificial Sequence
  Cyclic GFR-binding peptide
ELTQYNKLFIPKKRVIELYLVSIAS

SEQ ID NO: 5863 - protein, 27 aa, Artificial Sequence
  Cyclic GFR-binding peptide
VVMQYNKLVKPTRGVLYLISIASLDQP

SEQ ID NO: 5864 - protein, 36 aa, Artificial Sequence
  Cyclic GFR-binding peptide
  MOD_RES (2)..(33)..(34): Xaa is C or S
KXSRVIMRYKKLVKPKRGVFYLISIANLAQPVXXPA

SEQ ID NO: 5865 - protein, 37 aa, Artificial Sequence
  Cyclic GFR-binding peptide
  MOD_RES (2)..(4)..(36)..(37): Xaa is C or S
HXGXSRVVMNRHKRLIVNSSDDYYLVSTASLKTPAXX

SEQ ID NO: 5866 - protein, 27 aa, Artificial Sequence
  Cyclic GFR-binding peptide
  MOD_RES (27)..(27): Xaa is C or S
EYHYKLVVKDYEDKYLMSIPSLETPVX

SEQ ID NO: 5867 - protein, 29 aa, Artificial Sequence
  Cyclic GFR-binding peptide
SRVIMQYNKLVKPKRGVLYLISIASLAQP

SEQ ID NO: 5868 - protein, 30 aa, Artificial Sequence
  Cyclic GFR-binding peptide
  MOD_RES (1)..(1): Xaa is C or S
XGEVVMDRYKKLVVKENEDFYLMSIANLET

SEQ ID NO: 5869 - protein, 29 aa, Artificial Sequence
  Cyclic GFR-binding peptide
ALHDELTRYKKLFIPKKRVIEFYLVSIAN

SEQ ID NO: 5870 - protein, 36 aa, Artificial Sequence
  Cyclic GFR-binding peptide
  MOD_RES (1)..(3)..(35)..(36): Xaa is C or S
XGXSRVVMNYHYKLIVNSSDDKYLVSIPSLKTPAXX

SEQ ID NO: 5871 - protein, 22 aa, Artificial Sequence
  Cyclic GFR-binding peptide
YHYKLIKPTKGIKYLISIPSLD

SEQ ID NO: 5872 - protein, 35 aa, Artificial Sequence
  Cyclic GFR-binding peptide
  MOD_RES (2)..(33)..(34): Xaa is C or S
KXSKVIMRYKKLIKPTKGIFYLISIANLDQSVXXP

SEQ ID NO: 5873 - protein, 29 aa, Artificial Sequence
  Cyclic GFR-binding peptide
KVIMRHKRLIKPTKGIYYLISTASLDQSV

SEQ ID NO: 5874 - protein, 39 aa, Artificial Sequence
  Cyclic GFR-binding peptide
  MOD_RES (2)..(34)..(35): Xaa is C or S
GXAKVVMNRYKKLIVNNSSDFYLVSIANLKTPAXXAKPV

SEQ ID NO: 5875 - protein, 33 aa, Artificial Sequence
  Cyclic GFR-binding peptide
  MOD_RES (1)..(1): Xaa is C or S
XALHDELTRHKRLFIPKKRVIEYYLVSTASLQV

SEQ ID NO: 5876 - protein, 28 aa, Artificial Sequence
  Cyclic GFR-binding peptide
HDELTYHYKLFIPKKRVIEKYLVSIPSL

SEQ ID NO: 5877 - protein, 35 aa, Artificial Sequence
  Cyclic GFR-binding peptide
  MOD_RES (29)..(30): Xaa is C or S
VMNQYNKLIVNSSDDLYLVSIASLQTPAXXPKPVT

SEQ ID NO: 5878 - protein, 37 aa, Artificial Sequence
  Cyclic GFR-binding peptide
  MOD_RES (32)..(33): Xaa is C or S
AKVVMNRYKKLIVNNSSDFYLVSIANLKTPAXXAKPV

SEQ ID NO: 5879 - protein, 39 aa, Artificial Sequence
  Cyclic GFR-binding peptide
  MOD_RES (2)..(33)..(34): Xaa is C or S
KXSKVIMYHYKLIKPTKGIKYLISIPSLDQSVXXPSASA

SEQ ID NO: 5880 - protein, 27 aa, Artificial Sequence
  Cyclic GFR-binding peptide
IMRYKKLVKPKRGVFYLISIANLAQPV

SEQ ID NO: 5881 - protein, 32 aa, Artificial Sequence
  Cyclic GFR-binding peptide
HDELTQYNKLFIPKKRVIELYLVSIASLQVQT

SEQ ID NO: 5882 - protein, 28 aa, Artificial Sequence
  Cyclic GFR-binding peptide
  MOD_RES (1)..(3): Xaa is C or S
XKXSKVIMRYKKLIKPTKGIFYLISIAN

SEQ ID NO: 5883 - protein, 35 aa, Artificial Sequence
  Cyclic GFR-binding peptide
  MOD_RES (2)..(34)..(35): Xaa is C or S
GXARVVMNYHYKLIVNSSDDKYLVSIPSLQTPAXX

SEQ ID NO: 5884 - protein, 31 aa, Artificial Sequence
  Cyclic GFR-binding peptide
  MOD_RES (1)..(1): Xaa is C or S
XARVVMNYHYKLIVNSSDDKYLVSIPSLQTP

SEQ ID NO: 5885 - protein, 37 aa, Artificial Sequence
  Cyclic GFR-binding peptide
  MOD_RES (31)..(32): Xaa is C or S
KVVMNRYKKLIVNNSSDFYLVSIANLKTPAXXAKPVA

SEQ ID NO: 5886 - protein, 28 aa, Artificial Sequence
  Cyclic GFR-binding peptide
  MOD_RES (26)..(27): Xaa is C or S
QYNKLVVKENEDLYLMSIASLETPVXXA

SEQ ID NO: 5887 - protein, 36 aa, Artificial Sequence
  Cyclic GFR-binding peptide
  MOD_RES (32)..(32): Xaa is C or S
SRVVMNQYNKLIVNSSDDLYLVSIASLKTPAXTPKT

SEQ ID NO: 5888 - protein, 37 aa, Artificial Sequence
  Cyclic GFR-binding peptide
  MOD_RES (2)..(4)..(35)..(36): Xaa is C or S
SXKXSKVIMRHKRLIKPTKGIYYLISTASLDQSVXXP

SEQ ID NO: 5889 - protein, 34 aa, Artificial Sequence
  Cyclic GFR-binding peptide
  MOD_RES (32)..(33): Xaa is C or S
ARVVMNQYNKLIVNSSDDLYLVSIASLQTPAXXP

SEQ ID NO: 5890 - protein, 31 aa, Artificial Sequence
  Cyclic GFR-binding peptide
ARVVMNRYKKLIVNSSDDFYLVSIANLQTPA

SEQ ID NO: 5891 - protein, 32 aa, Artificial Sequence
  Cyclic GFR-binding peptide
  MOD_RES (2)..(4): Xaa is C or S
SXKXSKVVMQYNKLVKPTRGVLYLISIASLDQ

SEQ ID NO: 5892 - protein, 31 aa, Artificial Sequence
  Cyclic GFR-binding peptide
  MOD_RES (26)..(26): Xaa is C or S
RYKKLIVNSSDDFYLVSIANLKTPAXTPKTV

SEQ ID NO: 5893 - protein, 25 aa, Artificial Sequence
  Cyclic GFR-binding peptide
GERHKRLTPVGMDDYYLVSTASLKT

SEQ ID NO: 5894 - protein, 34 aa, Artificial Sequence
  Cyclic GFR-binding peptide
  MOD_RES (29)..(30): Xaa is C or S
MGEQYNKLTPVGMDDLYLVSIASLKTPVXXAKGV

SEQ ID NO: 5895 - protein, 34 aa, Artificial Sequence
  Cyclic GFR-binding peptide
  MOD_RES (28)..(29): Xaa is C or S
IMQYNKLVKPKRGVLYLISIASLAQPVXXPAASA

SEQ ID NO: 5896 - protein, 25 aa, Artificial Sequence
  Cyclic GFR-binding peptide
VMNQYNKLIVNSSDDLYLVSIASLQ

SEQ ID NO: 5897 - protein, 40 aa, Artificial Sequence
  Cyclic GFR-binding peptide
  MOD_RES (2)..(34)..(35): Xaa is C or S
GXAKVVMNYHYKLIVNNSSDKYLVSIPSLKTPAXXAKPVA

SEQ ID NO: 5898 - protein, 37 aa, Artificial Sequence
  Cyclic GFR-binding peptide
  MOD_RES (1)..(33)..(34): Xaa is C or S
XARVVMNRYKKLIVNSSDDFYLVSIANLQTPAXXPKP

SEQ ID NO: 5899 - protein, 39 aa, Artificial Sequence
  Cyclic GFR-binding peptide
  MOD_RES (1)..(33): Xaa is C or S
XSRVVMNRYKKLIVNSSDDFYLVSIANLKTPAXTPKTVH

SEQ ID NO: 5900 - protein, 32 aa, Artificial Sequence
  Cyclic GFR-binding peptide
  MOD_RES (31)..(32): Xaa is C or S
KVVMNRYKKLIVNNSSDFYLVSIANLKTPAXX

SEQ ID NO: 5901 - protein, 26 aa, Artificial Sequence
  Cyclic GFR-binding peptide
VIMRHKRLIKPTKGIYYLISTASLDQ

SEQ ID NO: 5902 - protein, 30 aa, Artificial Sequence
  Cyclic GFR-binding peptide
  MOD_RES (29)..(30): Xaa is C or S
VMNRYKKLIVNNSSDFYLVSIANLKTPAXX

SEQ ID NO: 5903 - protein, 29 aa, Artificial Sequence
  Cyclic GFR-binding peptide
  MOD_RES (27)..(28): Xaa is C or S
DQYNKLVVKENEDLYLMSIASLETPVXXA

SEQ ID NO: 5904 - protein, 28 aa, Artificial Sequence
  Cyclic GFR-binding peptide
VMERHKRLVVKDYEDYYLMSTASLETPV

SEQ ID NO: 5905 - protein, 27 aa, Artificial Sequence
  Cyclic GFR-binding peptide
  MOD_RES (27)..(27): Xaa is C or S
DRHKRLVVKENEDYYLMSTASLETPVX

SEQ ID NO: 5906 - protein, 28 aa, Artificial Sequence
  Cyclic GFR-binding peptide
VIMRHKRLIKPTKGIYYLISTASLDQSV

SEQ ID NO: 5907 - protein, 29 aa, Artificial Sequence
  Cyclic GFR-binding peptide
  MOD_RES (1)..(3): Xaa is C or S
XGXSRVVMNRHKRLIVNSSDDYYLVSTAS

SEQ ID NO: 5908 - protein, 37 aa, Artificial Sequence
  Cyclic GFR-binding peptide
  MOD_RES (36)..(36): Xaa is C or S
LHDELTYHYKLFIPKKRVIEKYLVSIPSLQVQTPRXQ

SEQ ID NO: 5909 - protein, 34 aa, Artificial Sequence
  Cyclic GFR-binding peptide
  MOD_RES (28)..(29): Xaa is C or S
MDQYNKLVVKENEDLYLMSIASLETPVXXAKPIK

SEQ ID NO: 5910 - protein, 41 aa, Artificial Sequence
  Cyclic GFR-binding peptide
  MOD_RES (2)..(4)..(35)..(36): Xaa is C or S
SXKXSRVIMRYKKLVKPKRGVFYLISIANLAQPVXXPAASA

SEQ ID NO: 5911 - protein, 33 aa, Artificial Sequence
  Cyclic GFR-binding peptide
  MOD_RES (28)..(29): Xaa is C or S
GERYKKLTPVGMDDFYLVSIANLKTPVXXAKGV

SEQ ID NO: 5912 - protein, 35 aa, Artificial Sequence
  Cyclic GFR-binding peptide
  MOD_RES (31)..(32): Xaa is C or S
SKVIMQYNKLIKPTKGILYLISIASLDQSVXXPSA

SEQ ID NO: 5913 - protein, 35 aa, Artificial Sequence
  Cyclic GFR-binding peptide
  MOD_RES (2)..(34)..(35): Xaa is C or S
GXGEVVMERYKKLVVKDYEDFYLMSIANLETPVXX

SEQ ID NO: 5914 - protein, 36 aa, Artificial Sequence
  Cyclic GFR-binding peptide
  MOD_RES (2)..(4)..(36): Xaa is C or S
HXGXAKVVMNRYKKLIVNNSSDFYLVSIANLKTPAX

SEQ ID NO: 5915 - protein, 30 aa, Artificial Sequence
  Cyclic GFR-binding peptide
  MOD_RES (28)..(29): Xaa is C or S
MERYKKLVVKDYEDFYLMSIANLETPVXXA

SEQ ID NO: 5916 - protein, 28 aa, Artificial Sequence
  Cyclic GFR-binding peptide
  MOD_RES (26)..(27): Xaa is C or S
QYNKLIVNNSSDLYLVSIASLKTPAXXA

SEQ ID NO: 5917 - protein, 30 aa, Artificial Sequence
  Cyclic GFR-binding peptide
DELTQYNKLFIPKKRVIELYLVSIASLQVQ

SEQ ID NO: 5918 - protein, 29 aa, Artificial Sequence
  Cyclic GFR-binding peptide
  MOD_RES (29)..(29): Xaa is C or S
VMNRHKRLIVNSSDDYYLVSTASLQTPAX

SEQ ID NO: 5919 - protein, 30 aa, Artificial Sequence
  Cyclic GFR-binding peptide
  MOD_RES (26)..(27): Xaa is C or S
YHYKLIVNSSDDKYLVSIPSLKTPAXXPKP

SEQ ID NO: 5920 - protein, 26 aa, Artificial Sequence
  Cyclic GFR-binding peptide
MNYHYKLIVNSSDDKYLVSIPSLKTP

SEQ ID NO: 5921 - protein, 32 aa, Artificial Sequence
  Cyclic GFR-binding peptide
  MOD_RES (1)..(3): Xaa is C or S
XKXALHDELTRHKRLFIPKKRVIEYYLVSTAS

SEQ ID NO: 5922 - protein, 23 aa, Artificial Sequence
  Cyclic GFR-binding peptide
MRYKKLVKPTRGVFYLISIANLD

SEQ ID NO: 5923 - protein, 26 aa, Artificial Sequence
  Cyclic GFR-binding peptide
GEVVMDRYKKLVVKENEDFYLMSIAN

SEQ ID NO: 5924 - protein, 29 aa, Artificial Sequence
  Cyclic GFR-binding peptide
  MOD_RES (29)..(29): Xaa is C or S
VMERYKKLVVKDYEDFYLMSIANLETPVX

SEQ ID NO: 5925 - protein, 29 aa, Artificial Sequence
  Cyclic GFR-binding peptide
  MOD_RES (1)..(1): Xaa is C or S
XSRVIMRYKKLVKPKRGVFYLISIANLAQ

SEQ ID NO: 5926 - protein, 23 aa, Artificial Sequence
  Cyclic GFR-binding peptide
IMRYKKLVKPKRGVFYLISIANL

SEQ ID NO: 5927 - protein, 38 aa, Artificial Sequence
  Cyclic GFR-binding peptide
  MOD_RES (1)..(3)..(35)..(36): Xaa is C or S
XGXAKVVMNQYNKLIVNNSSDLYLVSIASLKTPAXXAK

SEQ ID NO: 5928 - protein, 34 aa, Artificial Sequence
  Cyclic GFR-binding peptide
  MOD_RES (2)..(4): Xaa is C or S
RXGXGEVVMDRHKRLVVKENEDYYLMSTASLETP

SEQ ID NO: 5929 - protein, 30 aa, Artificial Sequence
  Cyclic GFR-binding peptide
TQYNKLFIPKKRVIELYLVSIASLQVQTPR

SEQ ID NO: 5930 - protein, 31 aa, Artificial Sequence
  Cyclic GFR-binding peptide
  MOD_RES (26)..(26): Xaa is C or S
RHKRLIVNSSDDYYLVSTASLKTPAXTPKTV

SEQ ID NO: 5931 - protein, 35 aa, Artificial Sequence
  Cyclic GFR-binding peptide
  MOD_RES (30)..(31): Xaa is C or S
RVIMYHYKLVKPKRGVKYLISIPSLAQPVXXPAAS

SEQ ID NO: 5932 - protein, 30 aa, Artificial Sequence
  Cyclic GFR-binding peptide
  MOD_RES (30)..(30): Xaa is C or S
RVIMYHYKLVKPKRGVKYLISIPSLAQPVX

SEQ ID NO: 5933 - protein, 37 aa, Artificial Sequence
  Cyclic GFR-binding peptide
  MOD_RES (2)..(33)..(34): Xaa is C or S
KXSKVIMRHKRLIKPTKGIYYLISTASLDQSVXXPSA

SEQ ID NO: 5934 - protein, 33 aa, Artificial Sequence
  Cyclic GFR-binding peptide
  MOD_RES (1)..(32)..(33): Xaa is C or S
XSKVIMRHKRLIKPTKGIYYLISTASLDQSVXX

SEQ ID NO: 5935 - protein, 35 aa, Artificial Sequence
  Cyclic GFR-binding peptide
  MOD_RES (30)..(31): Xaa is C or S
VVMDRHKRLVVKENEDYYLMSTASLETPVXXAKPI

SEQ ID NO: 5936 - protein, 31 aa, Artificial Sequence
  Cyclic GFR-binding peptide
GEVVMDYHYKLVVKENEDKYLMSIPSLETPV

SEQ ID NO: 5937 - protein, 31 aa, Artificial Sequence
  Cyclic GFR-binding peptide
ALHDELTRYKKLFIPKKRVIEFYLVSIANLQ

SEQ ID NO: 5938 - protein, 26 aa, Artificial Sequence
  Cyclic GFR-binding peptide
EVVMEYHYKLVVKDYEDKYLMSIPSL

SEQ ID NO: 5939 - protein, 27 aa, Artificial Sequence
  Cyclic GFR-binding peptide
VVMEQYNKLVVKDYEDLYLMSIASLET

SEQ ID NO: 5940 - protein, 32 aa, Artificial Sequence
  Cyclic GFR-binding peptide
  MOD_RES (2)..(2): Xaa is C or S
KXSKVVMQYNKLVKPTRGVLYLISIASLDQPV

SEQ ID NO: 5941 - protein, 39 aa, Artificial Sequence
  Cyclic GFR-binding peptide
  MOD_RES (2)..(4)..(36)..(37): Xaa is C or S
HXGXARVVMNRYKKLIVNSSDDFYLVSIANLQTPAXXPK

SEQ ID NO: 5942 - protein, 36 aa, Artificial Sequence
  Cyclic GFR-binding peptide
  MOD_RES (2)..(33)..(34): Xaa is C or S
KXSRVIMYHYKLVKPKRGVKYLISIPSLAQPVXXPA

SEQ ID NO: 5943 - protein, 33 aa, Artificial Sequence
  Cyclic GFR-binding peptide
  MOD_RES (27)..(28): Xaa is C or S
NRYKKLIVNSSDDFYLVSIANLQTPAXXPKPVT

SEQ ID NO: 5944 - protein, 42 aa, Artificial Sequence
  Cyclic GFR-binding peptide
  MOD_RES (2)..(4)..(41): Xaa is C or S
EXKXALHDELTRYKKLFIPKKRVIEFYLVSIANLQVQTPRXQ

SEQ ID NO: 5945 - protein, 39 aa, Artificial Sequence
  Cyclic GFR-binding peptide
  MOD_RES (2)..(4)..(35)..(36): Xaa is C or S
SXKXSKVVMRHKRLVKPTRGVYYLISTASLDQPVXXPSA

SEQ ID NO: 5946 - protein, 30 aa, Artificial Sequence
  Cyclic GFR-binding peptide
  MOD_RES (1)..(1): Xaa is C or S
XEAVSMGEQYNKLTPVGMDDLYLVSIASLK

SEQ ID NO: 5947 - protein, 25 aa, Artificial Sequence
  Cyclic GFR-binding peptide
MEQYNKLVVKDYEDLYLMSIASLET

SEQ ID NO: 5948 - protein, 28 aa, Artificial Sequence
  Cyclic GFR-binding peptide
  MOD_RES (1)..(3): Xaa is C or S
XKXSKVIMRHKRLIKPTKGIYYLISTAS

SEQ ID NO: 5949 - protein, 28 aa, Artificial Sequence
  Cyclic GFR-binding peptide
  MOD_RES (1)..(3): Xaa is C or S
XKXSKVIMYHYKLIKPTKGIKYLISIPS

SEQ ID NO: 5950 - protein, 30 aa, Artificial Sequence
  Cyclic GFR-binding peptide
EVVMDYHYKLVVKENEDKYLMSIPSLETPV

SEQ ID NO: 5951 - protein, 29 aa, Artificial Sequence
  Cyclic GFR-binding peptide
  MOD_RES (26)..(27): Xaa is C or S
RYKKLVVKDYEDFYLMSIANLETPVXXAK

SEQ ID NO: 5952 - protein, 38 aa, Artificial Sequence
  Cyclic GFR-binding peptide
  MOD_RES (32)..(33): Xaa is C or S
GEVVMERYKKLVVKDYEDFYLMSIANLETPVXXAKPIS

SEQ ID NO: 5953 - protein, 32 aa, Artificial Sequence
  Cyclic GFR-binding peptide
  MOD_RES (2)..(4): Xaa is C or S
RXGXGEVVMDQYNKLVVKENEDLYLMSIASLE

SEQ ID NO: 5954 - protein, 31 aa, Artificial Sequence
  Cyclic GFR-binding peptide
  MOD_RES (1)..(1): Xaa is C or S
XARVVMNRYKKLIVNSSDDFYLVSIANLQTP

SEQ ID NO: 5955 - protein, 22 aa, Artificial Sequence
  Cyclic GFR-binding peptide
YHYKLFIPKKRVIEKYLVSIPS

SEQ ID NO: 5956 - protein, 40 aa, Artificial Sequence
  Cyclic GFR-binding peptide
  MOD_RES (2)..(4)..(35)..(36): Xaa is C or S
SXKXSKVIMRYKKLIKPTKGIFYLISIANLDQSVXXPSAS

SEQ ID NO: 5957 - protein, 37 aa, Artificial Sequence
  Cyclic GFR-binding peptide
  MOD_RES (2)..(34): Xaa is C or S
GXSRVVMNQYNKLIVNSSDDLYLVSIASLKTPAXTPK

SEQ ID NO: 5958 - protein, 41 aa, Artificial Sequence
  Cyclic GFR-binding peptide
  MOD_RES (2)..(39): Xaa is C or S
KXALHDELTYHYKLFIPKKRVIEKYLVSIPSLQVQTPRXQV

SEQ ID NO: 5959 - protein, 28 aa, Artificial Sequence
  Cyclic GFR-binding peptide
  MOD_RES (2)..(2): Xaa is C or S
KXSRVIMRYKKLVKPKRGVFYLISIANL

SEQ ID NO: 5960 - protein, 26 aa, Artificial Sequence
  Cyclic GFR-binding peptide
MDRHKRLVVKENEDYYLMSTASLETP

SEQ ID NO: 5961 - protein, 27 aa, Artificial Sequence
  Cyclic GFR-binding peptide
  MOD_RES (1)..(1): Xaa is C or S
XGEVVMDYHYKLVVKENEDKYLMSIPS

SEQ ID NO: 5962 - protein, 26 aa, Artificial Sequence
  Cyclic GFR-binding peptide
LTYHYKLFIPKKRVIEKYLVSIPSLQ

SEQ ID NO: 5963 - protein, 30 aa, Artificial Sequence
  Cyclic GFR-binding peptide
  MOD_RES (2)..(4): Xaa is C or S
HXGXARVVMNYHYKLIVNSSDDKYLVSIPS

SEQ ID NO: 5964 - protein, 39 aa, Artificial Sequence
  Cyclic GFR-binding peptide
  MOD_RES (1)..(38): Xaa is C or S
XALHDELTQYNKLFIPKKRVIELYLVSIASLQVQTPRXQ

SEQ ID NO: 5965 - protein, 24 aa, Artificial Sequence
  Cyclic GFR-binding peptide
RYKKLVVKENEDFYLMSIANLETP

SEQ ID NO: 5966 - protein, 33 aa, Artificial Sequence
  Cyclic GFR-binding peptide
  MOD_RES (31)..(31): Xaa is C or S
RVVMNRHKRLIVNSSDDYYLVSTASLKTPAXTP

SEQ ID NO: 5967 - protein, 29 aa, Artificial Sequence
  Cyclic GFR-binding peptide
RVIMRYKKLVKPKRGVFYLISIANLAQPV

SEQ ID NO: 5968 - protein, 28 aa, Artificial Sequence
  Cyclic GFR-binding peptide
  MOD_RES (1)..(3): Xaa is C or S
XKXSKVVMRHKRLVKPTRGVYYLISTAS

SEQ ID NO: 5969 - protein, 34 aa, Artificial Sequence
  Cyclic GFR-binding peptide
  MOD_RES (2)..(34): Xaa is C or S
GXGEVVMDYHYKLVVKENEDKYLMSIPSLETPVX

SEQ ID NO: 5970 - protein, 26 aa, Artificial Sequence
  Cyclic GFR-binding peptide
VMEQYNKLVVKDYEDLYLMSIASLET

SEQ ID NO: 5971 - protein, 32 aa, Artificial Sequence
  Cyclic GFR-binding peptide
  MOD_RES (26)..(27): Xaa is C or S
RHKRLIVNSSDDYYLVSTASLKTPAXXPKPVY

SEQ ID NO: 5972 - protein, 39 aa, Artificial Sequence
  Cyclic GFR-binding peptide
  MOD_RES (2)..(33)..(34): Xaa is C or S
KXSKVIMRYKKLIKPTKGIFYLISIANLDQSVXXPSASA

SEQ ID NO: 5973 - protein, 37 aa, Artificial Sequence
  Cyclic GFR-binding peptide
  MOD_RES (1)..(3)..(36)..(37): Xaa is C or S
XGXEAVSMGERYKKLTPVGMDDFYLVSIANLKTPVXX

SEQ ID NO: 5974 - protein, 26 aa, Artificial Sequence
  Cyclic GFR-binding peptide
  MOD_RES (26)..(26): Xaa is C or S
RYKKLVVKENEDFYLMSIANLETPVX

SEQ ID NO: 5975 - protein, 32 aa, Artificial Sequence
  Cyclic GFR-binding peptide
  MOD_RES (2)..(4): Xaa is C or S
HXGXAKVVMNYHYKLIVNNSSDKYLVSIPSLK

SEQ ID NO: 5976 - protein, 27 aa, Artificial Sequence
  Cyclic GFR-binding peptide
VMERYKKLVVKDYEDFYLMSIANLETP

SEQ ID NO: 5977 - protein, 33 aa, Artificial Sequence
  Cyclic GFR-binding peptide
  MOD_RES (30)..(31): Xaa is C or S
VVMNRYKKLIVNSSDDFYLVSIANLKTPAXXPK

SEQ ID NO: 5978 - protein, 29 aa, Artificial Sequence
  Cyclic GFR-binding peptide
  MOD_RES (2)..(2): Xaa is C or S
GXGEVVMDQYNKLVVKENEDLYLMSIASL

SEQ ID NO: 5979 - protein, 41 aa, Artificial Sequence
  Cyclic GFR-binding peptide
  MOD_RES (2)..(4)..(36)..(37): Xaa is C or S
HXGXARVVMNRYKKLIVNSSDDFYLVSIANLQTPAXXPKPV

SEQ ID NO: 5980 - protein, 35 aa, Artificial Sequence
  Cyclic GFR-binding peptide
  MOD_RES (29)..(30): Xaa is C or S
VIMRHKRLVKPKRGVYYLISTASLAQPVXXPAASA

SEQ ID NO: 5981 - protein, 34 aa, Artificial Sequence
  Cyclic GFR-binding peptide
  MOD_RES (28)..(29): Xaa is C or S
MDRYKKLVVKENEDFYLMSIANLETPVXXAKPIK

SEQ ID NO: 5982 - protein, 32 aa, Artificial Sequence
  Cyclic GFR-binding peptide
  MOD_RES (27)..(28): Xaa is C or S
DYHYKLVVKENEDKYLMSIPSLETPVXXAKPI

SEQ ID NO: 5983 - protein, 40 aa, Artificial Sequence
  Cyclic GFR-binding peptide
  MOD_RES (1)..(34)..(35): Xaa is C or S
XEAVSMGERYKKLTPVGMDDFYLVSIANLKTPVXXAKGVK

SEQ ID NO: 5984 - protein, 29 aa, Artificial Sequence
  Cyclic GFR-binding peptide
  MOD_RES (28)..(29): Xaa is C or S
IMRHKRLVKPKRGVYYLISTASLAQPVXX

SEQ ID NO: 5985 - protein, 40 aa, Artificial Sequence
  Cyclic GFR-binding peptide
  MOD_RES (1)..(38): Xaa is C or S
XALHDELTRYKKLFIPKKRVIEFYLVSIANLQVQTPRXQV

SEQ ID NO: 5986 - protein, 32 aa, Artificial Sequence
  Cyclic GFR-binding peptide
  MOD_RES (32)..(32): Xaa is C or S
AKVVMNRYKKLIVNNSSDFYLVSIANLKTPAX

SEQ ID NO: 5987 - protein, 25 aa, Artificial Sequence
  Cyclic GFR-binding peptide
MGEQYNKLTPVGMDDLYLVSIASLK

SEQ ID NO: 5988 - protein, 30 aa, Artificial Sequence
  Cyclic GFR-binding peptide
  MOD_RES (27)..(28): Xaa is C or S
EYHYKLVVKDYEDKYLMSIPSLETPVXXAK

SEQ ID NO: 5989 - protein, 38 aa, Artificial Sequence
  Cyclic GFR-binding peptide
  MOD_RES (37)..(37): Xaa is C or S
ALHDELTYHYKLFIPKKRVIEKYLVSIPSLQVQTPRXQ

SEQ ID NO: 5990 - protein, 28 aa, Artificial Sequence
  Cyclic GFR-binding peptide
YHYKLFIPKKRVIEKYLVSIPSLQVQTP

SEQ ID NO: 5991 - protein, 35 aa, Artificial Sequence
  Cyclic GFR-binding peptide
  MOD_RES (29)..(29): Xaa is C or S
VMNYHYKLIVNSSDDKYLVSIPSLKTPAXTPKTVH

SEQ ID NO: 5992 - protein, 34 aa, Artificial Sequence
  Cyclic GFR-binding peptide
  MOD_RES (1)..(3)..(34): Xaa is C or S
XKXSRVIMRYKKLVKPKRGVFYLISIANLAQPVX

SEQ ID NO: 5993 - protein, 40 aa, Artificial Sequence
  Cyclic GFR-binding peptide
  MOD_RES (36)..(36): Xaa is C or S
LHDELTRYKKLFIPKKRVIEFYLVSIANLQVQTPRXQVNR

SEQ ID NO: 5994 - protein, 32 aa, Artificial Sequence
  Cyclic GFR-binding peptide
  MOD_RES (31)..(31): Xaa is C or S
RVVMNRHKRLIVNSSDDYYLVSTASLKTPAXT

SEQ ID NO: 5995 - protein, 21 aa, Artificial Sequence
  Cyclic GFR-binding peptide
ERHKRLTPVGMDDYYLVSTAS

SEQ ID NO: 5996 - protein, 27 aa, Artificial Sequence
  Cyclic GFR-binding peptide
  MOD_RES (27)..(27): Xaa is C or S
MYHYKLVKPTRGVKYLISIPSLDQPVX

SEQ ID NO: 5997 - protein, 36 aa, Artificial Sequence
  Cyclic GFR-binding peptide
  MOD_RES (2)..(4)..(36): Xaa is C or S
HXGXAKVVMNYHYKLIVNNSSDKYLVSIPSLKTPAX

SEQ ID NO: 5998 - protein, 29 aa, Artificial Sequence
  Cyclic GFR-binding peptide
  MOD_RES (29)..(29): Xaa is C or S
VIMRHKRLIKPTKGIYYLISTASLDQSVX

SEQ ID NO: 5999 - protein, 35 aa, Artificial Sequence
  Cyclic GFR-binding peptide
  MOD_RES (2)..(34): Xaa is C or S
GXSRVVMNRYKKLIVNSSDDFYLVSIANLKTPAXT

SEQ ID NO: 6000 - protein, 34 aa, Artificial Sequence
  Cyclic GFR-binding peptide
  MOD_RES (33)..(33): Xaa is C or S
ELTRHKRLFIPKKRVIEYYLVSTASLQVQTPRXQ

SEQ ID NO: 6001 - protein, 37 aa, Artificial Sequence
  Cyclic GFR-binding peptide
  MOD_RES (2)..(34)..(35): Xaa is C or S
GXGEVVMERHKRLVVKDYEDYYLMSTASLETPVXXAK

SEQ ID NO: 6002 - protein, 36 aa, Artificial Sequence
  Cyclic GFR-binding peptide
  MOD_RES (1)..(32)..(33): Xaa is C or S
XSKVVMRHKRLVKPTRGVYYLISTASLDQPVXXPSA

SEQ ID NO: 6003 - protein, 29 aa, Artificial Sequence
  Cyclic GFR-binding peptide
  MOD_RES (2)..(2): Xaa is C or S
KXSRVIMRYKKLVKPKRGVFYLISIANLA

SEQ ID NO: 6004 - protein, 25 aa, Artificial Sequence
  Cyclic GFR-binding peptide
VMNYHYKLIVNSSDDKYLVSIPSLK

SEQ ID NO: 6005 - protein, 26 aa, Artificial Sequence
  Cyclic GFR-binding peptide
MRYKKLVKPTRGVFYLISIANLDQPV

SEQ ID NO: 6006 - protein, 32 aa, Artificial Sequence
  Cyclic GFR-binding peptide
  MOD_RES (30)..(31): Xaa is C or S
RVIMRHKRLVKPKRGVYYLISTASLAQPVXXP

SEQ ID NO: 6007 - protein, 22 aa, Artificial Sequence
  Cyclic GFR-binding peptide
MDQYNKLVVKENEDLYLMSIAS

SEQ ID NO: 6008 - protein, 22 aa, Artificial Sequence
  Cyclic GFR-binding peptide
RYKKLIVNSSDDFYLVSIANLK

SEQ ID NO: 6009 - protein, 33 aa, Artificial Sequence
  Cyclic GFR-binding peptide
  MOD_RES (28)..(29): Xaa is C or S
IMRHKRLIKPTKGIYYLISTASLDQSVXXPSAS

SEQ ID NO: 6010 - protein, 22 aa, Artificial Sequence
  Cyclic GFR-binding peptide
RYKKLTPVGMDDFYLVSIANLK

SEQ ID NO: 6011 - protein, 35 aa, Artificial Sequence
  Cyclic GFR-binding peptide
  MOD_RES (2)..(2): Xaa is C or S
KXALHDELTRYKKLFIPKKRVIEFYLVSIANLQVQ

SEQ ID NO: 6012 - protein, 31 aa, Artificial Sequence
  Cyclic GFR-binding peptide
  MOD_RES (26)..(27): Xaa is C or S
RYKKLIKPTKGIFYLISIANLDQSVXXPSAS

SEQ ID NO: 6013 - protein, 31 aa, Artificial Sequence
  Cyclic GFR-binding peptide
  MOD_RES (2)..(4): Xaa is C or S
SXKXSKVIMRHKRLIKPTKGIYYLISTASLD

SEQ ID NO: 6014 - protein, 31 aa, Artificial Sequence
  Cyclic GFR-binding peptide
  MOD_RES (2)..(4): Xaa is C or S
RXGXGEVVMEQYNKLVVKDYEDLYLMSIASL

SEQ ID NO: 6015 - protein, 23 aa, Artificial Sequence
  Cyclic GFR-binding peptide
RHKRLIVNSSDDYYLVSTASLKT

SEQ ID NO: 6016 - protein, 21 aa, Artificial Sequence
  Cyclic GFR-binding peptide
RYKKLVKPTRGVFYLISIANL

SEQ ID NO: 6017 - protein, 26 aa, Artificial Sequence
  Cyclic GFR-binding peptide
  MOD_RES (26)..(26): Xaa is C or S
RYKKLIVNSSDDFYLVSIANLKTPAX

SEQ ID NO: 6018 - protein, 42 aa, Artificial Sequence
  Cyclic GFR-binding peptide
  MOD_RES (2)..(4)..(37)..(38): Xaa is C or S
RXGXEAVSMGERHKRLTPVGMDDYYLVSTASLKTPVXXAKGV

SEQ ID NO: 6019 - protein, 28 aa, Artificial Sequence
  Cyclic GFR-binding peptide
  MOD_RES (2)..(2): Xaa is C or S
GXAKVVMNRYKKLIVNNSSDFYLVSIAN

SEQ ID NO: 6020 - protein, 40 aa, Artificial Sequence
  Cyclic GFR-binding peptide
  MOD_RES (2)..(39): Xaa is C or S
KXALHDELTQYNKLFIPKKRVIELYLVSIASLQVQTPRXQ

SEQ ID NO: 6021 - protein, 32 aa, Artificial Sequence
  Cyclic GFR-binding peptide
  MOD_RES (1)..(3): Xaa is C or S
XKXSKVIMRHKRLIKPTKGIYYLISTASLDQS

SEQ ID NO: 6022 - protein, 35 aa, Artificial Sequence
  Cyclic GFR-binding peptide
  MOD_RES (2)..(4): Xaa is C or S
RXGXEAVSMGEYHYKLTPVGMDDKYLVSIPSLKTP

SEQ ID NO: 6023 - protein, 38 aa, Artificial Sequence
  Cyclic GFR-binding peptide
  MOD_RES (36)..(36): Xaa is C or S
LHDELTRYKKLFIPKKRVIEFYLVSIANLQVQTPRXQV

SEQ ID NO: 6024 - protein, 36 aa, Artificial Sequence
  Cyclic GFR-binding peptide
  MOD_RES (32)..(32): Xaa is C or S
SRVVMNRYKKLIVNSSDDFYLVSIANLKTPAXTPKT

SEQ ID NO: 6025 - protein, 38 aa, Artificial Sequence
  Cyclic GFR-binding peptide
  MOD_RES (1)..(3)..(35): Xaa is C or S
XGXSRVVMNRYKKLIVNSSDDFYLVSIANLKTPAXTPK

SEQ ID NO: 6026 - protein, 38 aa, Artificial Sequence
  Cyclic GFR-binding peptide
  MOD_RES (2)..(34)..(35): Xaa is C or S
GXGEVVMDRYKKLVVKENEDFYLMSIANLETPVXXAKP

SEQ ID NO: 6027 - protein, 28 aa, Artificial Sequence
  Cyclic GFR-binding peptide
  MOD_RES (26)..(27): Xaa is C or S
RYKKLIKPTKGIFYLISIANLDQSVXXP

SEQ ID NO: 6028 - protein, 29 aa, Artificial Sequence
  Cyclic GFR-binding peptide
  MOD_RES (26)..(27): Xaa is C or S
QYNKLVVKDYEDLYLMSIASLETPVXXAK

SEQ ID NO: 6029 - protein, 34 aa, Artificial Sequence
  Cyclic GFR-binding peptide
  MOD_RES (31)..(32): Xaa is C or S
KVVMNRYKKLIVNNSSDFYLVSIANLKTPAXXAK

SEQ ID NO: 6030 - protein, 33 aa, Artificial Sequence
  Cyclic GFR-binding peptide
  MOD_RES (29)..(30): Xaa is C or S
VMNRYKKLIVNSSDDFYLVSIANLQTPAXXPKP

SEQ ID NO: 6031 - protein, 30 aa, Artificial Sequence
  Cyclic GFR-binding peptide
  MOD_RES (27)..(27): Xaa is C or S
NQYNKLIVNSSDDLYLVSIASLKTPAXTPK

SEQ ID NO: 6032 - protein, 29 aa, Artificial Sequence
  Cyclic GFR-binding peptide
  MOD_RES (2)..(2): Xaa is C or S
KXSRVIMYHYKLVKPKRGVKYLISIPSLA

SEQ ID NO: 6033 - protein, 26 aa, Artificial Sequence
  Cyclic GFR-binding peptide
EVVMERYKKLVVKDYEDFYLMSIANL

SEQ ID NO: 6034 - protein, 34 aa, Artificial Sequence
  Cyclic GFR-binding peptide
  MOD_RES (34)..(34): Xaa is C or S
DELTRYKKLFIPKKRVIEFYLVSIANLQVQTPRX

SEQ ID NO: 6035 - protein, 34 aa, Artificial Sequence
  Cyclic GFR-binding peptide
  MOD_RES (2)..(34): Xaa is C or S
GXGEVVMEQYNKLVVKDYEDLYLMSIASLETPVX

SEQ ID NO: 6036 - protein, 23 aa, Artificial Sequence
  Cyclic GFR-binding peptide
YHYKLVKPTRGVKYLISIPSLDQ

SEQ ID NO: 6037 - protein, 38 aa, Artificial Sequence
  Cyclic GFR-binding peptide
  MOD_RES (32)..(33): Xaa is C or S
AKVVMNYHYKLIVNNSSDKYLVSIPSLKTPAXXAKPVA

SEQ ID NO: 6038 - protein, 39 aa, Artificial Sequence
  Cyclic GFR-binding peptide
  MOD_RES (1)..(34)..(35): Xaa is C or S
XEAVSMGERYKKLTPVGMDDFYLVSIANLKTPVXXAKGV

SEQ ID NO: 6039 - protein, 32 aa, Artificial Sequence
  Cyclic GFR-binding peptide
  MOD_RES (2)..(2): Xaa is C or S
KXSKVIMYHYKLIKPTKGIKYLISIPSLDQSV

SEQ ID NO: 6040 - protein, 31 aa, Artificial Sequence
  Cyclic GFR-binding peptide
  MOD_RES (1)..(3): Xaa is C or S
XKXSRVIMRHKRLVKPKRGVYYLISTASLAQ

SEQ ID NO: 6041 - protein, 35 aa, Artificial Sequence
  Cyclic GFR-binding peptide
  MOD_RES (2)..(34)..(35): Xaa is C or S
GXSRVVMNQYNKLIVNSSDDLYLVSIASLKTPAXX

SEQ ID NO: 6042 - protein, 20 aa, Artificial Sequence
  Cyclic GFR-binding peptide
QYNKLVKPTRGVLYLISIAS

SEQ ID NO: 6043 - protein, 31 aa, Artificial Sequence
  Cyclic GFR-binding peptide
  MOD_RES (31)..(31): Xaa is C or S
VSMGERHKRLTPVGMDDYYLVSTASLKTPVX

SEQ ID NO: 6044 - protein, 31 aa, Artificial Sequence
  Cyclic GFR-binding peptide
  MOD_RES (1)..(3): Xaa is C or S
XGXAKVVMNQYNKLIVNNSSDLYLVSIASLK

SEQ ID NO: 6045 - protein, 34 aa, Artificial Sequence
  Cyclic GFR-binding peptide
  MOD_RES (1)..(3): Xaa is C or S
XGXGEVVMDRHKRLVVKENEDYYLMSTASLETPV

SEQ ID NO: 6046 - protein, 29 aa, Artificial Sequence
  Cyclic GFR-binding peptide
  MOD_RES (26)..(27): Xaa is C or S
RHKRLIVNSSDDYYLVSTASLKTPAXXPK

SEQ ID NO: 6047 - protein, 30 aa, Artificial Sequence
  Cyclic GFR-binding peptide
SRVIMYHYKLVKPKRGVKYLISIPSLAQPV

SEQ ID NO: 6048 - protein, 29 aa, Artificial Sequence
  Cyclic GFR-binding peptide
  MOD_RES (1)..(3): Xaa is C or S
XGXGEVVMERYKKLVVKDYEDFYLMSIAN

SEQ ID NO: 6049 - protein, 28 aa, Artificial Sequence
  Cyclic GFR-binding peptide
  MOD_RES (27)..(28): Xaa is C or S
MYHYKLVKPTRGVKYLISIPSLDQPVXX

SEQ ID NO: 6050 - protein, 37 aa, Artificial Sequence
  Cyclic GFR-binding peptide
  MOD_RES (1)..(3)..(35)..(36): Xaa is C or S
XGXGEVVMDYHYKLVVKENEDKYLMSIPSLETPVXXA

SEQ ID NO: 6051 - protein, 28 aa, Artificial Sequence
  Cyclic GFR-binding peptide
  MOD_RES (26)..(27): Xaa is C or S
RHKRLVKPTRGVYYLISTASLDQPVXXP

SEQ ID NO: 6052 - protein, 36 aa, Artificial Sequence
  Cyclic GFR-binding peptide
  MOD_RES (31)..(31): Xaa is C or S
RVVMNQYNKLIVNSSDDLYLVSIASLKTPAXTPKTV

SEQ ID NO: 6053 - protein, 32 aa, Artificial Sequence
  Cyclic GFR-binding peptide
  MOD_RES (1)..(3): Xaa is C or S
XKXSKVIMYHYKLIKPTKGIKYLISIPSLDQS

SEQ ID NO: 6054 - protein, 28 aa, Artificial Sequence
  Cyclic GFR-binding peptide
  MOD_RES (1)..(1): Xaa is C or S
XEAVSMGERYKKLTPVGMDDFYLVSIAN

SEQ ID NO: 6055 - protein, 32 aa, Artificial Sequence
  Cyclic GFR-binding peptide
LHDELTRHKRLFIPKKRVIEYYLVSTASLQVQ

SEQ ID NO: 6056 - protein, 35 aa, Artificial Sequence
  Cyclic GFR-binding peptide
  MOD_RES (30)..(31): Xaa is C or S
VVMNQYNKLIVNNSSDLYLVSIASLKTPAXXAKPV

SEQ ID NO: 6057 - protein, 31 aa, Artificial Sequence
  Cyclic GFR-binding peptide
  MOD_RES (29)..(30): Xaa is C or S
VMNYHYKLIVNNSSDKYLVSIPSLKTPAXXA

SEQ ID NO: 6058 - protein, 25 aa, Artificial Sequence
  Cyclic GFR-binding peptide
SRVIMYHYKLVKPKRGVKYLISIPS

SEQ ID NO: 6059 - protein, 27 aa, Artificial Sequence
  Cyclic GFR-binding peptide
  MOD_RES (27)..(27): Xaa is C or S
ERYKKLTPVGMDDFYLVSIANLKTPVX

SEQ ID NO: 6060 - protein, 33 aa, Artificial Sequence
  Cyclic GFR-binding peptide
  MOD_RES (30)..(31): Xaa is C or S
KVVMYHYKLVKPTRGVKYLISIPSLDQPVXXPS

SEQ ID NO: 6061 - protein, 25 aa, Artificial Sequence
  Cyclic GFR-binding peptide
YHYKLFIPKKRVIEKYLVSIPSLQV

SEQ ID NO: 6062 - protein, 40 aa, Artificial Sequence
  Cyclic GFR-binding peptide
  MOD_RES (36)..(36): Xaa is C or S
LHDELTQYNKLFIPKKRVIELYLVSIASLQVQTPRXQVNR

SEQ ID NO: 6063 - protein, 28 aa, Artificial Sequence
  Cyclic GFR-binding peptide
  MOD_RES (27)..(28): Xaa is C or S
ERYKKLTPVGMDDFYLVSIANLKTPVXX

SEQ ID NO: 6064 - protein, 31 aa, Artificial Sequence
  Cyclic GFR-binding peptide
LHDELTYHYKLFIPKKRVIEKYLVSIPSLQV

SEQ ID NO: 6065 - protein, 29 aa, Artificial Sequence
  Cyclic GFR-binding peptide
  MOD_RES (27)..(28): Xaa is C or S
MQYNKLIKPTKGILYLISIASLDQSVXXP

SEQ ID NO: 6066 - protein, 37 aa, Artificial Sequence
  Cyclic GFR-binding peptide
  MOD_RES (1)..(33)..(34): Xaa is C or S
XGEVVMDYHYKLVVKENEDKYLMSIPSLETPVXXAKP

SEQ ID NO: 6067 - protein, 35 aa, Artificial Sequence
  Cyclic GFR-binding peptide
  MOD_RES (31)..(32): Xaa is C or S
RVVMNRYKKLIVNSSDDFYLVSIANLQTPAXXPKP

SEQ ID NO: 6068 - protein, 33 aa, Artificial Sequence
  Cyclic GFR-binding peptide
  MOD_RES (32)..(33): Xaa is C or S
GEVVMEYHYKLVVKDYEDKYLMSIPSLETPVXX

SEQ ID NO: 6069 - protein, 39 aa, Artificial Sequence
  Cyclic GFR-binding peptide
  MOD_RES (1)..(3)..(35)..(36): Xaa is C or S
XGXSRVVMNYHYKLIVNSSDDKYLVSIPSLKTPAXXPKP

SEQ ID NO: 6070 - protein, 32 aa, Artificial Sequence
  Cyclic GFR-binding peptide
  MOD_RES (1)..(3): Xaa is C or S
XGXAKVVMNRYKKLIVNNSSDFYLVSIANLKT

SEQ ID NO: 6071 - protein, 34 aa, Artificial Sequence
  Cyclic GFR-binding peptide
  MOD_RES (2)..(4): Xaa is C or S
HXGXAKVVMNRYKKLIVNNSSDFYLVSIANLKTP

SEQ ID NO: 6072 - protein, 22 aa, Artificial Sequence
  Cyclic GFR-binding peptide
IMRYKKLIKPTKGIFYLISIAN

SEQ ID NO: 6073 - protein, 36 aa, Artificial Sequence
  Cyclic GFR-binding peptide
  MOD_RES (2)..(4): Xaa is C or S
EXKXALHDELTRYKKLFIPKKRVIEFYLVSIANLQV

SEQ ID NO: 6074 - protein, 30 aa, Artificial Sequence
  Cyclic GFR-binding peptide
  MOD_RES (28)..(29): Xaa is C or S
GEQYNKLTPVGMDDLYLVSIASLKTPVXXA

SEQ ID NO: 6075 - protein, 36 aa, Artificial Sequence
  Cyclic GFR-binding peptide
  MOD_RES (1)..(33)..(34): Xaa is C or S
XGEVVMDYHYKLVVKENEDKYLMSIPSLETPVXXAK

SEQ ID NO: 6076 - protein, 35 aa, Artificial Sequence
  Cyclic GFR-binding peptide
  MOD_RES (2)..(4): Xaa is C or S
RXGXGEVVMERHKRLVVKDYEDYYLMSTASLETPV

SEQ ID NO: 6077 - protein, 25 aa, Artificial Sequence
  Cyclic GFR-binding peptide
VMEQYNKLVVKDYEDLYLMSIASLE

SEQ ID NO: 6078 - protein, 31 aa, Artificial Sequence
  Cyclic GFR-binding peptide
  MOD_RES (2)..(4): Xaa is C or S
RXGXGEVVMDYHYKLVVKENEDKYLMSIPSL

SEQ ID NO: 6079 - protein, 23 aa, Artificial Sequence
  Cyclic GFR-binding peptide
MNQYNKLIVNSSDDLYLVSIASL

SEQ ID NO: 6080 - protein, 33 aa, Artificial Sequence
  Cyclic GFR-binding peptide
  MOD_RES (2)..(4): Xaa is C or S
SXKXSKVIMQYNKLIKPTKGILYLISIASLDQS

SEQ ID NO: 6081 - protein, 23 aa, Artificial Sequence
  Cyclic GFR-binding peptide
NYHYKLIVNSSDDKYLVSIPSLQ

SEQ ID NO: 6082 - protein, 32 aa, Artificial Sequence
  Cyclic GFR-binding peptide
ALHDELTQYNKLFIPKKRVIELYLVSIASLQV

SEQ ID NO: 6083 - protein, 35 aa, Artificial Sequence
  Cyclic GFR-binding peptide
  MOD_RES (31)..(32): Xaa is C or S
SKVIMRHKRLIKPTKGIYYLISTASLDQSVXXPSA

SEQ ID NO: 6084 - protein, 30 aa, Artificial Sequence
  Cyclic GFR-binding peptide
  MOD_RES (30)..(30): Xaa is C or S
KVIMQYNKLIKPTKGILYLISIASLDQSVX

SEQ ID NO: 6085 - protein, 39 aa, Artificial Sequence
  Cyclic GFR-binding peptide
  MOD_RES (2)..(34): Xaa is C or S
GXSRVVMNRYKKLIVNSSDDFYLVSIANLKTPAXTPKTV

SEQ ID NO: 6086 - protein, 23 aa, Artificial Sequence
  Cyclic GFR-binding peptide
ERYKKLVVKDYEDFYLMSIANLE

SEQ ID NO: 6087 - protein, 43 aa, Artificial Sequence
  Cyclic GFR-binding peptide
  MOD_RES (2)..(4)..(37)..(38): Xaa is C or S
RXGXEAVSMGEQYNKLTPVGMDDLYLVSIASLKTPVXXAKGVK

SEQ ID NO: 6088 - protein, 30 aa, Artificial Sequence
  Cyclic GFR-binding peptide
  MOD_RES (1)..(3): Xaa is C or S
XGXEAVSMGEQYNKLTPVGMDDLYLVSIAS

SEQ ID NO: 6089 - protein, 36 aa, Artificial Sequence
  Cyclic GFR-binding peptide
  MOD_RES (32)..(33): Xaa is C or S
GEVVMERHKRLVVKDYEDYYLMSTASLETPVXXAKP

SEQ ID NO: 6090 - protein, 31 aa, Artificial Sequence
  Cyclic GFR-binding peptide
  MOD_RES (1)..(3): Xaa is C or S
XKXSKVVMRYKKLVKPTRGVFYLISIANLDQ

SEQ ID NO: 6091 - protein, 35 aa, Artificial Sequence
  Cyclic GFR-binding peptide
  MOD_RES (1)..(3)..(35): Xaa is C or S
XGXSRVVMNRYKKLIVNSSDDFYLVSIANLKTPAX

SEQ ID NO: 6092 - protein, 24 aa, Artificial Sequence
  Cyclic GFR-binding peptide
NRHKRLIVNSSDDYYLVSTASLQT

SEQ ID NO: 6093 - protein, 36 aa, Artificial Sequence
  Cyclic GFR-binding peptide
  MOD_RES (2)..(34)..(35): Xaa is C or S
GXSRVVMNRHKRLIVNSSDDYYLVSTASLKTPAXXP

SEQ ID NO: 6094 - protein, 25 aa, Artificial Sequence
  Cyclic GFR-binding peptide
YHYKLIVNSSDDKYLVSIPSLKTPA

SEQ ID NO: 6095 - protein, 24 aa, Artificial Sequence
  Cyclic GFR-binding peptide
MYHYKLIKPTKGIKYLISIPSLDQ

SEQ ID NO: 6096 - protein, 33 aa, Artificial Sequence
  Cyclic GFR-binding peptide
  MOD_RES (30)..(31): Xaa is C or S
RVIMRYKKLVKPKRGVFYLISIANLAQPVXXPA

SEQ ID NO: 6097 - protein, 24 aa, Artificial Sequence
  Cyclic GFR-binding peptide
LTRHKRLFIPKKRVIEYYLVSTAS

SEQ ID NO: 6098 - protein, 39 aa, Artificial Sequence
  Cyclic GFR-binding peptide
  MOD_RES (2)..(4): Xaa is C or S
EXKXALHDELTRHKRLFIPKKRVIEYYLVSTASLQVQTP

SEQ ID NO: 6099 - protein, 30 aa, Artificial Sequence
  Cyclic GFR-binding peptide
DELTYHYKLFIPKKRVIEKYLVSIPSLQVQ

SEQ ID NO: 6100 - protein, 36 aa, Artificial Sequence
  Cyclic GFR-binding peptide
  MOD_RES (2)..(4)..(35)..(36): Xaa is C or S
SXKXSRVIMYHYKLVKPKRGVKYLISIPSLAQPVXX

SEQ ID NO: 6101 - protein, 33 aa, Artificial Sequence
  Cyclic GFR-binding peptide
  MOD_RES (29)..(30): Xaa is C or S
VMNQYNKLIVNSSDDLYLVSIASLKTPAXXPKP

SEQ ID NO: 6102 - protein, 33 aa, Artificial Sequence
  Cyclic GFR-binding peptide
  MOD_RES (31)..(32): Xaa is C or S
EVVMERHKRLVVKDYEDYYLMSTASLETPVXXA

SEQ ID NO: 6103 - protein, 37 aa, Artificial Sequence
  Cyclic GFR-binding peptide
  MOD_RES (31)..(32): Xaa is C or S
VSMGERHKRLTPVGMDDYYLVSTASLKTPVXXAKGVK

SEQ ID NO: 6104 - protein, 32 aa, Artificial Sequence
  Cyclic GFR-binding peptide
  MOD_RES (28)..(29): Xaa is C or S
VMQYNKLVKPTRGVLYLISIASLDQPVXXPSA

SEQ ID NO: 6105 - protein, 25 aa, Artificial Sequence
  Cyclic GFR-binding peptide
NRHKRLIVNSSDDYYLVSTASLQTP

SEQ ID NO: 6106 - protein, 32 aa, Artificial Sequence
  Cyclic GFR-binding peptide
ALHDELTRHKRLFIPKKRVIEYYLVSTASLQV

SEQ ID NO: 6107 - protein, 42 aa, Artificial Sequence
  Cyclic GFR-binding peptide
  MOD_RES (1)..(38): Xaa is C or S
XALHDELTQYNKLFIPKKRVIELYLVSIASLQVQTPRXQVNR

SEQ ID NO: 6108 - protein, 34 aa, Artificial Sequence
  Cyclic GFR-binding peptide
  MOD_RES (32)..(32): Xaa is C or S
LTQYNKLFIPKKRVIELYLVSIASLQVQTPRXQV

SEQ ID NO: 6109 - protein, 29 aa, Artificial Sequence
  Cyclic GFR-binding peptide
  MOD_RES (2)..(4): Xaa is C or S
SXKXSKVVMRHKRLVKPTRGVYYLISTAS

SEQ ID NO: 6110 - protein, 30 aa, Artificial Sequence
  Cyclic GFR-binding peptide
  MOD_RES (2)..(2): Xaa is C or S
GXAKVVMNQYNKLIVNNSSDLYLVSIASLK

SEQ ID NO: 6111 - protein, 26 aa, Artificial Sequence
  Cyclic GFR-binding peptide
MNRYKKLIVNSSDDFYLVSIANLKTP

SEQ ID NO: 6112 - protein, 24 aa, Artificial Sequence
  Cyclic GFR-binding peptide
IMRYKKLVKPKRGVFYLISIANLA

SEQ ID NO: 6113 - protein, 26 aa, Artificial Sequence
  Cyclic GFR-binding peptide
AVSMGERHKRLTPVGMDDYYLVSTAS

SEQ ID NO: 6114 - protein, 29 aa, Artificial Sequence
  Cyclic GFR-binding peptide
EVVMDYHYKLVVKENEDKYLMSIPSLETP

SEQ ID NO: 6115 - protein, 33 aa, Artificial Sequence
  Cyclic GFR-binding peptide
  MOD_RES (28)..(29): Xaa is C or S
MNRHKRLIVNSSDDYYLVSTASLQTPAXXPKPV

SEQ ID NO: 6116 - protein, 28 aa, Artificial Sequence
  Cyclic GFR-binding peptide
VMERYKKLVVKDYEDFYLMSIANLETPV

SEQ ID NO: 6117 - protein, 28 aa, Artificial Sequence
  Cyclic GFR-binding peptide
  MOD_RES (1)..(1): Xaa is C or S
XSRVIMRHKRLVKPKRGVYYLISTASLA

SEQ ID NO: 6118 - protein, 22 aa, Artificial Sequence
  Cyclic GFR-binding peptide
QYNKLFIPKKRVIELYLVSIAS

SEQ ID NO: 6119 - protein, 36 aa, Artificial Sequence
  Cyclic GFR-binding peptide
  MOD_RES (32)..(33): Xaa is C or S
AKVVMNYHYKLIVNNSSDKYLVSIPSLKTPAXXAKP

SEQ ID NO: 6120 - protein, 25 aa, Artificial Sequence
  Cyclic GFR-binding peptide
VVMDYHYKLVVKENEDKYLMSIPSL

SEQ ID NO: 6121 - protein, 36 aa, Artificial Sequence
  Cyclic GFR-binding peptide
  MOD_RES (32)..(33): Xaa is C or S
AVSMGERYKKLTPVGMDDFYLVSIANLKTPVXXAKG

SEQ ID NO: 6122 - protein, 33 aa, Artificial Sequence
  Cyclic GFR-binding peptide
  MOD_RES (2)..(2): Xaa is C or S
GXARVVMNYHYKLIVNSSDDKYLVSIPSLQTPA

SEQ ID NO: 6123 - protein, 32 aa, Artificial Sequence
  Cyclic GFR-binding peptide
  MOD_RES (1)..(32): Xaa is C or S
XSKVIMQYNKLIKPTKGILYLISIASLDQSVX

SEQ ID NO: 6124 - protein, 30 aa, Artificial Sequence
  Cyclic GFR-binding peptide
  MOD_RES (26)..(27): Xaa is C or S
RHKRLVKPTRGVYYLISTASLDQPVXXPSA

SEQ ID NO: 6125 - protein, 40 aa, Artificial Sequence
  Cyclic GFR-binding peptide
  MOD_RES (2)..(34)..(35): Xaa is C or S
GXGEVVMERHKRLVVKDYEDYYLMSTASLETPVXXAKPIS

SEQ ID NO: 6126 - protein, 40 aa, Artificial Sequence
  Cyclic GFR-binding peptide
  MOD_RES (2)..(34): Xaa is C or S
GXSRVVMNRHKRLIVNSSDDYYLVSTASLKTPAXTPKTVH

SEQ ID NO: 6127 - protein, 20 aa, Artificial Sequence
  Cyclic GFR-binding peptide
RYKKLVKPTRGVFYLISIAN

SEQ ID NO: 6128 - protein, 26 aa, Artificial Sequence
  Cyclic GFR-binding peptide
ELTRHKRLFIPKKRVIEYYLVSTASL

SEQ ID NO: 6129 - protein, 23 aa, Artificial Sequence
  Cyclic GFR-binding peptide
TRYKKLFIPKKRVIEFYLVSIAN

SEQ ID NO: 6130 - protein, 36 aa, Artificial Sequence
  Cyclic GFR-binding peptide
  MOD_RES (32)..(33): Xaa is C or S
SRVVMNQYNKLIVNSSDDLYLVSIASLKTPAXXPKP

SEQ ID NO: 6131 - protein, 34 aa, Artificial Sequence
  Cyclic GFR-binding peptide
  MOD_RES (32)..(33): Xaa is C or S
GEVVMEQYNKLVVKDYEDLYLMSIASLETPVXXA

SEQ ID NO: 6132 - protein, 30 aa, Artificial Sequence
  Cyclic GFR-binding peptide
  MOD_RES (2)..(2): Xaa is C or S
GXSRVVMNRHKRLIVNSSDDYYLVSTASLK

SEQ ID NO: 6133 - protein, 33 aa, Artificial Sequence
  Cyclic GFR-binding peptide
  MOD_RES (27)..(28): Xaa is C or S
MRHKRLVKPKRGVYYLISTASLAQPVXXPAASA

SEQ ID NO: 6134 - protein, 27 aa, Artificial Sequence
  Cyclic GFR-binding peptide
VMNRYKKLIVNSSDDFYLVSIANLQTP

SEQ ID NO: 6135 - protein, 27 aa, Artificial Sequence
  Cyclic GFR-binding peptide
  MOD_RES (27)..(27): Xaa is C or S
MRYKKLVKPKRGVFYLISIANLAQPVX

SEQ ID NO: 6136 - protein, 31 aa, Artificial Sequence
  Cyclic GFR-binding peptide
  MOD_RES (29)..(30): Xaa is C or S
VIMYHYKLIKPTKGIKYLISIPSLDQSVXXP

SEQ ID NO: 6137 - protein, 26 aa, Artificial Sequence
  Cyclic GFR-binding peptide
RVIMRYKKLVKPKRGVFYLISIANLA

SEQ ID NO: 6138 - protein, 41 aa, Artificial Sequence
  Cyclic GFR-binding peptide
  MOD_RES (2)..(4)..(36)..(37): Xaa is C or S
HXGXAKVVMNYHYKLIVNNSSDKYLVSIPSLKTPAXXAKPV

SEQ ID NO: 6139 - protein, 41 aa, Artificial Sequence
  Cyclic GFR-binding peptide
  MOD_RES (2)..(4)..(36)..(37): Xaa is C or S
HXGXSRVVMNQYNKLIVNSSDDLYLVSIASLKTPAXXPKPV

SEQ ID NO: 6140 - protein, 33 aa, Artificial Sequence
  Cyclic GFR-binding peptide
  MOD_RES (2)..(4): Xaa is C or S
RXGXGEVVMDYHYKLVVKENEDKYLMSIPSLET

SEQ ID NO: 6141 - protein, 24 aa, Artificial Sequence
  Cyclic GFR-binding peptide
VVMRHKRLVKPTRGVYYLISTASL

SEQ ID NO: 6142 - protein, 32 aa, Artificial Sequence
  Cyclic GFR-binding peptide
  MOD_RES (2)..(2): Xaa is C or S
KXSKVIMRYKKLIKPTKGIFYLISIANLDQSV

SEQ ID NO: 6143 - protein, 28 aa, Artificial Sequence
  Cyclic GFR-binding peptide
  MOD_RES (26)..(27): Xaa is C or S
QYNKLIVNSSDDLYLVSIASLQTPAXXP

SEQ ID NO: 6144 - protein, 27 aa, Artificial Sequence
  Cyclic GFR-binding peptide
VMNRHKRLIVNSSDDYYLVSTASLQTP

SEQ ID NO: 6145 - protein, 21 aa, Artificial Sequence
  Cyclic GFR-binding peptide
QYNKLVVKDYEDLYLMSIASL

SEQ ID NO: 6146 - protein, 38 aa, Artificial Sequence
  Cyclic GFR-binding peptide
  MOD_RES (36)..(36): Xaa is C or S
LHDELTQYNKLFIPKKRVIELYLVSIASLQVQTPRXQV

SEQ ID NO: 6147 - protein, 28 aa, Artificial Sequence
  Cyclic GFR-binding peptide
  MOD_RES (26)..(27): Xaa is C or S
QYNKLIKPTKGILYLISIASLDQSVXXP

SEQ ID NO: 6148 - protein, 26 aa, Artificial Sequence
  Cyclic GFR-binding peptide
IMRHKRLIKPTKGIYYLISTASLDQS

SEQ ID NO: 6149 - protein, 31 aa, Artificial Sequence
  Cyclic GFR-binding peptide
AVSMGERHKRLTPVGMDDYYLVSTASLKTPV

SEQ ID NO: 6150 - protein, 37 aa, Artificial Sequence
  Cyclic GFR-binding peptide
  MOD_RES (2)..(4)..(36)..(37): Xaa is C or S
HXGXARVVMNQYNKLIVNSSDDLYLVSIASLQTPAXX

SEQ ID NO: 6151 - protein, 27 aa, Artificial Sequence
  Cyclic GFR-binding peptide
GEVVMEYHYKLVVKDYEDKYLMSIPSL

SEQ ID NO: 6152 - protein, 35 aa, Artificial Sequence
  Cyclic GFR-binding peptide
  MOD_RES (29)..(30): Xaa is C or S
VMNYHYKLIVNSSDDKYLVSIPSLKTPAXXPKPVY

SEQ ID NO: 6153 - protein, 39 aa, Artificial Sequence
  Cyclic GFR-binding peptide
  MOD_RES (35)..(35): Xaa is C or S
HDELTRYKKLFIPKKRVIEFYLVSIANLQVQTPRXQVNR

SEQ ID NO: 6154 - protein, 26 aa, Artificial Sequence
  Cyclic GFR-binding peptide
NQYNKLIVNNSSDLYLVSIASLKTPA

SEQ ID NO: 6155 - protein, 35 aa, Artificial Sequence
  Cyclic GFR-binding peptide
  MOD_RES (31)..(32): Xaa is C or S
KVVMNYHYKLIVNNSSDKYLVSIPSLKTPAXXAKP

SEQ ID NO: 6156 - protein, 36 aa, Artificial Sequence
  Cyclic GFR-binding peptide
  MOD_RES (1)..(33)..(34): Xaa is C or S
XGEVVMDRYKKLVVKENEDFYLMSIANLETPVXXAK

SEQ ID NO: 6157 - protein, 31 aa, Artificial Sequence
  Cyclic GFR-binding peptide
  MOD_RES (26)..(27): Xaa is C or S
QYNKLIVNNSSDLYLVSIASLKTPAXXAKPV

SEQ ID NO: 6158 - protein, 42 aa, Artificial Sequence
  Cyclic GFR-binding peptide
  MOD_RES (2)..(39): Xaa is C or S
KXALHDELTYHYKLFIPKKRVIEKYLVSIPSLQVQTPRXQVN

SEQ ID NO: 6159 - protein, 34 aa, Artificial Sequence
  Cyclic GFR-binding peptide
  MOD_RES (30)..(31): Xaa is C or S
KVIMRYKKLIKPTKGIFYLISIANLDQSVXXPSA

SEQ ID NO: 6160 - protein, 30 aa, Artificial Sequence
  Cyclic GFR-binding peptide
  MOD_RES (29)..(30): Xaa is C or S
VMEQYNKLVVKDYEDLYLMSIASLETPVXX

SEQ ID NO: 6161 - protein, 32 aa, Artificial Sequence
  Cyclic GFR-binding peptide
  MOD_RES (27)..(28): Xaa is C or S
NRYKKLIVNSSDDFYLVSIANLKTPAXXPKPV

SEQ ID NO: 6162 - protein, 26 aa, Artificial Sequence
  Cyclic GFR-binding peptide
VMNRYKKLIVNNSSDFYLVSIANLKT

SEQ ID NO: 6163 - protein, 27 aa, Artificial Sequence
  Cyclic GFR-binding peptide
  MOD_RES (26)..(27): Xaa is C or S
YHYKLIVNSSDDKYLVSIPSLQTPAXX

SEQ ID NO: 6164 - protein, 39 aa, Artificial Sequence
  Cyclic GFR-binding peptide
  MOD_RES (1)..(3)..(35)..(36): Xaa is C or S
XGXAKVVMNQYNKLIVNNSSDLYLVSIASLKTPAXXAKP

SEQ ID NO: 6165 - protein, 35 aa, Artificial Sequence
  Cyclic GFR-binding peptide
  MOD_RES (1)..(3): Xaa is C or S
XKXALHDELTQYNKLFIPKKRVIELYLVSIASLQV

SEQ ID NO: 6166 - protein, 32 aa, Artificial Sequence
  Cyclic GFR-binding peptide
  MOD_RES (1)..(3): Xaa is C or S
XKXSKVVMRHKRLVKPTRGVYYLISTASLDQP

SEQ ID NO: 6167 - protein, 35 aa, Artificial Sequence
  Cyclic GFR-binding peptide
  MOD_RES (2)..(33)..(34): Xaa is C or S
KXSKVIMYHYKLIKPTKGIKYLISIPSLDQSVXXP

SEQ ID NO: 6168 - protein, 31 aa, Artificial Sequence
  Cyclic GFR-binding peptide
  MOD_RES (1)..(3): Xaa is C or S
XGXSRVVMNYHYKLIVNSSDDKYLVSIPSLK

SEQ ID NO: 6169 - protein, 35 aa, Artificial Sequence
  Cyclic GFR-binding peptide
  MOD_RES (31)..(32): Xaa is C or S
KVVMNQYNKLIVNNSSDLYLVSIASLKTPAXXAKP

SEQ ID NO: 6170 - protein, 38 aa, Artificial Sequence
  Cyclic GFR-binding peptide
  MOD_RES (1)..(3)..(35)..(36): Xaa is C or S
XGXARVVMNYHYKLIVNSSDDKYLVSIPSLQTPAXXPK

SEQ ID NO: 6171 - protein, 40 aa, Artificial Sequence
  Cyclic GFR-binding peptide
  MOD_RES (2)..(34)..(35): Xaa is C or S
GXARVVMNRHKRLIVNSSDDYYLVSTASLQTPAXXPKPVT

SEQ ID NO: 6172 - protein, 30 aa, Artificial Sequence
  Cyclic GFR-binding peptide
  MOD_RES (2)..(4): Xaa is C or S
SXKXSRVIMRHKRLVKPKRGVYYLISTASL

SEQ ID NO: 6173 - protein, 33 aa, Artificial Sequence
  Cyclic GFR-binding peptide
  MOD_RES (1)..(32)..(33): Xaa is C or S
XSKVIMYHYKLIKPTKGIKYLISIPSLDQSVXX

SEQ ID NO: 6174 - protein, 23 aa, Artificial Sequence
  Cyclic GFR-binding peptide
IMRHKRLIKPTKGIYYLISTASL

SEQ ID NO: 6175 - protein, 37 aa, Artificial Sequence
  Cyclic GFR-binding peptide
  MOD_RES (31)..(32): Xaa is C or S
VSMGERYKKLTPVGMDDFYLVSIANLKTPVXXAKGVK

SEQ ID NO: 6176 - protein, 31 aa, Artificial Sequence
  Cyclic GFR-binding peptide
  MOD_RES (31)..(31): Xaa is C or S
RVVMNRHKRLIVNSSDDYYLVSTASLQTPAX

SEQ ID NO: 6177 - protein, 30 aa, Artificial Sequence
  Cyclic GFR-binding peptide
  MOD_RES (26)..(27): Xaa is C or S
YHYKLVVKDYEDKYLMSIPSLETPVXXAKP

SEQ ID NO: 6178 - protein, 31 aa, Artificial Sequence
  Cyclic GFR-binding peptide
  MOD_RES (26)..(27): Xaa is C or S
QYNKLIKPTKGILYLISIASLDQSVXXPSAS

SEQ ID NO: 6179 - protein, 21 aa, Artificial Sequence
  Cyclic GFR-binding peptide
QYNKLVKPTRGVLYLISIASL

SEQ ID NO: 6180 - protein, 23 aa, Artificial Sequence
  Cyclic GFR-binding peptide
RHKRLVKPKRGVYYLISTASLAQ

SEQ ID NO: 6181 - protein, 24 aa, Artificial Sequence
  Cyclic GFR-binding peptide
VVMNRYKKLIVNSSDDFYLVSIAN

SEQ ID NO: 6182 - protein, 29 aa, Artificial Sequence
  Cyclic GFR-binding peptide
HDELTQYNKLFIPKKRVIELYLVSIASLQ

SEQ ID NO: 6183 - protein, 36 aa, Artificial Sequence
  Cyclic GFR-binding peptide
  MOD_RES (1)..(3)..(35)..(36): Xaa is C or S
XGXGEVVMEYHYKLVVKDYEDKYLMSIPSLETPVXX

SEQ ID NO: 6184 - protein, 28 aa, Artificial Sequence
  Cyclic GFR-binding peptide
VVMEYHYKLVVKDYEDKYLMSIPSLETP

SEQ ID NO: 6185 - protein, 36 aa, Artificial Sequence
  Cyclic GFR-binding peptide
  MOD_RES (31)..(32): Xaa is C or S
EVVMDRYKKLVVKENEDFYLMSIANLETPVXXAKPI

SEQ ID NO: 6186 - protein, 38 aa, Artificial Sequence
  Cyclic GFR-binding peptide
  MOD_RES (2)..(34)..(35): Xaa is C or S
GXARVVMNRYKKLIVNSSDDFYLVSIANLQTPAXXPKP

SEQ ID NO: 6187 - protein, 29 aa, Artificial Sequence
  Cyclic GFR-binding peptide
RYKKLFIPKKRVIEFYLVSIANLQVQTPR

SEQ ID NO: 6188 - protein, 32 aa, Artificial Sequence
  Cyclic GFR-binding peptide
  MOD_RES (2)..(2): Xaa is C or S
GXGEVVMEYHYKLVVKDYEDKYLMSIPSLETP

SEQ ID NO: 6189 - protein, 34 aa, Artificial Sequence
  Cyclic GFR-binding peptide
  MOD_RES (2)..(33)..(34): Xaa is C or S
KXSKVVMQYNKLVKPTRGVLYLISIASLDQPVXX

SEQ ID NO: 6190 - protein, 24 aa, Artificial Sequence
  Cyclic GFR-binding peptide
NRYKKLIVNNSSDFYLVSIANLKT

SEQ ID NO: 6191 - protein, 40 aa, Artificial Sequence
  Cyclic GFR-binding peptide
  MOD_RES (2)..(4)..(36): Xaa is C or S
HXGXSRVVMNQYNKLIVNSSDDLYLVSIASLKTPAXTPKT

SEQ ID NO: 6192 - protein, 42 aa, Artificial Sequence
  Cyclic GFR-binding peptide
  MOD_RES (1)..(3)..(40): Xaa is C or S
XKXALHDELTRHKRLFIPKKRVIEYYLVSTASLQVQTPRXQV

SEQ ID NO: 6193 - protein, 30 aa, Artificial Sequence
  Cyclic GFR-binding peptide
  MOD_RES (2)..(4): Xaa is C or S
HXGXSRVVMNYHYKLIVNSSDDKYLVSIPS

SEQ ID NO: 6194 - protein, 25 aa, Artificial Sequence
  Cyclic GFR-binding peptide
VVMYHYKLVKPTRGVKYLISIPSLD

SEQ ID NO: 6195 - protein, 26 aa, Artificial Sequence
  Cyclic GFR-binding peptide
VMRHKRLVKPTRGVYYLISTASLDQP

SEQ ID NO: 6196 - protein, 26 aa, Artificial Sequence
  Cyclic GFR-binding peptide
RHKRLFIPKKRVIEYYLVSTASLQVQ

SEQ ID NO: 6197 - protein, 26 aa, Artificial Sequence
  Cyclic GFR-binding peptide
IMQYNKLVKPKRGVLYLISIASLAQP

SEQ ID NO: 6198 - protein, 31 aa, Artificial Sequence
  Cyclic GFR-binding peptide
  MOD_RES (1)..(1): Xaa is C or S
XAKVVMNQYNKLIVNNSSDLYLVSIASLKTP

SEQ ID NO: 6199 - protein, 37 aa, Artificial Sequence
  Cyclic GFR-binding peptide
  MOD_RES (31)..(32): Xaa is C or S
KVVMNQYNKLIVNNSSDLYLVSIASLKTPAXXAKPVA

SEQ ID NO: 6200 - protein, 27 aa, Artificial Sequence
  Cyclic GFR-binding peptide
  MOD_RES (1)..(1): Xaa is C or S
XSRVIMRHKRLVKPKRGVYYLISTASL

SEQ ID NO: 6201 - protein, 24 aa, Artificial Sequence
  Cyclic GFR-binding peptide
KVVMRYKKLVKPTRGVFYLISIAN

SEQ ID NO: 6202 - protein, 22 aa, Artificial Sequence
  Cyclic GFR-binding peptide
QYNKLIVNSSDDLYLVSIASLK

SEQ ID NO: 6203 - protein, 28 aa, Artificial Sequence
  Cyclic GFR-binding peptide
  MOD_RES (26)..(26): Xaa is C or S
QYNKLIVNSSDDLYLVSIASLKTPAXTP

SEQ ID NO: 6204 - protein, 34 aa, Artificial Sequence
  Cyclic GFR-binding peptide
  MOD_RES (30)..(30): Xaa is C or S
VVMNRYKKLIVNSSDDFYLVSIANLKTPAXTPKT

SEQ ID NO: 6205 - protein, 28 aa, Artificial Sequence
  Cyclic GFR-binding peptide
ARVVMNRHKRLIVNSSDDYYLVSTASLQ

SEQ ID NO: 6206 - protein, 33 aa, Artificial Sequence
  Cyclic GFR-binding peptide
  MOD_RES (27)..(27): Xaa is C or S
NRYKKLIVNSSDDFYLVSIANLKTPAXTPKTVH

SEQ ID NO: 6207 - protein, 42 aa, Artificial Sequence
  Cyclic GFR-binding peptide
  MOD_RES (1)..(3)..(36)..(37): Xaa is C or S
XGXEAVSMGERYKKLTPVGMDDFYLVSIANLKTPVXXAKGVK

SEQ ID NO: 6208 - protein, 32 aa, Artificial Sequence
  Cyclic GFR-binding peptide
  MOD_RES (26)..(27): Xaa is C or S
YHYKLIVNSSDDKYLVSIPSLKTPAXXPKPVY

SEQ ID NO: 6209 - protein, 22 aa, Artificial Sequence
  Cyclic GFR-binding peptide
QYNKLTPVGMDDLYLVSIASLK

SEQ ID NO: 6210 - protein, 35 aa, Artificial Sequence
  Cyclic GFR-binding peptide
  MOD_RES (32)..(32): Xaa is C or S
LTRHKRLFIPKKRVIEYYLVSTASLQVQTPRXQVN

SEQ ID NO: 6211 - protein, 33 aa, Artificial Sequence
  Cyclic GFR-binding peptide
  MOD_RES (29)..(30): Xaa is C or S
VMDQYNKLVVKENEDLYLMSIASLETPVXXAKP

SEQ ID NO: 6212 - protein, 40 aa, Artificial Sequence
  Cyclic GFR-binding peptide
  MOD_RES (2)..(39): Xaa is C or S
KXALHDELTRHKRLFIPKKRVIEYYLVSTASLQVQTPRXQ

SEQ ID NO: 6213 - protein, 33 aa, Artificial Sequence
  Cyclic GFR-binding peptide
  MOD_RES (1)..(3): Xaa is C or S
XKXALHDELTRYKKLFIPKKRVIEFYLVSIANL

SEQ ID NO: 6214 - protein, 26 aa, Artificial Sequence
  Cyclic GFR-binding peptide
  MOD_RES (26)..(26): Xaa is C or S
QYNKLIVNSSDDLYLVSIASLKTPAX

SEQ ID NO: 6215 - protein, 31 aa, Artificial Sequence
  Cyclic GFR-binding peptide
  MOD_RES (2)..(2): Xaa is C or S
KXSRVIMYHYKLVKPKRGVKYLISIPSLAQP

SEQ ID NO: 6216 - protein, 30 aa, Artificial Sequence
  Cyclic GFR-binding peptide
  MOD_RES (2)..(4): Xaa is C or S
HXGXAKVVMNQYNKLIVNNSSDLYLVSIAS

SEQ ID NO: 6217 - protein, 35 aa, Artificial Sequence
  Cyclic GFR-binding peptide
  MOD_RES (30)..(31): Xaa is C or S
VVMNQYNKLIVNSSDDLYLVSIASLKTPAXXPKPV

SEQ ID NO: 6218 - protein, 33 aa, Artificial Sequence
  Cyclic GFR-binding peptide
  MOD_RES (30)..(31): Xaa is C or S
VVMEQYNKLVVKDYEDLYLMSIASLETPVXXAK

SEQ ID NO: 6219 - protein, 30 aa, Artificial Sequence
  Cyclic GFR-binding peptide
EVVMDRYKKLVVKENEDFYLMSIANLETPV

SEQ ID NO: 6220 - protein, 27 aa, Artificial Sequence
  Cyclic GFR-binding peptide
  MOD_RES (26)..(27): Xaa is C or S
QYNKLIVNSSDDLYLVSIASLKTPAXX

SEQ ID NO: 6221 - protein, 31 aa, Artificial Sequence
  Cyclic GFR-binding peptide
  MOD_RES (31)..(31): Xaa is C or S
RVVMNRYKKLIVNSSDDFYLVSIANLQTPAX

SEQ ID NO: 6222 - protein, 42 aa, Artificial Sequence
  Cyclic GFR-binding peptide
  MOD_RES (2)..(4)..(37)..(38): Xaa is C or S
RXGXEAVSMGEQYNKLTPVGMDDLYLVSIASLKTPVXXAKGV

SEQ ID NO: 6223 - protein, 36 aa, Artificial Sequence
  Cyclic GFR-binding peptide
  MOD_RES (1)..(3): Xaa is C or S
XKXALHDELTRYKKLFIPKKRVIEFYLVSIANLQVQ

SEQ ID NO: 6224 - protein, 25 aa, Artificial Sequence
  Cyclic GFR-binding peptide
LTYHYKLFIPKKRVIEKYLVSIPSL

SEQ ID NO: 6225 - protein, 42 aa, Artificial Sequence
  Cyclic GFR-binding peptide
  MOD_RES (2)..(4)..(36)..(37): Xaa is C or S
HXGXAKVVMNRHKRLIVNNSSDYYLVSTASLKTPAXXAKPVA

SEQ ID NO: 6226 - protein, 26 aa, Artificial Sequence
  Cyclic GFR-binding peptide
IMRYKKLVKPKRGVFYLISIANLAQP

SEQ ID NO: 6227 - protein, 34 aa, Artificial Sequence
  Cyclic GFR-binding peptide
  MOD_RES (31)..(32): Xaa is C or S
VSMGERYKKLTPVGMDDFYLVSIANLKTPVXXAK

SEQ ID NO: 6228 - protein, 34 aa, Artificial Sequence
  Cyclic GFR-binding peptide
  MOD_RES (30)..(31): Xaa is C or S
RVIMRHKRLVKPKRGVYYLISTASLAQPVXXPAA

SEQ ID NO: 6229 - protein, 27 aa, Artificial Sequence
  Cyclic GFR-binding peptide
VMDRHKRLVVKENEDYYLMSTASLETP

SEQ ID NO: 6230 - protein, 25 aa, Artificial Sequence
  Cyclic GFR-binding peptide
SMGERYKKLTPVGMDDFYLVSIANL

SEQ ID NO: 6231 - protein, 21 aa, Artificial Sequence
  Cyclic GFR-binding peptide
NRHKRLIVNSSDDYYLVSTAS

SEQ ID NO: 6232 - protein, 29 aa, Artificial Sequence
  Cyclic GFR-binding peptide
  MOD_RES (29)..(29): Xaa is C or S
VMDRYKKLVVKENEDFYLMSIANLETPVX

SEQ ID NO: 6233 - protein, 37 aa, Artificial Sequence
  Cyclic GFR-binding peptide
  MOD_RES (2)..(34): Xaa is C or S
GXSRVVMNYHYKLIVNSSDDKYLVSIPSLKTPAXTPK

SEQ ID NO: 6234 - protein, 33 aa, Artificial Sequence
  Cyclic GFR-binding peptide
  MOD_RES (1)..(3): Xaa is C or S
XKXSRVIMRYKKLVKPKRGVFYLISIANLAQPV

SEQ ID NO: 6235 - protein, 34 aa, Artificial Sequence
  Cyclic GFR-binding peptide
  MOD_RES (28)..(29): Xaa is C or S
MNRHKRLIVNSSDDYYLVSTASLKTPAXXPKPVY

SEQ ID NO: 6236 - protein, 34 aa, Artificial Sequence
  Cyclic GFR-binding peptide
  MOD_RES (29)..(30): Xaa is C or S
VMDYHYKLVVKENEDKYLMSIPSLETPVXXAKPI

SEQ ID NO: 6237 - protein, 35 aa, Artificial Sequence
  Cyclic GFR-binding peptide
  MOD_RES (1)..(3)..(35): Xaa is C or S
XGXARVVMNRYKKLIVNSSDDFYLVSIANLQTPAX

SEQ ID NO: 6238 - protein, 33 aa, Artificial Sequence
  Cyclic GFR-binding peptide
  MOD_RES (27)..(28): Xaa is C or S
NRYKKLIVNNSSDFYLVSIANLKTPAXXAKPVA

SEQ ID NO: 6239 - protein, 30 aa, Artificial Sequence
  Cyclic GFR-binding peptide
  MOD_RES (28)..(29): Xaa is C or S
MEQYNKLVVKDYEDLYLMSIASLETPVXXA

SEQ ID NO: 6240 - protein, 23 aa, Artificial Sequence
  Cyclic GFR-binding peptide
IMQYNKLVKPKRGVLYLISIASL

SEQ ID NO: 6241 - protein, 30 aa, Artificial Sequence
  Cyclic GFR-binding peptide
DELTRYKKLFIPKKRVIEFYLVSIANLQVQ

SEQ ID NO: 6242 - protein, 37 aa, Artificial Sequence
  Cyclic GFR-binding peptide
  MOD_RES (2)..(35)..(36): Xaa is C or S
GXEAVSMGERHKRLTPVGMDDYYLVSTASLKTPVXXA

SEQ ID NO: 6243 - protein, 33 aa, Artificial Sequence
  Cyclic GFR-binding peptide
  MOD_RES (30)..(30): Xaa is C or S
VVMNRHKRLIVNSSDDYYLVSTASLKTPAXTPK

SEQ ID NO: 6244 - protein, 27 aa, Artificial Sequence
  Cyclic GFR-binding peptide
VVMDQYNKLVVKENEDLYLMSIASLET

SEQ ID NO: 6245 - protein, 35 aa, Artificial Sequence
  Cyclic GFR-binding peptide
  MOD_RES (31)..(32): Xaa is C or S
SKVVMQYNKLVKPTRGVLYLISIASLDQPVXXPSA

SEQ ID NO: 6246 - protein, 28 aa, Artificial Sequence
  Cyclic GFR-binding peptide
  MOD_RES (26)..(27): Xaa is C or S
RHKRLVKPKRGVYYLISTASLAQPVXXP

SEQ ID NO: 6247 - protein, 20 aa, Artificial Sequence
  Cyclic GFR-binding peptide
YHYKLVVKENEDKYLMSIPS

SEQ ID NO: 6248 - protein, 31 aa, Artificial Sequence
  Cyclic GFR-binding peptide
  MOD_RES (26)..(27): Xaa is C or S
YHYKLVKPTRGVKYLISIPSLDQPVXXPSAS

SEQ ID NO: 6249 - protein, 26 aa, Artificial Sequence
  Cyclic GFR-binding peptide
MNRYKKLIVNSSDDFYLVSIANLQTP

SEQ ID NO: 6250 - protein, 35 aa, Artificial Sequence
  Cyclic GFR-binding peptide
  MOD_RES (29)..(30): Xaa is C or S
VMERHKRLVVKDYEDYYLMSTASLETPVXXAKPIS

SEQ ID NO: 6251 - protein, 33 aa, Artificial Sequence
  Cyclic GFR-binding peptide
  MOD_RES (28)..(29): Xaa is C or S
VMRHKRLVKPTRGVYYLISTASLDQPVXXPSAS

SEQ ID NO: 6252 - protein, 36 aa, Artificial Sequence
  Cyclic GFR-binding peptide
  MOD_RES (30)..(30): Xaa is C or S
VVMNRYKKLIVNSSDDFYLVSIANLKTPAXTPKTVH

SEQ ID NO: 6253 - protein, 24 aa, Artificial Sequence
  Cyclic GFR-binding peptide
YHYKLIKPTKGIKYLISIPSLDQS

SEQ ID NO: 6254 - protein, 34 aa, Artificial Sequence
  Cyclic GFR-binding peptide
  MOD_RES (32)..(33): Xaa is C or S
GEVVMERYKKLVVKDYEDFYLMSIANLETPVXXA

SEQ ID NO: 6255 - protein, 31 aa, Artificial Sequence
  Cyclic GFR-binding peptide
  MOD_RES (29)..(30): Xaa is C or S
VMNYHYKLIVNSSDDKYLVSIPSLQTPAXXP

SEQ ID NO: 6256 - protein, 21 aa, Artificial Sequence
  Cyclic GFR-binding peptide
YHYKLVVKENEDKYLMSIPSL

SEQ ID NO: 6257 - protein, 29 aa, Artificial Sequence
  Cyclic GFR-binding peptide
  MOD_RES (1)..(1): Xaa is C or S
XEAVSMGERHKRLTPVGMDDYYLVSTASL

SEQ ID NO: 6258 - protein, 22 aa, Artificial Sequence
  Cyclic GFR-binding peptide
IMQYNKLIKPTKGILYLISIAS

SEQ ID NO: 6259 - protein, 37 aa, Artificial Sequence
  Cyclic GFR-binding peptide
  MOD_RES (1)..(33)..(34): Xaa is C or S
XGEVVMDRYKKLVVKENEDFYLMSIANLETPVXXAKP

SEQ ID NO: 6260 - protein, 32 aa, Artificial Sequence
  Cyclic GFR-binding peptide
  MOD_RES (31)..(32): Xaa is C or S
VSMGERHKRLTPVGMDDYYLVSTASLKTPVXX

SEQ ID NO: 6261 - protein, 30 aa, Artificial Sequence
  Cyclic GFR-binding peptide
  MOD_RES (27)..(28): Xaa is C or S
NRYKKLIVNSSDDFYLVSIANLKTPAXXPK

SEQ ID NO: 6262 - protein, 33 aa, Artificial Sequence
  Cyclic GFR-binding peptide
  MOD_RES (2)..(4): Xaa is C or S
RXGXEAVSMGEYHYKLTPVGMDDKYLVSIPSLK

SEQ ID NO: 6263 - protein, 38 aa, Artificial Sequence
  Cyclic GFR-binding peptide
  MOD_RES (1)..(3)..(35)..(36): Xaa is C or S
XGXSRVVMNYHYKLIVNSSDDKYLVSIPSLKTPAXXPK

SEQ ID NO: 6264 - protein, 31 aa, Artificial Sequence
  Cyclic GFR-binding peptide
  MOD_RES (30)..(31): Xaa is C or S
VVMEQYNKLVVKDYEDLYLMSIASLETPVXX

SEQ ID NO: 6265 - protein, 32 aa, Artificial Sequence
  Cyclic GFR-binding peptide
  MOD_RES (27)..(28): Xaa is C or S
NQYNKLIVNSSDDLYLVSIASLQTPAXXPKPV

SEQ ID NO: 6266 - protein, 35 aa, Artificial Sequence
  Cyclic GFR-binding peptide
  MOD_RES (2)..(4): Xaa is C or S
EXKXALHDELTYHYKLFIPKKRVIEKYLVSIPSLQ

SEQ ID NO: 6267 - protein, 26 aa, Artificial Sequence
  Cyclic GFR-binding peptide
  MOD_RES (26)..(26): Xaa is C or S
YHYKLIKPTKGIKYLISIPSLDQSVX

SEQ ID NO: 6268 - protein, 38 aa, Artificial Sequence
  Cyclic GFR-binding peptide
  MOD_RES (32)..(32): Xaa is C or S
SRVVMNRYKKLIVNSSDDFYLVSIANLKTPAXTPKTVH

SEQ ID NO: 6269 - protein, 38 aa, Artificial Sequence
  Cyclic GFR-binding peptide
  MOD_RES (2)..(34): Xaa is C or S
GXSRVVMNYHYKLIVNSSDDKYLVSIPSLKTPAXTPKT

SEQ ID NO: 6270 - protein, 32 aa, Artificial Sequence
  Cyclic GFR-binding peptide
  MOD_RES (26)..(26): Xaa is C or S
YHYKLIVNSSDDKYLVSIPSLKTPAXTPKTVH

SEQ ID NO: 6271 - protein, 32 aa, Artificial Sequence
  Cyclic GFR-binding peptide
  MOD_RES (27)..(28): Xaa is C or S
MRYKKLVKPKRGVFYLISIANLAQPVXXPAAS

SEQ ID NO: 6272 - protein, 32 aa, Artificial Sequence
  Cyclic GFR-binding peptide
  MOD_RES (1)..(3): Xaa is C or S
XKXSKVVMYHYKLVKPTRGVKYLISIPSLDQP

SEQ ID NO: 6273 - protein, 26 aa, Artificial Sequence
  Cyclic GFR-binding peptide
VIMRYKKLIKPTKGIFYLISIANLDQ

SEQ ID NO: 6274 - protein, 30 aa, Artificial Sequence
  Cyclic GFR-binding peptide
  MOD_RES (2)..(2): Xaa is C or S
GXGEVVMDYHYKLVVKENEDKYLMSIPSLE

SEQ ID NO: 6275 - protein, 39 aa, Artificial Sequence
  Cyclic GFR-binding peptide
  MOD_RES (1)..(3): Xaa is C or S
XKXALHDELTQYNKLFIPKKRVIELYLVSIASLQVQTPR

SEQ ID NO: 6276 - protein, 31 aa, Artificial Sequence
  Cyclic GFR-binding peptide
  MOD_RES (2)..(2): Xaa is C or S
KXSRVIMRYKKLVKPKRGVFYLISIANLAQP

SEQ ID NO: 6277 - protein, 24 aa, Artificial Sequence
  Cyclic GFR-binding peptide
VMDQYNKLVVKENEDLYLMSIASL

SEQ ID NO: 6278 - protein, 26 aa, Artificial Sequence
  Cyclic GFR-binding peptide
EYHYKLVVKDYEDKYLMSIPSLETPV

SEQ ID NO: 6279 - protein, 31 aa, Artificial Sequence
  Cyclic GFR-binding peptide
  MOD_RES (27)..(28): Xaa is C or S
NQYNKLIVNSSDDLYLVSIASLKTPAXXPKP

SEQ ID NO: 6280 - protein, 30 aa, Artificial Sequence
  Cyclic GFR-binding peptide
SRVIMQYNKLVKPKRGVLYLISIASLAQPV

SEQ ID NO: 6281 - protein, 29 aa, Artificial Sequence
  Cyclic GFR-binding peptide
  MOD_RES (1)..(1): Xaa is C or S
XSRVIMQYNKLVKPKRGVLYLISIASLAQ

SEQ ID NO: 6282 - protein, 40 aa, Artificial Sequence
  Cyclic GFR-binding peptide
  MOD_RES (2)..(34)..(35): Xaa is C or S
GXGEVVMDRYKKLVVKENEDFYLMSIANLETPVXXAKPIK

SEQ ID NO: 6283 - protein, 27 aa, Artificial Sequence
  Cyclic GFR-binding peptide
EVVMDYHYKLVVKENEDKYLMSIPSLE

SEQ ID NO: 6284 - protein, 26 aa, Artificial Sequence
  Cyclic GFR-binding peptide
SKVIMYHYKLIKPTKGIKYLISIPSL

SEQ ID NO: 6285 - protein, 29 aa, Artificial Sequence
  Cyclic GFR-binding peptide
  MOD_RES (1)..(3): Xaa is C or S
XGXGEVVMDRYKKLVVKENEDFYLMSIAN

SEQ ID NO: 6286 - protein, 33 aa, Artificial Sequence
  Cyclic GFR-binding peptide
ALHDELTYHYKLFIPKKRVIEKYLVSIPSLQVQ

SEQ ID NO: 6287 - protein, 37 aa, Artificial Sequence
  Cyclic GFR-binding peptide
  MOD_RES (1)..(3)..(34)..(35): Xaa is C or S
XKXSKVIMQYNKLIKPTKGILYLISIASLDQSVXXPS

SEQ ID NO: 6288 - protein, 38 aa, Artificial Sequence
  Cyclic GFR-binding peptide
  MOD_RES (35)..(35): Xaa is C or S
HDELTRHKRLFIPKKRVIEYYLVSTASLQVQTPRXQVN

SEQ ID NO: 6289 - protein, 43 aa, Artificial Sequence
  Cyclic GFR-binding peptide
  MOD_RES (2)..(4)..(41): Xaa is C or S
EXKXALHDELTRYKKLFIPKKRVIEFYLVSIANLQVQTPRXQV

SEQ ID NO: 6290 - protein, 37 aa, Artificial Sequence
  Cyclic GFR-binding peptide
  MOD_RES (1)..(33)..(34): Xaa is C or S
XAKVVMNQYNKLIVNNSSDLYLVSIASLKTPAXXAKP

SEQ ID NO: 6291 - protein, 42 aa, Artificial Sequence
  Cyclic GFR-binding peptide
  MOD_RES (2)..(4)..(36)..(37): Xaa is C or S
HXGXSRVVMNRHKRLIVNSSDDYYLVSTASLKTPAXXPKPVY

SEQ ID NO: 6292 - protein, 23 aa, Artificial Sequence
  Cyclic GFR-binding peptide
VIMYHYKLIKPTKGIKYLISIPS

SEQ ID NO: 6293 - protein, 31 aa, Artificial Sequence
  Cyclic GFR-binding peptide
  MOD_RES (30)..(31): Xaa is C or S
KVIMYHYKLIKPTKGIKYLISIPSLDQSVXX

SEQ ID NO: 6294 - protein, 28 aa, Artificial Sequence
  Cyclic GFR-binding peptide
VMDRHKRLVVKENEDYYLMSTASLETPV

SEQ ID NO: 6295 - protein, 32 aa, Artificial Sequence
  Cyclic GFR-binding peptide
  MOD_RES (31)..(32): Xaa is C or S
RVVMNRHKRLIVNSSDDYYLVSTASLQTPAXX

SEQ ID NO: 6296 - protein, 20 aa, Artificial Sequence
  Cyclic GFR-binding peptide
RYKKLVVKDYEDFYLMSIAN

SEQ ID NO: 6297 - protein, 38 aa, Artificial Sequence
  Cyclic GFR-binding peptide
  MOD_RES (2)..(4)..(36)..(37): Xaa is C or S
RXGXGEVVMDRHKRLVVKENEDYYLMSTASLETPVXXA

SEQ ID NO: 6298 - protein, 30 aa, Artificial Sequence
  Cyclic GFR-binding peptide
GEVVMDRYKKLVVKENEDFYLMSIANLETP

SEQ ID NO: 6299 - protein, 29 aa, Artificial Sequence
  Cyclic GFR-binding peptide
  MOD_RES (1)..(3): Xaa is C or S
XGXARVVMNQYNKLIVNSSDDLYLVSIAS

SEQ ID NO: 6300 - protein, 30 aa, Artificial Sequence
  Cyclic GFR-binding peptide
  MOD_RES (1)..(3): Xaa is C or S
XKXSRVIMQYNKLVKPKRGVLYLISIASLA

SEQ ID NO: 6301 - protein, 37 aa, Artificial Sequence
  Cyclic GFR-binding peptide
  MOD_RES (2)..(33)..(34): Xaa is C or S
KXSKVVMYHYKLVKPTRGVKYLISIPSLDQPVXXPSA

SEQ ID NO: 6302 - protein, 28 aa, Artificial Sequence
  Cyclic GFR-binding peptide
TQYNKLFIPKKRVIELYLVSIASLQVQT

SEQ ID NO: 6303 - protein, 28 aa, Artificial Sequence
  Cyclic GFR-binding peptide
  MOD_RES (26)..(27): Xaa is C or S
RYKKLIVNSSDDFYLVSIANLQTPAXXP

SEQ ID NO: 6304 - protein, 35 aa, Artificial Sequence
  Cyclic GFR-binding peptide
  MOD_RES (30)..(31): Xaa is C or S
VVMERHKRLVVKDYEDYYLMSTASLETPVXXAKPI

SEQ ID NO: 6305 - protein, 24 aa, Artificial Sequence
  Cyclic GFR-binding peptide
MQYNKLVKPTRGVLYLISIASLDQ

SEQ ID NO: 6306 - protein, 38 aa, Artificial Sequence
  Cyclic GFR-binding peptide
  MOD_RES (1)..(33): Xaa is C or S
XSRVVMNRHKRLIVNSSDDYYLVSTASLKTPAXTPKTV

SEQ ID NO: 6307 - protein, 31 aa, Artificial Sequence
  Cyclic GFR-binding peptide
  MOD_RES (1)..(1): Xaa is C or S
XALHDELTRYKKLFIPKKRVIEFYLVSIANL

SEQ ID NO: 6308 - protein, 40 aa, Artificial Sequence
  Cyclic GFR-binding peptide
  MOD_RES (2)..(34)..(35): Xaa is C or S
GXAKVVMNQYNKLIVNNSSDLYLVSIASLKTPAXXAKPVA

SEQ ID NO: 6309 - protein, 36 aa, Artificial Sequence
  Cyclic GFR-binding peptide
  MOD_RES (1)..(3)..(36): Xaa is C or S
XGXEAVSMGEQYNKLTPVGMDDLYLVSIASLKTPVX

SEQ ID NO: 6310 - protein, 36 aa, Artificial Sequence
  Cyclic GFR-binding peptide
  MOD_RES (30)..(31): Xaa is C or S
KVVMYHYKLVKPTRGVKYLISIPSLDQPVXXPSASA

SEQ ID NO: 6311 - protein, 32 aa, Artificial Sequence
  Cyclic GFR-binding peptide
  MOD_RES (28)..(29): Xaa is C or S
IMRYKKLIKPTKGIFYLISIANLDQSVXXPSA

SEQ ID NO: 6312 - protein, 35 aa, Artificial Sequence
  Cyclic GFR-binding peptide
  MOD_RES (2)..(34)..(35): Xaa is C or S
GXARVVMNQYNKLIVNSSDDLYLVSIASLQTPAXX

SEQ ID NO: 6313 - protein, 34 aa, Artificial Sequence
  Cyclic GFR-binding peptide
  MOD_RES (31)..(32): Xaa is C or S
VSMGERHKRLTPVGMDDYYLVSTASLKTPVXXAK

SEQ ID NO: 6314 - protein, 39 aa, Artificial Sequence
  Cyclic GFR-binding peptide
  MOD_RES (2)..(4)..(36)..(37): Xaa is C or S
HXGXSRVVMNQYNKLIVNSSDDLYLVSIASLKTPAXXPK

SEQ ID NO: 6315 - protein, 23 aa, Artificial Sequence
  Cyclic GFR-binding peptide
RYKKLIKPTKGIFYLISIANLDQ

SEQ ID NO: 6316 - protein, 31 aa, Artificial Sequence
  Cyclic GFR-binding peptide
  MOD_RES (2)..(4): Xaa is C or S
SXKXSRVIMRYKKLVKPKRGVFYLISIANLA

SEQ ID NO: 6317 - protein, 22 aa, Artificial Sequence
  Cyclic GFR-binding peptide
RHKRLFIPKKRVIEYYLVSTAS

SEQ ID NO: 6318 - protein, 24 aa, Artificial Sequence
  Cyclic GFR-binding peptide
MEYHYKLVVKDYEDKYLMSIPSLE

SEQ ID NO: 6319 - protein, 26 aa, Artificial Sequence
  Cyclic GFR-binding peptide
MNQYNKLIVNSSDDLYLVSIASLKTP

SEQ ID NO: 6320 - protein, 26 aa, Artificial Sequence
  Cyclic GFR-binding peptide
MGEQYNKLTPVGMDDLYLVSIASLKT

SEQ ID NO: 6321 - protein, 34 aa, Artificial Sequence
  Cyclic GFR-binding peptide
  MOD_RES (30)..(31): Xaa is C or S
SMGERHKRLTPVGMDDYYLVSTASLKTPVXXAKG

SEQ ID NO: 6322 - protein, 33 aa, Artificial Sequence
  Cyclic GFR-binding peptide
  MOD_RES (2)..(4): Xaa is C or S
RXGXGEVVMEQYNKLVVKDYEDLYLMSIASLET

SEQ ID NO: 6323 - protein, 32 aa, Artificial Sequence
  Cyclic GFR-binding peptide
  MOD_RES (32)..(32): Xaa is C or S
AKVVMNQYNKLIVNNSSDLYLVSIASLKTPAX

SEQ ID NO: 6324 - protein, 26 aa, Artificial Sequence
  Cyclic GFR-binding peptide
DRHKRLVVKENEDYYLMSTASLETPV

SEQ ID NO: 6325 - protein, 36 aa, Artificial Sequence
  Cyclic GFR-binding peptide
  MOD_RES (31)..(31): Xaa is C or S
RVVMNYHYKLIVNSSDDKYLVSIPSLKTPAXTPKTV

SEQ ID NO: 6326 - protein, 28 aa, Artificial Sequence
  Cyclic GFR-binding peptide
  MOD_RES (27)..(28): Xaa is C or S
MRYKKLVKPKRGVFYLISIANLAQPVXX

SEQ ID NO: 6327 - protein, 30 aa, Artificial Sequence
  Cyclic GFR-binding peptide
  MOD_RES (27)..(28): Xaa is C or S
NQYNKLIVNNSSDLYLVSIASLKTPAXXAK

SEQ ID NO: 6328 - protein, 40 aa, Artificial Sequence
  Cyclic GFR-binding peptide
  MOD_RES (2)..(4)..(36)..(37): Xaa is C or S
HXGXSRVVMNRHKRLIVNSSDDYYLVSTASLKTPAXXPKP

SEQ ID NO: 6329 - protein, 31 aa, Artificial Sequence
  Cyclic GFR-binding peptide
  MOD_RES (1)..(3): Xaa is C or S
XKXSRVIMYHYKLVKPKRGVKYLISIPSLAQ

SEQ ID NO: 6330 - protein, 33 aa, Artificial Sequence
  Cyclic GFR-binding peptide
  MOD_RES (30)..(31): Xaa is C or S
SMGERHKRLTPVGMDDYYLVSTASLKTPVXXAK

SEQ ID NO: 6331 - protein, 22 aa, Artificial Sequence
  Cyclic GFR-binding peptide
MDRYKKLVVKENEDFYLMSIAN

SEQ ID NO: 6332 - protein, 37 aa, Artificial Sequence
  Cyclic GFR-binding peptide
  MOD_RES (1)..(3)..(34)..(35): Xaa is C or S
XKXSKVVMQYNKLVKPTRGVLYLISIASLDQPVXXPS

SEQ ID NO: 6333 - protein, 38 aa, Artificial Sequence
  Cyclic GFR-binding peptide
  MOD_RES (2)..(34)..(35): Xaa is C or S
GXSRVVMNRYKKLIVNSSDDFYLVSIANLKTPAXXPKP

SEQ ID NO: 6334 - protein, 32 aa, Artificial Sequence
  Cyclic GFR-binding peptide
  MOD_RES (26)..(27): Xaa is C or S
YHYKLIVNSSDDKYLVSIPSLQTPAXXPKPVT

SEQ ID NO: 6335 - protein, 41 aa, Artificial Sequence
  Cyclic GFR-binding peptide
  MOD_RES (1)..(3)..(40): Xaa is C or S
XKXALHDELTRYKKLFIPKKRVIEFYLVSIANLQVQTPRXQ

SEQ ID NO: 6336 - protein, 36 aa, Artificial Sequence
  Cyclic GFR-binding peptide
  MOD_RES (2)..(34)..(35): Xaa is C or S
GXAKVVMNYHYKLIVNNSSDKYLVSIPSLKTPAXXA

SEQ ID NO: 6337 - protein, 27 aa, Artificial Sequence
  Cyclic GFR-binding peptide
  MOD_RES (1)..(1): Xaa is C or S
XSRVIMYHYKLVKPKRGVKYLISIPSL

SEQ ID NO: 6338 - protein, 29 aa, Artificial Sequence
  Cyclic GFR-binding peptide
  MOD_RES (27)..(28): Xaa is C or S
ERYKKLVVKDYEDFYLMSIANLETPVXXA

SEQ ID NO: 6339 - protein, 27 aa, Artificial Sequence
  Cyclic GFR-binding peptide
  MOD_RES (2)..(2): Xaa is C or S
KXSKVVMRHKRLVKPTRGVYYLISTAS

SEQ ID NO: 6340 - protein, 34 aa, Artificial Sequence
  Cyclic GFR-binding peptide
  MOD_RES (29)..(30): Xaa is C or S
VIMYHYKLVKPKRGVKYLISIPSLAQPVXXPAAS

SEQ ID NO: 6341 - protein, 32 aa, Artificial Sequence
  Cyclic GFR-binding peptide
  MOD_RES (27)..(28): Xaa is C or S
MRHKRLVKPTRGVYYLISTASLDQPVXXPSAS

SEQ ID NO: 6342 - protein, 30 aa, Artificial Sequence
  Cyclic GFR-binding peptide
  MOD_RES (26)..(27): Xaa is C or S
RYKKLIKPTKGIFYLISIANLDQSVXXPSA

SEQ ID NO: 6343 - protein, 35 aa, Artificial Sequence
  Cyclic GFR-binding peptide
  MOD_RES (2)..(4)..(35): Xaa is C or S
SXKXSKVIMRYKKLIKPTKGIFYLISIANLDQSVX

SEQ ID NO: 6344 - protein, 39 aa, Artificial Sequence
  Cyclic GFR-binding peptide
  MOD_RES (2)..(4)..(36)..(37): Xaa is C or S
HXGXAKVVMNYHYKLIVNNSSDKYLVSIPSLKTPAXXAK

SEQ ID NO: 6345 - protein, 28 aa, Artificial Sequence
  Cyclic GFR-binding peptide
GEVVMDRYKKLVVKENEDFYLMSIANLE

SEQ ID NO: 6346 - protein, 29 aa, Artificial Sequence
  Cyclic GFR-binding peptide
EVVMDQYNKLVVKENEDLYLMSIASLETP

SEQ ID NO: 6347 - protein, 31 aa, Artificial Sequence
  Cyclic GFR-binding peptide
HDELTRHKRLFIPKKRVIEYYLVSTASLQVQ

SEQ ID NO: 6348 - protein, 33 aa, Artificial Sequence
  Cyclic GFR-binding peptide
  MOD_RES (31)..(32): Xaa is C or S
EVVMERYKKLVVKDYEDFYLMSIANLETPVXXA

SEQ ID NO: 6349 - protein, 25 aa, Artificial Sequence
  Cyclic GFR-binding peptide
RHKRLVVKENEDYYLMSTASLETPV

SEQ ID NO: 6350 - protein, 34 aa, Artificial Sequence
  Cyclic GFR-binding peptide
  MOD_RES (30)..(31): Xaa is C or S
KVVMQYNKLVKPTRGVLYLISIASLDQPVXXPSA

SEQ ID NO: 6351 - protein, 31 aa, Artificial Sequence
  Cyclic GFR-binding peptide
  MOD_RES (30)..(31): Xaa is C or S
SMGERHKRLTPVGMDDYYLVSTASLKTPVXX

SEQ ID NO: 6352 - protein, 33 aa, Artificial Sequence
  Cyclic GFR-binding peptide
  MOD_RES (2)..(33): Xaa is C or S
KXSKVVMQYNKLVKPTRGVLYLISIASLDQPVX

SEQ ID NO: 6353 - protein, 31 aa, Artificial Sequence
  Cyclic GFR-binding peptide
  MOD_RES (27)..(28): Xaa is C or S
MRYKKLIKPTKGIFYLISIANLDQSVXXPSA

SEQ ID NO: 6354 - protein, 28 aa, Artificial Sequence
  Cyclic GFR-binding peptide
  MOD_RES (28)..(28): Xaa is C or S
LSAISVLYLDDSSNVILKNYQNMVVRSX

SEQ ID NO: 6355 - protein, 38 aa, Artificial Sequence
  Cyclic GFR-binding peptide
  MOD_RES (6)..(7): Xaa is C or S
KIPKAXXVPTELNAISMLYFDENEKVVLKKYRDMVVEG

SEQ ID NO: 6356 - protein, 35 aa, Artificial Sequence
  Cyclic GFR-binding peptide
  MOD_RES (32)..(34): Xaa is C or S
PTKLSATSVLYYDDMGVPTLRKHREGMSVAEXGXR

SEQ ID NO: 6357 - protein, 27 aa, Artificial Sequence
  Cyclic GFR-binding peptide
PTKLSPISVLYKDDSSNVILKYHYNMV

SEQ ID NO: 6358 - protein, 35 aa, Artificial Sequence
  Cyclic GFR-binding peptide
  MOD_RES (32)..(34): Xaa is C or S
APTQLSAISVLYLDDSSNVILKNYQNMVVRAXGXH

SEQ ID NO: 6359 - protein, 29 aa, Artificial Sequence
  Cyclic GFR-binding peptide
  MOD_RES (3)..(4): Xaa is C or S
KAXXVPTELSATSMLYYDEYDKVVLRKHR

SEQ ID NO: 6360 - protein, 24 aa, Artificial Sequence
  Cyclic GFR-binding peptide
QDLNAISILYFIGKTPKILKKYRM

SEQ ID NO: 6361 - protein, 29 aa, Artificial Sequence
  Cyclic GFR-binding peptide
  MOD_RES (29)..(29): Xaa is C or S
QDLNAISILYFVGRTPKVLKKYRMVVKSX

SEQ ID NO: 6362 - protein, 31 aa, Artificial Sequence
  Cyclic GFR-binding peptide
  MOD_RES (30)..(30): Xaa is C or S
TELSPISMLYKDEYDKVVLKYHYEMVVEGXG

SEQ ID NO: 6363 - protein, 30 aa, Artificial Sequence
  Cyclic GFR-binding peptide
  MOD_RES (30)..(30): Xaa is C or S
PQALNAISILYFVGRKPKVLKKYRMIVRSX

SEQ ID NO: 6364 - protein, 25 aa, Artificial Sequence
  Cyclic GFR-binding peptide
VSQDLSAISILYLIGKTPKILKNYQ

SEQ ID NO: 6365 - protein, 38 aa, Artificial Sequence
  Cyclic GFR-binding peptide
  MOD_RES (7)..(7): Xaa is C or S
HVTKPTXAPTKLSATSVLYYDDSSNVILRKHRNMVVRS

SEQ ID NO: 6366 - protein, 33 aa, Artificial Sequence
  Cyclic GFR-binding peptide
  MOD_RES (32)..(32): Xaa is C or S
VPTELNAISMLYFDENEKVVLKKYRDMVVEGXG

SEQ ID NO: 6367 - protein, 28 aa, Artificial Sequence
  Cyclic GFR-binding peptide
PQALNAISILYFVGRKPKVLKKYRMIVR

SEQ ID NO: 6368 - protein, 26 aa, Artificial Sequence
  Cyclic GFR-binding peptide
LSAISILYLIGKTPKILKNYQMIVKS

SEQ ID NO: 6369 - protein, 25 aa, Artificial Sequence
  Cyclic GFR-binding peptide
LNAISMLYFDENEKVVLKKYRDMVV

SEQ ID NO: 6370 - protein, 33 aa, Artificial Sequence
  Cyclic GFR-binding peptide
  MOD_RES (30)..(32): Xaa is C or S
TQLSAISVLYLDDSSNVILKNYQNMVVRAXGXH

SEQ ID NO: 6371 - protein, 36 aa, Artificial Sequence
  Cyclic GFR-binding peptide
  MOD_RES (3)..(4)..(36): Xaa is C or S
KPXXAPTKLSPISVLYKDDSSNVILKYHYNMVVRSX

SEQ ID NO: 6372 - protein, 25 aa, Artificial Sequence
  Cyclic GFR-binding peptide
KLSATSVLYYDDSSNVILRKHRNMV

SEQ ID NO: 6373 - protein, 32 aa, Artificial Sequence
  Cyclic GFR-binding peptide
  MOD_RES (1)..(32): Xaa is C or S
XVPQDLSPISILYKVGRTPKVLKYHYMVVKSX

SEQ ID NO: 6374 - protein, 27 aa, Artificial Sequence
  Cyclic GFR-binding peptide
  MOD_RES (1)..(1): Xaa is C or S
XAPTKLNAISVLYFDSSNNVILKKYRN

SEQ ID NO: 6375 - protein, 38 aa, Artificial Sequence
  Cyclic GFR-binding peptide
  MOD_RES (4)..(5)..(36)..(38): Xaa is C or S
AAPXXVPQALSAISILYLVGRKPKVLKNYQMIVRSXKX

SEQ ID NO: 6376 - protein, 24 aa, Artificial Sequence
  Cyclic GFR-binding peptide
QLSATSVLYYEIVRKKPIFLRKHR

SEQ ID NO: 6377 - protein, 27 aa, Artificial Sequence
  Cyclic GFR-binding peptide
SAISVLYLDSSNNVILKNYQDSSNNVI

SEQ ID NO: 6378 - protein, 38 aa, Artificial Sequence
  Cyclic GFR-binding peptide
  MOD_RES (6)..(7): Xaa is C or S
YVPKPXXAPTKLSATSVLYYDDSSNVILRKHRNMVVRS

SEQ ID NO: 6379 - protein, 22 aa, Artificial Sequence
  Cyclic GFR-binding peptide
LNAISILYFVGRKPKVLKKYRM

SEQ ID NO: 6380 - protein, 35 aa, Artificial Sequence
  Cyclic GFR-binding peptide
  MOD_RES (4)..(5): Xaa is C or S
ASPXXVSQDLNAISILYFIGKTPKILKKYRMIVKS

SEQ ID NO: 6381 - protein, 34 aa, Artificial Sequence
  Cyclic GFR-binding peptide
  MOD_RES (32)..(34): Xaa is C or S
PTKLNAISVLYFDDMGVPTLKKYREGMSVAEXGX

SEQ ID NO: 6382 - protein, 29 aa, Artificial Sequence
  Cyclic GFR-binding peptide
  MOD_RES (1)..(2): Xaa is C or S
XXAPTKLNAISVLYFDSSNNVILKKYRNM

SEQ ID NO: 6383 - protein, 32 aa, Artificial Sequence
  Cyclic GFR-binding peptide
  MOD_RES (2)..(3): Xaa is C or S
PXXAPTQLSATSVLYYDDSSNVILRKHRNMVV

SEQ ID NO: 6384 - protein, 27 aa, Artificial Sequence
  Cyclic GFR-binding peptide
  MOD_RES (1)..(2): Xaa is C or S
XXVPTKLSATSVLYYDDMGVPTLRKHR

SEQ ID NO: 6385 - protein, 35 aa, Artificial Sequence
  Cyclic GFR-binding peptide
  MOD_RES (5)..(6): Xaa is C or S
VPKAXXAPTKLNAISVLYFDSSNNVILKKYRNMVV

SEQ ID NO: 6386 - protein, 39 aa, Artificial Sequence
  Cyclic GFR-binding peptide
  MOD_RES (4)..(5)..(37)..(39): Xaa is C or S
PKAXXVPTELNAISMLYFDENEKVVLKKYRDMVVEGXGX

SEQ ID NO: 6387 - protein, 35 aa, Artificial Sequence
  Cyclic GFR-binding peptide
  MOD_RES (3)..(4)..(35): Xaa is C or S
SPXXVSQDLSAISILYLIGKTPKILKNYQMIVKSX

SEQ ID NO: 6388 - protein, 23 aa, Artificial Sequence
  Cyclic GFR-binding peptide
QDLSATSILYYVGRTPKVLRKHR

SEQ ID NO: 6389 - protein, 32 aa, Artificial Sequence
  Cyclic GFR-binding peptide
  MOD_RES (1)..(2): Xaa is C or S
XXVSQDLSPISILYKIGKTPKILKYHYMIVKS

SEQ ID NO: 6390 - protein, 31 aa, Artificial Sequence
  Cyclic GFR-binding peptide
  MOD_RES (3)..(4): Xaa is C or S
KPXXAPTQLSPISVLYKDDSSNVILKYHYNM

SEQ ID NO: 6391 - protein, 34 aa, Artificial Sequence
  Cyclic GFR-binding peptide
  MOD_RES (2)..(3): Xaa is C or S
AXXVPTELSATSMLYYDENEKVVLRKHRDMVVEG

SEQ ID NO: 6392 - protein, 28 aa, Artificial Sequence
  Cyclic GFR-binding peptide
  MOD_RES (1)..(2): Xaa is C or S
XXVPQDLSATSILYYVGRTPKVLRKHRM

SEQ ID NO: 6393 - protein, 33 aa, Artificial Sequence
  Cyclic GFR-binding peptide
  MOD_RES (30)..(32): Xaa is C or S
PQDLSATSILYYVGRTPKVLRKHRMVVKSXKXS

SEQ ID NO: 6394 - protein, 30 aa, Artificial Sequence
  Cyclic GFR-binding peptide
VPTELSPISMLYKDEYDKVVLKYHYEMVVE

SEQ ID NO: 6395 - protein, 37 aa, Artificial Sequence
  Cyclic GFR-binding peptide
  MOD_RES (6)..(7): Xaa is C or S
TVPKPXXAPTQLSAISVLYLDDSSNVILKNYQNMVVR

SEQ ID NO: 6396 - protein, 32 aa, Artificial Sequence
  Cyclic GFR-binding peptide
  MOD_RES (1)..(1): Xaa is C or S
XVPTELSPISMLYKDEYDKVVLKYHYEMVVEG

SEQ ID NO: 6397 - protein, 35 aa, Artificial Sequence
  Cyclic GFR-binding peptide
  MOD_RES (2)..(3)..(35): Xaa is C or S
AXXVPTELSATSMLYYDEYDKVVLRKHREMVVEGX

SEQ ID NO: 6398 - protein, 32 aa, Artificial Sequence
  Cyclic GFR-binding peptide
  MOD_RES (2)..(3): Xaa is C or S
PXXVSQDLSATSILYYIGKTPKILRKHRMIVK

SEQ ID NO: 6399 - protein, 29 aa, Artificial Sequence
  Cyclic GFR-binding peptide
PQALNAISILYFVGRKPKVLKKYRMIVRS

SEQ ID NO: 6400 - protein, 35 aa, Artificial Sequence
  Cyclic GFR-binding peptide
  MOD_RES (1)..(34): Xaa is C or S
XVPTKLSATSVLYYDDMGVPTLRKHREGMSVAEXG

SEQ ID NO: 6401 - protein, 36 aa, Artificial Sequence
  Cyclic GFR-binding peptide
  MOD_RES (2)..(2): Xaa is C or S
QXRPTQVQLSATSVLYYEIVRKKPIFLRKHRTLEDH

SEQ ID NO: 6402 - protein, 29 aa, Artificial Sequence
  Cyclic GFR-binding peptide
QLSPISVLYKEIVRKKPIFLKYHYTLEDH

SEQ ID NO: 6403 - protein, 38 aa, Artificial Sequence
  Cyclic GFR-binding peptide
  MOD_RES (7)..(7): Xaa is C or S
HVTKPTXAPTKLSAISVLYLDDSSNVILKNYQNMVVRS

SEQ ID NO: 6404 - protein, 35 aa, Artificial Sequence
  Cyclic GFR-binding peptide
  MOD_RES (5)..(6): Xaa is C or S
SAAPXXVPQALSATSILYYVGRKPKVLRKHRMIVR

SEQ ID NO: 6405 - protein, 36 aa, Artificial Sequence
  Cyclic GFR-binding peptide
  MOD_RES (34)..(36): Xaa is C or S
QVQLSAISVLYLEIVRKKPIFLKNYQTLEDHLAXKX

SEQ ID NO: 6406 - protein, 30 aa, Artificial Sequence
  Cyclic GFR-binding peptide
  MOD_RES (3)..(4): Xaa is C or S
KAXXVPTKLNAISVLYFDDMGVPTLKKYRE

SEQ ID NO: 6407 - protein, 30 aa, Artificial Sequence
  Cyclic GFR-binding peptide
  MOD_RES (29)..(29): Xaa is C or S
QDLNAISILYFVGRTPKVLKKYRMVVKSXK

SEQ ID NO: 6408 - protein, 35 aa, Artificial Sequence
  Cyclic GFR-binding peptide
  MOD_RES (6)..(7): Xaa is C or S
AVPKAXXAPTKLSPISVLYKDSSNNVILKYHYNMV

SEQ ID NO: 6409 - protein, 32 aa, Artificial Sequence
  Cyclic GFR-binding peptide
  MOD_RES (32)..(32): Xaa is C or S
VPTELSPISMLYKDEYDKVVLKYHYEMVVEGX

SEQ ID NO: 6410 - protein, 40 aa, Artificial Sequence
  Cyclic GFR-binding peptide
  MOD_RES (5)..(6)..(39): Xaa is C or S
VGKAXXVPTKLSAISVLYLDDMGVPTLKNYQEGMSVAEXG

SEQ ID NO: 6411 - protein, 34 aa, Artificial Sequence
  Cyclic GFR-binding peptide
  MOD_RES (4)..(5): Xaa is C or S
PKAXXVPTELSATSMLYYDENEKVVLRKHRDMVV

SEQ ID NO: 6412 - protein, 33 aa, Artificial Sequence
  Cyclic GFR-binding peptide
  MOD_RES (3)..(4): Xaa is C or S
KAXXVPTELNAISMLYFDENEKVVLKKYRDMVV

SEQ ID NO: 6413 - protein, 38 aa, Artificial Sequence
  Cyclic GFR-binding peptide
  MOD_RES (4)..(5)..(37): Xaa is C or S
PKAXXVPTELSATSMLYYDEYDKVVLRKHREMVVEGXG

SEQ ID NO: 6414 - protein, 25 aa, Artificial Sequence
  Cyclic GFR-binding peptide
PTKLNAISVLYFDSSNNVILKKYRN

SEQ ID NO: 6415 - protein, 22 aa, Artificial Sequence
  Cyclic GFR-binding peptide
LSAISILYLIGKTPKILKNYQM

SEQ ID NO: 6416 - protein, 33 aa, Artificial Sequence
  Cyclic GFR-binding peptide
  MOD_RES (4)..(5): Xaa is C or S
PKAXXAPTKLNAISVLYFDSSNNVILKKYRNMV

SEQ ID NO: 6417 - protein, 35 aa, Artificial Sequence
  Cyclic GFR-binding peptide
  MOD_RES (1)..(32)..(34): Xaa is C or S
XVSQDLSAISILYLIGKTPKILKNYQMIVKSXKXS

SEQ ID NO: 6418 - protein, 26 aa, Artificial Sequence
  Cyclic GFR-binding peptide
  MOD_RES (1)..(1): Xaa is C or S
XVPTELNAISMLYFDEYDKVVLKKYR

SEQ ID NO: 6419 - protein, 26 aa, Artificial Sequence
  Cyclic GFR-binding peptide
TQLSATSVLYYDDSSNVILRKHRNMV

SEQ ID NO: 6420 - protein, 31 aa, Artificial Sequence
  Cyclic GFR-binding peptide
  MOD_RES (3)..(4): Xaa is C or S
KPXXAPTQLSATSVLYYDDSSNVILRKHRNM

SEQ ID NO: 6421 - protein, 40 aa, Artificial Sequence
  Cyclic GFR-binding peptide
  MOD_RES (4)..(5)..(38)..(40): Xaa is C or S
GKAXXVPTKLNAISVLYFDDMGVPTLKKYREGMSVAEXGX

SEQ ID NO: 6422 - protein, 32 aa, Artificial Sequence
  Cyclic GFR-binding peptide
  MOD_RES (4)..(5): Xaa is C or S
ASPXXVSQDLSAISILYLIGKTPKILKNYQMI

SEQ ID NO: 6423 - protein, 20 aa, Artificial Sequence
  Cyclic GFR-binding peptide
SATSILYYVGRTPKVLRKHR

SEQ ID NO: 6424 - protein, 34 aa, Artificial Sequence
  Cyclic GFR-binding peptide
  MOD_RES (34)..(34): Xaa is C or S
QVQLNAISVLYFEIVRKKPIFLKKYRTLEDHLAX

SEQ ID NO: 6425 - protein, 28 aa, Artificial Sequence
  Cyclic GFR-binding peptide
  MOD_RES (27)..(27): Xaa is C or S
SAISVLYLDDSSNVILKNYQNMVVRSXG

SEQ ID NO: 6426 - protein, 37 aa, Artificial Sequence
  Cyclic GFR-binding peptide
  MOD_RES (2)..(3)..(35)..(37): Xaa is C or S
AXXAPTKLSAISVLYLDSSNNVILKNYQNMVVKAXGX

SEQ ID NO: 6427 - protein, 25 aa, Artificial Sequence
  Cyclic GFR-binding peptide
QDLNAISILYFIGKTPKILKKYRMI

SEQ ID NO: 6428 - protein, 30 aa, Artificial Sequence
  Cyclic GFR-binding peptide
  MOD_RES (30)..(30): Xaa is C or S
SAISVLYLEIVRKKPIFLKNYQTLEDHLAX

SEQ ID NO: 6429 - protein, 31 aa, Artificial Sequence
  Cyclic GFR-binding peptide
  MOD_RES (29)..(31): Xaa is C or S
KLSATSVLYYDDSSNVILRKHRNMVVRSXGX

SEQ ID NO: 6430 - protein, 27 aa, Artificial Sequence
  Cyclic GFR-binding peptide
SAISVLYLDDSSNVILKNYQDDSSNVI

SEQ ID NO: 6431 - protein, 38 aa, Artificial Sequence
  Cyclic GFR-binding peptide
  MOD_RES (1)..(38): Xaa is C or S
XRPTQVQLSATSVLYYEIVRKKPIFLRKHRTLEDHLAX

SEQ ID NO: 6432 - protein, 37 aa, Artificial Sequence
  Cyclic GFR-binding peptide
  MOD_RES (4)..(5)..(37): Xaa is C or S
PKPXXAPTQLSAISVLYLDDSSNVILKNYQNMVVRAX

SEQ ID NO: 6433 - protein, 26 aa, Artificial Sequence
  Cyclic GFR-binding peptide
  MOD_RES (1)..(1): Xaa is C or S
XVPTELSPISMLYKDENEKVVLKYHY

SEQ ID NO: 6434 - protein, 30 aa, Artificial Sequence
  Cyclic GFR-binding peptide
VPQALSATSILYYVGRKPKVLRKHRMIVRS

SEQ ID NO: 6435 - protein, 33 aa, Artificial Sequence
  Cyclic GFR-binding peptide
  MOD_RES (30)..(32): Xaa is C or S
PQALNAISILYFVGRKPKVLKKYRMIVRSXKXS

SEQ ID NO: 6436 - protein, 26 aa, Artificial Sequence
  Cyclic GFR-binding peptide
LSAISILYLVGRKPKVLKNYQMIVRS

SEQ ID NO: 6437 - protein, 35 aa, Artificial Sequence
  Cyclic GFR-binding peptide
  MOD_RES (6)..(7): Xaa is C or S
YVPKPXXAPTKLSAISVLYLDDSSNVILKNYQNMV

SEQ ID NO: 6438 - protein, 30 aa, Artificial Sequence
  Cyclic GFR-binding peptide
  MOD_RES (29)..(29): Xaa is C or S
LSATSVLYYDDMGVPTLRKHREGMSVAEXG

SEQ ID NO: 6439 - protein, 34 aa, Artificial Sequence
  Cyclic GFR-binding peptide
  MOD_RES (3)..(4): Xaa is C or S
SPXXVSQDLSAISILYLIGKTPKILKNYQMIVKS

SEQ ID NO: 6440 - protein, 28 aa, Artificial Sequence
  Cyclic GFR-binding peptide
PTELSPISMLYKDENEKVVLKYHYDMVV

SEQ ID NO: 6441 - protein, 32 aa, Artificial Sequence
  Cyclic GFR-binding peptide
  MOD_RES (29)..(31): Xaa is C or S
ELNAISMLYFDEYDKVVLKKYREMVVEGXGXR

SEQ ID NO: 6442 - protein, 33 aa, Artificial Sequence
  Cyclic GFR-binding peptide
  MOD_RES (1)..(32): Xaa is C or S
XVSQDLSPISILYKIGKTPKILKYHYMIVKSXK

SEQ ID NO: 6443 - protein, 27 aa, Artificial Sequence
  Cyclic GFR-binding peptide
QLSATSVLYYDDSSNVILRKHRNMVVR

SEQ ID NO: 6444 - protein, 36 aa, Artificial Sequence
  Cyclic GFR-binding peptide
  MOD_RES (1)..(1): Xaa is C or S
XRPTQVQLSPISVLYKEIVRKKPIFLKYHYTLEDHL

SEQ ID NO: 6445 - protein, 30 aa, Artificial Sequence
  Cyclic GFR-binding peptide
  MOD_RES (1)..(2): Xaa is C or S
XXVPTELNAISMLYFDENEKVVLKKYRDMV

SEQ ID NO: 6446 - protein, 27 aa, Artificial Sequence
  Cyclic GFR-binding peptide
LNAISMLYFDEYDKVVLKKYREMVVEG

SEQ ID NO: 6447 - protein, 21 aa, Artificial Sequence
  Cyclic GFR-binding peptide
SATSMLYYDENEKVVLRKHRD

SEQ ID NO: 6448 - protein, 31 aa, Artificial Sequence
  Cyclic GFR-binding peptide
  MOD_RES (2)..(3): Xaa is C or S
PXXVSQDLSAISILYLIGKTPKILKNYQMIV

SEQ ID NO: 6449 - protein, 27 aa, Artificial Sequence
  Cyclic GFR-binding peptide
  MOD_RES (26)..(26): Xaa is C or S
NAISILYFIGKTPKILKKYRMIVKSXK

SEQ ID NO: 6450 - protein, 21 aa, Artificial Sequence
  Cyclic GFR-binding peptide
SAISILYLVGRKPKVLKNYQM

SEQ ID NO: 6451 - protein, 28 aa, Artificial Sequence
  Cyclic GFR-binding peptide
PTQVQLNAISVLYFEIVRKKPIFLKKYR

SEQ ID NO: 6452 - protein, 31 aa, Artificial Sequence
  Cyclic GFR-binding peptide
  MOD_RES (28)..(30): Xaa is C or S
DLSATSILYYVGRTPKVLRKHRMVVKSXKXS

SEQ ID NO: 6453 - protein, 34 aa, Artificial Sequence
  Cyclic GFR-binding peptide
  MOD_RES (1)..(2)..(34): Xaa is C or S
XXAPTKLSAISVLYLDDSSNVILKNYQNMVVRSX

SEQ ID NO: 6454 - protein, 29 aa, Artificial Sequence
  Cyclic GFR-binding peptide
PTKLSATSVLYYDDMGVPTLRKHREGMSV

SEQ ID NO: 6455 - protein, 42 aa, Artificial Sequence
  Cyclic GFR-binding peptide
  MOD_RES (3)..(40)..(42): Xaa is C or S
VQXRPTQVQLNAISVLYFEIVRKKPIFLKKYRTLEDHLAXKX

SEQ ID NO: 6456 - protein, 30 aa, Artificial Sequence
  Cyclic GFR-binding peptide
  MOD_RES (1)..(2): Xaa is C or S
XXVPQALSAISILYLVGRKPKVLKNYQMIV

SEQ ID NO: 6457 - protein, 33 aa, Artificial Sequence
  Cyclic GFR-binding peptide
PTQVQLSATSVLYYEIVRKKPIFLRKHRTLEDH

SEQ ID NO: 6458 - protein, 30 aa, Artificial Sequence
  Cyclic GFR-binding peptide
  MOD_RES (1)..(1): Xaa is C or S
XVPTKLNAISVLYFDDMGVPTLKKYREGMS

SEQ ID NO: 6459 - protein, 31 aa, Artificial Sequence
  Cyclic GFR-binding peptide
PTKLNAISVLYFDDMGVPTLKKYREGMSVAE

SEQ ID NO: 6460 - protein, 33 aa, Artificial Sequence
  Cyclic GFR-binding peptide
  MOD_RES (32)..(32): Xaa is C or S
APTQLSATSVLYYDDSSNVILRKHRNMVVRAXG

SEQ ID NO: 6461 - protein, 26 aa, Artificial Sequence
  Cyclic GFR-binding peptide
KLSPISVLYKDSSNNVILKYHYNMVV

SEQ ID NO: 6462 - protein, 37 aa, Artificial Sequence
  Cyclic GFR-binding peptide
  MOD_RES (5)..(6): Xaa is C or S
IPKAXXVPTELSPISMLYKDEYDKVVLKYHYEMVVEG

SEQ ID NO: 6463 - protein, 34 aa, Artificial Sequence
  Cyclic GFR-binding peptide
  MOD_RES (6)..(7): Xaa is C or S
ASASPXXVPQDLSAISILYLVGRTPKVLKNYQMV

SEQ ID NO: 6464 - protein, 34 aa, Artificial Sequence
  Cyclic GFR-binding peptide
  MOD_RES (5)..(5): Xaa is C or S
TKPTXAPTKLSAISVLYLDDSSNVILKNYQNMVV

SEQ ID NO: 6465 - protein, 34 aa, Artificial Sequence
  Cyclic GFR-binding peptide
RPTQVQLNAISVLYFEIVRKKPIFLKKYRTLEDH

SEQ ID NO: 6466 - protein, 29 aa, Artificial Sequence
  Cyclic GFR-binding peptide
  MOD_RES (28)..(28): Xaa is C or S
LSAISVLYLDDSSNVILKNYQNMVVRSXG

SEQ ID NO: 6467 - protein, 38 aa, Artificial Sequence
  Cyclic GFR-binding peptide
  MOD_RES (5)..(6)..(38): Xaa is C or S
VPKAXXAPTKLSPISVLYKDSSNNVILKYHYNMVVKAX

SEQ ID NO: 6468 - protein, 31 aa, Artificial Sequence
  Cyclic GFR-binding peptide
  MOD_RES (4)..(5): Xaa is C or S
ASPXXVPQDLNAISILYFVGRTPKVLKKYRM

SEQ ID NO: 6469 - protein, 31 aa, Artificial Sequence
  Cyclic GFR-binding peptide
  MOD_RES (3)..(4): Xaa is C or S
KAXXVPTKLSAISVLYLDDMGVPTLKNYQEG

SEQ ID NO: 6470 - protein, 39 aa, Artificial Sequence
  Cyclic GFR-binding peptide
  MOD_RES (5)..(6)..(38): Xaa is C or S
VPKPXXAPTKLSATSVLYYDDSSNVILRKHRNMVVRSXG

SEQ ID NO: 6471 - protein, 37 aa, Artificial Sequence
  Cyclic GFR-binding peptide
  MOD_RES (1)..(34)..(36): Xaa is C or S
XVPTKLSATSVLYYDDMGVPTLRKHREGMSVAEXGXR

SEQ ID NO: 6472 - protein, 28 aa, Artificial Sequence
  Cyclic GFR-binding peptide
  MOD_RES (2)..(3): Xaa is C or S
PXXVPQALSPISILYKVGRKPKVLKYHY

SEQ ID NO: 6473 - protein, 36 aa, Artificial Sequence
  Cyclic GFR-binding peptide
  MOD_RES (6)..(7): Xaa is C or S
SIPKAXXVPTELSATSMLYYDEYDKVVLRKHREMVV

SEQ ID NO: 6474 - protein, 26 aa, Artificial Sequence
  Cyclic GFR-binding peptide
DLSPISILYKVGRTPKVLKYHYMVVK

SEQ ID NO: 6475 - protein, 30 aa, Artificial Sequence
  Cyclic GFR-binding peptide
  MOD_RES (2)..(3): Xaa is C or S
AXXVPTKLNAISVLYFDDMGVPTLKKYREG

SEQ ID NO: 6476 - protein, 37 aa, Artificial Sequence
  Cyclic GFR-binding peptide
  MOD_RES (6)..(7): Xaa is C or S
TVPKPXXAPTQLSPISVLYKDDSSNVILKYHYNMVVR

SEQ ID NO: 6477 - protein, 36 aa, Artificial Sequence
  Cyclic GFR-binding peptide
  MOD_RES (2)..(3)..(34)..(36): Xaa is C or S
PXXVPQDLSPISILYKVGRTPKVLKYHYMVVKSXKX

SEQ ID NO: 6478 - protein, 23 aa, Artificial Sequence
  Cyclic GFR-binding peptide
TKLSAISVLYLDDMGVPTLKNYQ

SEQ ID NO: 6479 - protein, 28 aa, Artificial Sequence
  Cyclic GFR-binding peptide
QALNAISILYFVGRKPKVLKKYRMIVRS

SEQ ID NO: 6480 - protein, 27 aa, Artificial Sequence
  Cyclic GFR-binding peptide
  MOD_RES (27)..(27): Xaa is C or S
NAISVLYFDSSNNVILKKYRNMVVKAX

SEQ ID NO: 6481 - protein, 30 aa, Artificial Sequence
  Cyclic GFR-binding peptide
  MOD_RES (29)..(29): Xaa is C or S
QLSPISVLYKDDSSNVILKYHYNMVVRAXG

SEQ ID NO: 6482 - protein, 28 aa, Artificial Sequence
  Cyclic GFR-binding peptide
PTKLSPISVLYKDDSSNVILKYHYNMVV

SEQ ID NO: 6483 - protein, 26 aa, Artificial Sequence
  Cyclic GFR-binding peptide
LSAISVLYLDDMGVPTLKNYQEGMSV

SEQ ID NO: 6484 - protein, 35 aa, Artificial Sequence
  Cyclic GFR-binding peptide
  MOD_RES (3)..(4)..(35): Xaa is C or S
SPXXVSQDLNAISILYFIGKTPKILKKYRMIVKSX

SEQ ID NO: 6485 - protein, 40 aa, Artificial Sequence
  Cyclic GFR-binding peptide
  MOD_RES (5)..(5): Xaa is C or S
RNVQXRPTQVQLSPISVLYKEIVRKKPIFLKYHYTLEDHL

SEQ ID NO: 6486 - protein, 35 aa, Artificial Sequence
  Cyclic GFR-binding peptide
  MOD_RES (1)..(33)..(35): Xaa is C or S
XVPTELSPISMLYKDENEKVVLKYHYDMVVEGXGX

SEQ ID NO: 6487 - protein, 31 aa, Artificial Sequence
  Cyclic GFR-binding peptide
  MOD_RES (5)..(6): Xaa is C or S
IPKAXXVPTELSATSMLYYDEYDKVVLRKHR

SEQ ID NO: 6488 - protein, 31 aa, Artificial Sequence
  Cyclic GFR-binding peptide
PTKLSAISVLYLDDMGVPTLKNYQEGMSVAE

SEQ ID NO: 6489 - protein, 23 aa, Artificial Sequence
  Cyclic GFR-binding peptide
ELSPISMLYKDEYDKVVLKYHYE

SEQ ID NO: 6490 - protein, 32 aa, Artificial Sequence
  Cyclic GFR-binding peptide
  MOD_RES (31)..(31): Xaa is C or S
PTELNAISMLYFDEYDKVVLKKYREMVVEGXG

SEQ ID NO: 6491 - protein, 38 aa, Artificial Sequence
  Cyclic GFR-binding peptide
  MOD_RES (2)..(2): Xaa is C or S
QXRPTQVQLNAISVLYFEIVRKKPIFLKKYRTLEDHLA

SEQ ID NO: 6492 - protein, 27 aa, Artificial Sequence
  Cyclic GFR-binding peptide
PTKLSPISVLYKDSSNNVILKYHYNMV

SEQ ID NO: 6493 - protein, 34 aa, Artificial Sequence
  Cyclic GFR-binding peptide
  MOD_RES (2)..(3)..(34): Xaa is C or S
PXXVSQDLSATSILYYIGKTPKILRKHRMIVKSX

SEQ ID NO: 6494 - protein, 25 aa, Artificial Sequence
  Cyclic GFR-binding peptide
KLSAISVLYLDDSSNVILKNYQNMV

SEQ ID NO: 6495 - protein, 30 aa, Artificial Sequence
  Cyclic GFR-binding peptide
APTKLSATSVLYYDDSSNVILRKHRNMVVR

SEQ ID NO: 6496 - protein, 41 aa, Artificial Sequence
  Cyclic GFR-binding peptide
  MOD_RES (6)..(7)..(39)..(41): Xaa is C or S
TVPKPXXAPTQLSPISVLYKDDSSNVILKYHYNMVVRAXGX

SEQ ID NO: 6497 - protein, 38 aa, Artificial Sequence
  Cyclic GFR-binding peptide
  MOD_RES (2)..(3)..(35)..(37): Xaa is C or S
AXXAPTKLNAISVLYFDSSNNVILKKYRNMVVKAXGXH

SEQ ID NO: 6498 - protein, 22 aa, Artificial Sequence
  Cyclic GFR-binding peptide
LSATSILYYVGRKPKVLRKHRM

SEQ ID NO: 6499 - protein, 25 aa, Artificial Sequence
  Cyclic GFR-binding peptide
TQLSATSVLYYDDSSNVILRKHRNM

SEQ ID NO: 6500 - protein, 25 aa, Artificial Sequence
  Cyclic GFR-binding peptide
LSPISILYKVGRKPKVLKYHYMIVR

SEQ ID NO: 6501 - protein, 27 aa, Artificial Sequence
  Cyclic GFR-binding peptide
TKLSAISVLYLDSSNNVILKNYQNMVV

SEQ ID NO: 6502 - protein, 36 aa, Artificial Sequence
  Cyclic GFR-binding peptide
  MOD_RES (2)..(3)..(35): Xaa is C or S
PXXAPTQLSATSVLYYDDSSNVILRKHRNMVVRAXG

SEQ ID NO: 6503 - protein, 23 aa, Artificial Sequence
  Cyclic GFR-binding peptide
LNAISMLYFDENEKVVLKKYRDM

SEQ ID NO: 6504 - protein, 40 aa, Artificial Sequence
  Cyclic GFR-binding peptide
  MOD_RES (4)..(5)..(37)..(39): Xaa is C or S
PKPXXAPTQLSPISVLYKDDSSNVILKYHYNMVVRAXGXH

SEQ ID NO: 6505 - protein, 32 aa, Artificial Sequence
  Cyclic GFR-binding peptide
  MOD_RES (2)..(3): Xaa is C or S
AXXAPTKLSAISVLYLDSSNNVILKNYQNMVV

SEQ ID NO: 6506 - protein, 28 aa, Artificial Sequence
  Cyclic GFR-binding peptide
LSATSVLYYDDMGVPTLRKHREGMSVAE

SEQ ID NO: 6507 - protein, 29 aa, Artificial Sequence
  Cyclic GFR-binding peptide
VPQDLNAISILYFVGRTPKVLKKYRMVVK

SEQ ID NO: 6508 - protein, 25 aa, Artificial Sequence
  Cyclic GFR-binding peptide
SPISILYKIGKTPKILKYHYMIVKS

SEQ ID NO: 6509 - protein, 29 aa, Artificial Sequence
  Cyclic GFR-binding peptide
  MOD_RES (28)..(28): Xaa is C or S
ALSAISILYLVGRKPKVLKNYQMIVRSXK

SEQ ID NO: 6510 - protein, 32 aa, Artificial Sequence
  Cyclic GFR-binding peptide
  MOD_RES (2)..(2): Xaa is C or S
TXAPTKLSAISVLYLDDSSNVILKNYQNMVVR

SEQ ID NO: 6511 - protein, 34 aa, Artificial Sequence
  Cyclic GFR-binding peptide
  MOD_RES (3)..(4): Xaa is C or S
SPXXVSQDLSPISILYKIGKTPKILKYHYMIVKS

SEQ ID NO: 6512 - protein, 38 aa, Artificial Sequence
  Cyclic GFR-binding peptide
  MOD_RES (2)..(3)..(35)..(37): Xaa is C or S
AXXVPTELSPISMLYKDENEKVVLKYHYDMVVEGXGXR

SEQ ID NO: 6513 - protein, 32 aa, Artificial Sequence
  Cyclic GFR-binding peptide
PTQVQLSPISVLYKEIVRKKPIFLKYHYTLED

SEQ ID NO: 6514 - protein, 41 aa, Artificial Sequence
  Cyclic GFR-binding peptide
  MOD_RES (5)..(5): Xaa is C or S
RNVQXRPTQVQLSATSVLYYEIVRKKPIFLRKHRTLEDHLA

SEQ ID NO: 6515 - protein, 36 aa, Artificial Sequence
  Cyclic GFR-binding peptide
  MOD_RES (2)..(2): Xaa is C or S
QXRPTQVQLSPISVLYKEIVRKKPIFLKYHYTLEDH

SEQ ID NO: 6516 - protein, 39 aa, Artificial Sequence
  Cyclic GFR-binding peptide
  MOD_RES (4)..(5)..(37)..(39): Xaa is C or S
PKPXXAPTQLSPISVLYKDDSSNVILKYHYNMVVRAXGX

SEQ ID NO: 6517 - protein, 29 aa, Artificial Sequence
  Cyclic GFR-binding peptide
  MOD_RES (27)..(29): Xaa is C or S
SAISVLYLDDSSNVILKNYQNMVVRSXGX

SEQ ID NO: 6518 - protein, 32 aa, Artificial Sequence
  Cyclic GFR-binding peptide
  MOD_RES (1)..(2): Xaa is C or S
XXVPTKLNAISVLYFDDMGVPTLKKYREGMSV

SEQ ID NO: 6519 - protein, 38 aa, Artificial Sequence
  Cyclic GFR-binding peptide
  MOD_RES (5)..(6)..(38): Xaa is C or S
VPKPXXAPTQLSPISVLYKDDSSNVILKYHYNMVVRAX

SEQ ID NO: 6520 - protein, 32 aa, Artificial Sequence
  Cyclic GFR-binding peptide
  MOD_RES (3)..(4): Xaa is C or S
KAXXAPTKLSPISVLYKDSSNNVILKYHYNMV

SEQ ID NO: 6521 - protein, 36 aa, Artificial Sequence
  Cyclic GFR-binding peptide
  MOD_RES (4)..(5)..(36): Xaa is C or S
ASPXXVSQDLNAISILYFIGKTPKILKKYRMIVKSX

SEQ ID NO: 6522 - protein, 26 aa, Artificial Sequence
  Cyclic GFR-binding peptide
PTELNAISMLYFDENEKVVLKKYRDM

SEQ ID NO: 6523 - protein, 37 aa, Artificial Sequence
  Cyclic GFR-binding peptide
  MOD_RES (3)..(4)..(35)..(37): Xaa is C or S
SPXXVPQDLSATSILYYVGRTPKVLRKHRMVVKSXKX

SEQ ID NO: 6524 - protein, 40 aa, Artificial Sequence
  Cyclic GFR-binding peptide
  MOD_RES (4)..(5)..(37)..(39): Xaa is C or S
PKAXXVPTELSPISMLYKDEYDKVVLKYHYEMVVEGXGXR

SEQ ID NO: 6525 - protein, 29 aa, Artificial Sequence
  Cyclic GFR-binding peptide
TQLSATSVLYYDDSSNVILRKHRNMVVRA

SEQ ID NO: 6526 - protein, 41 aa, Artificial Sequence
  Cyclic GFR-binding peptide
  MOD_RES (4)..(41): Xaa is C or S
NVQXRPTQVQLNAISVLYFEIVRKKPIFLKKYRTLEDHLAX

SEQ ID NO: 6527 - protein, 35 aa, Artificial Sequence
  Cyclic GFR-binding peptide
  MOD_RES (6)..(7): Xaa is C or S
KIPKAXXVPTELNAISMLYFDENEKVVLKKYRDMV

SEQ ID NO: 6528 - protein, 29 aa, Artificial Sequence
  Cyclic GFR-binding peptide
TQLSAISVLYLDDSSNVILKNYQNMVVRA

SEQ ID NO: 6529 - protein, 34 aa, Artificial Sequence
  Cyclic GFR-binding peptide
  MOD_RES (5)..(6): Xaa is C or S
SASPXXVPQDLSATSILYYVGRTPKVLRKHRMVV

SEQ ID NO: 6530 - protein, 24 aa, Artificial Sequence
  Cyclic GFR-binding peptide
SAISVLYLDDMGVPTLKNYQEGMS

SEQ ID NO: 6531 - protein, 28 aa, Artificial Sequence
  Cyclic GFR-binding peptide
  MOD_RES (2)..(3): Xaa is C or S
PXXAPTKLSPISVLYKDDSSNVILKYHY

SEQ ID NO: 6532 - protein, 33 aa, Artificial Sequence
  Cyclic GFR-binding peptide
  MOD_RES (4)..(5): Xaa is C or S
PKPXXAPTQLSPISVLYKDDSSNVILKYHYNMV

SEQ ID NO: 6533 - protein, 36 aa, Artificial Sequence
  Cyclic GFR-binding peptide
  MOD_RES (3)..(4)..(36): Xaa is C or S
KAXXVPTELSPISMLYKDEYDKVVLKYHYEMVVEGX

SEQ ID NO: 6534 - protein, 32 aa, Artificial Sequence
  Cyclic GFR-binding peptide
  MOD_RES (1)..(1): Xaa is C or S
XAPTKLSPISVLYKDSSNNVILKYHYNMVVKA

SEQ ID NO: 6535 - protein, 37 aa, Artificial Sequence
  Cyclic GFR-binding peptide
  MOD_RES (1)..(2)..(34)..(36): Xaa is C or S
XXVPTELSATSMLYYDEYDKVVLRKHREMVVEGXGXR

SEQ ID NO: 6536 - protein, 41 aa, Artificial Sequence
  Cyclic GFR-binding peptide
  MOD_RES (5)..(5): Xaa is C or S
RNVQXRPTQVQLSAISVLYLEIVRKKPIFLKNYQTLEDHLA

SEQ ID NO: 6537 - protein, 25 aa, Artificial Sequence
  Cyclic GFR-binding peptide
DLSAISILYLIGKTPKILKNYQMIV

SEQ ID NO: 6538 - protein, 26 aa, Artificial Sequence
  Cyclic GFR-binding peptide
  MOD_RES (1)..(1): Xaa is C or S
XVPTELSATSMLYYDENEKVVLRKHR

SEQ ID NO: 6539 - protein, 27 aa, Artificial Sequence
  Cyclic GFR-binding peptide
  MOD_RES (1)..(2): Xaa is C or S
XXVPQDLNAISILYFVGRTPKVLKKYR

SEQ ID NO: 6540 - protein, 35 aa, Artificial Sequence
  Cyclic GFR-binding peptide
  MOD_RES (2)..(3)..(35): Xaa is C or S
PXXAPTQLSATSVLYYDDSSNVILRKHRNMVVRAX

SEQ ID NO: 6541 - protein, 32 aa, Artificial Sequence
  Cyclic GFR-binding peptide
  MOD_RES (2)..(2): Xaa is C or S
QXRPTQVQLSATSVLYYEIVRKKPIFLRKHRT

SEQ ID NO: 6542 - protein, 31 aa, Artificial Sequence
  Cyclic GFR-binding peptide
  MOD_RES (5)..(6): Xaa is C or S
IPKAXXVPTELSPISMLYKDEYDKVVLKYHY

SEQ ID NO: 6543 - protein, 25 aa, Artificial Sequence
  Cyclic GFR-binding peptide
SAISILYLVGRKPKVLKNYQMIVRS

SEQ ID NO: 6544 - protein, 34 aa, Artificial Sequence
  Cyclic GFR-binding peptide
  MOD_RES (32)..(34): Xaa is C or S
QLNAISVLYFEIVRKKPIFLKKYRTLEDHLAXKX

SEQ ID NO: 6545 - protein, 27 aa, Artificial Sequence
  Cyclic GFR-binding peptide
VPQDLSPISILYKVGRTPKVLKYHYMV

SEQ ID NO: 6546 - protein, 32 aa, Artificial Sequence
  Cyclic GFR-binding peptide
  MOD_RES (3)..(3): Xaa is C or S
VQXRPTQVQLSATSVLYYEIVRKKPIFLRKHR

SEQ ID NO: 6547 - protein, 31 aa, Artificial Sequence
  Cyclic GFR-binding peptide
  MOD_RES (28)..(30): Xaa is C or S
DLSAISILYLVGRTPKVLKNYQMVVKSXKXS

SEQ ID NO: 6548 - protein, 33 aa, Artificial Sequence
  Cyclic GFR-binding peptide
  MOD_RES (2)..(3): Xaa is C or S
AXXVPTELNAISMLYFDENEKVVLKKYRDMVVE

SEQ ID NO: 6549 - protein, 29 aa, Artificial Sequence
  Cyclic GFR-binding peptide
TQVQLNAISVLYFEIVRKKPIFLKKYRTL

SEQ ID NO: 6550 - protein, 34 aa, Artificial Sequence
  Cyclic GFR-binding peptide
  MOD_RES (1)..(32)..(34): Xaa is C or S
XVPQALSAISILYLVGRKPKVLKNYQMIVRSXKX

SEQ ID NO: 6551 - protein, 35 aa, Artificial Sequence
  Cyclic GFR-binding peptide
  MOD_RES (6)..(7): Xaa is C or S
AVPKAXXAPTKLSAISVLYLDSSNNVILKNYQNMV

SEQ ID NO: 6552 - protein, 31 aa, Artificial Sequence
  Cyclic GFR-binding peptide
  MOD_RES (2)..(2): Xaa is C or S
QXRPTQVQLSPISVLYKEIVRKKPIFLKYHY

SEQ ID NO: 6553 - protein, 36 aa, Artificial Sequence
  Cyclic GFR-binding peptide
  MOD_RES (3)..(4): Xaa is C or S
KAXXVPTKLSATSVLYYDDMGVPTLRKHREGMSVAE

SEQ ID NO: 6554 - protein, 34 aa, Artificial Sequence
  Cyclic GFR-binding peptide
  MOD_RES (5)..(6): Xaa is C or S
IPKAXXVPTELSPISMLYKDEYDKVVLKYHYEMV

SEQ ID NO: 6555 - protein, 29 aa, Artificial Sequence
  Cyclic GFR-binding peptide
VSQDLSAISILYLIGKTPKILKNYQMIVK

SEQ ID NO: 6556 - protein, 30 aa, Artificial Sequence
  Cyclic GFR-binding peptide
  MOD_RES (29)..(29): Xaa is C or S
QDLSAISILYLIGKTPKILKNYQMIVKSXK

SEQ ID NO: 6557 - protein, 25 aa, Artificial Sequence
  Cyclic GFR-binding peptide
SAISILYLIGKTPKILKNYQMIVKS

SEQ ID NO: 6558 - protein, 35 aa, Artificial Sequence
  Cyclic GFR-binding peptide
  MOD_RES (4)..(5): Xaa is C or S
PKAXXVPTELSATSMLYYDEYDKVVLRKHREMVVE

SEQ ID NO: 6559 - protein, 37 aa, Artificial Sequence
  Cyclic GFR-binding peptide
  MOD_RES (36)..(36): Xaa is C or S
PTQVQLSATSVLYYEIVRKKPIFLRKHRTLEDHLAXK

SEQ ID NO: 6560 - protein, 26 aa, Artificial Sequence
  Cyclic GFR-binding peptide
APTQLSPISVLYKDDSSNVILKYHYN

SEQ ID NO: 6561 - protein, 25 aa, Artificial Sequence
  Cyclic GFR-binding peptide
LSAISVLYLDSSNNVILKNYQNMVV

SEQ ID NO: 6562 - protein, 28 aa, Artificial Sequence
  Cyclic GFR-binding peptide
  MOD_RES (1)..(1): Xaa is C or S
XVPTKLNAISVLYFDDMGVPTLKKYREG

SEQ ID NO: 6563 - protein, 35 aa, Artificial Sequence
  Cyclic GFR-binding peptide
  MOD_RES (34)..(34): Xaa is C or S
QVQLSPISVLYKEIVRKKPIFLKYHYTLEDHLAXK

SEQ ID NO: 6564 - protein, 29 aa, Artificial Sequence
  Cyclic GFR-binding peptide
PTQVQLSAISVLYLEIVRKKPIFLKNYQT

SEQ ID NO: 6565 - protein, 25 aa, Artificial Sequence
  Cyclic GFR-binding peptide
SAISVLYLDDMGVPTLKNYQEGMSV

SEQ ID NO: 6566 - protein, 41 aa, Artificial Sequence
  Cyclic GFR-binding peptide
  MOD_RES (2)..(39)..(41): Xaa is C or S
QXRPTQVQLSPISVLYKEIVRKKPIFLKYHYTLEDHLAXKX

SEQ ID NO: 6567 - protein, 31 aa, Artificial Sequence
  Cyclic GFR-binding peptide
  MOD_RES (1)..(1): Xaa is C or S
XVPTELNAISMLYFDENEKVVLKKYRDMVVE

SEQ ID NO: 6568 - protein, 26 aa, Artificial Sequence
  Cyclic GFR-binding peptide
VSQDLSAISILYLIGKTPKILKNYQM

SEQ ID NO: 6569 - protein, 31 aa, Artificial Sequence
  Cyclic GFR-binding peptide
  MOD_RES (4)..(5): Xaa is C or S
PKAXXVPTELNAISMLYFDENEKVVLKKYRD

SEQ ID NO: 6570 - protein, 28 aa, Artificial Sequence
  Cyclic GFR-binding peptide
  MOD_RES (1)..(2): Xaa is C or S
XXVSQDLSATSILYYIGKTPKILRKHRM

SEQ ID NO: 6571 - protein, 34 aa, Artificial Sequence
  Cyclic GFR-binding peptide
  MOD_RES (3)..(4): Xaa is C or S
KAXXVPTKLSAISVLYLDDMGVPTLKNYQEGMSV

SEQ ID NO: 6572 - protein, 33 aa, Artificial Sequence
  Cyclic GFR-binding peptide
  MOD_RES (2)..(2): Xaa is C or S
TXAPTKLSATSVLYYDDSSNVILRKHRNMVVRS

SEQ ID NO: 6573 - protein, 40 aa, Artificial Sequence
  Cyclic GFR-binding peptide
  MOD_RES (4)..(5)..(37)..(39): Xaa is C or S
PKAXXVPTELNAISMLYFDENEKVVLKKYRDMVVEGXGXR

SEQ ID NO: 6574 - protein, 34 aa, Artificial Sequence
  Cyclic GFR-binding peptide
  MOD_RES (32)..(34): Xaa is C or S
APTKLSATSVLYYDDSSNVILRKHRNMVVRSXGX

SEQ ID NO: 6575 - protein, 24 aa, Artificial Sequence
  Cyclic GFR-binding peptide
DLSAISILYLIGKTPKILKNYQMI

SEQ ID NO: 6576 - protein, 28 aa, Artificial Sequence
  Cyclic GFR-binding peptide
  MOD_RES (1)..(1): Xaa is C or S
XVPQALNAISILYFVGRKPKVLKKYRMI

SEQ ID NO: 6577 - protein, 32 aa, Artificial Sequence
  Cyclic GFR-binding peptide
  MOD_RES (3)..(4): Xaa is C or S
KPXXAPTKLSATSVLYYDDSSNVILRKHRNMV

SEQ ID NO: 6578 - protein, 33 aa, Artificial Sequence
  Cyclic GFR-binding peptide
  MOD_RES (4)..(5): Xaa is C or S
AAPXXVPQALNAISILYFVGRKPKVLKKYRMIV

SEQ ID NO: 6579 - protein, 34 aa, Artificial Sequence
  Cyclic GFR-binding peptide
  MOD_RES (6)..(7): Xaa is C or S
ASASPXXVSQDLSAISILYLIGKTPKILKNYQMI

SEQ ID NO: 6580 - protein, 32 aa, Artificial Sequence
  Cyclic GFR-binding peptide
  MOD_RES (1)..(2): Xaa is C or S
XXVSQDLSAISILYLIGKTPKILKNYQMIVKS

SEQ ID NO: 6581 - protein, 30 aa, Artificial Sequence
  Cyclic GFR-binding peptide
  MOD_RES (4)..(5): Xaa is C or S
PKAXXVPTELNAISMLYFDENEKVVLKKYR

SEQ ID NO: 6582 - protein, 42 aa, Artificial Sequence
  Cyclic GFR-binding peptide
  MOD_RES (5)..(42): Xaa is C or S
RNVQXRPTQVQLSPISVLYKEIVRKKPIFLKYHYTLEDHLAX

SEQ ID NO: 6583 - protein, 25 aa, Artificial Sequence
  Cyclic GFR-binding peptide
KLSAISVLYLDSSNNVILKNYQNMV

SEQ ID NO: 6584 - protein, 27 aa, Artificial Sequence
  Cyclic GFR-binding peptide
TELSATSMLYYDEYDKVVLRKHREMVV

SEQ ID NO: 6585 - protein, 38 aa, Artificial Sequence
  Cyclic GFR-binding peptide
  MOD_RES (6)..(7)..(38): Xaa is C or S
ASAAPXXVPQALSAISILYLVGRKPKVLKNYQMIVRSX

SEQ ID NO: 6586 - protein, 26 aa, Artificial Sequence
  Cyclic GFR-binding peptide
ALSATSILYYVGRKPKVLRKHRMIVR

SEQ ID NO: 6587 - protein, 26 aa, Artificial Sequence
  Cyclic GFR-binding peptide
QLSAISVLYLEIVRKKPIFLKNYQTL

SEQ ID NO: 6588 - protein, 35 aa, Artificial Sequence
  Cyclic GFR-binding peptide
  MOD_RES (5)..(5): Xaa is C or S
RNVQXRPTQVQLSATSVLYYEIVRKKPIFLRKHRT

SEQ ID NO: 6589 - protein, 27 aa, Artificial Sequence
  Cyclic GFR-binding peptide
  MOD_RES (1)..(2): Xaa is C or S
XXVPQDLSPISILYKVGRTPKVLKYHY

SEQ ID NO: 6590 - protein, 32 aa, Artificial Sequence
  Cyclic GFR-binding peptide
  MOD_RES (1)..(32): Xaa is C or S
XVPQALSAISILYLVGRKPKVLKNYQMIVRSX

SEQ ID NO: 6591 - protein, 31 aa, Artificial Sequence
  Cyclic GFR-binding peptide
  MOD_RES (5)..(6): Xaa is C or S
SASPXXVSQDLSPISILYKIGKTPKILKYHY

SEQ ID NO: 6592 - protein, 26 aa, Artificial Sequence
  Cyclic GFR-binding peptide
VQLNAISVLYFEIVRKKPIFLKKYRT

SEQ ID NO: 6593 - protein, 27 aa, Artificial Sequence
  Cyclic GFR-binding peptide
PTKLSAISVLYLDDSSNVILKNYQNMV

SEQ ID NO: 6594 - protein, 37 aa, Artificial Sequence
  Cyclic GFR-binding peptide
  MOD_RES (5)..(6): Xaa is C or S
VPKPXXAPTKLSPISVLYKDDSSNVILKYHYNMVVRS

SEQ ID NO: 6595 - protein, 30 aa, Artificial Sequence
  Cyclic GFR-binding peptide
  MOD_RES (30)..(30): Xaa is C or S
SQDLSAISILYLIGKTPKILKNYQMIVKSX

SEQ ID NO: 6596 - protein, 31 aa, Artificial Sequence
  Cyclic GFR-binding peptide
  MOD_RES (31)..(31): Xaa is C or S
VPQDLSAISILYLVGRTPKVLKNYQMVVKSX

SEQ ID NO: 6597 - protein, 33 aa, Artificial Sequence
  Cyclic GFR-binding peptide
  MOD_RES (6)..(7): Xaa is C or S
SIPKAXXVPTELSATSMLYYDEYDKVVLRKHRE

SEQ ID NO: 6598 - protein, 40 aa, Artificial Sequence
  Cyclic GFR-binding peptide
  MOD_RES (6)..(7)..(38)..(40): Xaa is C or S
ASAAPXXVPQALSPISILYKVGRKPKVLKYHYMIVRSXKX

SEQ ID NO: 6599 - protein, 35 aa, Artificial Sequence
  Cyclic GFR-binding peptide
  MOD_RES (4)..(5): Xaa is C or S
PKAXXVPTELSPISMLYKDEYDKVVLKYHYEMVVE

SEQ ID NO: 6600 - protein, 33 aa, Artificial Sequence
  Cyclic GFR-binding peptide
  MOD_RES (4)..(5): Xaa is C or S
PKPXXAPTQLSATSVLYYDDSSNVILRKHRNMV

SEQ ID NO: 6601 - protein, 37 aa, Artificial Sequence
  Cyclic GFR-binding peptide
  MOD_RES (2)..(3)..(35)..(37): Xaa is C or S
PXXAPTQLSPISVLYKDDSSNVILKYHYNMVVRAXGX

SEQ ID NO: 6602 - protein, 25 aa, Artificial Sequence
  Cyclic GFR-binding peptide
LNAISILYFIGKTPKILKKYRMIVK

SEQ ID NO: 6603 - protein, 38 aa, Artificial Sequence
  Cyclic GFR-binding peptide
  MOD_RES (6)..(7): Xaa is C or S
YVPKPXXAPTKLSAISVLYLDDSSNVILKNYQNMVVRS

SEQ ID NO: 6604 - protein, 39 aa, Artificial Sequence
  Cyclic GFR-binding peptide
  MOD_RES (4)..(5)..(36)..(38): Xaa is C or S
ASPXXVPQDLNAISILYFVGRTPKVLKKYRMVVKSXKXS

SEQ ID NO: 6605 - protein, 22 aa, Artificial Sequence
  Cyclic GFR-binding peptide
SATSILYYIGKTPKILRKHRMI

SEQ ID NO: 6606 - protein, 31 aa, Artificial Sequence
  Cyclic GFR-binding peptide
  MOD_RES (4)..(5): Xaa is C or S
GKAXXVPTKLSATSVLYYDDMGVPTLRKHRE

SEQ ID NO: 6607 - protein, 32 aa, Artificial Sequence
  Cyclic GFR-binding peptide
VQLSPISVLYKEIVRKKPIFLKYHYTLEDHLA

SEQ ID NO: 6608 - protein, 23 aa, Artificial Sequence
  Cyclic GFR-binding peptide
LSPISILYKVGRKPKVLKYHYMI

SEQ ID NO: 6609 - protein, 40 aa, Artificial Sequence
  Cyclic GFR-binding peptide
  MOD_RES (5)..(6)..(37)..(39): Xaa is C or S
SASPXXVPQDLSPISILYKVGRTPKVLKYHYMVVKSXKXS

SEQ ID NO: 6610 - protein, 31 aa, Artificial Sequence
  Cyclic GFR-binding peptide
  MOD_RES (29)..(31): Xaa is C or S
QDLSAISILYLVGRTPKVLKNYQMVVKSXKX

SEQ ID NO: 6611 - protein, 28 aa, Artificial Sequence
  Cyclic GFR-binding peptide
PTKLNAISVLYFDDMGVPTLKKYREGMS

SEQ ID NO: 6612 - protein, 40 aa, Artificial Sequence
  Cyclic GFR-binding peptide
  MOD_RES (7)..(39): Xaa is C or S
HVTKPTXAPTKLSAISVLYLDDSSNVILKNYQNMVVRSXG

SEQ ID NO: 6613 - protein, 33 aa, Artificial Sequence
  Cyclic GFR-binding peptide
TQVQLSAISVLYLEIVRKKPIFLKNYQTLEDHL

SEQ ID NO: 6614 - protein, 34 aa, Artificial Sequence
  Cyclic GFR-binding peptide
  MOD_RES (2)..(3)..(34): Xaa is C or S
PXXVPQALSATSILYYVGRKPKVLRKHRMIVRSX

SEQ ID NO: 6615 - protein, 29 aa, Artificial Sequence
  Cyclic GFR-binding peptide
TQVQLSATSVLYYEIVRKKPIFLRKHRTL

SEQ ID NO: 6616 - protein, 38 aa, Artificial Sequence
  Cyclic GFR-binding peptide
  MOD_RES (4)..(5)..(37): Xaa is C or S
PKAXXVPTELSPISMLYKDENEKVVLKYHYDMVVEGXG

SEQ ID NO: 6617 - protein, 34 aa, Artificial Sequence
  Cyclic GFR-binding peptide
  MOD_RES (32)..(34): Xaa is C or S
APTKLSAISVLYLDDSSNVILKNYQNMVVRSXGX

SEQ ID NO: 6618 - protein, 33 aa, Artificial Sequence
  Cyclic GFR-binding peptide
PTQVQLSPISVLYKEIVRKKPIFLKYHYTLEDH

SEQ ID NO: 6619 - protein, 38 aa, Artificial Sequence
  Cyclic GFR-binding peptide
  MOD_RES (3)..(4)..(35)..(37): Xaa is C or S
SPXXVPQDLSAISILYLVGRTPKVLKNYQMVVKSXKXS

SEQ ID NO: 6620 - protein, 20 aa, Artificial Sequence
  Cyclic GFR-binding peptide
SPISILYKVGRTPKVLKYHY

SEQ ID NO: 6621 - protein, 34 aa, Artificial Sequence
  Cyclic GFR-binding peptide
  MOD_RES (31)..(33): Xaa is C or S
VSQDLSPISILYKIGKTPKILKYHYMIVKSXKXS

SEQ ID NO: 6622 - protein, 29 aa, Artificial Sequence
  Cyclic GFR-binding peptide
  MOD_RES (28)..(28): Xaa is C or S
DLSATSILYYVGRTPKVLRKHRMVVKSXK

SEQ ID NO: 6623 - protein, 36 aa, Artificial Sequence
  Cyclic GFR-binding peptide
  MOD_RES (5)..(6): Xaa is C or S
VGKAXXVPTKLSAISVLYLDDMGVPTLKNYQEGMSV

SEQ ID NO: 6624 - protein, 30 aa, Artificial Sequence
  Cyclic GFR-binding peptide
  MOD_RES (5)..(5): Xaa is C or S
TKPTXAPTKLSPISVLYKDDSSNVILKYHY

SEQ ID NO: 6625 - protein, 32 aa, Artificial Sequence
  Cyclic GFR-binding peptide
  MOD_RES (2)..(2): Xaa is C or S
TXAPTKLSPISVLYKDDSSNVILKYHYNMVVR

SEQ ID NO: 6626 - protein, 29 aa, Artificial Sequence
  Cyclic GFR-binding peptide
  MOD_RES (29)..(29): Xaa is C or S
KLSPISVLYKDDSSNVILKYHYNMVVRSX

SEQ ID NO: 6627 - protein, 31 aa, Artificial Sequence
  Cyclic GFR-binding peptide
  MOD_RES (30)..(30): Xaa is C or S
KLSAISVLYLDDMGVPTLKNYQEGMSVAEXG

SEQ ID NO: 6628 - protein, 25 aa, Artificial Sequence
  Cyclic GFR-binding peptide
ELNAISMLYFDENEKVVLKKYRDMV

SEQ ID NO: 6629 - protein, 29 aa, Artificial Sequence
  Cyclic GFR-binding peptide
VQLSAISVLYLEIVRKKPIFLKNYQTLED

SEQ ID NO: 6630 - protein, 35 aa, Artificial Sequence
  Cyclic GFR-binding peptide
  MOD_RES (6)..(7): Xaa is C or S
ASASPXXVSQDLNAISILYFIGKTPKILKKYRMIV

SEQ ID NO: 6631 - protein, 38 aa, Artificial Sequence
  Cyclic GFR-binding peptide
  MOD_RES (3)..(4)..(37): Xaa is C or S
KAXXVPTKLSAISVLYLDDMGVPTLKNYQEGMSVAEXG

SEQ ID NO: 6632 - protein, 39 aa, Artificial Sequence
  Cyclic GFR-binding peptide
  MOD_RES (6)..(7)..(39): Xaa is C or S
TVPKPXXAPTQLSPISVLYKDDSSNVILKYHYNMVVRAX

SEQ ID NO: 6633 - protein, 29 aa, Artificial Sequence
  Cyclic GFR-binding peptide
RPTQVQLSATSVLYYEIVRKKPIFLRKHR

SEQ ID NO: 6634 - protein, 32 aa, Artificial Sequence
  Cyclic GFR-binding peptide
  MOD_RES (30)..(32): Xaa is C or S
TQLSPISVLYKDDSSNVILKYHYNMVVRAXGX

SEQ ID NO: 6635 - protein, 35 aa, Artificial Sequence
  Cyclic GFR-binding peptide
  MOD_RES (5)..(6): Xaa is C or S
SASPXXVPQDLSPISILYKVGRTPKVLKYHYMVVK

SEQ ID NO: 6636 - protein, 32 aa, Artificial Sequence
  Cyclic GFR-binding peptide
  MOD_RES (4)..(5): Xaa is C or S
PKPXXAPTKLSATSVLYYDDSSNVILRKHRNM

SEQ ID NO: 6637 - protein, 31 aa, Artificial Sequence
  Cyclic GFR-binding peptide
  MOD_RES (30)..(30): Xaa is C or S
TKLSPISVLYKDDSSNVILKYHYNMVVRSXG

SEQ ID NO: 6638 - protein, 23 aa, Artificial Sequence
  Cyclic GFR-binding peptide
LSATSILYYVGRKPKVLRKHRMI

SEQ ID NO: 6639 - protein, 38 aa, Artificial Sequence
  Cyclic GFR-binding peptide
  MOD_RES (3)..(4)..(36)..(38): Xaa is C or S
KAXXVPTELSPISMLYKDEYDKVVLKYHYEMVVEGXGX

SEQ ID NO: 6640 - protein, 28 aa, Artificial Sequence
  Cyclic GFR-binding peptide
ELSPISMLYKDEYDKVVLKYHYEMVVEG

SEQ ID NO: 6641 - protein, 33 aa, Artificial Sequence
  Cyclic GFR-binding peptide
  MOD_RES (2)..(2): Xaa is C or S
TXAPTKLSAISVLYLDDSSNVILKNYQNMVVRS

SEQ ID NO: 6642 - protein, 23 aa, Artificial Sequence
  Cyclic GFR-binding peptide
SAISVLYLEIVRKKPIFLKNYQT

SEQ ID NO: 6643 - protein, 31 aa, Artificial Sequence
  Cyclic GFR-binding peptide
  MOD_RES (5)..(6): Xaa is C or S
SASPXXVPQDLSAISILYLVGRTPKVLKNYQ

SEQ ID NO: 6644 - protein, 24 aa, Artificial Sequence
  Cyclic GFR-binding peptide
QDLSATSILYYIGKTPKILRKHRM

SEQ ID NO: 6645 - protein, 22 aa, Artificial Sequence
  Cyclic GFR-binding peptide
SPISILYKIGKTPKILKYHYMI

SEQ ID NO: 6646 - protein, 31 aa, Artificial Sequence
  Cyclic GFR-binding peptide
  MOD_RES (5)..(6): Xaa is C or S
SASPXXVPQDLSATSILYYVGRTPKVLRKHR

SEQ ID NO: 6647 - protein, 32 aa, Artificial Sequence
  Cyclic GFR-binding peptide
  MOD_RES (31)..(31): Xaa is C or S
VPQALSATSILYYVGRKPKVLRKHRMIVRSXK

SEQ ID NO: 6648 - protein, 29 aa, Artificial Sequence
  Cyclic GFR-binding peptide
  MOD_RES (3)..(4): Xaa is C or S
KAXXAPTKLNAISVLYFDSSNNVILKKYR

SEQ ID NO: 6649 - protein, 23 aa, Artificial Sequence
  Cyclic GFR-binding peptide
DLSAISILYLIGKTPKILKNYQM

SEQ ID NO: 6650 - protein, 25 aa, Artificial Sequence
  Cyclic GFR-binding peptide
TQLSPISVLYKDDSSNVILKYHYNM

SEQ ID NO: 6651 - protein, 39 aa, Artificial Sequence
  Cyclic GFR-binding peptide
  MOD_RES (5)..(6)..(37)..(39): Xaa is C or S
SASPXXVSQDLSAISILYLIGKTPKILKNYQMIVKSXKX

SEQ ID NO: 6652 - protein, 30 aa, Artificial Sequence
  Cyclic GFR-binding peptide
  MOD_RES (28)..(30): Xaa is C or S
LSPISVLYKDSSNNVILKYHYNMVVKAXGX

SEQ ID NO: 6653 - protein, 32 aa, Artificial Sequence
  Cyclic GFR-binding peptide
  MOD_RES (6)..(7): Xaa is C or S
SIPKAXXVPTELNAISMLYFDEYDKVVLKKYR

SEQ ID NO: 6654 - protein, 27 aa, Artificial Sequence
  Cyclic GFR-binding peptide
  MOD_RES (27)..(27): Xaa is C or S
LSPISILYKIGKTPKILKYHYMIVKSX

SEQ ID NO: 6655 - protein, 28 aa, Artificial Sequence
  Cyclic GFR-binding peptide
VPTKLNAISVLYFDDMGVPTLKKYREGM

SEQ ID NO: 6656 - protein, 28 aa, Artificial Sequence
  Cyclic GFR-binding peptide
  MOD_RES (28)..(28): Xaa is C or S
DLSATSILYYVGRTPKVLRKHRMVVKSX

SEQ ID NO: 6657 - protein, 28 aa, Artificial Sequence
  Cyclic GFR-binding peptide
  MOD_RES (1)..(2): Xaa is C or S
XXVSQDLNAISILYFIGKTPKILKKYRM

SEQ ID NO: 6658 - protein, 33 aa, Artificial Sequence
  Cyclic GFR-binding peptide
PTQVQLNAISVLYFEIVRKKPIFLKKYRTLEDH

SEQ ID NO: 6659 - protein, 24 aa, Artificial Sequence
  Cyclic GFR-binding peptide
KLSPISVLYKDSSNNVILKYHYNM

SEQ ID NO: 6660 - protein, 35 aa, Artificial Sequence
  Cyclic GFR-binding peptide
  MOD_RES (2)..(34): Xaa is C or S
TXAPTKLSATSVLYYDDSSNVILRKHRNMVVRSXG

SEQ ID NO: 6661 - protein, 30 aa, Artificial Sequence
  Cyclic GFR-binding peptide
PTKLNAISVLYFDSSNNVILKKYRNMVVKA

SEQ ID NO: 6662 - protein, 36 aa, Artificial Sequence
  Cyclic GFR-binding peptide
  MOD_RES (3)..(4)..(36): Xaa is C or S
KPXXAPTQLSPISVLYKDDSSNVILKYHYNMVVRAX

SEQ ID NO: 6663 - protein, 28 aa, Artificial Sequence
  Cyclic GFR-binding peptide
TELNAISMLYFDEYDKVVLKKYREMVVE

SEQ ID NO: 6664 - protein, 28 aa, Artificial Sequence
  Cyclic GFR-binding peptide
NAISVLYFEIVRKKPIFLKKYRTLEDHL

SEQ ID NO: 6665 - protein, 34 aa, Artificial Sequence
  Cyclic GFR-binding peptide
  MOD_RES (2)..(3): Xaa is C or S
AXXVPTELSATSMLYYDEYDKVVLRKHREMVVEG

SEQ ID NO: 6666 - protein, 34 aa, Artificial Sequence
  Cyclic GFR-binding peptide
  MOD_RES (5)..(6): Xaa is C or S
VPKPXXAPTQLSAISVLYLDDSSNVILKNYQNMV

SEQ ID NO: 6667 - protein, 29 aa, Artificial Sequence
  Cyclic GFR-binding peptide
  MOD_RES (29)..(29): Xaa is C or S
ELSPISMLYKDENEKVVLKYHYDMVVEGX

SEQ ID NO: 6668 - protein, 36 aa, Artificial Sequence
  Cyclic GFR-binding peptide
  MOD_RES (6)..(7): Xaa is C or S
TVPKPXXAPTQLSPISVLYKDDSSNVILKYHYNMVV

SEQ ID NO: 6669 - protein, 39 aa, Artificial Sequence
  Cyclic GFR-binding peptide
  MOD_RES (5)..(5): Xaa is C or S
RNVQXRPTQVQLSPISVLYKEIVRKKPIFLKYHYTLEDH

SEQ ID NO: 6670 - protein, 33 aa, Artificial Sequence
  Cyclic GFR-binding peptide
  MOD_RES (32)..(32): Xaa is C or S
APTKLNAISVLYFDSSNNVILKKYRNMVVKAXG

SEQ ID NO: 6671 - protein, 27 aa, Artificial Sequence
  Cyclic GFR-binding peptide
  MOD_RES (26)..(26): Xaa is C or S
SATSILYYIGKTPKILRKHRMIVKSXK

SEQ ID NO: 6672 - protein, 36 aa, Artificial Sequence
  Cyclic GFR-binding peptide
  MOD_RES (1)..(2)..(34)..(36): Xaa is C or S
XXAPTKLNAISVLYFDSSNNVILKKYRNMVVKAXGX

SEQ ID NO: 6673 - protein, 30 aa, Artificial Sequence
  Cyclic GFR-binding peptide
  MOD_RES (27)..(29): Xaa is C or S
SATSMLYYDEYDKVVLRKHREMVVEGXGXR

SEQ ID NO: 6674 - protein, 28 aa, Artificial Sequence
  Cyclic GFR-binding peptide
TKLSPISVLYKDSSNNVILKYHYNMVVK

SEQ ID NO: 6675 - protein, 37 aa, Artificial Sequence
  Cyclic GFR-binding peptide
  MOD_RES (4)..(5)..(36): Xaa is C or S
ASPXXVSQDLNAISILYFIGKTPKILKKYRMIVKSXK

SEQ ID NO: 6676 - protein, 33 aa, Artificial Sequence
  Cyclic GFR-binding peptide
RPTQVQLSAISVLYLEIVRKKPIFLKNYQTLED

SEQ ID NO: 6677 - protein, 26 aa, Artificial Sequence
  Cyclic GFR-binding peptide
  MOD_RES (26)..(26): Xaa is C or S
NAISILYFVGRTPKVLKKYRMVVKSX

SEQ ID NO: 6678 - protein, 41 aa, Artificial Sequence
  Cyclic GFR-binding peptide
  MOD_RES (5)..(6)..(38)..(40): Xaa is C or S
IPKAXXVPTELNAISMLYFDENEKVVLKKYRDMVVEGXGXR

SEQ ID NO: 6679 - protein, 28 aa, Artificial Sequence
  Cyclic GFR-binding peptide
PTKLSPISVLYKDSSNNVILKYHYNMVV

SEQ ID NO: 6680 - protein, 35 aa, Artificial Sequence
  Cyclic GFR-binding peptide
  MOD_RES (1)..(2)..(34): Xaa is C or S
XXVPTELSATSMLYYDENEKVVLRKHRDMVVEGXG

SEQ ID NO: 6681 - protein, 35 aa, Artificial Sequence
  Cyclic GFR-binding peptide
  MOD_RES (3)..(4): Xaa is C or S
KPXXAPTQLSATSVLYYDDSSNVILRKHRNMVVRA

SEQ ID NO: 6682 - protein, 24 aa, Artificial Sequence
  Cyclic GFR-binding peptide
LNAISILYFIGKTPKILKKYRMIV

SEQ ID NO: 6683 - protein, 25 aa, Artificial Sequence
  Cyclic GFR-binding peptide
KLSPISVLYKDSSNNVILKYHYNMV

SEQ ID NO: 6684 - protein, 34 aa, Artificial Sequence
  Cyclic GFR-binding peptide
  MOD_RES (2)..(34): Xaa is C or S
TXAPTKLSAISVLYLDDSSNVILKNYQNMVVRSX

SEQ ID NO: 6685 - protein, 28 aa, Artificial Sequence
  Cyclic GFR-binding peptide
  MOD_RES (27)..(27): Xaa is C or S
LSAISILYLVGRTPKVLKNYQMVVKSXK

SEQ ID NO: 6686 - protein, 35 aa, Artificial Sequence
  Cyclic GFR-binding peptide
  MOD_RES (1)..(2)..(34): Xaa is C or S
XXAPTKLSPISVLYKDDSSNVILKYHYNMVVRSXG

SEQ ID NO: 6687 - protein, 33 aa, Artificial Sequence
  Cyclic GFR-binding peptide
  MOD_RES (2)..(3): Xaa is C or S
PXXAPTQLSPISVLYKDDSSNVILKYHYNMVVR

SEQ ID NO: 6688 - protein, 36 aa, Artificial Sequence
  Cyclic GFR-binding peptide
  MOD_RES (4)..(5): Xaa is C or S
PKAXXVPTELNAISMLYFDEYDKVVLKKYREMVVEG

SEQ ID NO: 6689 - protein, 23 aa, Artificial Sequence
  Cyclic GFR-binding peptide
TKLSATSVLYYDDMGVPTLRKHR

SEQ ID NO: 6690 - protein, 36 aa, Artificial Sequence
  Cyclic GFR-binding peptide
  MOD_RES (6)..(7): Xaa is C or S
TVPKPXXAPTQLSATSVLYYDDSSNVILRKHRNMVV

SEQ ID NO: 6691 - protein, 27 aa, Artificial Sequence
  Cyclic GFR-binding peptide
VPTKLSAISVLYLDDMGVPTLKNYQEG

SEQ ID NO: 6692 - protein, 27 aa, Artificial Sequence
  Cyclic GFR-binding peptide
PQALSPISILYKVGRKPKVLKYHYMIV

SEQ ID NO: 6693 - protein, 34 aa, Artificial Sequence
  Cyclic GFR-binding peptide
  MOD_RES (31)..(33): Xaa is C or S
VPQALNAISILYFVGRKPKVLKKYRMIVRSXKXS

SEQ ID NO: 6694 - protein, 38 aa, Artificial Sequence
  Cyclic GFR-binding peptide
  MOD_RES (5)..(6): Xaa is C or S
VGKAXXVPTKLSAISVLYLDDMGVPTLKNYQEGMSVAE

SEQ ID NO: 6695 - protein, 29 aa, Artificial Sequence
  Cyclic GFR-binding peptide
PTKLSAISVLYLDSSNNVILKNYQNMVVK

SEQ ID NO: 6696 - protein, 28 aa, Artificial Sequence
  Cyclic GFR-binding peptide
  MOD_RES (27)..(27): Xaa is C or S
LSPISILYKVGRKPKVLKYHYMIVRSXK

SEQ ID NO: 6697 - protein, 38 aa, Artificial Sequence
  Cyclic GFR-binding peptide
  MOD_RES (3)..(4)..(36)..(38): Xaa is C or S
KAXXAPTKLSPISVLYKDSSNNVILKYHYNMVVKAXGX

SEQ ID NO: 6698 - protein, 36 aa, Artificial Sequence
  Cyclic GFR-binding peptide
  MOD_RES (1)..(33)..(35): Xaa is C or S
XVPTELSATSMLYYDEYDKVVLRKHREMVVEGXGXR

SEQ ID NO: 6699 - protein, 31 aa, Artificial Sequence
  Cyclic GFR-binding peptide
  MOD_RES (29)..(31): Xaa is C or S
LSAISVLYLDDMGVPTLKNYQEGMSVAEXGX

SEQ ID NO: 6700 - protein, 33 aa, Artificial Sequence
  Cyclic GFR-binding peptide
  MOD_RES (6)..(7): Xaa is C or S
TVPKPXXAPTQLSPISVLYKDDSSNVILKYHYN

SEQ ID NO: 6701 - protein, 30 aa, Artificial Sequence
  Cyclic GFR-binding peptide
  MOD_RES (1)..(1): Xaa is C or S
XAPTKLSATSVLYYDDSSNVILRKHRNMVV

SEQ ID NO: 6702 - protein, 32 aa, Artificial Sequence
  Cyclic GFR-binding peptide
  MOD_RES (4)..(5): Xaa is C or S
PKPXXAPTKLSPISVLYKDDSSNVILKYHYNM

SEQ ID NO: 6703 - protein, 40 aa, Artificial Sequence
  Cyclic GFR-binding peptide
  MOD_RES (5)..(6)..(38)..(40): Xaa is C or S
IPKAXXVPTELSPISMLYKDENEKVVLKYHYDMVVEGXGX

SEQ ID NO: 6704 - protein, 26 aa, Artificial Sequence
  Cyclic GFR-binding peptide
VPQDLSAISILYLVGRTPKVLKNYQM

SEQ ID NO: 6705 - protein, 34 aa, Artificial Sequence
  Cyclic GFR-binding peptide
  MOD_RES (2)..(3): Xaa is C or S
PXXAPTQLSPISVLYKDDSSNVILKYHYNMVVRA

SEQ ID NO: 6706 - protein, 27 aa, Artificial Sequence
  Cyclic GFR-binding peptide
  MOD_RES (1)..(1): Xaa is C or S
XVSQDLSAISILYLIGKTPKILKNYQM

SEQ ID NO: 6707 - protein, 27 aa, Artificial Sequence
  Cyclic GFR-binding peptide
QLSPISVLYKEIVRKKPIFLKYHYTLE

SEQ ID NO: 6708 - protein, 27 aa, Artificial Sequence
  Cyclic GFR-binding peptide
  MOD_RES (27)..(27): Xaa is C or S
SATSVLYYDDSSNVILRKHRNMVVRAX

SEQ ID NO: 6709 - protein, 39 aa, Artificial Sequence
  Cyclic GFR-binding peptide
  MOD_RES (4)..(5)..(38): Xaa is C or S
GKAXXVPTKLSATSVLYYDDMGVPTLRKHREGMSVAEXG

SEQ ID NO: 6710 - protein, 29 aa, Artificial Sequence
  Cyclic GFR-binding peptide
  MOD_RES (1)..(2): Xaa is C or S
XXVPQALNAISILYFVGRKPKVLKKYRMI

SEQ ID NO: 6711 - protein, 35 aa, Artificial Sequence
  Cyclic GFR-binding peptide
  MOD_RES (2)..(3)..(35): Xaa is C or S
AXXVPTELNAISMLYFDEYDKVVLKKYREMVVEGX

SEQ ID NO: 6712 - protein, 27 aa, Artificial Sequence
  Cyclic GFR-binding peptide
QDLNAISILYFIGKTPKILKKYRMIVK

SEQ ID NO: 6713 - protein, 39 aa, Artificial Sequence
  Cyclic GFR-binding peptide
  MOD_RES (5)..(6)..(37)..(39): Xaa is C or S
SASPXXVPQDLSAISILYLVGRTPKVLKNYQMVVKSXKX

SEQ ID NO: 6714 - protein, 25 aa, Artificial Sequence
  Cyclic GFR-binding peptide
DLSATSILYYIGKTPKILRKHRMIV

SEQ ID NO: 6715 - protein, 32 aa, Artificial Sequence
  Cyclic GFR-binding peptide
  MOD_RES (6)..(6): Xaa is C or S
VTKPTXAPTKLSATSVLYYDDSSNVILRKHRN

SEQ ID NO: 6716 - protein, 36 aa, Artificial Sequence
  Cyclic GFR-binding peptide
  MOD_RES (6)..(7): Xaa is C or S
KIPKAXXVPTELNAISMLYFDENEKVVLKKYRDMVV

SEQ ID NO: 6717 - protein, 31 aa, Artificial Sequence
  Cyclic GFR-binding peptide
  MOD_RES (31)..(31): Xaa is C or S
PTELSPISMLYKDEYDKVVLKYHYEMVVEGX

SEQ ID NO: 6718 - protein, 31 aa, Artificial Sequence
  Cyclic GFR-binding peptide
  MOD_RES (1)..(2): Xaa is C or S
XXVPQALSATSILYYVGRKPKVLRKHRMIVR

SEQ ID NO: 6719 - protein, 30 aa, Artificial Sequence
  Cyclic GFR-binding peptide
  MOD_RES (29)..(29): Xaa is C or S
QALSAISILYLVGRKPKVLKNYQMIVRSXK

SEQ ID NO: 6720 - protein, 34 aa, Artificial Sequence
  Cyclic GFR-binding peptide
PTQVQLNAISVLYFEIVRKKPIFLKKYRTLEDHL

SEQ ID NO: 6721 - protein, 31 aa, Artificial Sequence
  Cyclic GFR-binding peptide
  MOD_RES (4)..(5): Xaa is C or S
AAPXXVPQALSAISILYLVGRKPKVLKNYQM

SEQ ID NO: 6722 - protein, 36 aa, Artificial Sequence
  Cyclic GFR-binding peptide
  MOD_RES (4)..(5)..(36): Xaa is C or S
ASPXXVSQDLSAISILYLIGKTPKILKNYQMIVKSX

SEQ ID NO: 6723 - protein, 38 aa, Artificial Sequence
  Cyclic GFR-binding peptide
  MOD_RES (3)..(4)..(35)..(37): Xaa is C or S
SPXXVSQDLSPISILYKIGKTPKILKYHYMIVKSXKXS

SEQ ID NO: 6724 - protein, 43 aa, Artificial Sequence
  Cyclic GFR-binding peptide
  MOD_RES (5)..(42): Xaa is C or S
RNVQXRPTQVQLNAISVLYFEIVRKKPIFLKKYRTLEDHLAXK

SEQ ID NO: 6725 - protein, 30 aa, Artificial Sequence
  Cyclic GFR-binding peptide
  MOD_RES (3)..(4): Xaa is C or S
APXXVPQALSATSILYYVGRKPKVLRKHRM

SEQ ID NO: 6726 - protein, 33 aa, Artificial Sequence
  Cyclic GFR-binding peptide
  MOD_RES (2)..(3): Xaa is C or S
PXXAPTQLSAISVLYLDDSSNVILKNYQNMVVR

SEQ ID NO: 6727 - protein, 33 aa, Artificial Sequence
  Cyclic GFR-binding peptide
  MOD_RES (6)..(7): Xaa is C or S
ASAAPXXVPQALNAISILYFVGRKPKVLKKYRM

SEQ ID NO: 6728 - protein, 29 aa, Artificial Sequence
  Cyclic GFR-binding peptide
TKLSATSVLYYDDMGVPTLRKHREGMSVA

SEQ ID NO: 6729 - protein, 30 aa, Artificial Sequence
  Cyclic GFR-binding peptide
  MOD_RES (27)..(29): Xaa is C or S
LSATSILYYVGRTPKVLRKHRMVVKSXKXS

SEQ ID NO: 6730 - protein, 42 aa, Artificial Sequence
  Cyclic GFR-binding peptide
  MOD_RES (7)..(39)..(41): Xaa is C or S
HVTKPTXAPTKLSAISVLYLDDSSNVILKNYQNMVVRSXGXH

SEQ ID NO: 6731 - protein, 36 aa, Artificial Sequence
  Cyclic GFR-binding peptide
  MOD_RES (1)..(1): Xaa is C or S
XRPTQVQLSATSVLYYEIVRKKPIFLRKHRTLEDHL

SEQ ID NO: 6732 - protein, 32 aa, Artificial Sequence
  Cyclic GFR-binding peptide
  MOD_RES (30)..(32): Xaa is C or S
TELNAISMLYFDEYDKVVLKKYREMVVEGXGX

SEQ ID NO: 6733 - protein, 32 aa, Artificial Sequence
  Cyclic GFR-binding peptide
  MOD_RES (2)..(3): Xaa is C or S
PXXVPQALSAISILYLVGRKPKVLKNYQMIVR

SEQ ID NO: 6734 - protein, 27 aa, Artificial Sequence
  Cyclic GFR-binding peptide
VPQALSAISILYLVGRKPKVLKNYQMI

SEQ ID NO: 6735 - protein, 30 aa, Artificial Sequence
  Cyclic GFR-binding peptide
  MOD_RES (3)..(4): Xaa is C or S
KPXXAPTKLSAISVLYLDDSSNVILKNYQN

SEQ ID NO: 6736 - protein, 39 aa, Artificial Sequence
  Cyclic GFR-binding peptide
  MOD_RES (2)..(39): Xaa is C or S
QXRPTQVQLNAISVLYFEIVRKKPIFLKKYRTLEDHLAX

SEQ ID NO: 6737 - protein, 34 aa, Artificial Sequence
  Cyclic GFR-binding peptide
  MOD_RES (5)..(6): Xaa is C or S
SASPXXVPQDLSAISILYLVGRTPKVLKNYQMVV

SEQ ID NO: 6738 - protein, 25 aa, Artificial Sequence
  Cyclic GFR-binding peptide
VQLSAISVLYLEIVRKKPIFLKNYQ

SEQ ID NO: 6739 - protein, 29 aa, Artificial Sequence
  Cyclic GFR-binding peptide
  MOD_RES (29)..(29): Xaa is C or S
LNAISVLYFDDMGVPTLKKYREGMSVAEX

SEQ ID NO: 6740 - protein, 34 aa, Artificial Sequence
  Cyclic GFR-binding peptide
  MOD_RES (31)..(33): Xaa is C or S
VPQDLSATSILYYVGRTPKVLRKHRMVVKSXKXS

SEQ ID NO: 6741 - protein, 29 aa, Artificial Sequence
  Cyclic GFR-binding peptide
APTQLSAISVLYLDDSSNVILKNYQNMVV

SEQ ID NO: 6742 - protein, 32 aa, Artificial Sequence
  Cyclic GFR-binding peptide
  MOD_RES (5)..(6): Xaa is C or S
SAAPXXVPQALSAISILYLVGRKPKVLKNYQM

SEQ ID NO: 6743 - protein, 27 aa, Artificial Sequence
  Cyclic GFR-binding peptide
LNAISMLYFDENEKVVLKKYRDMVVEG

SEQ ID NO: 6744 - protein, 26 aa, Artificial Sequence
  Cyclic GFR-binding peptide
KLSATSVLYYDDSSNVILRKHRNMVV

SEQ ID NO: 6745 - protein, 34 aa, Artificial Sequence
  Cyclic GFR-binding peptide
  MOD_RES (1)..(2)..(34): Xaa is C or S
XXAPTQLSAISVLYLDDSSNVILKNYQNMVVRAX

SEQ ID NO: 6746 - protein, 27 aa, Artificial Sequence
  Cyclic GFR-binding peptide
  MOD_RES (1)..(1): Xaa is C or S
XVPTELNAISMLYFDENEKVVLKKYRD

SEQ ID NO: 6747 - protein, 30 aa, Artificial Sequence
  Cyclic GFR-binding peptide
  MOD_RES (1)..(1): Xaa is C or S
XRPTQVQLSPISVLYKEIVRKKPIFLKYHY

SEQ ID NO: 6748 - protein, 36 aa, Artificial Sequence
  Cyclic GFR-binding peptide
  MOD_RES (4)..(5): Xaa is C or S
PKPXXAPTKLSATSVLYYDDSSNVILRKHRNMVVRS

SEQ ID NO: 6749 - protein, 35 aa, Artificial Sequence
  Cyclic GFR-binding peptide
  MOD_RES (4)..(5): Xaa is C or S
GKAXXVPTKLNAISVLYFDDMGVPTLKKYREGMSV

SEQ ID NO: 6750 - protein, 36 aa, Artificial Sequence
  Cyclic GFR-binding peptide
  MOD_RES (34)..(36): Xaa is C or S
QVQLSPISVLYKEIVRKKPIFLKYHYTLEDHLAXKX

SEQ ID NO: 6751 - protein, 31 aa, Artificial Sequence
  Cyclic GFR-binding peptide
  MOD_RES (31)..(31): Xaa is C or S
PTELSPISMLYKDENEKVVLKYHYDMVVEGX

SEQ ID NO: 6752 - protein, 29 aa, Artificial Sequence
  Cyclic GFR-binding peptide
  MOD_RES (3)..(4): Xaa is C or S
KAXXVPTELSPISMLYKDEYDKVVLKYHY

SEQ ID NO: 6753 - protein, 27 aa, Artificial Sequence
  Cyclic GFR-binding peptide
QLNAISVLYFEIVRKKPIFLKKYRTLE

SEQ ID NO: 6754 - protein, 29 aa, Artificial Sequence
  Cyclic GFR-binding peptide
QVQLSAISVLYLEIVRKKPIFLKNYQTLE

SEQ ID NO: 6755 - protein, 27 aa, Artificial Sequence
  Cyclic GFR-binding peptide
VPQDLSATSILYYVGRTPKVLRKHRMV

SEQ ID NO: 6756 - protein, 28 aa, Artificial Sequence
  Cyclic GFR-binding peptide
  MOD_RES (1)..(1): Xaa is C or S
XAPTKLNAISVLYFDSSNNVILKKYRNM

SEQ ID NO: 6757 - protein, 27 aa, Artificial Sequence
  Cyclic GFR-binding peptide
PTKLSAISVLYLDSSNNVILKNYQNMV

SEQ ID NO: 6758 - protein, 30 aa, Artificial Sequence
  Cyclic GFR-binding peptide
  MOD_RES (30)..(30): Xaa is C or S
TKLNAISVLYFDSSNNVILKKYRNMVVKAX

SEQ ID NO: 6759 - protein, 29 aa, Artificial Sequence
  Cyclic GFR-binding peptide
  MOD_RES (1)..(2): Xaa is C or S
XXVPTKLNAISVLYFDDMGVPTLKKYREG

SEQ ID NO: 6760 - protein, 29 aa, Artificial Sequence
  Cyclic GFR-binding peptide
KLNAISVLYFDDMGVPTLKKYREGMSVAE

SEQ ID NO: 6761 - protein, 29 aa, Artificial Sequence
  Cyclic GFR-binding peptide
  MOD_RES (3)..(4): Xaa is C or S
KAXXVPTELSATSMLYYDENEKVVLRKHR

SEQ ID NO: 6762 - protein, 27 aa, Artificial Sequence
  Cyclic GFR-binding peptide
  MOD_RES (27)..(27): Xaa is C or S
LSPISILYKVGRTPKVLKYHYMVVKSX

SEQ ID NO: 6763 - protein, 26 aa, Artificial Sequence
  Cyclic GFR-binding peptide
KLNAISVLYFDDMGVPTLKKYREGMS

SEQ ID NO: 6764 - protein, 32 aa, Artificial Sequence
  Cyclic GFR-binding peptide
  MOD_RES (29)..(31): Xaa is C or S
QALSPISILYKVGRKPKVLKYHYMIVRSXKXS

SEQ ID NO: 6765 - protein, 28 aa, Artificial Sequence
  Cyclic GFR-binding peptide
QVQLSPISVLYKEIVRKKPIFLKYHYTL

SEQ ID NO: 6766 - protein, 28 aa, Artificial Sequence
  Cyclic GFR-binding peptide
  MOD_RES (27)..(27): Xaa is C or S
NAISMLYFDENEKVVLKKYRDMVVEGXG

SEQ ID NO: 6767 - protein, 20 aa, Artificial Sequence
  Cyclic GFR-binding peptide
NAISVLYFDDMGVPTLKKYR

SEQ ID NO: 6768 - protein, 35 aa, Artificial Sequence
  Cyclic GFR-binding peptide
  MOD_RES (1)..(32)..(34): Xaa is C or S
XVPQDLSATSILYYVGRTPKVLRKHRMVVKSXKXS

SEQ ID NO: 6769 - protein, 36 aa, Artificial Sequence
  Cyclic GFR-binding peptide
  MOD_RES (3)..(35): Xaa is C or S
PTXAPTKLSPISVLYKDDSSNVILKYHYNMVVRSXG

SEQ ID NO: 6770 - protein, 29 aa, Artificial Sequence
  Cyclic GFR-binding peptide
  MOD_RES (28)..(28): Xaa is C or S
SATSVLYYDDMGVPTLRKHREGMSVAEXG

SEQ ID NO: 6771 - protein, 30 aa, Artificial Sequence
  Cyclic GFR-binding peptide
  MOD_RES (2)..(3): Xaa is C or S
PXXAPTKLSAISVLYLDDSSNVILKNYQNM

SEQ ID NO: 6772 - protein, 38 aa, Artificial Sequence
  Cyclic GFR-binding peptide
  MOD_RES (37)..(37): Xaa is C or S
RPTQVQLNAISVLYFEIVRKKPIFLKKYRTLEDHLAXK

SEQ ID NO: 6773 - protein, 38 aa, Artificial Sequence
  Cyclic GFR-binding peptide
  MOD_RES (4)..(4): Xaa is C or S
NVQXRPTQVQLSPISVLYKEIVRKKPIFLKYHYTLEDH

SEQ ID NO: 6774 - protein, 37 aa, Artificial Sequence
  Cyclic GFR-binding peptide
  MOD_RES (37)..(37): Xaa is C or S
RPTQVQLSPISVLYKEIVRKKPIFLKYHYTLEDHLAX

SEQ ID NO: 6775 - protein, 31 aa, Artificial Sequence
  Cyclic GFR-binding peptide
  MOD_RES (4)..(5): Xaa is C or S
PKAXXVPTELSATSMLYYDENEKVVLRKHRD

SEQ ID NO: 6776 - protein, 32 aa, Artificial Sequence
  Cyclic GFR-binding peptide
  MOD_RES (31)..(31): Xaa is C or S
PTQLSAISVLYLDDSSNVILKNYQNMVVRAXG

SEQ ID NO: 6777 - protein, 40 aa, Artificial Sequence
  Cyclic GFR-binding peptide
  MOD_RES (5)..(6)..(37)..(39): Xaa is C or S
SASPXXVPQDLSAISILYLVGRTPKVLKNYQMVVKSXKXS

SEQ ID NO: 6778 - protein, 39 aa, Artificial Sequence
  Cyclic GFR-binding peptide
  MOD_RES (4)..(5)..(37)..(39): Xaa is C or S
PKAXXVPTELSATSMLYYDEYDKVVLRKHREMVVEGXGX

SEQ ID NO: 6779 - protein, 25 aa, Artificial Sequence
  Cyclic GFR-binding peptide
PTKLSPISVLYKDDSSNVILKYHYN

SEQ ID NO: 6780 - protein, 31 aa, Artificial Sequence
  Cyclic GFR-binding peptide
  MOD_RES (1)..(2): Xaa is C or S
XXVPQALSPISILYKVGRKPKVLKYHYMIVR

SEQ ID NO: 6781 - protein, 41 aa, Artificial Sequence
  Cyclic GFR-binding peptide
  MOD_RES (6)..(7)..(39)..(41): Xaa is C or S
TVPKPXXAPTQLSAISVLYLDDSSNVILKNYQNMVVRAXGX

SEQ ID NO: 6782 - protein, 30 aa, Artificial Sequence
  Cyclic GFR-binding peptide
  MOD_RES (1)..(1): Xaa is C or S
XVPQALNAISILYFVGRKPKVLKKYRMIVR

SEQ ID NO: 6783 - protein, 28 aa, Artificial Sequence
  Cyclic GFR-binding peptide
  MOD_RES (1)..(2): Xaa is C or S
XXAPTKLSAISVLYLDDSSNVILKNYQN

SEQ ID NO: 6784 - protein, 29 aa, Artificial Sequence
  Cyclic GFR-binding peptide
  MOD_RES (28)..(28): Xaa is C or S
LSPISVLYKDDSSNVILKYHYNMVVRAXG

SEQ ID NO: 6785 - protein, 33 aa, Artificial Sequence
  Cyclic GFR-binding peptide
  MOD_RES (1)..(33): Xaa is C or S
XAPTQLSAISVLYLDDSSNVILKNYQNMVVRAX

SEQ ID NO: 6786 - protein, 33 aa, Artificial Sequence
  Cyclic GFR-binding peptide
  MOD_RES (2)..(3): Xaa is C or S
PXXVPQDLSATSILYYVGRTPKVLRKHRMVVKS

SEQ ID NO: 6787 - protein, 33 aa, Artificial Sequence
  Cyclic GFR-binding peptide
  MOD_RES (3)..(4): Xaa is C or S
SPXXVSQDLNAISILYFIGKTPKILKKYRMIVK

SEQ ID NO: 6788 - protein, 23 aa, Artificial Sequence
  Cyclic GFR-binding peptide
QDLSAISILYLVGRTPKVLKNYQ

SEQ ID NO: 6789 - protein, 41 aa, Artificial Sequence
  Cyclic GFR-binding peptide
  MOD_RES (6)..(7)..(38)..(40): Xaa is C or S
ASASPXXVSQDLSPISILYKIGKTPKILKYHYMIVKSXKXS

SEQ ID NO: 6790 - protein, 37 aa, Artificial Sequence
  Cyclic GFR-binding peptide
  MOD_RES (6)..(6): Xaa is C or S
VTKPTXAPTKLSAISVLYLDDSSNVILKNYQNMVVRS

SEQ ID NO: 6791 - protein, 30 aa, Artificial Sequence
  Cyclic GFR-binding peptide
  MOD_RES (28)..(30): Xaa is C or S
LSATSMLYYDEYDKVVLRKHREMVVEGXGX

SEQ ID NO: 6792 - protein, 31 aa, Artificial Sequence
  Cyclic GFR-binding peptide
  MOD_RES (1)..(1): Xaa is C or S
XVPTELNAISMLYFDEYDKVVLKKYREMVVE

SEQ ID NO: 6793 - protein, 34 aa, Artificial Sequence
  Cyclic GFR-binding peptide
  MOD_RES (5)..(6): Xaa is C or S
VPKPXXAPTQLSATSVLYYDDSSNVILRKHRNMV

SEQ ID NO: 6794 - protein, 35 aa, Artificial Sequence
  Cyclic GFR-binding peptide
PTQVQLSAISVLYLEIVRKKPIFLKNYQTLEDHLA

SEQ ID NO: 6795 - protein, 37 aa, Artificial Sequence
  Cyclic GFR-binding peptide
  MOD_RES (36)..(36): Xaa is C or S
PTQVQLSAISVLYLEIVRKKPIFLKNYQTLEDHLAXK

SEQ ID NO: 6796 - protein, 26 aa, Artificial Sequence
  Cyclic GFR-binding peptide
DLSAISILYLIGKTPKILKNYQMIVK

SEQ ID NO: 6797 - protein, 37 aa, Artificial Sequence
  Cyclic GFR-binding peptide
  MOD_RES (4)..(5)..(37): Xaa is C or S
PKPXXAPTKLSAISVLYLDDSSNVILKNYQNMVVRSX

SEQ ID NO: 6798 - protein, 37 aa, Artificial Sequence
  Cyclic GFR-binding peptide
  MOD_RES (5)..(6): Xaa is C or S
IPKAXXVPTELSPISMLYKDENEKVVLKYHYDMVVEG

SEQ ID NO: 6799 - protein, 32 aa, Artificial Sequence
  Cyclic GFR-binding peptide
  MOD_RES (30)..(32): Xaa is C or S
KLSATSVLYYDDMGVPTLRKHREGMSVAEXGX

SEQ ID NO: 6800 - protein, 30 aa, Artificial Sequence
  Cyclic GFR-binding peptide
  MOD_RES (1)..(1): Xaa is C or S
XRPTQVQLSATSVLYYEIVRKKPIFLRKHR

SEQ ID NO: 6801 - protein, 32 aa, Artificial Sequence
  Cyclic GFR-binding peptide
  MOD_RES (31)..(31): Xaa is C or S
PTKLSAISVLYLDDSSNVILKNYQNMVVRSXG

SEQ ID NO: 6802 - protein, 33 aa, Artificial Sequence
  Cyclic GFR-binding peptide
  MOD_RES (5)..(6): Xaa is C or S
VPKPXXAPTKLSAISVLYLDDSSNVILKNYQNM

SEQ ID NO: 6803 - protein, 37 aa, Artificial Sequence
  Cyclic GFR-binding peptide
  MOD_RES (6)..(7): Xaa is C or S
KIPKAXXVPTELNAISMLYFDENEKVVLKKYRDMVVE

SEQ ID NO: 6804 - protein, 34 aa, Artificial Sequence
  Cyclic GFR-binding peptide
  MOD_RES (31)..(33): Xaa is C or S
PTQLSATSVLYYDDSSNVILRKHRNMVVRAXGXH

SEQ ID NO: 6805 - protein, 35 aa, Artificial Sequence
  Cyclic GFR-binding peptide
PTQVQLSATSVLYYEIVRKKPIFLRKHRTLEDHLA

SEQ ID NO: 6806 - protein, 32 aa, Artificial Sequence
  Cyclic GFR-binding peptide
  MOD_RES (32)..(32): Xaa is C or S
APTKLSAISVLYLDDSSNVILKNYQNMVVRSX

SEQ ID NO: 6807 - protein, 37 aa, Artificial Sequence
  Cyclic GFR-binding peptide
  MOD_RES (5)..(37): Xaa is C or S
TKPTXAPTKLSAISVLYLDDSSNVILKNYQNMVVRSX

SEQ ID NO: 6808 - protein, 39 aa, Artificial Sequence
  Cyclic GFR-binding peptide
  MOD_RES (5)..(6)..(38): Xaa is C or S
VPKPXXAPTQLSPISVLYKDDSSNVILKYHYNMVVRAXG

SEQ ID NO: 6809 - protein, 28 aa, Artificial Sequence
  Cyclic GFR-binding peptide
KLSPISVLYKDDSSNVILKYHYNMVVRS

SEQ ID NO: 6810 - protein, 31 aa, Artificial Sequence
  Cyclic GFR-binding peptide
  MOD_RES (3)..(4): Xaa is C or S
KAXXAPTKLSAISVLYLDSSNNVILKNYQNM

SEQ ID NO: 6811 - protein, 39 aa, Artificial Sequence
  Cyclic GFR-binding peptide
  MOD_RES (4)..(5)..(36)..(38): Xaa is C or S
AAPXXVPQALSAISILYLVGRKPKVLKNYQMIVRSXKXS

SEQ ID NO: 6812 - protein, 33 aa, Artificial Sequence
  Cyclic GFR-binding peptide
  MOD_RES (6)..(7): Xaa is C or S
AVPKAXXAPTKLSAISVLYLDSSNNVILKNYQN

SEQ ID NO: 6813 - protein, 27 aa, Artificial Sequence
  Cyclic GFR-binding peptide
VSQDLSATSILYYIGKTPKILRKHRMI

SEQ ID NO: 6814 - protein, 29 aa, Artificial Sequence
  Cyclic GFR-binding peptide
VPQALSPISILYKVGRKPKVLKYHYMIVR

SEQ ID NO: 6815 - protein, 31 aa, Artificial Sequence
  Cyclic GFR-binding peptide
  MOD_RES (28)..(30): Xaa is C or S
LSAISVLYLDDSSNVILKNYQNMVVRAXGXH

SEQ ID NO: 6816 - protein, 24 aa, Artificial Sequence
  Cyclic GFR-binding peptide
SPISILYKVGRKPKVLKYHYMIVR

SEQ ID NO: 6817 - protein, 22 aa, Artificial Sequence
  Cyclic GFR-binding peptide
KLSATSVLYYDDSSNVILRKHR

SEQ ID NO: 6818 - protein, 35 aa, Artificial Sequence
  Cyclic GFR-binding peptide
  MOD_RES (1)..(32)..(34): Xaa is C or S
XVPQALNAISILYFVGRKPKVLKKYRMIVRSXKXS

SEQ ID NO: 6819 - protein, 35 aa, Artificial Sequence
  Cyclic GFR-binding peptide
  MOD_RES (1)..(2)..(33)..(35): Xaa is C or S
XXVPQALSAISILYLVGRKPKVLKNYQMIVRSXKX

SEQ ID NO: 6820 - protein, 28 aa, Artificial Sequence
  Cyclic GFR-binding peptide
  MOD_RES (1)..(2): Xaa is C or S
XXVPQDLNAISILYFVGRTPKVLKKYRM

SEQ ID NO: 6821 - protein, 37 aa, Artificial Sequence
  Cyclic GFR-binding peptide
  MOD_RES (4)..(5)..(36): Xaa is C or S
ASPXXVSQDLSAISILYLIGKTPKILKNYQMIVKSXK

SEQ ID NO: 6822 - protein, 32 aa, Artificial Sequence
  Cyclic GFR-binding peptide
  MOD_RES (29)..(31): Xaa is C or S
ELSPISMLYKDENEKVVLKYHYDMVVEGXGXR

SEQ ID NO: 6823 - protein, 28 aa, Artificial Sequence
  Cyclic GFR-binding peptide
VSQDLSAISILYLIGKTPKILKNYQMIV

SEQ ID NO: 6824 - protein, 37 aa, Artificial Sequence
  Cyclic GFR-binding peptide
  MOD_RES (5)..(6): Xaa is C or S
VGKAXXVPTKLNAISVLYFDDMGVPTLKKYREGMSVA

SEQ ID NO: 6825 - protein, 28 aa, Artificial Sequence
  Cyclic GFR-binding peptide
  MOD_RES (1)..(2): Xaa is C or S
XXVPQALSPISILYKVGRKPKVLKYHYM

SEQ ID NO: 6826 - protein, 38 aa, Artificial Sequence
  Cyclic GFR-binding peptide
  MOD_RES (1)..(38): Xaa is C or S
XRPTQVQLNAISVLYFEIVRKKPIFLKKYRTLEDHLAX

SEQ ID NO: 6827 - protein, 29 aa, Artificial Sequence
  Cyclic GFR-binding peptide
  MOD_RES (26)..(28): Xaa is C or S
SATSILYYVGRKPKVLRKHRMIVRSXKXS

SEQ ID NO: 6828 - protein, 24 aa, Artificial Sequence
  Cyclic GFR-binding peptide
SAISVLYLDSSNNVILKNYQNMVV

SEQ ID NO: 6829 - protein, 23 aa, Artificial Sequence
  Cyclic GFR-binding peptide
LNAISVLYFEIVRKKPIFLKKYR

SEQ ID NO: 6830 - protein, 34 aa, Artificial Sequence
  Cyclic GFR-binding peptide
  MOD_RES (4)..(4): Xaa is C or S
KPTXAPTKLSAISVLYLDDSSNVILKNYQNMVVR

SEQ ID NO: 6831 - protein, 31 aa, Artificial Sequence
  Cyclic GFR-binding peptide
  MOD_RES (1)..(1): Xaa is C or S
XAPTKLSPISVLYKDSSNNVILKYHYNMVVK

SEQ ID NO: 6832 - protein, 24 aa, Artificial Sequence
  Cyclic GFR-binding peptide
QALSAISILYLVGRKPKVLKNYQM

SEQ ID NO: 6833 - protein, 35 aa, Artificial Sequence
  Cyclic GFR-binding peptide
  MOD_RES (6)..(7): Xaa is C or S
ASASPXXVSQDLSATSILYYIGKTPKILRKHRMIV

SEQ ID NO: 6834 - protein, 26 aa, Artificial Sequence
  Cyclic GFR-binding peptide
LSATSILYYIGKTPKILRKHRMIVKS

SEQ ID NO: 6835 - protein, 35 aa, Artificial Sequence
  Cyclic GFR-binding peptide
  MOD_RES (5)..(6): Xaa is C or S
VPKPXXAPTKLSATSVLYYDDSSNVILRKHRNMVV

SEQ ID NO: 6836 - protein, 24 aa, Artificial Sequence
  Cyclic GFR-binding peptide
KLSAISVLYLDSSNNVILKNYQNM

SEQ ID NO: 6837 - protein, 30 aa, Artificial Sequence
  Cyclic GFR-binding peptide
  MOD_RES (1)..(1): Xaa is C or S
XAPTQLSAISVLYLDDSSNVILKNYQNMVV

SEQ ID NO: 6838 - protein, 34 aa, Artificial Sequence
  Cyclic GFR-binding peptide
  MOD_RES (6)..(7): Xaa is C or S
AVPKAXXAPTKLSAISVLYLDSSNNVILKNYQNM

SEQ ID NO: 6839 - protein, 34 aa, Artificial Sequence
  Cyclic GFR-binding peptide
  MOD_RES (5)..(6): Xaa is C or S
VPKAXXAPTKLNAISVLYFDSSNNVILKKYRNMV

SEQ ID NO: 6840 - protein, 37 aa, Artificial Sequence
  Cyclic GFR-binding peptide
  MOD_RES (6)..(7): Xaa is C or S
TVPKPXXAPTQLSATSVLYYDDSSNVILRKHRNMVVR

SEQ ID NO: 6841 - protein, 30 aa, Artificial Sequence
  Cyclic GFR-binding peptide
  MOD_RES (30)..(30): Xaa is C or S
PQALSAISILYLVGRKPKVLKNYQMIVRSX

SEQ ID NO: 6842 - protein, 28 aa, Artificial Sequence
  Cyclic GFR-binding peptide
  MOD_RES (28)..(28): Xaa is C or S
ALSAISILYLVGRKPKVLKNYQMIVRSX

SEQ ID NO: 6843 - protein, 29 aa, Artificial Sequence
  Cyclic GFR-binding peptide
  MOD_RES (29)..(29): Xaa is C or S
QDLSAISILYLVGRTPKVLKNYQMVVKSX

SEQ ID NO: 6844 - protein, 29 aa, Artificial Sequence
  Cyclic GFR-binding peptide
  MOD_RES (3)..(3): Xaa is C or S
PTXAPTKLSAISVLYLDDSSNVILKNYQN

SEQ ID NO: 6845 - protein, 24 aa, Artificial Sequence
  Cyclic GFR-binding peptide
SATSILYYVGRKPKVLRKHRMIVR

SEQ ID NO: 6846 - protein, 33 aa, Artificial Sequence
  Cyclic GFR-binding peptide
  MOD_RES (3)..(4): Xaa is C or S
APXXVPQALSATSILYYVGRKPKVLRKHRMIVR

SEQ ID NO: 6847 - protein, 35 aa, Artificial Sequence
  Cyclic GFR-binding peptide
  MOD_RES (2)..(2): Xaa is C or S
QXRPTQVQLSPISVLYKEIVRKKPIFLKYHYTLED

SEQ ID NO: 6848 - protein, 26 aa, Artificial Sequence
  Cyclic GFR-binding peptide
VQLSPISVLYKEIVRKKPIFLKYHYT

SEQ ID NO: 6849 - protein, 31 aa, Artificial Sequence
  Cyclic GFR-binding peptide
  MOD_RES (5)..(6): Xaa is C or S
SASPXXVSQDLSATSILYYIGKTPKILRKHR

SEQ ID NO: 6850 - protein, 35 aa, Artificial Sequence
  Cyclic GFR-binding peptide
  MOD_RES (3)..(3): Xaa is C or S
VQXRPTQVQLSATSVLYYEIVRKKPIFLRKHRTLE

SEQ ID NO: 6851 - protein, 29 aa, Artificial Sequence
  Cyclic GFR-binding peptide
  MOD_RES (1)..(2): Xaa is C or S
XXAPTQLSATSVLYYDDSSNVILRKHRNM

SEQ ID NO: 6852 - protein, 35 aa, Artificial Sequence
  Cyclic GFR-binding peptide
  MOD_RES (2)..(3)..(35): Xaa is C or S
AXXVPTELSATSMLYYDENEKVVLRKHRDMVVEGX

SEQ ID NO: 6853 - protein, 29 aa, Artificial Sequence
  Cyclic GFR-binding peptide
  MOD_RES (28)..(28): Xaa is C or S
LNAISMLYFDENEKVVLKKYRDMVVEGXG

SEQ ID NO: 6854 - protein, 30 aa, Artificial Sequence
  Cyclic GFR-binding peptide
PTQLSPISVLYKDDSSNVILKYHYNMVVRA

SEQ ID NO: 6855 - protein, 32 aa, Artificial Sequence
  Cyclic GFR-binding peptide
  MOD_RES (3)..(4): Xaa is C or S
KAXXVPTKLNAISVLYFDDMGVPTLKKYREGM

SEQ ID NO: 6856 - protein, 36 aa, Artificial Sequence
  Cyclic GFR-binding peptide
  MOD_RES (6)..(7): Xaa is C or S
YVPKPXXAPTKLSPISVLYKDDSSNVILKYHYNMVV

SEQ ID NO: 6857 - protein, 24 aa, Artificial Sequence
  Cyclic GFR-binding peptide
PTKLSATSVLYYDDMGVPTLRKHR

SEQ ID NO: 6858 - protein, 26 aa, Artificial Sequence
  Cyclic GFR-binding peptide
  MOD_RES (26)..(26): Xaa is C or S
SAISILYLVGRKPKVLKNYQMIVRSX

SEQ ID NO: 6859 - protein, 35 aa, Artificial Sequence
  Cyclic GFR-binding peptide
  MOD_RES (4)..(4): Xaa is C or S
KPTXAPTKLSAISVLYLDDSSNVILKNYQNMVVRS

SEQ ID NO: 6860 - protein, 29 aa, Artificial Sequence
  Cyclic GFR-binding peptide
  MOD_RES (2)..(3): Xaa is C or S
PXXAPTQLSPISVLYKDDSSNVILKYHYN

SEQ ID NO: 6861 - protein, 33 aa, Artificial Sequence
  Cyclic GFR-binding peptide
  MOD_RES (3)..(3): Xaa is C or S
VQXRPTQVQLSAISVLYLEIVRKKPIFLKNYQT

SEQ ID NO: 6862 - protein, 36 aa, Artificial Sequence
  Cyclic GFR-binding peptide
  MOD_RES (6)..(7): Xaa is C or S
ASASPXXVPQDLSAISILYLVGRTPKVLKNYQMVVK

SEQ ID NO: 6863 - protein, 36 aa, Artificial Sequence
  Cyclic GFR-binding peptide
  MOD_RES (2)..(34)..(36): Xaa is C or S
TXAPTKLSPISVLYKDDSSNVILKYHYNMVVRSXGX

SEQ ID NO: 6864 - protein, 36 aa, Artificial Sequence
  Cyclic GFR-binding peptide
  MOD_RES (36)..(36): Xaa is C or S
PTQVQLSPISVLYKEIVRKKPIFLKYHYTLEDHLAX

SEQ ID NO: 6865 - protein, 38 aa, Artificial Sequence
  Cyclic GFR-binding peptide
  MOD_RES (5)..(6)..(38): Xaa is C or S
VPKPXXAPTKLSPISVLYKDDSSNVILKYHYNMVVRSX

SEQ ID NO: 6866 - protein, 21 aa, Artificial Sequence
  Cyclic GFR-binding peptide
NAISMLYFDENEKVVLKKYRD

SEQ ID NO: 6867 - protein, 30 aa, Artificial Sequence
  Cyclic GFR-binding peptide
  MOD_RES (28)..(30): Xaa is C or S
LSPISMLYKDEYDKVVLKYHYEMVVEGXGX

SEQ ID NO: 6868 - protein, 36 aa, Artificial Sequence
  Cyclic GFR-binding peptide
  MOD_RES (33)..(35): Xaa is C or S
VQLSAISVLYLEIVRKKPIFLKNYQTLEDHLAXKXE

SEQ ID NO: 6869 - protein, 32 aa, Artificial Sequence
  Cyclic GFR-binding peptide
  MOD_RES (1)..(2): Xaa is C or S
XXVPTELSPISMLYKDENEKVVLKYHYDMVVE

SEQ ID NO: 6870 - protein, 28 aa, Artificial Sequence
  Cyclic GFR-binding peptide
  MOD_RES (2)..(3): Xaa is C or S
PXXAPTKLSATSVLYYDDSSNVILRKHR

SEQ ID NO: 6871 - protein, 36 aa, Artificial Sequence
  Cyclic GFR-binding peptide
  MOD_RES (4)..(5): Xaa is C or S
PKAXXAPTKLNAISVLYFDSSNNVILKKYRNMVVKA

SEQ ID NO: 6872 - protein, 30 aa, Artificial Sequence
  Cyclic GFR-binding peptide
  MOD_RES (3)..(4): Xaa is C or S
KAXXVPTELNAISMLYFDEYDKVVLKKYRE

SEQ ID NO: 6873 - protein, 29 aa, Artificial Sequence
  Cyclic GFR-binding peptide
  MOD_RES (2)..(3): Xaa is C or S
PXXVPQDLSAISILYLVGRTPKVLKNYQM

SEQ ID NO: 6874 - protein, 28 aa, Artificial Sequence
  Cyclic GFR-binding peptide
VPTKLSATSVLYYDDMGVPTLRKHREGM

SEQ ID NO: 6875 - protein, 36 aa, Artificial Sequence
  Cyclic GFR-binding peptide
  MOD_RES (6)..(7): Xaa is C or S
YVPKPXXAPTKLSATSVLYYDDSSNVILRKHRNMVV

SEQ ID NO: 6876 - protein, 27 aa, Artificial Sequence
  Cyclic GFR-binding peptide
APTKLSAISVLYLDSSNNVILKNYQNM

SEQ ID NO: 6877 - protein, 29 aa, Artificial Sequence
  Cyclic GFR-binding peptide
QLSATSVLYYEIVRKKPIFLRKHRTLEDH

SEQ ID NO: 6878 - protein, 24 aa, Artificial Sequence
  Cyclic GFR-binding peptide
ELNAISMLYFDEYDKVVLKKYREM

SEQ ID NO: 6879 - protein, 34 aa, Artificial Sequence
  Cyclic GFR-binding peptide
  MOD_RES (31)..(33): Xaa is C or S
VPQDLSAISILYLVGRTPKVLKNYQMVVKSXKXS

SEQ ID NO: 6880 - protein, 33 aa, Artificial Sequence
  Cyclic GFR-binding peptide
  MOD_RES (1)..(2): Xaa is C or S
XXVPTKLNAISVLYFDDMGVPTLKKYREGMSVA

SEQ ID NO: 6881 - protein, 34 aa, Artificial Sequence
  Cyclic GFR-binding peptide
  MOD_RES (1)..(2)..(33): Xaa is C or S
XXVSQDLSPISILYKIGKTPKILKYHYMIVKSXK

SEQ ID NO: 6882 - protein, 28 aa, Artificial Sequence
  Cyclic GFR-binding peptide
  MOD_RES (2)..(3): Xaa is C or S
PXXVPQALSAISILYLVGRKPKVLKNYQ

SEQ ID NO: 6883 - protein, 29 aa, Artificial Sequence
  Cyclic GFR-binding peptide
PTKLSPISVLYKDSSNNVILKYHYNMVVK

SEQ ID NO: 6884 - protein, 28 aa, Artificial Sequence
  Cyclic GFR-binding peptide
  MOD_RES (28)..(28): Xaa is C or S
LNAISMLYFDENEKVVLKKYRDMVVEGX

SEQ ID NO: 6885 - protein, 30 aa, Artificial Sequence
  Cyclic GFR-binding peptide
VPQDLNAISILYFVGRTPKVLKKYRMVVKS

SEQ ID NO: 6886 - protein, 25 aa, Artificial Sequence
  Cyclic GFR-binding peptide
TELSATSMLYYDENEKVVLRKHRDM

SEQ ID NO: 6887 - protein, 21 aa, Artificial Sequence
  Cyclic GFR-binding peptide
SPISILYKIGKTPKILKYHYM

SEQ ID NO: 6888 - protein, 30 aa, Artificial Sequence
  Cyclic GFR-binding peptide
  MOD_RES (1)..(2): Xaa is C or S
XXAPTQLSPISVLYKDDSSNVILKYHYNMV

SEQ ID NO: 6889 - protein, 28 aa, Artificial Sequence
  Cyclic GFR-binding peptide
  MOD_RES (27)..(27): Xaa is C or S
SPISVLYKDDSSNVILKYHYNMVVRAXG

SEQ ID NO: 6890 - protein, 28 aa, Artificial Sequence
  Cyclic GFR-binding peptide
TKLSATSVLYYDDMGVPTLRKHREGMSV

SEQ ID NO: 6891 - protein, 25 aa, Artificial Sequence
  Cyclic GFR-binding peptide
DLSPISILYKIGKTPKILKYHYMIV

SEQ ID NO: 6892 - protein, 30 aa, Artificial Sequence
  Cyclic GFR-binding peptide
  MOD_RES (5)..(5): Xaa is C or S
TKPTXAPTKLSAISVLYLDDSSNVILKNYQ

SEQ ID NO: 6893 - protein, 34 aa, Artificial Sequence
  Cyclic GFR-binding peptide
  MOD_RES (4)..(5): Xaa is C or S
GKAXXVPTKLNAISVLYFDDMGVPTLKKYREGMS

SEQ ID NO: 6894 - protein, 30 aa, Artificial Sequence
  Cyclic GFR-binding peptide
APTKLSPISVLYKDDSSNVILKYHYNMVVR

SEQ ID NO: 6895 - protein, 25 aa, Artificial Sequence
  Cyclic GFR-binding peptide
VPTELNAISMLYFDENEKVVLKKYR

SEQ ID NO: 6896 - protein, 23 aa, Artificial Sequence
  Cyclic GFR-binding peptide
ALSPISILYKVGRKPKVLKYHYM

SEQ ID NO: 6897 - protein, 31 aa, Artificial Sequence
  Cyclic GFR-binding peptide
  MOD_RES (4)..(5): Xaa is C or S
ASPXXVSQDLSATSILYYIGKTPKILRKHRM

SEQ ID NO: 6898 - protein, 30 aa, Artificial Sequence
  Cyclic GFR-binding peptide
  MOD_RES (1)..(2): Xaa is C or S
XXVPQDLNAISILYFVGRTPKVLKKYRMVV

SEQ ID NO: 6899 - protein, 27 aa, Artificial Sequence
  Cyclic GFR-binding peptide
TKLSAISVLYLDDSSNVILKNYQNMVV

SEQ ID NO: 6900 - protein, 34 aa, Artificial Sequence
  Cyclic GFR-binding peptide
  MOD_RES (1)..(34): Xaa is C or S
XVPTKLSAISVLYLDDMGVPTLKNYQEGMSVAEX

SEQ ID NO: 6901 - protein, 24 aa, Artificial Sequence
  Cyclic GFR-binding peptide
TKLSPISVLYKDDSSNVILKYHYN

SEQ ID NO: 6902 - protein, 33 aa, Artificial Sequence
  Cyclic GFR-binding peptide
  MOD_RES (3)..(4): Xaa is C or S
KAXXAPTKLSPISVLYKDSSNNVILKYHYNMVV

SEQ ID NO: 6903 - protein, 34 aa, Artificial Sequence
  Cyclic GFR-binding peptide
  MOD_RES (4)..(4): Xaa is C or S
KPTXAPTKLSPISVLYKDDSSNVILKYHYNMVVR

SEQ ID NO: 6904 - protein, 32 aa, Artificial Sequence
  Cyclic GFR-binding peptide
  MOD_RES (5)..(6): Xaa is C or S
SASPXXVSQDLSAISILYLIGKTPKILKNYQM

SEQ ID NO: 6905 - protein, 29 aa, Artificial Sequence
  Cyclic GFR-binding peptide
LSATSVLYYEIVRKKPIFLRKHRTLEDHL

SEQ ID NO: 6906 - protein, 25 aa, Artificial Sequence
  Cyclic GFR-binding peptide
NAISMLYFDENEKVVLKKYRDMVVE

SEQ ID NO: 6907 - protein, 22 aa, Artificial Sequence
  Cyclic GFR-binding peptide
LSATSMLYYDEYDKVVLRKHRE

SEQ ID NO: 6908 - protein, 25 aa, Artificial Sequence
  Cyclic GFR-binding peptide
TELSPISMLYKDENEKVVLKYHYDM

SEQ ID NO: 6909 - protein, 28 aa, Artificial Sequence
  Cyclic GFR-binding peptide
VSQDLNAISILYFIGKTPKILKKYRMIV

SEQ ID NO: 6910 - protein, 34 aa, Artificial Sequence
  Cyclic GFR-binding peptide
  MOD_RES (4)..(5): Xaa is C or S
ASPXXVSQDLSATSILYYIGKTPKILRKHRMIVK

SEQ ID NO: 6911 - protein, 32 aa, Artificial Sequence
  Cyclic GFR-binding peptide
  MOD_RES (30)..(32): Xaa is C or S
TELSATSMLYYDENEKVVLRKHRDMVVEGXGX

SEQ ID NO: 6912 - protein, 35 aa, Artificial Sequence
  Cyclic GFR-binding peptide
  MOD_RES (6)..(6): Xaa is C or S
VTKPTXAPTKLSAISVLYLDDSSNVILKNYQNMVV

SEQ ID NO: 6913 - protein, 44 aa, Artificial Sequence
  Cyclic GFR-binding peptide
  MOD_RES (5)..(42)..(44): Xaa is C or S
RNVQXRPTQVQLNAISVLYFEIVRKKPIFLKKYRTLEDHLAXKX

SEQ ID NO: 6914 - protein, 29 aa, Artificial Sequence
  Cyclic GFR-binding peptide
  MOD_RES (28)..(28): Xaa is C or S
DLSAISILYLIGKTPKILKNYQMIVKSXK

SEQ ID NO: 6915 - protein, 41 aa, Artificial Sequence
  Cyclic GFR-binding peptide
  MOD_RES (4)..(41): Xaa is C or S
NVQXRPTQVQLSATSVLYYEIVRKKPIFLRKHRTLEDHLAX

SEQ ID NO: 6916 - protein, 39 aa, Artificial Sequence
  Cyclic GFR-binding peptide
  MOD_RES (5)..(37)..(39): Xaa is C or S
TKPTXAPTKLSATSVLYYDDSSNVILRKHRNMVVRSXGX

SEQ ID NO: 6917 - protein, 34 aa, Artificial Sequence
  Cyclic GFR-binding peptide
  MOD_RES (4)..(5): Xaa is C or S
AAPXXVPQALSAISILYLVGRKPKVLKNYQMIVR

SEQ ID NO: 6918 - protein, 36 aa, Artificial Sequence
  Cyclic GFR-binding peptide
  MOD_RES (1)..(2)..(34)..(36): Xaa is C or S
XXAPTQLSPISVLYKDDSSNVILKYHYNMVVRAXGX

SEQ ID NO: 6919 - protein, 31 aa, Artificial Sequence
  Cyclic GFR-binding peptide
  MOD_RES (31)..(31): Xaa is C or S
PTKLSPISVLYKDDSSNVILKYHYNMVVRSX

SEQ ID NO: 6920 - protein, 28 aa, Artificial Sequence
  Cyclic GFR-binding peptide
  MOD_RES (2)..(2): Xaa is C or S
TXAPTKLSATSVLYYDDSSNVILRKHRN

SEQ ID NO: 6921 - protein, 26 aa, Artificial Sequence
  Cyclic GFR-binding peptide
TQLSAISVLYLDDSSNVILKNYQNMV

SEQ ID NO: 6922 - protein, 34 aa, Artificial Sequence
  Cyclic GFR-binding peptide
  MOD_RES (5)..(5): Xaa is C or S
RNVQXRPTQVQLSAISVLYLEIVRKKPIFLKNYQ

SEQ ID NO: 6923 - protein, 36 aa, Artificial Sequence
  Cyclic GFR-binding peptide
  MOD_RES (2)..(3)..(35): Xaa is C or S
PXXAPTKLSAISVLYLDDSSNVILKNYQNMVVRSXG

SEQ ID NO: 6924 - protein, 32 aa, Artificial Sequence
  Cyclic GFR-binding peptide
  MOD_RES (5)..(6): Xaa is C or S
IPKAXXVPTELNAISMLYFDENEKVVLKKYRD

SEQ ID NO: 6925 - protein, 39 aa, Artificial Sequence
  Cyclic GFR-binding peptide
  MOD_RES (4)..(5)..(36)..(38): Xaa is C or S
AAPXXVPQALSATSILYYVGRKPKVLRKHRMIVRSXKXS

SEQ ID NO: 6926 - protein, 30 aa, Artificial Sequence
  Cyclic GFR-binding peptide
APTKLSAISVLYLDDSSNVILKNYQNMVVR

SEQ ID NO: 6927 - protein, 33 aa, Artificial Sequence
  Cyclic GFR-binding peptide
  MOD_RES (1)..(2): Xaa is C or S
XXAPTQLSAISVLYLDDSSNVILKNYQNMVVRA

SEQ ID NO: 6928 - protein, 33 aa, Artificial Sequence
  Cyclic GFR-binding peptide
  MOD_RES (3)..(4): Xaa is C or S
KPXXAPTQLSAISVLYLDDSSNVILKNYQNMVV

SEQ ID NO: 6929 - protein, 38 aa, Artificial Sequence
  Cyclic GFR-binding peptide
  MOD_RES (5)..(6)..(38): Xaa is C or S
IPKAXXVPTELSATSMLYYDEYDKVVLRKHREMVVEGX

SEQ ID NO: 6930 - protein, 32 aa, Artificial Sequence
  Cyclic GFR-binding peptide
  MOD_RES (2)..(3): Xaa is C or S
AXXVPTELSPISMLYKDEYDKVVLKYHYEMVV

SEQ ID NO: 6931 - protein, 41 aa, Artificial Sequence
  Cyclic GFR-binding peptide
  MOD_RES (5)..(6)..(39)..(41): Xaa is C or S
VGKAXXVPTKLSATSVLYYDDMGVPTLRKHREGMSVAEXGX

SEQ ID NO: 6932 - protein, 31 aa, Artificial Sequence
  Cyclic GFR-binding peptide
  MOD_RES (1)..(1): Xaa is C or S
XAPTKLSAISVLYLDSSNNVILKNYQNMVVK

SEQ ID NO: 6933 - protein, 36 aa, Artificial Sequence
  Cyclic GFR-binding peptide
  MOD_RES (3)..(3): Xaa is C or S
VQXRPTQVQLSATSVLYYEIVRKKPIFLRKHRTLED

SEQ ID NO: 6934 - protein, 29 aa, Artificial Sequence
  Cyclic GFR-binding peptide
RPTQVQLSPISVLYKEIVRKKPIFLKYHY

SEQ ID NO: 6935 - protein, 35 aa, Artificial Sequence
  Cyclic GFR-binding peptide
  MOD_RES (2)..(3)..(35): Xaa is C or S
AXXAPTKLNAISVLYFDSSNNVILKKYRNMVVKAX

SEQ ID NO: 6936 - protein, 31 aa, Artificial Sequence
  Cyclic GFR-binding peptide
  MOD_RES (31)..(31): Xaa is C or S
VPQDLNAISILYFVGRTPKVLKKYRMVVKSX

SEQ ID NO: 6937 - protein, 28 aa, Artificial Sequence
  Cyclic GFR-binding peptide
  MOD_RES (2)..(3): Xaa is C or S
PXXVPQALNAISILYFVGRKPKVLKKYR

SEQ ID NO: 6938 - protein, 29 aa, Artificial Sequence
  Cyclic GFR-binding peptide
  MOD_RES (2)..(3): Xaa is C or S
AXXVPTELSPISMLYKDEYDKVVLKYHYE

SEQ ID NO: 6939 - protein, 29 aa, Artificial Sequence
  Cyclic GFR-binding peptide
  MOD_RES (29)..(29): Xaa is C or S
ELSPISMLYKDEYDKVVLKYHYEMVVEGX

SEQ ID NO: 6940 - protein, 34 aa, Artificial Sequence
  Cyclic GFR-binding peptide
  MOD_RES (4)..(5): Xaa is C or S
ASPXXVSQDLSPISILYKIGKTPKILKYHYMIVK

SEQ ID NO: 6941 - protein, 28 aa, Artificial Sequence
  Cyclic GFR-binding peptide
QDLSPISILYKIGKTPKILKYHYMIVKS

SEQ ID NO: 6942 - protein, 36 aa, Artificial Sequence
  Cyclic GFR-binding peptide
  MOD_RES (2)..(3)..(34)..(36): Xaa is C or S
PXXVPQALSATSILYYVGRKPKVLRKHRMIVRSXKX

SEQ ID NO: 6943 - protein, 26 aa, Artificial Sequence
  Cyclic GFR-binding peptide
SATSVLYYDDSSNVILRKHRNMVVRS

SEQ ID NO: 6944 - protein, 39 aa, Artificial Sequence
  Cyclic GFR-binding peptide
  MOD_RES (6)..(7): Xaa is C or S
KVGKAXXVPTKLSATSVLYYDDMGVPTLRKHREGMSVAE

SEQ ID NO: 6945 - protein, 39 aa, Artificial Sequence
  Cyclic GFR-binding peptide
  MOD_RES (4)..(5)..(36)..(38): Xaa is C or S
AAPXXVPQALSPISILYKVGRKPKVLKYHYMIVRSXKXS

SEQ ID NO: 6946 - protein, 36 aa, Artificial Sequence
  Cyclic GFR-binding peptide
  MOD_RES (33)..(35): Xaa is C or S
VPTKLSAISVLYLDDMGVPTLKNYQEGMSVAEXGXR

SEQ ID NO: 6947 - protein, 36 aa, Artificial Sequence
  Cyclic GFR-binding peptide
  MOD_RES (5)..(5): Xaa is C or S
RNVQXRPTQVQLSAISVLYLEIVRKKPIFLKNYQTL

SEQ ID NO: 6948 - protein, 33 aa, Artificial Sequence
  Cyclic GFR-binding peptide
  MOD_RES (31)..(33): Xaa is C or S
PTELSPISMLYKDENEKVVLKYHYDMVVEGXGX

SEQ ID NO: 6949 - protein, 37 aa, Artificial Sequence
  Cyclic GFR-binding peptide
  MOD_RES (2)..(3)..(36): Xaa is C or S
AXXVPTKLNAISVLYFDDMGVPTLKKYREGMSVAEXG

SEQ ID NO: 6950 - protein, 26 aa, Artificial Sequence
  Cyclic GFR-binding peptide
SATSVLYYDDSSNVILRKHRNMVVRA

SEQ ID NO: 6951 - protein, 33 aa, Artificial Sequence
  Cyclic GFR-binding peptide
  MOD_RES (30)..(32): Xaa is C or S
KLSAISVLYLDDMGVPTLKNYQEGMSVAEXGXR

SEQ ID NO: 6952 - protein, 27 aa, Artificial Sequence
  Cyclic GFR-binding peptide
  MOD_RES (1)..(1): Xaa is C or S
XAPTKLSPISVLYKDDSSNVILKYHYN

SEQ ID NO: 6953 - protein, 27 aa, Artificial Sequence
  Cyclic GFR-binding peptide
ALNAISILYFVGRKPKVLKKYRMIVRS

SEQ ID NO: 6954 - protein, 28 aa, Artificial Sequence
  Cyclic GFR-binding peptide
TKLSPISVLYKDDSSNVILKYHYNMVVR

SEQ ID NO: 6955 - protein, 24 aa, Artificial Sequence
  Cyclic GFR-binding peptide
PQDLNAISILYFVGRTPKVLKKYR

SEQ ID NO: 6956 - protein, 37 aa, Artificial Sequence
  Cyclic GFR-binding peptide
  MOD_RES (4)..(4): Xaa is C or S
NVQXRPTQVQLSPISVLYKEIVRKKPIFLKYHYTLED

SEQ ID NO: 6957 - protein, 29 aa, Artificial Sequence
  Cyclic GFR-binding peptide
  MOD_RES (29)..(29): Xaa is C or S
QLSPISVLYKDDSSNVILKYHYNMVVRAX

SEQ ID NO: 6958 - protein, 31 aa, Artificial Sequence
  Cyclic GFR-binding peptide
  MOD_RES (29)..(31): Xaa is C or S
ELSPISMLYKDEYDKVVLKYHYEMVVEGXGX

SEQ ID NO: 6959 - protein, 28 aa, Artificial Sequence
  Cyclic GFR-binding peptide
  MOD_RES (1)..(2): Xaa is C or S
XXVPTKLSAISVLYLDDMGVPTLKNYQE

SEQ ID NO: 6960 - protein, 24 aa, Artificial Sequence
  Cyclic GFR-binding peptide
TELSATSMLYYDEYDKVVLRKHRE

SEQ ID NO: 6961 - protein, 29 aa, Artificial Sequence
  Cyclic GFR-binding peptide
  MOD_RES (1)..(2): Xaa is C or S
XXAPTQLSPISVLYKDDSSNVILKYHYNM

SEQ ID NO: 6962 - protein, 33 aa, Artificial Sequence
  Cyclic GFR-binding peptide
  MOD_RES (31)..(33): Xaa is C or S
LSAISVLYLEIVRKKPIFLKNYQTLEDHLAXKX

SEQ ID NO: 6963 - protein, 22 aa, Artificial Sequence
  Cyclic GFR-binding peptide
DLSATSILYYVGRTPKVLRKHR

SEQ ID NO: 6964 - protein, 41 aa, Artificial Sequence
  Cyclic GFR-binding peptide
  MOD_RES (6)..(7)..(39)..(41): Xaa is C or S
AVPKAXXAPTKLSPISVLYKDSSNNVILKYHYNMVVKAXGX

SEQ ID NO: 6965 - protein, 25 aa, Artificial Sequence
  Cyclic GFR-binding peptide
SATSVLYYDDMGVPTLRKHREGMSV

SEQ ID NO: 6966 - protein, 36 aa, Artificial Sequence
  Cyclic GFR-binding peptide
  MOD_RES (36)..(36): Xaa is C or S
PTQVQLSAISVLYLEIVRKKPIFLKNYQTLEDHLAX

SEQ ID NO: 6967 - protein, 37 aa, Artificial Sequence
  Cyclic GFR-binding peptide
  MOD_RES (4)..(5)..(37): Xaa is C or S
PKAXXVPTELSATSMLYYDENEKVVLRKHRDMVVEGX

SEQ ID NO: 6968 - protein, 30 aa, Artificial Sequence
  Cyclic GFR-binding peptide
  MOD_RES (4)..(5): Xaa is C or S
GKAXXVPTKLSATSVLYYDDMGVPTLRKHR

SEQ ID NO: 6969 - protein, 33 aa, Artificial Sequence
  Cyclic GFR-binding peptide
  MOD_RES (31)..(33): Xaa is C or S
VSQDLSATSILYYIGKTPKILRKHRMIVKSXKX

SEQ ID NO: 6970 - protein, 40 aa, Artificial Sequence
  Cyclic GFR-binding peptide
  MOD_RES (5)..(6)..(37)..(39): Xaa is C or S
SASPXXVPQDLSATSILYYVGRTPKVLRKHRMVVKSXKXS

SEQ ID NO: 6971 - protein, 30 aa, Artificial Sequence
  Cyclic GFR-binding peptide
TQVQLSPISVLYKEIVRKKPIFLKYHYTLE

SEQ ID NO: 6972 - protein, 34 aa, Artificial Sequence
  Cyclic GFR-binding peptide
  MOD_RES (31)..(33): Xaa is C or S
PTKLSPISVLYKDDSSNVILKYHYNMVVRSXGXH

SEQ ID NO: 6973 - protein, 25 aa, Artificial Sequence
  Cyclic GFR-binding peptide
PQALSAISILYLVGRKPKVLKNYQM

SEQ ID NO: 6974 - protein, 32 aa, Artificial Sequence
  Cyclic GFR-binding peptide
  MOD_RES (2)..(3): Xaa is C or S
PXXAPTQLSPISVLYKDDSSNVILKYHYNMVV

SEQ ID NO: 6975 - protein, 34 aa, Artificial Sequence
  Cyclic GFR-binding peptide
  MOD_RES (1)..(2)..(33): Xaa is C or S
XXVPQDLSPISILYKVGRTPKVLKYHYMVVKSXK

SEQ ID NO: 6976 - protein, 26 aa, Artificial Sequence
  Cyclic GFR-binding peptide
TELSATSMLYYDEYDKVVLRKHREMV

SEQ ID NO: 6977 - protein, 39 aa, Artificial Sequence
  Cyclic GFR-binding peptide
  MOD_RES (2)..(39): Xaa is C or S
QXRPTQVQLSATSVLYYEIVRKKPIFLRKHRTLEDHLAX

SEQ ID NO: 6978 - protein, 24 aa, Artificial Sequence
  Cyclic GFR-binding peptide
LSATSVLYYDDMGVPTLRKHREGM

SEQ ID NO: 6979 - protein, 28 aa, Artificial Sequence
  Cyclic GFR-binding peptide
QLSAISVLYLEIVRKKPIFLKNYQTLED

SEQ ID NO: 6980 - protein, 33 aa, Artificial Sequence
  Cyclic GFR-binding peptide
  MOD_RES (1)..(2): Xaa is C or S
XXAPTKLSATSVLYYDDSSNVILRKHRNMVVRS

SEQ ID NO: 6981 - protein, 41 aa, Artificial Sequence
  Cyclic GFR-binding peptide
  MOD_RES (5)..(5): Xaa is C or S
RNVQXRPTQVQLSPISVLYKEIVRKKPIFLKYHYTLEDHLA

SEQ ID NO: 6982 - protein, 23 aa, Artificial Sequence
  Cyclic GFR-binding peptide
LSAISILYLIGKTPKILKNYQMI

SEQ ID NO: 6983 - protein, 35 aa, Artificial Sequence
  Cyclic GFR-binding peptide
  MOD_RES (3)..(4): Xaa is C or S
KAXXVPTKLSATSVLYYDDMGVPTLRKHREGMSVA

SEQ ID NO: 6984 - protein, 35 aa, Artificial Sequence
  Cyclic GFR-binding peptide
  MOD_RES (1)..(32)..(34): Xaa is C or S
XVSQDLSPISILYKIGKTPKILKYHYMIVKSXKXS

SEQ ID NO: 6985 - protein, 32 aa, Artificial Sequence
  Cyclic GFR-binding peptide
  MOD_RES (6)..(7): Xaa is C or S
ASAAPXXVPQALSATSILYYVGRKPKVLRKHR

SEQ ID NO: 6986 - protein, 32 aa, Artificial Sequence
  Cyclic GFR-binding peptide
  MOD_RES (29)..(31): Xaa is C or S
KLSAISVLYLDDSSNVILKNYQNMVVRSXGXH

SEQ ID NO: 6987 - protein, 29 aa, Artificial Sequence
  Cyclic GFR-binding peptide
  MOD_RES (28)..(28): Xaa is C or S
LSPISMLYKDEYDKVVLKYHYEMVVEGXG

SEQ ID NO: 6988 - protein, 37 aa, Artificial Sequence
  Cyclic GFR-binding peptide
  MOD_RES (3)..(4)..(35)..(37): Xaa is C or S
APXXVPQALSAISILYLVGRKPKVLKNYQMIVRSXKX

SEQ ID NO: 6989 - protein, 36 aa, Artificial Sequence
  Cyclic GFR-binding peptide
  MOD_RES (4)..(5): Xaa is C or S
PKAXXVPTELNAISMLYFDENEKVVLKKYRDMVVEG

SEQ ID NO: 6990 - protein, 32 aa, Artificial Sequence
  Cyclic GFR-binding peptide
  MOD_RES (1)..(2): Xaa is C or S
XXVPQDLSAISILYLVGRTPKVLKNYQMVVKS

SEQ ID NO: 6991 - protein, 21 aa, Artificial Sequence
  Cyclic GFR-binding peptide
SPISVLYKDSSNNVILKYHYN

SEQ ID NO: 6992 - protein, 30 aa, Artificial Sequence
  Cyclic GFR-binding peptide
  MOD_RES (27)..(29): Xaa is C or S
LSAISILYLVGRTPKVLKNYQMVVKSXKXS

SEQ ID NO: 6993 - protein, 34 aa, Artificial Sequence
  Cyclic GFR-binding peptide
  MOD_RES (3)..(4): Xaa is C or S
KPXXAPTKLSATSVLYYDDSSNVILRKHRNMVVR

SEQ ID NO: 6994 - protein, 29 aa, Artificial Sequence
  Cyclic GFR-binding peptide
  MOD_RES (27)..(29): Xaa is C or S
LSATSILYYIGKTPKILRKHRMIVKSXKX

SEQ ID NO: 6995 - protein, 33 aa, Artificial Sequence
  Cyclic GFR-binding peptide
  MOD_RES (1)..(33): Xaa is C or S
XAPTKLSATSVLYYDDSSNVILRKHRNMVVRSX

SEQ ID NO: 6996 - protein, 39 aa, Artificial Sequence
  Cyclic GFR-binding peptide
  MOD_RES (6)..(7)..(39): Xaa is C or S
AVPKAXXAPTKLSPISVLYKDSSNNVILKYHYNMVVKAX

SEQ ID NO: 6997 - protein, 26 aa, Artificial Sequence
  Cyclic GFR-binding peptide
PQDLSAISILYLVGRTPKVLKNYQMV

SEQ ID NO: 6998 - protein, 26 aa, Artificial Sequence
  Cyclic GFR-binding peptide
DLSATSILYYVGRTPKVLRKHRMVVK

SEQ ID NO: 6999 - protein, 37 aa, Artificial Sequence
  Cyclic GFR-binding peptide
  MOD_RES (4)..(5): Xaa is C or S
GKAXXVPTKLNAISVLYFDDMGVPTLKKYREGMSVAE

SEQ ID NO: 7000 - protein, 33 aa, Artificial Sequence
  Cyclic GFR-binding peptide
  MOD_RES (4)..(5): Xaa is C or S
PKAXXVPTELSPISMLYKDENEKVVLKYHYDMV

SEQ ID NO: 7001 - protein, 34 aa, Artificial Sequence
  Cyclic GFR-binding peptide
  MOD_RES (1)..(2)..(34): Xaa is C or S
XXAPTKLSPISVLYKDSSNNVILKYHYNMVVKAX

SEQ ID NO: 7002 - protein, 30 aa, Artificial Sequence
  Cyclic GFR-binding peptide
RPTQVQLSATSVLYYEIVRKKPIFLRKHRT

SEQ ID NO: 7003 - protein, 36 aa, Artificial Sequence
  Cyclic GFR-binding peptide
  MOD_RES (3)..(4)..(35): Xaa is C or S
SPXXVSQDLSPISILYKIGKTPKILKYHYMIVKSXK

SEQ ID NO: 7004 - protein, 28 aa, Artificial Sequence
  Cyclic GFR-binding peptide
  MOD_RES (1)..(1): Xaa is C or S
XAPTQLSATSVLYYDDSSNVILRKHRNM

SEQ ID NO: 7005 - protein, 32 aa, Artificial Sequence
  Cyclic GFR-binding peptide
  MOD_RES (6)..(7): Xaa is C or S
TVPKPXXAPTQLSAISVLYLDDSSNVILKNYQ

SEQ ID NO: 7006 - protein, 35 aa, Artificial Sequence
  Cyclic GFR-binding peptide
  MOD_RES (6)..(7): Xaa is C or S
ASASPXXVSQDLSAISILYLIGKTPKILKNYQMIV

SEQ ID NO: 7007 - protein, 36 aa, Artificial Sequence
  Cyclic GFR-binding peptide
  MOD_RES (4)..(36): Xaa is C or S
KPTXAPTKLSPISVLYKDDSSNVILKYHYNMVVRSX

SEQ ID NO: 7008 - protein, 31 aa, Artificial Sequence
  Cyclic GFR-binding peptide
  MOD_RES (5)..(5): Xaa is C or S
TKPTXAPTKLSATSVLYYDDSSNVILRKHRN

SEQ ID NO: 7009 - protein, 29 aa, Artificial Sequence
  Cyclic GFR-binding peptide
  MOD_RES (27)..(29): Xaa is C or S
LSATSILYYVGRTPKVLRKHRMVVKSXKX

SEQ ID NO: 7010 - protein, 32 aa, Artificial Sequence
  Cyclic GFR-binding peptide
  MOD_RES (3)..(4): Xaa is C or S
SPXXVSQDLSATSILYYIGKTPKILRKHRMIV

SEQ ID NO: 7011 - protein, 25 aa, Artificial Sequence
  Cyclic GFR-binding peptide
QDLSATSILYYIGKTPKILRKHRMI

SEQ ID NO: 7012 - protein, 29 aa, Artificial Sequence
  Cyclic GFR-binding peptide
  MOD_RES (27)..(29): Xaa is C or S
SAISVLYLDSSNNVILKNYQNMVVKAXGX

SEQ ID NO: 7013 - protein, 35 aa, Artificial Sequence
  Cyclic GFR-binding peptide
  MOD_RES (3)..(4): Xaa is C or S
KAXXVPTELNAISMLYFDENEKVVLKKYRDMVVEG

SEQ ID NO: 7014 - protein, 32 aa, Artificial Sequence
  Cyclic GFR-binding peptide
  MOD_RES (29)..(31): Xaa is C or S
KLSAISVLYLDSSNNVILKNYQNMVVKAXGXH

SEQ ID NO: 7015 - protein, 26 aa, Artificial Sequence
  Cyclic GFR-binding peptide
SATSMLYYDEYDKVVLRKHREMVVEG

SEQ ID NO: 7016 - protein, 27 aa, Artificial Sequence
  Cyclic GFR-binding peptide
VPQDLSAISILYLVGRTPKVLKNYQMV

SEQ ID NO: 7017 - protein, 30 aa, Artificial Sequence
  Cyclic GFR-binding peptide
  MOD_RES (4)..(4): Xaa is C or S
KPTXAPTKLSPISVLYKDDSSNVILKYHYN

SEQ ID NO: 7018 - protein, 32 aa, Artificial Sequence
  Cyclic GFR-binding peptide
  MOD_RES (4)..(5): Xaa is C or S
ASPXXVPQDLSATSILYYVGRTPKVLRKHRMV

SEQ ID NO: 7019 - protein, 32 aa, Artificial Sequence
  Cyclic GFR-binding peptide
  MOD_RES (3)..(4): Xaa is C or S
KAXXVPTELSPISMLYKDENEKVVLKYHYDMV

SEQ ID NO: 7020 - protein, 25 aa, Artificial Sequence
  Cyclic GFR-binding peptide
LSPISILYKIGKTPKILKYHYMIVK

SEQ ID NO: 7021 - protein, 34 aa, Artificial Sequence
  Cyclic GFR-binding peptide
  MOD_RES (1)..(32)..(34): Xaa is C or S
XVPQDLSATSILYYVGRTPKVLRKHRMVVKSXKX

SEQ ID NO: 7022 - protein, 24 aa, Artificial Sequence
  Cyclic GFR-binding peptide
TQLSAISVLYLDDSSNVILKNYQN

SEQ ID NO: 7023 - protein, 26 aa, Artificial Sequence
  Cyclic GFR-binding peptide
TKLSATSVLYYDDMGVPTLRKHREGM

SEQ ID NO: 7024 - protein, 36 aa, Artificial Sequence
  Cyclic GFR-binding peptide
  MOD_RES (1)..(33)..(35): Xaa is C or S
XAPTKLSATSVLYYDDSSNVILRKHRNMVVRSXGXH

SEQ ID NO: 7025 - protein, 33 aa, Artificial Sequence
  Cyclic GFR-binding peptide
  MOD_RES (1)..(2): Xaa is C or S
XXVPTELNAISMLYFDENEKVVLKKYRDMVVEG

SEQ ID NO: 7026 - protein, 24 aa, Artificial Sequence
  Cyclic GFR-binding peptide
ELSATSMLYYDEYDKVVLRKHREM

SEQ ID NO: 7027 - protein, 26 aa, Artificial Sequence
  Cyclic GFR-binding peptide
  MOD_RES (26)..(26): Xaa is C or S
NAISILYFVGRKPKVLKKYRMIVRSX

SEQ ID NO: 7028 - protein, 28 aa, Artificial Sequence
  Cyclic GFR-binding peptide
PTKLSATSVLYYDDSSNVILRKHRNMVV

SEQ ID NO: 7029 - protein, 34 aa, Artificial Sequence
  Cyclic GFR-binding peptide
  MOD_RES (31)..(33): Xaa is C or S
PTKLSPISVLYKDSSNNVILKYHYNMVVKAXGXH

SEQ ID NO: 7030 - protein, 36 aa, Artificial Sequence
  Cyclic GFR-binding peptide
  MOD_RES (2)..(3)..(34)..(36): Xaa is C or S
PXXVSQDLSPISILYKIGKTPKILKYHYMIVKSXKX

SEQ ID NO: 7031 - protein, 24 aa, Artificial Sequence
  Cyclic GFR-binding peptide
NAISVLYFEIVRKKPIFLKKYRTL

SEQ ID NO: 7032 - protein, 30 aa, Artificial Sequence
  Cyclic GFR-binding peptide
  MOD_RES (1)..(1): Xaa is C or S
XVPTELSATSMLYYDENEKVVLRKHRDMVV

SEQ ID NO: 7033 - protein, 25 aa, Artificial Sequence
  Cyclic GFR-binding peptide
NAISVLYFDSSNNVILKKYRNMVVK

SEQ ID NO: 7034 - protein, 33 aa, Artificial Sequence
  Cyclic GFR-binding peptide
  MOD_RES (2)..(3): Xaa is C or S
PXXVPQDLSPISILYKVGRTPKVLKYHYMVVKS

SEQ ID NO: 7035 - protein, 34 aa, Artificial Sequence
  Cyclic GFR-binding peptide
  MOD_RES (6)..(7): Xaa is C or S
ASASPXXVPQDLSPISILYKVGRTPKVLKYHYMV

SEQ ID NO: 7036 - protein, 32 aa, Artificial Sequence
  Cyclic GFR-binding peptide
  MOD_RES (1)..(32): Xaa is C or S
XVSQDLSATSILYYIGKTPKILRKHRMIVKSX

SEQ ID NO: 7037 - protein, 32 aa, Artificial Sequence
  Cyclic GFR-binding peptide
  MOD_RES (1)..(2): Xaa is C or S
XXVPQDLSPISILYKVGRTPKVLKYHYMVVKS

SEQ ID NO: 7038 - protein, 29 aa, Artificial Sequence
  Cyclic GFR-binding peptide
PTKLSAISVLYLDDMGVPTLKNYQEGMSV

SEQ ID NO: 7039 - protein, 39 aa, Artificial Sequence
  Cyclic GFR-binding peptide
  MOD_RES (5)..(6)..(37)..(39): Xaa is C or S
SAAPXXVPQALSATSILYYVGRKPKVLRKHRMIVRSXKX

SEQ ID NO: 7040 - protein, 39 aa, Artificial Sequence
  Cyclic GFR-binding peptide
  MOD_RES (3)..(4)..(36)..(38): Xaa is C or S
KPXXAPTKLSPISVLYKDDSSNVILKYHYNMVVRSXGXH

SEQ ID NO: 7041 - protein, 27 aa, Artificial Sequence
  Cyclic GFR-binding peptide
LSPISVLYKDSSNNVILKYHYNMVVKA

SEQ ID NO: 7042 - protein, 33 aa, Artificial Sequence
  Cyclic GFR-binding peptide
TQVQLSATSVLYYEIVRKKPIFLRKHRTLEDHL

SEQ ID NO: 7043 - protein, 35 aa, Artificial Sequence
  Cyclic GFR-binding peptide
  MOD_RES (6)..(7): Xaa is C or S
KIPKAXXVPTELSATSMLYYDENEKVVLRKHRDMV

SEQ ID NO: 7044 - protein, 33 aa, Artificial Sequence
  Cyclic GFR-binding peptide
  MOD_RES (3)..(4): Xaa is C or S
KPXXAPTKLSATSVLYYDDSSNVILRKHRNMVV

SEQ ID NO: 7045 - protein, 28 aa, Artificial Sequence
  Cyclic GFR-binding peptide
PQDLNAISILYFVGRTPKVLKKYRMVVK

SEQ ID NO: 7046 - protein, 33 aa, Artificial Sequence
  Cyclic GFR-binding peptide
QVQLNAISVLYFEIVRKKPIFLKKYRTLEDHLA

SEQ ID NO: 7047 - protein, 34 aa, Artificial Sequence
  Cyclic GFR-binding peptide
  MOD_RES (5)..(6): Xaa is C or S
VPKPXXAPTQLSPISVLYKDDSSNVILKYHYNMV

SEQ ID NO: 7048 - protein, 30 aa, Artificial Sequence
  Cyclic GFR-binding peptide
  MOD_RES (4)..(5): Xaa is C or S
PKAXXVPTELNAISMLYFDEYDKVVLKKYR

SEQ ID NO: 7049 - protein, 39 aa, Artificial Sequence
  Cyclic GFR-binding peptide
  MOD_RES (5)..(6)..(37)..(39): Xaa is C or S
SAAPXXVPQALSPISILYKVGRKPKVLKYHYMIVRSXKX

SEQ ID NO: 7050 - protein, 30 aa, Artificial Sequence
  Cyclic GFR-binding peptide
VPTKLNAISVLYFDDMGVPTLKKYREGMSV

SEQ ID NO: 7051 - protein, 38 aa, Artificial Sequence
  Cyclic GFR-binding peptide
  MOD_RES (3)..(35)..(37): Xaa is C or S
PTXAPTKLSPISVLYKDDSSNVILKYHYNMVVRSXGXH

SEQ ID NO: 7052 - protein, 37 aa, Artificial Sequence
  Cyclic GFR-binding peptide
  MOD_RES (5)..(6)..(37): Xaa is C or S
SASPXXVPQDLSATSILYYVGRTPKVLRKHRMVVKSX

SEQ ID NO: 7053 - protein, 22 aa, Artificial Sequence
  Cyclic GFR-binding peptide
LSATSILYYVGRTPKVLRKHRM

SEQ ID NO: 7054 - protein, 32 aa, Artificial Sequence
  Cyclic GFR-binding peptide
  MOD_RES (31)..(31): Xaa is C or S
PTKLSPISVLYKDSSNNVILKYHYNMVVKAXG

SEQ ID NO: 7055 - protein, 33 aa, Artificial Sequence
  Cyclic GFR-binding peptide
  MOD_RES (31)..(33): Xaa is C or S
VPQALSAISILYLVGRKPKVLKNYQMIVRSXKX

SEQ ID NO: 7056 - protein, 32 aa, Artificial Sequence
  Cyclic GFR-binding peptide
  MOD_RES (5)..(6): Xaa is C or S
SASPXXVSQDLNAISILYFIGKTPKILKKYRM

SEQ ID NO: 7057 - protein, 31 aa, Artificial Sequence
  Cyclic GFR-binding peptide
  MOD_RES (30)..(30): Xaa is C or S
PQALSAISILYLVGRKPKVLKNYQMIVRSXK

SEQ ID NO: 7058 - protein, 28 aa, Artificial Sequence
  Cyclic GFR-binding peptide
  MOD_RES (28)..(28): Xaa is C or S
LNAISMLYFDEYDKVVLKKYREMVVEGX

SEQ ID NO: 7059 - protein, 38 aa, Artificial Sequence
  Cyclic GFR-binding peptide
  MOD_RES (6)..(7): Xaa is C or S
SIPKAXXVPTELSATSMLYYDEYDKVVLRKHREMVVEG

SEQ ID NO: 7060 - protein, 32 aa, Artificial Sequence
  Cyclic GFR-binding peptide
  MOD_RES (2)..(3): Xaa is C or S
AXXVPTELSATSMLYYDEYDKVVLRKHREMVV

SEQ ID NO: 7061 - protein, 24 aa, Artificial Sequence
  Cyclic GFR-binding peptide
SPISMLYKDENEKVVLKYHYDMVV

SEQ ID NO: 7062 - protein, 24 aa, Artificial Sequence
  Cyclic GFR-binding peptide
PQDLSPISILYKVGRTPKVLKYHY

SEQ ID NO: 7063 - protein, 32 aa, Artificial Sequence
  Cyclic GFR-binding peptide
  MOD_RES (4)..(5): Xaa is C or S
PKPXXAPTKLSAISVLYLDDSSNVILKNYQNM

SEQ ID NO: 7064 - protein, 34 aa, Artificial Sequence
  Cyclic GFR-binding peptide
  MOD_RES (6)..(7): Xaa is C or S
KVGKAXXVPTKLSAISVLYLDDMGVPTLKNYQEG

SEQ ID NO: 7065 - protein, 33 aa, Artificial Sequence
  Cyclic GFR-binding peptide
  MOD_RES (30)..(32): Xaa is C or S
TKLSATSVLYYDDSSNVILRKHRNMVVRSXGXH

SEQ ID NO: 7066 - protein, 32 aa, Artificial Sequence
  Cyclic GFR-binding peptide
  MOD_RES (29)..(31): Xaa is C or S
QDLNAISILYFIGKTPKILKKYRMIVKSXKXS

SEQ ID NO: 7067 - protein, 36 aa, Artificial Sequence
  Cyclic GFR-binding peptide
  MOD_RES (5)..(6): Xaa is C or S
VGKAXXVPTKLSATSVLYYDDMGVPTLRKHREGMSV

SEQ ID NO: 7068 - protein, 37 aa, Artificial Sequence
  Cyclic GFR-binding peptide
  MOD_RES (35)..(37): Xaa is C or S
TQVQLNAISVLYFEIVRKKPIFLKKYRTLEDHLAXKX

SEQ ID NO: 7069 - protein, 30 aa, Artificial Sequence
  Cyclic GFR-binding peptide
  MOD_RES (30)..(30): Xaa is C or S
KLSATSVLYYDDMGVPTLRKHREGMSVAEX

SEQ ID NO: 7070 - protein, 38 aa, Artificial Sequence
  Cyclic GFR-binding peptide
  MOD_RES (2)..(3)..(35)..(37): Xaa is C or S
AXXVPTELNAISMLYFDEYDKVVLKKYREMVVEGXGXR

SEQ ID NO: 7071 - protein, 35 aa, Artificial Sequence
  Cyclic GFR-binding peptide
  MOD_RES (1)..(33)..(35): Xaa is C or S
XVPTELSATSMLYYDENEKVVLRKHRDMVVEGXGX

SEQ ID NO: 7072 - protein, 28 aa, Artificial Sequence
  Cyclic GFR-binding peptide
  MOD_RES (2)..(3): Xaa is C or S
PXXAPTQLSATSVLYYDDSSNVILRKHR

SEQ ID NO: 7073 - protein, 26 aa, Artificial Sequence
  Cyclic GFR-binding peptide
LSATSILYYVGRKPKVLRKHRMIVRS

SEQ ID NO: 7074 - protein, 36 aa, Artificial Sequence
  Cyclic GFR-binding peptide
  MOD_RES (6)..(7): Xaa is C or S
SIPKAXXVPTELSPISMLYKDEYDKVVLKYHYEMVV

SEQ ID NO: 7075 - protein, 29 aa, Artificial Sequence
  Cyclic GFR-binding peptide
  MOD_RES (2)..(3): Xaa is C or S
AXXVPTELSATSMLYYDENEKVVLRKHRD

SEQ ID NO: 7076 - protein, 24 aa, Artificial Sequence
  Cyclic GFR-binding peptide
QDLSATSILYYVGRTPKVLRKHRM

SEQ ID NO: 7077 - protein, 21 aa, Artificial Sequence
  Cyclic GFR-binding peptide
LSAISVLYLDDSSNVILKNYQ

SEQ ID NO: 7078 - protein, 29 aa, Artificial Sequence
  Cyclic GFR-binding peptide
  MOD_RES (27)..(29): Xaa is C or S
SPISMLYKDENEKVVLKYHYDMVVEGXGX

SEQ ID NO: 7079 - protein, 28 aa, Artificial Sequence
  Cyclic GFR-binding peptide
TKLSAISVLYLDDSSNVILKNYQNMVVR

SEQ ID NO: 7080 - protein, 33 aa, Artificial Sequence
  Cyclic GFR-binding peptide
  MOD_RES (5)..(6): Xaa is C or S
VPKPXXAPTKLSPISVLYKDDSSNVILKYHYNM

SEQ ID NO: 7081 - protein, 27 aa, Artificial Sequence
  Cyclic GFR-binding peptide
  MOD_RES (27)..(27): Xaa is C or S
LSATSILYYIGKTPKILRKHRMIVKSX

SEQ ID NO: 7082 - protein, 24 aa, Artificial Sequence
  Cyclic GFR-binding peptide
TKLSATSVLYYDDMGVPTLRKHRE

SEQ ID NO: 7083 - protein, 35 aa, Artificial Sequence
  Cyclic GFR-binding peptide
  MOD_RES (1)..(32)..(34): Xaa is C or S
XVPQDLSAISILYLVGRTPKVLKNYQMVVKSXKXS

SEQ ID NO: 7084 - protein, 30 aa, Artificial Sequence
  Cyclic GFR-binding peptide
  MOD_RES (1)..(2): Xaa is C or S
XXVPTELSATSMLYYDENEKVVLRKHRDMV

SEQ ID NO: 7085 - protein, 24 aa, Artificial Sequence
  Cyclic GFR-binding peptide
QLSPISVLYKEIVRKKPIFLKYHY

SEQ ID NO: 7086 - protein, 25 aa, Artificial Sequence
  Cyclic GFR-binding peptide
PTKLNAISVLYFDDMGVPTLKKYRE

SEQ ID NO: 7087 - protein, 34 aa, Artificial Sequence
  Cyclic GFR-binding peptide
  MOD_RES (2)..(3)..(34): Xaa is C or S
PXXVPQDLSPISILYKVGRTPKVLKYHYMVVKSX

SEQ ID NO: 7088 - protein, 33 aa, Artificial Sequence
  Cyclic GFR-binding peptide
  MOD_RES (7)..(7): Xaa is C or S
HVTKPTXAPTKLSPISVLYKDDSSNVILKYHYN

SEQ ID NO: 7089 - protein, 34 aa, Artificial Sequence
  Cyclic GFR-binding peptide
  MOD_RES (2)..(3): Xaa is C or S
AXXAPTKLNAISVLYFDSSNNVILKKYRNMVVKA

SEQ ID NO: 7090 - protein, 33 aa, Artificial Sequence
  Cyclic GFR-binding peptide
  MOD_RES (1)..(2): Xaa is C or S
XXAPTKLSAISVLYLDDSSNVILKNYQNMVVRS

SEQ ID NO: 7091 - protein, 33 aa, Artificial Sequence
  Cyclic GFR-binding peptide
  MOD_RES (32)..(32): Xaa is C or S
APTKLSATSVLYYDDSSNVILRKHRNMVVRSXG

SEQ ID NO: 7092 - protein, 36 aa, Artificial Sequence
  Cyclic GFR-binding peptide
  MOD_RES (3)..(3): Xaa is C or S
VQXRPTQVQLNAISVLYFEIVRKKPIFLKKYRTLED

SEQ ID NO: 7093 - protein, 33 aa, Artificial Sequence
  Cyclic GFR-binding peptide
  MOD_RES (1)..(33): Xaa is C or S
XAPTKLSAISVLYLDDSSNVILKNYQNMVVRSX

SEQ ID NO: 7094 - protein, 24 aa, Artificial Sequence
  Cyclic GFR-binding peptide
LSAISVLYLDDMGVPTLKNYQEGM

SEQ ID NO: 7095 - protein, 31 aa, Artificial Sequence
  Cyclic GFR-binding peptide
VPTELSATSMLYYDEYDKVVLRKHREMVVEG

SEQ ID NO: 7096 - protein, 37 aa, Artificial Sequence
  Cyclic GFR-binding peptide
  MOD_RES (4)..(5)..(36): Xaa is C or S
AAPXXVPQALSPISILYKVGRKPKVLKYHYMIVRSXK

SEQ ID NO: 7097 - protein, 29 aa, Artificial Sequence
  Cyclic GFR-binding peptide
  MOD_RES (1)..(2): Xaa is C or S
XXVPQDLNAISILYFVGRTPKVLKKYRMV

SEQ ID NO: 7098 - protein, 29 aa, Artificial Sequence
  Cyclic GFR-binding peptide
  MOD_RES (28)..(28): Xaa is C or S
DLNAISILYFIGKTPKILKKYRMIVKSXK

SEQ ID NO: 7099 - protein, 25 aa, Artificial Sequence
  Cyclic GFR-binding peptide
SATSILYYVGRKPKVLRKHRMIVRS

SEQ ID NO: 7100 - protein, 38 aa, Artificial Sequence
  Cyclic GFR-binding peptide
  MOD_RES (6)..(7): Xaa is C or S
KVGKAXXVPTKLSAISVLYLDDMGVPTLKNYQEGMSVA

SEQ ID NO: 7101 - protein, 32 aa, Artificial Sequence
  Cyclic GFR-binding peptide
  MOD_RES (2)..(3): Xaa is C or S
PXXAPTKLSPISVLYKDDSSNVILKYHYNMVV

SEQ ID NO: 7102 - protein, 32 aa, Artificial Sequence
  Cyclic GFR-binding peptide
  MOD_RES (30)..(32): Xaa is C or S
TQLSAISVLYLDDSSNVILKNYQNMVVRAXGX

SEQ ID NO: 7103 - protein, 34 aa, Artificial Sequence
  Cyclic GFR-binding peptide
  MOD_RES (32)..(34): Xaa is C or S
VPTELSPISMLYKDENEKVVLKYHYDMVVEGXGX

SEQ ID NO: 7104 - protein, 32 aa, Artificial Sequence
  Cyclic GFR-binding peptide
  MOD_RES (29)..(31): Xaa is C or S
QALSATSILYYVGRKPKVLRKHRMIVRSXKXS

SEQ ID NO: 7105 - protein, 23 aa, Artificial Sequence
  Cyclic GFR-binding peptide
LSATSVLYYDDSSNVILRKHRNM

SEQ ID NO: 7106 - protein, 31 aa, Artificial Sequence
  Cyclic GFR-binding peptide
  MOD_RES (3)..(4): Xaa is C or S
KPXXAPTQLSAISVLYLDDSSNVILKNYQNM

SEQ ID NO: 7107 - protein, 34 aa, Artificial Sequence
  Cyclic GFR-binding peptide
  MOD_RES (4)..(5): Xaa is C or S
PKAXXVPTELSPISMLYKDENEKVVLKYHYDMVV

SEQ ID NO: 7108 - protein, 31 aa, Artificial Sequence
  Cyclic GFR-binding peptide
  MOD_RES (2)..(2): Xaa is C or S
QXRPTQVQLSAISVLYLEIVRKKPIFLKNYQ

SEQ ID NO: 7109 - protein, 33 aa, Artificial Sequence
  Cyclic GFR-binding peptide
  MOD_RES (30)..(32): Xaa is C or S
SQDLSATSILYYIGKTPKILRKHRMIVKSXKXS

SEQ ID NO: 7110 - protein, 33 aa, Artificial Sequence
  Cyclic GFR-binding peptide
  MOD_RES (30)..(32): Xaa is C or S
TELSPISMLYKDEYDKVVLKYHYEMVVEGXGXR

SEQ ID NO: 7111 - protein, 30 aa, Artificial Sequence
  Cyclic GFR-binding peptide
  MOD_RES (2)..(3): Xaa is C or S
AXXVPTKLSATSVLYYDDMGVPTLRKHREG

SEQ ID NO: 7112 - protein, 31 aa, Artificial Sequence
  Cyclic GFR-binding peptide
  MOD_RES (5)..(6): Xaa is C or S
SASPXXVPQDLNAISILYFVGRTPKVLKKYR

SEQ ID NO: 7113 - protein, 24 aa, Artificial Sequence
  Cyclic GFR-binding peptide
LSPISMLYKDENEKVVLKYHYDMV

SEQ ID NO: 7114 - protein, 30 aa, Artificial Sequence
  Cyclic GFR-binding peptide
  MOD_RES (27)..(29): Xaa is C or S
SPISVLYKDSSNNVILKYHYNMVVKAXGXH

SEQ ID NO: 7115 - protein, 33 aa, Artificial Sequence
  Cyclic GFR-binding peptide
  MOD_RES (6)..(7): Xaa is C or S
KVGKAXXVPTKLSAISVLYLDDMGVPTLKNYQE

SEQ ID NO: 7116 - protein, 37 aa, Artificial Sequence
  Cyclic GFR-binding peptide
  MOD_RES (2)..(3)..(34)..(36): Xaa is C or S
PXXVPQDLNAISILYFVGRTPKVLKKYRMVVKSXKXS

SEQ ID NO: 7117 - protein, 29 aa, Artificial Sequence
  Cyclic GFR-binding peptide
  MOD_RES (27)..(29): Xaa is C or S
SPISVLYKDDSSNVILKYHYNMVVRSXGX

SEQ ID NO: 7118 - protein, 31 aa, Artificial Sequence
  Cyclic GFR-binding peptide
  MOD_RES (30)..(30): Xaa is C or S
NAISVLYFEIVRKKPIFLKKYRTLEDHLAXK

SEQ ID NO: 7119 - protein, 25 aa, Artificial Sequence
  Cyclic GFR-binding peptide
PTKLSATSVLYYDDMGVPTLRKHRE

SEQ ID NO: 7120 - protein, 27 aa, Artificial Sequence
  Cyclic GFR-binding peptide
VSQDLSPISILYKIGKTPKILKYHYMI

SEQ ID NO: 7121 - protein, 30 aa, Artificial Sequence
  Cyclic GFR-binding peptide
PTELSATSMLYYDEYDKVVLRKHREMVVEG

SEQ ID NO: 7122 - protein, 27 aa, Artificial Sequence
  Cyclic GFR-binding peptide
LSATSMLYYDENEKVVLRKHRDMVVEG

SEQ ID NO: 7123 - protein, 30 aa, Artificial Sequence
  Cyclic GFR-binding peptide
APTKLSPISVLYKDSSNNVILKYHYNMVVK

SEQ ID NO: 7124 - protein, 31 aa, Artificial Sequence
  Cyclic GFR-binding peptide
VQLSAISVLYLEIVRKKPIFLKNYQTLEDHL

SEQ ID NO: 7125 - protein, 24 aa, Artificial Sequence
  Cyclic GFR-binding peptide
SQDLNAISILYFIGKTPKILKKYR

SEQ ID NO: 7126 - protein, 28 aa, Artificial Sequence
  Cyclic GFR-binding peptide
KLSAISVLYLDSSNNVILKNYQNMVVKA

SEQ ID NO: 7127 - protein, 32 aa, Artificial Sequence
  Cyclic GFR-binding peptide
  MOD_RES (1)..(1): Xaa is C or S
XAPTQLSAISVLYLDDSSNVILKNYQNMVVRA

SEQ ID NO: 7128 - protein, 25 aa, Artificial Sequence
  Cyclic GFR-binding peptide
QLSAISVLYLEIVRKKPIFLKNYQT

SEQ ID NO: 7129 - protein, 31 aa, Artificial Sequence
  Cyclic GFR-binding peptide
  MOD_RES (2)..(3): Xaa is C or S
AXXVPTELSPISMLYKDEYDKVVLKYHYEMV

SEQ ID NO: 7130 - protein, 35 aa, Artificial Sequence
  Cyclic GFR-binding peptide
  MOD_RES (5)..(6): Xaa is C or S
SASPXXVPQDLSATSILYYVGRTPKVLRKHRMVVK

SEQ ID NO: 7131 - protein, 23 aa, Artificial Sequence
  Cyclic GFR-binding peptide
TKLNAISVLYFDSSNNVILKKYR

SEQ ID NO: 7132 - protein, 25 aa, Artificial Sequence
  Cyclic GFR-binding peptide
VPTELSPISMLYKDEYDKVVLKYHY

SEQ ID NO: 7133 - protein, 38 aa, Artificial Sequence
  Cyclic GFR-binding peptide
  MOD_RES (5)..(5): Xaa is C or S
RNVQXRPTQVQLNAISVLYFEIVRKKPIFLKKYRTLED

SEQ ID NO: 7134 - protein, 31 aa, Artificial Sequence
  Cyclic GFR-binding peptide
  MOD_RES (1)..(1): Xaa is C or S
XAPTKLSPISVLYKDDSSNVILKYHYNMVVR

SEQ ID NO: 7135 - protein, 26 aa, Artificial Sequence
  Cyclic GFR-binding peptide
  MOD_RES (1)..(1): Xaa is C or S
XVSQDLSAISILYLIGKTPKILKNYQ

SEQ ID NO: 7136 - protein, 38 aa, Artificial Sequence
  Cyclic GFR-binding peptide
  MOD_RES (2)..(3)..(35)..(37): Xaa is C or S
PXXAPTKLSPISVLYKDDSSNVILKYHYNMVVRSXGXH

SEQ ID NO: 7137 - protein, 35 aa, Artificial Sequence
  Cyclic GFR-binding peptide
  MOD_RES (4)..(5): Xaa is C or S
PKPXXAPTKLSAISVLYLDDSSNVILKNYQNMVVR

SEQ ID NO: 7138 - protein, 23 aa, Artificial Sequence
  Cyclic GFR-binding peptide
SAISVLYLDDMGVPTLKNYQEGM

SEQ ID NO: 7139 - protein, 27 aa, Artificial Sequence
  Cyclic GFR-binding peptide
  MOD_RES (1)..(2): Xaa is C or S
XXVPTKLNAISVLYFDDMGVPTLKKYR

SEQ ID NO: 7140 - protein, 30 aa, Artificial Sequence
  Cyclic GFR-binding peptide
  MOD_RES (1)..(2): Xaa is C or S
XXAPTQLSAISVLYLDDSSNVILKNYQNMV

SEQ ID NO: 7141 - protein, 40 aa, Artificial Sequence
  Cyclic GFR-binding peptide
  MOD_RES (4)..(5)..(38)..(40): Xaa is C or S
GKAXXVPTKLSAISVLYLDDMGVPTLKNYQEGMSVAEXGX

SEQ ID NO: 7142 - protein, 33 aa, Artificial Sequence
  Cyclic GFR-binding peptide
  MOD_RES (1)..(1): Xaa is C or S
XVPTKLNAISVLYFDDMGVPTLKKYREGMSVAE

SEQ ID NO: 7143 - protein, 31 aa, Artificial Sequence
  Cyclic GFR-binding peptide
  MOD_RES (5)..(6): Xaa is C or S
IPKAXXVPTELNAISMLYFDEYDKVVLKKYR

SEQ ID NO: 7144 - protein, 31 aa, Artificial Sequence
  Cyclic GFR-binding peptide
  MOD_RES (29)..(31): Xaa is C or S
LNAISVLYFDDMGVPTLKKYREGMSVAEXGX

SEQ ID NO: 7145 - protein, 34 aa, Artificial Sequence
  Cyclic GFR-binding peptide
  MOD_RES (1)..(1): Xaa is C or S
XRPTQVQLSATSVLYYEIVRKKPIFLRKHRTLED

SEQ ID NO: 7146 - protein, 24 aa, Artificial Sequence
  Cyclic GFR-binding peptide
SAISILYLVGRTPKVLKNYQMVVK

SEQ ID NO: 7147 - protein, 41 aa, Artificial Sequence
  Cyclic GFR-binding peptide
  MOD_RES (6)..(7)..(40): Xaa is C or S
KVGKAXXVPTKLSAISVLYLDDMGVPTLKNYQEGMSVAEXG

SEQ ID NO: 7148 - protein, 28 aa, Artificial Sequence
  Cyclic GFR-binding peptide
PTQLSATSVLYYDDSSNVILRKHRNMVV

SEQ ID NO: 7149 - protein, 27 aa, Artificial Sequence
  Cyclic GFR-binding peptide
  MOD_RES (1)..(1): Xaa is C or S
XVPQALSPISILYKVGRKPKVLKYHYM

SEQ ID NO: 7150 - protein, 32 aa, Artificial Sequence
  Cyclic GFR-binding peptide
  MOD_RES (2)..(3): Xaa is C or S
AXXVPTELNAISMLYFDEYDKVVLKKYREMVV

SEQ ID NO: 7151 - protein, 30 aa, Artificial Sequence
  Cyclic GFR-binding peptide
  MOD_RES (29)..(29): Xaa is C or S
QDLSAISILYLVGRTPKVLKNYQMVVKSXK

SEQ ID NO: 7152 - protein, 31 aa, Artificial Sequence
  Cyclic GFR-binding peptide
RPTQVQLNAISVLYFEIVRKKPIFLKKYRTL

SEQ ID NO: 7153 - protein, 36 aa, Artificial Sequence
  Cyclic GFR-binding peptide
  MOD_RES (6)..(7): Xaa is C or S
KVGKAXXVPTKLSAISVLYLDDMGVPTLKNYQEGMS

SEQ ID NO: 7154 - protein, 27 aa, Artificial Sequence
  Cyclic GFR-binding peptide
QDLSPISILYKIGKTPKILKYHYMIVK

SEQ ID NO: 7155 - protein, 40 aa, Artificial Sequence
  Cyclic GFR-binding peptide
  MOD_RES (5)..(6)..(37)..(39): Xaa is C or S
SASPXXVSQDLSPISILYKIGKTPKILKYHYMIVKSXKXS

SEQ ID NO: 7156 - protein, 40 aa, Artificial Sequence
  Cyclic GFR-binding peptide
  MOD_RES (6)..(7)..(38)..(40): Xaa is C or S
ASASPXXVPQDLSAISILYLVGRTPKVLKNYQMVVKSXKX

SEQ ID NO: 7157 - protein, 34 aa, Artificial Sequence
  Cyclic GFR-binding peptide
  MOD_RES (32)..(34): Xaa is C or S
PTKLSAISVLYLDDMGVPTLKNYQEGMSVAEXGX

SEQ ID NO: 7158 - protein, 35 aa, Artificial Sequence
  Cyclic GFR-binding peptide
  MOD_RES (1)..(2)..(35): Xaa is C or S
XXVPTKLSAISVLYLDDMGVPTLKNYQEGMSVAEX

SEQ ID NO: 7159 - protein, 32 aa, Artificial Sequence
  Cyclic GFR-binding peptide
  MOD_RES (1)..(1): Xaa is C or S
XRPTQVQLSATSVLYYEIVRKKPIFLRKHRTL

SEQ ID NO: 7160 - protein, 36 aa, Artificial Sequence
  Cyclic GFR-binding peptide
  MOD_RES (35)..(35): Xaa is C or S
TQVQLNAISVLYFEIVRKKPIFLKKYRTLEDHLAXK

SEQ ID NO: 7161 - protein, 38 aa, Artificial Sequence
  Cyclic GFR-binding peptide
  MOD_RES (4)..(5)..(37): Xaa is C or S
PKPXXAPTKLSATSVLYYDDSSNVILRKHRNMVVRSXG

SEQ ID NO: 7162 - protein, 30 aa, Artificial Sequence
  Cyclic GFR-binding peptide
  MOD_RES (29)..(29): Xaa is C or S
ELSPISMLYKDEYDKVVLKYHYEMVVEGXG

SEQ ID NO: 7163 - protein, 41 aa, Artificial Sequence
  Cyclic GFR-binding peptide
  MOD_RES (6)..(7)..(39)..(41): Xaa is C or S
SIPKAXXVPTELSATSMLYYDEYDKVVLRKHREMVVEGXGX

SEQ ID NO: 7164 - protein, 30 aa, Artificial Sequence
  Cyclic GFR-binding peptide
  MOD_RES (27)..(29): Xaa is C or S
SAISVLYLDDSSNVILKNYQNMVVRSXGXH

SEQ ID NO: 7165 - protein, 37 aa, Artificial Sequence
  Cyclic GFR-binding peptide
  MOD_RES (4)..(5)..(37): Xaa is C or S
PKAXXAPTKLNAISVLYFDSSNNVILKKYRNMVVKAX

SEQ ID NO: 7166 - protein, 35 aa, Artificial Sequence
  Cyclic GFR-binding peptide
  MOD_RES (1)..(2)..(33)..(35): Xaa is C or S
XXVPQDLSATSILYYVGRTPKVLRKHRMVVKSXKX

SEQ ID NO: 7167 - protein, 32 aa, Artificial Sequence
  Cyclic GFR-binding peptide
  MOD_RES (4)..(5): Xaa is C or S
AAPXXVPQALSAISILYLVGRKPKVLKNYQMI

SEQ ID NO: 7168 - protein, 38 aa, Artificial Sequence
  Cyclic GFR-binding peptide
  MOD_RES (4)..(5)..(37): Xaa is C or S
PKAXXAPTKLSPISVLYKDSSNNVILKYHYNMVVKAXG

SEQ ID NO: 7169 - protein, 29 aa, Artificial Sequence
  Cyclic GFR-binding peptide
APTKLSATSVLYYDDSSNVILRKHRNMVV

SEQ ID NO: 7170 - protein, 35 aa, Artificial Sequence
  Cyclic GFR-binding peptide
  MOD_RES (3)..(4): Xaa is C or S
KPXXAPTKLSAISVLYLDDSSNVILKNYQNMVVRS

SEQ ID NO: 7171 - protein, 38 aa, Artificial Sequence
  Cyclic GFR-binding peptide
  MOD_RES (6)..(7): Xaa is C or S
KVGKAXXVPTKLSATSVLYYDDMGVPTLRKHREGMSVA

SEQ ID NO: 7172 - protein, 23 aa, Artificial Sequence
  Cyclic GFR-binding peptide
LSPISMLYKDENEKVVLKYHYDM

SEQ ID NO: 7173 - protein, 29 aa, Artificial Sequence
  Cyclic GFR-binding peptide
QLNAISVLYFEIVRKKPIFLKKYRTLEDH

SEQ ID NO: 7174 - protein, 30 aa, Artificial Sequence
  Cyclic GFR-binding peptide
  MOD_RES (3)..(3): Xaa is C or S
PTXAPTKLSAISVLYLDDSSNVILKNYQNM

SEQ ID NO: 7175 - protein, 34 aa, Artificial Sequence
  Cyclic GFR-binding peptide
  MOD_RES (31)..(33): Xaa is C or S
VPQDLSPISILYKVGRTPKVLKYHYMVVKSXKXS

SEQ ID NO: 7176 - protein, 27 aa, Artificial Sequence
  Cyclic GFR-binding peptide
TKLSAISVLYLDDMGVPTLKNYQEGMS

SEQ ID NO: 7177 - protein, 38 aa, Artificial Sequence
  Cyclic GFR-binding peptide
  MOD_RES (3)..(4)..(35)..(37): Xaa is C or S
SPXXVPQDLSATSILYYVGRTPKVLRKHRMVVKSXKXS

SEQ ID NO: 7178 - protein, 29 aa, Artificial Sequence
  Cyclic GFR-binding peptide
  MOD_RES (27)..(29): Xaa is C or S
LSPISILYKIGKTPKILKYHYMIVKSXKX

SEQ ID NO: 7179 - protein, 32 aa, Artificial Sequence
  Cyclic GFR-binding peptide
  MOD_RES (3)..(4): Xaa is C or S
KPXXAPTKLSPISVLYKDDSSNVILKYHYNMV

SEQ ID NO: 7180 - protein, 22 aa, Artificial Sequence
  Cyclic GFR-binding peptide
LSPISMLYKDENEKVVLKYHYD

SEQ ID NO: 7181 - protein, 41 aa, Artificial Sequence
  Cyclic GFR-binding peptide
  MOD_RES (7)..(39)..(41): Xaa is C or S
HVTKPTXAPTKLSATSVLYYDDSSNVILRKHRNMVVRSXGX

SEQ ID NO: 7182 - protein, 31 aa, Artificial Sequence
  Cyclic GFR-binding peptide
  MOD_RES (1)..(1): Xaa is C or S
XVPQALSAISILYLVGRKPKVLKNYQMIVRS

SEQ ID NO: 7183 - protein, 32 aa, Artificial Sequence
  Cyclic GFR-binding peptide
  MOD_RES (6)..(7): Xaa is C or S
SIPKAXXVPTELSPISMLYKDEYDKVVLKYHY

SEQ ID NO: 7184 - protein, 41 aa, Artificial Sequence
  Cyclic GFR-binding peptide
  MOD_RES (6)..(7)..(39)..(41): Xaa is C or S
TVPKPXXAPTQLSATSVLYYDDSSNVILRKHRNMVVRAXGX

SEQ ID NO: 7185 - protein, 34 aa, Artificial Sequence
  Cyclic GFR-binding peptide
  MOD_RES (5)..(6): Xaa is C or S
SAAPXXVPQALSAISILYLVGRKPKVLKNYQMIV

SEQ ID NO: 7186 - protein, 25 aa, Artificial Sequence
  Cyclic GFR-binding peptide
NAISMLYFDEYDKVVLKKYREMVVE

SEQ ID NO: 7187 - protein, 39 aa, Artificial Sequence
  Cyclic GFR-binding peptide
  MOD_RES (6)..(38): Xaa is C or S
VTKPTXAPTKLSATSVLYYDDSSNVILRKHRNMVVRSXG

SEQ ID NO: 7188 - protein, 28 aa, Artificial Sequence
  Cyclic GFR-binding peptide
VPTKLSAISVLYLDDMGVPTLKNYQEGM

SEQ ID NO: 7189 - protein, 31 aa, Artificial Sequence
  Cyclic GFR-binding peptide
  MOD_RES (1)..(1): Xaa is C or S
XAPTKLSAISVLYLDDSSNVILKNYQNMVVR

SEQ ID NO: 7190 - protein, 41 aa, Artificial Sequence
  Cyclic GFR-binding peptide
  MOD_RES (6)..(38)..(40): Xaa is C or S
VTKPTXAPTKLSATSVLYYDDSSNVILRKHRNMVVRSXGXH

SEQ ID NO: 7191 - protein, 24 aa, Artificial Sequence
  Cyclic GFR-binding peptide
QLSATSVLYYDDSSNVILRKHRNM

SEQ ID NO: 7192 - protein, 25 aa, Artificial Sequence
  Cyclic GFR-binding peptide
TKLSPISVLYKDSSNNVILKYHYNM

SEQ ID NO: 7193 - protein, 35 aa, Artificial Sequence
  Cyclic GFR-binding peptide
  MOD_RES (4)..(5): Xaa is C or S
PKPXXAPTKLSPISVLYKDDSSNVILKYHYNMVVR

SEQ ID NO: 7194 - protein, 32 aa, Artificial Sequence
  Cyclic GFR-binding peptide
  MOD_RES (2)..(2): Xaa is C or S
QXRPTQVQLSAISVLYLEIVRKKPIFLKNYQT

SEQ ID NO: 7195 - protein, 35 aa, Artificial Sequence
  Cyclic GFR-binding peptide
  MOD_RES (32)..(34): Xaa is C or S
APTKLSATSVLYYDDSSNVILRKHRNMVVRSXGXH

SEQ ID NO: 7196 - protein, 34 aa, Artificial Sequence
  Cyclic GFR-binding peptide
  MOD_RES (2)..(3): Xaa is C or S
AXXAPTKLSAISVLYLDSSNNVILKNYQNMVVKA

SEQ ID NO: 7197 - protein, 32 aa, Artificial Sequence
  Cyclic GFR-binding peptide
  MOD_RES (30)..(32): Xaa is C or S
TKLSAISVLYLDSSNNVILKNYQNMVVKAXGX

SEQ ID NO: 7198 - protein, 31 aa, Artificial Sequence
  Cyclic GFR-binding peptide
  MOD_RES (30)..(30): Xaa is C or S
TQLSPISVLYKDDSSNVILKYHYNMVVRAXG

SEQ ID NO: 7199 - protein, 22 aa, Artificial Sequence
  Cyclic GFR-binding peptide
NAISVLYFEIVRKKPIFLKKYR

SEQ ID NO: 7200 - protein, 41 aa, Artificial Sequence
  Cyclic GFR-binding peptide
  MOD_RES (5)..(6)..(38)..(40): Xaa is C or S
VPKPXXAPTQLSAISVLYLDDSSNVILKNYQNMVVRAXGXH

SEQ ID NO: 7201 - protein, 29 aa, Artificial Sequence
  Cyclic GFR-binding peptide
  MOD_RES (1)..(1): Xaa is C or S
XVPTKLSATSVLYYDDMGVPTLRKHREGM

SEQ ID NO: 7202 - protein, 33 aa, Artificial Sequence
  Cyclic GFR-binding peptide
  MOD_RES (4)..(4): Xaa is C or S
NVQXRPTQVQLSPISVLYKEIVRKKPIFLKYHY

SEQ ID NO: 7203 - protein, 22 aa, Artificial Sequence
  Cyclic GFR-binding peptide
ELSATSMLYYDEYDKVVLRKHR

SEQ ID NO: 7204 - protein, 37 aa, Artificial Sequence
  Cyclic GFR-binding peptide
  MOD_RES (3)..(4)..(37): Xaa is C or S
KAXXVPTKLSATSVLYYDDMGVPTLRKHREGMSVAEX

SEQ ID NO: 7205 - protein, 30 aa, Artificial Sequence
  Cyclic GFR-binding peptide
PTELSPISMLYKDENEKVVLKYHYDMVVEG

SEQ ID NO: 7206 - protein, 23 aa, Artificial Sequence
  Cyclic GFR-binding peptide
NAISILYFVGRTPKVLKKYRMVV

SEQ ID NO: 7207 - protein, 32 aa, Artificial Sequence
  Cyclic GFR-binding peptide
  MOD_RES (1)..(2): Xaa is C or S
XXVPTELSPISMLYKDEYDKVVLKYHYEMVVE

SEQ ID NO: 7208 - protein, 29 aa, Artificial Sequence
  Cyclic GFR-binding peptide
LSAISVLYLEIVRKKPIFLKNYQTLEDHL

SEQ ID NO: 7209 - protein, 21 aa, Artificial Sequence
  Cyclic GFR-binding peptide
LSPISILYKVGRTPKVLKYHY

SEQ ID NO: 7210 - protein, 26 aa, Artificial Sequence
  Cyclic GFR-binding peptide
ELSPISMLYKDENEKVVLKYHYDMVV

SEQ ID NO: 7211 - protein, 40 aa, Artificial Sequence
  Cyclic GFR-binding peptide
  MOD_RES (6)..(7)..(39): Xaa is C or S
TVPKPXXAPTQLSPISVLYKDDSSNVILKYHYNMVVRAXG

SEQ ID NO: 7212 - protein, 29 aa, Artificial Sequence
  Cyclic GFR-binding peptide
PTQLSATSVLYYDDSSNVILRKHRNMVVR

SEQ ID NO: 7213 - protein, 29 aa, Artificial Sequence
  Cyclic GFR-binding peptide
  MOD_RES (3)..(4): Xaa is C or S
KAXXVPTELNAISMLYFDENEKVVLKKYR

SEQ ID NO: 7214 - protein, 31 aa, Artificial Sequence
  Cyclic GFR-binding peptide
  MOD_RES (5)..(6): Xaa is C or S
IPKAXXVPTELSPISMLYKDENEKVVLKYHY

SEQ ID NO: 7215 - protein, 26 aa, Artificial Sequence
  Cyclic GFR-binding peptide
QALNAISILYFVGRKPKVLKKYRMIV

SEQ ID NO: 7216 - protein, 40 aa, Artificial Sequence
  Cyclic GFR-binding peptide
  MOD_RES (6)..(7)..(38)..(40): Xaa is C or S
ASAAPXXVPQALNAISILYFVGRKPKVLKKYRMIVRSXKX

SEQ ID NO: 7217 - protein, 28 aa, Artificial Sequence
  Cyclic GFR-binding peptide
SQDLSAISILYLIGKTPKILKNYQMIVK

SEQ ID NO: 7218 - protein, 23 aa, Artificial Sequence
  Cyclic GFR-binding peptide
DLSATSILYYVGRTPKVLRKHRM

SEQ ID NO: 7219 - protein, 26 aa, Artificial Sequence
  Cyclic GFR-binding peptide
PTELSPISMLYKDENEKVVLKYHYDM

SEQ ID NO: 7220 - protein, 23 aa, Artificial Sequence
  Cyclic GFR-binding peptide
QDLNAISILYFVGRTPKVLKKYR

SEQ ID NO: 7221 - protein, 34 aa, Artificial Sequence
  Cyclic GFR-binding peptide
  MOD_RES (4)..(5): Xaa is C or S
PKAXXVPTELNAISMLYFDEYDKVVLKKYREMVV

SEQ ID NO: 7222 - protein, 28 aa, Artificial Sequence
  Cyclic GFR-binding peptide
  MOD_RES (28)..(28): Xaa is C or S
ALNAISILYFVGRKPKVLKKYRMIVRSX

SEQ ID NO: 7223 - protein, 36 aa, Artificial Sequence
  Cyclic GFR-binding peptide
  MOD_RES (4)..(5)..(36): Xaa is C or S
AAPXXVPQALSPISILYKVGRKPKVLKYHYMIVRSX

SEQ ID NO: 7224 - protein, 29 aa, Artificial Sequence
  Cyclic GFR-binding peptide
TKLSPISVLYKDSSNNVILKYHYNMVVKA

SEQ ID NO: 7225 - protein, 28 aa, Artificial Sequence
  Cyclic GFR-binding peptide
TKLSAISVLYLDDMGVPTLKNYQEGMSV

SEQ ID NO: 7226 - protein, 24 aa, Artificial Sequence
  Cyclic GFR-binding peptide
LSATSMLYYDENEKVVLRKHRDMV

SEQ ID NO: 7227 - protein, 27 aa, Artificial Sequence
  Cyclic GFR-binding peptide
DLNAISILYFIGKTPKILKKYRMIVKS

SEQ ID NO: 7228 - protein, 20 aa, Artificial Sequence
  Cyclic GFR-binding peptide
SATSVLYYDDMGVPTLRKHR

SEQ ID NO: 7229 - protein, 26 aa, Artificial Sequence
  Cyclic GFR-binding peptide
KLSPISVLYKDDSSNVILKYHYNMVV

SEQ ID NO: 7230 - protein, 33 aa, Artificial Sequence
  Cyclic GFR-binding peptide
  MOD_RES (1)..(1): Xaa is C or S
XRPTQVQLSAISVLYLEIVRKKPIFLKNYQTLE

SEQ ID NO: 7231 - protein, 27 aa, Artificial Sequence
  Cyclic GFR-binding peptide
PQDLNAISILYFVGRTPKVLKKYRMVV

SEQ ID NO: 7232 - protein, 27 aa, Artificial Sequence
  Cyclic GFR-binding peptide
APTKLSPISVLYKDSSNNVILKYHYNM

SEQ ID NO: 7233 - protein, 41 aa, Artificial Sequence
  Cyclic GFR-binding peptide
  MOD_RES (2)..(39)..(41): Xaa is C or S
QXRPTQVQLSAISVLYLEIVRKKPIFLKNYQTLEDHLAXKX

SEQ ID NO: 7234 - protein, 26 aa, Artificial Sequence
  Cyclic GFR-binding peptide
QVQLNAISVLYFEIVRKKPIFLKKYR

SEQ ID NO: 7235 - protein, 32 aa, Artificial Sequence
  Cyclic GFR-binding peptide
  MOD_RES (1)..(1): Xaa is C or S
XAPTQLSATSVLYYDDSSNVILRKHRNMVVRA

SEQ ID NO: 7236 - protein, 22 aa, Artificial Sequence
  Cyclic GFR-binding peptide
KLSPISVLYKDDSSNVILKYHY

SEQ ID NO: 7237 - protein, 33 aa, Artificial Sequence
  Cyclic GFR-binding peptide
  MOD_RES (1)..(2)..(33): Xaa is C or S
XXVPQDLNAISILYFVGRTPKVLKKYRMVVKSX

SEQ ID NO: 7238 - protein, 37 aa, Artificial Sequence
  Cyclic GFR-binding peptide
  MOD_RES (2)..(2): Xaa is C or S
QXRPTQVQLSATSVLYYEIVRKKPIFLRKHRTLEDHL

SEQ ID NO: 7239 - protein, 30 aa, Artificial Sequence
  Cyclic GFR-binding peptide
QLSAISVLYLEIVRKKPIFLKNYQTLEDHL

SEQ ID NO: 7240 - protein, 30 aa, Artificial Sequence
  Cyclic GFR-binding peptide
APTKLSAISVLYLDSSNNVILKNYQNMVVK

SEQ ID NO: 7241 - protein, 37 aa, Artificial Sequence
  Cyclic GFR-binding peptide
  MOD_RES (2)..(3)..(34)..(36): Xaa is C or S
PXXVPQALSATSILYYVGRKPKVLRKHRMIVRSXKXS

SEQ ID NO: 7242 - protein, 25 aa, Artificial Sequence
  Cyclic GFR-binding peptide
VSQDLSPISILYKIGKTPKILKYHY

SEQ ID NO: 7243 - protein, 39 aa, Artificial Sequence
  Cyclic GFR-binding peptide
  MOD_RES (5)..(6)..(38): Xaa is C or S
IPKAXXVPTELSPISMLYKDEYDKVVLKYHYEMVVEGXG

SEQ ID NO: 7244 - protein, 37 aa, Artificial Sequence
  Cyclic GFR-binding peptide
  MOD_RES (3)..(4)..(36): Xaa is C or S
KAXXVPTELSPISMLYKDEYDKVVLKYHYEMVVEGXG

SEQ ID NO: 7245 - protein, 28 aa, Artificial Sequence
  Cyclic GFR-binding peptide
  MOD_RES (1)..(1): Xaa is C or S
XVPQALSPISILYKVGRKPKVLKYHYMI

SEQ ID NO: 7246 - protein, 26 aa, Artificial Sequence
  Cyclic GFR-binding peptide
LNAISMLYFDENEKVVLKKYRDMVVE

SEQ ID NO: 7247 - protein, 27 aa, Artificial Sequence
  Cyclic GFR-binding peptide
  MOD_RES (27)..(27): Xaa is C or S
SAISVLYLDSSNNVILKNYQNMVVKAX

SEQ ID NO: 7248 - protein, 27 aa, Artificial Sequence
  Cyclic GFR-binding peptide
QALSAISILYLVGRKPKVLKNYQMIVR

SEQ ID NO: 7249 - protein, 36 aa, Artificial Sequence
  Cyclic GFR-binding peptide
  MOD_RES (1)..(33)..(35): Xaa is C or S
XVPTELSPISMLYKDENEKVVLKYHYDMVVEGXGXR

SEQ ID NO: 7250 - protein, 39 aa, Artificial Sequence
  Cyclic GFR-binding peptide
  MOD_RES (4)..(5)..(37)..(39): Xaa is C or S
PKPXXAPTQLSATSVLYYDDSSNVILRKHRNMVVRAXGX

SEQ ID NO: 7251 - protein, 27 aa, Artificial Sequence
  Cyclic GFR-binding peptide
TQLSPISVLYKDDSSNVILKYHYNMVV

SEQ ID NO: 7252 - protein, 32 aa, Artificial Sequence
  Cyclic GFR-binding peptide
  MOD_RES (3)..(4): Xaa is C or S
KAXXVPTELNAISMLYFDEYDKVVLKKYREMV

SEQ ID NO: 7253 - protein, 24 aa, Artificial Sequence
  Cyclic GFR-binding peptide
TELSPISMLYKDENEKVVLKYHYD

SEQ ID NO: 7254 - protein, 34 aa, Artificial Sequence
  Cyclic GFR-binding peptide
  MOD_RES (33)..(33): Xaa is C or S
VPTKLSATSVLYYDDMGVPTLRKHREGMSVAEXG

SEQ ID NO: 7255 - protein, 30 aa, Artificial Sequence
  Cyclic GFR-binding peptide
  MOD_RES (4)..(5): Xaa is C or S
PKAXXVPTELSATSMLYYDENEKVVLRKHR

SEQ ID NO: 7256 - protein, 26 aa, Artificial Sequence
  Cyclic GFR-binding peptide
ALSPISILYKVGRKPKVLKYHYMIVR

SEQ ID NO: 7257 - protein, 31 aa, Artificial Sequence
  Cyclic GFR-binding peptide
  MOD_RES (1)..(2): Xaa is C or S
XXVPTELSATSMLYYDENEKVVLRKHRDMVV

SEQ ID NO: 7258 - protein, 26 aa, Artificial Sequence
  Cyclic GFR-binding peptide
SATSVLYYEIVRKKPIFLRKHRTLED

SEQ ID NO: 7259 - protein, 27 aa, Artificial Sequence
  Cyclic GFR-binding peptide
  MOD_RES (26)..(26): Xaa is C or S
SAISILYLIGKTPKILKNYQMIVKSXK

SEQ ID NO: 7260 - protein, 28 aa, Artificial Sequence
  Cyclic GFR-binding peptide
ELSPISMLYKDENEKVVLKYHYDMVVEG

SEQ ID NO: 7261 - protein, 35 aa, Artificial Sequence
  Cyclic GFR-binding peptide
  MOD_RES (32)..(34): Xaa is C or S
QLSATSVLYYEIVRKKPIFLRKHRTLEDHLAXKXE

SEQ ID NO: 7262 - protein, 33 aa, Artificial Sequence
  Cyclic GFR-binding peptide
  MOD_RES (32)..(32): Xaa is C or S
VPTELNAISMLYFDEYDKVVLKKYREMVVEGXG

SEQ ID NO: 7263 - protein, 24 aa, Artificial Sequence
  Cyclic GFR-binding peptide
SPISILYKIGKTPKILKYHYMIVK

SEQ ID NO: 7264 - protein, 36 aa, Artificial Sequence
  Cyclic GFR-binding peptide
RPTQVQLNAISVLYFEIVRKKPIFLKKYRTLEDHLA

SEQ ID NO: 7265 - protein, 27 aa, Artificial Sequence
  Cyclic GFR-binding peptide
  MOD_RES (1)..(2): Xaa is C or S
XXVSQDLNAISILYFIGKTPKILKKYR

SEQ ID NO: 7266 - protein, 27 aa, Artificial Sequence
  Cyclic GFR-binding peptide
  MOD_RES (1)..(2): Xaa is C or S
XXVPTKLSAISVLYLDDMGVPTLKNYQ

SEQ ID NO: 7267 - protein, 31 aa, Artificial Sequence
  Cyclic GFR-binding peptide
  MOD_RES (4)..(5): Xaa is C or S
PKPXXAPTKLSPISVLYKDDSSNVILKYHYN

SEQ ID NO: 7268 - protein, 35 aa, Artificial Sequence
  Cyclic GFR-binding peptide
  MOD_RES (3)..(4)..(35): Xaa is C or S
APXXVPQALSPISILYKVGRKPKVLKYHYMIVRSX

SEQ ID NO: 7269 - protein, 34 aa, Artificial Sequence
  Cyclic GFR-binding peptide
  MOD_RES (2)..(3): Xaa is C or S
PXXAPTKLSATSVLYYDDSSNVILRKHRNMVVRS

SEQ ID NO: 7270 - protein, 29 aa, Artificial Sequence
  Cyclic GFR-binding peptide
  MOD_RES (28)..(28): Xaa is C or S
LNAISVLYFDSSNNVILKKYRNMVVKAXG

SEQ ID NO: 7271 - protein, 26 aa, Artificial Sequence
  Cyclic GFR-binding peptide
LSAISVLYLDSSNNVILKNYQNMVVK

SEQ ID NO: 7272 - protein, 32 aa, Artificial Sequence
  Cyclic GFR-binding peptide
  MOD_RES (31)..(31): Xaa is C or S
PTQLSATSVLYYDDSSNVILRKHRNMVVRAXG

SEQ ID NO: 7273 - protein, 33 aa, Artificial Sequence
  Cyclic GFR-binding peptide
  MOD_RES (33)..(33): Xaa is C or S
VQLNAISVLYFEIVRKKPIFLKKYRTLEDHLAX

SEQ ID NO: 7274 - protein, 33 aa, Artificial Sequence
  Cyclic GFR-binding peptide
  MOD_RES (2)..(3): Xaa is C or S
PXXVSQDLSATSILYYIGKTPKILRKHRMIVKS

SEQ ID NO: 7275 - protein, 38 aa, Artificial Sequence
  Cyclic GFR-binding peptide
  MOD_RES (5)..(37): Xaa is C or S
TKPTXAPTKLSATSVLYYDDSSNVILRKHRNMVVRSXG

SEQ ID NO: 7276 - protein, 33 aa, Artificial Sequence
  Cyclic GFR-binding peptide
  MOD_RES (4)..(5): Xaa is C or S
PKAXXVPTELSATSMLYYDENEKVVLRKHRDMV

SEQ ID NO: 7277 - protein, 37 aa, Artificial Sequence
  Cyclic GFR-binding peptide
  MOD_RES (6)..(6): Xaa is C or S
VTKPTXAPTKLSATSVLYYDDSSNVILRKHRNMVVRS

SEQ ID NO: 7278 - protein, 29 aa, Artificial Sequence
  Cyclic GFR-binding peptide
VPTKLNAISVLYFDDMGVPTLKKYREGMS

SEQ ID NO: 7279 - protein, 35 aa, Artificial Sequence
  Cyclic GFR-binding peptide
  MOD_RES (1)..(33)..(35): Xaa is C or S
XAPTKLSAISVLYLDDSSNVILKNYQNMVVRSXGX

SEQ ID NO: 7280 - protein, 28 aa, Artificial Sequence
  Cyclic GFR-binding peptide
APTKLSPISVLYKDSSNNVILKYHYNMV

SEQ ID NO: 7281 - protein, 28 aa, Artificial Sequence
  Cyclic GFR-binding peptide
  MOD_RES (1)..(2): Xaa is C or S
XXVPTELNAISMLYFDENEKVVLKKYRD

SEQ ID NO: 7282 - protein, 34 aa, Artificial Sequence
  Cyclic GFR-binding peptide
  MOD_RES (4)..(5): Xaa is C or S
PKPXXAPTQLSPISVLYKDDSSNVILKYHYNMVV

SEQ ID NO: 7283 - protein, 30 aa, Artificial Sequence
  Cyclic GFR-binding peptide
  MOD_RES (3)..(4): Xaa is C or S
KPXXAPTQLSATSVLYYDDSSNVILRKHRN

SEQ ID NO: 7284 - protein, 35 aa, Artificial Sequence
  Cyclic GFR-binding peptide
  MOD_RES (3)..(4): Xaa is C or S
KPXXAPTQLSAISVLYLDDSSNVILKNYQNMVVRA

SEQ ID NO: 7285 - protein, 31 aa, Artificial Sequence
  Cyclic GFR-binding peptide
  MOD_RES (3)..(4): Xaa is C or S
KAXXAPTKLSPISVLYKDSSNNVILKYHYNM

SEQ ID NO: 7286 - protein, 33 aa, Artificial Sequence
  Cyclic GFR-binding peptide
  MOD_RES (6)..(7): Xaa is C or S
ASASPXXVSQDLSPISILYKIGKTPKILKYHYM

SEQ ID NO: 7287 - protein, 24 aa, Artificial Sequence
  Cyclic GFR-binding peptide
LNAISMLYFDENEKVVLKKYRDMV

SEQ ID NO: 7288 - protein, 31 aa, Artificial Sequence
  Cyclic GFR-binding peptide
  MOD_RES (4)..(5): Xaa is C or S
ASPXXVPQDLSATSILYYVGRTPKVLRKHRM

SEQ ID NO: 7289 - protein, 39 aa, Artificial Sequence
  Cyclic GFR-binding peptide
  MOD_RES (4)..(4): Xaa is C or S
NVQXRPTQVQLSPISVLYKEIVRKKPIFLKYHYTLEDHL

SEQ ID NO: 7290 - protein, 23 aa, Artificial Sequence
  Cyclic GFR-binding peptide
TELNAISMLYFDENEKVVLKKYR

SEQ ID NO: 7291 - protein, 25 aa, Artificial Sequence
  Cyclic GFR-binding peptide
PQDLSATSILYYVGRTPKVLRKHRM

SEQ ID NO: 7292 - protein, 26 aa, Artificial Sequence
  Cyclic GFR-binding peptide
SATSMLYYDENEKVVLRKHRDMVVEG

SEQ ID NO: 7293 - protein, 25 aa, Artificial Sequence
  Cyclic GFR-binding peptide
TKLNAISVLYFDSSNNVILKKYRNM

SEQ ID NO: 7294 - protein, 40 aa, Artificial Sequence
  Cyclic GFR-binding peptide
  MOD_RES (5)..(6)..(37)..(39): Xaa is C or S
SAAPXXVPQALSATSILYYVGRKPKVLRKHRMIVRSXKXS

SEQ ID NO: 7295 - protein, 35 aa, Artificial Sequence
  Cyclic GFR-binding peptide
  MOD_RES (2)..(3)..(34): Xaa is C or S
PXXVSQDLSAISILYLIGKTPKILKNYQMIVKSXK

SEQ ID NO: 7296 - protein, 24 aa, Artificial Sequence
  Cyclic GFR-binding peptide
LSAISILYLVGRTPKVLKNYQMVV

SEQ ID NO: 7297 - protein, 27 aa, Artificial Sequence
  Cyclic GFR-binding peptide
  MOD_RES (27)..(27): Xaa is C or S
SATSVLYYDDSSNVILRKHRNMVVRSX

SEQ ID NO: 7298 - protein, 29 aa, Artificial Sequence
  Cyclic GFR-binding peptide
PQDLSATSILYYVGRTPKVLRKHRMVVKS

SEQ ID NO: 7299 - protein, 24 aa, Artificial Sequence
  Cyclic GFR-binding peptide
NAISMLYFDENEKVVLKKYRDMVV

SEQ ID NO: 7300 - protein, 27 aa, Artificial Sequence
  Cyclic GFR-binding peptide
  MOD_RES (1)..(2): Xaa is C or S
XXVPQDLSATSILYYVGRTPKVLRKHR

SEQ ID NO: 7301 - protein, 31 aa, Artificial Sequence
  Cyclic GFR-binding peptide
  MOD_RES (5)..(6): Xaa is C or S
IPKAXXVPTELSATSMLYYDENEKVVLRKHR

SEQ ID NO: 7302 - protein, 45 aa, Artificial Sequence
  Cyclic GFR-binding peptide
  MOD_RES (5)..(42)..(44): Xaa is C or S
RNVQXRPTQVQLSATSVLYYEIVRKKPIFLRKHRTLEDHLAXKXE

SEQ ID NO: 7303 - protein, 26 aa, Artificial Sequence
  Cyclic GFR-binding peptide
TELSPISMLYKDEYDKVVLKYHYEMV

SEQ ID NO: 7304 - protein, 30 aa, Artificial Sequence
  Cyclic GFR-binding peptide
  MOD_RES (1)..(2): Xaa is C or S
XXVPQALNAISILYFVGRKPKVLKKYRMIV

SEQ ID NO: 7305 - protein, 29 aa, Artificial Sequence
  Cyclic GFR-binding peptide
VPTELSPISMLYKDENEKVVLKYHYDMVV

SEQ ID NO: 7306 - protein, 41 aa, Artificial Sequence
  Cyclic GFR-binding peptide
  MOD_RES (5)..(6)..(38)..(40): Xaa is C or S
IPKAXXVPTELSPISMLYKDEYDKVVLKYHYEMVVEGXGXR

SEQ ID NO: 7307 - protein, 42 aa, Artificial Sequence
  Cyclic GFR-binding peptide
  MOD_RES (6)..(7)..(39)..(41): Xaa is C or S
KIPKAXXVPTELSATSMLYYDENEKVVLRKHRDMVVEGXGXR

SEQ ID NO: 7308 - protein, 35 aa, Artificial Sequence
  Cyclic GFR-binding peptide
  MOD_RES (34)..(34): Xaa is C or S
QVQLSATSVLYYEIVRKKPIFLRKHRTLEDHLAXK

SEQ ID NO: 7309 - protein, 29 aa, Artificial Sequence
  Cyclic GFR-binding peptide
  MOD_RES (27)..(29): Xaa is C or S
SATSVLYYDDSSNVILRKHRNMVVRAXGX

SEQ ID NO: 7310 - protein, 40 aa, Artificial Sequence
  Cyclic GFR-binding peptide
  MOD_RES (2)..(39): Xaa is C or S
QXRPTQVQLSPISVLYKEIVRKKPIFLKYHYTLEDHLAXK

SEQ ID NO: 7311 - protein, 38 aa, Artificial Sequence
  Cyclic GFR-binding peptide
  MOD_RES (4)..(36)..(38): Xaa is C or S
KPTXAPTKLSAISVLYLDDSSNVILKNYQNMVVRSXGX

SEQ ID NO: 7312 - protein, 35 aa, Artificial Sequence
  Cyclic GFR-binding peptide
  MOD_RES (3)..(4): Xaa is C or S
KAXXVPTELNAISMLYFDEYDKVVLKKYREMVVEG

SEQ ID NO: 7313 - protein, 29 aa, Artificial Sequence
  Cyclic GFR-binding peptide
  MOD_RES (3)..(4): Xaa is C or S
KPXXAPTQLSATSVLYYDDSSNVILRKHR

SEQ ID NO: 7314 - protein, 37 aa, Artificial Sequence
  Cyclic GFR-binding peptide
  MOD_RES (36)..(36): Xaa is C or S
PTQVQLSPISVLYKEIVRKKPIFLKYHYTLEDHLAXK

SEQ ID NO: 7315 - protein, 32 aa, Artificial Sequence
  Cyclic GFR-binding peptide
  MOD_RES (31)..(31): Xaa is C or S
PTELNAISMLYFDENEKVVLKKYRDMVVEGXG

SEQ ID NO: 7316 - protein, 37 aa, Artificial Sequence
  Cyclic GFR-binding peptide
  MOD_RES (4)..(5)..(36): Xaa is C or S
ASPXXVPQDLSATSILYYVGRTPKVLRKHRMVVKSXK

SEQ ID NO: 7317 - protein, 33 aa, Artificial Sequence
  Cyclic GFR-binding peptide
  MOD_RES (31)..(33): Xaa is C or S
LSATSVLYYEIVRKKPIFLRKHRTLEDHLAXKX

SEQ ID NO: 7318 - protein, 28 aa, Artificial Sequence
  Cyclic GFR-binding peptide
  MOD_RES (2)..(3): Xaa is C or S
PXXAPTQLSPISVLYKDDSSNVILKYHY

SEQ ID NO: 7319 - protein, 33 aa, Artificial Sequence
  Cyclic GFR-binding peptide
  MOD_RES (5)..(6): Xaa is C or S
IPKAXXVPTELSPISMLYKDEYDKVVLKYHYEM

SEQ ID NO: 7320 - protein, 25 aa, Artificial Sequence
  Cyclic GFR-binding peptide
VSQDLSATSILYYIGKTPKILRKHR

SEQ ID NO: 7321 - protein, 31 aa, Artificial Sequence
  Cyclic GFR-binding peptide
  MOD_RES (4)..(5): Xaa is C or S
PKAXXAPTKLNAISVLYFDSSNNVILKKYRN

SEQ ID NO: 7322 - protein, 28 aa, Artificial Sequence
  Cyclic GFR-binding peptide
  MOD_RES (1)..(2): Xaa is C or S
XXVPTELNAISMLYFDEYDKVVLKKYRE

SEQ ID NO: 7323 - protein, 29 aa, Artificial Sequence
  Cyclic GFR-binding peptide
VPTELSATSMLYYDENEKVVLRKHRDMVV

SEQ ID NO: 7324 - protein, 37 aa, Artificial Sequence
  Cyclic GFR-binding peptide
  MOD_RES (4)..(5)..(36): Xaa is C or S
ASPXXVPQDLSAISILYLVGRTPKVLKNYQMVVKSXK

SEQ ID NO: 7325 - protein, 41 aa, Artificial Sequence
  Cyclic GFR-binding peptide
  MOD_RES (6)..(7)..(38)..(40): Xaa is C or S
ASASPXXVPQDLSAISILYLVGRTPKVLKNYQMVVKSXKXS

SEQ ID NO: 7326 - protein, 26 aa, Artificial Sequence
  Cyclic GFR-binding peptide
QLSATSVLYYDDSSNVILRKHRNMVV

SEQ ID NO: 7327 - protein, 27 aa, Artificial Sequence
  Cyclic GFR-binding peptide
VSQDLSAISILYLIGKTPKILKNYQMI

SEQ ID NO: 7328 - protein, 31 aa, Artificial Sequence
  Cyclic GFR-binding peptide
  MOD_RES (1)..(2): Xaa is C or S
XXAPTKLSAISVLYLDSSNNVILKNYQNMVV

SEQ ID NO: 7329 - protein, 30 aa, Artificial Sequence
  Cyclic GFR-binding peptide
  MOD_RES (29)..(29): Xaa is C or S
QDLSATSILYYVGRTPKVLRKHRMVVKSXK

SEQ ID NO: 7330 - protein, 27 aa, Artificial Sequence
  Cyclic GFR-binding peptide
QLSPISVLYKDDSSNVILKYHYNMVVR

SEQ ID NO: 7331 - protein, 27 aa, Artificial Sequence
  Cyclic GFR-binding peptide
SAISILYLIGKTPKILKNYQIGKTPKI

SEQ ID NO: 7332 - protein, 33 aa, Artificial Sequence
  Cyclic GFR-binding peptide
  MOD_RES (1)..(2): Xaa is C or S
XXAPTKLSPISVLYKDSSNNVILKYHYNMVVKA

SEQ ID NO: 7333 - protein, 27 aa, Artificial Sequence
  Cyclic GFR-binding peptide
KLSAISVLYLDDMGVPTLKNYQEGMSV

SEQ ID NO: 7334 - protein, 22 aa, Artificial Sequence
  Cyclic GFR-binding peptide
DLSPISILYKVGRTPKVLKYHY

SEQ ID NO: 7335 - protein, 26 aa, Artificial Sequence
  Cyclic GFR-binding peptide
ELSATSMLYYDENEKVVLRKHRDMVV

SEQ ID NO: 7336 - protein, 26 aa, Artificial Sequence
  Cyclic GFR-binding peptide
TQLSPISVLYKDDSSNVILKYHYNMV

SEQ ID NO: 7337 - protein, 29 aa, Artificial Sequence
  Cyclic GFR-binding peptide
PTQVQLSATSVLYYEIVRKKPIFLRKHRT

SEQ ID NO: 7338 - protein, 27 aa, Artificial Sequence
  Cyclic GFR-binding peptide
KLNAISVLYFDSSNNVILKKYRNMVVK

SEQ ID NO: 7339 - protein, 36 aa, Artificial Sequence
  Cyclic GFR-binding peptide
  MOD_RES (3)..(35): Xaa is C or S
PTXAPTKLSATSVLYYDDSSNVILRKHRNMVVRSXG

SEQ ID NO: 7340 - protein, 40 aa, Artificial Sequence
  Cyclic GFR-binding peptide
  MOD_RES (6)..(7)..(39): Xaa is C or S
YVPKPXXAPTKLSPISVLYKDDSSNVILKYHYNMVVRSXG

SEQ ID NO: 7341 - protein, 39 aa, Artificial Sequence
  Cyclic GFR-binding peptide
  MOD_RES (6)..(7)..(38): Xaa is C or S
ASASPXXVPQDLSPISILYKVGRTPKVLKYHYMVVKSXK

SEQ ID NO: 7342 - protein, 32 aa, Artificial Sequence
  Cyclic GFR-binding peptide
  MOD_RES (3)..(4): Xaa is C or S
SPXXVSQDLSPISILYKIGKTPKILKYHYMIV

SEQ ID NO: 7343 - protein, 32 aa, Artificial Sequence
  Cyclic GFR-binding peptide
  MOD_RES (6)..(7): Xaa is C or S
ASASPXXVPQDLNAISILYFVGRTPKVLKKYR

SEQ ID NO: 7344 - protein, 35 aa, Artificial Sequence
  Cyclic GFR-binding peptide
  MOD_RES (6)..(7): Xaa is C or S
KIPKAXXVPTELSPISMLYKDENEKVVLKYHYDMV

SEQ ID NO: 7345 - protein, 36 aa, Artificial Sequence
  Cyclic GFR-binding peptide
  MOD_RES (6)..(7): Xaa is C or S
ASASPXXVSQDLSPISILYKIGKTPKILKYHYMIVK

SEQ ID NO: 7346 - protein, 28 aa, Artificial Sequence
  Cyclic GFR-binding peptide
TKLSATSVLYYDDSSNVILRKHRNMVVR

SEQ ID NO: 7347 - protein, 39 aa, Artificial Sequence
  Cyclic GFR-binding peptide
  MOD_RES (6)..(7)..(39): Xaa is C or S
YVPKPXXAPTKLSPISVLYKDDSSNVILKYHYNMVVRSX

SEQ ID NO: 7348 - protein, 31 aa, Artificial Sequence
  Cyclic GFR-binding peptide
  MOD_RES (1)..(1): Xaa is C or S
XVSQDLNAISILYFIGKTPKILKKYRMIVKS

SEQ ID NO: 7349 - protein, 32 aa, Artificial Sequence
  Cyclic GFR-binding peptide
RPTQVQLSPISVLYKEIVRKKPIFLKYHYTLE

SEQ ID NO: 7350 - protein, 29 aa, Artificial Sequence
  Cyclic GFR-binding peptide
  MOD_RES (28)..(28): Xaa is C or S
LSPISVLYKDSSNNVILKYHYNMVVKAXG

SEQ ID NO: 7351 - protein, 32 aa, Artificial Sequence
  Cyclic GFR-binding peptide
  MOD_RES (1)..(2): Xaa is C or S
XXVSQDLSATSILYYIGKTPKILRKHRMIVKS

SEQ ID NO: 7352 - protein, 26 aa, Artificial Sequence
  Cyclic GFR-binding peptide
ELNAISMLYFDEYDKVVLKKYREMVV

SEQ ID NO: 7353 - protein, 37 aa, Artificial Sequence
  Cyclic GFR-binding peptide
  MOD_RES (34)..(36): Xaa is C or S
QVQLSAISVLYLEIVRKKPIFLKNYQTLEDHLAXKXE

SEQ ID NO: 7354 - protein, 27 aa, Artificial Sequence
  Cyclic GFR-binding peptide
  MOD_RES (1)..(1): Xaa is C or S
XAPTQLSAISVLYLDDSSNVILKNYQN

SEQ ID NO: 7355 - protein, 41 aa, Artificial Sequence
  Cyclic GFR-binding peptide
  MOD_RES (2)..(39)..(41): Xaa is C or S
QXRPTQVQLSATSVLYYEIVRKKPIFLRKHRTLEDHLAXKX

SEQ ID NO: 7356 - protein, 35 aa, Artificial Sequence
  Cyclic GFR-binding peptide
  MOD_RES (5)..(6): Xaa is C or S
IPKAXXVPTELNAISMLYFDENEKVVLKKYRDMVV

SEQ ID NO: 7357 - protein, 29 aa, Artificial Sequence
  Cyclic GFR-binding peptide
  MOD_RES (1)..(2): Xaa is C or S
XXVSQDLNAISILYFIGKTPKILKKYRMI

SEQ ID NO: 7358 - protein, 35 aa, Artificial Sequence
  Cyclic GFR-binding peptide
  MOD_RES (2)..(3)..(35): Xaa is C or S
PXXAPTQLSAISVLYLDDSSNVILKNYQNMVVRAX

SEQ ID NO: 7359 - protein, 32 aa, Artificial Sequence
  Cyclic GFR-binding peptide
  MOD_RES (5)..(6): Xaa is C or S
SASPXXVPQDLSAISILYLVGRTPKVLKNYQM

SEQ ID NO: 7360 - protein, 36 aa, Artificial Sequence
  Cyclic GFR-binding peptide
  MOD_RES (34)..(36): Xaa is C or S
QVQLSATSVLYYEIVRKKPIFLRKHRTLEDHLAXKX

SEQ ID NO: 7361 - protein, 26 aa, Artificial Sequence
  Cyclic GFR-binding peptide
SQDLSAISILYLIGKTPKILKNYQMI

SEQ ID NO: 7362 - protein, 26 aa, Artificial Sequence
  Cyclic GFR-binding peptide
SQDLSPISILYKIGKTPKILKYHYMI

SEQ ID NO: 7363 - protein, 35 aa, Artificial Sequence
  Cyclic GFR-binding peptide
  MOD_RES (4)..(5): Xaa is C or S
PKAXXVPTELSPISMLYKDENEKVVLKYHYDMVVE

SEQ ID NO: 7364 - protein, 30 aa, Artificial Sequence
  Cyclic GFR-binding peptide
  MOD_RES (4)..(5): Xaa is C or S
PKAXXVPTELSPISMLYKDENEKVVLKYHY

SEQ ID NO: 7365 - protein, 25 aa, Artificial Sequence
  Cyclic GFR-binding peptide
QDLSAISILYLVGRTPKVLKNYQMV

SEQ ID NO: 7366 - protein, 21 aa, Artificial Sequence
  Cyclic GFR-binding peptide
LSATSVLYYDDSSNVILRKHR

SEQ ID NO: 7367 - protein, 34 aa, Artificial Sequence
  Cyclic GFR-binding peptide
  MOD_RES (32)..(34): Xaa is C or S
APTQLSATSVLYYDDSSNVILRKHRNMVVRAXGX

SEQ ID NO: 7368 - protein, 34 aa, Artificial Sequence
  Cyclic GFR-binding peptide
  MOD_RES (2)..(3)..(34): Xaa is C or S
PXXVPQALNAISILYFVGRKPKVLKKYRMIVRSX

SEQ ID NO: 7369 - protein, 30 aa, Artificial Sequence
  Cyclic GFR-binding peptide
  MOD_RES (3)..(4): Xaa is C or S
SPXXVPQDLSATSILYYVGRTPKVLRKHRM

SEQ ID NO: 7370 - protein, 28 aa, Artificial Sequence
  Cyclic GFR-binding peptide
TKLSAISVLYLDSSNNVILKNYQNMVVK

SEQ ID NO: 7371 - protein, 31 aa, Artificial Sequence
  Cyclic GFR-binding peptide
  MOD_RES (30)..(30): Xaa is C or S
SQDLSATSILYYIGKTPKILRKHRMIVKSXK

SEQ ID NO: 7372 - protein, 38 aa, Artificial Sequence
  Cyclic GFR-binding peptide
  MOD_RES (6)..(7)..(38): Xaa is C or S
ASAAPXXVPQALNAISILYFVGRKPKVLKKYRMIVRSX

SEQ ID NO: 7373 - protein, 26 aa, Artificial Sequence
  Cyclic GFR-binding peptide
VPQALSATSILYYVGRKPKVLRKHRM

SEQ ID NO: 7374 - protein, 30 aa, Artificial Sequence
  Cyclic GFR-binding peptide
  MOD_RES (28)..(30): Xaa is C or S
SATSVLYYDDMGVPTLRKHREGMSVAEXGX

SEQ ID NO: 7375 - protein, 32 aa, Artificial Sequence
  Cyclic GFR-binding peptide
  MOD_RES (5)..(6): Xaa is C or S
VPKAXXAPTKLSPISVLYKDSSNNVILKYHYN

SEQ ID NO: 7376 - protein, 28 aa, Artificial Sequence
  Cyclic GFR-binding peptide
  MOD_RES (28)..(28): Xaa is C or S
DLSATSILYYIGKTPKILRKHRMIVKSX

SEQ ID NO: 7377 - protein, 41 aa, Artificial Sequence
  Cyclic GFR-binding peptide
  MOD_RES (3)..(40): Xaa is C or S
VQXRPTQVQLSATSVLYYEIVRKKPIFLRKHRTLEDHLAXK

SEQ ID NO: 7378 - protein, 29 aa, Artificial Sequence
  Cyclic GFR-binding peptide
PTELNAISMLYFDEYDKVVLKKYREMVVE

SEQ ID NO: 7379 - protein, 33 aa, Artificial Sequence
  Cyclic GFR-binding peptide
  MOD_RES (4)..(5): Xaa is C or S
AAPXXVPQALSATSILYYVGRKPKVLRKHRMIV

SEQ ID NO: 7380 - protein, 28 aa, Artificial Sequence
  Cyclic GFR-binding peptide
PQALSPISILYKVGRKPKVLKYHYMIVR

SEQ ID NO: 7381 - protein, 37 aa, Artificial Sequence
  Cyclic GFR-binding peptide
  MOD_RES (2)..(3)..(35)..(37): Xaa is C or S
AXXVPTELNAISMLYFDENEKVVLKKYRDMVVEGXGX

SEQ ID NO: 7382 - protein, 22 aa, Artificial Sequence
  Cyclic GFR-binding peptide
LSPISVLYKDDSSNVILKYHYN

SEQ ID NO: 7383 - protein, 29 aa, Artificial Sequence
  Cyclic GFR-binding peptide
  MOD_RES (28)..(28): Xaa is C or S
DLNAISILYFVGRTPKVLKKYRMVVKSXK

SEQ ID NO: 7384 - protein, 36 aa, Artificial Sequence
  Cyclic GFR-binding peptide
  MOD_RES (1)..(2)..(34)..(36): Xaa is C or S
XXVPTELSATSMLYYDENEKVVLRKHRDMVVEGXGX

SEQ ID NO: 7385 - protein, 32 aa, Artificial Sequence
  Cyclic GFR-binding peptide
  MOD_RES (31)..(31): Xaa is C or S
TKLSAISVLYLDDMGVPTLKNYQEGMSVAEXG

SEQ ID NO: 7386 - protein, 40 aa, Artificial Sequence
  Cyclic GFR-binding peptide
  MOD_RES (6)..(7)..(38)..(40): Xaa is C or S
ASASPXXVSQDLSAISILYLIGKTPKILKNYQMIVKSXKX

SEQ ID NO: 7387 - protein, 27 aa, Artificial Sequence
  Cyclic GFR-binding peptide
  MOD_RES (1)..(1): Xaa is C or S
XVSQDLNAISILYFIGKTPKILKKYRM

SEQ ID NO: 7388 - protein, 32 aa, Artificial Sequence
  Cyclic GFR-binding peptide
  MOD_RES (30)..(32): Xaa is C or S
TKLSPISVLYKDDSSNVILKYHYNMVVRSXGX

SEQ ID NO: 7389 - protein, 36 aa, Artificial Sequence
  Cyclic GFR-binding peptide
  MOD_RES (4)..(5): Xaa is C or S
PKPXXAPTQLSPISVLYKDDSSNVILKYHYNMVVRA

SEQ ID NO: 7390 - protein, 31 aa, Artificial Sequence
  Cyclic GFR-binding peptide
  MOD_RES (4)..(5): Xaa is C or S
AAPXXVPQALNAISILYFVGRKPKVLKKYRM

SEQ ID NO: 7391 - protein, 35 aa, Artificial Sequence
  Cyclic GFR-binding peptide
  MOD_RES (2)..(3): Xaa is C or S
AXXVPTKLSATSVLYYDDMGVPTLRKHREGMSVAE

SEQ ID NO: 7392 - protein, 31 aa, Artificial Sequence
  Cyclic GFR-binding peptide
  MOD_RES (2)..(3): Xaa is C or S
AXXVPTELSATSMLYYDEYDKVVLRKHREMV

SEQ ID NO: 7393 - protein, 30 aa, Artificial Sequence
  Cyclic GFR-binding peptide
  MOD_RES (30)..(30): Xaa is C or S
SPISVLYKEIVRKKPIFLKYHYTLEDHLAX

SEQ ID NO: 7394 - protein, 34 aa, Artificial Sequence
  Cyclic GFR-binding peptide
  MOD_RES (3)..(4): Xaa is C or S
KPXXAPTKLSPISVLYKDDSSNVILKYHYNMVVR

SEQ ID NO: 7395 - protein, 32 aa, Artificial Sequence
  Cyclic GFR-binding peptide
  MOD_RES (6)..(7): Xaa is C or S
ASASPXXVPQDLSAISILYLVGRTPKVLKNYQ

SEQ ID NO: 7396 - protein, 34 aa, Artificial Sequence
  Cyclic GFR-binding peptide
  MOD_RES (3)..(3): Xaa is C or S
PTXAPTKLSPISVLYKDDSSNVILKYHYNMVVRS

SEQ ID NO: 7397 - protein, 33 aa, Artificial Sequence
  Cyclic GFR-binding peptide
  MOD_RES (32)..(32): Xaa is C or S
APTKLSAISVLYLDSSNNVILKNYQNMVVKAXG

SEQ ID NO: 7398 - protein, 34 aa, Artificial Sequence
  Cyclic GFR-binding peptide
  MOD_RES (5)..(5): Xaa is C or S
RNVQXRPTQVQLSPISVLYKEIVRKKPIFLKYHY

SEQ ID NO: 7399 - protein, 28 aa, Artificial Sequence
  Cyclic GFR-binding peptide
  MOD_RES (1)..(1): Xaa is C or S
XAPTKLSPISVLYKDSSNNVILKYHYNM

SEQ ID NO: 7400 - protein, 32 aa, Artificial Sequence
  Cyclic GFR-binding peptide
  MOD_RES (32)..(32): Xaa is C or S
PTKLNAISVLYFDDMGVPTLKKYREGMSVAEX

SEQ ID NO: 7401 - protein, 34 aa, Artificial Sequence
  Cyclic GFR-binding peptide
  MOD_RES (34)..(34): Xaa is C or S
QVQLSATSVLYYEIVRKKPIFLRKHRTLEDHLAX

SEQ ID NO: 7402 - protein, 27 aa, Artificial Sequence
  Cyclic GFR-binding peptide
VPQDLNAISILYFVGRTPKVLKKYRMV

SEQ ID NO: 7403 - protein, 32 aa, Artificial Sequence
  Cyclic GFR-binding peptide
  MOD_RES (30)..(32): Xaa is C or S
TKLSPISVLYKDSSNNVILKYHYNMVVKAXGX

SEQ ID NO: 7404 - protein, 26 aa, Artificial Sequence
  Cyclic GFR-binding peptide
LSPISVLYKDSSNNVILKYHYNMVVK

SEQ ID NO: 7405 - protein, 32 aa, Artificial Sequence
  Cyclic GFR-binding peptide
  MOD_RES (6)..(7): Xaa is C or S
ASAAPXXVPQALSAISILYLVGRKPKVLKNYQ

SEQ ID NO: 7406 - protein, 29 aa, Artificial Sequence
  Cyclic GFR-binding peptide
  MOD_RES (1)..(2): Xaa is C or S
XXVPQALSPISILYKVGRKPKVLKYHYMI

SEQ ID NO: 7407 - protein, 27 aa, Artificial Sequence
  Cyclic GFR-binding peptide
QDLSATSILYYVGRTPKVLRKHRMVVK

SEQ ID NO: 7408 - protein, 30 aa, Artificial Sequence
  Cyclic GFR-binding peptide
  MOD_RES (1)..(2): Xaa is C or S
XXVPQALSATSILYYVGRKPKVLRKHRMIV

SEQ ID NO: 7409 - protein, 36 aa, Artificial Sequence
  Cyclic GFR-binding peptide
  MOD_RES (6)..(7): Xaa is C or S
ASAAPXXVPQALSAISILYLVGRKPKVLKNYQMIVR

SEQ ID NO: 7410 - protein, 37 aa, Artificial Sequence
  Cyclic GFR-binding peptide
  MOD_RES (3)..(4)..(36): Xaa is C or S
KAXXAPTKLSPISVLYKDSSNNVILKYHYNMVVKAXG

SEQ ID NO: 7411 - protein, 23 aa, Artificial Sequence
  Cyclic GFR-binding peptide
KLSATSVLYYDDSSNVILRKHRN

SEQ ID NO: 7412 - protein, 36 aa, Artificial Sequence
  Cyclic GFR-binding peptide
  MOD_RES (6)..(7): Xaa is C or S
ASASPXXVSQDLSATSILYYIGKTPKILRKHRMIVK

SEQ ID NO: 7413 - protein, 30 aa, Artificial Sequence
  Cyclic GFR-binding peptide
  MOD_RES (1)..(2): Xaa is C or S
XXVPTELSPISMLYKDENEKVVLKYHYDMV

SEQ ID NO: 7414 - protein, 30 aa, Artificial Sequence
  Cyclic GFR-binding peptide
  MOD_RES (1)..(2): Xaa is C or S
XXVPQALSPISILYKVGRKPKVLKYHYMIV

SEQ ID NO: 7415 - protein, 29 aa, Artificial Sequence
  Cyclic GFR-binding peptide
  MOD_RES (3)..(4): Xaa is C or S
KAXXAPTKLSPISVLYKDSSNNVILKYHY

SEQ ID NO: 7416 - protein, 32 aa, Artificial Sequence
  Cyclic GFR-binding peptide
  MOD_RES (1)..(2): Xaa is C or S
XXVPTELSATSMLYYDENEKVVLRKHRDMVVE

SEQ ID NO: 7417 - protein, 31 aa, Artificial Sequence
  Cyclic GFR-binding peptide
  MOD_RES (28)..(30): Xaa is C or S
LNAISMLYFDEYDKVVLKKYREMVVEGXGXR

SEQ ID NO: 7418 - protein, 37 aa, Artificial Sequence
  Cyclic GFR-binding peptide
  MOD_RES (2)..(3)..(35)..(37): Xaa is C or S
PXXAPTQLSAISVLYLDDSSNVILKNYQNMVVRAXGX

SEQ ID NO: 7419 - protein, 30 aa, Artificial Sequence
  Cyclic GFR-binding peptide
  MOD_RES (3)..(4): Xaa is C or S
APXXVPQALNAISILYFVGRKPKVLKKYRM

SEQ ID NO: 7420 - protein, 38 aa, Artificial Sequence
  Cyclic GFR-binding peptide
  MOD_RES (5)..(6)..(37): Xaa is C or S
SASPXXVPQDLSPISILYKVGRTPKVLKYHYMVVKSXK

SEQ ID NO: 7421 - protein, 27 aa, Artificial Sequence
  Cyclic GFR-binding peptide
  MOD_RES (26)..(26): Xaa is C or S
NAISILYFVGRTPKVLKKYRMVVKSXK

SEQ ID NO: 7422 - protein, 24 aa, Artificial Sequence
  Cyclic GFR-binding peptide
ELSPISMLYKDENEKVVLKYHYDM

SEQ ID NO: 7423 - protein, 41 aa, Artificial Sequence
  Cyclic GFR-binding peptide
  MOD_RES (3)..(40): Xaa is C or S
VQXRPTQVQLSAISVLYLEIVRKKPIFLKNYQTLEDHLAXK

SEQ ID NO: 7424 - protein, 24 aa, Artificial Sequence
  Cyclic GFR-binding peptide
PTKLSAISVLYLDDMGVPTLKNYQ

SEQ ID NO: 7425 - protein, 32 aa, Artificial Sequence
  Cyclic GFR-binding peptide
  MOD_RES (1)..(32): Xaa is C or S
XVPQALSATSILYYVGRKPKVLRKHRMIVRSX

SEQ ID NO: 7426 - protein, 32 aa, Artificial Sequence
  Cyclic GFR-binding peptide
  MOD_RES (1)..(2): Xaa is C or S
XXVPQALSATSILYYVGRKPKVLRKHRMIVRS

SEQ ID NO: 7427 - protein, 25 aa, Artificial Sequence
  Cyclic GFR-binding peptide
ELSATSMLYYDENEKVVLRKHRDMV

SEQ ID NO: 7428 - protein, 34 aa, Artificial Sequence
  Cyclic GFR-binding peptide
  MOD_RES (3)..(4): Xaa is C or S
KPXXAPTKLSAISVLYLDDSSNVILKNYQNMVVR

SEQ ID NO: 7429 - protein, 33 aa, Artificial Sequence
  Cyclic GFR-binding peptide
  MOD_RES (31)..(33): Xaa is C or S
VPQDLSATSILYYVGRTPKVLRKHRMVVKSXKX

SEQ ID NO: 7430 - protein, 31 aa, Artificial Sequence
  Cyclic GFR-binding peptide
  MOD_RES (30)..(30): Xaa is C or S
PQALSATSILYYVGRKPKVLRKHRMIVRSXK

SEQ ID NO: 7431 - protein, 28 aa, Artificial Sequence
  Cyclic GFR-binding peptide
PTELNAISMLYFDENEKVVLKKYRDMVV

SEQ ID NO: 7432 - protein, 26 aa, Artificial Sequence
  Cyclic GFR-binding peptide
LSPISILYKVGRKPKVLKYHYMIVRS

SEQ ID NO: 7433 - protein, 26 aa, Artificial Sequence
  Cyclic GFR-binding peptide
  MOD_RES (26)..(26): Xaa is C or S
SAISILYLIGKTPKILKNYQMIVKSX

SEQ ID NO: 7434 - protein, 34 aa, Artificial Sequence
  Cyclic GFR-binding peptide
  MOD_RES (31)..(33): Xaa is C or S
PTELSPISMLYKDEYDKVVLKYHYEMVVEGXGXR

SEQ ID NO: 7435 - protein, 31 aa, Artificial Sequence
  Cyclic GFR-binding peptide
  MOD_RES (1)..(1): Xaa is C or S
XVPQALNAISILYFVGRKPKVLKKYRMIVRS

SEQ ID NO: 7436 - protein, 29 aa, Artificial Sequence
  Cyclic GFR-binding peptide
TELNAISMLYFDENEKVVLKKYRDMVVEG

SEQ ID NO: 7437 - protein, 33 aa, Artificial Sequence
  Cyclic GFR-binding peptide
  MOD_RES (6)..(7): Xaa is C or S
KVGKAXXVPTKLNAISVLYFDDMGVPTLKKYRE

SEQ ID NO: 7438 - protein, 30 aa, Artificial Sequence
  Cyclic GFR-binding peptide
  MOD_RES (5)..(5): Xaa is C or S
TKPTXAPTKLSATSVLYYDDSSNVILRKHR

SEQ ID NO: 7439 - protein, 25 aa, Artificial Sequence
  Cyclic GFR-binding peptide
TELNAISMLYFDENEKVVLKKYRDM

SEQ ID NO: 7440 - protein, 32 aa, Artificial Sequence
  Cyclic GFR-binding peptide
  MOD_RES (3)..(4): Xaa is C or S
SPXXVSQDLNAISILYFIGKTPKILKKYRMIV

SEQ ID NO: 7441 - protein, 36 aa, Artificial Sequence
  Cyclic GFR-binding peptide
  MOD_RES (1)..(2)..(33)..(35): Xaa is C or S
XXVPQALSATSILYYVGRKPKVLRKHRMIVRSXKXS

SEQ ID NO: 7442 - protein, 24 aa, Artificial Sequence
  Cyclic GFR-binding peptide
SAISVLYLDDSSNVILKNYQNMVV

SEQ ID NO: 7443 - protein, 30 aa, Artificial Sequence
  Cyclic GFR-binding peptide
  MOD_RES (3)..(4): Xaa is C or S
KAXXVPTKLSATSVLYYDDMGVPTLRKHRE

SEQ ID NO: 7444 - protein, 32 aa, Artificial Sequence
  Cyclic GFR-binding peptide
  MOD_RES (6)..(7): Xaa is C or S
SIPKAXXVPTELSATSMLYYDEYDKVVLRKHR

SEQ ID NO: 7445 - protein, 25 aa, Artificial Sequence
  Cyclic GFR-binding peptide
LSAISVLYLDDMGVPTLKNYQEGMS

SEQ ID NO: 7446 - protein, 34 aa, Artificial Sequence
  Cyclic GFR-binding peptide
  MOD_RES (3)..(4): Xaa is C or S
KAXXVPTELSATSMLYYDENEKVVLRKHRDMVVE

SEQ ID NO: 7447 - protein, 38 aa, Artificial Sequence
  Cyclic GFR-binding peptide
  MOD_RES (4)..(5)..(37): Xaa is C or S
PKAXXVPTELSPISMLYKDEYDKVVLKYHYEMVVEGXG

SEQ ID NO: 7448 - protein, 38 aa, Artificial Sequence
  Cyclic GFR-binding peptide
  MOD_RES (6)..(7)..(38): Xaa is C or S
ASASPXXVSQDLSPISILYKIGKTPKILKYHYMIVKSX

SEQ ID NO: 7449 - protein, 28 aa, Artificial Sequence
  Cyclic GFR-binding peptide
  MOD_RES (27)..(27): Xaa is C or S
LSPISILYKIGKTPKILKYHYMIVKSXK

SEQ ID NO: 7450 - protein, 32 aa, Artificial Sequence
  Cyclic GFR-binding peptide
  MOD_RES (32)..(32): Xaa is C or S
QLSATSVLYYEIVRKKPIFLRKHRTLEDHLAX

SEQ ID NO: 7451 - protein, 29 aa, Artificial Sequence
  Cyclic GFR-binding peptide
  MOD_RES (2)..(3): Xaa is C or S
AXXAPTKLNAISVLYFDSSNNVILKKYRN

SEQ ID NO: 7452 - protein, 31 aa, Artificial Sequence
  Cyclic GFR-binding peptide
  MOD_RES (2)..(2): Xaa is C or S
QXRPTQVQLSATSVLYYEIVRKKPIFLRKHR

SEQ ID NO: 7453 - protein, 38 aa, Artificial Sequence
  Cyclic GFR-binding peptide
  MOD_RES (6)..(7): Xaa is C or S
TVPKPXXAPTQLSAISVLYLDDSSNVILKNYQNMVVRA

SEQ ID NO: 7454 - protein, 28 aa, Artificial Sequence
  Cyclic GFR-binding peptide
  MOD_RES (1)..(2): Xaa is C or S
XXAPTQLSAISVLYLDDSSNVILKNYQN

SEQ ID NO: 7455 - protein, 27 aa, Artificial Sequence
  Cyclic GFR-binding peptide
  MOD_RES (1)..(2): Xaa is C or S
XXVSQDLSAISILYLIGKTPKILKNYQ

SEQ ID NO: 7456 - protein, 38 aa, Artificial Sequence
  Cyclic GFR-binding peptide
  MOD_RES (35)..(37): Xaa is C or S
TQVQLSAISVLYLEIVRKKPIFLKNYQTLEDHLAXKXE

SEQ ID NO: 7457 - protein, 44 aa, Artificial Sequence
  Cyclic GFR-binding peptide
  MOD_RES (4)..(41)..(43): Xaa is C or S
NVQXRPTQVQLSAISVLYLEIVRKKPIFLKNYQTLEDHLAXKXE

SEQ ID NO: 7458 - protein, 38 aa, Artificial Sequence
  Cyclic GFR-binding peptide
  MOD_RES (2)..(3)..(35)..(37): Xaa is C or S
AXXVPTELSATSMLYYDEYDKVVLRKHREMVVEGXGXR

SEQ ID NO: 7459 - protein, 34 aa, Artificial Sequence
  Cyclic GFR-binding peptide
  MOD_RES (1)..(32)..(34): Xaa is C or S
XVSQDLSATSILYYIGKTPKILRKHRMIVKSXKX

SEQ ID NO: 7460 - protein, 37 aa, Artificial Sequence
  Cyclic GFR-binding peptide
  MOD_RES (3)..(4)..(36): Xaa is C or S
KPXXAPTKLSATSVLYYDDSSNVILRKHRNMVVRSXG

SEQ ID NO: 7461 - protein, 30 aa, Artificial Sequence
  Cyclic GFR-binding peptide
  MOD_RES (27)..(29): Xaa is C or S
LSAISILYLVGRKPKVLKNYQMIVRSXKXS

SEQ ID NO: 7462 - protein, 33 aa, Artificial Sequence
  Cyclic GFR-binding peptide
  MOD_RES (30)..(32): Xaa is C or S
TELSATSMLYYDEYDKVVLRKHREMVVEGXGXR

SEQ ID NO: 7463 - protein, 29 aa, Artificial Sequence
  Cyclic GFR-binding peptide
TELNAISMLYFDEYDKVVLKKYREMVVEG

SEQ ID NO: 7464 - protein, 30 aa, Artificial Sequence
  Cyclic GFR-binding peptide
  MOD_RES (30)..(30): Xaa is C or S
TKLSPISVLYKDDSSNVILKYHYNMVVRSX

SEQ ID NO: 7465 - protein, 28 aa, Artificial Sequence
  Cyclic GFR-binding peptide
  MOD_RES (1)..(1): Xaa is C or S
XVSQDLNAISILYFIGKTPKILKKYRMI

SEQ ID NO: 7466 - protein, 37 aa, Artificial Sequence
  Cyclic GFR-binding peptide
  MOD_RES (2)..(34)..(36): Xaa is C or S
TXAPTKLSPISVLYKDDSSNVILKYHYNMVVRSXGXH

SEQ ID NO: 7467 - protein, 31 aa, Artificial Sequence
  Cyclic GFR-binding peptide
TQVQLSATSVLYYEIVRKKPIFLRKHRTLED

SEQ ID NO: 7468 - protein, 25 aa, Artificial Sequence
  Cyclic GFR-binding peptide
ELSPISMLYKDENEKVVLKYHYDMV

SEQ ID NO: 7469 - protein, 36 aa, Artificial Sequence
  Cyclic GFR-binding peptide
  MOD_RES (1)..(2)..(33)..(35): Xaa is C or S
XXVPQDLNAISILYFVGRTPKVLKKYRMVVKSXKXS

SEQ ID NO: 7470 - protein, 40 aa, Artificial Sequence
  Cyclic GFR-binding peptide
  MOD_RES (3)..(4)..(37)..(39): Xaa is C or S
KAXXVPTKLNAISVLYFDDMGVPTLKKYREGMSVAEXGXR

SEQ ID NO: 7471 - protein, 28 aa, Artificial Sequence
  Cyclic GFR-binding peptide
  MOD_RES (28)..(28): Xaa is C or S
LSPISVLYKDSSNNVILKYHYNMVVKAX

SEQ ID NO: 7472 - protein, 22 aa, Artificial Sequence
  Cyclic GFR-binding peptide
ELSPISMLYKDEYDKVVLKYHY

SEQ ID NO: 7473 - protein, 33 aa, Artificial Sequence
  Cyclic GFR-binding peptide
  MOD_RES (1)..(32): Xaa is C or S
XVPQDLSPISILYKVGRTPKVLKYHYMVVKSXK

SEQ ID NO: 7474 - protein, 34 aa, Artificial Sequence
  Cyclic GFR-binding peptide
  MOD_RES (2)..(3)..(34): Xaa is C or S
PXXVPQALSAISILYLVGRKPKVLKNYQMIVRSX

SEQ ID NO: 7475 - protein, 27 aa, Artificial Sequence
  Cyclic GFR-binding peptide
VSQDLNAISILYFIGKTPKILKKYRMI

SEQ ID NO: 7476 - protein, 38 aa, Artificial Sequence
  Cyclic GFR-binding peptide
  MOD_RES (3)..(4)..(35)..(37): Xaa is C or S
APXXVPQALSATSILYYVGRKPKVLRKHRMIVRSXKXS

SEQ ID NO: 7477 - protein, 34 aa, Artificial Sequence
  Cyclic GFR-binding peptide
  MOD_RES (1)..(33): Xaa is C or S
XVPTELSATSMLYYDENEKVVLRKHRDMVVEGXG

SEQ ID NO: 7478 - protein, 25 aa, Artificial Sequence
  Cyclic GFR-binding peptide
LSATSILYYVGRKPKVLRKHRMIVR

SEQ ID NO: 7479 - protein, 22 aa, Artificial Sequence
  Cyclic GFR-binding peptide
LSAISVLYLDSSNNVILKNYQN

SEQ ID NO: 7480 - protein, 34 aa, Artificial Sequence
  Cyclic GFR-binding peptide
  MOD_RES (1)..(33): Xaa is C or S
XAPTKLSPISVLYKDDSSNVILKYHYNMVVRSXG

SEQ ID NO: 7481 - protein, 37 aa, Artificial Sequence
  Cyclic GFR-binding peptide
  MOD_RES (1)..(2)..(34)..(36): Xaa is C or S
XXAPTKLNAISVLYFDSSNNVILKKYRNMVVKAXGXH

SEQ ID NO: 7482 - protein, 36 aa, Artificial Sequence
  Cyclic GFR-binding peptide
  MOD_RES (2)..(3)..(36): Xaa is C or S
AXXVPTKLNAISVLYFDDMGVPTLKKYREGMSVAEX

SEQ ID NO: 7483 - protein, 32 aa, Artificial Sequence
  Cyclic GFR-binding peptide
  MOD_RES (3)..(3): Xaa is C or S
VQXRPTQVQLSPISVLYKEIVRKKPIFLKYHY

SEQ ID NO: 7484 - protein, 20 aa, Artificial Sequence
  Cyclic GFR-binding peptide
NAISMLYFDENEKVVLKKYR

SEQ ID NO: 7485 - protein, 26 aa, Artificial Sequence
  Cyclic GFR-binding peptide
PQDLSPISILYKVGRTPKVLKYHYMV

SEQ ID NO: 7486 - protein, 28 aa, Artificial Sequence
  Cyclic GFR-binding peptide
  MOD_RES (2)..(3): Xaa is C or S
AXXVPTKLNAISVLYFDDMGVPTLKKYR

SEQ ID NO: 7487 - protein, 31 aa, Artificial Sequence
  Cyclic GFR-binding peptide
  MOD_RES (1)..(2): Xaa is C or S
XXVPQDLSATSILYYVGRTPKVLRKHRMVVK

SEQ ID NO: 7488 - protein, 27 aa, Artificial Sequence
  Cyclic GFR-binding peptide
  MOD_RES (1)..(1): Xaa is C or S
XVPQDLSAISILYLVGRTPKVLKNYQM

SEQ ID NO: 7489 - protein, 22 aa, Artificial Sequence
  Cyclic GFR-binding peptide
DLNAISILYFIGKTPKILKKYR

SEQ ID NO: 7490 - protein, 24 aa, Artificial Sequence
  Cyclic GFR-binding peptide
PQDLSATSILYYVGRTPKVLRKHR

SEQ ID NO: 7491 - protein, 36 aa, Artificial Sequence
  Cyclic GFR-binding peptide
  MOD_RES (1)..(2)..(34)..(36): Xaa is C or S
XXVPTELNAISMLYFDEYDKVVLKKYREMVVEGXGX

SEQ ID NO: 7492 - protein, 27 aa, Artificial Sequence
  Cyclic GFR-binding peptide
PQDLSPISILYKVGRTPKVLKYHYMVV

SEQ ID NO: 7493 - protein, 27 aa, Artificial Sequence
  Cyclic GFR-binding peptide
PQDLSATSILYYVGRTPKVLRKHRMVV

SEQ ID NO: 7494 - protein, 35 aa, Artificial Sequence
  Cyclic GFR-binding peptide
PTQVQLSPISVLYKEIVRKKPIFLKYHYTLEDHLA

SEQ ID NO: 7495 - protein, 31 aa, Artificial Sequence
  Cyclic GFR-binding peptide
PTKLSATSVLYYDDMGVPTLRKHREGMSVAE

SEQ ID NO: 7496 - protein, 31 aa, Artificial Sequence
  Cyclic GFR-binding peptide
  MOD_RES (28)..(30): Xaa is C or S
DLSPISILYKVGRTPKVLKYHYMVVKSXKXS

SEQ ID NO: 7497 - protein, 37 aa, Artificial Sequence
  Cyclic GFR-binding peptide
  MOD_RES (2)..(3)..(35)..(37): Xaa is C or S
AXXVPTELSATSMLYYDEYDKVVLRKHREMVVEGXGX

SEQ ID NO: 7498 - protein, 30 aa, Artificial Sequence
  Cyclic GFR-binding peptide
  MOD_RES (28)..(30): Xaa is C or S
DLSAISILYLIGKTPKILKNYQMIVKSXKX

SEQ ID NO: 7499 - protein, 31 aa, Artificial Sequence
  Cyclic GFR-binding peptide
  MOD_RES (3)..(4): Xaa is C or S
KAXXVPTELNAISMLYFDENEKVVLKKYRDM

SEQ ID NO: 7500 - protein, 38 aa, Artificial Sequence
  Cyclic GFR-binding peptide
  MOD_RES (5)..(6): Xaa is C or S
VGKAXXVPTKLNAISVLYFDDMGVPTLKKYREGMSVAE

SEQ ID NO: 7501 - protein, 36 aa, Artificial Sequence
  Cyclic GFR-binding peptide
  MOD_RES (3)..(4)..(35): Xaa is C or S
SPXXVPQDLSPISILYKVGRTPKVLKYHYMVVKSXK

SEQ ID NO: 7502 - protein, 33 aa, Artificial Sequence
  Cyclic GFR-binding peptide
TQVQLSPISVLYKEIVRKKPIFLKYHYTLEDHL

SEQ ID NO: 7503 - protein, 23 aa, Artificial Sequence
  Cyclic GFR-binding peptide
SAISILYLVGRKPKVLKNYQMIV

SEQ ID NO: 7504 - protein, 36 aa, Artificial Sequence
  Cyclic GFR-binding peptide
  MOD_RES (7)..(7): Xaa is C or S
HVTKPTXAPTKLSAISVLYLDDSSNVILKNYQNMVV

SEQ ID NO: 7505 - protein, 40 aa, Artificial Sequence
  Cyclic GFR-binding peptide
  MOD_RES (4)..(5)..(37)..(39): Xaa is C or S
PKAXXAPTKLSPISVLYKDSSNNVILKYHYNMVVKAXGXH

SEQ ID NO: 7506 - protein, 27 aa, Artificial Sequence
  Cyclic GFR-binding peptide
VPTELNAISMLYFDENEKVVLKKYRDM

SEQ ID NO: 7507 - protein, 33 aa, Artificial Sequence
  Cyclic GFR-binding peptide
  MOD_RES (1)..(32): Xaa is C or S
XVPQALSATSILYYVGRKPKVLRKHRMIVRSXK

SEQ ID NO: 7508 - protein, 33 aa, Artificial Sequence
  Cyclic GFR-binding peptide
  MOD_RES (4)..(4): Xaa is C or S
NVQXRPTQVQLSATSVLYYEIVRKKPIFLRKHR

SEQ ID NO: 7509 - protein, 40 aa, Artificial Sequence
  Cyclic GFR-binding peptide
  MOD_RES (4)..(5)..(37)..(39): Xaa is C or S
PKPXXAPTKLSAISVLYLDDSSNVILKNYQNMVVRSXGXH

SEQ ID NO: 7510 - protein, 35 aa, Artificial Sequence
  Cyclic GFR-binding peptide
  MOD_RES (34)..(34): Xaa is C or S
QVQLSAISVLYLEIVRKKPIFLKNYQTLEDHLAXK

SEQ ID NO: 7511 - protein, 27 aa, Artificial Sequence
  Cyclic GFR-binding peptide
  MOD_RES (27)..(27): Xaa is C or S
SATSMLYYDEYDKVVLRKHREMVVEGX

SEQ ID NO: 7512 - protein, 30 aa, Artificial Sequence
  Cyclic GFR-binding peptide
  MOD_RES (27)..(29): Xaa is C or S
LSPISILYKVGRKPKVLKYHYMIVRSXKXS

SEQ ID NO: 7513 - protein, 33 aa, Artificial Sequence
  Cyclic GFR-binding peptide
  MOD_RES (6)..(7): Xaa is C or S
ASASPXXVSQDLSATSILYYIGKTPKILRKHRM

SEQ ID NO: 7514 - protein, 31 aa, Artificial Sequence
  Cyclic GFR-binding peptide
  MOD_RES (1)..(2): Xaa is C or S
XXVPTELNAISMLYFDEYDKVVLKKYREMVV

SEQ ID NO: 7515 - protein, 38 aa, Artificial Sequence
  Cyclic GFR-binding peptide
  MOD_RES (5)..(5): Xaa is C or S
RNVQXRPTQVQLSAISVLYLEIVRKKPIFLKNYQTLED

SEQ ID NO: 7516 - protein, 35 aa, Artificial Sequence
  Cyclic GFR-binding peptide
  MOD_RES (1)..(2)..(35): Xaa is C or S
XXVPTKLNAISVLYFDDMGVPTLKKYREGMSVAEX

SEQ ID NO: 7517 - protein, 40 aa, Artificial Sequence
  Cyclic GFR-binding peptide
  MOD_RES (5)..(6)..(38)..(40): Xaa is C or S
VPKAXXAPTKLNAISVLYFDSSNNVILKKYRNMVVKAXGX

SEQ ID NO: 7518 - protein, 25 aa, Artificial Sequence
  Cyclic GFR-binding peptide
SPISMLYKDEYDKVVLKYHYEMVVE

SEQ ID NO: 7519 - protein, 32 aa, Artificial Sequence
  Cyclic GFR-binding peptide
  MOD_RES (4)..(5): Xaa is C or S
PKAXXVPTELSPISMLYKDEYDKVVLKYHYEM

SEQ ID NO: 7520 - protein, 33 aa, Artificial Sequence
  Cyclic GFR-binding peptide
  MOD_RES (2)..(2): Xaa is C or S
QXRPTQVQLNAISVLYFEIVRKKPIFLKKYRTL

SEQ ID NO: 7521 - protein, 30 aa, Artificial Sequence
  Cyclic GFR-binding peptide
  MOD_RES (1)..(1): Xaa is C or S
XVPTELSPISMLYKDENEKVVLKYHYDMVV

SEQ ID NO: 7522 - protein, 35 aa, Artificial Sequence
  Cyclic GFR-binding peptide
RPTQVQLSPISVLYKEIVRKKPIFLKYHYTLEDHL

SEQ ID NO: 7523 - protein, 36 aa, Artificial Sequence
  Cyclic GFR-binding peptide
  MOD_RES (4)..(4): Xaa is C or S
NVQXRPTQVQLSAISVLYLEIVRKKPIFLKNYQTLE

SEQ ID NO: 7524 - protein, 26 aa, Artificial Sequence
  Cyclic GFR-binding peptide
NAISVLYFDSSNNVILKKYRNMVVKA

SEQ ID NO: 7525 - protein, 29 aa, Artificial Sequence
  Cyclic GFR-binding peptide
TKLSATSVLYYDDSSNVILRKHRNMVVRS

SEQ ID NO: 7526 - protein, 41 aa, Artificial Sequence
  Cyclic GFR-binding peptide
  MOD_RES (6)..(7)..(38)..(40): Xaa is C or S
ASASPXXVPQDLSPISILYKVGRTPKVLKYHYMVVKSXKXS

SEQ ID NO: 7527 - protein, 22 aa, Artificial Sequence
  Cyclic GFR-binding peptide
LNAISILYFVGRTPKVLKKYRM

SEQ ID NO: 7528 - protein, 34 aa, Artificial Sequence
  Cyclic GFR-binding peptide
  MOD_RES (31)..(33): Xaa is C or S
PTKLSATSVLYYDDSSNVILRKHRNMVVRSXGXH

SEQ ID NO: 7529 - protein, 26 aa, Artificial Sequence
  Cyclic GFR-binding peptide
LSAISVLYLDDSSNVILKNYQNMVVR

SEQ ID NO: 7530 - protein, 36 aa, Artificial Sequence
  Cyclic GFR-binding peptide
  MOD_RES (1)..(2)..(35): Xaa is C or S
XXVPTKLSATSVLYYDDMGVPTLRKHREGMSVAEXG

SEQ ID NO: 7531 - protein, 35 aa, Artificial Sequence
  Cyclic GFR-binding peptide
  MOD_RES (4)..(4): Xaa is C or S
NVQXRPTQVQLNAISVLYFEIVRKKPIFLKKYRTL

SEQ ID NO: 7532 - protein, 36 aa, Artificial Sequence
  Cyclic GFR-binding peptide
  MOD_RES (5)..(6): Xaa is C or S
IPKAXXVPTELSATSMLYYDEYDKVVLRKHREMVVE

SEQ ID NO: 7533 - protein, 42 aa, Artificial Sequence
  Cyclic GFR-binding peptide
  MOD_RES (6)..(7)..(39)..(41): Xaa is C or S
KIPKAXXVPTELNAISMLYFDENEKVVLKKYRDMVVEGXGXR

SEQ ID NO: 7534 - protein, 39 aa, Artificial Sequence
  Cyclic GFR-binding peptide
  MOD_RES (6)..(7)..(39): Xaa is C or S
KIPKAXXVPTELSPISMLYKDENEKVVLKYHYDMVVEGX

SEQ ID NO: 7535 - protein, 24 aa, Artificial Sequence
  Cyclic GFR-binding peptide
TKLNAISVLYFDDMGVPTLKKYRE

SEQ ID NO: 7536 - protein, 25 aa, Artificial Sequence
  Cyclic GFR-binding peptide
PTQLSAISVLYLDDSSNVILKNYQN

SEQ ID NO: 7537 - protein, 33 aa, Artificial Sequence
  Cyclic GFR-binding peptide
  MOD_RES (1)..(2): Xaa is C or S
XXAPTQLSATSVLYYDDSSNVILRKHRNMVVRA

SEQ ID NO: 7538 - protein, 33 aa, Artificial Sequence
  Cyclic GFR-binding peptide
  MOD_RES (1)..(2)..(33): Xaa is C or S
XXVPQDLSAISILYLVGRTPKVLKNYQMVVKSX

SEQ ID NO: 7539 - protein, 29 aa, Artificial Sequence
  Cyclic GFR-binding peptide
  MOD_RES (1)..(2): Xaa is C or S
XXAPTKLSPISVLYKDSSNNVILKYHYNM

SEQ ID NO: 7540 - protein, 28 aa, Artificial Sequence
  Cyclic GFR-binding peptide
  MOD_RES (2)..(3): Xaa is C or S
PXXAPTKLSAISVLYLDDSSNVILKNYQ

SEQ ID NO: 7541 - protein, 28 aa, Artificial Sequence
  Cyclic GFR-binding peptide
QDLSATSILYYVGRTPKVLRKHRMVVKS

SEQ ID NO: 7542 - protein, 31 aa, Artificial Sequence
  Cyclic GFR-binding peptide
  MOD_RES (31)..(31): Xaa is C or S
VPQALSPISILYKVGRKPKVLKYHYMIVRSX

SEQ ID NO: 7543 - protein, 38 aa, Artificial Sequence
  Cyclic GFR-binding peptide
  MOD_RES (6)..(7)..(38): Xaa is C or S
ASASPXXVSQDLSATSILYYIGKTPKILRKHRMIVKSX

SEQ ID NO: 7544 - protein, 25 aa, Artificial Sequence
  Cyclic GFR-binding peptide
VPTELSATSMLYYDEYDKVVLRKHR

SEQ ID NO: 7545 - protein, 27 aa, Artificial Sequence
  Cyclic GFR-binding peptide
QLSAISVLYLDDSSNVILKNYQNMVVR

SEQ ID NO: 7546 - protein, 33 aa, Artificial Sequence
  Cyclic GFR-binding peptide
  MOD_RES (4)..(5): Xaa is C or S
PKPXXAPTQLSAISVLYLDDSSNVILKNYQNMV

SEQ ID NO: 7547 - protein, 28 aa, Artificial Sequence
  Cyclic GFR-binding peptide
  MOD_RES (28)..(28): Xaa is C or S
LSPISVLYKDDSSNVILKYHYNMVVRAX

SEQ ID NO: 7548 - protein, 22 aa, Artificial Sequence
  Cyclic GFR-binding peptide
NAISILYFVGRKPKVLKKYRMI

SEQ ID NO: 7549 - protein, 33 aa, Artificial Sequence
  Cyclic GFR-binding peptide
  MOD_RES (1)..(1): Xaa is C or S
XVPTKLSAISVLYLDDMGVPTLKNYQEGMSVAE

SEQ ID NO: 7550 - protein, 36 aa, Artificial Sequence
  Cyclic GFR-binding peptide
  MOD_RES (2)..(3)..(34)..(36): Xaa is C or S
PXXVSQDLSATSILYYIGKTPKILRKHRMIVKSXKX

SEQ ID NO: 7551 - protein, 30 aa, Artificial Sequence
  Cyclic GFR-binding peptide
  MOD_RES (30)..(30): Xaa is C or S
SQDLNAISILYFIGKTPKILKKYRMIVKSX

SEQ ID NO: 7552 - protein, 27 aa, Artificial Sequence
  Cyclic GFR-binding peptide
  MOD_RES (26)..(26): Xaa is C or S
NAISILYFVGRKPKVLKKYRMIVRSXK

SEQ ID NO: 7553 - protein, 34 aa, Artificial Sequence
  Cyclic GFR-binding peptide
  MOD_RES (1)..(2)..(33): Xaa is C or S
XXVPQALSATSILYYVGRKPKVLRKHRMIVRSXK

SEQ ID NO: 7554 - protein, 33 aa, Artificial Sequence
  Cyclic GFR-binding peptide
  MOD_RES (2)..(3): Xaa is C or S
PXXVPQDLSAISILYLVGRTPKVLKNYQMVVKS

SEQ ID NO: 7555 - protein, 28 aa, Artificial Sequence
  Cyclic GFR-binding peptide
TQVQLSATSVLYYEIVRKKPIFLRKHRT

SEQ ID NO: 7556 - protein, 33 aa, Artificial Sequence
  Cyclic GFR-binding peptide
  MOD_RES (2)..(3): Xaa is C or S
PXXVPQALNAISILYFVGRKPKVLKKYRMIVRS

SEQ ID NO: 7557 - protein, 27 aa, Artificial Sequence
  Cyclic GFR-binding peptide
PQALSAISILYLVGRKPKVLKNYQMIV

SEQ ID NO: 7558 - protein, 31 aa, Artificial Sequence
  Cyclic GFR-binding peptide
  MOD_RES (29)..(31): Xaa is C or S
QDLSATSILYYIGKTPKILRKHRMIVKSXKX

SEQ ID NO: 7559 - protein, 32 aa, Artificial Sequence
  Cyclic GFR-binding peptide
  MOD_RES (32)..(32): Xaa is C or S
APTKLSPISVLYKDSSNNVILKYHYNMVVKAX

SEQ ID NO: 7560 - protein, 32 aa, Artificial Sequence
  Cyclic GFR-binding peptide
  MOD_RES (31)..(31): Xaa is C or S
VPQALSAISILYLVGRKPKVLKNYQMIVRSXK

SEQ ID NO: 7561 - protein, 30 aa, Artificial Sequence
  Cyclic GFR-binding peptide
  MOD_RES (2)..(3): Xaa is C or S
PXXVPQALNAISILYFVGRKPKVLKKYRMI

SEQ ID NO: 7562 - protein, 27 aa, Artificial Sequence
  Cyclic GFR-binding peptide
VQLSAISVLYLEIVRKKPIFLKNYQTL

SEQ ID NO: 7563 - protein, 33 aa, Artificial Sequence
  Cyclic GFR-binding peptide
  MOD_RES (4)..(5): Xaa is C or S
PKAXXVPTELNAISMLYFDENEKVVLKKYRDMV

SEQ ID NO: 7564 - protein, 34 aa, Artificial Sequence
  Cyclic GFR-binding peptide
  MOD_RES (4)..(5): Xaa is C or S
PKPXXAPTKLSAISVLYLDDSSNVILKNYQNMVV

SEQ ID NO: 7565 - protein, 36 aa, Artificial Sequence
  Cyclic GFR-binding peptide
  MOD_RES (1)..(33)..(35): Xaa is C or S
XAPTQLSAISVLYLDDSSNVILKNYQNMVVRAXGXH

SEQ ID NO: 7566 - protein, 28 aa, Artificial Sequence
  Cyclic GFR-binding peptide
KLNAISVLYFDDMGVPTLKKYREGMSVA

SEQ ID NO: 7567 - protein, 24 aa, Artificial Sequence
  Cyclic GFR-binding peptide
PTKLNAISVLYFDDMGVPTLKKYR

SEQ ID NO: 7568 - protein, 32 aa, Artificial Sequence
  Cyclic GFR-binding peptide
  MOD_RES (31)..(31): Xaa is C or S
VSQDLSATSILYYIGKTPKILRKHRMIVKSXK

SEQ ID NO: 7569 - protein, 36 aa, Artificial Sequence
  Cyclic GFR-binding peptide
  MOD_RES (3)..(4)..(36): Xaa is C or S
KAXXAPTKLSPISVLYKDSSNNVILKYHYNMVVKAX

SEQ ID NO: 7570 - protein, 33 aa, Artificial Sequence
  Cyclic GFR-binding peptide
  MOD_RES (4)..(5): Xaa is C or S
PKAXXAPTKLSAISVLYLDSSNNVILKNYQNMV

SEQ ID NO: 7571 - protein, 30 aa, Artificial Sequence
  Cyclic GFR-binding peptide
  MOD_RES (3)..(4): Xaa is C or S
KAXXAPTKLSPISVLYKDSSNNVILKYHYN

SEQ ID NO: 7572 - protein, 32 aa, Artificial Sequence
  Cyclic GFR-binding peptide
  MOD_RES (3)..(4): Xaa is C or S
KAXXAPTKLSAISVLYLDSSNNVILKNYQNMV

SEQ ID NO: 7573 - protein, 30 aa, Artificial Sequence
  Cyclic GFR-binding peptide
LNAISVLYFEIVRKKPIFLKKYRTLEDHLA

SEQ ID NO: 7574 - protein, 30 aa, Artificial Sequence
  Cyclic GFR-binding peptide
VPTELSATSMLYYDEYDKVVLRKHREMVVE

SEQ ID NO: 7575 - protein, 42 aa, Artificial Sequence
  Cyclic GFR-binding peptide
  MOD_RES (6)..(7)..(39)..(41): Xaa is C or S
YVPKPXXAPTKLSAISVLYLDDSSNVILKNYQNMVVRSXGXH

SEQ ID NO: 7576 - protein, 28 aa, Artificial Sequence
  Cyclic GFR-binding peptide
  MOD_RES (1)..(1): Xaa is C or S
XVPQDLNAISILYFVGRTPKVLKKYRMV

SEQ ID NO: 7577 - protein, 35 aa, Artificial Sequence
  Cyclic GFR-binding peptide
  MOD_RES (32)..(34): Xaa is C or S
VPTELSPISMLYKDENEKVVLKYHYDMVVEGXGXR

SEQ ID NO: 7578 - protein, 29 aa, Artificial Sequence
  Cyclic GFR-binding peptide
  MOD_RES (2)..(3): Xaa is C or S
PXXAPTKLSPISVLYKDDSSNVILKYHYN

SEQ ID NO: 7579 - protein, 27 aa, Artificial Sequence
  Cyclic GFR-binding peptide
PTKLSATSVLYYDDSSNVILRKHRNMV

SEQ ID NO: 7580 - protein, 32 aa, Artificial Sequence
  Cyclic GFR-binding peptide
  MOD_RES (2)..(3): Xaa is C or S
PXXVPQDLSAISILYLVGRTPKVLKNYQMVVK

SEQ ID NO: 7581 - protein, 42 aa, Artificial Sequence
  Cyclic GFR-binding peptide
  MOD_RES (6)..(7)..(39)..(41): Xaa is C or S
SIPKAXXVPTELNAISMLYFDEYDKVVLKKYREMVVEGXGXR

SEQ ID NO: 7582 - protein, 31 aa, Artificial Sequence
  Cyclic GFR-binding peptide
  MOD_RES (1)..(2): Xaa is C or S
XXVPQDLSPISILYKVGRTPKVLKYHYMVVK

SEQ ID NO: 7583 - protein, 32 aa, Artificial Sequence
  Cyclic GFR-binding peptide
  MOD_RES (31)..(31): Xaa is C or S
LSPISVLYKEIVRKKPIFLKYHYTLEDHLAXK

SEQ ID NO: 7584 - protein, 32 aa, Artificial Sequence
  Cyclic GFR-binding peptide
  MOD_RES (4)..(5): Xaa is C or S
AAPXXVPQALSPISILYKVGRKPKVLKYHYMI

SEQ ID NO: 7585 - protein, 32 aa, Artificial Sequence
  Cyclic GFR-binding peptide
  MOD_RES (6)..(7): Xaa is C or S
ASASPXXVSQDLSATSILYYIGKTPKILRKHR

SEQ ID NO: 7586 - protein, 30 aa, Artificial Sequence
  Cyclic GFR-binding peptide
  MOD_RES (27)..(29): Xaa is C or S
LSPISILYKVGRTPKVLKYHYMVVKSXKXS

SEQ ID NO: 7587 - protein, 39 aa, Artificial Sequence
  Cyclic GFR-binding peptide
  MOD_RES (6)..(7)..(39): Xaa is C or S
SIPKAXXVPTELSPISMLYKDEYDKVVLKYHYEMVVEGX

SEQ ID NO: 7588 - protein, 41 aa, Artificial Sequence
  Cyclic GFR-binding peptide
  MOD_RES (6)..(7)..(40): Xaa is C or S
KVGKAXXVPTKLNAISVLYFDDMGVPTLKKYREGMSVAEXG

SEQ ID NO: 7589 - protein, 30 aa, Artificial Sequence
  Cyclic GFR-binding peptide
  MOD_RES (29)..(29): Xaa is C or S
ELSATSMLYYDENEKVVLRKHRDMVVEGXG

SEQ ID NO: 7590 - protein, 31 aa, Artificial Sequence
  Cyclic GFR-binding peptide
  MOD_RES (30)..(30): Xaa is C or S
SPISVLYKEIVRKKPIFLKYHYTLEDHLAXK

SEQ ID NO: 7591 - protein, 34 aa, Artificial Sequence
  Cyclic GFR-binding peptide
  MOD_RES (6)..(7): Xaa is C or S
TVPKPXXAPTQLSPISVLYKDDSSNVILKYHYNM

SEQ ID NO: 7592 - protein, 33 aa, Artificial Sequence
  Cyclic GFR-binding peptide
  MOD_RES (1)..(32): Xaa is C or S
XVPQALNAISILYFVGRKPKVLKKYRMIVRSXK

SEQ ID NO: 7593 - protein, 31 aa, Artificial Sequence
  Cyclic GFR-binding peptide
  MOD_RES (30)..(30): Xaa is C or S
SQDLNAISILYFIGKTPKILKKYRMIVKSXK

SEQ ID NO: 7594 - protein, 30 aa, Artificial Sequence
  Cyclic GFR-binding peptide
  MOD_RES (1)..(2): Xaa is C or S
XXAPTKLSAISVLYLDSSNNVILKNYQNMV

SEQ ID NO: 7595 - protein, 32 aa, Artificial Sequence
  Cyclic GFR-binding peptide
  MOD_RES (5)..(6): Xaa is C or S
VGKAXXVPTKLSATSVLYYDDMGVPTLRKHRE

SEQ ID NO: 7596 - protein, 29 aa, Artificial Sequence
  Cyclic GFR-binding peptide
  MOD_RES (4)..(4): Xaa is C or S
KPTXAPTKLSATSVLYYDDSSNVILRKHR

SEQ ID NO: 7597 - protein, 32 aa, Artificial Sequence
  Cyclic GFR-binding peptide
  MOD_RES (2)..(3): Xaa is C or S
AXXVPTKLSAISVLYLDDMGVPTLKNYQEGMS

SEQ ID NO: 7598 - protein, 22 aa, Artificial Sequence
  Cyclic GFR-binding peptide
ELSATSMLYYDENEKVVLRKHR

SEQ ID NO: 7599 - protein, 34 aa, Artificial Sequence
  Cyclic GFR-binding peptide
  MOD_RES (3)..(4): Xaa is C or S
SPXXVPQDLSATSILYYVGRTPKVLRKHRMVVKS

SEQ ID NO: 7600 - protein, 31 aa, Artificial Sequence
  Cyclic GFR-binding peptide
  MOD_RES (28)..(30): Xaa is C or S
ALSPISILYKVGRKPKVLKYHYMIVRSXKXS

SEQ ID NO: 7601 - protein, 29 aa, Artificial Sequence
  Cyclic GFR-binding peptide
  MOD_RES (3)..(4): Xaa is C or S
KPXXAPTQLSAISVLYLDDSSNVILKNYQ

SEQ ID NO: 7602 - protein, 35 aa, Artificial Sequence
  Cyclic GFR-binding peptide
  MOD_RES (1)..(2)..(33)..(35): Xaa is C or S
XXVPQALSPISILYKVGRKPKVLKYHYMIVRSXKX

SEQ ID NO: 7603 - protein, 36 aa, Artificial Sequence
  Cyclic GFR-binding peptide
  MOD_RES (1)..(33)..(35): Xaa is C or S
XAPTKLSAISVLYLDDSSNVILKNYQNMVVRSXGXH

SEQ ID NO: 7604 - protein, 35 aa, Artificial Sequence
  Cyclic GFR-binding peptide
  MOD_RES (7)..(7): Xaa is C or S
HVTKPTXAPTKLSATSVLYYDDSSNVILRKHRNMV

SEQ ID NO: 7605 - protein, 25 aa, Artificial Sequence
  Cyclic GFR-binding peptide
LSATSMLYYDEYDKVVLRKHREMVV

SEQ ID NO: 7606 - protein, 26 aa, Artificial Sequence
  Cyclic GFR-binding peptide
  MOD_RES (1)..(1): Xaa is C or S
XVPQALNAISILYFVGRKPKVLKKYR

SEQ ID NO: 7607 - protein, 37 aa, Artificial Sequence
  Cyclic GFR-binding peptide
  MOD_RES (4)..(5)..(37): Xaa is C or S
PKPXXAPTQLSATSVLYYDDSSNVILRKHRNMVVRAX

SEQ ID NO: 7608 - protein, 23 aa, Artificial Sequence
  Cyclic GFR-binding peptide
LSATSVLYYDDMGVPTLRKHREG

SEQ ID NO: 7609 - protein, 26 aa, Artificial Sequence
  Cyclic GFR-binding peptide
DLNAISILYFIGKTPKILKKYRMIVK

SEQ ID NO: 7610 - protein, 29 aa, Artificial Sequence
  Cyclic GFR-binding peptide
  MOD_RES (2)..(3): Xaa is C or S
PXXVSQDLSPISILYKIGKTPKILKYHYM

SEQ ID NO: 7611 - protein, 32 aa, Artificial Sequence
  Cyclic GFR-binding peptide
  MOD_RES (32)..(32): Xaa is C or S
APTKLSPISVLYKDDSSNVILKYHYNMVVRSX

SEQ ID NO: 7612 - protein, 23 aa, Artificial Sequence
  Cyclic GFR-binding peptide
SAISILYLVGRTPKVLKNYQMVV

SEQ ID NO: 7613 - protein, 34 aa, Artificial Sequence
  Cyclic GFR-binding peptide
  MOD_RES (33)..(33): Xaa is C or S
VQLSATSVLYYEIVRKKPIFLRKHRTLEDHLAXK

SEQ ID NO: 7614 - protein, 33 aa, Artificial Sequence
  Cyclic GFR-binding peptide
  MOD_RES (1)..(32): Xaa is C or S
XVPQALSPISILYKVGRKPKVLKYHYMIVRSXK

SEQ ID NO: 7615 - protein, 35 aa, Artificial Sequence
  Cyclic GFR-binding peptide
  MOD_RES (35)..(35): Xaa is C or S
TQVQLSAISVLYLEIVRKKPIFLKNYQTLEDHLAX

SEQ ID NO: 7616 - protein, 31 aa, Artificial Sequence
  Cyclic GFR-binding peptide
  MOD_RES (2)..(3): Xaa is C or S
AXXVPTELNAISMLYFDENEKVVLKKYRDMV

SEQ ID NO: 7617 - protein, 29 aa, Artificial Sequence
  Cyclic GFR-binding peptide
VPTKLSATSVLYYDDMGVPTLRKHREGMS

SEQ ID NO: 7618 - protein, 28 aa, Artificial Sequence
  Cyclic GFR-binding peptide
  MOD_RES (1)..(1): Xaa is C or S
XVPTKLSAISVLYLDDMGVPTLKNYQEG

SEQ ID NO: 7619 - protein, 26 aa, Artificial Sequence
  Cyclic GFR-binding peptide
ELNAISMLYFDENEKVVLKKYRDMVV

SEQ ID NO: 7620 - protein, 29 aa, Artificial Sequence
  Cyclic GFR-binding peptide
  MOD_RES (1)..(2): Xaa is C or S
XXAPTQLSAISVLYLDDSSNVILKNYQNM

SEQ ID NO: 7621 - protein, 22 aa, Artificial Sequence
  Cyclic GFR-binding peptide
LSATSMLYYDENEKVVLRKHRD

SEQ ID NO: 7622 - protein, 31 aa, Artificial Sequence
  Cyclic GFR-binding peptide
  MOD_RES (31)..(31): Xaa is C or S
LSATSVLYYEIVRKKPIFLRKHRTLEDHLAX

SEQ ID NO: 7623 - protein, 30 aa, Artificial Sequence
  Cyclic GFR-binding peptide
  MOD_RES (30)..(30): Xaa is C or S
TELNAISMLYFDEYDKVVLKKYREMVVEGX

SEQ ID NO: 7624 - protein, 33 aa, Artificial Sequence
  Cyclic GFR-binding peptide
  MOD_RES (4)..(5): Xaa is C or S
AAPXXVPQALSPISILYKVGRKPKVLKYHYMIV

SEQ ID NO: 7625 - protein, 31 aa, Artificial Sequence
  Cyclic GFR-binding peptide
  MOD_RES (1)..(2): Xaa is C or S
XXVPQALNAISILYFVGRKPKVLKKYRMIVR

SEQ ID NO: 7626 - protein, 29 aa, Artificial Sequence
  Cyclic GFR-binding peptide
SQDLNAISILYFIGKTPKILKKYRMIVKS

SEQ ID NO: 7627 - protein, 28 aa, Artificial Sequence
  Cyclic GFR-binding peptide
QLSPISVLYKEIVRKKPIFLKYHYTLED

SEQ ID NO: 7628 - protein, 27 aa, Artificial Sequence
  Cyclic GFR-binding peptide
  MOD_RES (27)..(27): Xaa is C or S
SPISVLYKDDSSNVILKYHYNMVVRSX

SEQ ID NO: 7629 - protein, 36 aa, Artificial Sequence
  Cyclic GFR-binding peptide
  MOD_RES (2)..(3)..(35): Xaa is C or S
PXXAPTQLSAISVLYLDDSSNVILKNYQNMVVRAXG

SEQ ID NO: 7630 - protein, 28 aa, Artificial Sequence
  Cyclic GFR-binding peptide
  MOD_RES (1)..(1): Xaa is C or S
XAPTKLSAISVLYLDDSSNVILKNYQNM

SEQ ID NO: 7631 - protein, 34 aa, Artificial Sequence
  Cyclic GFR-binding peptide
  MOD_RES (6)..(7): Xaa is C or S
AVPKAXXAPTKLSPISVLYKDSSNNVILKYHYNM

SEQ ID NO: 7632 - protein, 37 aa, Artificial Sequence
  Cyclic GFR-binding peptide
  MOD_RES (7)..(7): Xaa is C or S
HVTKPTXAPTKLSAISVLYLDDSSNVILKNYQNMVVR

SEQ ID NO: 7633 - protein, 43 aa, Artificial Sequence
  Cyclic GFR-binding peptide
  MOD_RES (5)..(42): Xaa is C or S
RNVQXRPTQVQLSAISVLYLEIVRKKPIFLKNYQTLEDHLAXK

SEQ ID NO: 7634 - protein, 30 aa, Artificial Sequence
  Cyclic GFR-binding peptide
  MOD_RES (27)..(29): Xaa is C or S
SPISMLYKDEYDKVVLKYHYEMVVEGXGXR

SEQ ID NO: 7635 - protein, 28 aa, Artificial Sequence
  Cyclic GFR-binding peptide
  MOD_RES (1)..(2): Xaa is C or S
XXAPTKLNAISVLYFDSSNNVILKKYRN

SEQ ID NO: 7636 - protein, 31 aa, Artificial Sequence
  Cyclic GFR-binding peptide
  MOD_RES (1)..(1): Xaa is C or S
XVPTELSPISMLYKDEYDKVVLKYHYEMVVE

SEQ ID NO: 7637 - protein, 36 aa, Artificial Sequence
  Cyclic GFR-binding peptide
  MOD_RES (2)..(3)..(34)..(36): Xaa is C or S
PXXVPQDLSATSILYYVGRTPKVLRKHRMVVKSXKX

SEQ ID NO: 7638 - protein, 29 aa, Artificial Sequence
  Cyclic GFR-binding peptide
PTQLSPISVLYKDDSSNVILKYHYNMVVR

SEQ ID NO: 7639 - protein, 34 aa, Artificial Sequence
  Cyclic GFR-binding peptide
  MOD_RES (1)..(34): Xaa is C or S
XVPTKLSATSVLYYDDMGVPTLRKHREGMSVAEX

SEQ ID NO: 7640 - protein, 31 aa, Artificial Sequence
  Cyclic GFR-binding peptide
  MOD_RES (4)..(5): Xaa is C or S
ASPXXVSQDLSAISILYLIGKTPKILKNYQM

SEQ ID NO: 7641 - protein, 38 aa, Artificial Sequence
  Cyclic GFR-binding peptide
  MOD_RES (36)..(38): Xaa is C or S
PTQVQLSATSVLYYEIVRKKPIFLRKHRTLEDHLAXKX

SEQ ID NO: 7642 - protein, 24 aa, Artificial Sequence
  Cyclic GFR-binding peptide
TELSATSMLYYDENEKVVLRKHRD

SEQ ID NO: 7643 - protein, 37 aa, Artificial Sequence
  Cyclic GFR-binding peptide
  MOD_RES (6)..(7): Xaa is C or S
YVPKPXXAPTKLSATSVLYYDDSSNVILRKHRNMVVR

SEQ ID NO: 7644 - protein, 26 aa, Artificial Sequence
  Cyclic GFR-binding peptide
PTKLSPISVLYKDSSNNVILKYHYNM

SEQ ID NO: 7645 - protein, 38 aa, Artificial Sequence
  Cyclic GFR-binding peptide
  MOD_RES (35)..(37): Xaa is C or S
TQVQLNAISVLYFEIVRKKPIFLKKYRTLEDHLAXKXE

SEQ ID NO: 7646 - protein, 29 aa, Artificial Sequence
  Cyclic GFR-binding peptide
PTKLNAISVLYFDSSNNVILKKYRNMVVK

SEQ ID NO: 7647 - protein, 30 aa, Artificial Sequence
  Cyclic GFR-binding peptide
  MOD_RES (1)..(1): Xaa is C or S
XVPQDLSPISILYKVGRTPKVLKYHYMVVK

SEQ ID NO: 7648 - protein, 30 aa, Artificial Sequence
  Cyclic GFR-binding peptide
  MOD_RES (3)..(4): Xaa is C or S
KPXXAPTKLSATSVLYYDDSSNVILRKHRN

SEQ ID NO: 7649 - protein, 31 aa, Artificial Sequence
  Cyclic GFR-binding peptide
  MOD_RES (30)..(30): Xaa is C or S
SQDLSPISILYKIGKTPKILKYHYMIVKSXK

SEQ ID NO: 7650 - protein, 37 aa, Artificial Sequence
  Cyclic GFR-binding peptide
  MOD_RES (5)..(6): Xaa is C or S
VPKAXXAPTKLSPISVLYKDSSNNVILKYHYNMVVKA

SEQ ID NO: 7651 - protein, 29 aa, Artificial Sequence
  Cyclic GFR-binding peptide
  MOD_RES (29)..(29): Xaa is C or S
KLSPISVLYKDSSNNVILKYHYNMVVKAX

SEQ ID NO: 7652 - protein, 34 aa, Artificial Sequence
  Cyclic GFR-binding peptide
  MOD_RES (33)..(33): Xaa is C or S
VPTKLNAISVLYFDDMGVPTLKKYREGMSVAEXG

SEQ ID NO: 7653 - protein, 42 aa, Artificial Sequence
  Cyclic GFR-binding peptide
  MOD_RES (7)..(39)..(41): Xaa is C or S
HVTKPTXAPTKLSPISVLYKDDSSNVILKYHYNMVVRSXGXH

SEQ ID NO: 7654 - protein, 33 aa, Artificial Sequence
  Cyclic GFR-binding peptide
  MOD_RES (33)..(33): Xaa is C or S
VPTKLSATSVLYYDDMGVPTLRKHREGMSVAEX

SEQ ID NO: 7655 - protein, 30 aa, Artificial Sequence
  Cyclic GFR-binding peptide
  MOD_RES (2)..(3): Xaa is C or S
AXXAPTKLSPISVLYKDSSNNVILKYHYNM

SEQ ID NO: 7656 - protein, 21 aa, Artificial Sequence
  Cyclic GFR-binding peptide
SAISILYLIGKTPKILKNYQM

SEQ ID NO: 7657 - protein, 27 aa, Artificial Sequence
  Cyclic GFR-binding peptide
KLSAISVLYLDSSNNVILKNYQNMVVK

SEQ ID NO: 7658 - protein, 30 aa, Artificial Sequence
  Cyclic GFR-binding peptide
VSQDLSATSILYYIGKTPKILRKHRMIVKS

SEQ ID NO: 7659 - protein, 22 aa, Artificial Sequence
  Cyclic GFR-binding peptide
LSAISILYLVGRKPKVLKNYQM

SEQ ID NO: 7660 - protein, 29 aa, Artificial Sequence
  Cyclic GFR-binding peptide
  MOD_RES (27)..(29): Xaa is C or S
LSAISILYLVGRKPKVLKNYQMIVRSXKX

SEQ ID NO: 7661 - protein, 36 aa, Artificial Sequence
  Cyclic GFR-binding peptide
  MOD_RES (6)..(7): Xaa is C or S
KIPKAXXVPTELSPISMLYKDENEKVVLKYHYDMVV

SEQ ID NO: 7662 - protein, 36 aa, Artificial Sequence
  Cyclic GFR-binding peptide
  MOD_RES (1)..(33)..(35): Xaa is C or S
XAPTKLSAISVLYLDSSNNVILKNYQNMVVKAXGXH

SEQ ID NO: 7663 - protein, 27 aa, Artificial Sequence
  Cyclic GFR-binding peptide
  MOD_RES (1)..(1): Xaa is C or S
XVPQALSATSILYYVGRKPKVLRKHRM

SEQ ID NO: 7664 - protein, 40 aa, Artificial Sequence
  Cyclic GFR-binding peptide
  MOD_RES (3)..(40): Xaa is C or S
VQXRPTQVQLSAISVLYLEIVRKKPIFLKNYQTLEDHLAX

SEQ ID NO: 7665 - protein, 39 aa, Artificial Sequence
  Cyclic GFR-binding peptide
  MOD_RES (6)..(7): Xaa is C or S
KVGKAXXVPTKLSAISVLYLDDMGVPTLKNYQEGMSVAE

SEQ ID NO: 7666 - protein, 23 aa, Artificial Sequence
  Cyclic GFR-binding peptide
DLNAISILYFIGKTPKILKKYRM

SEQ ID NO: 7667 - protein, 35 aa, Artificial Sequence
  Cyclic GFR-binding peptide
  MOD_RES (32)..(34): Xaa is C or S
VPTELSPISMLYKDEYDKVVLKYHYEMVVEGXGXR

SEQ ID NO: 7668 - protein, 39 aa, Artificial Sequence
  Cyclic GFR-binding peptide
  MOD_RES (6)..(7)..(39): Xaa is C or S
SIPKAXXVPTELNAISMLYFDEYDKVVLKKYREMVVEGX

SEQ ID NO: 7669 - protein, 31 aa, Artificial Sequence
  Cyclic GFR-binding peptide
VQLSATSVLYYEIVRKKPIFLRKHRTLEDHL

SEQ ID NO: 7670 - protein, 25 aa, Artificial Sequence
  Cyclic GFR-binding peptide
VPQDLNAISILYFVGRTPKVLKKYR

SEQ ID NO: 7671 - protein, 34 aa, Artificial Sequence
  Cyclic GFR-binding peptide
  MOD_RES (32)..(34): Xaa is C or S
QLSATSVLYYEIVRKKPIFLRKHRTLEDHLAXKX

SEQ ID NO: 7672 - protein, 41 aa, Artificial Sequence
  Cyclic GFR-binding peptide
  MOD_RES (6)..(7)..(38)..(40): Xaa is C or S
ASASPXXVSQDLSATSILYYIGKTPKILRKHRMIVKSXKXS

SEQ ID NO: 7673 - protein, 39 aa, Artificial Sequence
  Cyclic GFR-binding peptide
  MOD_RES (6)..(7)..(38): Xaa is C or S
ASAAPXXVPQALSATSILYYVGRKPKVLRKHRMIVRSXK

SEQ ID NO: 7674 - protein, 34 aa, Artificial Sequence
  Cyclic GFR-binding peptide
  MOD_RES (4)..(4): Xaa is C or S
NVQXRPTQVQLSPISVLYKEIVRKKPIFLKYHYT

SEQ ID NO: 7675 - protein, 32 aa, Artificial Sequence
  Cyclic GFR-binding peptide
  MOD_RES (5)..(6): Xaa is C or S
VPKAXXAPTKLNAISVLYFDSSNNVILKKYRN

SEQ ID NO: 7676 - protein, 30 aa, Artificial Sequence
  Cyclic GFR-binding peptide
  MOD_RES (2)..(3): Xaa is C or S
PXXAPTKLSPISVLYKDDSSNVILKYHYNM

SEQ ID NO: 7677 - protein, 29 aa, Artificial Sequence
  Cyclic GFR-binding peptide
  MOD_RES (3)..(4): Xaa is C or S
SPXXVSQDLSAISILYLIGKTPKILKNYQ

SEQ ID NO: 7678 - protein, 23 aa, Artificial Sequence
  Cyclic GFR-binding peptide
NAISILYFIGKTPKILKKYRMIV

SEQ ID NO: 7679 - protein, 32 aa, Artificial Sequence
  Cyclic GFR-binding peptide
  MOD_RES (3)..(4): Xaa is C or S
KAXXAPTKLNAISVLYFDSSNNVILKKYRNMV

SEQ ID NO: 7680 - protein, 37 aa, Artificial Sequence
  Cyclic GFR-binding peptide
  MOD_RES (5)..(6)..(37): Xaa is C or S
SASPXXVSQDLSAISILYLIGKTPKILKNYQMIVKSX

SEQ ID NO: 7681 - protein, 28 aa, Artificial Sequence
  Cyclic GFR-binding peptide
  MOD_RES (27)..(27): Xaa is C or S
SATSVLYYDDSSNVILRKHRNMVVRSXG

SEQ ID NO: 7682 - protein, 33 aa, Artificial Sequence
  Cyclic GFR-binding peptide
  MOD_RES (3)..(3): Xaa is C or S
VQXRPTQVQLSATSVLYYEIVRKKPIFLRKHRT

SEQ ID NO: 7683 - protein, 37 aa, Artificial Sequence
  Cyclic GFR-binding peptide
  MOD_RES (5)..(6)..(37): Xaa is C or S
SASPXXVSQDLNAISILYFIGKTPKILKKYRMIVKSX

SEQ ID NO: 7684 - protein, 29 aa, Artificial Sequence
  Cyclic GFR-binding peptide
  MOD_RES (2)..(3): Xaa is C or S
PXXAPTKLSATSVLYYDDSSNVILRKHRN

SEQ ID NO: 7685 - protein, 24 aa, Artificial Sequence
  Cyclic GFR-binding peptide
SATSILYYVGRTPKVLRKHRMVVK

SEQ ID NO: 7686 - protein, 40 aa, Artificial Sequence
  Cyclic GFR-binding peptide
  MOD_RES (4)..(5)..(37)..(39): Xaa is C or S
PKAXXVPTELSATSMLYYDENEKVVLRKHRDMVVEGXGXR

SEQ ID NO: 7687 - protein, 30 aa, Artificial Sequence
  Cyclic GFR-binding peptide
  MOD_RES (1)..(2): Xaa is C or S
XXAPTKLSATSVLYYDDSSNVILRKHRNMV

SEQ ID NO: 7688 - protein, 34 aa, Artificial Sequence
  Cyclic GFR-binding peptide
  MOD_RES (2)..(3): Xaa is C or S
AXXVPTKLSAISVLYLDDMGVPTLKNYQEGMSVA

SEQ ID NO: 7689 - protein, 28 aa, Artificial Sequence
  Cyclic GFR-binding peptide
PTQLSPISVLYKDDSSNVILKYHYNMVV

SEQ ID NO: 7690 - protein, 28 aa, Artificial Sequence
  Cyclic GFR-binding peptide
  MOD_RES (1)..(1): Xaa is C or S
XVPTELSATSMLYYDEYDKVVLRKHREM

SEQ ID NO: 7691 - protein, 35 aa, Artificial Sequence
  Cyclic GFR-binding peptide
  MOD_RES (6)..(7): Xaa is C or S
KVGKAXXVPTKLSATSVLYYDDMGVPTLRKHREGM

SEQ ID NO: 7692 - protein, 28 aa, Artificial Sequence
  Cyclic GFR-binding peptide
VPQDLSPISILYKVGRTPKVLKYHYMVV

SEQ ID NO: 7693 - protein, 30 aa, Artificial Sequence
  Cyclic GFR-binding peptide
  MOD_RES (27)..(29): Xaa is C or S
NAISMLYFDENEKVVLKKYRDMVVEGXGXR

SEQ ID NO: 7694 - protein, 40 aa, Artificial Sequence
  Cyclic GFR-binding peptide
  MOD_RES (3)..(40): Xaa is C or S
VQXRPTQVQLSATSVLYYEIVRKKPIFLRKHRTLEDHLAX

SEQ ID NO: 7695 - protein, 35 aa, Artificial Sequence
  Cyclic GFR-binding peptide
  MOD_RES (1)..(2)..(33)..(35): Xaa is C or S
XXVSQDLSATSILYYIGKTPKILRKHRMIVKSXKX

SEQ ID NO: 7696 - protein, 33 aa, Artificial Sequence
  Cyclic GFR-binding peptide
  MOD_RES (1)..(1): Xaa is C or S
XRPTQVQLNAISVLYFEIVRKKPIFLKKYRTLE

SEQ ID NO: 7697 - protein, 24 aa, Artificial Sequence
  Cyclic GFR-binding peptide
NAISILYFVGRKPKVLKKYRMIVR

SEQ ID NO: 7698 - protein, 27 aa, Artificial Sequence
  Cyclic GFR-binding peptide
SAISMLYLDENEKVVLKNYQDENEKVV

SEQ ID NO: 7699 - protein, 36 aa, Artificial Sequence
  Cyclic GFR-binding peptide
  MOD_RES (2)..(3)..(35): Xaa is C or S
PXXAPTQLSPISVLYKDDSSNVILKYHYNMVVRAXG

SEQ ID NO: 7700 - protein, 28 aa, Artificial Sequence
  Cyclic GFR-binding peptide
APTKLSAISVLYLDSSNNVILKNYQNMV

SEQ ID NO: 7701 - protein, 35 aa, Artificial Sequence
  Cyclic GFR-binding peptide
  MOD_RES (32)..(34): Xaa is C or S
APTKLSAISVLYLDSSNNVILKNYQNMVVKAXGXH

SEQ ID NO: 7702 - protein, 31 aa, Artificial Sequence
  Cyclic GFR-binding peptide
  MOD_RES (1)..(1): Xaa is C or S
XVPQALSATSILYYVGRKPKVLRKHRMIVRS

SEQ ID NO: 7703 - protein, 36 aa, Artificial Sequence
  Cyclic GFR-binding peptide
  MOD_RES (6)..(7): Xaa is C or S
KVGKAXXVPTKLSATSVLYYDDMGVPTLRKHREGMS

SEQ ID NO: 7704 - protein, 30 aa, Artificial Sequence
  Cyclic GFR-binding peptide
  MOD_RES (2)..(2): Xaa is C or S
TXAPTKLSATSVLYYDDSSNVILRKHRNMV

SEQ ID NO: 7705 - protein, 26 aa, Artificial Sequence
  Cyclic GFR-binding peptide
KLSATSVLYYDDMGVPTLRKHREGMS

SEQ ID NO: 7706 - protein, 34 aa, Artificial Sequence
  Cyclic GFR-binding peptide
  MOD_RES (2)..(3)..(34): Xaa is C or S
PXXVPQALSPISILYKVGRKPKVLKYHYMIVRSX

SEQ ID NO: 7707 - protein, 23 aa, Artificial Sequence
  Cyclic GFR-binding peptide
TELSPISMLYKDENEKVVLKYHY

SEQ ID NO: 7708 - protein, 31 aa, Artificial Sequence
  Cyclic GFR-binding peptide
APTKLSPISVLYKDSSNNVILKYHYNMVVKA

SEQ ID NO: 7709 - protein, 33 aa, Artificial Sequence
  Cyclic GFR-binding peptide
  MOD_RES (2)..(3): Xaa is C or S
AXXAPTKLNAISVLYFDSSNNVILKKYRNMVVK

SEQ ID NO: 7710 - protein, 24 aa, Artificial Sequence
  Cyclic GFR-binding peptide
LSAISILYLIGKTPKILKNYQMIV

SEQ ID NO: 7711 - protein, 32 aa, Artificial Sequence
  Cyclic GFR-binding peptide
  MOD_RES (6)..(7): Xaa is C or S
KIPKAXXVPTELNAISMLYFDENEKVVLKKYR

SEQ ID NO: 7712 - protein, 33 aa, Artificial Sequence
  Cyclic GFR-binding peptide
PTQVQLSAISVLYLEIVRKKPIFLKNYQTLEDH

SEQ ID NO: 7713 - protein, 29 aa, Artificial Sequence
  Cyclic GFR-binding peptide
  MOD_RES (29)..(29): Xaa is C or S
QDLSATSILYYVGRTPKVLRKHRMVVKSX

SEQ ID NO: 7714 - protein, 29 aa, Artificial Sequence
  Cyclic GFR-binding peptide
  MOD_RES (26)..(28): Xaa is C or S
NAISILYFVGRTPKVLKKYRMVVKSXKXS

SEQ ID NO: 7715 - protein, 37 aa, Artificial Sequence
  Cyclic GFR-binding peptide
  MOD_RES (1)..(2)..(34)..(36): Xaa is C or S
XXVPTELNAISMLYFDEYDKVVLKKYREMVVEGXGXR

SEQ ID NO: 7716 - protein, 37 aa, Artificial Sequence
  Cyclic GFR-binding peptide
  MOD_RES (1)..(2)..(34)..(36): Xaa is C or S
XXAPTQLSPISVLYKDDSSNVILKYHYNMVVRAXGXH

SEQ ID NO: 7717 - protein, 35 aa, Artificial Sequence
  Cyclic GFR-binding peptide
  MOD_RES (6)..(7): Xaa is C or S
ASASPXXVPQDLSAISILYLVGRTPKVLKNYQMVV

SEQ ID NO: 7718 - protein, 35 aa, Artificial Sequence
  Cyclic GFR-binding peptide
  MOD_RES (32)..(34): Xaa is C or S
QLSAISVLYLEIVRKKPIFLKNYQTLEDHLAXKXE

SEQ ID NO: 7719 - protein, 32 aa, Artificial Sequence
  Cyclic GFR-binding peptide
  MOD_RES (3)..(3): Xaa is C or S
PTXAPTKLSPISVLYKDDSSNVILKYHYNMVV

SEQ ID NO: 7720 - protein, 37 aa, Artificial Sequence
  Cyclic GFR-binding peptide
  MOD_RES (3)..(4)..(35)..(37): Xaa is C or S
APXXVPQALNAISILYFVGRKPKVLKKYRMIVRSXKX

SEQ ID NO: 7721 - protein, 33 aa, Artificial Sequence
  Cyclic GFR-binding peptide
  MOD_RES (30)..(32): Xaa is C or S
PQALSPISILYKVGRKPKVLKYHYMIVRSXKXS

SEQ ID NO: 7722 - protein, 36 aa, Artificial Sequence
  Cyclic GFR-binding peptide
  MOD_RES (3)..(4)..(35): Xaa is C or S
SPXXVPQDLSAISILYLVGRTPKVLKNYQMVVKSXK

SEQ ID NO: 7723 - protein, 34 aa, Artificial Sequence
  Cyclic GFR-binding peptide
  MOD_RES (5)..(6): Xaa is C or S
IPKAXXVPTELNAISMLYFDEYDKVVLKKYREMV

SEQ ID NO: 7724 - protein, 34 aa, Artificial Sequence
  Cyclic GFR-binding peptide
  MOD_RES (32)..(34): Xaa is C or S
PTKLSATSVLYYDDMGVPTLRKHREGMSVAEXGX

SEQ ID NO: 7725 - protein, 40 aa, Artificial Sequence
  Cyclic GFR-binding peptide
  MOD_RES (6)..(7)..(39): Xaa is C or S
SIPKAXXVPTELSPISMLYKDEYDKVVLKYHYEMVVEGXG

SEQ ID NO: 7726 - protein, 37 aa, Artificial Sequence
  Cyclic GFR-binding peptide
  MOD_RES (4)..(5)..(37): Xaa is C or S
PKAXXVPTELSATSMLYYDEYDKVVLRKHREMVVEGX

SEQ ID NO: 7727 - protein, 26 aa, Artificial Sequence
  Cyclic GFR-binding peptide
APTQLSAISVLYLDDSSNVILKNYQN

SEQ ID NO: 7728 - protein, 26 aa, Artificial Sequence
  Cyclic GFR-binding peptide
LSPISMLYKDENEKVVLKYHYDMVVE

SEQ ID NO: 7729 - protein, 36 aa, Artificial Sequence
  Cyclic GFR-binding peptide
  MOD_RES (2)..(3)..(34)..(36): Xaa is C or S
PXXVPQDLSAISILYLVGRTPKVLKNYQMVVKSXKX

SEQ ID NO: 7730 - protein, 28 aa, Artificial Sequence
  Cyclic GFR-binding peptide
  MOD_RES (1)..(2): Xaa is C or S
XXVPTKLSATSVLYYDDMGVPTLRKHRE

SEQ ID NO: 7731 - protein, 25 aa, Artificial Sequence
  Cyclic GFR-binding peptide
APTKLNAISVLYFDSSNNVILKKYR

SEQ ID NO: 7732 - protein, 30 aa, Artificial Sequence
  Cyclic GFR-binding peptide
  MOD_RES (1)..(1): Xaa is C or S
XVPTELNAISMLYFDEYDKVVLKKYREMVV

SEQ ID NO: 7733 - protein, 25 aa, Artificial Sequence
  Cyclic GFR-binding peptide
APTQLSATSVLYYDDSSNVILRKHR

SEQ ID NO: 7734 - protein, 32 aa, Artificial Sequence
  Cyclic GFR-binding peptide
  MOD_RES (3)..(4): Xaa is C or S
SPXXVPQDLSAISILYLVGRTPKVLKNYQMVV

SEQ ID NO: 7735 - protein, 40 aa, Artificial Sequence
  Cyclic GFR-binding peptide
  MOD_RES (1)..(38)..(40): Xaa is C or S
XRPTQVQLSATSVLYYEIVRKKPIFLRKHRTLEDHLAXKX

SEQ ID NO: 7736 - protein, 37 aa, Artificial Sequence
  Cyclic GFR-binding peptide
  MOD_RES (6)..(7): Xaa is C or S
ASAAPXXVPQALSATSILYYVGRKPKVLRKHRMIVRS

SEQ ID NO: 7737 - protein, 30 aa, Artificial Sequence
  Cyclic GFR-binding peptide
  MOD_RES (3)..(4): Xaa is C or S
SPXXVPQDLNAISILYFVGRTPKVLKKYRM

SEQ ID NO: 7738 - protein, 36 aa, Artificial Sequence
  Cyclic GFR-binding peptide
  MOD_RES (1)..(33)..(35): Xaa is C or S
XVPTELNAISMLYFDENEKVVLKKYRDMVVEGXGXR

SEQ ID NO: 7739 - protein, 32 aa, Artificial Sequence
  Cyclic GFR-binding peptide
  MOD_RES (3)..(4): Xaa is C or S
SPXXVPQDLSATSILYYVGRTPKVLRKHRMVV

SEQ ID NO: 7740 - protein, 31 aa, Artificial Sequence
  Cyclic GFR-binding peptide
  MOD_RES (1)..(1): Xaa is C or S
XRPTQVQLNAISVLYFEIVRKKPIFLKKYRT

SEQ ID NO: 7741 - protein, 24 aa, Artificial Sequence
  Cyclic GFR-binding peptide
SATSMLYYDENEKVVLRKHRDMVV

SEQ ID NO: 7742 - protein, 28 aa, Artificial Sequence
  Cyclic GFR-binding peptide
  MOD_RES (27)..(27): Xaa is C or S
LNAISILYFVGRTPKVLKKYRMVVKSXK

SEQ ID NO: 7743 - protein, 31 aa, Artificial Sequence
  Cyclic GFR-binding peptide
  MOD_RES (31)..(31): Xaa is C or S
LSAISVLYLEIVRKKPIFLKNYQTLEDHLAX

SEQ ID NO: 7744 - protein, 28 aa, Artificial Sequence
  Cyclic GFR-binding peptide
  MOD_RES (1)..(1): Xaa is C or S
XVPTELSPISMLYKDEYDKVVLKYHYEM

SEQ ID NO: 7745 - protein, 28 aa, Artificial Sequence
  Cyclic GFR-binding peptide
VQLSATSVLYYEIVRKKPIFLRKHRTLE

SEQ ID NO: 7746 - protein, 23 aa, Artificial Sequence
  Cyclic GFR-binding peptide
TQLSAISVLYLDDSSNVILKNYQ

SEQ ID NO: 7747 - protein, 33 aa, Artificial Sequence
  Cyclic GFR-binding peptide
  MOD_RES (1)..(1): Xaa is C or S
XRPTQVQLSATSVLYYEIVRKKPIFLRKHRTLE

SEQ ID NO: 7748 - protein, 36 aa, Artificial Sequence
  Cyclic GFR-binding peptide
  MOD_RES (5)..(6): Xaa is C or S
SASPXXVPQDLSATSILYYVGRTPKVLRKHRMVVKS

SEQ ID NO: 7749 - protein, 29 aa, Artificial Sequence
  Cyclic GFR-binding peptide
  MOD_RES (29)..(29): Xaa is C or S
KLNAISVLYFDSSNNVILKKYRNMVVKAX

SEQ ID NO: 7750 - protein, 31 aa, Artificial Sequence
  Cyclic GFR-binding peptide
  MOD_RES (5)..(6): Xaa is C or S
VPKPXXAPTKLSAISVLYLDDSSNVILKNYQ

SEQ ID NO: 7751 - protein, 35 aa, Artificial Sequence
  Cyclic GFR-binding peptide
RPTQVQLSAISVLYLEIVRKKPIFLKNYQTLEDHL

SEQ ID NO: 7752 - protein, 29 aa, Artificial Sequence
  Cyclic GFR-binding peptide
PTQLSAISVLYLDDSSNVILKNYQNMVVR

SEQ ID NO: 7753 - protein, 36 aa, Artificial Sequence
  Cyclic GFR-binding peptide
  MOD_RES (3)..(4): Xaa is C or S
KAXXVPTKLSAISVLYLDDMGVPTLKNYQEGMSVAE

SEQ ID NO: 7754 - protein, 30 aa, Artificial Sequence
  Cyclic GFR-binding peptide
  MOD_RES (1)..(1): Xaa is C or S
XVPQDLSAISILYLVGRTPKVLKNYQMVVK

SEQ ID NO: 7755 - protein, 25 aa, Artificial Sequence
  Cyclic GFR-binding peptide
NAISILYFVGRTPKVLKKYRMVVKS

SEQ ID NO: 7756 - protein, 34 aa, Artificial Sequence
  Cyclic GFR-binding peptide
  MOD_RES (1)..(2)..(34): Xaa is C or S
XXAPTKLSATSVLYYDDSSNVILRKHRNMVVRSX

SEQ ID NO: 7757 - protein, 29 aa, Artificial Sequence
  Cyclic GFR-binding peptide
  MOD_RES (1)..(1): Xaa is C or S
XVPQALSAISILYLVGRKPKVLKNYQMIV

SEQ ID NO: 7758 - protein, 34 aa, Artificial Sequence
  Cyclic GFR-binding peptide
  MOD_RES (1)..(2)..(34): Xaa is C or S
XXAPTKLSAISVLYLDSSNNVILKNYQNMVVKAX

SEQ ID NO: 7759 - protein, 28 aa, Artificial Sequence
  Cyclic GFR-binding peptide
QDLNAISILYFIGKTPKILKKYRMIVKS

SEQ ID NO: 7760 - protein, 40 aa, Artificial Sequence
  Cyclic GFR-binding peptide
  MOD_RES (4)..(4): Xaa is C or S
NVQXRPTQVQLNAISVLYFEIVRKKPIFLKKYRTLEDHLA

SEQ ID NO: 7761 - protein, 35 aa, Artificial Sequence
  Cyclic GFR-binding peptide
  MOD_RES (6)..(7): Xaa is C or S
KVGKAXXVPTKLSAISVLYLDDMGVPTLKNYQEGM

SEQ ID NO: 7762 - protein, 22 aa, Artificial Sequence
  Cyclic GFR-binding peptide
LSATSILYYIGKTPKILRKHRM

SEQ ID NO: 7763 - protein, 27 aa, Artificial Sequence
  Cyclic GFR-binding peptide
  MOD_RES (27)..(27): Xaa is C or S
NAISMLYFDEYDKVVLKKYREMVVEGX

SEQ ID NO: 7764 - protein, 29 aa, Artificial Sequence
  Cyclic GFR-binding peptide
VPQDLSAISILYLVGRTPKVLKNYQMVVK

SEQ ID NO: 7765 - protein, 34 aa, Artificial Sequence
  Cyclic GFR-binding peptide
  MOD_RES (5)..(6): Xaa is C or S
SAAPXXVPQALNAISILYFVGRKPKVLKKYRMIV

SEQ ID NO: 7766 - protein, 32 aa, Artificial Sequence
  Cyclic GFR-binding peptide
  MOD_RES (2)..(3): Xaa is C or S
AXXAPTKLNAISVLYFDSSNNVILKKYRNMVV

SEQ ID NO: 7767 - protein, 27 aa, Artificial Sequence
  Cyclic GFR-binding peptide
APTKLSATSVLYYDDSSNVILRKHRNM

SEQ ID NO: 7768 - protein, 34 aa, Artificial Sequence
  Cyclic GFR-binding peptide
  MOD_RES (7)..(7): Xaa is C or S
HVTKPTXAPTKLSPISVLYKDDSSNVILKYHYNM

SEQ ID NO: 7769 - protein, 34 aa, Artificial Sequence
  Cyclic GFR-binding peptide
  MOD_RES (7)..(7): Xaa is C or S
HVTKPTXAPTKLSATSVLYYDDSSNVILRKHRNM

SEQ ID NO: 7770 - protein, 39 aa, Artificial Sequence
  Cyclic GFR-binding peptide
  MOD_RES (5)..(6)..(38): Xaa is C or S
VPKAXXAPTKLSPISVLYKDSSNNVILKYHYNMVVKAXG

SEQ ID NO: 7771 - protein, 41 aa, Artificial Sequence
  Cyclic GFR-binding peptide
  MOD_RES (5)..(6)..(38)..(40): Xaa is C or S
VPKPXXAPTKLSATSVLYYDDSSNVILRKHRNMVVRSXGXH

SEQ ID NO: 7772 - protein, 37 aa, Artificial Sequence
  Cyclic GFR-binding peptide
  MOD_RES (6)..(7): Xaa is C or S
SIPKAXXVPTELSPISMLYKDEYDKVVLKYHYEMVVE

SEQ ID NO: 7773 - protein, 35 aa, Artificial Sequence
  Cyclic GFR-binding peptide
  MOD_RES (5)..(6): Xaa is C or S
IPKAXXVPTELSPISMLYKDENEKVVLKYHYDMVV

SEQ ID NO: 7774 - protein, 34 aa, Artificial Sequence
  Cyclic GFR-binding peptide
  MOD_RES (2)..(34): Xaa is C or S
TXAPTKLSPISVLYKDDSSNVILKYHYNMVVRSX

SEQ ID NO: 7775 - protein, 28 aa, Artificial Sequence
  Cyclic GFR-binding peptide
  MOD_RES (28)..(28): Xaa is C or S
LSATSMLYYDEYDKVVLRKHREMVVEGX

SEQ ID NO: 7776 - protein, 27 aa, Artificial Sequence
  Cyclic GFR-binding peptide
  MOD_RES (27)..(27): Xaa is C or S
SPISMLYKDEYDKVVLKYHYEMVVEGX

SEQ ID NO: 7777 - protein, 27 aa, Artificial Sequence
  Cyclic GFR-binding peptide
TQLSATSVLYYDDSSNVILRKHRNMVV

SEQ ID NO: 7778 - protein, 32 aa, Artificial Sequence
  Cyclic GFR-binding peptide
  MOD_RES (31)..(31): Xaa is C or S
PTKLNAISVLYFDSSNNVILKKYRNMVVKAXG

SEQ ID NO: 7779 - protein, 31 aa, Artificial Sequence
  Cyclic GFR-binding peptide
VPTELSATSMLYYDENEKVVLRKHRDMVVEG

SEQ ID NO: 7780 - protein, 36 aa, Artificial Sequence
  Cyclic GFR-binding peptide
  MOD_RES (3)..(4)..(35): Xaa is C or S
SPXXVSQDLSAISILYLIGKTPKILKNYQMIVKSXK

SEQ ID NO: 7781 - protein, 35 aa, Artificial Sequence
  Cyclic GFR-binding peptide
  MOD_RES (3)..(4): Xaa is C or S
KAXXVPTELSPISMLYKDEYDKVVLKYHYEMVVEG

SEQ ID NO: 7782 - protein, 30 aa, Artificial Sequence
  Cyclic GFR-binding peptide
  MOD_RES (4)..(5): Xaa is C or S
PKAXXAPTKLNAISVLYFDSSNNVILKKYR

SEQ ID NO: 7783 - protein, 29 aa, Artificial Sequence
  Cyclic GFR-binding peptide
PTKLSATSVLYYDDSSNVILRKHRNMVVR

SEQ ID NO: 7784 - protein, 35 aa, Artificial Sequence
  Cyclic GFR-binding peptide
  MOD_RES (5)..(6): Xaa is C or S
SASPXXVSQDLSPISILYKIGKTPKILKYHYMIVK

SEQ ID NO: 7785 - protein, 30 aa, Artificial Sequence
  Cyclic GFR-binding peptide
PTELSATSMLYYDENEKVVLRKHRDMVVEG

SEQ ID NO: 7786 - protein, 27 aa, Artificial Sequence
  Cyclic GFR-binding peptide
LSATSMLYYDEYDKVVLRKHREMVVEG

SEQ ID NO: 7787 - protein, 31 aa, Artificial Sequence
  Cyclic GFR-binding peptide
VPTELSPISMLYKDEYDKVVLKYHYEMVVEG

SEQ ID NO: 7788 - protein, 27 aa, Artificial Sequence
  Cyclic GFR-binding peptide
VPTKLSATSVLYYDDMGVPTLRKHREG

SEQ ID NO: 7789 - protein, 26 aa, Artificial Sequence
  Cyclic GFR-binding peptide
QALSAISILYLVGRKPKVLKNYQMIV

SEQ ID NO: 7790 - protein, 23 aa, Artificial Sequence
  Cyclic GFR-binding peptide
LSPISVLYKDSSNNVILKYHYNM

SEQ ID NO: 7791 - protein, 29 aa, Artificial Sequence
  Cyclic GFR-binding peptide
VPQALSATSILYYVGRKPKVLRKHRMIVR

SEQ ID NO: 7792 - protein, 34 aa, Artificial Sequence
  Cyclic GFR-binding peptide
TQVQLNAISVLYFEIVRKKPIFLKKYRTLEDHLA

SEQ ID NO: 7793 - protein, 22 aa, Artificial Sequence
  Cyclic GFR-binding peptide
ELNAISMLYFDEYDKVVLKKYR

SEQ ID NO: 7794 - protein, 35 aa, Artificial Sequence
  Cyclic GFR-binding peptide
  MOD_RES (3)..(3): Xaa is C or S
VQXRPTQVQLSPISVLYKEIVRKKPIFLKYHYTLE

SEQ ID NO: 7795 - protein, 35 aa, Artificial Sequence
  Cyclic GFR-binding peptide
  MOD_RES (6)..(7): Xaa is C or S
ASASPXXVPQDLSPISILYKVGRTPKVLKYHYMVV

SEQ ID NO: 7796 - protein, 40 aa, Artificial Sequence
  Cyclic GFR-binding peptide
  MOD_RES (5)..(37)..(39): Xaa is C or S
TKPTXAPTKLSPISVLYKDDSSNVILKYHYNMVVRSXGXH

SEQ ID NO: 7797 - protein, 37 aa, Artificial Sequence
  Cyclic GFR-binding peptide
  MOD_RES (5)..(37): Xaa is C or S
TKPTXAPTKLSPISVLYKDDSSNVILKYHYNMVVRSX

SEQ ID NO: 7798 - protein, 31 aa, Artificial Sequence
  Cyclic GFR-binding peptide
  MOD_RES (1)..(2): Xaa is C or S
XXVPTELSPISMLYKDENEKVVLKYHYDMVV

SEQ ID NO: 7799 - protein, 35 aa, Artificial Sequence
  Cyclic GFR-binding peptide
  MOD_RES (2)..(3)..(35): Xaa is C or S
AXXAPTKLSAISVLYLDSSNNVILKNYQNMVVKAX

SEQ ID NO: 7800 - protein, 24 aa, Artificial Sequence
  Cyclic GFR-binding peptide
QLSAISVLYLEIVRKKPIFLKNYQ

SEQ ID NO: 7801 - protein, 31 aa, Artificial Sequence
  Cyclic GFR-binding peptide
  MOD_RES (28)..(30): Xaa is C or S
LSPISVLYKDDSSNVILKYHYNMVVRAXGXH

SEQ ID NO: 7802 - protein, 31 aa, Artificial Sequence
  Cyclic GFR-binding peptide
  MOD_RES (4)..(5): Xaa is C or S
ASPXXVPQDLSAISILYLVGRTPKVLKNYQM

SEQ ID NO: 7803 - protein, 29 aa, Artificial Sequence
  Cyclic GFR-binding peptide
RPTQVQLSAISVLYLEIVRKKPIFLKNYQ

SEQ ID NO: 7804 - protein, 31 aa, Artificial Sequence
  Cyclic GFR-binding peptide
  MOD_RES (3)..(4): Xaa is C or S
KAXXVPTKLNAISVLYFDDMGVPTLKKYREG

SEQ ID NO: 7805 - protein, 31 aa, Artificial Sequence
  Cyclic GFR-binding peptide
  MOD_RES (29)..(31): Xaa is C or S
QLSAISVLYLDDSSNVILKNYQNMVVRAXGX

SEQ ID NO: 7806 - protein, 31 aa, Artificial Sequence
  Cyclic GFR-binding peptide
  MOD_RES (30)..(30): Xaa is C or S
PQDLSPISILYKVGRTPKVLKYHYMVVKSXK

SEQ ID NO: 7807 - protein, 23 aa, Artificial Sequence
  Cyclic GFR-binding peptide
SPISMLYKDEYDKVVLKYHYEMV

SEQ ID NO: 7808 - protein, 40 aa, Artificial Sequence
  Cyclic GFR-binding peptide
  MOD_RES (5)..(6)..(37)..(39): Xaa is C or S
SASPXXVPQDLNAISILYFVGRTPKVLKKYRMVVKSXKXS

SEQ ID NO: 7809 - protein, 22 aa, Artificial Sequence
  Cyclic GFR-binding peptide
DLNAISILYFVGRTPKVLKKYR

SEQ ID NO: 7810 - protein, 28 aa, Artificial Sequence
  Cyclic GFR-binding peptide
PTKLSAISVLYLDDMGVPTLKNYQEGMS

SEQ ID NO: 7811 - protein, 30 aa, Artificial Sequence
  Cyclic GFR-binding peptide
  MOD_RES (1)..(1): Xaa is C or S
XVPTKLSATSVLYYDDMGVPTLRKHREGMS

SEQ ID NO: 7812 - protein, 30 aa, Artificial Sequence
  Cyclic GFR-binding peptide
VPQDLSAISILYLVGRTPKVLKNYQMVVKS

SEQ ID NO: 7813 - protein, 32 aa, Artificial Sequence
  Cyclic GFR-binding peptide
  MOD_RES (32)..(32): Xaa is C or S
PTKLSAISVLYLDDMGVPTLKNYQEGMSVAEX

SEQ ID NO: 7814 - protein, 33 aa, Artificial Sequence
  Cyclic GFR-binding peptide
  MOD_RES (30)..(32): Xaa is C or S
NAISVLYFEIVRKKPIFLKKYRTLEDHLAXKXE

SEQ ID NO: 7815 - protein, 34 aa, Artificial Sequence
  Cyclic GFR-binding peptide
  MOD_RES (4)..(5): Xaa is C or S
PKAXXAPTKLSPISVLYKDSSNNVILKYHYNMVV

SEQ ID NO: 7816 - protein, 40 aa, Artificial Sequence
  Cyclic GFR-binding peptide
  MOD_RES (3)..(4)..(37)..(39): Xaa is C or S
KAXXVPTKLSAISVLYLDDMGVPTLKNYQEGMSVAEXGXR

SEQ ID NO: 7817 - protein, 27 aa, Artificial Sequence
  Cyclic GFR-binding peptide
  MOD_RES (1)..(1): Xaa is C or S
XVSQDLSATSILYYIGKTPKILRKHRM

SEQ ID NO: 7818 - protein, 40 aa, Artificial Sequence
  Cyclic GFR-binding peptide
  MOD_RES (4)..(5)..(38)..(40): Xaa is C or S
GKAXXVPTKLSATSVLYYDDMGVPTLRKHREGMSVAEXGX

SEQ ID NO: 7819 - protein, 32 aa, Artificial Sequence
  Cyclic GFR-binding peptide
  MOD_RES (30)..(32): Xaa is C or S
PQALSAISILYLVGRKPKVLKNYQMIVRSXKX

SEQ ID NO: 7820 - protein, 24 aa, Artificial Sequence
  Cyclic GFR-binding peptide
LSATSILYYIGKTPKILRKHRMIV

SEQ ID NO: 7821 - protein, 33 aa, Artificial Sequence
  Cyclic GFR-binding peptide
  MOD_RES (1)..(2): Xaa is C or S
XXVPTELSPISMLYKDENEKVVLKYHYDMVVEG

SEQ ID NO: 7822 - protein, 22 aa, Artificial Sequence
  Cyclic GFR-binding peptide
LSATSVLYYDDSSNVILRKHRN

SEQ ID NO: 7823 - protein, 28 aa, Artificial Sequence
  Cyclic GFR-binding peptide
  MOD_RES (27)..(27): Xaa is C or S
SAISVLYLDSSNNVILKNYQNMVVKAXG

SEQ ID NO: 7824 - protein, 37 aa, Artificial Sequence
  Cyclic GFR-binding peptide
  MOD_RES (2)..(2): Xaa is C or S
QXRPTQVQLNAISVLYFEIVRKKPIFLKKYRTLEDHL

SEQ ID NO: 7825 - protein, 27 aa, Artificial Sequence
  Cyclic GFR-binding peptide
LSAISVLYLEIVRKKPIFLKNYQTLED

SEQ ID NO: 7826 - protein, 23 aa, Artificial Sequence
  Cyclic GFR-binding peptide
DLSPISILYKIGKTPKILKYHYM

SEQ ID NO: 7827 - protein, 38 aa, Artificial Sequence
  Cyclic GFR-binding peptide
  MOD_RES (6)..(7)..(38): Xaa is C or S
ASASPXXVPQDLSAISILYLVGRTPKVLKNYQMVVKSX

SEQ ID NO: 7828 - protein, 38 aa, Artificial Sequence
  Cyclic GFR-binding peptide
  MOD_RES (36)..(38): Xaa is C or S
PTQVQLSAISVLYLEIVRKKPIFLKNYQTLEDHLAXKX

SEQ ID NO: 7829 - protein, 34 aa, Artificial Sequence
  Cyclic GFR-binding peptide
  MOD_RES (4)..(5): Xaa is C or S
PKPXXAPTQLSAISVLYLDDSSNVILKNYQNMVV

SEQ ID NO: 7830 - protein, 20 aa, Artificial Sequence
  Cyclic GFR-binding peptide
SAISVLYLDDMGVPTLKNYQ

SEQ ID NO: 7831 - protein, 28 aa, Artificial Sequence
  Cyclic GFR-binding peptide
PQDLSAISILYLVGRTPKVLKNYQMVVK

SEQ ID NO: 7832 - protein, 21 aa, Artificial Sequence
  Cyclic GFR-binding peptide
LNAISVLYFDDMGVPTLKKYR

SEQ ID NO: 7833 - protein, 28 aa, Artificial Sequence
  Cyclic GFR-binding peptide
  MOD_RES (28)..(28): Xaa is C or S
LSATSVLYYDDSSNVILRKHRNMVVRSX

SEQ ID NO: 7834 - protein, 34 aa, Artificial Sequence
  Cyclic GFR-binding peptide
  MOD_RES (3)..(4): Xaa is C or S
KAXXVPTELNAISMLYFDEYDKVVLKKYREMVVE

SEQ ID NO: 7835 - protein, 30 aa, Artificial Sequence
  Cyclic GFR-binding peptide
  MOD_RES (1)..(1): Xaa is C or S
XVPQALSATSILYYVGRKPKVLRKHRMIVR

SEQ ID NO: 7836 - protein, 33 aa, Artificial Sequence
  Cyclic GFR-binding peptide
  MOD_RES (4)..(5): Xaa is C or S
PKAXXAPTKLSPISVLYKDSSNNVILKYHYNMV

SEQ ID NO: 7837 - protein, 36 aa, Artificial Sequence
  Cyclic GFR-binding peptide
  MOD_RES (1)..(33)..(35): Xaa is C or S
XAPTQLSPISVLYKDDSSNVILKYHYNMVVRAXGXH

SEQ ID NO: 7838 - protein, 39 aa, Artificial Sequence
  Cyclic GFR-binding peptide
  MOD_RES (5)..(6)..(38): Xaa is C or S
IPKAXXVPTELNAISMLYFDEYDKVVLKKYREMVVEGXG

SEQ ID NO: 7839 - protein, 36 aa, Artificial Sequence
  Cyclic GFR-binding peptide
  MOD_RES (2)..(3)..(36): Xaa is C or S
AXXVPTKLSAISVLYLDDMGVPTLKNYQEGMSVAEX

SEQ ID NO: 7840 - protein, 25 aa, Artificial Sequence
  Cyclic GFR-binding peptide
NAISVLYFEIVRKKPIFLKKYRTLE

SEQ ID NO: 7841 - protein, 33 aa, Artificial Sequence
  Cyclic GFR-binding peptide
  MOD_RES (32)..(32): Xaa is C or S
VPTELSPISMLYKDEYDKVVLKYHYEMVVEGXG

SEQ ID NO: 7842 - protein, 31 aa, Artificial Sequence
  Cyclic GFR-binding peptide
  MOD_RES (30)..(30): Xaa is C or S
TELSATSMLYYDEYDKVVLRKHREMVVEGXG

SEQ ID NO: 7843 - protein, 27 aa, Artificial Sequence
  Cyclic GFR-binding peptide
KLSPISVLYKDSSNNVILKYHYNMVVK

SEQ ID NO: 7844 - protein, 29 aa, Artificial Sequence
  Cyclic GFR-binding peptide
  MOD_RES (1)..(1): Xaa is C or S
XAPTQLSPISVLYKDDSSNVILKYHYNMV

SEQ ID NO: 7845 - protein, 26 aa, Artificial Sequence
  Cyclic GFR-binding peptide
QDLSPISILYKIGKTPKILKYHYMIV

SEQ ID NO: 7846 - protein, 38 aa, Artificial Sequence
  Cyclic GFR-binding peptide
  MOD_RES (3)..(4)..(36)..(38): Xaa is C or S
KAXXVPTELSATSMLYYDEYDKVVLRKHREMVVEGXGX

SEQ ID NO: 7847 - protein, 34 aa, Artificial Sequence
  Cyclic GFR-binding peptide
  MOD_RES (1)..(2)..(33): Xaa is C or S
XXVPQDLSATSILYYVGRTPKVLRKHRMVVKSXK

SEQ ID NO: 7848 - protein, 25 aa, Artificial Sequence
  Cyclic GFR-binding peptide
SATSILYYVGRTPKVLRKHRMVVKS

SEQ ID NO: 7849 - protein, 34 aa, Artificial Sequence
  Cyclic GFR-binding peptide
  MOD_RES (31)..(33): Xaa is C or S
VSQDLNAISILYFIGKTPKILKKYRMIVKSXKXS

SEQ ID NO: 7850 - protein, 39 aa, Artificial Sequence
  Cyclic GFR-binding peptide
  MOD_RES (4)..(5)..(37)..(39): Xaa is C or S
PKAXXAPTKLSPISVLYKDSSNNVILKYHYNMVVKAXGX

SEQ ID NO: 7851 - protein, 37 aa, Artificial Sequence
  Cyclic GFR-binding peptide
  MOD_RES (6)..(7): Xaa is C or S
SIPKAXXVPTELSATSMLYYDEYDKVVLRKHREMVVE

SEQ ID NO: 7852 - protein, 35 aa, Artificial Sequence
  Cyclic GFR-binding peptide
  MOD_RES (4)..(5): Xaa is C or S
PKAXXVPTELNAISMLYFDENEKVVLKKYRDMVVE

SEQ ID NO: 7853 - protein, 33 aa, Artificial Sequence
  Cyclic GFR-binding peptide
  MOD_RES (4)..(5): Xaa is C or S
ASPXXVSQDLSAISILYLIGKTPKILKNYQMIV

SEQ ID NO: 7854 - protein, 35 aa, Artificial Sequence
  Cyclic GFR-binding peptide
  MOD_RES (33)..(35): Xaa is C or S
VPTKLSAISVLYLDDMGVPTLKNYQEGMSVAEXGX

SEQ ID NO: 7855 - protein, 27 aa, Artificial Sequence
  Cyclic GFR-binding peptide
ELNAISMLYFDEYDKVVLKKYREMVVE

SEQ ID NO: 7856 - protein, 32 aa, Artificial Sequence
  Cyclic GFR-binding peptide
  MOD_RES (6)..(7): Xaa is C or S
ASAAPXXVPQALNAISILYFVGRKPKVLKKYR

SEQ ID NO: 7857 - protein, 41 aa, Artificial Sequence
  Cyclic GFR-binding peptide
  MOD_RES (1)..(38)..(40): Xaa is C or S
XRPTQVQLSPISVLYKEIVRKKPIFLKYHYTLEDHLAXKXE

SEQ ID NO: 7858 - protein, 35 aa, Artificial Sequence
  Cyclic GFR-binding peptide
  MOD_RES (2)..(34): Xaa is C or S
TXAPTKLSPISVLYKDDSSNVILKYHYNMVVRSXG

SEQ ID NO: 7859 - protein, 29 aa, Artificial Sequence
  Cyclic GFR-binding peptide
VPQDLSPISILYKVGRTPKVLKYHYMVVK

SEQ ID NO: 7860 - protein, 29 aa, Artificial Sequence
  Cyclic GFR-binding peptide
  MOD_RES (1)..(2): Xaa is C or S
XXVPTELSATSMLYYDEYDKVVLRKHREM

SEQ ID NO: 7861 - protein, 29 aa, Artificial Sequence
  Cyclic GFR-binding peptide
  MOD_RES (1)..(2): Xaa is C or S
XXVPTELNAISMLYFDENEKVVLKKYRDM

SEQ ID NO: 7862 - protein, 30 aa, Artificial Sequence
  Cyclic GFR-binding peptide
  MOD_RES (30)..(30): Xaa is C or S
TELSPISMLYKDEYDKVVLKYHYEMVVEGX

SEQ ID NO: 7863 - protein, 30 aa, Artificial Sequence
  Cyclic GFR-binding peptide
VPQDLSPISILYKVGRTPKVLKYHYMVVKS

SEQ ID NO: 7864 - protein, 35 aa, Artificial Sequence
  Cyclic GFR-binding peptide
  MOD_RES (6)..(7): Xaa is C or S
AVPKAXXAPTKLNAISVLYFDSSNNVILKKYRNMV

SEQ ID NO: 7865 - protein, 28 aa, Artificial Sequence
  Cyclic GFR-binding peptide
  MOD_RES (1)..(2): Xaa is C or S
XXVPTELSPISMLYKDENEKVVLKYHYD

SEQ ID NO: 7866 - protein, 37 aa, Artificial Sequence
  Cyclic GFR-binding peptide
  MOD_RES (3)..(4)..(35)..(37): Xaa is C or S
SPXXVPQDLSPISILYKVGRTPKVLKYHYMVVKSXKX

SEQ ID NO: 7867 - protein, 31 aa, Artificial Sequence
  Cyclic GFR-binding peptide
  MOD_RES (29)..(31): Xaa is C or S
QALSAISILYLVGRKPKVLKNYQMIVRSXKX

SEQ ID NO: 7868 - protein, 31 aa, Artificial Sequence
  Cyclic GFR-binding peptide
  MOD_RES (30)..(30): Xaa is C or S
PQDLNAISILYFVGRTPKVLKKYRMVVKSXK

SEQ ID NO: 7869 - protein, 23 aa, Artificial Sequence
  Cyclic GFR-binding peptide
LNAISMLYFDEYDKVVLKKYREM

SEQ ID NO: 7870 - protein, 26 aa, Artificial Sequence
  Cyclic GFR-binding peptide
SPISVLYKDSSNNVILKYHYNMVVKA

SEQ ID NO: 7871 - protein, 29 aa, Artificial Sequence
  Cyclic GFR-binding peptide
  MOD_RES (1)..(2): Xaa is C or S
XXVPTELSPISMLYKDEYDKVVLKYHYEM

SEQ ID NO: 7872 - protein, 40 aa, Artificial Sequence
  Cyclic GFR-binding peptide
  MOD_RES (5)..(6)..(37)..(39): Xaa is C or S
SASPXXVSQDLSATSILYYIGKTPKILRKHRMIVKSXKXS

SEQ ID NO: 7873 - protein, 38 aa, Artificial Sequence
  Cyclic GFR-binding peptide
  MOD_RES (4)..(5)..(36)..(38): Xaa is C or S
AAPXXVPQALSPISILYKVGRKPKVLKYHYMIVRSXKX

SEQ ID NO: 7874 - protein, 29 aa, Artificial Sequence
  Cyclic GFR-binding peptide
VPTELNAISMLYFDEYDKVVLKKYREMVV

SEQ ID NO: 7875 - protein, 40 aa, Artificial Sequence
  Cyclic GFR-binding peptide
  MOD_RES (4)..(5)..(37)..(39): Xaa is C or S
PKPXXAPTKLSPISVLYKDDSSNVILKYHYNMVVRSXGXH

SEQ ID NO: 7876 - protein, 32 aa, Artificial Sequence
  Cyclic GFR-binding peptide
  MOD_RES (4)..(5): Xaa is C or S
GKAXXVPTKLNAISVLYFDDMGVPTLKKYREG

SEQ ID NO: 7877 - protein, 40 aa, Artificial Sequence
  Cyclic GFR-binding peptide
  MOD_RES (1)..(38)..(40): Xaa is C or S
XRPTQVQLSAISVLYLEIVRKKPIFLKNYQTLEDHLAXKX

SEQ ID NO: 7878 - protein, 34 aa, Artificial Sequence
  Cyclic GFR-binding peptide
  MOD_RES (3)..(3): Xaa is C or S
PTXAPTKLSAISVLYLDDSSNVILKNYQNMVVRS

SEQ ID NO: 7879 - protein, 37 aa, Artificial Sequence
  Cyclic GFR-binding peptide
  MOD_RES (2)..(3)..(34)..(36): Xaa is C or S
PXXVSQDLNAISILYFIGKTPKILKKYRMIVKSXKXS

SEQ ID NO: 7880 - protein, 30 aa, Artificial Sequence
  Cyclic GFR-binding peptide
  MOD_RES (2)..(3): Xaa is C or S
PXXVSQDLNAISILYFIGKTPKILKKYRMI

SEQ ID NO: 7881 - protein, 34 aa, Artificial Sequence
  Cyclic GFR-binding peptide
  MOD_RES (33)..(33): Xaa is C or S
VQLSAISVLYLEIVRKKPIFLKNYQTLEDHLAXK

SEQ ID NO: 7882 - protein, 33 aa, Artificial Sequence
  Cyclic GFR-binding peptide
  MOD_RES (5)..(6): Xaa is C or S
IPKAXXVPTELSATSMLYYDEYDKVVLRKHREM

SEQ ID NO: 7883 - protein, 34 aa, Artificial Sequence
  Cyclic GFR-binding peptide
  MOD_RES (1)..(33): Xaa is C or S
XAPTQLSAISVLYLDDSSNVILKNYQNMVVRAXG

SEQ ID NO: 7884 - protein, 38 aa, Artificial Sequence
  Cyclic GFR-binding peptide
  MOD_RES (4)..(4): Xaa is C or S
NVQXRPTQVQLNAISVLYFEIVRKKPIFLKKYRTLEDH

SEQ ID NO: 7885 - protein, 25 aa, Artificial Sequence
  Cyclic GFR-binding peptide
VPTKLSATSVLYYDDMGVPTLRKHR

SEQ ID NO: 7886 - protein, 23 aa, Artificial Sequence
  Cyclic GFR-binding peptide
KLSAISVLYLDDSSNVILKNYQN

SEQ ID NO: 7887 - protein, 40 aa, Artificial Sequence
  Cyclic GFR-binding peptide
  MOD_RES (6)..(7)..(39): Xaa is C or S
AVPKAXXAPTKLNAISVLYFDSSNNVILKKYRNMVVKAXG

SEQ ID NO: 7888 - protein, 26 aa, Artificial Sequence
  Cyclic GFR-binding peptide
LNAISILYFVGRKPKVLKKYRMIVRS

SEQ ID NO: 7889 - protein, 30 aa, Artificial Sequence
  Cyclic GFR-binding peptide
QLSPISVLYKEIVRKKPIFLKYHYTLEDHL

SEQ ID NO: 7890 - protein, 34 aa, Artificial Sequence
  Cyclic GFR-binding peptide
  MOD_RES (2)..(3)..(34): Xaa is C or S
PXXVSQDLSAISILYLIGKTPKILKNYQMIVKSX

SEQ ID NO: 7891 - protein, 35 aa, Artificial Sequence
  Cyclic GFR-binding peptide
  MOD_RES (35)..(35): Xaa is C or S
TQVQLNAISVLYFEIVRKKPIFLKKYRTLEDHLAX

SEQ ID NO: 7892 - protein, 32 aa, Artificial Sequence
  Cyclic GFR-binding peptide
  MOD_RES (32)..(32): Xaa is C or S
APTQLSPISVLYKDDSSNVILKYHYNMVVRAX

SEQ ID NO: 7893 - protein, 36 aa, Artificial Sequence
  Cyclic GFR-binding peptide
  MOD_RES (2)..(3)..(34)..(36): Xaa is C or S
PXXVSQDLNAISILYFIGKTPKILKKYRMIVKSXKX

SEQ ID NO: 7894 - protein, 38 aa, Artificial Sequence
  Cyclic GFR-binding peptide
  MOD_RES (3)..(4)..(35)..(37): Xaa is C or S
SPXXVSQDLSAISILYLIGKTPKILKNYQMIVKSXKXS

SEQ ID NO: 7895 - protein, 32 aa, Artificial Sequence
  Cyclic GFR-binding peptide
  MOD_RES (3)..(4): Xaa is C or S
KPXXAPTQLSATSVLYYDDSSNVILRKHRNMV

SEQ ID NO: 7896 - protein, 30 aa, Artificial Sequence
  Cyclic GFR-binding peptide
  MOD_RES (1)..(1): Xaa is C or S
XRPTQVQLSAISVLYLEIVRKKPIFLKNYQ

SEQ ID NO: 7897 - protein, 32 aa, Artificial Sequence
  Cyclic GFR-binding peptide
  MOD_RES (29)..(31): Xaa is C or S
QDLNAISILYFVGRTPKVLKKYRMVVKSXKXS

SEQ ID NO: 7898 - protein, 36 aa, Artificial Sequence
  Cyclic GFR-binding peptide
  MOD_RES (4)..(5): Xaa is C or S
PKAXXAPTKLSAISVLYLDSSNNVILKNYQNMVVKA

SEQ ID NO: 7899 - protein, 43 aa, Artificial Sequence
  Cyclic GFR-binding peptide
  MOD_RES (6)..(7)..(40)..(42): Xaa is C or S
KVGKAXXVPTKLNAISVLYFDDMGVPTLKKYREGMSVAEXGXR

SEQ ID NO: 7900 - protein, 39 aa, Artificial Sequence
  Cyclic GFR-binding peptide
  MOD_RES (3)..(3): Xaa is C or S
VQXRPTQVQLNAISVLYFEIVRKKPIFLKKYRTLEDHLA

SEQ ID NO: 7901 - protein, 28 aa, Artificial Sequence
  Cyclic GFR-binding peptide
APTKLSPISVLYKDDSSNVILKYHYNMV

SEQ ID NO: 7902 - protein, 36 aa, Artificial Sequence
  Cyclic GFR-binding peptide
  MOD_RES (4)..(5): Xaa is C or S
PKPXXAPTQLSAISVLYLDDSSNVILKNYQNMVVRA

SEQ ID NO: 7903 - protein, 31 aa, Artificial Sequence
  Cyclic GFR-binding peptide
  MOD_RES (5)..(6): Xaa is C or S
VPKPXXAPTKLSATSVLYYDDSSNVILRKHR

SEQ ID NO: 7904 - protein, 34 aa, Artificial Sequence
  Cyclic GFR-binding peptide
  MOD_RES (31)..(33): Xaa is C or S
PTQLSAISVLYLDDSSNVILKNYQNMVVRAXGXH

SEQ ID NO: 7905 - protein, 30 aa, Artificial Sequence
  Cyclic GFR-binding peptide
  MOD_RES (27)..(29): Xaa is C or S
SPISMLYKDENEKVVLKYHYDMVVEGXGXR

SEQ ID NO: 7906 - protein, 30 aa, Artificial Sequence
  Cyclic GFR-binding peptide
  MOD_RES (1)..(1): Xaa is C or S
XVPTELNAISMLYFDENEKVVLKKYRDMVV

SEQ ID NO: 7907 - protein, 33 aa, Artificial Sequence
  Cyclic GFR-binding peptide
  MOD_RES (3)..(4): Xaa is C or S
KAXXVPTKLNAISVLYFDDMGVPTLKKYREGMS

SEQ ID NO: 7908 - protein, 28 aa, Artificial Sequence
  Cyclic GFR-binding peptide
TELNAISMLYFDENEKVVLKKYRDMVVE

SEQ ID NO: 7909 - protein, 32 aa, Artificial Sequence
  Cyclic GFR-binding peptide
RPTQVQLNAISVLYFEIVRKKPIFLKKYRTLE

SEQ ID NO: 7910 - protein, 35 aa, Artificial Sequence
  Cyclic GFR-binding peptide
  MOD_RES (2)..(3)..(34): Xaa is C or S
PXXVPQALSATSILYYVGRKPKVLRKHRMIVRSXK

SEQ ID NO: 7911 - protein, 37 aa, Artificial Sequence
  Cyclic GFR-binding peptide
  MOD_RES (2)..(3)..(36): Xaa is C or S
AXXVPTKLSAISVLYLDDMGVPTLKNYQEGMSVAEXG

SEQ ID NO: 7912 - protein, 24 aa, Artificial Sequence
  Cyclic GFR-binding peptide
SATSMLYYDEYDKVVLRKHREMVV

SEQ ID NO: 7913 - protein, 33 aa, Artificial Sequence
  Cyclic GFR-binding peptide
  MOD_RES (31)..(33): Xaa is C or S
PTELNAISMLYFDENEKVVLKKYRDMVVEGXGX

SEQ ID NO: 7914 - protein, 30 aa, Artificial Sequence
  Cyclic GFR-binding peptide
  MOD_RES (3)..(4): Xaa is C or S
SPXXVSQDLSPISILYKIGKTPKILKYHYM

SEQ ID NO: 7915 - protein, 25 aa, Artificial Sequence
  Cyclic GFR-binding peptide
TQLSAISVLYLDDSSNVILKNYQNM

SEQ ID NO: 7916 - protein, 39 aa, Artificial Sequence
  Cyclic GFR-binding peptide
  MOD_RES (36)..(38): Xaa is C or S
PTQVQLNAISVLYFEIVRKKPIFLKKYRTLEDHLAXKXE

SEQ ID NO: 7917 - protein, 24 aa, Artificial Sequence
  Cyclic GFR-binding peptide
DLSPISILYKIGKTPKILKYHYMI

SEQ ID NO: 7918 - protein, 30 aa, Artificial Sequence
  Cyclic GFR-binding peptide
  MOD_RES (27)..(29): Xaa is C or S
LNAISILYFIGKTPKILKKYRMIVKSXKXS

SEQ ID NO: 7919 - protein, 38 aa, Artificial Sequence
  Cyclic GFR-binding peptide
  MOD_RES (3)..(4)..(36)..(38): Xaa is C or S
KAXXAPTKLNAISVLYFDSSNNVILKKYRNMVVKAXGX

SEQ ID NO: 7920 - protein, 29 aa, Artificial Sequence
  Cyclic GFR-binding peptide
  MOD_RES (1)..(2): Xaa is C or S
XXVSQDLSPISILYKIGKTPKILKYHYMI

SEQ ID NO: 7921 - protein, 34 aa, Artificial Sequence
  Cyclic GFR-binding peptide
  MOD_RES (1)..(2)..(33): Xaa is C or S
XXVPQALSAISILYLVGRKPKVLKNYQMIVRSXK

SEQ ID NO: 7922 - protein, 30 aa, Artificial Sequence
  Cyclic GFR-binding peptide
  MOD_RES (2)..(3): Xaa is C or S
PXXVPQDLNAISILYFVGRTPKVLKKYRMV

SEQ ID NO: 7923 - protein, 26 aa, Artificial Sequence
  Cyclic GFR-binding peptide
SPISMLYKDENEKVVLKYHYDMVVEG

SEQ ID NO: 7924 - protein, 27 aa, Artificial Sequence
  Cyclic GFR-binding peptide
APTQLSATSVLYYDDSSNVILRKHRNM

SEQ ID NO: 7925 - protein, 26 aa, Artificial Sequence
  Cyclic GFR-binding peptide
SAISVLYLDDMGVPTLKNYQEGMSVA

SEQ ID NO: 7926 - protein, 26 aa, Artificial Sequence
  Cyclic GFR-binding peptide
  MOD_RES (26)..(26): Xaa is C or S
NAISILYFIGKTPKILKKYRMIVKSX

SEQ ID NO: 7927 - protein, 28 aa, Artificial Sequence
  Cyclic GFR-binding peptide
KLNAISVLYFDSSNNVILKKYRNMVVKA

SEQ ID NO: 7928 - protein, 29 aa, Artificial Sequence
  Cyclic GFR-binding peptide
  MOD_RES (29)..(29): Xaa is C or S
LSAISVLYLDDMGVPTLKNYQEGMSVAEX

SEQ ID NO: 7929 - protein, 30 aa, Artificial Sequence
  Cyclic GFR-binding peptide
  MOD_RES (28)..(30): Xaa is C or S
DLSPISILYKIGKTPKILKYHYMIVKSXKX

SEQ ID NO: 7930 - protein, 24 aa, Artificial Sequence
  Cyclic GFR-binding peptide
PTKLNAISVLYFDSSNNVILKKYR

SEQ ID NO: 7931 - protein, 29 aa, Artificial Sequence
  Cyclic GFR-binding peptide
  MOD_RES (4)..(4): Xaa is C or S
KPTXAPTKLSPISVLYKDDSSNVILKYHY

SEQ ID NO: 7932 - protein, 30 aa, Artificial Sequence
  Cyclic GFR-binding peptide
PTQVQLSPISVLYKEIVRKKPIFLKYHYTL

SEQ ID NO: 7933 - protein, 24 aa, Artificial Sequence
  Cyclic GFR-binding peptide
SATSILYYIGKTPKILRKHRMIVK

SEQ ID NO: 7934 - protein, 30 aa, Artificial Sequence
  Cyclic GFR-binding peptide
  MOD_RES (29)..(29): Xaa is C or S
QDLSPISILYKIGKTPKILKYHYMIVKSXK

SEQ ID NO: 7935 - protein, 26 aa, Artificial Sequence
  Cyclic GFR-binding peptide
  MOD_RES (1)..(1): Xaa is C or S
XVPQDLSAISILYLVGRTPKVLKNYQ

SEQ ID NO: 7936 - protein, 29 aa, Artificial Sequence
  Cyclic GFR-binding peptide
TKLSAISVLYLDDSSNVILKNYQNMVVRS

SEQ ID NO: 7937 - protein, 34 aa, Artificial Sequence
  Cyclic GFR-binding peptide
  MOD_RES (2)..(3): Xaa is C or S
PXXAPTKLSAISVLYLDDSSNVILKNYQNMVVRS

SEQ ID NO: 7938 - protein, 37 aa, Artificial Sequence
  Cyclic GFR-binding peptide
  MOD_RES (1)..(34)..(36): Xaa is C or S
XVPTKLNAISVLYFDDMGVPTLKKYREGMSVAEXGXR

SEQ ID NO: 7939 - protein, 33 aa, Artificial Sequence
  Cyclic GFR-binding peptide
  MOD_RES (32)..(32): Xaa is C or S
APTKLSPISVLYKDSSNNVILKYHYNMVVKAXG

SEQ ID NO: 7940 - protein, 39 aa, Artificial Sequence
  Cyclic GFR-binding peptide
  MOD_RES (6)..(7)..(39): Xaa is C or S
SIPKAXXVPTELSATSMLYYDEYDKVVLRKHREMVVEGX

SEQ ID NO: 7941 - protein, 33 aa, Artificial Sequence
  Cyclic GFR-binding peptide
  MOD_RES (3)..(4): Xaa is C or S
KAXXVPTELSPISMLYKDENEKVVLKYHYDMVV

SEQ ID NO: 7942 - protein, 27 aa, Artificial Sequence
  Cyclic GFR-binding peptide
KLSAISVLYLDDSSNVILKNYQNMVVR

SEQ ID NO: 7943 - protein, 41 aa, Artificial Sequence
  Cyclic GFR-binding peptide
  MOD_RES (5)..(6)..(39)..(41): Xaa is C or S
VGKAXXVPTKLSAISVLYLDDMGVPTLKNYQEGMSVAEXGX

SEQ ID NO: 7944 - protein, 31 aa, Artificial Sequence
  Cyclic GFR-binding peptide
  MOD_RES (29)..(31): Xaa is C or S
LSATSVLYYDDMGVPTLRKHREGMSVAEXGX

SEQ ID NO: 7945 - protein, 39 aa, Artificial Sequence
  Cyclic GFR-binding peptide
  MOD_RES (6)..(7)..(38): Xaa is C or S
ASAAPXXVPQALNAISILYFVGRKPKVLKKYRMIVRSXK

SEQ ID NO: 7946 - protein, 23 aa, Artificial Sequence
  Cyclic GFR-binding peptide
SPISILYKVGRTPKVLKYHYMVV

SEQ ID NO: 7947 - protein, 35 aa, Artificial Sequence
  Cyclic GFR-binding peptide
  MOD_RES (3)..(4): Xaa is C or S
KPXXAPTQLSPISVLYKDDSSNVILKYHYNMVVRA

SEQ ID NO: 7948 - protein, 28 aa, Artificial Sequence
  Cyclic GFR-binding peptide
PTKLSATSVLYYDDMGVPTLRKHREGMS

SEQ ID NO: 7949 - protein, 23 aa, Artificial Sequence
  Cyclic GFR-binding peptide
KLSAISVLYLDDMGVPTLKNYQE

SEQ ID NO: 7950 - protein, 39 aa, Artificial Sequence
  Cyclic GFR-binding peptide
  MOD_RES (3)..(4)..(36)..(38): Xaa is C or S
KAXXVPTELSATSMLYYDEYDKVVLRKHREMVVEGXGXR

SEQ ID NO: 7951 - protein, 24 aa, Artificial Sequence
  Cyclic GFR-binding peptide
PQALSAISILYLVGRKPKVLKNYQ

SEQ ID NO: 7952 - protein, 33 aa, Artificial Sequence
  Cyclic GFR-binding peptide
  MOD_RES (1)..(33): Xaa is C or S
XVPTELSPISMLYKDENEKVVLKYHYDMVVEGX

SEQ ID NO: 7953 - protein, 35 aa, Artificial Sequence
  Cyclic GFR-binding peptide
  MOD_RES (32)..(34): Xaa is C or S
VPTELNAISMLYFDEYDKVVLKKYREMVVEGXGXR

SEQ ID NO: 7954 - protein, 36 aa, Artificial Sequence
  Cyclic GFR-binding peptide
  MOD_RES (5)..(6): Xaa is C or S
SASPXXVSQDLNAISILYFIGKTPKILKKYRMIVKS

SEQ ID NO: 7955 - protein, 28 aa, Artificial Sequence
  Cyclic GFR-binding peptide
VQLNAISVLYFEIVRKKPIFLKKYRTLE

SEQ ID NO: 7956 - protein, 28 aa, Artificial Sequence
  Cyclic GFR-binding peptide
  MOD_RES (1)..(2): Xaa is C or S
XXVPQALSAISILYLVGRKPKVLKNYQM

SEQ ID NO: 7957 - protein, 26 aa, Artificial Sequence
  Cyclic GFR-binding peptide
VSQDLSATSILYYIGKTPKILRKHRM

SEQ ID NO: 7958 - protein, 31 aa, Artificial Sequence
  Cyclic GFR-binding peptide
  MOD_RES (4)..(4): Xaa is C or S
KPTXAPTKLSATSVLYYDDSSNVILRKHRNM

SEQ ID NO: 7959 - protein, 33 aa, Artificial Sequence
  Cyclic GFR-binding peptide
  MOD_RES (2)..(3): Xaa is C or S
AXXVPTKLSATSVLYYDDMGVPTLRKHREGMSV

SEQ ID NO: 7960 - protein, 32 aa, Artificial Sequence
  Cyclic GFR-binding peptide
  MOD_RES (5)..(6): Xaa is C or S
SASPXXVPQDLNAISILYFVGRTPKVLKKYRM

SEQ ID NO: 7961 - protein, 33 aa, Artificial Sequence
  Cyclic GFR-binding peptide
  MOD_RES (32)..(32): Xaa is C or S
QLNAISVLYFEIVRKKPIFLKKYRTLEDHLAXK

SEQ ID NO: 7962 - protein, 32 aa, Artificial Sequence
  Cyclic GFR-binding peptide
  MOD_RES (29)..(31): Xaa is C or S
KLSPISVLYKDDSSNVILKYHYNMVVRSXGXH

SEQ ID NO: 7963 - protein, 27 aa, Artificial Sequence
  Cyclic GFR-binding peptide
ELSATSMLYYDEYDKVVLRKHREMVVE

SEQ ID NO: 7964 - protein, 26 aa, Artificial Sequence
  Cyclic GFR-binding peptide
NAISVLYFEIVRKKPIFLKKYRTLED

SEQ ID NO: 7965 - protein, 35 aa, Artificial Sequence
  Cyclic GFR-binding peptide
  MOD_RES (3)..(35): Xaa is C or S
PTXAPTKLSATSVLYYDDSSNVILRKHRNMVVRSX

SEQ ID NO: 7966 - protein, 25 aa, Artificial Sequence
  Cyclic GFR-binding peptide
LSAISVLYLEIVRKKPIFLKNYQTL

SEQ ID NO: 7967 - protein, 35 aa, Artificial Sequence
  Cyclic GFR-binding peptide
  MOD_RES (1)..(2)..(34): Xaa is C or S
XXAPTKLSATSVLYYDDSSNVILRKHRNMVVRSXG

SEQ ID NO: 7968 - protein, 30 aa, Artificial Sequence
  Cyclic GFR-binding peptide
VSQDLNAISILYFIGKTPKILKKYRMIVKS

SEQ ID NO: 7969 - protein, 29 aa, Artificial Sequence
  Cyclic GFR-binding peptide
SQDLSATSILYYIGKTPKILRKHRMIVKS

SEQ ID NO: 7970 - protein, 25 aa, Artificial Sequence
  Cyclic GFR-binding peptide
VPQDLSPISILYKVGRTPKVLKYHY

SEQ ID NO: 7971 - protein, 21 aa, Artificial Sequence
  Cyclic GFR-binding peptide
LSAISVLYLDSSNNVILKNYQ

SEQ ID NO: 7972 - protein, 38 aa, Artificial Sequence
  Cyclic GFR-binding peptide
  MOD_RES (3)..(4)..(35)..(37): Xaa is C or S
SPXXVSQDLNAISILYFIGKTPKILKKYRMIVKSXKXS

SEQ ID NO: 7973 - protein, 20 aa, Artificial Sequence
  Cyclic GFR-binding peptide
SAISVLYLDDSSNVILKNYQ

SEQ ID NO: 7974 - protein, 29 aa, Artificial Sequence
  Cyclic GFR-binding peptide
  MOD_RES (3)..(4): Xaa is C or S
KAXXAPTKLSAISVLYLDSSNNVILKNYQ

SEQ ID NO: 7975 - protein, 32 aa, Artificial Sequence
  Cyclic GFR-binding peptide
  MOD_RES (32)..(32): Xaa is C or S
APTKLSATSVLYYDDSSNVILRKHRNMVVRSX

SEQ ID NO: 7976 - protein, 44 aa, Artificial Sequence
  Cyclic GFR-binding peptide
  MOD_RES (5)..(42)..(44): Xaa is C or S
RNVQXRPTQVQLSATSVLYYEIVRKKPIFLRKHRTLEDHLAXKX

SEQ ID NO: 7977 - protein, 30 aa, Artificial Sequence
  Cyclic GFR-binding peptide
  MOD_RES (27)..(29): Xaa is C or S
NAISMLYFDEYDKVVLKKYREMVVEGXGXR

SEQ ID NO: 7978 - protein, 38 aa, Artificial Sequence
  Cyclic GFR-binding peptide
  MOD_RES (6)..(7): Xaa is C or S
TVPKPXXAPTQLSATSVLYYDDSSNVILRKHRNMVVRA

SEQ ID NO: 7979 - protein, 35 aa, Artificial Sequence
  Cyclic GFR-binding peptide
  MOD_RES (5)..(5): Xaa is C or S
RNVQXRPTQVQLSPISVLYKEIVRKKPIFLKYHYT

SEQ ID NO: 7980 - protein, 35 aa, Artificial Sequence
  Cyclic GFR-binding peptide
  MOD_RES (5)..(6): Xaa is C or S
VPKAXXAPTKLSPISVLYKDSSNNVILKYHYNMVV

SEQ ID NO: 7981 - protein, 28 aa, Artificial Sequence
  Cyclic GFR-binding peptide
KLSATSVLYYDDMGVPTLRKHREGMSVA

SEQ ID NO: 7982 - protein, 33 aa, Artificial Sequence
  Cyclic GFR-binding peptide
  MOD_RES (6)..(6): Xaa is C or S
VTKPTXAPTKLSATSVLYYDDSSNVILRKHRNM

SEQ ID NO: 7983 - protein, 34 aa, Artificial Sequence
  Cyclic GFR-binding peptide
  MOD_RES (1)..(2)..(34): Xaa is C or S
XXAPTQLSPISVLYKDDSSNVILKYHYNMVVRAX

SEQ ID NO: 7984 - protein, 39 aa, Artificial Sequence
  Cyclic GFR-binding peptide
  MOD_RES (3)..(4)..(36)..(38): Xaa is C or S
KPXXAPTQLSATSVLYYDDSSNVILRKHRNMVVRAXGXH

SEQ ID NO: 7985 - protein, 39 aa, Artificial Sequence
  Cyclic GFR-binding peptide
  MOD_RES (5)..(6)..(38): Xaa is C or S
VPKAXXAPTKLSAISVLYLDSSNNVILKNYQNMVVKAXG

SEQ ID NO: 7986 - protein, 40 aa, Artificial Sequence
  Cyclic GFR-binding peptide
  MOD_RES (6)..(7)..(38)..(40): Xaa is C or S
ASASPXXVSQDLSPISILYKIGKTPKILKYHYMIVKSXKX

SEQ ID NO: 7987 - protein, 41 aa, Artificial Sequence
  Cyclic GFR-binding peptide
  MOD_RES (5)..(6)..(39)..(41): Xaa is C or S
VGKAXXVPTKLNAISVLYFDDMGVPTLKKYREGMSVAEXGX

SEQ ID NO: 7988 - protein, 25 aa, Artificial Sequence
  Cyclic GFR-binding peptide
APTQLSAISVLYLDDSSNVILKNYQ

SEQ ID NO: 7989 - protein, 32 aa, Artificial Sequence
  Cyclic GFR-binding peptide
  MOD_RES (31)..(31): Xaa is C or S
TKLSATSVLYYDDMGVPTLRKHREGMSVAEXG

SEQ ID NO: 7990 - protein, 34 aa, Artificial Sequence
  Cyclic GFR-binding peptide
  MOD_RES (31)..(33): Xaa is C or S
PTELNAISMLYFDEYDKVVLKKYREMVVEGXGXR

SEQ ID NO: 7991 - protein, 31 aa, Artificial Sequence
  Cyclic GFR-binding peptide
  MOD_RES (3)..(4): Xaa is C or S
SPXXVPQDLSATSILYYVGRTPKVLRKHRMV

SEQ ID NO: 7992 - protein, 38 aa, Artificial Sequence
  Cyclic GFR-binding peptide
  MOD_RES (3)..(35)..(37): Xaa is C or S
PTXAPTKLSAISVLYLDDSSNVILKNYQNMVVRSXGXH

SEQ ID NO: 7993 - protein, 36 aa, Artificial Sequence
  Cyclic GFR-binding peptide
  MOD_RES (1)..(2)..(34)..(36): Xaa is C or S
XXAPTKLSPISVLYKDSSNNVILKYHYNMVVKAXGX

SEQ ID NO: 7994 - protein, 35 aa, Artificial Sequence
  Cyclic GFR-binding peptide
  MOD_RES (5)..(6): Xaa is C or S
VPKPXXAPTKLSPISVLYKDDSSNVILKYHYNMVV

SEQ ID NO: 7995 - protein, 26 aa, Artificial Sequence
  Cyclic GFR-binding peptide
PTKLSATSVLYYDDMGVPTLRKHREG

SEQ ID NO: 7996 - protein, 34 aa, Artificial Sequence
  Cyclic GFR-binding peptide
PTQVQLSPISVLYKEIVRKKPIFLKYHYTLEDHL

SEQ ID NO: 7997 - protein, 38 aa, Artificial Sequence
  Cyclic GFR-binding peptide
  MOD_RES (2)..(3)..(36)..(38): Xaa is C or S
AXXVPTKLSATSVLYYDDMGVPTLRKHREGMSVAEXGX

SEQ ID NO: 7998 - protein, 33 aa, Artificial Sequence
  Cyclic GFR-binding peptide
  MOD_RES (31)..(33): Xaa is C or S
TKLSAISVLYLDDMGVPTLKNYQEGMSVAEXGX

SEQ ID NO: 7999 - protein, 28 aa, Artificial Sequence
  Cyclic GFR-binding peptide
QALSAISILYLVGRKPKVLKNYQMIVRS

SEQ ID NO: 8000 - protein, 25 aa, Artificial Sequence
  Cyclic GFR-binding peptide
QDLSATSILYYVGRTPKVLRKHRMV

SEQ ID NO: 8001 - protein, 30 aa, Artificial Sequence
  Cyclic GFR-binding peptide
PTKLSAISVLYLDSSNNVILKNYQNMVVKA

SEQ ID NO: 8002 - protein, 38 aa, Artificial Sequence
  Cyclic GFR-binding peptide
  MOD_RES (4)..(5)..(38): Xaa is C or S
GKAXXVPTKLNAISVLYFDDMGVPTLKKYREGMSVAEX

SEQ ID NO: 8003 - protein, 28 aa, Artificial Sequence
  Cyclic GFR-binding peptide
TQLSATSVLYYDDSSNVILRKHRNMVVR

SEQ ID NO: 8004 - protein, 31 aa, Artificial Sequence
  Cyclic GFR-binding peptide
  MOD_RES (28)..(30): Xaa is C or S
LSPISVLYKDDSSNVILKYHYNMVVRSXGXH

SEQ ID NO: 8005 - protein, 29 aa, Artificial Sequence
  Cyclic GFR-binding peptide
  MOD_RES (29)..(29): Xaa is C or S
QDLSAISILYLIGKTPKILKNYQMIVKSX

SEQ ID NO: 8006 - protein, 39 aa, Artificial Sequence
  Cyclic GFR-binding peptide
  MOD_RES (5)..(6)..(37)..(39): Xaa is C or S
SAAPXXVPQALNAISILYFVGRKPKVLKKYRMIVRSXKX

SEQ ID NO: 8007 - protein, 36 aa, Artificial Sequence
  Cyclic GFR-binding peptide
  MOD_RES (5)..(6): Xaa is C or S
VPKPXXAPTKLSPISVLYKDDSSNVILKYHYNMVVR

SEQ ID NO: 8008 - protein, 30 aa, Artificial Sequence
  Cyclic GFR-binding peptide
  MOD_RES (29)..(29): Xaa is C or S
QDLNAISILYFIGKTPKILKKYRMIVKSXK

SEQ ID NO: 8009 - protein, 35 aa, Artificial Sequence
  Cyclic GFR-binding peptide
  MOD_RES (4)..(5): Xaa is C or S
PKAXXVPTELSATSMLYYDENEKVVLRKHRDMVVE

SEQ ID NO: 8010 - protein, 25 aa, Artificial Sequence
  Cyclic GFR-binding peptide
LSPISILYKVGRTPKVLKYHYMVVK

SEQ ID NO: 8011 - protein, 34 aa, Artificial Sequence
  Cyclic GFR-binding peptide
TQVQLSAISVLYLEIVRKKPIFLKNYQTLEDHLA

SEQ ID NO: 8012 - protein, 30 aa, Artificial Sequence
  Cyclic GFR-binding peptide
  MOD_RES (29)..(29): Xaa is C or S
KLSPISVLYKDDSSNVILKYHYNMVVRSXG

SEQ ID NO: 8013 - protein, 34 aa, Artificial Sequence
  Cyclic GFR-binding peptide
  MOD_RES (3)..(4): Xaa is C or S
SPXXVPQDLNAISILYFVGRTPKVLKKYRMVVKS

SEQ ID NO: 8014 - protein, 32 aa, Artificial Sequence
  Cyclic GFR-binding peptide
  MOD_RES (6)..(7): Xaa is C or S
ASASPXXVSQDLSPISILYKIGKTPKILKYHY

SEQ ID NO: 8015 - protein, 35 aa, Artificial Sequence
  Cyclic GFR-binding peptide
  MOD_RES (5)..(6): Xaa is C or S
SASPXXVPQDLNAISILYFVGRTPKVLKKYRMVVK

SEQ ID NO: 8016 - protein, 34 aa, Artificial Sequence
  Cyclic GFR-binding peptide
  MOD_RES (4)..(5): Xaa is C or S
AAPXXVPQALNAISILYFVGRKPKVLKKYRMIVR

SEQ ID NO: 8017 - protein, 34 aa, Artificial Sequence
  Cyclic GFR-binding peptide
TQVQLSATSVLYYEIVRKKPIFLRKHRTLEDHLA

SEQ ID NO: 8018 - protein, 42 aa, Artificial Sequence
  Cyclic GFR-binding peptide
  MOD_RES (6)..(7)..(39)..(41): Xaa is C or S
SIPKAXXVPTELSPISMLYKDEYDKVVLKYHYEMVVEGXGXR

SEQ ID NO: 8019 - protein, 28 aa, Artificial Sequence
  Cyclic GFR-binding peptide
  MOD_RES (1)..(2): Xaa is C or S
XXAPTKLSPISVLYKDDSSNVILKYHYN

SEQ ID NO: 8020 - protein, 29 aa, Artificial Sequence
  Cyclic GFR-binding peptide
  MOD_RES (27)..(29): Xaa is C or S
LNAISILYFIGKTPKILKKYRMIVKSXKX

SEQ ID NO: 8021 - protein, 33 aa, Artificial Sequence
  Cyclic GFR-binding peptide
  MOD_RES (2)..(2): Xaa is C or S
QXRPTQVQLSPISVLYKEIVRKKPIFLKYHYTL

SEQ ID NO: 8022 - protein, 31 aa, Artificial Sequence
  Cyclic GFR-binding peptide
  MOD_RES (4)..(5): Xaa is C or S
PKPXXAPTQLSAISVLYLDDSSNVILKNYQN

SEQ ID NO: 8023 - protein, 39 aa, Artificial Sequence
  Cyclic GFR-binding peptide
  MOD_RES (3)..(4)..(36)..(38): Xaa is C or S
KAXXVPTELSPISMLYKDENEKVVLKYHYDMVVEGXGXR

SEQ ID NO: 8024 - protein, 33 aa, Artificial Sequence
  Cyclic GFR-binding peptide
  MOD_RES (5)..(6): Xaa is C or S
SAAPXXVPQALNAISILYFVGRKPKVLKKYRMI

SEQ ID NO: 8025 - protein, 27 aa, Artificial Sequence
  Cyclic GFR-binding peptide
  MOD_RES (1)..(1): Xaa is C or S
XVPTKLSAISVLYLDDMGVPTLKNYQE

SEQ ID NO: 8026 - protein, 29 aa, Artificial Sequence
  Cyclic GFR-binding peptide
  MOD_RES (2)..(3): Xaa is C or S
PXXVSQDLNAISILYFIGKTPKILKKYRM

SEQ ID NO: 8027 - protein, 35 aa, Artificial Sequence
  Cyclic GFR-binding peptide
  MOD_RES (1)..(34): Xaa is C or S
XVPTKLNAISVLYFDDMGVPTLKKYREGMSVAEXG

SEQ ID NO: 8028 - protein, 32 aa, Artificial Sequence
  Cyclic GFR-binding peptide
QVQLSAISVLYLEIVRKKPIFLKNYQTLEDHL

SEQ ID NO: 8029 - protein, 33 aa, Artificial Sequence
  Cyclic GFR-binding peptide
  MOD_RES (6)..(7): Xaa is C or S
ASASPXXVPQDLSATSILYYVGRTPKVLRKHRM

SEQ ID NO: 8030 - protein, 43 aa, Artificial Sequence
  Cyclic GFR-binding peptide
  MOD_RES (5)..(42): Xaa is C or S
RNVQXRPTQVQLSATSVLYYEIVRKKPIFLRKHRTLEDHLAXK

SEQ ID NO: 8031 - protein, 31 aa, Artificial Sequence
  Cyclic GFR-binding peptide
  MOD_RES (30)..(30): Xaa is C or S
TELNAISMLYFDENEKVVLKKYRDMVVEGXG

SEQ ID NO: 8032 - protein, 29 aa, Artificial Sequence
  Cyclic GFR-binding peptide
  MOD_RES (2)..(2): Xaa is C or S
TXAPTKLSATSVLYYDDSSNVILRKHRNM

SEQ ID NO: 8033 - protein, 33 aa, Artificial Sequence
  Cyclic GFR-binding peptide
  MOD_RES (32)..(32): Xaa is C or S
PTKLNAISVLYFDDMGVPTLKKYREGMSVAEXG

SEQ ID NO: 8034 - protein, 33 aa, Artificial Sequence
  Cyclic GFR-binding peptide
  MOD_RES (1)..(33): Xaa is C or S
XVPTELNAISMLYFDENEKVVLKKYRDMVVEGX

SEQ ID NO: 8035 - protein, 34 aa, Artificial Sequence
  Cyclic GFR-binding peptide
  MOD_RES (5)..(6): Xaa is C or S
VPKAXXAPTKLSPISVLYKDSSNNVILKYHYNMV

SEQ ID NO: 8036 - protein, 31 aa, Artificial Sequence
  Cyclic GFR-binding peptide
  MOD_RES (30)..(30): Xaa is C or S
KLNAISVLYFDDMGVPTLKKYREGMSVAEXG

SEQ ID NO: 8037 - protein, 32 aa, Artificial Sequence
  Cyclic GFR-binding peptide
  MOD_RES (6)..(6): Xaa is C or S
VTKPTXAPTKLSAISVLYLDDSSNVILKNYQN

SEQ ID NO: 8038 - protein, 32 aa, Artificial Sequence
  Cyclic GFR-binding peptide
  MOD_RES (5)..(6): Xaa is C or S
IPKAXXVPTELNAISMLYFDEYDKVVLKKYRE

SEQ ID NO: 8039 - protein, 31 aa, Artificial Sequence
  Cyclic GFR-binding peptide
PTQVQLSATSVLYYEIVRKKPIFLRKHRTLE

SEQ ID NO: 8040 - protein, 34 aa, Artificial Sequence
  Cyclic GFR-binding peptide
  MOD_RES (1)..(2)..(34): Xaa is C or S
XXVPTELNAISMLYFDENEKVVLKKYRDMVVEGX

SEQ ID NO: 8041 - protein, 39 aa, Artificial Sequence
  Cyclic GFR-binding peptide
  MOD_RES (6)..(7): Xaa is C or S
KVGKAXXVPTKLNAISVLYFDDMGVPTLKKYREGMSVAE

SEQ ID NO: 8042 - protein, 31 aa, Artificial Sequence
  Cyclic GFR-binding peptide
  MOD_RES (2)..(3): Xaa is C or S
PXXAPTKLSAISVLYLDDSSNVILKNYQNMV

SEQ ID NO: 8043 - protein, 24 aa, Artificial Sequence
  Cyclic GFR-binding peptide
PQALNAISILYFVGRKPKVLKKYR

SEQ ID NO: 8044 - protein, 35 aa, Artificial Sequence
  Cyclic GFR-binding peptide
  MOD_RES (1)..(2)..(34): Xaa is C or S
XXAPTQLSATSVLYYDDSSNVILRKHRNMVVRAXG

SEQ ID NO: 8045 - protein, 25 aa, Artificial Sequence
  Cyclic GFR-binding peptide
QALSAISILYLVGRKPKVLKNYQMI

SEQ ID NO: 8046 - protein, 29 aa, Artificial Sequence
  Cyclic GFR-binding peptide
  MOD_RES (1)..(1): Xaa is C or S
XVPQALSATSILYYVGRKPKVLRKHRMIV

SEQ ID NO: 8047 - protein, 27 aa, Artificial Sequence
  Cyclic GFR-binding peptide
DLSAISILYLVGRTPKVLKNYQMVVKS

SEQ ID NO: 8048 - protein, 37 aa, Artificial Sequence
  Cyclic GFR-binding peptide
  MOD_RES (3)..(4)..(35)..(37): Xaa is C or S
APXXVPQALSPISILYKVGRKPKVLKYHYMIVRSXKX

SEQ ID NO: 8049 - protein, 36 aa, Artificial Sequence
  Cyclic GFR-binding peptide
  MOD_RES (6)..(7): Xaa is C or S
ASASPXXVSQDLSAISILYLIGKTPKILKNYQMIVK

SEQ ID NO: 8050 - protein, 28 aa, Artificial Sequence
  Cyclic GFR-binding peptide
  MOD_RES (1)..(1): Xaa is C or S
XVSQDLSPISILYKIGKTPKILKYHYMI

SEQ ID NO: 8051 - protein, 34 aa, Artificial Sequence
  Cyclic GFR-binding peptide
  MOD_RES (1)..(2)..(34): Xaa is C or S
XXVPTELSPISMLYKDENEKVVLKYHYDMVVEGX

SEQ ID NO: 8052 - protein, 27 aa, Artificial Sequence
  Cyclic GFR-binding peptide
  MOD_RES (1)..(1): Xaa is C or S
XAPTKLSAISVLYLDDSSNVILKNYQN

SEQ ID NO: 8053 - protein, 36 aa, Artificial Sequence
  Cyclic GFR-binding peptide
  MOD_RES (1)..(2)..(33)..(35): Xaa is C or S
XXVSQDLNAISILYFIGKTPKILKKYRMIVKSXKXS

SEQ ID NO: 8054 - protein, 24 aa, Artificial Sequence
  Cyclic GFR-binding peptide
TKLSAISVLYLDSSNNVILKNYQN

SEQ ID NO: 8055 - protein, 26 aa, Artificial Sequence
  Cyclic GFR-binding peptide
  MOD_RES (1)..(1): Xaa is C or S
XVPQDLNAISILYFVGRTPKVLKKYR

SEQ ID NO: 8056 - protein, 29 aa, Artificial Sequence
  Cyclic GFR-binding peptide
  MOD_RES (3)..(4): Xaa is C or S
APXXVPQALNAISILYFVGRKPKVLKKYR

SEQ ID NO: 8057 - protein, 32 aa, Artificial Sequence
  Cyclic GFR-binding peptide
  MOD_RES (32)..(32): Xaa is C or S
APTQLSAISVLYLDDSSNVILKNYQNMVVRAX

SEQ ID NO: 8058 - protein, 27 aa, Artificial Sequence
  Cyclic GFR-binding peptide
VPTELSPISMLYKDENEKVVLKYHYDM

SEQ ID NO: 8059 - protein, 32 aa, Artificial Sequence
  Cyclic GFR-binding peptide
PTQVQLSAISVLYLEIVRKKPIFLKNYQTLED

SEQ ID NO: 8060 - protein, 38 aa, Artificial Sequence
  Cyclic GFR-binding peptide
  MOD_RES (5)..(6)..(38): Xaa is C or S
IPKAXXVPTELNAISMLYFDEYDKVVLKKYREMVVEGX

SEQ ID NO: 8061 - protein, 37 aa, Artificial Sequence
  Cyclic GFR-binding peptide
  MOD_RES (6)..(7): Xaa is C or S
YVPKPXXAPTKLSAISVLYLDDSSNVILKNYQNMVVR

SEQ ID NO: 8062 - protein, 28 aa, Artificial Sequence
  Cyclic GFR-binding peptide
  MOD_RES (1)..(2): Xaa is C or S
XXVPTELSATSMLYYDEYDKVVLRKHRE

SEQ ID NO: 8063 - protein, 39 aa, Artificial Sequence
  Cyclic GFR-binding peptide
  MOD_RES (5)..(37)..(39): Xaa is C or S
TKPTXAPTKLSPISVLYKDDSSNVILKYHYNMVVRSXGX

SEQ ID NO: 8064 - protein, 24 aa, Artificial Sequence
  Cyclic GFR-binding peptide
PQDLSAISILYLVGRTPKVLKNYQ

SEQ ID NO: 8065 - protein, 29 aa, Artificial Sequence
  Cyclic GFR-binding peptide
PQDLSPISILYKVGRTPKVLKYHYMVVKS

SEQ ID NO: 8066 - protein, 24 aa, Artificial Sequence
  Cyclic GFR-binding peptide
QLNAISVLYFEIVRKKPIFLKKYR

SEQ ID NO: 8067 - protein, 31 aa, Artificial Sequence
  Cyclic GFR-binding peptide
  MOD_RES (1)..(2): Xaa is C or S
XXVPTELSPISMLYKDEYDKVVLKYHYEMVV

SEQ ID NO: 8068 - protein, 25 aa, Artificial Sequence
  Cyclic GFR-binding peptide
PTELSATSMLYYDENEKVVLRKHRD

SEQ ID NO: 8069 - protein, 30 aa, Artificial Sequence
  Cyclic GFR-binding peptide
RPTQVQLSPISVLYKEIVRKKPIFLKYHYT

SEQ ID NO: 8070 - protein, 31 aa, Artificial Sequence
  Cyclic GFR-binding peptide
  MOD_RES (5)..(6): Xaa is C or S
SAAPXXVPQALSATSILYYVGRKPKVLRKHR

SEQ ID NO: 8071 - protein, 32 aa, Artificial Sequence
  Cyclic GFR-binding peptide
QVQLNAISVLYFEIVRKKPIFLKKYRTLEDHL

SEQ ID NO: 8072 - protein, 23 aa, Artificial Sequence
  Cyclic GFR-binding peptide
TELSATSMLYYDENEKVVLRKHR

SEQ ID NO: 8073 - protein, 35 aa, Artificial Sequence
  Cyclic GFR-binding peptide
  MOD_RES (3)..(4): Xaa is C or S
KAXXVPTELSATSMLYYDENEKVVLRKHRDMVVEG

SEQ ID NO: 8074 - protein, 27 aa, Artificial Sequence
  Cyclic GFR-binding peptide
  MOD_RES (1)..(2): Xaa is C or S
XXVPQALSAISILYLVGRKPKVLKNYQ

SEQ ID NO: 8075 - protein, 29 aa, Artificial Sequence
  Cyclic GFR-binding peptide
  MOD_RES (1)..(1): Xaa is C or S
XVSQDLSAISILYLIGKTPKILKNYQMIV

SEQ ID NO: 8076 - protein, 31 aa, Artificial Sequence
  Cyclic GFR-binding peptide
  MOD_RES (1)..(2): Xaa is C or S
XXVPTKLNAISVLYFDDMGVPTLKKYREGMS

SEQ ID NO: 8077 - protein, 40 aa, Artificial Sequence
  Cyclic GFR-binding peptide
  MOD_RES (6)..(7)..(38)..(40): Xaa is C or S
ASASPXXVPQDLSATSILYYVGRTPKVLRKHRMVVKSXKX

SEQ ID NO: 8078 - protein, 28 aa, Artificial Sequence
  Cyclic GFR-binding peptide
  MOD_RES (1)..(1): Xaa is C or S
XVPQDLSPISILYKVGRTPKVLKYHYMV

SEQ ID NO: 8079 - protein, 39 aa, Artificial Sequence
  Cyclic GFR-binding peptide
  MOD_RES (5)..(6)..(37)..(39): Xaa is C or S
SASPXXVPQDLSPISILYKVGRTPKVLKYHYMVVKSXKX

SEQ ID NO: 8080 - protein, 28 aa, Artificial Sequence
  Cyclic GFR-binding peptide
  MOD_RES (27)..(27): Xaa is C or S
LSPISILYKVGRTPKVLKYHYMVVKSXK

SEQ ID NO: 8081 - protein, 30 aa, Artificial Sequence
  Cyclic GFR-binding peptide
  MOD_RES (2)..(3): Xaa is C or S
PXXVPQALSPISILYKVGRKPKVLKYHYMI

SEQ ID NO: 8082 - protein, 32 aa, Artificial Sequence
  Cyclic GFR-binding peptide
  MOD_RES (5)..(6): Xaa is C or S
VPKPXXAPTKLSAISVLYLDDSSNVILKNYQN

SEQ ID NO: 8083 - protein, 32 aa, Artificial Sequence
  Cyclic GFR-binding peptide
  MOD_RES (1)..(1): Xaa is C or S
XVPTELSATSMLYYDEYDKVVLRKHREMVVEG

SEQ ID NO: 8084 - protein, 23 aa, Artificial Sequence
  Cyclic GFR-binding peptide
ALSAISILYLVGRKPKVLKNYQM

SEQ ID NO: 8085 - protein, 32 aa, Artificial Sequence
  Cyclic GFR-binding peptide
  MOD_RES (4)..(5): Xaa is C or S
PKAXXVPTELNAISMLYFDEYDKVVLKKYREM

SEQ ID NO: 8086 - protein, 24 aa, Artificial Sequence
  Cyclic GFR-binding peptide
LNAISVLYFDDMGVPTLKKYREGM

SEQ ID NO: 8087 - protein, 36 aa, Artificial Sequence
  Cyclic GFR-binding peptide
  MOD_RES (1)..(2)..(34)..(36): Xaa is C or S
XXAPTQLSAISVLYLDDSSNVILKNYQNMVVRAXGX

SEQ ID NO: 8088 - protein, 28 aa, Artificial Sequence
  Cyclic GFR-binding peptide
  MOD_RES (28)..(28): Xaa is C or S
LSPISVLYKDDSSNVILKYHYNMVVRSX

SEQ ID NO: 8089 - protein, 26 aa, Artificial Sequence
  Cyclic GFR-binding peptide
  MOD_RES (26)..(26): Xaa is C or S
SATSILYYVGRTPKVLRKHRMVVKSX

SEQ ID NO: 8090 - protein, 26 aa, Artificial Sequence
  Cyclic GFR-binding peptide
VPTELNAISMLYFDENEKVVLKKYRD

SEQ ID NO: 8091 - protein, 29 aa, Artificial Sequence
  Cyclic GFR-binding peptide
TQLSPISVLYKDDSSNVILKYHYNMVVRA

SEQ ID NO: 8092 - protein, 29 aa, Artificial Sequence
  Cyclic GFR-binding peptide
  MOD_RES (1)..(2): Xaa is C or S
XXVPTKLSAISVLYLDDMGVPTLKNYQEG

SEQ ID NO: 8093 - protein, 36 aa, Artificial Sequence
  Cyclic GFR-binding peptide
  MOD_RES (5)..(5): Xaa is C or S
TKPTXAPTKLSPISVLYKDDSSNVILKYHYNMVVRS

SEQ ID NO: 8094 - protein, 41 aa, Artificial Sequence
  Cyclic GFR-binding peptide
  MOD_RES (6)..(7)..(39)..(41): Xaa is C or S
KIPKAXXVPTELNAISMLYFDENEKVVLKKYRDMVVEGXGX

SEQ ID NO: 8095 - protein, 31 aa, Artificial Sequence
  Cyclic GFR-binding peptide
  MOD_RES (2)..(2): Xaa is C or S
TXAPTKLSAISVLYLDDSSNVILKNYQNMVV

SEQ ID NO: 8096 - protein, 36 aa, Artificial Sequence
  Cyclic GFR-binding peptide
  MOD_RES (7)..(7): Xaa is C or S
HVTKPTXAPTKLSATSVLYYDDSSNVILRKHRNMVV

SEQ ID NO: 8097 - protein, 29 aa, Artificial Sequence
  Cyclic GFR-binding peptide
  MOD_RES (28)..(28): Xaa is C or S
LSATSMLYYDEYDKVVLRKHREMVVEGXG

SEQ ID NO: 8098 - protein, 31 aa, Artificial Sequence
  Cyclic GFR-binding peptide
  MOD_RES (4)..(5): Xaa is C or S
PKAXXVPTELSPISMLYKDEYDKVVLKYHYE

SEQ ID NO: 8099 - protein, 35 aa, Artificial Sequence
  Cyclic GFR-binding peptide
  MOD_RES (1)..(2)..(34): Xaa is C or S
XXAPTKLSAISVLYLDSSNNVILKNYQNMVVKAXG

SEQ ID NO: 8100 - protein, 24 aa, Artificial Sequence
  Cyclic GFR-binding peptide
NAISVLYFDSSNNVILKKYRNMVV

SEQ ID NO: 8101 - protein, 27 aa, Artificial Sequence
  Cyclic GFR-binding peptide
DLSPISILYKIGKTPKILKYHYMIVKS

SEQ ID NO: 8102 - protein, 33 aa, Artificial Sequence
  Cyclic GFR-binding peptide
  MOD_RES (4)..(5): Xaa is C or S
ASPXXVSQDLSPISILYKIGKTPKILKYHYMIV

SEQ ID NO: 8103 - protein, 40 aa, Artificial Sequence
  Cyclic GFR-binding peptide
  MOD_RES (5)..(6)..(38)..(40): Xaa is C or S
IPKAXXVPTELSATSMLYYDEYDKVVLRKHREMVVEGXGX

SEQ ID NO: 8104 - protein, 27 aa, Artificial Sequence
  Cyclic GFR-binding peptide
LSAISVLYLDSSNNVILKNYQNMVVKA

SEQ ID NO: 8105 - protein, 41 aa, Artificial Sequence
  Cyclic GFR-binding peptide
  MOD_RES (1)..(38)..(40): Xaa is C or S
XRPTQVQLSAISVLYLEIVRKKPIFLKNYQTLEDHLAXKXE

SEQ ID NO: 8106 - protein, 24 aa, Artificial Sequence
  Cyclic GFR-binding peptide
ELNAISMLYFDENEKVVLKKYRDM

SEQ ID NO: 8107 - protein, 34 aa, Artificial Sequence
  Cyclic GFR-binding peptide
  MOD_RES (2)..(3)..(34): Xaa is C or S
PXXVSQDLNAISILYFIGKTPKILKKYRMIVKSX

SEQ ID NO: 8108 - protein, 29 aa, Artificial Sequence
  Cyclic GFR-binding peptide
  MOD_RES (1)..(1): Xaa is C or S
XAPTQLSAISVLYLDDSSNVILKNYQNMV

SEQ ID NO: 8109 - protein, 38 aa, Artificial Sequence
  Cyclic GFR-binding peptide
  MOD_RES (5)..(6)..(37): Xaa is C or S
SASPXXVSQDLSATSILYYIGKTPKILRKHRMIVKSXK

SEQ ID NO: 8110 - protein, 31 aa, Artificial Sequence
  Cyclic GFR-binding peptide
  MOD_RES (4)..(5): Xaa is C or S
AAPXXVPQALSATSILYYVGRKPKVLRKHRM

SEQ ID NO: 8111 - protein, 23 aa, Artificial Sequence
  Cyclic GFR-binding peptide
TELSATSMLYYDEYDKVVLRKHR

SEQ ID NO: 8112 - protein, 28 aa, Artificial Sequence
  Cyclic GFR-binding peptide
  MOD_RES (27)..(27): Xaa is C or S
NAISMLYFDEYDKVVLKKYREMVVEGXG

SEQ ID NO: 8113 - protein, 35 aa, Artificial Sequence
  Cyclic GFR-binding peptide
  MOD_RES (2)..(2): Xaa is C or S
QXRPTQVQLSATSVLYYEIVRKKPIFLRKHRTLED

SEQ ID NO: 8114 - protein, 28 aa, Artificial Sequence
  Cyclic GFR-binding peptide
PTELSATSMLYYDENEKVVLRKHRDMVV

SEQ ID NO: 8115 - protein, 23 aa, Artificial Sequence
  Cyclic GFR-binding peptide
SPISMLYKDENEKVVLKYHYDMV

SEQ ID NO: 8116 - protein, 26 aa, Artificial Sequence
  Cyclic GFR-binding peptide
QDLNAISILYFVGRTPKVLKKYRMVV

SEQ ID NO: 8117 - protein, 21 aa, Artificial Sequence
  Cyclic GFR-binding peptide
SPISILYKVGRKPKVLKYHYM

SEQ ID NO: 8118 - protein, 32 aa, Artificial Sequence
  Cyclic GFR-binding peptide
  MOD_RES (1)..(1): Xaa is C or S
XVPTKLSATSVLYYDDMGVPTLRKHREGMSVA

SEQ ID NO: 8119 - protein, 31 aa, Artificial Sequence
  Cyclic GFR-binding peptide
  MOD_RES (28)..(30): Xaa is C or S
NAISVLYFDDMGVPTLKKYREGMSVAEXGXR

SEQ ID NO: 8120 - protein, 41 aa, Artificial Sequence
  Cyclic GFR-binding peptide
  MOD_RES (6)..(7)..(38)..(40): Xaa is C or S
ASASPXXVSQDLSAISILYLIGKTPKILKNYQMIVKSXKXS

SEQ ID NO: 8121 - protein, 25 aa, Artificial Sequence
  Cyclic GFR-binding peptide
LNAISILYFVGRKPKVLKKYRMIVR

SEQ ID NO: 8122 - protein, 30 aa, Artificial Sequence
  Cyclic GFR-binding peptide
  MOD_RES (28)..(30): Xaa is C or S
LSPISVLYKDDSSNVILKYHYNMVVRAXGX

SEQ ID NO: 8123 - protein, 28 aa, Artificial Sequence
  Cyclic GFR-binding peptide
  MOD_RES (28)..(28): Xaa is C or S
LSPISMLYKDEYDKVVLKYHYEMVVEGX

SEQ ID NO: 8124 - protein, 40 aa, Artificial Sequence
  Cyclic GFR-binding peptide
  MOD_RES (6)..(7)..(38)..(40): Xaa is C or S
ASAAPXXVPQALSAISILYLVGRKPKVLKNYQMIVRSXKX

SEQ ID NO: 8125 - protein, 34 aa, Artificial Sequence
  Cyclic GFR-binding peptide
  MOD_RES (1)..(33): Xaa is C or S
XVPTELNAISMLYFDEYDKVVLKKYREMVVEGXG

SEQ ID NO: 8126 - protein, 30 aa, Artificial Sequence
  Cyclic GFR-binding peptide
  MOD_RES (1)..(1): Xaa is C or S
XAPTKLNAISVLYFDSSNNVILKKYRNMVV

SEQ ID NO: 8127 - protein, 27 aa, Artificial Sequence
  Cyclic GFR-binding peptide
DLSPISILYKVGRTPKVLKYHYMVVKS

SEQ ID NO: 8128 - protein, 35 aa, Artificial Sequence
  Cyclic GFR-binding peptide
  MOD_RES (33)..(35): Xaa is C or S
VQLSPISVLYKEIVRKKPIFLKYHYTLEDHLAXKX

SEQ ID NO: 8129 - protein, 29 aa, Artificial Sequence
  Cyclic GFR-binding peptide
  MOD_RES (28)..(28): Xaa is C or S
LSATSVLYYDDSSNVILRKHRNMVVRSXG

SEQ ID NO: 8130 - protein, 37 aa, Artificial Sequence
  Cyclic GFR-binding peptide
  MOD_RES (6)..(7): Xaa is C or S
ASAAPXXVPQALNAISILYFVGRKPKVLKKYRMIVRS

SEQ ID NO: 8131 - protein, 29 aa, Artificial Sequence
  Cyclic GFR-binding peptide
  MOD_RES (1)..(2): Xaa is C or S
XXVPQDLSPISILYKVGRTPKVLKYHYMV

SEQ ID NO: 8132 - protein, 41 aa, Artificial Sequence
  Cyclic GFR-binding peptide
  MOD_RES (4)..(5)..(38)..(40): Xaa is C or S
GKAXXVPTKLNAISVLYFDDMGVPTLKKYREGMSVAEXGXR

SEQ ID NO: 8133 - protein, 29 aa, Artificial Sequence
  Cyclic GFR-binding peptide
VPTELNAISMLYFDENEKVVLKKYRDMVV

SEQ ID NO: 8134 - protein, 36 aa, Artificial Sequence
  Cyclic GFR-binding peptide
  MOD_RES (1)..(2)..(33)..(35): Xaa is C or S
XXVSQDLSAISILYLIGKTPKILKNYQMIVKSXKXS

SEQ ID NO: 8135 - protein, 36 aa, Artificial Sequence
  Cyclic GFR-binding peptide
  MOD_RES (5)..(6): Xaa is C or S
VPKPXXAPTKLSAISVLYLDDSSNVILKNYQNMVVR

SEQ ID NO: 8136 - protein, 31 aa, Artificial Sequence
  Cyclic GFR-binding peptide
APTQLSPISVLYKDDSSNVILKYHYNMVVRA

SEQ ID NO: 8137 - protein, 22 aa, Artificial Sequence
  Cyclic GFR-binding peptide
SPISMLYKDEYDKVVLKYHYEM

SEQ ID NO: 8138 - protein, 33 aa, Artificial Sequence
  Cyclic GFR-binding peptide
  MOD_RES (6)..(7): Xaa is C or S
ASASPXXVSQDLNAISILYFIGKTPKILKKYRM

SEQ ID NO: 8139 - protein, 37 aa, Artificial Sequence
  Cyclic GFR-binding peptide
  MOD_RES (34)..(36): Xaa is C or S
QVQLNAISVLYFEIVRKKPIFLKKYRTLEDHLAXKXE

SEQ ID NO: 8140 - protein, 33 aa, Artificial Sequence
  Cyclic GFR-binding peptide
  MOD_RES (1)..(2): Xaa is C or S
XXVPTELNAISMLYFDEYDKVVLKKYREMVVEG

SEQ ID NO: 8141 - protein, 29 aa, Artificial Sequence
  Cyclic GFR-binding peptide
  MOD_RES (3)..(3): Xaa is C or S
PTXAPTKLSPISVLYKDDSSNVILKYHYN

SEQ ID NO: 8142 - protein, 29 aa, Artificial Sequence
  Cyclic GFR-binding peptide
  MOD_RES (2)..(3): Xaa is C or S
AXXVPTKLSAISVLYLDDMGVPTLKNYQE

SEQ ID NO: 8143 - protein, 32 aa, Artificial Sequence
  Cyclic GFR-binding peptide
  MOD_RES (2)..(3): Xaa is C or S
PXXVPQALNAISILYFVGRKPKVLKKYRMIVR

SEQ ID NO: 8144 - protein, 23 aa, Artificial Sequence
  Cyclic GFR-binding peptide
ELSPISMLYKDENEKVVLKYHYD

SEQ ID NO: 8145 - protein, 32 aa, Artificial Sequence
  Cyclic GFR-binding peptide
  MOD_RES (4)..(4): Xaa is C or S
KPTXAPTKLSPISVLYKDDSSNVILKYHYNMV

SEQ ID NO: 8146 - protein, 28 aa, Artificial Sequence
  Cyclic GFR-binding peptide
  MOD_RES (28)..(28): Xaa is C or S
SAISVLYLDDMGVPTLKNYQEGMSVAEX

SEQ ID NO: 8147 - protein, 33 aa, Artificial Sequence
  Cyclic GFR-binding peptide
  MOD_RES (30)..(32): Xaa is C or S
TKLSAISVLYLDSSNNVILKNYQNMVVKAXGXH

SEQ ID NO: 8148 - protein, 26 aa, Artificial Sequence
  Cyclic GFR-binding peptide
LNAISVLYFDSSNNVILKKYRNMVVK

SEQ ID NO: 8149 - protein, 37 aa, Artificial Sequence
  Cyclic GFR-binding peptide
  MOD_RES (1)..(2)..(34)..(36): Xaa is C or S
XXVPTELNAISMLYFDENEKVVLKKYRDMVVEGXGXR

SEQ ID NO: 8150 - protein, 31 aa, Artificial Sequence
  Cyclic GFR-binding peptide
VPTKLNAISVLYFDDMGVPTLKKYREGMSVA

SEQ ID NO: 8151 - protein, 34 aa, Artificial Sequence
  Cyclic GFR-binding peptide
  MOD_RES (6)..(7): Xaa is C or S
ASASPXXVPQDLSATSILYYVGRTPKVLRKHRMV

SEQ ID NO: 8152 - protein, 30 aa, Artificial Sequence
  Cyclic GFR-binding peptide
  MOD_RES (30)..(30): Xaa is C or S
TELSATSMLYYDEYDKVVLRKHREMVVEGX

SEQ ID NO: 8153 - protein, 38 aa, Artificial Sequence
  Cyclic GFR-binding peptide
  MOD_RES (2)..(3)..(35)..(37): Xaa is C or S
PXXAPTKLSATSVLYYDDSSNVILRKHRNMVVRSXGXH

SEQ ID NO: 8154 - protein, 35 aa, Artificial Sequence
  Cyclic GFR-binding peptide
  MOD_RES (6)..(7): Xaa is C or S
TVPKPXXAPTQLSATSVLYYDDSSNVILRKHRNMV

SEQ ID NO: 8155 - protein, 29 aa, Artificial Sequence
  Cyclic GFR-binding peptide
TQVQLSPISVLYKEIVRKKPIFLKYHYTL

SEQ ID NO: 8156 - protein, 37 aa, Artificial Sequence
  Cyclic GFR-binding peptide
  MOD_RES (35)..(37): Xaa is C or S
TQVQLSATSVLYYEIVRKKPIFLRKHRTLEDHLAXKX

SEQ ID NO: 8157 - protein, 36 aa, Artificial Sequence
  Cyclic GFR-binding peptide
  MOD_RES (5)..(6): Xaa is C or S
SASPXXVPQDLNAISILYFVGRTPKVLKKYRMVVKS

SEQ ID NO: 8158 - protein, 30 aa, Artificial Sequence
  Cyclic GFR-binding peptide
  MOD_RES (4)..(5): Xaa is C or S
PKAXXAPTKLSPISVLYKDSSNNVILKYHY

SEQ ID NO: 8159 - protein, 32 aa, Artificial Sequence
  Cyclic GFR-binding peptide
  MOD_RES (3)..(4): Xaa is C or S
KAXXVPTELSPISMLYKDEYDKVVLKYHYEMV

SEQ ID NO: 8160 - protein, 31 aa, Artificial Sequence
  Cyclic GFR-binding peptide
  MOD_RES (4)..(4): Xaa is C or S
KPTXAPTKLSPISVLYKDDSSNVILKYHYNM

SEQ ID NO: 8161 - protein, 32 aa, Artificial Sequence
  Cyclic GFR-binding peptide
  MOD_RES (3)..(4): Xaa is C or S
KAXXVPTKLSAISVLYLDDMGVPTLKNYQEGM

SEQ ID NO: 8162 - protein, 35 aa, Artificial Sequence
  Cyclic GFR-binding peptide
  MOD_RES (1)..(32)..(34): Xaa is C or S
XVPQALSATSILYYVGRKPKVLRKHRMIVRSXKXS

SEQ ID NO: 8163 - protein, 20 aa, Artificial Sequence
  Cyclic GFR-binding peptide
SPISILYKIGKTPKILKYHY

SEQ ID NO: 8164 - protein, 26 aa, Artificial Sequence
  Cyclic GFR-binding peptide
KLNAISVLYFDSSNNVILKKYRNMVV

SEQ ID NO: 8165 - protein, 35 aa, Artificial Sequence
  Cyclic GFR-binding peptide
  MOD_RES (1)..(33)..(35): Xaa is C or S
XVPTELSATSMLYYDEYDKVVLRKHREMVVEGXGX

SEQ ID NO: 8166 - protein, 31 aa, Artificial Sequence
  Cyclic GFR-binding peptide
  MOD_RES (4)..(5): Xaa is C or S
PKAXXAPTKLSAISVLYLDSSNNVILKNYQN

SEQ ID NO: 8167 - protein, 35 aa, Artificial Sequence
  Cyclic GFR-binding peptide
  MOD_RES (1)..(32)..(34): Xaa is C or S
XVPQALSPISILYKVGRKPKVLKYHYMIVRSXKXS

SEQ ID NO: 8168 - protein, 27 aa, Artificial Sequence
  Cyclic GFR-binding peptide
KLSPISVLYKDDSSNVILKYHYNMVVR

SEQ ID NO: 8169 - protein, 26 aa, Artificial Sequence
  Cyclic GFR-binding peptide
DLNAISILYFVGRTPKVLKKYRMVVK

SEQ ID NO: 8170 - protein, 39 aa, Artificial Sequence
  Cyclic GFR-binding peptide
  MOD_RES (5)..(6)..(37)..(39): Xaa is C or S
SASPXXVSQDLSPISILYKIGKTPKILKYHYMIVKSXKX

SEQ ID NO: 8171 - protein, 39 aa, Artificial Sequence
  Cyclic GFR-binding peptide
  MOD_RES (5)..(6)..(38): Xaa is C or S
IPKAXXVPTELSPISMLYKDENEKVVLKYHYDMVVEGXG

SEQ ID NO: 8172 - protein, 29 aa, Artificial Sequence
  Cyclic GFR-binding peptide
  MOD_RES (28)..(28): Xaa is C or S
LSAISVLYLDSSNNVILKNYQNMVVKAXG

SEQ ID NO: 8173 - protein, 39 aa, Artificial Sequence
  Cyclic GFR-binding peptide
  MOD_RES (6)..(7)..(38): Xaa is C or S
ASAAPXXVPQALSPISILYKVGRKPKVLKYHYMIVRSXK

SEQ ID NO: 8174 - protein, 22 aa, Artificial Sequence
  Cyclic GFR-binding peptide
LNAISVLYFDSSNNVILKKYRN

SEQ ID NO: 8175 - protein, 28 aa, Artificial Sequence
  Cyclic GFR-binding peptide
QLSPISVLYKDDSSNVILKYHYNMVVRA

SEQ ID NO: 8176 - protein, 37 aa, Artificial Sequence
  Cyclic GFR-binding peptide
  MOD_RES (5)..(6): Xaa is C or S
VGKAXXVPTKLSAISVLYLDDMGVPTLKNYQEGMSVA

SEQ ID NO: 8177 - protein, 22 aa, Artificial Sequence
  Cyclic GFR-binding peptide
NAISVLYFDSSNNVILKKYRNM

SEQ ID NO: 8178 - protein, 29 aa, Artificial Sequence
  Cyclic GFR-binding peptide
TKLNAISVLYFDSSNNVILKKYRNMVVKA

SEQ ID NO: 8179 - protein, 28 aa, Artificial Sequence
  Cyclic GFR-binding peptide
  MOD_RES (1)..(2): Xaa is C or S
XXAPTKLSPISVLYKDSSNNVILKYHYN

SEQ ID NO: 8180 - protein, 33 aa, Artificial Sequence
  Cyclic GFR-binding peptide
  MOD_RES (3)..(4): Xaa is C or S
SPXXVSQDLSAISILYLIGKTPKILKNYQMIVK

SEQ ID NO: 8181 - protein, 40 aa, Artificial Sequence
  Cyclic GFR-binding peptide
  MOD_RES (6)..(38)..(40): Xaa is C or S
VTKPTXAPTKLSPISVLYKDDSSNVILKYHYNMVVRSXGX

SEQ ID NO: 8182 - protein, 32 aa, Artificial Sequence
  Cyclic GFR-binding peptide
  MOD_RES (5)..(6): Xaa is C or S
SAAPXXVPQALSATSILYYVGRKPKVLRKHRM

SEQ ID NO: 8183 - protein, 27 aa, Artificial Sequence
  Cyclic GFR-binding peptide
DLSAISILYLIGKTPKILKNYQMIVKS

SEQ ID NO: 8184 - protein, 29 aa, Artificial Sequence
  Cyclic GFR-binding peptide
  MOD_RES (26)..(28): Xaa is C or S
SAISILYLVGRKPKVLKNYQMIVRSXKXS

SEQ ID NO: 8185 - protein, 25 aa, Artificial Sequence
  Cyclic GFR-binding peptide
LSATSVLYYDDMGVPTLRKHREGMS

SEQ ID NO: 8186 - protein, 30 aa, Artificial Sequence
  Cyclic GFR-binding peptide
TQVQLSAISVLYLEIVRKKPIFLKNYQTLE

SEQ ID NO: 8187 - protein, 40 aa, Artificial Sequence
  Cyclic GFR-binding peptide
  MOD_RES (4)..(5)..(37)..(39): Xaa is C or S
PKAXXVPTELSATSMLYYDEYDKVVLRKHREMVVEGXGXR

SEQ ID NO: 8188 - protein, 24 aa, Artificial Sequence
  Cyclic GFR-binding peptide
LNAISVLYFDSSNNVILKKYRNMV

SEQ ID NO: 8189 - protein, 32 aa, Artificial Sequence
  Cyclic GFR-binding peptide
  MOD_RES (2)..(3): Xaa is C or S
PXXVPQDLSATSILYYVGRTPKVLRKHRMVVK

SEQ ID NO: 8190 - protein, 34 aa, Artificial Sequence
  Cyclic GFR-binding peptide
  MOD_RES (6)..(7): Xaa is C or S
KVGKAXXVPTKLNAISVLYFDDMGVPTLKKYREG

SEQ ID NO: 8191 - protein, 28 aa, Artificial Sequence
  Cyclic GFR-binding peptide
  MOD_RES (26)..(28): Xaa is C or S
SAISILYLIGKTPKILKNYQMIVKSXKX

SEQ ID NO: 8192 - protein, 37 aa, Artificial Sequence
  Cyclic GFR-binding peptide
  MOD_RES (7)..(7): Xaa is C or S
HVTKPTXAPTKLSPISVLYKDDSSNVILKYHYNMVVR

SEQ ID NO: 8193 - protein, 33 aa, Artificial Sequence
  Cyclic GFR-binding peptide
  MOD_RES (33)..(33): Xaa is C or S
VPTKLNAISVLYFDDMGVPTLKKYREGMSVAEX

SEQ ID NO: 8194 - protein, 31 aa, Artificial Sequence
  Cyclic GFR-binding peptide
  MOD_RES (3)..(4): Xaa is C or S
KAXXVPTELSPISMLYKDENEKVVLKYHYDM

SEQ ID NO: 8195 - protein, 33 aa, Artificial Sequence
  Cyclic GFR-binding peptide
  MOD_RES (7)..(7): Xaa is C or S
HVTKPTXAPTKLSATSVLYYDDSSNVILRKHRN

SEQ ID NO: 8196 - protein, 40 aa, Artificial Sequence
  Cyclic GFR-binding peptide
  MOD_RES (6)..(7)..(40): Xaa is C or S
KVGKAXXVPTKLSAISVLYLDDMGVPTLKNYQEGMSVAEX

SEQ ID NO: 8197 - protein, 29 aa, Artificial Sequence
  Cyclic GFR-binding peptide
PQDLSAISILYLVGRTPKVLKNYQMVVKS

SEQ ID NO: 8198 - protein, 34 aa, Artificial Sequence
  Cyclic GFR-binding peptide
  MOD_RES (4)..(5): Xaa is C or S
PKAXXVPTELNAISMLYFDENEKVVLKKYRDMVV

SEQ ID NO: 8199 - protein, 45 aa, Artificial Sequence
  Cyclic GFR-binding peptide
  MOD_RES (5)..(42)..(44): Xaa is C or S
RNVQXRPTQVQLSAISVLYLEIVRKKPIFLKNYQTLEDHLAXKXE

SEQ ID NO: 8200 - protein, 37 aa, Artificial Sequence
  Cyclic GFR-binding peptide
  MOD_RES (6)..(7): Xaa is C or S
YVPKPXXAPTKLSPISVLYKDDSSNVILKYHYNMVVR

SEQ ID NO: 8201 - protein, 25 aa, Artificial Sequence
  Cyclic GFR-binding peptide
PTKLSAISVLYLDSSNNVILKNYQN

SEQ ID NO: 8202 - protein, 33 aa, Artificial Sequence
  Cyclic GFR-binding peptide
  MOD_RES (32)..(32): Xaa is C or S
QLSATSVLYYEIVRKKPIFLRKHRTLEDHLAXK

SEQ ID NO: 8203 - protein, 22 aa, Artificial Sequence
  Cyclic GFR-binding peptide
SATSILYYVGRKPKVLRKHRMI

SEQ ID NO: 8204 - protein, 32 aa, Artificial Sequence
  Cyclic GFR-binding peptide
  MOD_RES (31)..(31): Xaa is C or S
VPQDLSATSILYYVGRTPKVLRKHRMVVKSXK

SEQ ID NO: 8205 - protein, 36 aa, Artificial Sequence
  Cyclic GFR-binding peptide
  MOD_RES (5)..(6): Xaa is C or S
VGKAXXVPTKLNAISVLYFDDMGVPTLKKYREGMSV

SEQ ID NO: 8206 - protein, 38 aa, Artificial Sequence
  Cyclic GFR-binding peptide
  MOD_RES (6)..(7): Xaa is C or S
KVGKAXXVPTKLNAISVLYFDDMGVPTLKKYREGMSVA

SEQ ID NO: 8207 - protein, 38 aa, Artificial Sequence
  Cyclic GFR-binding peptide
  MOD_RES (6)..(7): Xaa is C or S
SIPKAXXVPTELSPISMLYKDEYDKVVLKYHYEMVVEG

SEQ ID NO: 8208 - protein, 34 aa, Artificial Sequence
  Cyclic GFR-binding peptide
  MOD_RES (6)..(7): Xaa is C or S
ASASPXXVSQDLSATSILYYIGKTPKILRKHRMI

SEQ ID NO: 8209 - protein, 28 aa, Artificial Sequence
  Cyclic GFR-binding peptide
  MOD_RES (26)..(28): Xaa is C or S
SAISILYLVGRKPKVLKNYQMIVRSXKX

SEQ ID NO: 8210 - protein, 27 aa, Artificial Sequence
  Cyclic GFR-binding peptide
  MOD_RES (1)..(2): Xaa is C or S
XXVPTELSPISMLYKDEYDKVVLKYHY

SEQ ID NO: 8211 - protein, 26 aa, Artificial Sequence
  Cyclic GFR-binding peptide
SAISVLYLEIVRKKPIFLKNYQTLED

SEQ ID NO: 8212 - protein, 35 aa, Artificial Sequence
  Cyclic GFR-binding peptide
  MOD_RES (5)..(6): Xaa is C or S
SAAPXXVPQALSAISILYLVGRKPKVLKNYQMIVR

SEQ ID NO: 8213 - protein, 30 aa, Artificial Sequence
  Cyclic GFR-binding peptide
  MOD_RES (4)..(5): Xaa is C or S
AAPXXVPQALSPISILYKVGRKPKVLKYHY

SEQ ID NO: 8214 - protein, 30 aa, Artificial Sequence
  Cyclic GFR-binding peptide
  MOD_RES (1)..(1): Xaa is C or S
XAPTKLSPISVLYKDSSNNVILKYHYNMVV

SEQ ID NO: 8215 - protein, 21 aa, Artificial Sequence
  Cyclic GFR-binding peptide
SATSMLYYDEYDKVVLRKHRE

SEQ ID NO: 8216 - protein, 39 aa, Artificial Sequence
  Cyclic GFR-binding peptide
  MOD_RES (5)..(6)..(37)..(39): Xaa is C or S
SASPXXVSQDLNAISILYFIGKTPKILKKYRMIVKSXKX

SEQ ID NO: 8217 - protein, 36 aa, Artificial Sequence
  Cyclic GFR-binding peptide
RPTQVQLSAISVLYLEIVRKKPIFLKNYQTLEDHLA

SEQ ID NO: 8218 - protein, 34 aa, Artificial Sequence
  Cyclic GFR-binding peptide
  MOD_RES (4)..(4): Xaa is C or S
NVQXRPTQVQLNAISVLYFEIVRKKPIFLKKYRT

SEQ ID NO: 8219 - protein, 30 aa, Artificial Sequence
  Cyclic GFR-binding peptide
  MOD_RES (4)..(5): Xaa is C or S
PKAXXAPTKLSAISVLYLDSSNNVILKNYQ

SEQ ID NO: 8220 - protein, 34 aa, Artificial Sequence
  Cyclic GFR-binding peptide
  MOD_RES (32)..(34): Xaa is C or S
APTQLSPISVLYKDDSSNVILKYHYNMVVRAXGX

SEQ ID NO: 8221 - protein, 22 aa, Artificial Sequence
  Cyclic GFR-binding peptide
ALNAISILYFVGRKPKVLKKYR

SEQ ID NO: 8222 - protein, 25 aa, Artificial Sequence
  Cyclic GFR-binding peptide
PTQLSPISVLYKDDSSNVILKYHYN

SEQ ID NO: 8223 - protein, 32 aa, Artificial Sequence
  Cyclic GFR-binding peptide
  MOD_RES (5)..(5): Xaa is C or S
TKPTXAPTKLSPISVLYKDDSSNVILKYHYNM

SEQ ID NO: 8224 - protein, 21 aa, Artificial Sequence
  Cyclic GFR-binding peptide
SAISILYLVGRTPKVLKNYQM

SEQ ID NO: 8225 - protein, 37 aa, Artificial Sequence
  Cyclic GFR-binding peptide
  MOD_RES (6)..(7): Xaa is C or S
SIPKAXXVPTELNAISMLYFDEYDKVVLKKYREMVVE

SEQ ID NO: 8226 - protein, 35 aa, Artificial Sequence
  Cyclic GFR-binding peptide
  MOD_RES (32)..(34): Xaa is C or S
APTKLNAISVLYFDSSNNVILKKYRNMVVKAXGXH

SEQ ID NO: 8227 - protein, 32 aa, Artificial Sequence
  Cyclic GFR-binding peptide
QVQLSPISVLYKEIVRKKPIFLKYHYTLEDHL

SEQ ID NO: 8228 - protein, 34 aa, Artificial Sequence
  Cyclic GFR-binding peptide
  MOD_RES (31)..(33): Xaa is C or S
TKLSATSVLYYDDMGVPTLRKHREGMSVAEXGXR

SEQ ID NO: 8229 - protein, 25 aa, Artificial Sequence
  Cyclic GFR-binding peptide
SPISILYKVGRTPKVLKYHYMVVKS

SEQ ID NO: 8230 - protein, 25 aa, Artificial Sequence
  Cyclic GFR-binding peptide
QALSATSILYYVGRKPKVLRKHRMI

SEQ ID NO: 8231 - protein, 28 aa, Artificial Sequence
  Cyclic GFR-binding peptide
  MOD_RES (28)..(28): Xaa is C or S
DLSAISILYLIGKTPKILKNYQMIVKSX

SEQ ID NO: 8232 - protein, 31 aa, Artificial Sequence
  Cyclic GFR-binding peptide
  MOD_RES (1)..(2): Xaa is C or S
XXAPTKLSAISVLYLDDSSNVILKNYQNMVV

SEQ ID NO: 8233 - protein, 38 aa, Artificial Sequence
  Cyclic GFR-binding peptide
  MOD_RES (4)..(5)..(37): Xaa is C or S
PKPXXAPTKLSAISVLYLDDSSNVILKNYQNMVVRSXG

SEQ ID NO: 8234 - protein, 32 aa, Artificial Sequence
  Cyclic GFR-binding peptide
  MOD_RES (2)..(3): Xaa is C or S
PXXVSQDLSAISILYLIGKTPKILKNYQMIVK

SEQ ID NO: 8235 - protein, 31 aa, Artificial Sequence
  Cyclic GFR-binding peptide
  MOD_RES (1)..(2): Xaa is C or S
XXVSQDLSAISILYLIGKTPKILKNYQMIVK

SEQ ID NO: 8236 - protein, 31 aa, Artificial Sequence
  Cyclic GFR-binding peptide
  MOD_RES (30)..(30): Xaa is C or S
PQDLSAISILYLVGRTPKVLKNYQMVVKSXK

SEQ ID NO: 8237 - protein, 28 aa, Artificial Sequence
  Cyclic GFR-binding peptide
VQLSAISVLYLEIVRKKPIFLKNYQTLE

SEQ ID NO: 8238 - protein, 33 aa, Artificial Sequence
  Cyclic GFR-binding peptide
  MOD_RES (2)..(3): Xaa is C or S
AXXVPTKLNAISVLYFDDMGVPTLKKYREGMSV

SEQ ID NO: 8239 - protein, 29 aa, Artificial Sequence
  Cyclic GFR-binding peptide
VPTKLSAISVLYLDDMGVPTLKNYQEGMS

SEQ ID NO: 8240 - protein, 33 aa, Artificial Sequence
  Cyclic GFR-binding peptide
  MOD_RES (6)..(7): Xaa is C or S
ASAAPXXVPQALSPISILYKVGRKPKVLKYHYM

SEQ ID NO: 8241 - protein, 36 aa, Artificial Sequence
  Cyclic GFR-binding peptide
RPTQVQLSATSVLYYEIVRKKPIFLRKHRTLEDHLA

SEQ ID NO: 8242 - protein, 31 aa, Artificial Sequence
  Cyclic GFR-binding peptide
  MOD_RES (29)..(31): Xaa is C or S
ELSATSMLYYDEYDKVVLRKHREMVVEGXGX

SEQ ID NO: 8243 - protein, 38 aa, Artificial Sequence
  Cyclic GFR-binding peptide
  MOD_RES (4)..(5)..(37): Xaa is C or S
PKPXXAPTKLSPISVLYKDDSSNVILKYHYNMVVRSXG

SEQ ID NO: 8244 - protein, 23 aa, Artificial Sequence
  Cyclic GFR-binding peptide
LNAISVLYFDDMGVPTLKKYREG

SEQ ID NO: 8245 - protein, 40 aa, Artificial Sequence
  Cyclic GFR-binding peptide
  MOD_RES (5)..(6)..(38)..(40): Xaa is C or S
IPKAXXVPTELSATSMLYYDENEKVVLRKHRDMVVEGXGX

SEQ ID NO: 8246 - protein, 28 aa, Artificial Sequence
  Cyclic GFR-binding peptide
TQVQLSPISVLYKEIVRKKPIFLKYHYT

SEQ ID NO: 8247 - protein, 31 aa, Artificial Sequence
  Cyclic GFR-binding peptide
  MOD_RES (31)..(31): Xaa is C or S
VPQALSAISILYLVGRKPKVLKNYQMIVRSX

SEQ ID NO: 8248 - protein, 44 aa, Artificial Sequence
  Cyclic GFR-binding peptide
  MOD_RES (4)..(41)..(43): Xaa is C or S
NVQXRPTQVQLNAISVLYFEIVRKKPIFLKKYRTLEDHLAXKXE

SEQ ID NO: 8249 - protein, 31 aa, Artificial Sequence
  Cyclic GFR-binding peptide
  MOD_RES (3)..(4): Xaa is C or S
SPXXVSQDLSPISILYKIGKTPKILKYHYMI

SEQ ID NO: 8250 - protein, 34 aa, Artificial Sequence
  Cyclic GFR-binding peptide
  MOD_RES (3)..(3): Xaa is C or S
VQXRPTQVQLSPISVLYKEIVRKKPIFLKYHYTL

SEQ ID NO: 8251 - protein, 35 aa, Artificial Sequence
  Cyclic GFR-binding peptide
  MOD_RES (3)..(4): Xaa is C or S
KAXXVPTKLSAISVLYLDDMGVPTLKNYQEGMSVA

SEQ ID NO: 8252 - protein, 30 aa, Artificial Sequence
  Cyclic GFR-binding peptide
  MOD_RES (3)..(4): Xaa is C or S
APXXVPQALSPISILYKVGRKPKVLKYHYM

SEQ ID NO: 8253 - protein, 34 aa, Artificial Sequence
  Cyclic GFR-binding peptide
  MOD_RES (1)..(34): Xaa is C or S
XVPTKLNAISVLYFDDMGVPTLKKYREGMSVAEX

SEQ ID NO: 8254 - protein, 33 aa, Artificial Sequence
  Cyclic GFR-binding peptide
  MOD_RES (33)..(33): Xaa is C or S
VQLSAISVLYLEIVRKKPIFLKNYQTLEDHLAX

SEQ ID NO: 8255 - protein, 26 aa, Artificial Sequence
  Cyclic GFR-binding peptide
PTKLNAISVLYFDSSNNVILKKYRNM

SEQ ID NO: 8256 - protein, 41 aa, Artificial Sequence
  Cyclic GFR-binding peptide
  MOD_RES (5)..(6)..(38)..(40): Xaa is C or S
IPKAXXVPTELSPISMLYKDENEKVVLKYHYDMVVEGXGXR

SEQ ID NO: 8257 - protein, 32 aa, Artificial Sequence
  Cyclic GFR-binding peptide
  MOD_RES (5)..(6): Xaa is C or S
SASPXXVPQDLSPISILYKVGRTPKVLKYHYM

SEQ ID NO: 8258 - protein, 31 aa, Artificial Sequence
  Cyclic GFR-binding peptide
TQVQLNAISVLYFEIVRKKPIFLKKYRTLED

SEQ ID NO: 8259 - protein, 33 aa, Artificial Sequence
  Cyclic GFR-binding peptide
  MOD_RES (3)..(4): Xaa is C or S
KAXXVPTELSPISMLYKDEYDKVVLKYHYEMVV

SEQ ID NO: 8260 - protein, 35 aa, Artificial Sequence
  Cyclic GFR-binding peptide
  MOD_RES (1)..(33)..(35): Xaa is C or S
XAPTQLSATSVLYYDDSSNVILRKHRNMVVRAXGX

SEQ ID NO: 8261 - protein, 30 aa, Artificial Sequence
  Cyclic GFR-binding peptide
  MOD_RES (30)..(30): Xaa is C or S
PQDLSATSILYYVGRTPKVLRKHRMVVKSX

SEQ ID NO: 8262 - protein, 35 aa, Artificial Sequence
  Cyclic GFR-binding peptide
  MOD_RES (1)..(33)..(35): Xaa is C or S
XAPTKLSATSVLYYDDSSNVILRKHRNMVVRSXGX

SEQ ID NO: 8263 - protein, 35 aa, Artificial Sequence
  Cyclic GFR-binding peptide
  MOD_RES (6)..(7): Xaa is C or S
ASAAPXXVPQALSPISILYKVGRKPKVLKYHYMIV

SEQ ID NO: 8264 - protein, 34 aa, Artificial Sequence
  Cyclic GFR-binding peptide
  MOD_RES (6)..(7): Xaa is C or S
SIPKAXXVPTELNAISMLYFDEYDKVVLKKYREM

SEQ ID NO: 8265 - protein, 37 aa, Artificial Sequence
  Cyclic GFR-binding peptide
  MOD_RES (2)..(3)..(35)..(37): Xaa is C or S
AXXAPTKLSPISVLYKDSSNNVILKYHYNMVVKAXGX

SEQ ID NO: 8266 - protein, 30 aa, Artificial Sequence
  Cyclic GFR-binding peptide
  MOD_RES (3)..(4): Xaa is C or S
KAXXVPTELNAISMLYFDENEKVVLKKYRD

SEQ ID NO: 8267 - protein, 33 aa, Artificial Sequence
  Cyclic GFR-binding peptide
  MOD_RES (1)..(33): Xaa is C or S
XAPTKLSAISVLYLDSSNNVILKNYQNMVVKAX

SEQ ID NO: 8268 - protein, 31 aa, Artificial Sequence
  Cyclic GFR-binding peptide
APTKLSAISVLYLDSSNNVILKNYQNMVVKA

SEQ ID NO: 8269 - protein, 26 aa, Artificial Sequence
  Cyclic GFR-binding peptide
KLSAISVLYLDDMGVPTLKNYQEGMS

SEQ ID NO: 8270 - protein, 34 aa, Artificial Sequence
  Cyclic GFR-binding peptide
  MOD_RES (31)..(33): Xaa is C or S
LSAISVLYLEIVRKKPIFLKNYQTLEDHLAXKXE

SEQ ID NO: 8271 - protein, 40 aa, Artificial Sequence
  Cyclic GFR-binding peptide
  MOD_RES (5)..(6)..(37)..(39): Xaa is C or S
SAAPXXVPQALSPISILYKVGRKPKVLKYHYMIVRSXKXS

SEQ ID NO: 8272 - protein, 31 aa, Artificial Sequence
  Cyclic GFR-binding peptide
  MOD_RES (1)..(2): Xaa is C or S
XXAPTQLSAISVLYLDDSSNVILKNYQNMVV

SEQ ID NO: 8273 - protein, 27 aa, Artificial Sequence
  Cyclic GFR-binding peptide
  MOD_RES (1)..(2): Xaa is C or S
XXVPQDLSAISILYLVGRTPKVLKNYQ

SEQ ID NO: 8274 - protein, 25 aa, Artificial Sequence
  Cyclic GFR-binding peptide
SQDLNAISILYFIGKTPKILKKYRM

SEQ ID NO: 8275 - protein, 35 aa, Artificial Sequence
  Cyclic GFR-binding peptide
  MOD_RES (32)..(34): Xaa is C or S
APTQLSATSVLYYDDSSNVILRKHRNMVVRAXGXH

SEQ ID NO: 8276 - protein, 31 aa, Artificial Sequence
  Cyclic GFR-binding peptide
  MOD_RES (28)..(30): Xaa is C or S
LSATSMLYYDENEKVVLRKHRDMVVEGXGXR

SEQ ID NO: 8277 - protein, 29 aa, Artificial Sequence
  Cyclic GFR-binding peptide
  MOD_RES (29)..(29): Xaa is C or S
QLSATSVLYYDDSSNVILRKHRNMVVRAX

SEQ ID NO: 8278 - protein, 42 aa, Artificial Sequence
  Cyclic GFR-binding peptide
  MOD_RES (2)..(39)..(41): Xaa is C or S
QXRPTQVQLSPISVLYKEIVRKKPIFLKYHYTLEDHLAXKXE

SEQ ID NO: 8279 - protein, 34 aa, Artificial Sequence
  Cyclic GFR-binding peptide
  MOD_RES (7)..(7): Xaa is C or S
HVTKPTXAPTKLSAISVLYLDDSSNVILKNYQNM

SEQ ID NO: 8280 - protein, 35 aa, Artificial Sequence
  Cyclic GFR-binding peptide
  MOD_RES (3)..(4)..(35): Xaa is C or S
SPXXVPQDLSATSILYYVGRTPKVLRKHRMVVKSX

SEQ ID NO: 8281 - protein, 36 aa, Artificial Sequence
  Cyclic GFR-binding peptide
  MOD_RES (2)..(3)..(34)..(36): Xaa is C or S
PXXVPQALSPISILYKVGRKPKVLKYHYMIVRSXKX

SEQ ID NO: 8282 - protein, 27 aa, Artificial Sequence
  Cyclic GFR-binding peptide
SAISVLYLEIVRKKPIFLKNYQTLEDH

SEQ ID NO: 8283 - protein, 33 aa, Artificial Sequence
  Cyclic GFR-binding peptide
  MOD_RES (32)..(32): Xaa is C or S
VPTELSATSMLYYDENEKVVLRKHRDMVVEGXG

SEQ ID NO: 8284 - protein, 38 aa, Artificial Sequence
  Cyclic GFR-binding peptide
  MOD_RES (5)..(6)..(37): Xaa is C or S
SASPXXVPQDLSATSILYYVGRTPKVLRKHRMVVKSXK

SEQ ID NO: 8285 - protein, 22 aa, Artificial Sequence
  Cyclic GFR-binding peptide
SAISVLYLDSSNNVILKNYQNM

SEQ ID NO: 8286 - protein, 30 aa, Artificial Sequence
  Cyclic GFR-binding peptide
  MOD_RES (2)..(3): Xaa is C or S
PXXVSQDLSPISILYKIGKTPKILKYHYMI

SEQ ID NO: 8287 - protein, 29 aa, Artificial Sequence
  Cyclic GFR-binding peptide
PTKLSAISVLYLDDSSNVILKNYQNMVVR

SEQ ID NO: 8288 - protein, 23 aa, Artificial Sequence
  Cyclic GFR-binding peptide
LSAISVLYLDSSNNVILKNYQNM

SEQ ID NO: 8289 - protein, 40 aa, Artificial Sequence
  Cyclic GFR-binding peptide
  MOD_RES (5)..(6)..(38)..(40): Xaa is C or S
VPKAXXAPTKLSPISVLYKDSSNNVILKYHYNMVVKAXGX

SEQ ID NO: 8290 - protein, 31 aa, Artificial Sequence
  Cyclic GFR-binding peptide
  MOD_RES (5)..(6): Xaa is C or S
VPKPXXAPTKLSPISVLYKDDSSNVILKYHY

SEQ ID NO: 8291 - protein, 38 aa, Artificial Sequence
  Cyclic GFR-binding peptide
  MOD_RES (2)..(3)..(35)..(37): Xaa is C or S
AXXAPTKLSAISVLYLDSSNNVILKNYQNMVVKAXGXH

SEQ ID NO: 8292 - protein, 24 aa, Artificial Sequence
  Cyclic GFR-binding peptide
QDLNAISILYFVGRTPKVLKKYRM

SEQ ID NO: 8293 - protein, 23 aa, Artificial Sequence
  Cyclic GFR-binding peptide
DLSAISILYLVGRTPKVLKNYQM

SEQ ID NO: 8294 - protein, 33 aa, Artificial Sequence
  Cyclic GFR-binding peptide
  MOD_RES (6)..(7): Xaa is C or S
YVPKPXXAPTKLSPISVLYKDDSSNVILKYHYN

SEQ ID NO: 8295 - protein, 29 aa, Artificial Sequence
  Cyclic GFR-binding peptide
  MOD_RES (2)..(3): Xaa is C or S
AXXVPTELNAISMLYFDENEKVVLKKYRD

SEQ ID NO: 8296 - protein, 30 aa, Artificial Sequence
  Cyclic GFR-binding peptide
  MOD_RES (28)..(30): Xaa is C or S
DLNAISILYFIGKTPKILKKYRMIVKSXKX

SEQ ID NO: 8297 - protein, 29 aa, Artificial Sequence
  Cyclic GFR-binding peptide
  MOD_RES (1)..(1): Xaa is C or S
XVPTELSPISMLYKDEYDKVVLKYHYEMV

SEQ ID NO: 8298 - protein, 39 aa, Artificial Sequence
  Cyclic GFR-binding peptide
  MOD_RES (6)..(7)..(39): Xaa is C or S
YVPKPXXAPTKLSAISVLYLDDSSNVILKNYQNMVVRSX

SEQ ID NO: 8299 - protein, 25 aa, Artificial Sequence
  Cyclic GFR-binding peptide
SAISILYLVGRTPKVLKNYQMVVKS

SEQ ID NO: 8300 - protein, 35 aa, Artificial Sequence
  Cyclic GFR-binding peptide
  MOD_RES (2)..(3)..(34): Xaa is C or S
PXXVPQALNAISILYFVGRKPKVLKKYRMIVRSXK

SEQ ID NO: 8301 - protein, 31 aa, Artificial Sequence
  Cyclic GFR-binding peptide
APTKLNAISVLYFDSSNNVILKKYRNMVVKA

SEQ ID NO: 8302 - protein, 38 aa, Artificial Sequence
  Cyclic GFR-binding peptide
  MOD_RES (6)..(7)..(38): Xaa is C or S
ASAAPXXVPQALSPISILYKVGRKPKVLKYHYMIVRSX

SEQ ID NO: 8303 - protein, 34 aa, Artificial Sequence
  Cyclic GFR-binding peptide
  MOD_RES (32)..(34): Xaa is C or S
APTKLSPISVLYKDDSSNVILKYHYNMVVRSXGX

SEQ ID NO: 8304 - protein, 35 aa, Artificial Sequence
  Cyclic GFR-binding peptide
  MOD_RES (4)..(5): Xaa is C or S
PKAXXVPTELNAISMLYFDEYDKVVLKKYREMVVE

SEQ ID NO: 8305 - protein, 35 aa, Artificial Sequence
  Cyclic GFR-binding peptide
  MOD_RES (2)..(3)..(34): Xaa is C or S
PXXVPQALSPISILYKVGRKPKVLKYHYMIVRSXK

SEQ ID NO: 8306 - protein, 24 aa, Artificial Sequence
  Cyclic GFR-binding peptide
LSPISILYKVGRTPKVLKYHYMVV

SEQ ID NO: 8307 - protein, 31 aa, Artificial Sequence
  Cyclic GFR-binding peptide
  MOD_RES (2)..(3): Xaa is C or S
AXXVPTKLSAISVLYLDDMGVPTLKNYQEGM

SEQ ID NO: 8308 - protein, 29 aa, Artificial Sequence
  Cyclic GFR-binding peptide
TELSATSMLYYDENEKVVLRKHRDMVVEG

SEQ ID NO: 8309 - protein, 30 aa, Artificial Sequence
  Cyclic GFR-binding peptide
  MOD_RES (28)..(30): Xaa is C or S
DLNAISILYFVGRTPKVLKKYRMVVKSXKX

SEQ ID NO: 8310 - protein, 36 aa, Artificial Sequence
  Cyclic GFR-binding peptide
  MOD_RES (6)..(7): Xaa is C or S
ASASPXXVPQDLSATSILYYVGRTPKVLRKHRMVVK

SEQ ID NO: 8311 - protein, 32 aa, Artificial Sequence
  Cyclic GFR-binding peptide
  MOD_RES (4)..(5): Xaa is C or S
PKPXXAPTQLSAISVLYLDDSSNVILKNYQNM

SEQ ID NO: 8312 - protein, 25 aa, Artificial Sequence
  Cyclic GFR-binding peptide
QLSATSVLYYEIVRKKPIFLRKHRT

SEQ ID NO: 8313 - protein, 27 aa, Artificial Sequence
  Cyclic GFR-binding peptide
QALNAISILYFVGRKPKVLKKYRMIVR

SEQ ID NO: 8314 - protein, 31 aa, Artificial Sequence
  Cyclic GFR-binding peptide
  MOD_RES (4)..(5): Xaa is C or S
PKPXXAPTQLSPISVLYKDDSSNVILKYHYN

SEQ ID NO: 8315 - protein, 28 aa, Artificial Sequence
  Cyclic GFR-binding peptide
PTKLNAISVLYFDSSNNVILKKYRNMVV

SEQ ID NO: 8316 - protein, 32 aa, Artificial Sequence
  Cyclic GFR-binding peptide
  MOD_RES (32)..(32): Xaa is C or S
VPTELNAISMLYFDENEKVVLKKYRDMVVEGX

SEQ ID NO: 8317 - protein, 33 aa, Artificial Sequence
  Cyclic GFR-binding peptide
  MOD_RES (30)..(32): Xaa is C or S
TELSATSMLYYDENEKVVLRKHRDMVVEGXGXR

SEQ ID NO: 8318 - protein, 30 aa, Artificial Sequence
  Cyclic GFR-binding peptide
  MOD_RES (28)..(30): Xaa is C or S
LSAISVLYLDSSNNVILKNYQNMVVKAXGX

SEQ ID NO: 8319 - protein, 35 aa, Artificial Sequence
  Cyclic GFR-binding peptide
  MOD_RES (1)..(2)..(34): Xaa is C or S
XXAPTKLSPISVLYKDSSNNVILKYHYNMVVKAXG

SEQ ID NO: 8320 - protein, 32 aa, Artificial Sequence
  Cyclic GFR-binding peptide
PTQVQLSATSVLYYEIVRKKPIFLRKHRTLED

SEQ ID NO: 8321 - protein, 34 aa, Artificial Sequence
  Cyclic GFR-binding peptide
  MOD_RES (2)..(2): Xaa is C or S
QXRPTQVQLSPISVLYKEIVRKKPIFLKYHYTLE

SEQ ID NO: 8322 - protein, 31 aa, Artificial Sequence
  Cyclic GFR-binding peptide
  MOD_RES (3)..(4): Xaa is C or S
KAXXVPTELNAISMLYFDEYDKVVLKKYREM

SEQ ID NO: 8323 - protein, 35 aa, Artificial Sequence
  Cyclic GFR-binding peptide
  MOD_RES (5)..(6): Xaa is C or S
SASPXXVSQDLNAISILYFIGKTPKILKKYRMIVK

SEQ ID NO: 8324 - protein, 25 aa, Artificial Sequence
  Cyclic GFR-binding peptide
VQLNAISVLYFEIVRKKPIFLKKYR

SEQ ID NO: 8325 - protein, 35 aa, Artificial Sequence
  Cyclic GFR-binding peptide
  MOD_RES (3)..(4): Xaa is C or S
KAXXVPTKLNAISVLYFDDMGVPTLKKYREGMSVA

SEQ ID NO: 8326 - protein, 25 aa, Artificial Sequence
  Cyclic GFR-binding peptide
PQDLNAISILYFVGRTPKVLKKYRM

SEQ ID NO: 8327 - protein, 29 aa, Artificial Sequence
  Cyclic GFR-binding peptide
PTKLSPISVLYKDDSSNVILKYHYNMVVR

SEQ ID NO: 8328 - protein, 29 aa, Artificial Sequence
  Cyclic GFR-binding peptide
  MOD_RES (29)..(29): Xaa is C or S
QDLNAISILYFIGKTPKILKKYRMIVKSX

SEQ ID NO: 8329 - protein, 36 aa, Artificial Sequence
  Cyclic GFR-binding peptide
  MOD_RES (4)..(5): Xaa is C or S
PKAXXVPTELSATSMLYYDENEKVVLRKHRDMVVEG

SEQ ID NO: 8330 - protein, 34 aa, Artificial Sequence
  Cyclic GFR-binding peptide
  MOD_RES (31)..(33): Xaa is C or S
PTELNAISMLYFDENEKVVLKKYRDMVVEGXGXR

SEQ ID NO: 8331 - protein, 31 aa, Artificial Sequence
  Cyclic GFR-binding peptide
  MOD_RES (28)..(30): Xaa is C or S
DLNAISILYFVGRTPKVLKKYRMVVKSXKXS

SEQ ID NO: 8332 - protein, 26 aa, Artificial Sequence
  Cyclic GFR-binding peptide
VPTELSPISMLYKDENEKVVLKYHYD

SEQ ID NO: 8333 - protein, 38 aa, Artificial Sequence
  Cyclic GFR-binding peptide
  MOD_RES (5)..(6)..(38): Xaa is C or S
IPKAXXVPTELSPISMLYKDEYDKVVLKYHYEMVVEGX

SEQ ID NO: 8334 - protein, 36 aa, Artificial Sequence
  Cyclic GFR-binding peptide
  MOD_RES (33)..(35): Xaa is C or S
VQLSPISVLYKEIVRKKPIFLKYHYTLEDHLAXKXE

SEQ ID NO: 8335 - protein, 30 aa, Artificial Sequence
  Cyclic GFR-binding peptide
  MOD_RES (2)..(3): Xaa is C or S
PXXVPQDLSAISILYLVGRTPKVLKNYQMV

SEQ ID NO: 8336 - protein, 39 aa, Artificial Sequence
  Cyclic GFR-binding peptide
  MOD_RES (6)..(38): Xaa is C or S
VTKPTXAPTKLSAISVLYLDDSSNVILKNYQNMVVRSXG

SEQ ID NO: 8337 - protein, 39 aa, Artificial Sequence
  Cyclic GFR-binding peptide
  MOD_RES (5)..(5): Xaa is C or S
RNVQXRPTQVQLSATSVLYYEIVRKKPIFLRKHRTLEDH

SEQ ID NO: 8338 - protein, 32 aa, Artificial Sequence
  Cyclic GFR-binding peptide
  MOD_RES (29)..(31): Xaa is C or S
QDLSPISILYKIGKTPKILKYHYMIVKSXKXS

SEQ ID NO: 8339 - protein, 39 aa, Artificial Sequence
  Cyclic GFR-binding peptide
  MOD_RES (3)..(3): Xaa is C or S
VQXRPTQVQLSPISVLYKEIVRKKPIFLKYHYTLEDHLA

SEQ ID NO: 8340 - protein, 32 aa, Artificial Sequence
  Cyclic GFR-binding peptide
  MOD_RES (31)..(31): Xaa is C or S
LSATSVLYYEIVRKKPIFLRKHRTLEDHLAXK

SEQ ID NO: 8341 - protein, 29 aa, Artificial Sequence
  Cyclic GFR-binding peptide
  MOD_RES (1)..(1): Xaa is C or S
XVSQDLSPISILYKIGKTPKILKYHYMIV

SEQ ID NO: 8342 - protein, 27 aa, Artificial Sequence
  Cyclic GFR-binding peptide
QLSATSVLYYEIVRKKPIFLRKHRTLE

SEQ ID NO: 8343 - protein, 27 aa, Artificial Sequence
  Cyclic GFR-binding peptide
DLSATSILYYVGRTPKVLRKHRMVVKS

SEQ ID NO: 8344 - protein, 28 aa, Artificial Sequence
  Cyclic GFR-binding peptide
  MOD_RES (1)..(1): Xaa is C or S
XAPTQLSPISVLYKDDSSNVILKYHYNM

SEQ ID NO: 8345 - protein, 35 aa, Artificial Sequence
  Cyclic GFR-binding peptide
  MOD_RES (3)..(35): Xaa is C or S
PTXAPTKLSPISVLYKDDSSNVILKYHYNMVVRSX

SEQ ID NO: 8346 - protein, 26 aa, Artificial Sequence
  Cyclic GFR-binding peptide
LSPISVLYKEIVRKKPIFLKYHYTLE

SEQ ID NO: 8347 - protein, 40 aa, Artificial Sequence
  Cyclic GFR-binding peptide
  MOD_RES (6)..(7)..(39): Xaa is C or S
TVPKPXXAPTQLSAISVLYLDDSSNVILKNYQNMVVRAXG

SEQ ID NO: 8348 - protein, 34 aa, Artificial Sequence
  Cyclic GFR-binding peptide
  MOD_RES (1)..(2)..(33): Xaa is C or S
XXVPQALNAISILYFVGRKPKVLKKYRMIVRSXK

SEQ ID NO: 8349 - protein, 27 aa, Artificial Sequence
  Cyclic GFR-binding peptide
PTQLSPISVLYKDDSSNVILKYHYNMV

SEQ ID NO: 8350 - protein, 31 aa, Artificial Sequence
  Cyclic GFR-binding peptide
  MOD_RES (1)..(1): Xaa is C or S
XRPTQVQLSPISVLYKEIVRKKPIFLKYHYT

SEQ ID NO: 8351 - protein, 29 aa, Artificial Sequence
  Cyclic GFR-binding peptide
  MOD_RES (3)..(4): Xaa is C or S
KAXXVPTKLSAISVLYLDDMGVPTLKNYQ

SEQ ID NO: 8352 - protein, 28 aa, Artificial Sequence
  Cyclic GFR-binding peptide
QDLSAISILYLIGKTPKILKNYQMIVKS

SEQ ID NO: 8353 - protein, 34 aa, Artificial Sequence
  Cyclic GFR-binding peptide
  MOD_RES (5)..(6): Xaa is C or S
SASPXXVPQDLNAISILYFVGRTPKVLKKYRMVV

SEQ ID NO: 8354 - protein, 32 aa, Artificial Sequence
  Cyclic GFR-binding peptide
  MOD_RES (2)..(3): Xaa is C or S
AXXVPTKLSATSVLYYDDMGVPTLRKHREGMS

SEQ ID NO: 8355 - protein, 33 aa, Artificial Sequence
  Cyclic GFR-binding peptide
  MOD_RES (30)..(32): Xaa is C or S
TKLNAISVLYFDSSNNVILKKYRNMVVKAXGXH

SEQ ID NO: 8356 - protein, 40 aa, Artificial Sequence
  Cyclic GFR-binding peptide
  MOD_RES (5)..(5): Xaa is C or S
RNVQXRPTQVQLSATSVLYYEIVRKKPIFLRKHRTLEDHL

SEQ ID NO: 8357 - protein, 26 aa, Artificial Sequence
  Cyclic GFR-binding peptide
  MOD_RES (26)..(26): Xaa is C or S
SATSILYYVGRKPKVLRKHRMIVRSX

SEQ ID NO: 8358 - protein, 37 aa, Artificial Sequence
  Cyclic GFR-binding peptide
  MOD_RES (1)..(1): Xaa is C or S
XRPTQVQLSPISVLYKEIVRKKPIFLKYHYTLEDHLA

SEQ ID NO: 8359 - protein, 29 aa, Artificial Sequence
  Cyclic GFR-binding peptide
  MOD_RES (3)..(4): Xaa is C or S
SPXXVSQDLSPISILYKIGKTPKILKYHY

SEQ ID NO: 8360 - protein, 22 aa, Artificial Sequence
  Cyclic GFR-binding peptide
SATSVLYYDDSSNVILRKHRNM

SEQ ID NO: 8361 - protein, 32 aa, Artificial Sequence
  Cyclic GFR-binding peptide
  MOD_RES (6)..(7): Xaa is C or S
ASASPXXVPQDLSATSILYYVGRTPKVLRKHR

SEQ ID NO: 8362 - protein, 33 aa, Artificial Sequence
  Cyclic GFR-binding peptide
  MOD_RES (7)..(7): Xaa is C or S
HVTKPTXAPTKLSAISVLYLDDSSNVILKNYQN

SEQ ID NO: 8363 - protein, 32 aa, Artificial Sequence
  Cyclic GFR-binding peptide
  MOD_RES (1)..(1): Xaa is C or S
XRPTQVQLNAISVLYFEIVRKKPIFLKKYRTL

SEQ ID NO: 8364 - protein, 31 aa, Artificial Sequence
  Cyclic GFR-binding peptide
  MOD_RES (1)..(1): Xaa is C or S
XVPTELSATSMLYYDEYDKVVLRKHREMVVE

SEQ ID NO: 8365 - protein, 25 aa, Artificial Sequence
  Cyclic GFR-binding peptide
TKLSAISVLYLDDSSNVILKNYQNM

SEQ ID NO: 8366 - protein, 36 aa, Artificial Sequence
  Cyclic GFR-binding peptide
  MOD_RES (2)..(3)..(34)..(36): Xaa is C or S
PXXVPQDLNAISILYFVGRTPKVLKKYRMVVKSXKX

SEQ ID NO: 8367 - protein, 27 aa, Artificial Sequence
  Cyclic GFR-binding peptide
LSAISVLYLDDMGVPTLKNYQEGMSVA

SEQ ID NO: 8368 - protein, 37 aa, Artificial Sequence
  Cyclic GFR-binding peptide
  MOD_RES (3)..(4)..(36): Xaa is C or S
KPXXAPTQLSPISVLYKDDSSNVILKYHYNMVVRAXG

SEQ ID NO: 8369 - protein, 30 aa, Artificial Sequence
  Cyclic GFR-binding peptide
PTQVQLNAISVLYFEIVRKKPIFLKKYRTL

SEQ ID NO: 8370 - protein, 35 aa, Artificial Sequence
  Cyclic GFR-binding peptide
  MOD_RES (5)..(6): Xaa is C or S
VPKPXXAPTQLSPISVLYKDDSSNVILKYHYNMVV

SEQ ID NO: 8371 - protein, 39 aa, Artificial Sequence
  Cyclic GFR-binding peptide
  MOD_RES (1)..(38): Xaa is C or S
XRPTQVQLNAISVLYFEIVRKKPIFLKKYRTLEDHLAXK

SEQ ID NO: 8372 - protein, 30 aa, Artificial Sequence
  Cyclic GFR-binding peptide
  MOD_RES (28)..(30): Xaa is C or S
LSPISVLYKDDSSNVILKYHYNMVVRSXGX

SEQ ID NO: 8373 - protein, 34 aa, Artificial Sequence
  Cyclic GFR-binding peptide
  MOD_RES (3)..(4): Xaa is C or S
KAXXVPTELSATSMLYYDEYDKVVLRKHREMVVE

SEQ ID NO: 8374 - protein, 36 aa, Artificial Sequence
  Cyclic GFR-binding peptide
  MOD_RES (6)..(7): Xaa is C or S
ASASPXXVSQDLNAISILYFIGKTPKILKKYRMIVK

SEQ ID NO: 8375 - protein, 30 aa, Artificial Sequence
  Cyclic GFR-binding peptide
  MOD_RES (2)..(3): Xaa is C or S
AXXAPTKLSAISVLYLDSSNNVILKNYQNM

SEQ ID NO: 8376 - protein, 32 aa, Artificial Sequence
  Cyclic GFR-binding peptide
  MOD_RES (31)..(31): Xaa is C or S
PTKLSPISVLYKDDSSNVILKYHYNMVVRSXG

SEQ ID NO: 8377 - protein, 25 aa, Artificial Sequence
  Cyclic GFR-binding peptide
VPQDLSAISILYLVGRTPKVLKNYQ

SEQ ID NO: 8378 - protein, 33 aa, Artificial Sequence
  Cyclic GFR-binding peptide
  MOD_RES (32)..(32): Xaa is C or S
PTKLSATSVLYYDDMGVPTLRKHREGMSVAEXG

SEQ ID NO: 8379 - protein, 33 aa, Artificial Sequence
  Cyclic GFR-binding peptide
  MOD_RES (6)..(7): Xaa is C or S
TVPKPXXAPTQLSATSVLYYDDSSNVILRKHRN

SEQ ID NO: 8380 - protein, 28 aa, Artificial Sequence
  Cyclic GFR-binding peptide
  MOD_RES (28)..(28): Xaa is C or S
LSATSVLYYDDSSNVILRKHRNMVVRAX

SEQ ID NO: 8381 - protein, 31 aa, Artificial Sequence
  Cyclic GFR-binding peptide
  MOD_RES (2)..(3): Xaa is C or S
AXXAPTKLNAISVLYFDSSNNVILKKYRNMV

SEQ ID NO: 8382 - protein, 32 aa, Artificial Sequence
  Cyclic GFR-binding peptide
  MOD_RES (6)..(7): Xaa is C or S
ASASPXXVSQDLNAISILYFIGKTPKILKKYR

SEQ ID NO: 8383 - protein, 38 aa, Artificial Sequence
  Cyclic GFR-binding peptide
  MOD_RES (3)..(4)..(36)..(38): Xaa is C or S
KPXXAPTQLSAISVLYLDDSSNVILKNYQNMVVRAXGX

SEQ ID NO: 8384 - protein, 33 aa, Artificial Sequence
  Cyclic GFR-binding peptide
  MOD_RES (1)..(32): Xaa is C or S
XVPQDLSATSILYYVGRTPKVLRKHRMVVKSXK

SEQ ID NO: 8385 - protein, 28 aa, Artificial Sequence
  Cyclic GFR-binding peptide
PTELSATSMLYYDEYDKVVLRKHREMVV

SEQ ID NO: 8386 - protein, 25 aa, Artificial Sequence
  Cyclic GFR-binding peptide
VPQALNAISILYFVGRKPKVLKKYR

SEQ ID NO: 8387 - protein, 39 aa, Artificial Sequence
  Cyclic GFR-binding peptide
  MOD_RES (4)..(5)..(37)..(39): Xaa is C or S
PKAXXVPTELSATSMLYYDENEKVVLRKHRDMVVEGXGX

SEQ ID NO: 8388 - protein, 37 aa, Artificial Sequence
  Cyclic GFR-binding peptide
  MOD_RES (37)..(37): Xaa is C or S
RPTQVQLSATSVLYYEIVRKKPIFLRKHRTLEDHLAX

SEQ ID NO: 8389 - protein, 31 aa, Artificial Sequence
  Cyclic GFR-binding peptide
  MOD_RES (4)..(5): Xaa is C or S
GKAXXVPTKLNAISVLYFDDMGVPTLKKYRE

SEQ ID NO: 8390 - protein, 33 aa, Artificial Sequence
  Cyclic GFR-binding peptide
  MOD_RES (31)..(33): Xaa is C or S
PTKLSATSVLYYDDSSNVILRKHRNMVVRSXGX

SEQ ID NO: 8391 - protein, 26 aa, Artificial Sequence
  Cyclic GFR-binding peptide
NAISMLYFDEYDKVVLKKYREMVVEG

SEQ ID NO: 8392 - protein, 35 aa, Artificial Sequence
  Cyclic GFR-binding peptide
  MOD_RES (35)..(35): Xaa is C or S
TQVQLSPISVLYKEIVRKKPIFLKYHYTLEDHLAX

SEQ ID NO: 8393 - protein, 28 aa, Artificial Sequence
  Cyclic GFR-binding peptide
  MOD_RES (2)..(3): Xaa is C or S
AXXVPTELSATSMLYYDEYDKVVLRKHR

SEQ ID NO: 8394 - protein, 31 aa, Artificial Sequence
  Cyclic GFR-binding peptide
SAISVLYLEIVRKKPIFLKNYQEIVRKKPIF

SEQ ID NO: 8395 - protein, 29 aa, Artificial Sequence
  Cyclic GFR-binding peptide
APTKLNAISVLYFDSSNNVILKKYRNMVV

SEQ ID NO: 8396 - protein, 30 aa, Artificial Sequence
  Cyclic GFR-binding peptide
  MOD_RES (28)..(30): Xaa is C or S
ALSPISILYKVGRKPKVLKYHYMIVRSXKX

SEQ ID NO: 8397 - protein, 25 aa, Artificial Sequence
  Cyclic GFR-binding peptide
VSQDLNAISILYFIGKTPKILKKYR

SEQ ID NO: 8398 - protein, 31 aa, Artificial Sequence
  Cyclic GFR-binding peptide
  MOD_RES (5)..(6): Xaa is C or S
IPKAXXVPTELNAISMLYFDENEKVVLKKYR

SEQ ID NO: 8399 - protein, 26 aa, Artificial Sequence
  Cyclic GFR-binding peptide
TKLSPISVLYKDSSNNVILKYHYNMV

SEQ ID NO: 8400 - protein, 39 aa, Artificial Sequence
  Cyclic GFR-binding peptide
  MOD_RES (4)..(4): Xaa is C or S
NVQXRPTQVQLNAISVLYFEIVRKKPIFLKKYRTLEDHL

SEQ ID NO: 8401 - protein, 30 aa, Artificial Sequence
  Cyclic GFR-binding peptide
  MOD_RES (29)..(29): Xaa is C or S
KLSAISVLYLDDSSNVILKNYQNMVVRSXG

SEQ ID NO: 8402 - protein, 37 aa, Artificial Sequence
  Cyclic GFR-binding peptide
  MOD_RES (3)..(4)..(37): Xaa is C or S
KAXXVPTKLSAISVLYLDDMGVPTLKNYQEGMSVAEX

SEQ ID NO: 8403 - protein, 24 aa, Artificial Sequence
  Cyclic GFR-binding peptide
SATSVLYYDDMGVPTLRKHREGMS

SEQ ID NO: 8404 - protein, 29 aa, Artificial Sequence
  Cyclic GFR-binding peptide
VQLSATSVLYYEIVRKKPIFLRKHRTLED

SEQ ID NO: 8405 - protein, 28 aa, Artificial Sequence
  Cyclic GFR-binding peptide
  MOD_RES (1)..(1): Xaa is C or S
XVPTKLSATSVLYYDDMGVPTLRKHREG

SEQ ID NO: 8406 - protein, 23 aa, Artificial Sequence
  Cyclic GFR-binding peptide
QLSATSVLYYDDSSNVILRKHRN

SEQ ID NO: 8407 - protein, 36 aa, Artificial Sequence
  Cyclic GFR-binding peptide
  MOD_RES (2)..(2): Xaa is C or S
QXRPTQVQLNAISVLYFEIVRKKPIFLKKYRTLEDH

SEQ ID NO: 8408 - protein, 23 aa, Artificial Sequence
  Cyclic GFR-binding peptide
KLSPISVLYKDSSNNVILKYHYN

SEQ ID NO: 8409 - protein, 36 aa, Artificial Sequence
  Cyclic GFR-binding peptide
  MOD_RES (5)..(6): Xaa is C or S
VPKAXXAPTKLNAISVLYFDSSNNVILKKYRNMVVK

SEQ ID NO: 8410 - protein, 28 aa, Artificial Sequence
  Cyclic GFR-binding peptide
VPTELSPISMLYKDEYDKVVLKYHYEMV

SEQ ID NO: 8411 - protein, 28 aa, Artificial Sequence
  Cyclic GFR-binding peptide
  MOD_RES (1)..(1): Xaa is C or S
XVPTELNAISMLYFDEYDKVVLKKYREM

SEQ ID NO: 8412 - protein, 39 aa, Artificial Sequence
  Cyclic GFR-binding peptide
  MOD_RES (4)..(5)..(37)..(39): Xaa is C or S
PKPXXAPTQLSAISVLYLDDSSNVILKNYQNMVVRAXGX

SEQ ID NO: 8413 - protein, 23 aa, Artificial Sequence
  Cyclic GFR-binding peptide
SATSILYYVGRKPKVLRKHRMIV

SEQ ID NO: 8414 - protein, 38 aa, Artificial Sequence
  Cyclic GFR-binding peptide
  MOD_RES (3)..(4)..(36)..(38): Xaa is C or S
KAXXVPTELSATSMLYYDENEKVVLRKHRDMVVEGXGX

SEQ ID NO: 8415 - protein, 32 aa, Artificial Sequence
  Cyclic GFR-binding peptide
  MOD_RES (3)..(4): Xaa is C or S
SPXXVPQDLNAISILYFVGRTPKVLKKYRMVV

SEQ ID NO: 8416 - protein, 38 aa, Artificial Sequence
  Cyclic GFR-binding peptide
  MOD_RES (4)..(5)..(36)..(38): Xaa is C or S
AAPXXVPQALNAISILYFVGRKPKVLKKYRMIVRSXKX

SEQ ID NO: 8417 - protein, 26 aa, Artificial Sequence
  Cyclic GFR-binding peptide
APTKLNAISVLYFDSSNNVILKKYRN

SEQ ID NO: 8418 - protein, 26 aa, Artificial Sequence
  Cyclic GFR-binding peptide
TKLSATSVLYYDDSSNVILRKHRNMV

SEQ ID NO: 8419 - protein, 23 aa, Artificial Sequence
  Cyclic GFR-binding peptide
ELSATSMLYYDEYDKVVLRKHRE

SEQ ID NO: 8420 - protein, 37 aa, Artificial Sequence
  Cyclic GFR-binding peptide
  MOD_RES (2)..(3)..(34)..(36): Xaa is C or S
PXXVPQDLSPISILYKVGRTPKVLKYHYMVVKSXKXS

SEQ ID NO: 8421 - protein, 27 aa, Artificial Sequence
  Cyclic GFR-binding peptide
TQVQLSAISVLYLEIVRKKPIFLKNYQ

SEQ ID NO: 8422 - protein, 40 aa, Artificial Sequence
  Cyclic GFR-binding peptide
  MOD_RES (5)..(6)..(38)..(40): Xaa is C or S
VPKPXXAPTKLSAISVLYLDDSSNVILKNYQNMVVRSXGX

SEQ ID NO: 8423 - protein, 42 aa, Artificial Sequence
  Cyclic GFR-binding peptide
  MOD_RES (6)..(7)..(39)..(41): Xaa is C or S
AVPKAXXAPTKLSPISVLYKDSSNNVILKYHYNMVVKAXGXH

SEQ ID NO: 8424 - protein, 26 aa, Artificial Sequence
  Cyclic GFR-binding peptide
VPQDLSATSILYYVGRTPKVLRKHRM

SEQ ID NO: 8425 - protein, 37 aa, Artificial Sequence
  Cyclic GFR-binding peptide
  MOD_RES (5)..(6): Xaa is C or S
IPKAXXVPTELSATSMLYYDEYDKVVLRKHREMVVEG

SEQ ID NO: 8426 - protein, 34 aa, Artificial Sequence
  Cyclic GFR-binding peptide
  MOD_RES (32)..(34): Xaa is C or S
VPTELNAISMLYFDENEKVVLKKYRDMVVEGXGX

SEQ ID NO: 8427 - protein, 28 aa, Artificial Sequence
  Cyclic GFR-binding peptide
APTQLSAISVLYLDDSSNVILKNYQNMV

SEQ ID NO: 8428 - protein, 34 aa, Artificial Sequence
  Cyclic GFR-binding peptide
  MOD_RES (5)..(6): Xaa is C or S
IPKAXXVPTELSATSMLYYDEYDKVVLRKHREMV

SEQ ID NO: 8429 - protein, 30 aa, Artificial Sequence
  Cyclic GFR-binding peptide
  MOD_RES (29)..(29): Xaa is C or S
KLNAISVLYFDSSNNVILKKYRNMVVKAXG

SEQ ID NO: 8430 - protein, 28 aa, Artificial Sequence
  Cyclic GFR-binding peptide
QLSATSVLYYEIVRKKPIFLRKHRTLED

SEQ ID NO: 8431 - protein, 30 aa, Artificial Sequence
  Cyclic GFR-binding peptide
  MOD_RES (1)..(1): Xaa is C or S
XVPTKLSAISVLYLDDMGVPTLKNYQEGMS

SEQ ID NO: 8432 - protein, 36 aa, Artificial Sequence
  Cyclic GFR-binding peptide
  MOD_RES (2)..(3)..(35): Xaa is C or S
AXXVPTELNAISMLYFDEYDKVVLKKYREMVVEGXG

SEQ ID NO: 8433 - protein, 27 aa, Artificial Sequence
  Cyclic GFR-binding peptide
VPTKLNAISVLYFDDMGVPTLKKYREG

SEQ ID NO: 8434 - protein, 37 aa, Artificial Sequence
  Cyclic GFR-binding peptide
  MOD_RES (2)..(3)..(34)..(36): Xaa is C or S
PXXVPQALSAISILYLVGRKPKVLKNYQMIVRSXKXS

SEQ ID NO: 8435 - protein, 34 aa, Artificial Sequence
  Cyclic GFR-binding peptide
  MOD_RES (4)..(5): Xaa is C or S
PKAXXAPTKLNAISVLYFDSSNNVILKKYRNMVV

SEQ ID NO: 8436 - protein, 36 aa, Artificial Sequence
  Cyclic GFR-binding peptide
  MOD_RES (5)..(6): Xaa is C or S
VPKPXXAPTQLSPISVLYKDDSSNVILKYHYNMVVR

SEQ ID NO: 8437 - protein, 31 aa, Artificial Sequence
  Cyclic GFR-binding peptide
  MOD_RES (3)..(4): Xaa is C or S
KAXXVPTKLSATSVLYYDDMGVPTLRKHREG

SEQ ID NO: 8438 - protein, 29 aa, Artificial Sequence
  Cyclic GFR-binding peptide
SQDLSPISILYKIGKTPKILKYHYMIVKS

SEQ ID NO: 8439 - protein, 31 aa, Artificial Sequence
  Cyclic GFR-binding peptide
  MOD_RES (3)..(4): Xaa is C or S
SPXXVPQDLSPISILYKVGRTPKVLKYHYMV

SEQ ID NO: 8440 - protein, 33 aa, Artificial Sequence
  Cyclic GFR-binding peptide
  MOD_RES (31)..(33): Xaa is C or S
PTQLSATSVLYYDDSSNVILRKHRNMVVRAXGX

SEQ ID NO: 8441 - protein, 34 aa, Artificial Sequence
  Cyclic GFR-binding peptide
  MOD_RES (1)..(2)..(34): Xaa is C or S
XXAPTKLSPISVLYKDDSSNVILKYHYNMVVRSX

SEQ ID NO: 8442 - protein, 35 aa, Artificial Sequence
  Cyclic GFR-binding peptide
  MOD_RES (6)..(7): Xaa is C or S
KVGKAXXVPTKLNAISVLYFDDMGVPTLKKYREGM

SEQ ID NO: 8443 - protein, 32 aa, Artificial Sequence
  Cyclic GFR-binding peptide
  MOD_RES (31)..(31): Xaa is C or S
LSAISVLYLEIVRKKPIFLKNYQTLEDHLAXK

SEQ ID NO: 8444 - protein, 32 aa, Artificial Sequence
  Cyclic GFR-binding peptide
  MOD_RES (32)..(32): Xaa is C or S
VPTELSPISMLYKDENEKVVLKYHYDMVVEGX

SEQ ID NO: 8445 - protein, 32 aa, Artificial Sequence
  Cyclic GFR-binding peptide
  MOD_RES (29)..(31): Xaa is C or S
QALSAISILYLVGRKPKVLKNYQMIVRSXKXS

SEQ ID NO: 8446 - protein, 35 aa, Artificial Sequence
  Cyclic GFR-binding peptide
  MOD_RES (4)..(5): Xaa is C or S
AAPXXVPQALNAISILYFVGRKPKVLKKYRMIVRS

SEQ ID NO: 8447 - protein, 33 aa, Artificial Sequence
  Cyclic GFR-binding peptide
  MOD_RES (2)..(3): Xaa is C or S
AXXAPTKLSPISVLYKDSSNNVILKYHYNMVVK

SEQ ID NO: 8448 - protein, 40 aa, Artificial Sequence
  Cyclic GFR-binding peptide
  MOD_RES (5)..(6)..(39): Xaa is C or S
VGKAXXVPTKLNAISVLYFDDMGVPTLKKYREGMSVAEXG

SEQ ID NO: 8449 - protein, 24 aa, Artificial Sequence
  Cyclic GFR-binding peptide
LSAISVLYLDDSSNVILKNYQNMV

SEQ ID NO: 8450 - protein, 35 aa, Artificial Sequence
  Cyclic GFR-binding peptide
  MOD_RES (1)..(2)..(35): Xaa is C or S
XXVPTKLSATSVLYYDDMGVPTLRKHREGMSVAEX

SEQ ID NO: 8451 - protein, 34 aa, Artificial Sequence
  Cyclic GFR-binding peptide
  MOD_RES (1)..(2)..(33): Xaa is C or S
XXVPQALSPISILYKVGRKPKVLKYHYMIVRSXK

SEQ ID NO: 8452 - protein, 33 aa, Artificial Sequence
  Cyclic GFR-binding peptide
  MOD_RES (32)..(32): Xaa is C or S
QLSAISVLYLEIVRKKPIFLKNYQTLEDHLAXK

SEQ ID NO: 8453 - protein, 33 aa, Artificial Sequence
  Cyclic GFR-binding peptide
  MOD_RES (30)..(32): Xaa is C or S
SAISVLYLEIVRKKPIFLKNYQTLEDHLAXKXE

SEQ ID NO: 8454 - protein, 37 aa, Artificial Sequence
  Cyclic GFR-binding peptide
  MOD_RES (2)..(34)..(36): Xaa is C or S
TXAPTKLSAISVLYLDDSSNVILKNYQNMVVRSXGXH

SEQ ID NO: 8455 - protein, 36 aa, Artificial Sequence
  Cyclic GFR-binding peptide
  MOD_RES (5)..(6): Xaa is C or S
VPKPXXAPTKLSATSVLYYDDSSNVILRKHRNMVVR

SEQ ID NO: 8456 - protein, 32 aa, Artificial Sequence
  Cyclic GFR-binding peptide
  MOD_RES (31)..(31): Xaa is C or S
PTQLSPISVLYKDDSSNVILKYHYNMVVRAXG

SEQ ID NO: 8457 - protein, 28 aa, Artificial Sequence
  Cyclic GFR-binding peptide
VSQDLSPISILYKIGKTPKILKYHYMIV

SEQ ID NO: 8458 - protein, 29 aa, Artificial Sequence
  Cyclic GFR-binding peptide
  MOD_RES (1)..(2): Xaa is C or S
XXVPTELSPISMLYKDENEKVVLKYHYDM

SEQ ID NO: 8459 - protein, 28 aa, Artificial Sequence
  Cyclic GFR-binding peptide
  MOD_RES (28)..(28): Xaa is C or S
DLSPISILYKVGRTPKVLKYHYMVVKSX

SEQ ID NO: 8460 - protein, 27 aa, Artificial Sequence
  Cyclic GFR-binding peptide
  MOD_RES (26)..(26): Xaa is C or S
SAISILYLVGRTPKVLKNYQMVVKSXK

SEQ ID NO: 8461 - protein, 28 aa, Artificial Sequence
  Cyclic GFR-binding peptide
  MOD_RES (27)..(27): Xaa is C or S
SATSMLYYDEYDKVVLRKHREMVVEGXG

SEQ ID NO: 8462 - protein, 24 aa, Artificial Sequence
  Cyclic GFR-binding peptide
QLSPISVLYKDDSSNVILKYHYNM

SEQ ID NO: 8463 - protein, 35 aa, Artificial Sequence
  Cyclic GFR-binding peptide
  MOD_RES (2)..(3)..(35): Xaa is C or S
AXXVPTELNAISMLYFDENEKVVLKKYRDMVVEGX

SEQ ID NO: 8464 - protein, 27 aa, Artificial Sequence
  Cyclic GFR-binding peptide
TQLSAISVLYLDDSSNVILKNYQNMVV

SEQ ID NO: 8465 - protein, 31 aa, Artificial Sequence
  Cyclic GFR-binding peptide
  MOD_RES (5)..(6): Xaa is C or S
SAAPXXVPQALSPISILYKVGRKPKVLKYHY

SEQ ID NO: 8466 - protein, 35 aa, Artificial Sequence
  Cyclic GFR-binding peptide
  MOD_RES (2)..(3)..(35): Xaa is C or S
AXXVPTELSPISMLYKDENEKVVLKYHYDMVVEGX

SEQ ID NO: 8467 - protein, 29 aa, Artificial Sequence
  Cyclic GFR-binding peptide
APTKLSPISVLYKDSSNNVILKYHYNMVV

SEQ ID NO: 8468 - protein, 23 aa, Artificial Sequence
  Cyclic GFR-binding peptide
NAISVLYFDDMGVPTLKKYREGM

SEQ ID NO: 8469 - protein, 35 aa, Artificial Sequence
  Cyclic GFR-binding peptide
  MOD_RES (1)..(2)..(33)..(35): Xaa is C or S
XXVSQDLNAISILYFIGKTPKILKKYRMIVKSXKX

SEQ ID NO: 8470 - protein, 29 aa, Artificial Sequence
  Cyclic GFR-binding peptide
SQDLSAISILYLIGKTPKILKNYQMIVKS

SEQ ID NO: 8471 - protein, 27 aa, Artificial Sequence
  Cyclic GFR-binding peptide
PQALSATSILYYVGRKPKVLRKHRMIV

SEQ ID NO: 8472 - protein, 32 aa, Artificial Sequence
  Cyclic GFR-binding peptide
  MOD_RES (32)..(32): Xaa is C or S
QLNAISVLYFEIVRKKPIFLKKYRTLEDHLAX

SEQ ID NO: 8473 - protein, 32 aa, Artificial Sequence
  Cyclic GFR-binding peptide
  MOD_RES (1)..(2): Xaa is C or S
XXVPTELSATSMLYYDEYDKVVLRKHREMVVE

SEQ ID NO: 8474 - protein, 43 aa, Artificial Sequence
  Cyclic GFR-binding peptide
  MOD_RES (4)..(41)..(43): Xaa is C or S
NVQXRPTQVQLNAISVLYFEIVRKKPIFLKKYRTLEDHLAXKX

SEQ ID NO: 8475 - protein, 33 aa, Artificial Sequence
  Cyclic GFR-binding peptide
  MOD_RES (1)..(2)..(33): Xaa is C or S
XXVPQALSPISILYKVGRKPKVLKYHYMIVRSX

SEQ ID NO: 8476 - protein, 27 aa, Artificial Sequence
  Cyclic GFR-binding peptide
LNAISVLYFDDMGVPTLKKYREGMSVA

SEQ ID NO: 8477 - protein, 38 aa, Artificial Sequence
  Cyclic GFR-binding peptide
  MOD_RES (6)..(38): Xaa is C or S
VTKPTXAPTKLSAISVLYLDDSSNVILKNYQNMVVRSX

SEQ ID NO: 8478 - protein, 20 aa, Artificial Sequence
  Cyclic GFR-binding peptide
NAISVLYFDSSNNVILKKYR

SEQ ID NO: 8479 - protein, 35 aa, Artificial Sequence
  Cyclic GFR-binding peptide
  MOD_RES (1)..(2)..(33)..(35): Xaa is C or S
XXVPQALNAISILYFVGRKPKVLKKYRMIVRSXKX

SEQ ID NO: 8480 - protein, 27 aa, Artificial Sequence
  Cyclic GFR-binding peptide
APTQLSPISVLYKDDSSNVILKYHYNM

SEQ ID NO: 8481 - protein, 30 aa, Artificial Sequence
  Cyclic GFR-binding peptide
  MOD_RES (3)..(4): Xaa is C or S
KAXXVPTELSPISMLYKDENEKVVLKYHYD

SEQ ID NO: 8482 - protein, 25 aa, Artificial Sequence
  Cyclic GFR-binding peptide
DLNAISILYFVGRTPKVLKKYRMVV

SEQ ID NO: 8483 - protein, 32 aa, Artificial Sequence
  Cyclic GFR-binding peptide
  MOD_RES (6)..(7): Xaa is C or S
AVPKAXXAPTKLSAISVLYLDSSNNVILKNYQ

SEQ ID NO: 8484 - protein, 25 aa, Artificial Sequence
  Cyclic GFR-binding peptide
SQDLSPISILYKIGKTPKILKYHYM

SEQ ID NO: 8485 - protein, 27 aa, Artificial Sequence
  Cyclic GFR-binding peptide
TELSPISMLYKDEYDKVVLKYHYEMVV

SEQ ID NO: 8486 - protein, 44 aa, Artificial Sequence
  Cyclic GFR-binding peptide
  MOD_RES (5)..(42)..(44): Xaa is C or S
RNVQXRPTQVQLSAISVLYLEIVRKKPIFLKNYQTLEDHLAXKX

SEQ ID NO: 8487 - protein, 27 aa, Artificial Sequence
  Cyclic GFR-binding peptide
TQVQLSATSVLYYEIVRKKPIFLRKHR

SEQ ID NO: 8488 - protein, 23 aa, Artificial Sequence
  Cyclic GFR-binding peptide
LNAISVLYFDSSNNVILKKYRNM

SEQ ID NO: 8489 - protein, 30 aa, Artificial Sequence
  Cyclic GFR-binding peptide
  MOD_RES (28)..(30): Xaa is C or S
ALSATSILYYVGRKPKVLRKHRMIVRSXKX

SEQ ID NO: 8490 - protein, 27 aa, Artificial Sequence
  Cyclic GFR-binding peptide
  MOD_RES (27)..(27): Xaa is C or S
SPISVLYKDDSSNVILKYHYNMVVRAX

SEQ ID NO: 8491 - protein, 33 aa, Artificial Sequence
  Cyclic GFR-binding peptide
  MOD_RES (1)..(2): Xaa is C or S
XXVPTKLSATSVLYYDDMGVPTLRKHREGMSVA

SEQ ID NO: 8492 - protein, 24 aa, Artificial Sequence
  Cyclic GFR-binding peptide
LSAISILYLVGRKPKVLKNYQMIV

SEQ ID NO: 8493 - protein, 41 aa, Artificial Sequence
  Cyclic GFR-binding peptide
  MOD_RES (7)..(39)..(41): Xaa is C or S
HVTKPTXAPTKLSAISVLYLDDSSNVILKNYQNMVVRSXGX

SEQ ID NO: 8494 - protein, 34 aa, Artificial Sequence
  Cyclic GFR-binding peptide
  MOD_RES (32)..(34): Xaa is C or S
VPTELNAISMLYFDEYDKVVLKKYREMVVEGXGX

SEQ ID NO: 8495 - protein, 22 aa, Artificial Sequence
  Cyclic GFR-binding peptide
DLSAISILYLVGRTPKVLKNYQ

SEQ ID NO: 8496 - protein, 28 aa, Artificial Sequence
  Cyclic GFR-binding peptide
SQDLSPISILYKIGKTPKILKYHYMIVK

SEQ ID NO: 8497 - protein, 34 aa, Artificial Sequence
  Cyclic GFR-binding peptide
  MOD_RES (3)..(4): Xaa is C or S
SPXXVSQDLSATSILYYIGKTPKILRKHRMIVKS

SEQ ID NO: 8498 - protein, 38 aa, Artificial Sequence
  Cyclic GFR-binding peptide
  MOD_RES (37)..(37): Xaa is C or S
RPTQVQLSAISVLYLEIVRKKPIFLKNYQTLEDHLAXK

SEQ ID NO: 8499 - protein, 39 aa, Artificial Sequence
  Cyclic GFR-binding peptide
  MOD_RES (3)..(4)..(36)..(38): Xaa is C or S
KAXXVPTELNAISMLYFDENEKVVLKKYRDMVVEGXGXR

SEQ ID NO: 8500 - protein, 25 aa, Artificial Sequence
  Cyclic GFR-binding peptide
VPTKLSAISVLYLDDMGVPTLKNYQ

SEQ ID NO: 8501 - protein, 28 aa, Artificial Sequence
  Cyclic GFR-binding peptide
QVQLNAISVLYFEIVRKKPIFLKKYRTL

SEQ ID NO: 8502 - protein, 27 aa, Artificial Sequence
  Cyclic GFR-binding peptide
LSAISVLYLDDSSNVILKNYQNMVVRS

SEQ ID NO: 8503 - protein, 28 aa, Artificial Sequence
  Cyclic GFR-binding peptide
  MOD_RES (1)..(1): Xaa is C or S
XAPTKLSPISVLYKDDSSNVILKYHYNM

SEQ ID NO: 8504 - protein, 41 aa, Artificial Sequence
  Cyclic GFR-binding peptide
  MOD_RES (6)..(7)..(39)..(41): Xaa is C or S
SIPKAXXVPTELSPISMLYKDEYDKVVLKYHYEMVVEGXGX

SEQ ID NO: 8505 - protein, 28 aa, Artificial Sequence
  Cyclic GFR-binding peptide
QALSPISILYKVGRKPKVLKYHYMIVRS

SEQ ID NO: 8506 - protein, 26 aa, Artificial Sequence
  Cyclic GFR-binding peptide
APTKLSPISVLYKDDSSNVILKYHYN

SEQ ID NO: 8507 - protein, 26 aa, Artificial Sequence
  Cyclic GFR-binding peptide
  MOD_RES (1)..(1): Xaa is C or S
XVPTELSATSMLYYDEYDKVVLRKHR

SEQ ID NO: 8508 - protein, 37 aa, Artificial Sequence
  Cyclic GFR-binding peptide
  MOD_RES (1)..(1): Xaa is C or S
XRPTQVQLNAISVLYFEIVRKKPIFLKKYRTLEDHLA

SEQ ID NO: 8509 - protein, 39 aa, Artificial Sequence
  Cyclic GFR-binding peptide
  MOD_RES (4)..(4): Xaa is C or S
NVQXRPTQVQLSAISVLYLEIVRKKPIFLKNYQTLEDHL

SEQ ID NO: 8510 - protein, 37 aa, Artificial Sequence
  Cyclic GFR-binding peptide
  MOD_RES (3)..(4)..(36): Xaa is C or S
KPXXAPTKLSPISVLYKDDSSNVILKYHYNMVVRSXG

SEQ ID NO: 8511 - protein, 27 aa, Artificial Sequence
  Cyclic GFR-binding peptide
LSAISVLYLDDSSNVILKNYQNMVVRA

SEQ ID NO: 8512 - protein, 25 aa, Artificial Sequence
  Cyclic GFR-binding peptide
VPQDLSATSILYYVGRTPKVLRKHR

SEQ ID NO: 8513 - protein, 33 aa, Artificial Sequence
  Cyclic GFR-binding peptide
  MOD_RES (5)..(6): Xaa is C or S
IPKAXXVPTELNAISMLYFDENEKVVLKKYRDM

SEQ ID NO: 8514 - protein, 26 aa, Artificial Sequence
  Cyclic GFR-binding peptide
PTELSPISMLYKDEYDKVVLKYHYEM

SEQ ID NO: 8515 - protein, 34 aa, Artificial Sequence
  Cyclic GFR-binding peptide
  MOD_RES (6)..(7): Xaa is C or S
AVPKAXXAPTKLNAISVLYFDSSNNVILKKYRNM

SEQ ID NO: 8516 - protein, 26 aa, Artificial Sequence
  Cyclic GFR-binding peptide
  MOD_RES (26)..(26): Xaa is C or S
SAISILYLVGRTPKVLKNYQMVVKSX

SEQ ID NO: 8517 - protein, 31 aa, Artificial Sequence
  Cyclic GFR-binding peptide
  MOD_RES (4)..(4): Xaa is C or S
KPTXAPTKLSAISVLYLDDSSNVILKNYQNM

SEQ ID NO: 8518 - protein, 33 aa, Artificial Sequence
  Cyclic GFR-binding peptide
  MOD_RES (6)..(7): Xaa is C or S
KIPKAXXVPTELSPISMLYKDENEKVVLKYHYD

SEQ ID NO: 8519 - protein, 26 aa, Artificial Sequence
  Cyclic GFR-binding peptide
VPTELSATSMLYYDEYDKVVLRKHRE

SEQ ID NO: 8520 - protein, 29 aa, Artificial Sequence
  Cyclic GFR-binding peptide
  MOD_RES (26)..(28): Xaa is C or S
NAISILYFIGKTPKILKKYRMIVKSXKXS

SEQ ID NO: 8521 - protein, 23 aa, Artificial Sequence
  Cyclic GFR-binding peptide
LSPISMLYKDEYDKVVLKYHYEM

SEQ ID NO: 8522 - protein, 34 aa, Artificial Sequence
  Cyclic GFR-binding peptide
  MOD_RES (3)..(4): Xaa is C or S
SPXXVSQDLNAISILYFIGKTPKILKKYRMIVKS

SEQ ID NO: 8523 - protein, 42 aa, Artificial Sequence
  Cyclic GFR-binding peptide
  MOD_RES (3)..(40)..(42): Xaa is C or S
VQXRPTQVQLSPISVLYKEIVRKKPIFLKYHYTLEDHLAXKX

SEQ ID NO: 8524 - protein, 30 aa, Artificial Sequence
  Cyclic GFR-binding peptide
  MOD_RES (1)..(2): Xaa is C or S
XXVPQDLSATSILYYVGRTPKVLRKHRMVV

SEQ ID NO: 8525 - protein, 36 aa, Artificial Sequence
  Cyclic GFR-binding peptide
  MOD_RES (2)..(3)..(34)..(36): Xaa is C or S
PXXVPQALNAISILYFVGRKPKVLKKYRMIVRSXKX

SEQ ID NO: 8526 - protein, 34 aa, Artificial Sequence
  Cyclic GFR-binding peptide
  MOD_RES (32)..(34): Xaa is C or S
APTKLSAISVLYLDSSNNVILKNYQNMVVKAXGX

SEQ ID NO: 8527 - protein, 29 aa, Artificial Sequence
  Cyclic GFR-binding peptide
QVQLSATSVLYYEIVRKKPIFLRKHRTLE

SEQ ID NO: 8528 - protein, 26 aa, Artificial Sequence
  Cyclic GFR-binding peptide
  MOD_RES (1)..(1): Xaa is C or S
XVPTELSPISMLYKDEYDKVVLKYHY

SEQ ID NO: 8529 - protein, 29 aa, Artificial Sequence
  Cyclic GFR-binding peptide
TKLNAISVLYFDDMGVPTLKKYREGMSVA

SEQ ID NO: 8530 - protein, 32 aa, Artificial Sequence
  Cyclic GFR-binding peptide
  MOD_RES (1)..(1): Xaa is C or S
XVPTELSPISMLYKDENEKVVLKYHYDMVVEG

SEQ ID NO: 8531 - protein, 31 aa, Artificial Sequence
  Cyclic GFR-binding peptide
  MOD_RES (2)..(3): Xaa is C or S
PXXVSQDLNAISILYFIGKTPKILKKYRMIV

SEQ ID NO: 8532 - protein, 23 aa, Artificial Sequence
  Cyclic GFR-binding peptide
ELNAISMLYFDENEKVVLKKYRD

SEQ ID NO: 8533 - protein, 33 aa, Artificial Sequence
  Cyclic GFR-binding peptide
  MOD_RES (2)..(3): Xaa is C or S
AXXAPTKLSAISVLYLDSSNNVILKNYQNMVVK

SEQ ID NO: 8534 - protein, 25 aa, Artificial Sequence
  Cyclic GFR-binding peptide
ALSAISILYLVGRKPKVLKNYQMIV

SEQ ID NO: 8535 - protein, 30 aa, Artificial Sequence
  Cyclic GFR-binding peptide
  MOD_RES (4)..(5): Xaa is C or S
GKAXXVPTKLSAISVLYLDDMGVPTLKNYQ

SEQ ID NO: 8536 - protein, 33 aa, Artificial Sequence
  Cyclic GFR-binding peptide
  MOD_RES (30)..(32): Xaa is C or S
PQDLSAISILYLVGRTPKVLKNYQMVVKSXKXS

SEQ ID NO: 8537 - protein, 38 aa, Artificial Sequence
  Cyclic GFR-binding peptide
  MOD_RES (3)..(4)..(35)..(37): Xaa is C or S
SPXXVPQDLSPISILYKVGRTPKVLKYHYMVVKSXKXS

SEQ ID NO: 8538 - protein, 30 aa, Artificial Sequence
  Cyclic GFR-binding peptide
  MOD_RES (2)..(3): Xaa is C or S
PXXVPQDLSPISILYKVGRTPKVLKYHYMV

SEQ ID NO: 8539 - protein, 36 aa, Artificial Sequence
  Cyclic GFR-binding peptide
  MOD_RES (36)..(36): Xaa is C or S
PTQVQLNAISVLYFEIVRKKPIFLKKYRTLEDHLAX

SEQ ID NO: 8540 - protein, 26 aa, Artificial Sequence
  Cyclic GFR-binding peptide
  MOD_RES (26)..(26): Xaa is C or S
SPISILYKVGRKPKVLKYHYMIVRSX

SEQ ID NO: 8541 - protein, 39 aa, Artificial Sequence
  Cyclic GFR-binding peptide
  MOD_RES (2)..(3)..(36)..(38): Xaa is C or S
AXXVPTKLSATSVLYYDDMGVPTLRKHREGMSVAEXGXR

SEQ ID NO: 8542 - protein, 30 aa, Artificial Sequence
  Cyclic GFR-binding peptide
  MOD_RES (30)..(30): Xaa is C or S
TKLSAISVLYLDDSSNVILKNYQNMVVRSX

SEQ ID NO: 8543 - protein, 32 aa, Artificial Sequence
  Cyclic GFR-binding peptide
  MOD_RES (2)..(3): Xaa is C or S
PXXVPQALSPISILYKVGRKPKVLKYHYMIVR

SEQ ID NO: 8544 - protein, 32 aa, Artificial Sequence
  Cyclic GFR-binding peptide
  MOD_RES (1)..(1): Xaa is C or S
XAPTKLSPISVLYKDDSSNVILKYHYNMVVRS

SEQ ID NO: 8545 - protein, 32 aa, Artificial Sequence
  Cyclic GFR-binding peptide
  MOD_RES (3)..(4): Xaa is C or S
KPXXAPTKLSAISVLYLDDSSNVILKNYQNMV

SEQ ID NO: 8546 - protein, 37 aa, Artificial Sequence
  Cyclic GFR-binding peptide
  MOD_RES (5)..(5): Xaa is C or S
RNVQXRPTQVQLSPISVLYKEIVRKKPIFLKYHYTLE

SEQ ID NO: 8547 - protein, 28 aa, Artificial Sequence
  Cyclic GFR-binding peptide
  MOD_RES (26)..(28): Xaa is C or S
SAISILYLVGRTPKVLKNYQMVVKSXKX

SEQ ID NO: 8548 - protein, 30 aa, Artificial Sequence
  Cyclic GFR-binding peptide
  MOD_RES (30)..(30): Xaa is C or S
SQDLSATSILYYIGKTPKILRKHRMIVKSX

SEQ ID NO: 8549 - protein, 38 aa, Artificial Sequence
  Cyclic GFR-binding peptide
  MOD_RES (4)..(5)..(36)..(38): Xaa is C or S
ASPXXVSQDLSPISILYKIGKTPKILKYHYMIVKSXKX

SEQ ID NO: 8550 - protein, 41 aa, Artificial Sequence
  Cyclic GFR-binding peptide
  MOD_RES (6)..(7)..(38)..(40): Xaa is C or S
ASAAPXXVPQALSATSILYYVGRKPKVLRKHRMIVRSXKXS

SEQ ID NO: 8551 - protein, 30 aa, Artificial Sequence
  Cyclic GFR-binding peptide
  MOD_RES (28)..(30): Xaa is C or S
DLSPISILYKVGRTPKVLKYHYMVVKSXKX

SEQ ID NO: 8552 - protein, 39 aa, Artificial Sequence
  Cyclic GFR-binding peptide
  MOD_RES (4)..(5)..(37)..(39): Xaa is C or S
PKPXXAPTKLSAISVLYLDDSSNVILKNYQNMVVRSXGX

SEQ ID NO: 8553 - protein, 29 aa, Artificial Sequence
  Cyclic GFR-binding peptide
TELSPISMLYKDEYDKVVLKYHYEMVVEG

SEQ ID NO: 8554 - protein, 25 aa, Artificial Sequence
  Cyclic GFR-binding peptide
VPTKLNAISVLYFDDMGVPTLKKYR

SEQ ID NO: 8555 - protein, 32 aa, Artificial Sequence
  Cyclic GFR-binding peptide
  MOD_RES (6)..(7): Xaa is C or S
ASASPXXVSQDLSAISILYLIGKTPKILKNYQ

SEQ ID NO: 8556 - protein, 24 aa, Artificial Sequence
  Cyclic GFR-binding peptide
QLSAISVLYLDDSSNVILKNYQNM

SEQ ID NO: 8557 - protein, 37 aa, Artificial Sequence
  Cyclic GFR-binding peptide
  MOD_RES (3)..(4)..(35)..(37): Xaa is C or S
SPXXVSQDLSPISILYKIGKTPKILKYHYMIVKSXKX

SEQ ID NO: 8558 - protein, 36 aa, Artificial Sequence
  Cyclic GFR-binding peptide
  MOD_RES (4)..(5)..(36): Xaa is C or S
AAPXXVPQALNAISILYFVGRKPKVLKKYRMIVRSX

SEQ ID NO: 8559 - protein, 42 aa, Artificial Sequence
  Cyclic GFR-binding peptide
  MOD_RES (6)..(7)..(40)..(42): Xaa is C or S
KVGKAXXVPTKLSATSVLYYDDMGVPTLRKHREGMSVAEXGX

SEQ ID NO: 8560 - protein, 29 aa, Artificial Sequence
  Cyclic GFR-binding peptide
  MOD_RES (28)..(28): Xaa is C or S
DLSAISILYLVGRTPKVLKNYQMVVKSXK

SEQ ID NO: 8561 - protein, 29 aa, Artificial Sequence
  Cyclic GFR-binding peptide
  MOD_RES (27)..(29): Xaa is C or S
SATSMLYYDENEKVVLRKHRDMVVEGXGX

SEQ ID NO: 8562 - protein, 32 aa, Artificial Sequence
  Cyclic GFR-binding peptide
  MOD_RES (4)..(4): Xaa is C or S
KPTXAPTKLSAISVLYLDDSSNVILKNYQNMV

SEQ ID NO: 8563 - protein, 30 aa, Artificial Sequence
  Cyclic GFR-binding peptide
  MOD_RES (1)..(1): Xaa is C or S
XVPQDLNAISILYFVGRTPKVLKKYRMVVK

SEQ ID NO: 8564 - protein, 25 aa, Artificial Sequence
  Cyclic GFR-binding peptide
LSATSMLYYDENEKVVLRKHRDMVV

SEQ ID NO: 8565 - protein, 21 aa, Artificial Sequence
  Cyclic GFR-binding peptide
SPISMLYKDENEKVVLKYHYD

SEQ ID NO: 8566 - protein, 27 aa, Artificial Sequence
  Cyclic GFR-binding peptide
APTKLSAISVLYLDDSSNVILKNYQNM

SEQ ID NO: 8567 - protein, 33 aa, Artificial Sequence
  Cyclic GFR-binding peptide
  MOD_RES (31)..(33): Xaa is C or S
TKLNAISVLYFDDMGVPTLKKYREGMSVAEXGX

SEQ ID NO: 8568 - protein, 30 aa, Artificial Sequence
  Cyclic GFR-binding peptide
  MOD_RES (1)..(2): Xaa is C or S
XXAPTKLSPISVLYKDSSNNVILKYHYNMV

SEQ ID NO: 8569 - protein, 36 aa, Artificial Sequence
  Cyclic GFR-binding peptide
  MOD_RES (2)..(3)..(35): Xaa is C or S
AXXAPTKLNAISVLYFDSSNNVILKKYRNMVVKAXG

SEQ ID NO: 8570 - protein, 38 aa, Artificial Sequence
  Cyclic GFR-binding peptide
  MOD_RES (5)..(6)..(37): Xaa is C or S
SAAPXXVPQALSPISILYKVGRKPKVLKYHYMIVRSXK

SEQ ID NO: 8571 - protein, 38 aa, Artificial Sequence
  Cyclic GFR-binding peptide
  MOD_RES (3)..(4)..(36)..(38): Xaa is C or S
KPXXAPTKLSAISVLYLDDSSNVILKNYQNMVVRSXGX

SEQ ID NO: 8572 - protein, 31 aa, Artificial Sequence
  Cyclic GFR-binding peptide
TQVQLSPISVLYKEIVRKKPIFLKYHYTLED

SEQ ID NO: 8573 - protein, 33 aa, Artificial Sequence
  Cyclic GFR-binding peptide
  MOD_RES (2)..(2): Xaa is C or S
QXRPTQVQLSATSVLYYEIVRKKPIFLRKHRTL

SEQ ID NO: 8574 - protein, 26 aa, Artificial Sequence
  Cyclic GFR-binding peptide
PTELNAISMLYFDEYDKVVLKKYREM

SEQ ID NO: 8575 - protein, 28 aa, Artificial Sequence
  Cyclic GFR-binding peptide
VPQALNAISILYFVGRKPKVLKKYRMIV

SEQ ID NO: 8576 - protein, 37 aa, Artificial Sequence
  Cyclic GFR-binding peptide
  MOD_RES (5)..(6)..(37): Xaa is C or S
SASPXXVPQDLSAISILYLVGRTPKVLKNYQMVVKSX

SEQ ID NO: 8577 - protein, 29 aa, Artificial Sequence
  Cyclic GFR-binding peptide
  MOD_RES (1)..(1): Xaa is C or S
XVPQALNAISILYFVGRKPKVLKKYRMIV

SEQ ID NO: 8578 - protein, 38 aa, Artificial Sequence
  Cyclic GFR-binding peptide
  MOD_RES (1)..(38): Xaa is C or S
XRPTQVQLSPISVLYKEIVRKKPIFLKYHYTLEDHLAX

SEQ ID NO: 8579 - protein, 37 aa, Artificial Sequence
  Cyclic GFR-binding peptide
  MOD_RES (3)..(4)..(35)..(37): Xaa is C or S
SPXXVSQDLSATSILYYIGKTPKILRKHRMIVKSXKX

SEQ ID NO: 8580 - protein, 24 aa, Artificial Sequence
  Cyclic GFR-binding peptide
TELNAISMLYFDEYDKVVLKKYRE

SEQ ID NO: 8581 - protein, 30 aa, Artificial Sequence
  Cyclic GFR-binding peptide
  MOD_RES (28)..(30): Xaa is C or S
DLSATSILYYVGRTPKVLRKHRMVVKSXKX

SEQ ID NO: 8582 - protein, 40 aa, Artificial Sequence
  Cyclic GFR-binding peptide
  MOD_RES (4)..(4): Xaa is C or S
NVQXRPTQVQLSATSVLYYEIVRKKPIFLRKHRTLEDHLA

SEQ ID NO: 8583 - protein, 31 aa, Artificial Sequence
  Cyclic GFR-binding peptide
TQVQLSAISVLYLEIVRKKPIFLKNYQTLED

SEQ ID NO: 8584 - protein, 23 aa, Artificial Sequence
  Cyclic GFR-binding peptide
KLNAISVLYFDSSNNVILKKYRN

SEQ ID NO: 8585 - protein, 31 aa, Artificial Sequence
  Cyclic GFR-binding peptide
  MOD_RES (29)..(31): Xaa is C or S
KLSPISVLYKDSSNNVILKYHYNMVVKAXGX

SEQ ID NO: 8586 - protein, 33 aa, Artificial Sequence
  Cyclic GFR-binding peptide
  MOD_RES (31)..(33): Xaa is C or S
PTKLNAISVLYFDSSNNVILKKYRNMVVKAXGX

SEQ ID NO: 8587 - protein, 32 aa, Artificial Sequence
  Cyclic GFR-binding peptide
  MOD_RES (32)..(32): Xaa is C or S
APTKLSAISVLYLDSSNNVILKNYQNMVVKAX

SEQ ID NO: 8588 - protein, 34 aa, Artificial Sequence
  Cyclic GFR-binding peptide
  MOD_RES (1)..(33): Xaa is C or S
XVPTELSATSMLYYDEYDKVVLRKHREMVVEGXG

SEQ ID NO: 8589 - protein, 27 aa, Artificial Sequence
  Cyclic GFR-binding peptide
SAISILYLVGRKPKVLKNYQVGRKPKV

SEQ ID NO: 8590 - protein, 25 aa, Artificial Sequence
  Cyclic GFR-binding peptide
SPISMLYKDENEKVVLKYHYDMVVE

SEQ ID NO: 8591 - protein, 29 aa, Artificial Sequence
  Cyclic GFR-binding peptide
  MOD_RES (1)..(1): Xaa is C or S
XVPTELSPISMLYKDENEKVVLKYHYDMV

SEQ ID NO: 8592 - protein, 26 aa, Artificial Sequence
  Cyclic GFR-binding peptide
PTKLSAISVLYLDDMGVPTLKNYQEG

SEQ ID NO: 8593 - protein, 39 aa, Artificial Sequence
  Cyclic GFR-binding peptide
  MOD_RES (5)..(6)..(39): Xaa is C or S
VGKAXXVPTKLSAISVLYLDDMGVPTLKNYQEGMSVAEX

SEQ ID NO: 8594 - protein, 28 aa, Artificial Sequence
  Cyclic GFR-binding peptide
  MOD_RES (1)..(1): Xaa is C or S
XAPTQLSAISVLYLDDSSNVILKNYQNM

SEQ ID NO: 8595 - protein, 32 aa, Artificial Sequence
  Cyclic GFR-binding peptide
  MOD_RES (31)..(31): Xaa is C or S
TKLNAISVLYFDDMGVPTLKKYREGMSVAEXG

SEQ ID NO: 8596 - protein, 27 aa, Artificial Sequence
  Cyclic GFR-binding peptide
  MOD_RES (2)..(2): Xaa is C or S
TXAPTKLSAISVLYLDDSSNVILKNYQ

SEQ ID NO: 8597 - protein, 30 aa, Artificial Sequence
  Cyclic GFR-binding peptide
  MOD_RES (30)..(30): Xaa is C or S
PQDLSPISILYKVGRTPKVLKYHYMVVKSX

SEQ ID NO: 8598 - protein, 33 aa, Artificial Sequence
  Cyclic GFR-binding peptide
  MOD_RES (30)..(32): Xaa is C or S
SQDLSPISILYKIGKTPKILKYHYMIVKSXKXS

SEQ ID NO: 8599 - protein, 36 aa, Artificial Sequence
  Cyclic GFR-binding peptide
  MOD_RES (1)..(1): Xaa is C or S
XRPTQVQLSAISVLYLEIVRKKPIFLKNYQTLEDHL

SEQ ID NO: 8600 - protein, 27 aa, Artificial Sequence
  Cyclic GFR-binding peptide
SAISVLYLDDMGVPTLKNYQDDMGVPT

SEQ ID NO: 8601 - protein, 33 aa, Artificial Sequence
  Cyclic GFR-binding peptide
  MOD_RES (1)..(2)..(33): Xaa is C or S
XXVPQALSATSILYYVGRKPKVLRKHRMIVRSX

SEQ ID NO: 8602 - protein, 35 aa, Artificial Sequence
  Cyclic GFR-binding peptide
  MOD_RES (5)..(6): Xaa is C or S
IPKAXXVPTELSPISMLYKDEYDKVVLKYHYEMVV

SEQ ID NO: 8603 - protein, 37 aa, Artificial Sequence
  Cyclic GFR-binding peptide
  MOD_RES (1)..(2)..(35)..(37): Xaa is C or S
XXVPTKLSATSVLYYDDMGVPTLRKHREGMSVAEXGX

SEQ ID NO: 8604 - protein, 24 aa, Artificial Sequence
  Cyclic GFR-binding peptide
PTQLSAISVLYLDDSSNVILKNYQ

SEQ ID NO: 8605 - protein, 28 aa, Artificial Sequence
  Cyclic GFR-binding peptide
LSAISVLYLDDMGVPTLKNYQEGMSVAE

SEQ ID NO: 8606 - protein, 29 aa, Artificial Sequence
  Cyclic GFR-binding peptide
  MOD_RES (3)..(4): Xaa is C or S
KAXXVPTKLSATSVLYYDDMGVPTLRKHR

SEQ ID NO: 8607 - protein, 36 aa, Artificial Sequence
  Cyclic GFR-binding peptide
  MOD_RES (6)..(7): Xaa is C or S
TVPKPXXAPTQLSAISVLYLDDSSNVILKNYQNMVV

SEQ ID NO: 8608 - protein, 41 aa, Artificial Sequence
  Cyclic GFR-binding peptide
  MOD_RES (3)..(40): Xaa is C or S
VQXRPTQVQLNAISVLYFEIVRKKPIFLKKYRTLEDHLAXK

SEQ ID NO: 8609 - protein, 32 aa, Artificial Sequence
  Cyclic GFR-binding peptide
  MOD_RES (29)..(31): Xaa is C or S
QLSPISVLYKDDSSNVILKYHYNMVVRAXGXH

SEQ ID NO: 8610 - protein, 30 aa, Artificial Sequence
  Cyclic GFR-binding peptide
  MOD_RES (2)..(3): Xaa is C or S
PXXVSQDLSAISILYLIGKTPKILKNYQMI

SEQ ID NO: 8611 - protein, 32 aa, Artificial Sequence
  Cyclic GFR-binding peptide
  MOD_RES (5)..(6): Xaa is C or S
IPKAXXVPTELSPISMLYKDEYDKVVLKYHYE

SEQ ID NO: 8612 - protein, 34 aa, Artificial Sequence
  Cyclic GFR-binding peptide
  MOD_RES (5)..(6): Xaa is C or S
IPKAXXVPTELNAISMLYFDENEKVVLKKYRDMV

SEQ ID NO: 8613 - protein, 38 aa, Artificial Sequence
  Cyclic GFR-binding peptide
  MOD_RES (2)..(3)..(35)..(37): Xaa is C or S
AXXVPTELNAISMLYFDENEKVVLKKYRDMVVEGXGXR

SEQ ID NO: 8614 - protein, 35 aa, Artificial Sequence
  Cyclic GFR-binding peptide
  MOD_RES (2)..(34): Xaa is C or S
TXAPTKLSAISVLYLDDSSNVILKNYQNMVVRSXG

SEQ ID NO: 8615 - protein, 34 aa, Artificial Sequence
  Cyclic GFR-binding peptide
  MOD_RES (4)..(4): Xaa is C or S
KPTXAPTKLSATSVLYYDDSSNVILRKHRNMVVR

SEQ ID NO: 8616 - protein, 28 aa, Artificial Sequence
  Cyclic GFR-binding peptide
  MOD_RES (1)..(2): Xaa is C or S
XXAPTQLSATSVLYYDDSSNVILRKHRN

SEQ ID NO: 8617 - protein, 26 aa, Artificial Sequence
  Cyclic GFR-binding peptide
VPTKLSAISVLYLDDMGVPTLKNYQE

SEQ ID NO: 8618 - protein, 32 aa, Artificial Sequence
  Cyclic GFR-binding peptide
  MOD_RES (31)..(31): Xaa is C or S
VPQALNAISILYFVGRKPKVLKKYRMIVRSXK

SEQ ID NO: 8619 - protein, 45 aa, Artificial Sequence
  Cyclic GFR-binding peptide
  MOD_RES (5)..(42)..(44): Xaa is C or S
RNVQXRPTQVQLNAISVLYFEIVRKKPIFLKKYRTLEDHLAXKXE

SEQ ID NO: 8620 - protein, 23 aa, Artificial Sequence
  Cyclic GFR-binding peptide
LSAISVLYLDDMGVPTLKNYQEG

SEQ ID NO: 8621 - protein, 35 aa, Artificial Sequence
  Cyclic GFR-binding peptide
  MOD_RES (3)..(4)..(35): Xaa is C or S
SPXXVSQDLSPISILYKIGKTPKILKYHYMIVKSX

SEQ ID NO: 8622 - protein, 31 aa, Artificial Sequence
  Cyclic GFR-binding peptide
PTQVQLSAISVLYLEIVRKKPIFLKNYQTLE

SEQ ID NO: 8623 - protein, 22 aa, Artificial Sequence
  Cyclic GFR-binding peptide
ELSPISMLYKDENEKVVLKYHY

SEQ ID NO: 8624 - protein, 31 aa, Artificial Sequence
  Cyclic GFR-binding peptide
  MOD_RES (29)..(31): Xaa is C or S
KLSAISVLYLDDSSNVILKNYQNMVVRSXGX

SEQ ID NO: 8625 - protein, 35 aa, Artificial Sequence
  Cyclic GFR-binding peptide
  MOD_RES (3)..(4): Xaa is C or S
KAXXAPTKLSAISVLYLDSSNNVILKNYQNMVVKA

SEQ ID NO: 8626 - protein, 35 aa, Artificial Sequence
  Cyclic GFR-binding peptide
  MOD_RES (3)..(4): Xaa is C or S
KPXXAPTKLSATSVLYYDDSSNVILRKHRNMVVRS

SEQ ID NO: 8627 - protein, 33 aa, Artificial Sequence
  Cyclic GFR-binding peptide
  MOD_RES (6)..(7): Xaa is C or S
SIPKAXXVPTELNAISMLYFDEYDKVVLKKYRE

SEQ ID NO: 8628 - protein, 33 aa, Artificial Sequence
  Cyclic GFR-binding peptide
TQVQLNAISVLYFEIVRKKPIFLKKYRTLEDHL

SEQ ID NO: 8629 - protein, 30 aa, Artificial Sequence
  Cyclic GFR-binding peptide
  MOD_RES (4)..(5): Xaa is C or S
PKPXXAPTQLSAISVLYLDDSSNVILKNYQ

SEQ ID NO: 8630 - protein, 30 aa, Artificial Sequence
  Cyclic GFR-binding peptide
  MOD_RES (29)..(29): Xaa is C or S
ELSATSMLYYDEYDKVVLRKHREMVVEGXG

SEQ ID NO: 8631 - protein, 29 aa, Artificial Sequence
  Cyclic GFR-binding peptide
  MOD_RES (1)..(2): Xaa is C or S
XXVPTKLSATSVLYYDDMGVPTLRKHREG

SEQ ID NO: 8632 - protein, 43 aa, Artificial Sequence
  Cyclic GFR-binding peptide
  MOD_RES (3)..(40)..(42): Xaa is C or S
VQXRPTQVQLSPISVLYKEIVRKKPIFLKYHYTLEDHLAXKXE

SEQ ID NO: 8633 - protein, 26 aa, Artificial Sequence
  Cyclic GFR-binding peptide
LNAISVLYFDDMGVPTLKKYREGMSV

SEQ ID NO: 8634 - protein, 31 aa, Artificial Sequence
  Cyclic GFR-binding peptide
  MOD_RES (3)..(4): Xaa is C or S
SPXXVPQDLNAISILYFVGRTPKVLKKYRMV

SEQ ID NO: 8635 - protein, 37 aa, Artificial Sequence
  Cyclic GFR-binding peptide
  MOD_RES (5)..(6)..(37): Xaa is C or S
SAAPXXVPQALSPISILYKVGRKPKVLKYHYMIVRSX

SEQ ID NO: 8636 - protein, 22 aa, Artificial Sequence
  Cyclic GFR-binding peptide
LNAISMLYFDEYDKVVLKKYRE

SEQ ID NO: 8637 - protein, 25 aa, Artificial Sequence
  Cyclic GFR-binding peptide
LNAISVLYFDSSNNVILKKYRNMVV

SEQ ID NO: 8638 - protein, 27 aa, Artificial Sequence
  Cyclic GFR-binding peptide
  MOD_RES (26)..(26): Xaa is C or S
SATSILYYVGRKPKVLRKHRMIVRSXK

SEQ ID NO: 8639 - protein, 30 aa, Artificial Sequence
  Cyclic GFR-binding peptide
  MOD_RES (2)..(3): Xaa is C or S
PXXAPTQLSATSVLYYDDSSNVILRKHRNM

SEQ ID NO: 8640 - protein, 38 aa, Artificial Sequence
  Cyclic GFR-binding peptide
  MOD_RES (5)..(5): Xaa is C or S
RNVQXRPTQVQLSATSVLYYEIVRKKPIFLRKHRTLED

SEQ ID NO: 8641 - protein, 28 aa, Artificial Sequence
  Cyclic GFR-binding peptide
LNAISVLYFDDMGVPTLKKYREGMSVAE

SEQ ID NO: 8642 - protein, 23 aa, Artificial Sequence
  Cyclic GFR-binding peptide
NAISILYFVGRKPKVLKKYRMIV

SEQ ID NO: 8643 - protein, 38 aa, Artificial Sequence
  Cyclic GFR-binding peptide
  MOD_RES (4)..(5)..(36)..(38): Xaa is C or S
ASPXXVSQDLSATSILYYIGKTPKILRKHRMIVKSXKX

SEQ ID NO: 8644 - protein, 30 aa, Artificial Sequence
  Cyclic GFR-binding peptide
VSQDLSAISILYLIGKTPKILKNYQMIVKS

SEQ ID NO: 8645 - protein, 24 aa, Artificial Sequence
  Cyclic GFR-binding peptide
PTELSPISMLYKDEYDKVVLKYHY

SEQ ID NO: 8646 - protein, 39 aa, Artificial Sequence
  Cyclic GFR-binding peptide
  MOD_RES (6)..(38): Xaa is C or S
VTKPTXAPTKLSPISVLYKDDSSNVILKYHYNMVVRSXG

SEQ ID NO: 8647 - protein, 35 aa, Artificial Sequence
  Cyclic GFR-binding peptide
  MOD_RES (4)..(4): Xaa is C or S
KPTXAPTKLSATSVLYYDDSSNVILRKHRNMVVRS

SEQ ID NO: 8648 - protein, 38 aa, Artificial Sequence
  Cyclic GFR-binding peptide
  MOD_RES (2)..(3)..(35)..(37): Xaa is C or S
PXXAPTQLSATSVLYYDDSSNVILRKHRNMVVRAXGXH

SEQ ID NO: 8649 - protein, 41 aa, Artificial Sequence
  Cyclic GFR-binding peptide
  MOD_RES (4)..(41): Xaa is C or S
NVQXRPTQVQLSAISVLYLEIVRKKPIFLKNYQTLEDHLAX

SEQ ID NO: 8650 - protein, 30 aa, Artificial Sequence
  Cyclic GFR-binding peptide
LSATSVLYYEIVRKKPIFLRKHRTLEDHLA

SEQ ID NO: 8651 - protein, 28 aa, Artificial Sequence
  Cyclic GFR-binding peptide
TELSPISMLYKDENEKVVLKYHYDMVVE

SEQ ID NO: 8652 - protein, 29 aa, Artificial Sequence
  Cyclic GFR-binding peptide
  MOD_RES (27)..(29): Xaa is C or S
LNAISILYFVGRTPKVLKKYRMVVKSXKX

SEQ ID NO: 8653 - protein, 28 aa, Artificial Sequence
  Cyclic GFR-binding peptide
  MOD_RES (28)..(28): Xaa is C or S
DLNAISILYFIGKTPKILKKYRMIVKSX

SEQ ID NO: 8654 - protein, 40 aa, Artificial Sequence
  Cyclic GFR-binding peptide
  MOD_RES (6)..(7)..(38)..(40): Xaa is C or S
ASASPXXVSQDLNAISILYFIGKTPKILKKYRMIVKSXKX

SEQ ID NO: 8655 - protein, 38 aa, Artificial Sequence
  Cyclic GFR-binding peptide
  MOD_RES (5)..(6)..(38): Xaa is C or S
VPKAXXAPTKLSAISVLYLDSSNNVILKNYQNMVVKAX

SEQ ID NO: 8656 - protein, 38 aa, Artificial Sequence
  Cyclic GFR-binding peptide
  MOD_RES (6)..(7)..(38): Xaa is C or S
ASASPXXVSQDLNAISILYFIGKTPKILKKYRMIVKSX

SEQ ID NO: 8657 - protein, 27 aa, Artificial Sequence
  Cyclic GFR-binding peptide
PTELSPISMLYKDENEKVVLKYHYDMV

SEQ ID NO: 8658 - protein, 35 aa, Artificial Sequence
  Cyclic GFR-binding peptide
  MOD_RES (6)..(7): Xaa is C or S
YVPKPXXAPTKLSATSVLYYDDSSNVILRKHRNMV

SEQ ID NO: 8659 - protein, 39 aa, Artificial Sequence
  Cyclic GFR-binding peptide
  MOD_RES (5)..(6)..(37)..(39): Xaa is C or S
SASPXXVPQDLNAISILYFVGRTPKVLKKYRMVVKSXKX

SEQ ID NO: 8660 - protein, 38 aa, Artificial Sequence
  Cyclic GFR-binding peptide
  MOD_RES (3)..(4)..(37): Xaa is C or S
KAXXVPTKLNAISVLYFDDMGVPTLKKYREGMSVAEXG

SEQ ID NO: 8661 - protein, 26 aa, Artificial Sequence
  Cyclic GFR-binding peptide
PTKLNAISVLYFDDMGVPTLKKYREG

SEQ ID NO: 8662 - protein, 26 aa, Artificial Sequence
  Cyclic GFR-binding peptide
SAISVLYLDDSSNVILKNYQNMVVRS

SEQ ID NO: 8663 - protein, 31 aa, Artificial Sequence
  Cyclic GFR-binding peptide
  MOD_RES (2)..(3): Xaa is C or S
PXXVSQDLSATSILYYIGKTPKILRKHRMIV

SEQ ID NO: 8664 - protein, 27 aa, Artificial Sequence
  Cyclic GFR-binding peptide
APTKLSPISVLYKDDSSNVILKYHYNM

SEQ ID NO: 8665 - protein, 33 aa, Artificial Sequence
  Cyclic GFR-binding peptide
  MOD_RES (4)..(4): Xaa is C or S
KPTXAPTKLSPISVLYKDDSSNVILKYHYNMVV

SEQ ID NO: 8666 - protein, 29 aa, Artificial Sequence
  Cyclic GFR-binding peptide
  MOD_RES (2)..(3): Xaa is C or S
PXXVPQALSATSILYYVGRKPKVLRKHRM

SEQ ID NO: 8667 - protein, 29 aa, Artificial Sequence
  Cyclic GFR-binding peptide
  MOD_RES (27)..(29): Xaa is C or S
SATSMLYYDEYDKVVLRKHREMVVEGXGX

SEQ ID NO: 8668 - protein, 34 aa, Artificial Sequence
  Cyclic GFR-binding peptide
  MOD_RES (3)..(4): Xaa is C or S
SPXXVPQDLSAISILYLVGRTPKVLKNYQMVVKS

SEQ ID NO: 8669 - protein, 38 aa, Artificial Sequence
  Cyclic GFR-binding peptide
  MOD_RES (4)..(5)..(36)..(38): Xaa is C or S
ASPXXVPQDLSPISILYKVGRTPKVLKYHYMVVKSXKX

SEQ ID NO: 8670 - protein, 30 aa, Artificial Sequence
  Cyclic GFR-binding peptide
LSAISVLYLEIVRKKPIFLKNYQTLEDHLA

SEQ ID NO: 8671 - protein, 37 aa, Artificial Sequence
  Cyclic GFR-binding peptide
  MOD_RES (4)..(5)..(37): Xaa is C or S
PKAXXVPTELSPISMLYKDEYDKVVLKYHYEMVVEGX

SEQ ID NO: 8672 - protein, 37 aa, Artificial Sequence
  Cyclic GFR-binding peptide
  MOD_RES (5)..(37): Xaa is C or S
TKPTXAPTKLSATSVLYYDDSSNVILRKHRNMVVRSX

SEQ ID NO: 8673 - protein, 31 aa, Artificial Sequence
  Cyclic GFR-binding peptide
  MOD_RES (28)..(30): Xaa is C or S
DLNAISILYFIGKTPKILKKYRMIVKSXKXS

SEQ ID NO: 8674 - protein, 32 aa, Artificial Sequence
  Cyclic GFR-binding peptide
  MOD_RES (4)..(5): Xaa is C or S
PKAXXVPTELSPISMLYKDENEKVVLKYHYDM

SEQ ID NO: 8675 - protein, 24 aa, Artificial Sequence
  Cyclic GFR-binding peptide
TQLSPISVLYKDDSSNVILKYHYN

SEQ ID NO: 8676 - protein, 36 aa, Artificial Sequence
  Cyclic GFR-binding peptide
  MOD_RES (1)..(2)..(33)..(35): Xaa is C or S
XXVPQALSAISILYLVGRKPKVLKNYQMIVRSXKXS

SEQ ID NO: 8677 - protein, 34 aa, Artificial Sequence
  Cyclic GFR-binding peptide
  MOD_RES (31)..(33): Xaa is C or S
PTELSPISMLYKDENEKVVLKYHYDMVVEGXGXR

SEQ ID NO: 8678 - protein, 36 aa, Artificial Sequence
  Cyclic GFR-binding peptide
  MOD_RES (3)..(4)..(36): Xaa is C or S
KAXXVPTELNAISMLYFDEYDKVVLKKYREMVVEGX

SEQ ID NO: 8679 - protein, 32 aa, Artificial Sequence
  Cyclic GFR-binding peptide
  MOD_RES (1)..(1): Xaa is C or S
XRPTQVQLSPISVLYKEIVRKKPIFLKYHYTL

SEQ ID NO: 8680 - protein, 37 aa, Artificial Sequence
  Cyclic GFR-binding peptide
  MOD_RES (35)..(37): Xaa is C or S
TQVQLSAISVLYLEIVRKKPIFLKNYQTLEDHLAXKX

SEQ ID NO: 8681 - protein, 24 aa, Artificial Sequence
  Cyclic GFR-binding peptide
ELSATSMLYYDENEKVVLRKHRDM

SEQ ID NO: 8682 - protein, 36 aa, Artificial Sequence
  Cyclic GFR-binding peptide
  MOD_RES (5)..(6): Xaa is C or S
VPKPXXAPTQLSAISVLYLDDSSNVILKNYQNMVVR

SEQ ID NO: 8683 - protein, 37 aa, Artificial Sequence
  Cyclic GFR-binding peptide
  MOD_RES (1)..(2)..(34)..(36): Xaa is C or S
XXVPTELSPISMLYKDENEKVVLKYHYDMVVEGXGXR

SEQ ID NO: 8684 - protein, 35 aa, Artificial Sequence
  Cyclic GFR-binding peptide
  MOD_RES (3)..(4)..(35): Xaa is C or S
SPXXVPQDLSPISILYKVGRTPKVLKYHYMVVKSX

SEQ ID NO: 8685 - protein, 35 aa, Artificial Sequence
  Cyclic GFR-binding peptide
  MOD_RES (4)..(5): Xaa is C or S
AAPXXVPQALSAISILYLVGRKPKVLKNYQMIVRS

SEQ ID NO: 8686 - protein, 35 aa, Artificial Sequence
  Cyclic GFR-binding peptide
RPTQVQLNAISVLYFEIVRKKPIFLKKYRTLEDHL

SEQ ID NO: 8687 - protein, 37 aa, Artificial Sequence
  Cyclic GFR-binding peptide
  MOD_RES (5)..(6)..(37): Xaa is C or S
SASPXXVPQDLNAISILYFVGRTPKVLKKYRMVVKSX

SEQ ID NO: 8688 - protein, 39 aa, Artificial Sequence
  Cyclic GFR-binding peptide
  MOD_RES (2)..(3)..(36)..(38): Xaa is C or S
AXXVPTKLSAISVLYLDDMGVPTLKNYQEGMSVAEXGXR

SEQ ID NO: 8689 - protein, 34 aa, Artificial Sequence
  Cyclic GFR-binding peptide
  MOD_RES (4)..(4): Xaa is C or S
NVQXRPTQVQLSATSVLYYEIVRKKPIFLRKHRT

SEQ ID NO: 8690 - protein, 37 aa, Artificial Sequence
  Cyclic GFR-binding peptide
  MOD_RES (4)..(5)..(37): Xaa is C or S
PKAXXVPTELNAISMLYFDEYDKVVLKKYREMVVEGX

SEQ ID NO: 8691 - protein, 26 aa, Artificial Sequence
  Cyclic GFR-binding peptide
LSATSVLYYDDMGVPTLRKHREGMSV

SEQ ID NO: 8692 - protein, 28 aa, Artificial Sequence
  Cyclic GFR-binding peptide
VPTELSPISMLYKDENEKVVLKYHYDMV

SEQ ID NO: 8693 - protein, 31 aa, Artificial Sequence
  Cyclic GFR-binding peptide
  MOD_RES (2)..(3): Xaa is C or S
PXXAPTQLSATSVLYYDDSSNVILRKHRNMV

SEQ ID NO: 8694 - protein, 29 aa, Artificial Sequence
  Cyclic GFR-binding peptide
TKLSAISVLYLDDMGVPTLKNYQEGMSVA

SEQ ID NO: 8695 - protein, 42 aa, Artificial Sequence
  Cyclic GFR-binding peptide
  MOD_RES (6)..(7)..(39)..(41): Xaa is C or S
TVPKPXXAPTQLSPISVLYKDDSSNVILKYHYNMVVRAXGXH

SEQ ID NO: 8696 - protein, 38 aa, Artificial Sequence
  Cyclic GFR-binding peptide
  MOD_RES (4)..(5)..(37): Xaa is C or S
PKPXXAPTQLSPISVLYKDDSSNVILKYHYNMVVRAXG

SEQ ID NO: 8697 - protein, 39 aa, Artificial Sequence
  Cyclic GFR-binding peptide
  MOD_RES (5)..(6)..(38): Xaa is C or S
VPKPXXAPTQLSATSVLYYDDSSNVILRKHRNMVVRAXG

SEQ ID NO: 8698 - protein, 38 aa, Artificial Sequence
  Cyclic GFR-binding peptide
  MOD_RES (4)..(5)..(36)..(38): Xaa is C or S
ASPXXVPQDLSATSILYYVGRTPKVLRKHRMVVKSXKX

SEQ ID NO: 8699 - protein, 21 aa, Artificial Sequence
  Cyclic GFR-binding peptide
SPISVLYKDDSSNVILKYHYN

SEQ ID NO: 8700 - protein, 35 aa, Artificial Sequence
  Cyclic GFR-binding peptide
  MOD_RES (3)..(4)..(35): Xaa is C or S
SPXXVSQDLSATSILYYIGKTPKILRKHRMIVKSX

SEQ ID NO: 8701 - protein, 27 aa, Artificial Sequence
  Cyclic GFR-binding peptide
PQALNAISILYFVGRKPKVLKKYRMIV

SEQ ID NO: 8702 - protein, 37 aa, Artificial Sequence
  Cyclic GFR-binding peptide
  MOD_RES (1)..(2)..(34)..(36): Xaa is C or S
XXAPTKLSAISVLYLDSSNNVILKNYQNMVVKAXGXH

SEQ ID NO: 8703 - protein, 35 aa, Artificial Sequence
  Cyclic GFR-binding peptide
  MOD_RES (6)..(7): Xaa is C or S
SIPKAXXVPTELSPISMLYKDEYDKVVLKYHYEMV

SEQ ID NO: 8704 - protein, 24 aa, Artificial Sequence
  Cyclic GFR-binding peptide
SPISVLYKDSSNNVILKYHYNMVV

SEQ ID NO: 8705 - protein, 34 aa, Artificial Sequence
  Cyclic GFR-binding peptide
  MOD_RES (3)..(3): Xaa is C or S
VQXRPTQVQLNAISVLYFEIVRKKPIFLKKYRTL

SEQ ID NO: 8706 - protein, 29 aa, Artificial Sequence
  Cyclic GFR-binding peptide
  MOD_RES (28)..(28): Xaa is C or S
NAISVLYFDDMGVPTLKKYREGMSVAEXG

SEQ ID NO: 8707 - protein, 34 aa, Artificial Sequence
  Cyclic GFR-binding peptide
  MOD_RES (5)..(6): Xaa is C or S
IPKAXXVPTELSATSMLYYDENEKVVLRKHRDMV

SEQ ID NO: 8708 - protein, 35 aa, Artificial Sequence
  Cyclic GFR-binding peptide
  MOD_RES (1)..(33)..(35): Xaa is C or S
XAPTKLNAISVLYFDSSNNVILKKYRNMVVKAXGX

SEQ ID NO: 8709 - protein, 32 aa, Artificial Sequence
  Cyclic GFR-binding peptide
  MOD_RES (31)..(31): Xaa is C or S
VPQALSPISILYKVGRKPKVLKYHYMIVRSXK

SEQ ID NO: 8710 - protein, 29 aa, Artificial Sequence
  Cyclic GFR-binding peptide
LSPISVLYKEIVRKKPIFLKYHYTLEDHL

SEQ ID NO: 8711 - protein, 29 aa, Artificial Sequence
  Cyclic GFR-binding peptide
  MOD_RES (27)..(29): Xaa is C or S
SPISVLYKDDSSNVILKYHYNMVVRAXGX

SEQ ID NO: 8712 - protein, 26 aa, Artificial Sequence
  Cyclic GFR-binding peptide
SAISVLYLDDSSNVILKNYQNMVVRA

SEQ ID NO: 8713 - protein, 31 aa, Artificial Sequence
  Cyclic GFR-binding peptide
  MOD_RES (2)..(2): Xaa is C or S
TXAPTKLSATSVLYYDDSSNVILRKHRNMVV

SEQ ID NO: 8714 - protein, 27 aa, Artificial Sequence
  Cyclic GFR-binding peptide
LSPISVLYKEIVRKKPIFLKYHYTLED

SEQ ID NO: 8715 - protein, 32 aa, Artificial Sequence
  Cyclic GFR-binding peptide
  MOD_RES (6)..(7): Xaa is C or S
ASASPXXVPQDLSPISILYKVGRTPKVLKYHY

SEQ ID NO: 8716 - protein, 36 aa, Artificial Sequence
  Cyclic GFR-binding peptide
  MOD_RES (5)..(6): Xaa is C or S
VPKAXXAPTKLSAISVLYLDSSNNVILKNYQNMVVK

SEQ ID NO: 8717 - protein, 35 aa, Artificial Sequence
  Cyclic GFR-binding peptide
  MOD_RES (2)..(3)..(35): Xaa is C or S
PXXAPTKLSATSVLYYDDSSNVILRKHRNMVVRSX

SEQ ID NO: 8718 - protein, 39 aa, Artificial Sequence
  Cyclic GFR-binding peptide
  MOD_RES (4)..(36)..(38): Xaa is C or S
KPTXAPTKLSAISVLYLDDSSNVILKNYQNMVVRSXGXH

SEQ ID NO: 8719 - protein, 24 aa, Artificial Sequence
  Cyclic GFR-binding peptide
KLSPISVLYKDDSSNVILKYHYNM

SEQ ID NO: 8720 - protein, 42 aa, Artificial Sequence
  Cyclic GFR-binding peptide
  MOD_RES (6)..(7)..(39)..(41): Xaa is C or S
AVPKAXXAPTKLNAISVLYFDSSNNVILKKYRNMVVKAXGXH

SEQ ID NO: 8721 - protein, 31 aa, Artificial Sequence
  Cyclic GFR-binding peptide
  MOD_RES (3)..(4): Xaa is C or S
SPXXVSQDLSAISILYLIGKTPKILKNYQMI

SEQ ID NO: 8722 - protein, 36 aa, Artificial Sequence
  Cyclic GFR-binding peptide
  MOD_RES (6)..(7): Xaa is C or S
AVPKAXXAPTKLSPISVLYKDSSNNVILKYHYNMVV

SEQ ID NO: 8723 - protein, 33 aa, Artificial Sequence
  Cyclic GFR-binding peptide
  MOD_RES (5)..(6): Xaa is C or S
SAAPXXVPQALSPISILYKVGRKPKVLKYHYMI

SEQ ID NO: 8724 - protein, 40 aa, Artificial Sequence
  Cyclic GFR-binding peptide
  MOD_RES (6)..(7)..(39): Xaa is C or S
KIPKAXXVPTELSPISMLYKDENEKVVLKYHYDMVVEGXG

SEQ ID NO: 8725 - protein, 27 aa, Artificial Sequence
  Cyclic GFR-binding peptide
QVQLSAISVLYLEIVRKKPIFLKNYQT

SEQ ID NO: 8726 - protein, 27 aa, Artificial Sequence
  Cyclic GFR-binding peptide
VPTELNAISMLYFDEYDKVVLKKYREM

SEQ ID NO: 8727 - protein, 37 aa, Artificial Sequence
  Cyclic GFR-binding peptide
  MOD_RES (1)..(2)..(34)..(36): Xaa is C or S
XXAPTKLSPISVLYKDDSSNVILKYHYNMVVRSXGXH

SEQ ID NO: 8728 - protein, 29 aa, Artificial Sequence
  Cyclic GFR-binding peptide
  MOD_RES (1)..(2): Xaa is C or S
XXAPTKLSAISVLYLDDSSNVILKNYQNM

SEQ ID NO: 8729 - protein, 35 aa, Artificial Sequence
  Cyclic GFR-binding peptide
  MOD_RES (4)..(5): Xaa is C or S
AAPXXVPQALSPISILYKVGRKPKVLKYHYMIVRS

SEQ ID NO: 8730 - protein, 42 aa, Artificial Sequence
  Cyclic GFR-binding peptide
  MOD_RES (4)..(41): Xaa is C or S
NVQXRPTQVQLNAISVLYFEIVRKKPIFLKKYRTLEDHLAXK

SEQ ID NO: 8731 - protein, 37 aa, Artificial Sequence
  Cyclic GFR-binding peptide
  MOD_RES (5)..(6)..(37): Xaa is C or S
SAAPXXVPQALSATSILYYVGRKPKVLRKHRMIVRSX

SEQ ID NO: 8732 - protein, 30 aa, Artificial Sequence
  Cyclic GFR-binding peptide
  MOD_RES (3)..(4): Xaa is C or S
KAXXVPTELSATSMLYYDEYDKVVLRKHRE

SEQ ID NO: 8733 - protein, 30 aa, Artificial Sequence
  Cyclic GFR-binding peptide
PTELNAISMLYFDEYDKVVLKKYREMVVEG

SEQ ID NO: 8734 - protein, 40 aa, Artificial Sequence
  Cyclic GFR-binding peptide
  MOD_RES (4)..(4): Xaa is C or S
NVQXRPTQVQLSAISVLYLEIVRKKPIFLKNYQTLEDHLA

SEQ ID NO: 8735 - protein, 33 aa, Artificial Sequence
  Cyclic GFR-binding peptide
  MOD_RES (2)..(3): Xaa is C or S
AXXVPTKLSAISVLYLDDMGVPTLKNYQEGMSV

SEQ ID NO: 8736 - protein, 32 aa, Artificial Sequence
  Cyclic GFR-binding peptide
  MOD_RES (30)..(32): Xaa is C or S
SPISVLYKEIVRKKPIFLKYHYTLEDHLAXKX

SEQ ID NO: 8737 - protein, 34 aa, Artificial Sequence
  Cyclic GFR-binding peptide
  MOD_RES (1)..(2): Xaa is C or S
XXVPTKLNAISVLYFDDMGVPTLKKYREGMSVAE

SEQ ID NO: 8738 - protein, 32 aa, Artificial Sequence
  Cyclic GFR-binding peptide
  MOD_RES (5)..(6): Xaa is C or S
IPKAXXVPTELSATSMLYYDENEKVVLRKHRD

SEQ ID NO: 8739 - protein, 35 aa, Artificial Sequence
  Cyclic GFR-binding peptide
  MOD_RES (32)..(34): Xaa is C or S
QLNAISVLYFEIVRKKPIFLKKYRTLEDHLAXKXE

SEQ ID NO: 8740 - protein, 30 aa, Artificial Sequence
  Cyclic GFR-binding peptide
  MOD_RES (2)..(3): Xaa is C or S
AXXAPTKLNAISVLYFDSSNNVILKKYRNM

SEQ ID NO: 8741 - protein, 26 aa, Artificial Sequence
  Cyclic GFR-binding peptide
VPQALSAISILYLVGRKPKVLKNYQM

SEQ ID NO: 8742 - protein, 35 aa, Artificial Sequence
  Cyclic GFR-binding peptide
  MOD_RES (3)..(4): Xaa is C or S
KAXXAPTKLNAISVLYFDSSNNVILKKYRNMVVKA

SEQ ID NO: 8743 - protein, 29 aa, Artificial Sequence
  Cyclic GFR-binding peptide
  MOD_RES (3)..(4): Xaa is C or S
SPXXVSQDLSATSILYYIGKTPKILRKHR

SEQ ID NO: 8744 - protein, 28 aa, Artificial Sequence
  Cyclic GFR-binding peptide
QDLSATSILYYIGKTPKILRKHRMIVKS

SEQ ID NO: 8745 - protein, 27 aa, Artificial Sequence
  Cyclic GFR-binding peptide
  MOD_RES (1)..(1): Xaa is C or S
XAPTQLSATSVLYYDDSSNVILRKHRN

SEQ ID NO: 8746 - protein, 28 aa, Artificial Sequence
  Cyclic GFR-binding peptide
  MOD_RES (2)..(3): Xaa is C or S
AXXVPTELSPISMLYKDEYDKVVLKYHY

SEQ ID NO: 8747 - protein, 28 aa, Artificial Sequence
  Cyclic GFR-binding peptide
  MOD_RES (28)..(28): Xaa is C or S
LSAISVLYLDSSNNVILKNYQNMVVKAX

SEQ ID NO: 8748 - protein, 27 aa, Artificial Sequence
  Cyclic GFR-binding peptide
  MOD_RES (1)..(1): Xaa is C or S
XVPQDLSATSILYYVGRTPKVLRKHRM

SEQ ID NO: 8749 - protein, 28 aa, Artificial Sequence
  Cyclic GFR-binding peptide
  MOD_RES (27)..(27): Xaa is C or S
SPISVLYKDSSNNVILKYHYNMVVKAXG

SEQ ID NO: 8750 - protein, 38 aa, Artificial Sequence
  Cyclic GFR-binding peptide
  MOD_RES (3)..(4)..(35)..(37): Xaa is C or S
APXXVPQALSAISILYLVGRKPKVLKNYQMIVRSXKXS

SEQ ID NO: 8751 - protein, 30 aa, Artificial Sequence
  Cyclic GFR-binding peptide
  MOD_RES (30)..(30): Xaa is C or S
KLNAISVLYFDDMGVPTLKKYREGMSVAEX

SEQ ID NO: 8752 - protein, 28 aa, Artificial Sequence
  Cyclic GFR-binding peptide
KLSATSVLYYDDSSNVILRKHRNMVVRS

SEQ ID NO: 8753 - protein, 32 aa, Artificial Sequence
  Cyclic GFR-binding peptide
  MOD_RES (4)..(5): Xaa is C or S
PKAXXVPTELSATSMLYYDEYDKVVLRKHREM

SEQ ID NO: 8754 - protein, 30 aa, Artificial Sequence
  Cyclic GFR-binding peptide
  MOD_RES (2)..(3): Xaa is C or S
PXXAPTKLSATSVLYYDDSSNVILRKHRNM

SEQ ID NO: 8755 - protein, 25 aa, Artificial Sequence
  Cyclic GFR-binding peptide
DLSATSILYYVGRTPKVLRKHRMVV

SEQ ID NO: 8756 - protein, 29 aa, Artificial Sequence
  Cyclic GFR-binding peptide
  MOD_RES (2)..(3): Xaa is C or S
PXXAPTKLSAISVLYLDDSSNVILKNYQN

SEQ ID NO: 8757 - protein, 31 aa, Artificial Sequence
  Cyclic GFR-binding peptide
  MOD_RES (28)..(30): Xaa is C or S
ALSATSILYYVGRKPKVLRKHRMIVRSXKXS

SEQ ID NO: 8758 - protein, 38 aa, Artificial Sequence
  Cyclic GFR-binding peptide
  MOD_RES (6)..(7)..(38): Xaa is C or S
ASASPXXVPQDLNAISILYFVGRTPKVLKKYRMVVKSX

SEQ ID NO: 8759 - protein, 30 aa, Artificial Sequence
  Cyclic GFR-binding peptide
PTKLSATSVLYYDDSSNVILRKHRNMVVRS

SEQ ID NO: 8760 - protein, 34 aa, Artificial Sequence
  Cyclic GFR-binding peptide
  MOD_RES (2)..(3): Xaa is C or S
AXXVPTELNAISMLYFDENEKVVLKKYRDMVVEG

SEQ ID NO: 8761 - protein, 31 aa, Artificial Sequence
  Cyclic GFR-binding peptide
  MOD_RES (30)..(30): Xaa is C or S
TELSATSMLYYDENEKVVLRKHRDMVVEGXG

SEQ ID NO: 8762 - protein, 36 aa, Artificial Sequence
  Cyclic GFR-binding peptide
  MOD_RES (5)..(6): Xaa is C or S
VPKAXXAPTKLSPISVLYKDSSNNVILKYHYNMVVK

SEQ ID NO: 8763 - protein, 22 aa, Artificial Sequence
  Cyclic GFR-binding peptide
SPISVLYKDSSNNVILKYHYNM

SEQ ID NO: 8764 - protein, 31 aa, Artificial Sequence
  Cyclic GFR-binding peptide
  MOD_RES (3)..(4): Xaa is C or S
SPXXVPQDLSAISILYLVGRTPKVLKNYQMV

SEQ ID NO: 8765 - protein, 21 aa, Artificial Sequence
  Cyclic GFR-binding peptide
NAISILYFVGRKPKVLKKYRM

SEQ ID NO: 8766 - protein, 31 aa, Artificial Sequence
  Cyclic GFR-binding peptide
  MOD_RES (2)..(3): Xaa is C or S
PXXVPQDLSAISILYLVGRTPKVLKNYQMVV

SEQ ID NO: 8767 - protein, 27 aa, Artificial Sequence
  Cyclic GFR-binding peptide
LNAISVLYFEIVRKKPIFLKKYRTLED

SEQ ID NO: 8768 - protein, 37 aa, Artificial Sequence
  Cyclic GFR-binding peptide
  MOD_RES (3)..(4)..(36): Xaa is C or S
KAXXVPTELSPISMLYKDENEKVVLKYHYDMVVEGXG

SEQ ID NO: 8769 - protein, 38 aa, Artificial Sequence
  Cyclic GFR-binding peptide
  MOD_RES (4)..(36)..(38): Xaa is C or S
KPTXAPTKLSATSVLYYDDSSNVILRKHRNMVVRSXGX

SEQ ID NO: 8770 - protein, 30 aa, Artificial Sequence
  Cyclic GFR-binding peptide
  MOD_RES (27)..(29): Xaa is C or S
LNAISILYFVGRKPKVLKKYRMIVRSXKXS

SEQ ID NO: 8771 - protein, 35 aa, Artificial Sequence
  Cyclic GFR-binding peptide
  MOD_RES (2)..(3)..(35): Xaa is C or S
PXXAPTQLSPISVLYKDDSSNVILKYHYNMVVRAX

SEQ ID NO: 8772 - protein, 34 aa, Artificial Sequence
  Cyclic GFR-binding peptide
  MOD_RES (31)..(33): Xaa is C or S
PTKLSAISVLYLDDSSNVILKNYQNMVVRSXGXH

SEQ ID NO: 8773 - protein, 33 aa, Artificial Sequence
  Cyclic GFR-binding peptide
  MOD_RES (2)..(3): Xaa is C or S
PXXAPTQLSATSVLYYDDSSNVILRKHRNMVVR

SEQ ID NO: 8774 - protein, 30 aa, Artificial Sequence
  Cyclic GFR-binding peptide
  MOD_RES (3)..(4): Xaa is C or S
KAXXVPTKLSAISVLYLDDMGVPTLKNYQE

SEQ ID NO: 8775 - protein, 31 aa, Artificial Sequence
  Cyclic GFR-binding peptide
  MOD_RES (31)..(31): Xaa is C or S
TKLSATSVLYYDDMGVPTLRKHREGMSVAEX

SEQ ID NO: 8776 - protein, 41 aa, Artificial Sequence
  Cyclic GFR-binding peptide
  MOD_RES (6)..(7)..(38)..(40): Xaa is C or S
ASASPXXVPQDLNAISILYFVGRTPKVLKKYRMVVKSXKXS

SEQ ID NO: 8777 - protein, 38 aa, Artificial Sequence
  Cyclic GFR-binding peptide
  MOD_RES (5)..(6): Xaa is C or S
VGKAXXVPTKLSATSVLYYDDMGVPTLRKHREGMSVAE

SEQ ID NO: 8778 - protein, 23 aa, Artificial Sequence
  Cyclic GFR-binding peptide
SATSILYYIGKTPKILRKHRMIV

SEQ ID NO: 8779 - protein, 22 aa, Artificial Sequence
  Cyclic GFR-binding peptide
LSPISVLYKDSSNNVILKYHYN

SEQ ID NO: 8780 - protein, 34 aa, Artificial Sequence
  Cyclic GFR-binding peptide
  MOD_RES (6)..(7): Xaa is C or S
KVGKAXXVPTKLSATSVLYYDDMGVPTLRKHREG

SEQ ID NO: 8781 - protein, 34 aa, Artificial Sequence
  Cyclic GFR-binding peptide
  MOD_RES (3)..(4): Xaa is C or S
SPXXVPQDLSPISILYKVGRTPKVLKYHYMVVKS

SEQ ID NO: 8782 - protein, 27 aa, Artificial Sequence
  Cyclic GFR-binding peptide
TQVQLSPISVLYKEIVRKKPIFLKYHY

SEQ ID NO: 8783 - protein, 28 aa, Artificial Sequence
  Cyclic GFR-binding peptide
ELNAISMLYFDEYDKVVLKKYREMVVEG

SEQ ID NO: 8784 - protein, 31 aa, Artificial Sequence
  Cyclic GFR-binding peptide
  MOD_RES (4)..(5): Xaa is C or S
PKAXXVPTELNAISMLYFDEYDKVVLKKYRE

SEQ ID NO: 8785 - protein, 41 aa, Artificial Sequence
  Cyclic GFR-binding peptide
  MOD_RES (1)..(38)..(40): Xaa is C or S
XRPTQVQLSATSVLYYEIVRKKPIFLRKHRTLEDHLAXKXE

SEQ ID NO: 8786 - protein, 33 aa, Artificial Sequence
  Cyclic GFR-binding peptide
  MOD_RES (3)..(4): Xaa is C or S
SPXXVPQDLSATSILYYVGRTPKVLRKHRMVVK

SEQ ID NO: 8787 - protein, 34 aa, Artificial Sequence
  Cyclic GFR-binding peptide
  MOD_RES (5)..(6): Xaa is C or S
SAAPXXVPQALSATSILYYVGRKPKVLRKHRMIV

SEQ ID NO: 8788 - protein, 27 aa, Artificial Sequence
  Cyclic GFR-binding peptide
APTQLSAISVLYLDDSSNVILKNYQNM

SEQ ID NO: 8789 - protein, 30 aa, Artificial Sequence
  Cyclic GFR-binding peptide
  MOD_RES (3)..(3): Xaa is C or S
PTXAPTKLSATSVLYYDDSSNVILRKHRNM

SEQ ID NO: 8790 - protein, 38 aa, Artificial Sequence
  Cyclic GFR-binding peptide
  MOD_RES (6)..(7)..(38): Xaa is C or S
ASAAPXXVPQALSATSILYYVGRKPKVLRKHRMIVRSX

SEQ ID NO: 8791 - protein, 30 aa, Artificial Sequence
  Cyclic GFR-binding peptide
  MOD_RES (30)..(30): Xaa is C or S
SQDLSPISILYKIGKTPKILKYHYMIVKSX

SEQ ID NO: 8792 - protein, 30 aa, Artificial Sequence
  Cyclic GFR-binding peptide
VSQDLSPISILYKIGKTPKILKYHYMIVKS

SEQ ID NO: 8793 - protein, 36 aa, Artificial Sequence
  Cyclic GFR-binding peptide
  MOD_RES (1)..(1): Xaa is C or S
XRPTQVQLNAISVLYFEIVRKKPIFLKKYRTLEDHL

SEQ ID NO: 8794 - protein, 25 aa, Artificial Sequence
  Cyclic GFR-binding peptide
PTELNAISMLYFDEYDKVVLKKYRE

SEQ ID NO: 8795 - protein, 30 aa, Artificial Sequence
  Cyclic GFR-binding peptide
  MOD_RES (27)..(29): Xaa is C or S
SATSVLYYDDSSNVILRKHRNMVVRAXGXH

SEQ ID NO: 8796 - protein, 34 aa, Artificial Sequence
  Cyclic GFR-binding peptide
  MOD_RES (31)..(33): Xaa is C or S
TKLSAISVLYLDDMGVPTLKNYQEGMSVAEXGXR

SEQ ID NO: 8797 - protein, 32 aa, Artificial Sequence
  Cyclic GFR-binding peptide
  MOD_RES (1)..(32): Xaa is C or S
XVPQALNAISILYFVGRKPKVLKKYRMIVRSX

SEQ ID NO: 8798 - protein, 31 aa, Artificial Sequence
  Cyclic GFR-binding peptide
  MOD_RES (31)..(31): Xaa is C or S
VPQALNAISILYFVGRKPKVLKKYRMIVRSX

SEQ ID NO: 8799 - protein, 23 aa, Artificial Sequence
  Cyclic GFR-binding peptide
TELNAISMLYFDEYDKVVLKKYR

SEQ ID NO: 8800 - protein, 30 aa, Artificial Sequence
  Cyclic GFR-binding peptide
  MOD_RES (4)..(5): Xaa is C or S
GKAXXVPTKLNAISVLYFDDMGVPTLKKYR

SEQ ID NO: 8801 - protein, 22 aa, Artificial Sequence
  Cyclic GFR-binding peptide
LSAISVLYLDDMGVPTLKNYQE

SEQ ID NO: 8802 - protein, 28 aa, Artificial Sequence
  Cyclic GFR-binding peptide
  MOD_RES (27)..(27): Xaa is C or S
LSAISILYLIGKTPKILKNYQMIVKSXK

SEQ ID NO: 8803 - protein, 23 aa, Artificial Sequence
  Cyclic GFR-binding peptide
SATSVLYYDDMGVPTLRKHREGM

SEQ ID NO: 8804 - protein, 30 aa, Artificial Sequence
  Cyclic GFR-binding peptide
  MOD_RES (3)..(4): Xaa is C or S
SPXXVSQDLNAISILYFIGKTPKILKKYRM

SEQ ID NO: 8805 - protein, 36 aa, Artificial Sequence
  Cyclic GFR-binding peptide
  MOD_RES (1)..(2)..(33)..(35): Xaa is C or S
XXVPQDLSPISILYKVGRTPKVLKYHYMVVKSXKXS

SEQ ID NO: 8806 - protein, 35 aa, Artificial Sequence
  Cyclic GFR-binding peptide
  MOD_RES (1)..(32)..(34): Xaa is C or S
XVSQDLSATSILYYIGKTPKILRKHRMIVKSXKXS

SEQ ID NO: 8807 - protein, 40 aa, Artificial Sequence
  Cyclic GFR-binding peptide
  MOD_RES (6)..(7)..(38)..(40): Xaa is C or S
ASASPXXVPQDLNAISILYFVGRTPKVLKKYRMVVKSXKX

SEQ ID NO: 8808 - protein, 34 aa, Artificial Sequence
  Cyclic GFR-binding peptide
  MOD_RES (4)..(5): Xaa is C or S
AAPXXVPQALSPISILYKVGRKPKVLKYHYMIVR

SEQ ID NO: 8809 - protein, 36 aa, Artificial Sequence
  Cyclic GFR-binding peptide
  MOD_RES (5)..(5): Xaa is C or S
RNVQXRPTQVQLSPISVLYKEIVRKKPIFLKYHYTL

SEQ ID NO: 8810 - protein, 30 aa, Artificial Sequence
  Cyclic GFR-binding peptide
  MOD_RES (29)..(29): Xaa is C or S
ELNAISMLYFDENEKVVLKKYRDMVVEGXG

SEQ ID NO: 8811 - protein, 28 aa, Artificial Sequence
  Cyclic GFR-binding peptide
  MOD_RES (27)..(27): Xaa is C or S
SPISVLYKDDSSNVILKYHYNMVVRSXG

SEQ ID NO: 8812 - protein, 34 aa, Artificial Sequence
  Cyclic GFR-binding peptide
  MOD_RES (6)..(7): Xaa is C or S
SIPKAXXVPTELSATSMLYYDEYDKVVLRKHREM

SEQ ID NO: 8813 - protein, 32 aa, Artificial Sequence
  Cyclic GFR-binding peptide
  MOD_RES (5)..(6): Xaa is C or S
VPKAXXAPTKLSAISVLYLDSSNNVILKNYQN

SEQ ID NO: 8814 - protein, 37 aa, Artificial Sequence
  Cyclic GFR-binding peptide
  MOD_RES (2)..(3)..(34)..(36): Xaa is C or S
PXXVPQALNAISILYFVGRKPKVLKKYRMIVRSXKXS

SEQ ID NO: 8815 - protein, 31 aa, Artificial Sequence
  Cyclic GFR-binding peptide
  MOD_RES (1)..(2): Xaa is C or S
XXAPTQLSATSVLYYDDSSNVILRKHRNMVV

SEQ ID NO: 8816 - protein, 35 aa, Artificial Sequence
  Cyclic GFR-binding peptide
  MOD_RES (1)..(2)..(33)..(35): Xaa is C or S
XXVSQDLSPISILYKIGKTPKILKYHYMIVKSXKX

SEQ ID NO: 8817 - protein, 30 aa, Artificial Sequence
  Cyclic GFR-binding peptide
  MOD_RES (29)..(29): Xaa is C or S
QDLSPISILYKVGRTPKVLKYHYMVVKSXK

SEQ ID NO: 8818 - protein, 36 aa, Artificial Sequence
  Cyclic GFR-binding peptide
  MOD_RES (1)..(33)..(35): Xaa is C or S
XVPTELSATSMLYYDENEKVVLRKHRDMVVEGXGXR

SEQ ID NO: 8819 - protein, 38 aa, Artificial Sequence
  Cyclic GFR-binding peptide
  MOD_RES (5)..(6)..(38): Xaa is C or S
VPKAXXAPTKLNAISVLYFDSSNNVILKKYRNMVVKAX

SEQ ID NO: 8820 - protein, 36 aa, Artificial Sequence
  Cyclic GFR-binding peptide
  MOD_RES (4)..(4): Xaa is C or S
NVQXRPTQVQLNAISVLYFEIVRKKPIFLKKYRTLE

SEQ ID NO: 8821 - protein, 30 aa, Artificial Sequence
  Cyclic GFR-binding peptide
  MOD_RES (29)..(29): Xaa is C or S
LSAISVLYLDDMGVPTLKNYQEGMSVAEXG

SEQ ID NO: 8822 - protein, 29 aa, Artificial Sequence
  Cyclic GFR-binding peptide
  MOD_RES (28)..(28): Xaa is C or S
LSPISVLYKDDSSNVILKYHYNMVVRSXG

SEQ ID NO: 8823 - protein, 29 aa, Artificial Sequence
  Cyclic GFR-binding peptide
  MOD_RES (26)..(28): Xaa is C or S
SPISILYKVGRTPKVLKYHYMVVKSXKXS

SEQ ID NO: 8824 - protein, 25 aa, Artificial Sequence
  Cyclic GFR-binding peptide
TKLSPISVLYKDDSSNVILKYHYNM

SEQ ID NO: 8825 - protein, 29 aa, Artificial Sequence
  Cyclic GFR-binding peptide
  MOD_RES (26)..(28): Xaa is C or S
NAISILYFVGRKPKVLKKYRMIVRSXKXS

SEQ ID NO: 8826 - protein, 30 aa, Artificial Sequence
  Cyclic GFR-binding peptide
APTKLNAISVLYFDSSNNVILKKYRNMVVK

SEQ ID NO: 8827 - protein, 29 aa, Artificial Sequence
  Cyclic GFR-binding peptide
  MOD_RES (1)..(1): Xaa is C or S
XAPTKLSAISVLYLDSSNNVILKNYQNMV

SEQ ID NO: 8828 - protein, 23 aa, Artificial Sequence
  Cyclic GFR-binding peptide
KLSPISVLYKDDSSNVILKYHYN

SEQ ID NO: 8829 - protein, 37 aa, Artificial Sequence
  Cyclic GFR-binding peptide
  MOD_RES (2)..(3)..(35)..(37): Xaa is C or S
AXXVPTELSATSMLYYDENEKVVLRKHRDMVVEGXGX

SEQ ID NO: 8830 - protein, 26 aa, Artificial Sequence
  Cyclic GFR-binding peptide
SPISVLYKEIVRKKPIFLKYHYTLED

SEQ ID NO: 8831 - protein, 33 aa, Artificial Sequence
  Cyclic GFR-binding peptide
  MOD_RES (4)..(5): Xaa is C or S
GKAXXVPTKLSATSVLYYDDMGVPTLRKHREGM

SEQ ID NO: 8832 - protein, 38 aa, Artificial Sequence
  Cyclic GFR-binding peptide
  MOD_RES (3)..(4)..(37): Xaa is C or S
KAXXVPTKLSATSVLYYDDMGVPTLRKHREGMSVAEXG

SEQ ID NO: 8833 - protein, 31 aa, Artificial Sequence
  Cyclic GFR-binding peptide
  MOD_RES (1)..(1): Xaa is C or S
XVSQDLSATSILYYIGKTPKILRKHRMIVKS

SEQ ID NO: 8834 - protein, 33 aa, Artificial Sequence
  Cyclic GFR-binding peptide
  MOD_RES (4)..(5): Xaa is C or S
PKAXXVPTELSATSMLYYDEYDKVVLRKHREMV

SEQ ID NO: 8835 - protein, 38 aa, Artificial Sequence
  Cyclic GFR-binding peptide
  MOD_RES (6)..(38): Xaa is C or S
VTKPTXAPTKLSPISVLYKDDSSNVILKYHYNMVVRSX

SEQ ID NO: 8836 - protein, 31 aa, Artificial Sequence
  Cyclic GFR-binding peptide
  MOD_RES (3)..(4): Xaa is C or S
KAXXVPTELSPISMLYKDEYDKVVLKYHYEM

SEQ ID NO: 8837 - protein, 27 aa, Artificial Sequence
  Cyclic GFR-binding peptide
ALSATSILYYVGRKPKVLRKHRMIVRS

SEQ ID NO: 8838 - protein, 35 aa, Artificial Sequence
  Cyclic GFR-binding peptide
  MOD_RES (1)..(32)..(34): Xaa is C or S
XVPQDLNAISILYFVGRTPKVLKKYRMVVKSXKXS

SEQ ID NO: 8839 - protein, 30 aa, Artificial Sequence
  Cyclic GFR-binding peptide
  MOD_RES (30)..(30): Xaa is C or S
SATSVLYYEIVRKKPIFLRKHRTLEDHLAX

SEQ ID NO: 8840 - protein, 29 aa, Artificial Sequence
  Cyclic GFR-binding peptide
  MOD_RES (3)..(4): Xaa is C or S
SPXXVPQDLNAISILYFVGRTPKVLKKYR

SEQ ID NO: 8841 - protein, 21 aa, Artificial Sequence
  Cyclic GFR-binding peptide
LSATSILYYIGKTPKILRKHR

SEQ ID NO: 8842 - protein, 35 aa, Artificial Sequence
  Cyclic GFR-binding peptide
  MOD_RES (1)..(33)..(35): Xaa is C or S
XVPTELSPISMLYKDEYDKVVLKYHYEMVVEGXGX

SEQ ID NO: 8843 - protein, 35 aa, Artificial Sequence
  Cyclic GFR-binding peptide
  MOD_RES (1)..(34): Xaa is C or S
XVPTKLSAISVLYLDDMGVPTLKNYQEGMSVAEXG

SEQ ID NO: 8844 - protein, 37 aa, Artificial Sequence
  Cyclic GFR-binding peptide
  MOD_RES (6)..(7): Xaa is C or S
KIPKAXXVPTELSATSMLYYDENEKVVLRKHRDMVVE

SEQ ID NO: 8845 - protein, 29 aa, Artificial Sequence
  Cyclic GFR-binding peptide
  MOD_RES (2)..(2): Xaa is C or S
TXAPTKLSAISVLYLDDSSNVILKNYQNM

SEQ ID NO: 8846 - protein, 29 aa, Artificial Sequence
  Cyclic GFR-binding peptide
  MOD_RES (2)..(3): Xaa is C or S
AXXAPTKLSPISVLYKDSSNNVILKYHYN

SEQ ID NO: 8847 - protein, 32 aa, Artificial Sequence
  Cyclic GFR-binding peptide
  MOD_RES (29)..(31): Xaa is C or S
KLSATSVLYYDDSSNVILRKHRNMVVRSXGXH

SEQ ID NO: 8848 - protein, 27 aa, Artificial Sequence
  Cyclic GFR-binding peptide
PTKLSAISVLYLDDMGVPTLKNYQEGM

SEQ ID NO: 8849 - protein, 27 aa, Artificial Sequence
  Cyclic GFR-binding peptide
  MOD_RES (27)..(27): Xaa is C or S
LNAISILYFVGRTPKVLKKYRMVVKSX

SEQ ID NO: 8850 - protein, 22 aa, Artificial Sequence
  Cyclic GFR-binding peptide
LSAISVLYLDDSSNVILKNYQN

SEQ ID NO: 8851 - protein, 26 aa, Artificial Sequence
  Cyclic GFR-binding peptide
ELSATSMLYYDEYDKVVLRKHREMVV

SEQ ID NO: 8852 - protein, 41 aa, Artificial Sequence
  Cyclic GFR-binding peptide
  MOD_RES (4)..(41): Xaa is C or S
NVQXRPTQVQLSPISVLYKEIVRKKPIFLKYHYTLEDHLAX

SEQ ID NO: 8853 - protein, 28 aa, Artificial Sequence
  Cyclic GFR-binding peptide
VPTELNAISMLYFDENEKVVLKKYRDMV

SEQ ID NO: 8854 - protein, 41 aa, Artificial Sequence
  Cyclic GFR-binding peptide
  MOD_RES (5)..(6)..(38)..(40): Xaa is C or S
IPKAXXVPTELNAISMLYFDEYDKVVLKKYREMVVEGXGXR

SEQ ID NO: 8855 - protein, 29 aa, Artificial Sequence
  Cyclic GFR-binding peptide
  MOD_RES (1)..(1): Xaa is C or S
XVPQDLSPISILYKVGRTPKVLKYHYMVV

SEQ ID NO: 8856 - protein, 26 aa, Artificial Sequence
  Cyclic GFR-binding peptide
  MOD_RES (26)..(26): Xaa is C or S
SPISILYKVGRTPKVLKYHYMVVKSX

SEQ ID NO: 8857 - protein, 27 aa, Artificial Sequence
  Cyclic GFR-binding peptide
LSATSVLYYEIVRKKPIFLRKHRTLED

SEQ ID NO: 8858 - protein, 27 aa, Artificial Sequence
  Cyclic GFR-binding peptide
  MOD_RES (26)..(26): Xaa is C or S
SPISILYKIGKTPKILKYHYMIVKSXK

SEQ ID NO: 8859 - protein, 24 aa, Artificial Sequence
  Cyclic GFR-binding peptide
LNAISILYFVGRKPKVLKKYRMIV

SEQ ID NO: 8860 - protein, 29 aa, Artificial Sequence
  Cyclic GFR-binding peptide
  MOD_RES (2)..(3): Xaa is C or S
AXXVPTELSATSMLYYDEYDKVVLRKHRE

SEQ ID NO: 8861 - protein, 37 aa, Artificial Sequence
  Cyclic GFR-binding peptide
  MOD_RES (2)..(3)..(34)..(36): Xaa is C or S
PXXVPQDLSATSILYYVGRTPKVLRKHRMVVKSXKXS

SEQ ID NO: 8862 - protein, 44 aa, Artificial Sequence
  Cyclic GFR-binding peptide
  MOD_RES (4)..(41)..(43): Xaa is C or S
NVQXRPTQVQLSATSVLYYEIVRKKPIFLRKHRTLEDHLAXKXE

SEQ ID NO: 8863 - protein, 29 aa, Artificial Sequence
  Cyclic GFR-binding peptide
  MOD_RES (1)..(1): Xaa is C or S
XAPTKLSAISVLYLDDSSNVILKNYQNMV

SEQ ID NO: 8864 - protein, 31 aa, Artificial Sequence
  Cyclic GFR-binding peptide
  MOD_RES (30)..(30): Xaa is C or S
KLSATSVLYYDDMGVPTLRKHREGMSVAEXG

SEQ ID NO: 8865 - protein, 27 aa, Artificial Sequence
  Cyclic GFR-binding peptide
QDLNAISILYFVGRTPKVLKKYRMVVK

SEQ ID NO: 8866 - protein, 29 aa, Artificial Sequence
  Cyclic GFR-binding peptide
PTELSATSMLYYDEYDKVVLRKHREMVVE

SEQ ID NO: 8867 - protein, 34 aa, Artificial Sequence
  Cyclic GFR-binding peptide
  MOD_RES (1)..(32)..(34): Xaa is C or S
XVSQDLSPISILYKIGKTPKILKYHYMIVKSXKX

SEQ ID NO: 8868 - protein, 36 aa, Artificial Sequence
  Cyclic GFR-binding peptide
  MOD_RES (3)..(4)..(35): Xaa is C or S
APXXVPQALSAISILYLVGRKPKVLKNYQMIVRSXK

SEQ ID NO: 8869 - protein, 35 aa, Artificial Sequence
  Cyclic GFR-binding peptide
  MOD_RES (5)..(6): Xaa is C or S
IPKAXXVPTELNAISMLYFDEYDKVVLKKYREMVV

SEQ ID NO: 8870 - protein, 27 aa, Artificial Sequence
  Cyclic GFR-binding peptide
  MOD_RES (26)..(26): Xaa is C or S
SPISILYKVGRKPKVLKYHYMIVRSXK

SEQ ID NO: 8871 - protein, 36 aa, Artificial Sequence
  Cyclic GFR-binding peptide
  MOD_RES (1)..(2)..(35): Xaa is C or S
XXVPTKLSAISVLYLDDMGVPTLKNYQEGMSVAEXG

SEQ ID NO: 8872 - protein, 34 aa, Artificial Sequence
  Cyclic GFR-binding peptide
  MOD_RES (6)..(6): Xaa is C or S
VTKPTXAPTKLSAISVLYLDDSSNVILKNYQNMV

SEQ ID NO: 8873 - protein, 30 aa, Artificial Sequence
  Cyclic GFR-binding peptide
  MOD_RES (3)..(4): Xaa is C or S
SPXXVPQDLSAISILYLVGRTPKVLKNYQM

SEQ ID NO: 8874 - protein, 32 aa, Artificial Sequence
  Cyclic GFR-binding peptide
  MOD_RES (6)..(7): Xaa is C or S
AVPKAXXAPTKLNAISVLYFDSSNNVILKKYR

SEQ ID NO: 8875 - protein, 27 aa, Artificial Sequence
  Cyclic GFR-binding peptide
  MOD_RES (1)..(2): Xaa is C or S
XXAPTQLSATSVLYYDDSSNVILRKHR

SEQ ID NO: 8876 - protein, 34 aa, Artificial Sequence
  Cyclic GFR-binding peptide
  MOD_RES (5)..(5): Xaa is C or S
RNVQXRPTQVQLNAISVLYFEIVRKKPIFLKKYR

SEQ ID NO: 8877 - protein, 35 aa, Artificial Sequence
  Cyclic GFR-binding peptide
PTQVQLNAISVLYFEIVRKKPIFLKKYRTLEDHLA

SEQ ID NO: 8878 - protein, 42 aa, Artificial Sequence
  Cyclic GFR-binding peptide
  MOD_RES (5)..(42): Xaa is C or S
RNVQXRPTQVQLNAISVLYFEIVRKKPIFLKKYRTLEDHLAX

SEQ ID NO: 8879 - protein, 34 aa, Artificial Sequence
  Cyclic GFR-binding peptide
  MOD_RES (2)..(3)..(34): Xaa is C or S
PXXVPQDLSAISILYLVGRTPKVLKNYQMVVKSX

SEQ ID NO: 8880 - protein, 29 aa, Artificial Sequence
  Cyclic GFR-binding peptide
TELSPISMLYKDENEKVVLKYHYDMVVEG

SEQ ID NO: 8881 - protein, 28 aa, Artificial Sequence
  Cyclic GFR-binding peptide
  MOD_RES (2)..(3): Xaa is C or S
AXXVPTELNAISMLYFDENEKVVLKKYR

SEQ ID NO: 8882 - protein, 31 aa, Artificial Sequence
  Cyclic GFR-binding peptide
  MOD_RES (3)..(4): Xaa is C or S
KAXXVPTELSATSMLYYDEYDKVVLRKHREM

SEQ ID NO: 8883 - protein, 27 aa, Artificial Sequence
  Cyclic GFR-binding peptide
  MOD_RES (1)..(2): Xaa is C or S
XXAPTKLSPISVLYKDSSNNVILKYHY

SEQ ID NO: 8884 - protein, 42 aa, Artificial Sequence
  Cyclic GFR-binding peptide
  MOD_RES (5)..(6)..(39)..(41): Xaa is C or S
VGKAXXVPTKLNAISVLYFDDMGVPTLKKYREGMSVAEXGXR

SEQ ID NO: 8885 - protein, 29 aa, Artificial Sequence
  Cyclic GFR-binding peptide
  MOD_RES (2)..(3): Xaa is C or S
AXXVPTKLNAISVLYFDDMGVPTLKKYRE

SEQ ID NO: 8886 - protein, 32 aa, Artificial Sequence
  Cyclic GFR-binding peptide
  MOD_RES (4)..(5): Xaa is C or S
PKPXXAPTQLSPISVLYKDDSSNVILKYHYNM

SEQ ID NO: 8887 - protein, 39 aa, Artificial Sequence
  Cyclic GFR-binding peptide
  MOD_RES (7)..(39): Xaa is C or S
HVTKPTXAPTKLSAISVLYLDDSSNVILKNYQNMVVRSX

SEQ ID NO: 8888 - protein, 25 aa, Artificial Sequence
  Cyclic GFR-binding peptide
LSAISILYLVGRKPKVLKNYQMIVR

SEQ ID NO: 8889 - protein, 37 aa, Artificial Sequence
  Cyclic GFR-binding peptide
  MOD_RES (2)..(34)..(36): Xaa is C or S
TXAPTKLSATSVLYYDDSSNVILRKHRNMVVRSXGXH

SEQ ID NO: 8890 - protein, 30 aa, Artificial Sequence
  Cyclic GFR-binding peptide
  MOD_RES (28)..(30): Xaa is C or S
ALNAISILYFVGRKPKVLKKYRMIVRSXKX

SEQ ID NO: 8891 - protein, 34 aa, Artificial Sequence
  Cyclic GFR-binding peptide
  MOD_RES (34)..(34): Xaa is C or S
QVQLSPISVLYKEIVRKKPIFLKYHYTLEDHLAX

SEQ ID NO: 8892 - protein, 27 aa, Artificial Sequence
  Cyclic GFR-binding peptide
LSPISMLYKDENEKVVLKYHYDMVVEG

SEQ ID NO: 8893 - protein, 29 aa, Artificial Sequence
  Cyclic GFR-binding peptide
  MOD_RES (1)..(1): Xaa is C or S
XAPTKLSATSVLYYDDSSNVILRKHRNMV

SEQ ID NO: 8894 - protein, 33 aa, Artificial Sequence
  Cyclic GFR-binding peptide
  MOD_RES (6)..(7): Xaa is C or S
ASASPXXVSQDLSAISILYLIGKTPKILKNYQM

SEQ ID NO: 8895 - protein, 33 aa, Artificial Sequence
  Cyclic GFR-binding peptide
  MOD_RES (3)..(3): Xaa is C or S
PTXAPTKLSPISVLYKDDSSNVILKYHYNMVVR

SEQ ID NO: 8896 - protein, 32 aa, Artificial Sequence
  Cyclic GFR-binding peptide
  MOD_RES (4)..(5): Xaa is C or S
PKPXXAPTQLSATSVLYYDDSSNVILRKHRNM

SEQ ID NO: 8897 - protein, 22 aa, Artificial Sequence
  Cyclic GFR-binding peptide
NAISILYFVGRTPKVLKKYRMV

SEQ ID NO: 8898 - protein, 30 aa, Artificial Sequence
  Cyclic GFR-binding peptide
  MOD_RES (3)..(4): Xaa is C or S
KPXXAPTQLSPISVLYKDDSSNVILKYHYN

SEQ ID NO: 8899 - protein, 30 aa, Artificial Sequence
  Cyclic GFR-binding peptide
  MOD_RES (4)..(5): Xaa is C or S
AAPXXVPQALSAISILYLVGRKPKVLKNYQ

SEQ ID NO: 8900 - protein, 37 aa, Artificial Sequence
  Cyclic GFR-binding peptide
  MOD_RES (5)..(5): Xaa is C or S
RNVQXRPTQVQLSATSVLYYEIVRKKPIFLRKHRTLE

SEQ ID NO: 8901 - protein, 31 aa, Artificial Sequence
  Cyclic GFR-binding peptide
  MOD_RES (2)..(3): Xaa is C or S
AXXAPTKLSAISVLYLDSSNNVILKNYQNMV

SEQ ID NO: 8902 - protein, 39 aa, Artificial Sequence
  Cyclic GFR-binding peptide
  MOD_RES (6)..(7)..(38): Xaa is C or S
ASAAPXXVPQALSAISILYLVGRKPKVLKNYQMIVRSXK

SEQ ID NO: 8903 - protein, 35 aa, Artificial Sequence
  Cyclic GFR-binding peptide
  MOD_RES (1)..(2)..(33)..(35): Xaa is C or S
XXVPQALSATSILYYVGRKPKVLRKHRMIVRSXKX

SEQ ID NO: 8904 - protein, 28 aa, Artificial Sequence
  Cyclic GFR-binding peptide
TQVQLNAISVLYFEIVRKKPIFLKKYRT

SEQ ID NO: 8905 - protein, 30 aa, Artificial Sequence
  Cyclic GFR-binding peptide
RPTQVQLNAISVLYFEIVRKKPIFLKKYRT

SEQ ID NO: 8906 - protein, 31 aa, Artificial Sequence
  Cyclic GFR-binding peptide
  MOD_RES (30)..(30): Xaa is C or S
SAISVLYLEIVRKKPIFLKNYQTLEDHLAXK

SEQ ID NO: 8907 - protein, 31 aa, Artificial Sequence
  Cyclic GFR-binding peptide
  MOD_RES (28)..(30): Xaa is C or S
LSAISVLYLDDSSNVILKNYQNMVVRSXGXH

SEQ ID NO: 8908 - protein, 40 aa, Artificial Sequence
  Cyclic GFR-binding peptide
  MOD_RES (4)..(5)..(37)..(39): Xaa is C or S
PKAXXAPTKLSAISVLYLDSSNNVILKNYQNMVVKAXGXH

SEQ ID NO: 8909 - protein, 31 aa, Artificial Sequence
  Cyclic GFR-binding peptide
  MOD_RES (3)..(4): Xaa is C or S
SPXXVSQDLNAISILYFIGKTPKILKKYRMI

SEQ ID NO: 8910 - protein, 32 aa, Artificial Sequence
  Cyclic GFR-binding peptide
VQLNAISVLYFEIVRKKPIFLKKYRTLEDHLA

SEQ ID NO: 8911 - protein, 26 aa, Artificial Sequence
  Cyclic GFR-binding peptide
DLSAISILYLVGRTPKVLKNYQMVVK

SEQ ID NO: 8912 - protein, 26 aa, Artificial Sequence
  Cyclic GFR-binding peptide
QDLSATSILYYVGRTPKVLRKHRMVV

SEQ ID NO: 8913 - protein, 26 aa, Artificial Sequence
  Cyclic GFR-binding peptide
VQLSAISVLYLEIVRKKPIFLKNYQT

SEQ ID NO: 8914 - protein, 31 aa, Artificial Sequence
  Cyclic GFR-binding peptide
  MOD_RES (1)..(2): Xaa is C or S
XXVSQDLSATSILYYIGKTPKILRKHRMIVK

SEQ ID NO: 8915 - protein, 31 aa, Artificial Sequence
  Cyclic GFR-binding peptide
  MOD_RES (30)..(30): Xaa is C or S
TKLSAISVLYLDDSSNVILKNYQNMVVRSXG

SEQ ID NO: 8916 - protein, 33 aa, Artificial Sequence
  Cyclic GFR-binding peptide
  MOD_RES (1)..(32): Xaa is C or S
XVPQDLNAISILYFVGRTPKVLKKYRMVVKSXK

SEQ ID NO: 8917 - protein, 26 aa, Artificial Sequence
  Cyclic GFR-binding peptide
QLNAISVLYFEIVRKKPIFLKKYRTL

SEQ ID NO: 8918 - protein, 30 aa, Artificial Sequence
  Cyclic GFR-binding peptide
  MOD_RES (27)..(29): Xaa is C or S
LNAISILYFVGRTPKVLKKYRMVVKSXKXS

SEQ ID NO: 8919 - protein, 33 aa, Artificial Sequence
  Cyclic GFR-binding peptide
  MOD_RES (5)..(6): Xaa is C or S
SASPXXVPQDLSPISILYKVGRTPKVLKYHYMV

SEQ ID NO: 8920 - protein, 28 aa, Artificial Sequence
  Cyclic GFR-binding peptide
TELSATSMLYYDEYDKVVLRKHREMVVE

SEQ ID NO: 8921 - protein, 33 aa, Artificial Sequence
  Cyclic GFR-binding peptide
  MOD_RES (1)..(32): Xaa is C or S
XVSQDLNAISILYFIGKTPKILKKYRMIVKSXK

SEQ ID NO: 8922 - protein, 36 aa, Artificial Sequence
  Cyclic GFR-binding peptide
  MOD_RES (3)..(4)..(35): Xaa is C or S
SPXXVPQDLSATSILYYVGRTPKVLRKHRMVVKSXK

SEQ ID NO: 8923 - protein, 26 aa, Artificial Sequence
  Cyclic GFR-binding peptide
KLSAISVLYLDSSNNVILKNYQNMVV

SEQ ID NO: 8924 - protein, 40 aa, Artificial Sequence
  Cyclic GFR-binding peptide
  MOD_RES (7)..(39): Xaa is C or S
HVTKPTXAPTKLSPISVLYKDDSSNVILKYHYNMVVRSXG

SEQ ID NO: 8925 - protein, 29 aa, Artificial Sequence
  Cyclic GFR-binding peptide
  MOD_RES (29)..(29): Xaa is C or S
ELSATSMLYYDENEKVVLRKHRDMVVEGX

SEQ ID NO: 8926 - protein, 24 aa, Artificial Sequence
  Cyclic GFR-binding peptide
TELSPISMLYKDEYDKVVLKYHYE

SEQ ID NO: 8927 - protein, 20 aa, Artificial Sequence
  Cyclic GFR-binding peptide
SATSILYYVGRKPKVLRKHR

SEQ ID NO: 8928 - protein, 36 aa, Artificial Sequence
  Cyclic GFR-binding peptide
  MOD_RES (1)..(2)..(33)..(35): Xaa is C or S
XXVPQDLSAISILYLVGRTPKVLKNYQMVVKSXKXS

SEQ ID NO: 8929 - protein, 40 aa, Artificial Sequence
  Cyclic GFR-binding peptide
  MOD_RES (4)..(5)..(37)..(39): Xaa is C or S
PKAXXVPTELNAISMLYFDEYDKVVLKKYREMVVEGXGXR

SEQ ID NO: 8930 - protein, 40 aa, Artificial Sequence
  Cyclic GFR-binding peptide
  MOD_RES (5)..(6)..(39): Xaa is C or S
VGKAXXVPTKLSATSVLYYDDMGVPTLRKHREGMSVAEXG

SEQ ID NO: 8931 - protein, 32 aa, Artificial Sequence
  Cyclic GFR-binding peptide
  MOD_RES (1)..(2): Xaa is C or S
XXVPTELNAISMLYFDEYDKVVLKKYREMVVE

SEQ ID NO: 8932 - protein, 27 aa, Artificial Sequence
  Cyclic GFR-binding peptide
  MOD_RES (1)..(1): Xaa is C or S
XVPTELSATSMLYYDEYDKVVLRKHRE

SEQ ID NO: 8933 - protein, 27 aa, Artificial Sequence
  Cyclic GFR-binding peptide
VQLNAISVLYFEIVRKKPIFLKKYRTL

SEQ ID NO: 8934 - protein, 36 aa, Artificial Sequence
  Cyclic GFR-binding peptide
  MOD_RES (2)..(3)..(36): Xaa is C or S
AXXVPTKLSATSVLYYDDMGVPTLRKHREGMSVAEX

SEQ ID NO: 8935 - protein, 32 aa, Artificial Sequence
  Cyclic GFR-binding peptide
  MOD_RES (29)..(31): Xaa is C or S
QDLSATSILYYIGKTPKILRKHRMIVKSXKXS

SEQ ID NO: 8936 - protein, 32 aa, Artificial Sequence
  Cyclic GFR-binding peptide
  MOD_RES (32)..(32): Xaa is C or S
VPTELNAISMLYFDEYDKVVLKKYREMVVEGX

SEQ ID NO: 8937 - protein, 30 aa, Artificial Sequence
  Cyclic GFR-binding peptide
APTQLSPISVLYKDDSSNVILKYHYNMVVR

SEQ ID NO: 8938 - protein, 39 aa, Artificial Sequence
  Cyclic GFR-binding peptide
  MOD_RES (6)..(7)..(38): Xaa is C or S
ASASPXXVPQDLSATSILYYVGRTPKVLRKHRMVVKSXK

SEQ ID NO: 8939 - protein, 31 aa, Artificial Sequence
  Cyclic GFR-binding peptide
  MOD_RES (1)..(2): Xaa is C or S
XXAPTKLNAISVLYFDSSNNVILKKYRNMVV

SEQ ID NO: 8940 - protein, 23 aa, Artificial Sequence
  Cyclic GFR-binding peptide
QALNAISILYFVGRKPKVLKKYR

SEQ ID NO: 8941 - protein, 38 aa, Artificial Sequence
  Cyclic GFR-binding peptide
  MOD_RES (3)..(4)..(36)..(38): Xaa is C or S
KAXXVPTELSPISMLYKDENEKVVLKYHYDMVVEGXGX

SEQ ID NO: 8942 - protein, 33 aa, Artificial Sequence
  Cyclic GFR-binding peptide
  MOD_RES (4)..(5): Xaa is C or S
GKAXXVPTKLSAISVLYLDDMGVPTLKNYQEGM

SEQ ID NO: 8943 - protein, 33 aa, Artificial Sequence
  Cyclic GFR-binding peptide
  MOD_RES (5)..(6): Xaa is C or S
VPKAXXAPTKLSAISVLYLDSSNNVILKNYQNM

SEQ ID NO: 8944 - protein, 36 aa, Artificial Sequence
  Cyclic GFR-binding peptide
  MOD_RES (1)..(2)..(34)..(36): Xaa is C or S
XXAPTKLSATSVLYYDDSSNVILRKHRNMVVRSXGX

SEQ ID NO: 8945 - protein, 28 aa, Artificial Sequence
  Cyclic GFR-binding peptide
  MOD_RES (2)..(3): Xaa is C or S
PXXVSQDLSATSILYYIGKTPKILRKHR

SEQ ID NO: 8946 - protein, 33 aa, Artificial Sequence
  Cyclic GFR-binding peptide
  MOD_RES (31)..(33): Xaa is C or S
PTKLSPISVLYKDDSSNVILKYHYNMVVRSXGX

SEQ ID NO: 8947 - protein, 32 aa, Artificial Sequence
  Cyclic GFR-binding peptide
  MOD_RES (30)..(32): Xaa is C or S
TELSATSMLYYDEYDKVVLRKHREMVVEGXGX

SEQ ID NO: 8948 - protein, 34 aa, Artificial Sequence
  Cyclic GFR-binding peptide
  MOD_RES (1)..(33): Xaa is C or S
XAPTQLSATSVLYYDDSSNVILRKHRNMVVRAXG

SEQ ID NO: 8949 - protein, 38 aa, Artificial Sequence
  Cyclic GFR-binding peptide
  MOD_RES (4)..(5)..(37): Xaa is C or S
PKAXXAPTKLNAISVLYFDSSNNVILKKYRNMVVKAXG

SEQ ID NO: 8950 - protein, 37 aa, Artificial Sequence
  Cyclic GFR-binding peptide
  MOD_RES (6)..(7): Xaa is C or S
AVPKAXXAPTKLSPISVLYKDSSNNVILKYHYNMVVK

SEQ ID NO: 8951 - protein, 26 aa, Artificial Sequence
  Cyclic GFR-binding peptide
QDLSAISILYLVGRTPKVLKNYQMVV

SEQ ID NO: 8952 - protein, 33 aa, Artificial Sequence
  Cyclic GFR-binding peptide
  MOD_RES (2)..(3): Xaa is C or S
PXXVPQALSPISILYKVGRKPKVLKYHYMIVRS

SEQ ID NO: 8953 - protein, 33 aa, Artificial Sequence
  Cyclic GFR-binding peptide
  MOD_RES (5)..(6): Xaa is C or S
VGKAXXVPTKLSAISVLYLDDMGVPTLKNYQEG

SEQ ID NO: 8954 - protein, 35 aa, Artificial Sequence
  Cyclic GFR-binding peptide
  MOD_RES (4)..(5): Xaa is C or S
AAPXXVPQALSATSILYYVGRKPKVLRKHRMIVRS

SEQ ID NO: 8955 - protein, 25 aa, Artificial Sequence
  Cyclic GFR-binding peptide
TKLSATSVLYYDDSSNVILRKHRNM

SEQ ID NO: 8956 - protein, 21 aa, Artificial Sequence
  Cyclic GFR-binding peptide
LSATSMLYYDEYDKVVLRKHR

SEQ ID NO: 8957 - protein, 28 aa, Artificial Sequence
  Cyclic GFR-binding peptide
  MOD_RES (27)..(27): Xaa is C or S
LSATSILYYVGRKPKVLRKHRMIVRSXK

SEQ ID NO: 8958 - protein, 29 aa, Artificial Sequence
  Cyclic GFR-binding peptide
SATSVLYYEIVRKKPIFLRKHRTLEDHLA

SEQ ID NO: 8959 - protein, 25 aa, Artificial Sequence
  Cyclic GFR-binding peptide
VPQALSAISILYLVGRKPKVLKNYQ

SEQ ID NO: 8960 - protein, 22 aa, Artificial Sequence
  Cyclic GFR-binding peptide
ALSAISILYLVGRKPKVLKNYQ

SEQ ID NO: 8961 - protein, 34 aa, Artificial Sequence
  Cyclic GFR-binding peptide
  MOD_RES (6)..(7): Xaa is C or S
SIPKAXXVPTELSPISMLYKDEYDKVVLKYHYEM

SEQ ID NO: 8962 - protein, 30 aa, Artificial Sequence
  Cyclic GFR-binding peptide
PTKLSPISVLYKDSSNNVILKYHYNMVVKA

SEQ ID NO: 8963 - protein, 24 aa, Artificial Sequence
  Cyclic GFR-binding peptide
KLSATSVLYYDDMGVPTLRKHREG

SEQ ID NO: 8964 - protein, 37 aa, Artificial Sequence
  Cyclic GFR-binding peptide
  MOD_RES (2)..(3)..(34)..(36): Xaa is C or S
PXXVSQDLSPISILYKIGKTPKILKYHYMIVKSXKXS

SEQ ID NO: 8965 - protein, 27 aa, Artificial Sequence
  Cyclic GFR-binding peptide
  MOD_RES (1)..(1): Xaa is C or S
XVPTELSPISMLYKDENEKVVLKYHYD

SEQ ID NO: 8966 - protein, 33 aa, Artificial Sequence
  Cyclic GFR-binding peptide
  MOD_RES (5)..(6): Xaa is C or S
IPKAXXVPTELSATSMLYYDENEKVVLRKHRDM

SEQ ID NO: 8967 - protein, 39 aa, Artificial Sequence
  Cyclic GFR-binding peptide
  MOD_RES (1)..(38): Xaa is C or S
XRPTQVQLSATSVLYYEIVRKKPIFLRKHRTLEDHLAXK

SEQ ID NO: 8968 - protein, 22 aa, Artificial Sequence
  Cyclic GFR-binding peptide
LSPISMLYKDEYDKVVLKYHYE

SEQ ID NO: 8969 - protein, 28 aa, Artificial Sequence
  Cyclic GFR-binding peptide
  MOD_RES (26)..(28): Xaa is C or S
NAISILYFVGRKPKVLKKYRMIVRSXKX

SEQ ID NO: 8970 - protein, 25 aa, Artificial Sequence
  Cyclic GFR-binding peptide
ELSATSMLYYDEYDKVVLRKHREMV

SEQ ID NO: 8971 - protein, 30 aa, Artificial Sequence
  Cyclic GFR-binding peptide
  MOD_RES (2)..(3): Xaa is C or S
AXXVPTELSPISMLYKDENEKVVLKYHYDM

SEQ ID NO: 8972 - protein, 36 aa, Artificial Sequence
  Cyclic GFR-binding peptide
  MOD_RES (4)..(5): Xaa is C or S
PKAXXVPTELSPISMLYKDEYDKVVLKYHYEMVVEG

SEQ ID NO: 8973 - protein, 39 aa, Artificial Sequence
  Cyclic GFR-binding peptide
  MOD_RES (6)..(7)..(38): Xaa is C or S
ASASPXXVSQDLSATSILYYIGKTPKILRKHRMIVKSXK

SEQ ID NO: 8974 - protein, 37 aa, Artificial Sequence
  Cyclic GFR-binding peptide
  MOD_RES (1)..(1): Xaa is C or S
XRPTQVQLSATSVLYYEIVRKKPIFLRKHRTLEDHLA

SEQ ID NO: 8975 - protein, 27 aa, Artificial Sequence
  Cyclic GFR-binding peptide
PTELSPISMLYKDEYDKVVLKYHYEMV

SEQ ID NO: 8976 - protein, 24 aa, Artificial Sequence
  Cyclic GFR-binding peptide
ALSAISILYLVGRKPKVLKNYQMI

SEQ ID NO: 8977 - protein, 26 aa, Artificial Sequence
  Cyclic GFR-binding peptide
QVQLSPISVLYKEIVRKKPIFLKYHY

SEQ ID NO: 8978 - protein, 31 aa, Artificial Sequence
  Cyclic GFR-binding peptide
  MOD_RES (30)..(30): Xaa is C or S
SATSVLYYEIVRKKPIFLRKHRTLEDHLAXK

SEQ ID NO: 8979 - protein, 36 aa, Artificial Sequence
  Cyclic GFR-binding peptide
  MOD_RES (2)..(3)..(35): Xaa is C or S
AXXVPTELSPISMLYKDEYDKVVLKYHYEMVVEGXG

SEQ ID NO: 8980 - protein, 28 aa, Artificial Sequence
  Cyclic GFR-binding peptide
SATSVLYYEIVRKKPIFLRKHRTLEDHL

SEQ ID NO: 8981 - protein, 36 aa, Artificial Sequence
  Cyclic GFR-binding peptide
  MOD_RES (4)..(5)..(36): Xaa is C or S
ASPXXVSQDLSPISILYKIGKTPKILKYHYMIVKSX

SEQ ID NO: 8982 - protein, 22 aa, Artificial Sequence
  Cyclic GFR-binding peptide
ALSATSILYYVGRKPKVLRKHR

SEQ ID NO: 8983 - protein, 31 aa, Artificial Sequence
  Cyclic GFR-binding peptide
  MOD_RES (3)..(3): Xaa is C or S
PTXAPTKLSATSVLYYDDSSNVILRKHRNMV

SEQ ID NO: 8984 - protein, 32 aa, Artificial Sequence
  Cyclic GFR-binding peptide
  MOD_RES (5)..(5): Xaa is C or S
TKPTXAPTKLSAISVLYLDDSSNVILKNYQNM

SEQ ID NO: 8985 - protein, 32 aa, Artificial Sequence
  Cyclic GFR-binding peptide
  MOD_RES (29)..(31): Xaa is C or S
QDLSAISILYLIGKTPKILKNYQMIVKSXKXS

SEQ ID NO: 8986 - protein, 34 aa, Artificial Sequence
  Cyclic GFR-binding peptide
  MOD_RES (1)..(1): Xaa is C or S
XRPTQVQLSPISVLYKEIVRKKPIFLKYHYTLED

SEQ ID NO: 8987 - protein, 35 aa, Artificial Sequence
  Cyclic GFR-binding peptide
  MOD_RES (1)..(1): Xaa is C or S
XRPTQVQLNAISVLYFEIVRKKPIFLKKYRTLEDH

SEQ ID NO: 8988 - protein, 34 aa, Artificial Sequence
  Cyclic GFR-binding peptide
  MOD_RES (2)..(3)..(34): Xaa is C or S
PXXVPQDLNAISILYFVGRTPKVLKKYRMVVKSX

SEQ ID NO: 8989 - protein, 25 aa, Artificial Sequence
  Cyclic GFR-binding peptide
LSATSVLYYDDSSNVILRKHRNMVV

SEQ ID NO: 8990 - protein, 38 aa, Artificial Sequence
  Cyclic GFR-binding peptide
  MOD_RES (2)..(2): Xaa is C or S
QXRPTQVQLSAISVLYLEIVRKKPIFLKNYQTLEDHLA

SEQ ID NO: 8991 - protein, 37 aa, Artificial Sequence
  Cyclic GFR-binding peptide
  MOD_RES (1)..(2)..(34)..(36): Xaa is C or S
XXAPTKLSPISVLYKDSSNNVILKYHYNMVVKAXGXH

SEQ ID NO: 8992 - protein, 30 aa, Artificial Sequence
  Cyclic GFR-binding peptide
  MOD_RES (2)..(3): Xaa is C or S
AXXVPTELSATSMLYYDENEKVVLRKHRDM

SEQ ID NO: 8993 - protein, 33 aa, Artificial Sequence
  Cyclic GFR-binding peptide
  MOD_RES (33)..(33): Xaa is C or S
VPTKLSAISVLYLDDMGVPTLKNYQEGMSVAEX

SEQ ID NO: 8994 - protein, 37 aa, Artificial Sequence
  Cyclic GFR-binding peptide
  MOD_RES (1)..(2)..(34)..(36): Xaa is C or S
XXVPTELSATSMLYYDENEKVVLRKHRDMVVEGXGXR

SEQ ID NO: 8995 - protein, 34 aa, Artificial Sequence
  Cyclic GFR-binding peptide
  MOD_RES (5)..(6): Xaa is C or S
SASPXXVSQDLSPISILYKIGKTPKILKYHYMIV

SEQ ID NO: 8996 - protein, 34 aa, Artificial Sequence
  Cyclic GFR-binding peptide
  MOD_RES (31)..(33): Xaa is C or S
PTELSATSMLYYDEYDKVVLRKHREMVVEGXGXR

SEQ ID NO: 8997 - protein, 32 aa, Artificial Sequence
  Cyclic GFR-binding peptide
  MOD_RES (5)..(6): Xaa is C or S
VGKAXXVPTKLSAISVLYLDDMGVPTLKNYQE

SEQ ID NO: 8998 - protein, 32 aa, Artificial Sequence
  Cyclic GFR-binding peptide
  MOD_RES (1)..(1): Xaa is C or S
XAPTQLSPISVLYKDDSSNVILKYHYNMVVRA

SEQ ID NO: 8999 - protein, 35 aa, Artificial Sequence
  Cyclic GFR-binding peptide
  MOD_RES (4)..(5): Xaa is C or S
ASPXXVPQDLSPISILYKVGRTPKVLKYHYMVVKS

SEQ ID NO: 9000 - protein, 25 aa, Artificial Sequence
  Cyclic GFR-binding peptide
TKLNAISVLYFDDMGVPTLKKYREG

SEQ ID NO: 9001 - protein, 40 aa, Artificial Sequence
  Cyclic GFR-binding peptide
  MOD_RES (5)..(6)..(38)..(40): Xaa is C or S
VPKPXXAPTKLSPISVLYKDDSSNVILKYHYNMVVRSXGX

SEQ ID NO: 9002 - protein, 35 aa, Artificial Sequence
  Cyclic GFR-binding peptide
  MOD_RES (5)..(6): Xaa is C or S
SASPXXVPQDLSAISILYLVGRTPKVLKNYQMVVK

SEQ ID NO: 9003 - protein, 23 aa, Artificial Sequence
  Cyclic GFR-binding peptide
LSAISVLYLEIVRKKPIFLKNYQ

SEQ ID NO: 9004 - protein, 34 aa, Artificial Sequence
  Cyclic GFR-binding peptide
  MOD_RES (5)..(5): Xaa is C or S
TKPTXAPTKLSPISVLYKDDSSNVILKYHYNMVV

SEQ ID NO: 9005 - protein, 24 aa, Artificial Sequence
  Cyclic GFR-binding peptide
DLSATSILYYVGRTPKVLRKHRMV

SEQ ID NO: 9006 - protein, 30 aa, Artificial Sequence
  Cyclic GFR-binding peptide
  MOD_RES (2)..(3): Xaa is C or S
PXXAPTQLSAISVLYLDDSSNVILKNYQNM

SEQ ID NO: 9007 - protein, 32 aa, Artificial Sequence
  Cyclic GFR-binding peptide
  MOD_RES (31)..(31): Xaa is C or S
LNAISVLYFEIVRKKPIFLKKYRTLEDHLAXK

SEQ ID NO: 9008 - protein, 27 aa, Artificial Sequence
  Cyclic GFR-binding peptide
  MOD_RES (27)..(27): Xaa is C or S
SPISVLYKDSSNNVILKYHYNMVVKAX

SEQ ID NO: 9009 - protein, 27 aa, Artificial Sequence
  Cyclic GFR-binding peptide
  MOD_RES (1)..(1): Xaa is C or S
XVPQALSAISILYLVGRKPKVLKNYQM

SEQ ID NO: 9010 - protein, 32 aa, Artificial Sequence
  Cyclic GFR-binding peptide
  MOD_RES (7)..(7): Xaa is C or S
HVTKPTXAPTKLSATSVLYYDDSSNVILRKHR

SEQ ID NO: 9011 - protein, 24 aa, Artificial Sequence
  Cyclic GFR-binding peptide
PTKLSAISVLYLDSSNNVILKNYQ

SEQ ID NO: 9012 - protein, 38 aa, Artificial Sequence
  Cyclic GFR-binding peptide
  MOD_RES (2)..(2): Xaa is C or S
QXRPTQVQLSATSVLYYEIVRKKPIFLRKHRTLEDHLA

SEQ ID NO: 9013 - protein, 30 aa, Artificial Sequence
  Cyclic GFR-binding peptide
  MOD_RES (27)..(29): Xaa is C or S
SATSVLYYDDSSNVILRKHRNMVVRSXGXH

SEQ ID NO: 9014 - protein, 39 aa, Artificial Sequence
  Cyclic GFR-binding peptide
  MOD_RES (4)..(5)..(38): Xaa is C or S
GKAXXVPTKLSAISVLYLDDMGVPTLKNYQEGMSVAEXG

SEQ ID NO: 9015 - protein, 29 aa, Artificial Sequence
  Cyclic GFR-binding peptide
  MOD_RES (28)..(28): Xaa is C or S
LSATSMLYYDENEKVVLRKHRDMVVEGXG

SEQ ID NO: 9016 - protein, 24 aa, Artificial Sequence
  Cyclic GFR-binding peptide
DLSPISILYKVGRTPKVLKYHYMV

SEQ ID NO: 9017 - protein, 29 aa, Artificial Sequence
  Cyclic GFR-binding peptide
  MOD_RES (2)..(3): Xaa is C or S
AXXVPTKLSATSVLYYDDMGVPTLRKHRE

SEQ ID NO: 9018 - protein, 29 aa, Artificial Sequence
  Cyclic GFR-binding peptide
PTQVQLNAISVLYFEIVRKKPIFLKKYRT

SEQ ID NO: 9019 - protein, 27 aa, Artificial Sequence
  Cyclic GFR-binding peptide
VQLSATSVLYYEIVRKKPIFLRKHRTL

SEQ ID NO: 9020 - protein, 31 aa, Artificial Sequence
  Cyclic GFR-binding peptide
  MOD_RES (4)..(5): Xaa is C or S
PKAXXVPTELSPISMLYKDENEKVVLKYHYD

SEQ ID NO: 9021 - protein, 24 aa, Artificial Sequence
  Cyclic GFR-binding peptide
PTELSATSMLYYDEYDKVVLRKHR

SEQ ID NO: 9022 - protein, 31 aa, Artificial Sequence
  Cyclic GFR-binding peptide
  MOD_RES (31)..(31): Xaa is C or S
PTELSATSMLYYDENEKVVLRKHRDMVVEGX

SEQ ID NO: 9023 - protein, 33 aa, Artificial Sequence
  Cyclic GFR-binding peptide
  MOD_RES (31)..(33): Xaa is C or S
TKLSATSVLYYDDMGVPTLRKHREGMSVAEXGX

SEQ ID NO: 9024 - protein, 31 aa, Artificial Sequence
  Cyclic GFR-binding peptide
  MOD_RES (4)..(5): Xaa is C or S
ASPXXVPQDLSPISILYKVGRTPKVLKYHYM

SEQ ID NO: 9025 - protein, 26 aa, Artificial Sequence
  Cyclic GFR-binding peptide
VPTKLNAISVLYFDDMGVPTLKKYRE

SEQ ID NO: 9026 - protein, 31 aa, Artificial Sequence
  Cyclic GFR-binding peptide
  MOD_RES (3)..(3): Xaa is C or S
PTXAPTKLSPISVLYKDDSSNVILKYHYNMV

SEQ ID NO: 9027 - protein, 36 aa, Artificial Sequence
  Cyclic GFR-binding peptide
  MOD_RES (3)..(35): Xaa is C or S
PTXAPTKLSAISVLYLDDSSNVILKNYQNMVVRSXG

SEQ ID NO: 9028 - protein, 37 aa, Artificial Sequence
  Cyclic GFR-binding peptide
  MOD_RES (1)..(1): Xaa is C or S
XRPTQVQLSAISVLYLEIVRKKPIFLKNYQTLEDHLA

SEQ ID NO: 9029 - protein, 28 aa, Artificial Sequence
  Cyclic GFR-binding peptide
ELSATSMLYYDENEKVVLRKHRDMVVEG

SEQ ID NO: 9030 - protein, 29 aa, Artificial Sequence
  Cyclic GFR-binding peptide
VPTELSATSMLYYDEYDKVVLRKHREMVV

SEQ ID NO: 9031 - protein, 39 aa, Artificial Sequence
  Cyclic GFR-binding peptide
  MOD_RES (6)..(7)..(39): Xaa is C or S
AVPKAXXAPTKLSAISVLYLDSSNNVILKNYQNMVVKAX

SEQ ID NO: 9032 - protein, 29 aa, Artificial Sequence
  Cyclic GFR-binding peptide
QVQLNAISVLYFEIVRKKPIFLKKYRTLE

SEQ ID NO: 9033 - protein, 27 aa, Artificial Sequence
  Cyclic GFR-binding peptide
PTELSATSMLYYDEYDKVVLRKHREMV

SEQ ID NO: 9034 - protein, 39 aa, Artificial Sequence
  Cyclic GFR-binding peptide
  MOD_RES (3)..(4)..(37)..(39): Xaa is C or S
KAXXVPTKLSATSVLYYDDMGVPTLRKHREGMSVAEXGX

SEQ ID NO: 9035 - protein, 39 aa, Artificial Sequence
  Cyclic GFR-binding peptide
  MOD_RES (4)..(5)..(36)..(38): Xaa is C or S
ASPXXVSQDLSATSILYYIGKTPKILRKHRMIVKSXKXS

SEQ ID NO: 9036 - protein, 33 aa, Artificial Sequence
  Cyclic GFR-binding peptide
  MOD_RES (5)..(6): Xaa is C or S
IPKAXXVPTELSPISMLYKDENEKVVLKYHYDM

SEQ ID NO: 9037 - protein, 20 aa, Artificial Sequence
  Cyclic GFR-binding peptide
SAISVLYLDSSNNVILKNYQ

SEQ ID NO: 9038 - protein, 25 aa, Artificial Sequence
  Cyclic GFR-binding peptide
QLNAISVLYFEIVRKKPIFLKKYRT

SEQ ID NO: 9039 - protein, 27 aa, Artificial Sequence
  Cyclic GFR-binding peptide
LNAISVLYFDSSNNVILKKYRNMVVKA

SEQ ID NO: 9040 - protein, 33 aa, Artificial Sequence
  Cyclic GFR-binding peptide
  MOD_RES (1)..(2): Xaa is C or S
XXAPTKLSAISVLYLDSSNNVILKNYQNMVVKA

SEQ ID NO: 9041 - protein, 33 aa, Artificial Sequence
  Cyclic GFR-binding peptide
  MOD_RES (31)..(33): Xaa is C or S
VPQDLSAISILYLVGRTPKVLKNYQMVVKSXKX

SEQ ID NO: 9042 - protein, 30 aa, Artificial Sequence
  Cyclic GFR-binding peptide
  MOD_RES (29)..(29): Xaa is C or S
QLSAISVLYLDDSSNVILKNYQNMVVRAXG

SEQ ID NO: 9043 - protein, 34 aa, Artificial Sequence
  Cyclic GFR-binding peptide
PTQVQLSAISVLYLEIVRKKPIFLKNYQTLEDHL

SEQ ID NO: 9044 - protein, 37 aa, Artificial Sequence
  Cyclic GFR-binding peptide
  MOD_RES (3)..(3): Xaa is C or S
VQXRPTQVQLNAISVLYFEIVRKKPIFLKKYRTLEDH

SEQ ID NO: 9045 - protein, 33 aa, Artificial Sequence
  Cyclic GFR-binding peptide
  MOD_RES (1)..(2): Xaa is C or S
XXAPTKLSPISVLYKDDSSNVILKYHYNMVVRS

SEQ ID NO: 9046 - protein, 34 aa, Artificial Sequence
  Cyclic GFR-binding peptide
  MOD_RES (6)..(7): Xaa is C or S
YVPKPXXAPTKLSAISVLYLDDSSNVILKNYQNM

SEQ ID NO: 9047 - protein, 28 aa, Artificial Sequence
  Cyclic GFR-binding peptide
VPQDLNAISILYFVGRTPKVLKKYRMVV

SEQ ID NO: 9048 - protein, 31 aa, Artificial Sequence
  Cyclic GFR-binding peptide
PTQVQLSPISVLYKEIVRKKPIFLKYHYTLE

SEQ ID NO: 9049 - protein, 35 aa, Artificial Sequence
  Cyclic GFR-binding peptide
  MOD_RES (2)..(3)..(34): Xaa is C or S
PXXVPQDLSATSILYYVGRTPKVLRKHRMVVKSXK

SEQ ID NO: 9050 - protein, 24 aa, Artificial Sequence
  Cyclic GFR-binding peptide
KLSAISVLYLDDSSNVILKNYQNM

SEQ ID NO: 9051 - protein, 33 aa, Artificial Sequence
  Cyclic GFR-binding peptide
  MOD_RES (6)..(7): Xaa is C or S
ASASPXXVPQDLSAISILYLVGRTPKVLKNYQM

SEQ ID NO: 9052 - protein, 21 aa, Artificial Sequence
  Cyclic GFR-binding peptide
LSAISILYLIGKTPKILKNYQ

SEQ ID NO: 9053 - protein, 27 aa, Artificial Sequence
  Cyclic GFR-binding peptide
DLNAISILYFVGRTPKVLKKYRMVVKS

SEQ ID NO: 9054 - protein, 41 aa, Artificial Sequence
  Cyclic GFR-binding peptide
  MOD_RES (5)..(6)..(38)..(40): Xaa is C or S
VPKPXXAPTQLSATSVLYYDDSSNVILRKHRNMVVRAXGXH

SEQ ID NO: 9055 - protein, 33 aa, Artificial Sequence
  Cyclic GFR-binding peptide
  MOD_RES (1)..(33): Xaa is C or S
XAPTKLSPISVLYKDDSSNVILKYHYNMVVRSX

SEQ ID NO: 9056 - protein, 31 aa, Artificial Sequence
  Cyclic GFR-binding peptide
  MOD_RES (5)..(6): Xaa is C or S
VPKPXXAPTQLSAISVLYLDDSSNVILKNYQ

SEQ ID NO: 9057 - protein, 29 aa, Artificial Sequence
  Cyclic GFR-binding peptide
  MOD_RES (27)..(29): Xaa is C or S
LSPISILYKVGRKPKVLKYHYMIVRSXKX

SEQ ID NO: 9058 - protein, 38 aa, Artificial Sequence
  Cyclic GFR-binding peptide
  MOD_RES (4)..(5)..(36)..(38): Xaa is C or S
AAPXXVPQALSATSILYYVGRKPKVLRKHRMIVRSXKX

SEQ ID NO: 9059 - protein, 34 aa, Artificial Sequence
  Cyclic GFR-binding peptide
  MOD_RES (32)..(34): Xaa is C or S
APTKLNAISVLYFDSSNNVILKKYRNMVVKAXGX

SEQ ID NO: 9060 - protein, 28 aa, Artificial Sequence
  Cyclic GFR-binding peptide
VPQALSPISILYKVGRKPKVLKYHYMIV

SEQ ID NO: 9061 - protein, 30 aa, Artificial Sequence
  Cyclic GFR-binding peptide
  MOD_RES (27)..(29): Xaa is C or S
LSPISILYKIGKTPKILKYHYMIVKSXKXS

SEQ ID NO: 9062 - protein, 25 aa, Artificial Sequence
  Cyclic GFR-binding peptide
QALNAISILYFVGRKPKVLKKYRMI

SEQ ID NO: 9063 - protein, 24 aa, Artificial Sequence
  Cyclic GFR-binding peptide
PTKLSPISVLYKDDSSNVILKYHY

SEQ ID NO: 9064 - protein, 32 aa, Artificial Sequence
  Cyclic GFR-binding peptide
  MOD_RES (30)..(32): Xaa is C or S
PQDLSAISILYLVGRTPKVLKNYQMVVKSXKX

SEQ ID NO: 9065 - protein, 28 aa, Artificial Sequence
  Cyclic GFR-binding peptide
  MOD_RES (27)..(27): Xaa is C or S
LSATSILYYIGKTPKILRKHRMIVKSXK

SEQ ID NO: 9066 - protein, 34 aa, Artificial Sequence
  Cyclic GFR-binding peptide
  MOD_RES (3)..(4): Xaa is C or S
KPXXAPTQLSATSVLYYDDSSNVILRKHRNMVVR

SEQ ID NO: 9067 - protein, 43 aa, Artificial Sequence
  Cyclic GFR-binding peptide
  MOD_RES (5)..(42): Xaa is C or S
RNVQXRPTQVQLSPISVLYKEIVRKKPIFLKYHYTLEDHLAXK

SEQ ID NO: 9068 - protein, 34 aa, Artificial Sequence
  Cyclic GFR-binding peptide
  MOD_RES (1)..(33): Xaa is C or S
XVPTELNAISMLYFDENEKVVLKKYRDMVVEGXG

SEQ ID NO: 9069 - protein, 42 aa, Artificial Sequence
  Cyclic GFR-binding peptide
  MOD_RES (6)..(7)..(39)..(41): Xaa is C or S
YVPKPXXAPTKLSPISVLYKDDSSNVILKYHYNMVVRSXGXH

SEQ ID NO: 9070 - protein, 35 aa, Artificial Sequence
  Cyclic GFR-binding peptide
  MOD_RES (2)..(3)..(34): Xaa is C or S
PXXVPQALSAISILYLVGRKPKVLKNYQMIVRSXK

SEQ ID NO: 9071 - protein, 33 aa, Artificial Sequence
  Cyclic GFR-binding peptide
  MOD_RES (1)..(2)..(33): Xaa is C or S
XXVPQDLSPISILYKVGRTPKVLKYHYMVVKSX

SEQ ID NO: 9072 - protein, 35 aa, Artificial Sequence
  Cyclic GFR-binding peptide
  MOD_RES (1)..(2)..(33)..(35): Xaa is C or S
XXVPQDLNAISILYFVGRTPKVLKKYRMVVKSXKX

SEQ ID NO: 9073 - protein, 35 aa, Artificial Sequence
  Cyclic GFR-binding peptide
  MOD_RES (4)..(5): Xaa is C or S
PKAXXAPTKLNAISVLYFDSSNNVILKKYRNMVVK

SEQ ID NO: 9074 - protein, 32 aa, Artificial Sequence
  Cyclic GFR-binding peptide
TQVQLSPISVLYKEIVRKKPIFLKYHYTLEDH

SEQ ID NO: 9075 - protein, 21 aa, Artificial Sequence
  Cyclic GFR-binding peptide
LNAISVLYFDSSNNVILKKYR

SEQ ID NO: 9076 - protein, 23 aa, Artificial Sequence
  Cyclic GFR-binding peptide
QALSPISILYKVGRKPKVLKYHY

SEQ ID NO: 9077 - protein, 28 aa, Artificial Sequence
  Cyclic GFR-binding peptide
  MOD_RES (27)..(27): Xaa is C or S
SAISVLYLDDSSNVILKNYQNMVVRAXG

SEQ ID NO: 9078 - protein, 28 aa, Artificial Sequence
  Cyclic GFR-binding peptide
  MOD_RES (3)..(3): Xaa is C or S
PTXAPTKLSPISVLYKDDSSNVILKYHY

SEQ ID NO: 9079 - protein, 29 aa, Artificial Sequence
  Cyclic GFR-binding peptide
  MOD_RES (1)..(1): Xaa is C or S
XVPQDLSAISILYLVGRTPKVLKNYQMVV

SEQ ID NO: 9080 - protein, 33 aa, Artificial Sequence
  Cyclic GFR-binding peptide
  MOD_RES (2)..(3): Xaa is C or S
PXXVPQDLNAISILYFVGRTPKVLKKYRMVVKS

SEQ ID NO: 9081 - protein, 33 aa, Artificial Sequence
  Cyclic GFR-binding peptide
  MOD_RES (2)..(3): Xaa is C or S
PXXVPQALSAISILYLVGRKPKVLKNYQMIVRS

SEQ ID NO: 9082 - protein, 28 aa, Artificial Sequence
  Cyclic GFR-binding peptide
LSAISVLYLEIVRKKPIFLKNYQTLEDH

SEQ ID NO: 9083 - protein, 36 aa, Artificial Sequence
  Cyclic GFR-binding peptide
  MOD_RES (4)..(5): Xaa is C or S
GKAXXVPTKLSAISVLYLDDMGVPTLKNYQEGMSVA

SEQ ID NO: 9084 - protein, 34 aa, Artificial Sequence
  Cyclic GFR-binding peptide
  MOD_RES (31)..(33): Xaa is C or S
VPQALSATSILYYVGRKPKVLRKHRMIVRSXKXS

SEQ ID NO: 9085 - protein, 31 aa, Artificial Sequence
  Cyclic GFR-binding peptide
  MOD_RES (3)..(4): Xaa is C or S
KPXXAPTKLSATSVLYYDDSSNVILRKHRNM

SEQ ID NO: 9086 - protein, 33 aa, Artificial Sequence
  Cyclic GFR-binding peptide
  MOD_RES (5)..(6): Xaa is C or S
SAAPXXVPQALSAISILYLVGRKPKVLKNYQMI

SEQ ID NO: 9087 - protein, 36 aa, Artificial Sequence
  Cyclic GFR-binding peptide
  MOD_RES (33)..(35): Xaa is C or S
VPTKLNAISVLYFDDMGVPTLKKYREGMSVAEXGXR

SEQ ID NO: 9088 - protein, 36 aa, Artificial Sequence
  Cyclic GFR-binding peptide
  MOD_RES (6)..(7): Xaa is C or S
KVGKAXXVPTKLNAISVLYFDDMGVPTLKKYREGMS

SEQ ID NO: 9089 - protein, 33 aa, Artificial Sequence
  Cyclic GFR-binding peptide
  MOD_RES (2)..(3): Xaa is C or S
PXXAPTKLSAISVLYLDDSSNVILKNYQNMVVR

SEQ ID NO: 9090 - protein, 38 aa, Artificial Sequence
  Cyclic GFR-binding peptide
  MOD_RES (5)..(6)..(37): Xaa is C or S
SAAPXXVPQALNAISILYFVGRKPKVLKKYRMIVRSXK

SEQ ID NO: 9091 - protein, 28 aa, Artificial Sequence
  Cyclic GFR-binding peptide
  MOD_RES (26)..(28): Xaa is C or S
SPISILYKVGRKPKVLKYHYMIVRSXKX

SEQ ID NO: 9092 - protein, 25 aa, Artificial Sequence
  Cyclic GFR-binding peptide
LNAISMLYFDEYDKVVLKKYREMVV

SEQ ID NO: 9093 - protein, 28 aa, Artificial Sequence
  Cyclic GFR-binding peptide
VPQALSATSILYYVGRKPKVLRKHRMIV

SEQ ID NO: 9094 - protein, 31 aa, Artificial Sequence
  Cyclic GFR-binding peptide
  MOD_RES (5)..(6): Xaa is C or S
VPKPXXAPTQLSATSVLYYDDSSNVILRKHR

SEQ ID NO: 9095 - protein, 25 aa, Artificial Sequence
  Cyclic GFR-binding peptide
APTKLSATSVLYYDDSSNVILRKHR

SEQ ID NO: 9096 - protein, 34 aa, Artificial Sequence
  Cyclic GFR-binding peptide
  MOD_RES (31)..(33): Xaa is C or S
TKLNAISVLYFDDMGVPTLKKYREGMSVAEXGXR

SEQ ID NO: 9097 - protein, 25 aa, Artificial Sequence
  Cyclic GFR-binding peptide
LNAISILYFVGRTPKVLKKYRMVVK

SEQ ID NO: 9098 - protein, 29 aa, Artificial Sequence
  Cyclic GFR-binding peptide
  MOD_RES (27)..(29): Xaa is C or S
NAISVLYFDSSNNVILKKYRNMVVKAXGX

SEQ ID NO: 9099 - protein, 35 aa, Artificial Sequence
  Cyclic GFR-binding peptide
  MOD_RES (32)..(34): Xaa is C or S
VPTELSATSMLYYDENEKVVLRKHRDMVVEGXGXR

SEQ ID NO: 9100 - protein, 23 aa, Artificial Sequence
  Cyclic GFR-binding peptide
TKLSAISVLYLDDSSNVILKNYQ

SEQ ID NO: 9101 - protein, 34 aa, Artificial Sequence
  Cyclic GFR-binding peptide
  MOD_RES (1)..(2)..(34): Xaa is C or S
XXVPTELSATSMLYYDEYDKVVLRKHREMVVEGX

SEQ ID NO: 9102 - protein, 31 aa, Artificial Sequence
  Cyclic GFR-binding peptide
QVQLNAISVLYFEIVRKKPIFLKKYRTLEDH

SEQ ID NO: 9103 - protein, 29 aa, Artificial Sequence
  Cyclic GFR-binding peptide
VSQDLSPISILYKIGKTPKILKYHYMIVK

SEQ ID NO: 9104 - protein, 34 aa, Artificial Sequence
  Cyclic GFR-binding peptide
  MOD_RES (31)..(33): Xaa is C or S
LSATSVLYYEIVRKKPIFLRKHRTLEDHLAXKXE

SEQ ID NO: 9105 - protein, 29 aa, Artificial Sequence
  Cyclic GFR-binding peptide
  MOD_RES (26)..(28): Xaa is C or S
SATSILYYIGKTPKILRKHRMIVKSXKXS

SEQ ID NO: 9106 - protein, 35 aa, Artificial Sequence
  Cyclic GFR-binding peptide
  MOD_RES (1)..(2)..(34): Xaa is C or S
XXVPTELSPISMLYKDEYDKVVLKYHYEMVVEGXG

SEQ ID NO: 9107 - protein, 33 aa, Artificial Sequence
  Cyclic GFR-binding peptide
  MOD_RES (1)..(2)..(33): Xaa is C or S
XXVPQALNAISILYFVGRKPKVLKKYRMIVRSX

SEQ ID NO: 9108 - protein, 30 aa, Artificial Sequence
  Cyclic GFR-binding peptide
  MOD_RES (29)..(29): Xaa is C or S
KLSPISVLYKDSSNNVILKYHYNMVVKAXG

SEQ ID NO: 9109 - protein, 38 aa, Artificial Sequence
  Cyclic GFR-binding peptide
  MOD_RES (2)..(3)..(36)..(38): Xaa is C or S
AXXVPTKLNAISVLYFDDMGVPTLKKYREGMSVAEXGX

SEQ ID NO: 9110 - protein, 36 aa, Artificial Sequence
  Cyclic GFR-binding peptide
  MOD_RES (4)..(5): Xaa is C or S
PKAXXVPTELSPISMLYKDENEKVVLKYHYDMVVEG

SEQ ID NO: 9111 - protein, 39 aa, Artificial Sequence
  Cyclic GFR-binding peptide
  MOD_RES (5)..(6)..(38): Xaa is C or S
IPKAXXVPTELSATSMLYYDENEKVVLRKHRDMVVEGXG

SEQ ID NO: 9112 - protein, 29 aa, Artificial Sequence
  Cyclic GFR-binding peptide
  MOD_RES (1)..(1): Xaa is C or S
XAPTKLSPISVLYKDSSNNVILKYHYNMV

SEQ ID NO: 9113 - protein, 28 aa, Artificial Sequence
  Cyclic GFR-binding peptide
  MOD_RES (28)..(28): Xaa is C or S
ALSPISILYKVGRKPKVLKYHYMIVRSX

SEQ ID NO: 9114 - protein, 26 aa, Artificial Sequence
  Cyclic GFR-binding peptide
APTQLSATSVLYYDDSSNVILRKHRN

SEQ ID NO: 9115 - protein, 23 aa, Artificial Sequence
  Cyclic GFR-binding peptide
SAISVLYLDSSNNVILKNYQNMV

SEQ ID NO: 9116 - protein, 23 aa, Artificial Sequence
  Cyclic GFR-binding peptide
KLNAISVLYFDDMGVPTLKKYRE

SEQ ID NO: 9117 - protein, 32 aa, Artificial Sequence
  Cyclic GFR-binding peptide
  MOD_RES (31)..(31): Xaa is C or S
VSQDLSAISILYLIGKTPKILKNYQMIVKSXK

SEQ ID NO: 9118 - protein, 34 aa, Artificial Sequence
  Cyclic GFR-binding peptide
  MOD_RES (1)..(2): Xaa is C or S
XXVPTKLSAISVLYLDDMGVPTLKNYQEGMSVAE

SEQ ID NO: 9119 - protein, 26 aa, Artificial Sequence
  Cyclic GFR-binding peptide
TELSPISMLYKDENEKVVLKYHYDMV

SEQ ID NO: 9120 - protein, 36 aa, Artificial Sequence
  Cyclic GFR-binding peptide
  MOD_RES (5)..(6): Xaa is C or S
VPKPXXAPTQLSATSVLYYDDSSNVILRKHRNMVVR

SEQ ID NO: 9121 - protein, 38 aa, Artificial Sequence
  Cyclic GFR-binding peptide
  MOD_RES (4)..(5)..(37): Xaa is C or S
PKPXXAPTQLSAISVLYLDDSSNVILKNYQNMVVRAXG

SEQ ID NO: 9122 - protein, 39 aa, Artificial Sequence
  Cyclic GFR-binding peptide
  MOD_RES (4)..(5)..(36)..(38): Xaa is C or S
ASPXXVSQDLSAISILYLIGKTPKILKNYQMIVKSXKXS

SEQ ID NO: 9123 - protein, 37 aa, Artificial Sequence
  Cyclic GFR-binding peptide
  MOD_RES (34)..(36): Xaa is C or S
QVQLSATSVLYYEIVRKKPIFLRKHRTLEDHLAXKXE

SEQ ID NO: 9124 - protein, 31 aa, Artificial Sequence
  Cyclic GFR-binding peptide
  MOD_RES (31)..(31): Xaa is C or S
PTELNAISMLYFDEYDKVVLKKYREMVVEGX

SEQ ID NO: 9125 - protein, 25 aa, Artificial Sequence
  Cyclic GFR-binding peptide
LSPISVLYKDSSNNVILKYHYNMVV

SEQ ID NO: 9126 - protein, 33 aa, Artificial Sequence
  Cyclic GFR-binding peptide
  MOD_RES (2)..(3): Xaa is C or S
AXXVPTELSATSMLYYDENEKVVLRKHRDMVVE

SEQ ID NO: 9127 - protein, 27 aa, Artificial Sequence
  Cyclic GFR-binding peptide
SQDLSPISILYKIGKTPKILKYHYMIV

SEQ ID NO: 9128 - protein, 31 aa, Artificial Sequence
  Cyclic GFR-binding peptide
  MOD_RES (3)..(4): Xaa is C or S
KPXXAPTKLSPISVLYKDDSSNVILKYHYNM

SEQ ID NO: 9129 - protein, 27 aa, Artificial Sequence
  Cyclic GFR-binding peptide
SQDLSATSILYYIGKTPKILRKHRMIV

SEQ ID NO: 9130 - protein, 27 aa, Artificial Sequence
  Cyclic GFR-binding peptide
  MOD_RES (1)..(2): Xaa is C or S
XXVPQALNAISILYFVGRKPKVLKKYR

SEQ ID NO: 9131 - protein, 31 aa, Artificial Sequence
  Cyclic GFR-binding peptide
  MOD_RES (2)..(3): Xaa is C or S
PXXVPQALSPISILYKVGRKPKVLKYHYMIV

SEQ ID NO: 9132 - protein, 34 aa, Artificial Sequence
  Cyclic GFR-binding peptide
  MOD_RES (5)..(6): Xaa is C or S
VGKAXXVPTKLNAISVLYFDDMGVPTLKKYREGM

SEQ ID NO: 9133 - protein, 39 aa, Artificial Sequence
  Cyclic GFR-binding peptide
  MOD_RES (37)..(39): Xaa is C or S
RPTQVQLSPISVLYKEIVRKKPIFLKYHYTLEDHLAXKX

SEQ ID NO: 9134 - protein, 38 aa, Artificial Sequence
  Cyclic GFR-binding peptide
  MOD_RES (4)..(5)..(38): Xaa is C or S
GKAXXVPTKLSAISVLYLDDMGVPTLKNYQEGMSVAEX

SEQ ID NO: 9135 - protein, 28 aa, Artificial Sequence
  Cyclic GFR-binding peptide
SAISVLYLEIVRKKPIFLKNYQTLEDHL

SEQ ID NO: 9136 - protein, 30 aa, Artificial Sequence
  Cyclic GFR-binding peptide
  MOD_RES (1)..(1): Xaa is C or S
XVSQDLSPISILYKIGKTPKILKYHYMIVK

SEQ ID NO: 9137 - protein, 39 aa, Artificial Sequence
  Cyclic GFR-binding peptide
  MOD_RES (5)..(6)..(38): Xaa is C or S
VPKPXXAPTQLSAISVLYLDDSSNVILKNYQNMVVRAXG

SEQ ID NO: 9138 - protein, 29 aa, Artificial Sequence
  Cyclic GFR-binding peptide
  MOD_RES (1)..(2): Xaa is C or S
XXVPTELNAISMLYFDEYDKVVLKKYREM

SEQ ID NO: 9139 - protein, 25 aa, Artificial Sequence
  Cyclic GFR-binding peptide
PTELSPISMLYKDEYDKVVLKYHYE

SEQ ID NO: 9140 - protein, 29 aa, Artificial Sequence
  Cyclic GFR-binding peptide
  MOD_RES (29)..(29): Xaa is C or S
QDLSPISILYKVGRTPKVLKYHYMVVKSX

SEQ ID NO: 9141 - protein, 34 aa, Artificial Sequence
  Cyclic GFR-binding peptide
  MOD_RES (1)..(32)..(34): Xaa is C or S
XVSQDLNAISILYFIGKTPKILKKYRMIVKSXKX

SEQ ID NO: 9142 - protein, 32 aa, Artificial Sequence
  Cyclic GFR-binding peptide
  MOD_RES (2)..(3): Xaa is C or S
AXXVPTKLNAISVLYFDDMGVPTLKKYREGMS

SEQ ID NO: 9143 - protein, 22 aa, Artificial Sequence
  Cyclic GFR-binding peptide
LSPISILYKVGRTPKVLKYHYM

SEQ ID NO: 9144 - protein, 31 aa, Artificial Sequence
  Cyclic GFR-binding peptide
VPTKLSAISVLYLDDMGVPTLKNYQEGMSVA

SEQ ID NO: 9145 - protein, 34 aa, Artificial Sequence
  Cyclic GFR-binding peptide
  MOD_RES (4)..(5): Xaa is C or S
ASPXXVPQDLSPISILYKVGRTPKVLKYHYMVVK

SEQ ID NO: 9146 - protein, 35 aa, Artificial Sequence
  Cyclic GFR-binding peptide
  MOD_RES (2)..(3)..(35): Xaa is C or S
AXXVPTELSPISMLYKDEYDKVVLKYHYEMVVEGX

SEQ ID NO: 9147 - protein, 30 aa, Artificial Sequence
  Cyclic GFR-binding peptide
  MOD_RES (30)..(30): Xaa is C or S
PQALSPISILYKVGRKPKVLKYHYMIVRSX

SEQ ID NO: 9148 - protein, 25 aa, Artificial Sequence
  Cyclic GFR-binding peptide
APTKLSAISVLYLDDSSNVILKNYQ

SEQ ID NO: 9149 - protein, 30 aa, Artificial Sequence
  Cyclic GFR-binding peptide
  MOD_RES (1)..(2): Xaa is C or S
XXVSQDLSATSILYYIGKTPKILRKHRMIV

SEQ ID NO: 9150 - protein, 36 aa, Artificial Sequence
  Cyclic GFR-binding peptide
  MOD_RES (5)..(5): Xaa is C or S
RNVQXRPTQVQLNAISVLYFEIVRKKPIFLKKYRTL

SEQ ID NO: 9151 - protein, 31 aa, Artificial Sequence
  Cyclic GFR-binding peptide
  MOD_RES (28)..(30): Xaa is C or S
SATSVLYYDDMGVPTLRKHREGMSVAEXGXR

SEQ ID NO: 9152 - protein, 28 aa, Artificial Sequence
  Cyclic GFR-binding peptide
VQLSPISVLYKEIVRKKPIFLKYHYTLE

SEQ ID NO: 9153 - protein, 26 aa, Artificial Sequence
  Cyclic GFR-binding peptide
PTELSATSMLYYDEYDKVVLRKHREM

SEQ ID NO: 9154 - protein, 21 aa, Artificial Sequence
  Cyclic GFR-binding peptide
LSPISILYKIGKTPKILKYHY

SEQ ID NO: 9155 - protein, 26 aa, Artificial Sequence
  Cyclic GFR-binding peptide
QDLSPISILYKVGRTPKVLKYHYMVV

SEQ ID NO: 9156 - protein, 33 aa, Artificial Sequence
  Cyclic GFR-binding peptide
  MOD_RES (32)..(32): Xaa is C or S
VPTELSATSMLYYDEYDKVVLRKHREMVVEGXG

SEQ ID NO: 9157 - protein, 37 aa, Artificial Sequence
  Cyclic GFR-binding peptide
  MOD_RES (3)..(4)..(36): Xaa is C or S
KPXXAPTKLSAISVLYLDDSSNVILKNYQNMVVRSXG

SEQ ID NO: 9158 - protein, 33 aa, Artificial Sequence
  Cyclic GFR-binding peptide
  MOD_RES (4)..(5): Xaa is C or S
ASPXXVSQDLNAISILYFIGKTPKILKKYRMIV

SEQ ID NO: 9159 - protein, 30 aa, Artificial Sequence
  Cyclic GFR-binding peptide
VQLSATSVLYYEIVRKKPIFLRKHRTLEDH

SEQ ID NO: 9160 - protein, 29 aa, Artificial Sequence
  Cyclic GFR-binding peptide
PQALSATSILYYVGRKPKVLRKHRMIVRS

SEQ ID NO: 9161 - protein, 30 aa, Artificial Sequence
  Cyclic GFR-binding peptide
  MOD_RES (28)..(30): Xaa is C or S
LSATSVLYYDDSSNVILRKHRNMVVRAXGX

SEQ ID NO: 9162 - protein, 38 aa, Artificial Sequence
  Cyclic GFR-binding peptide
  MOD_RES (37)..(37): Xaa is C or S
RPTQVQLSATSVLYYEIVRKKPIFLRKHRTLEDHLAXK

SEQ ID NO: 9163 - protein, 35 aa, Artificial Sequence
  Cyclic GFR-binding peptide
  MOD_RES (4)..(5): Xaa is C or S
ASPXXVPQDLSATSILYYVGRTPKVLRKHRMVVKS

SEQ ID NO: 9164 - protein, 29 aa, Artificial Sequence
  Cyclic GFR-binding peptide
  MOD_RES (1)..(2): Xaa is C or S
XXAPTKLSPISVLYKDDSSNVILKYHYNM

SEQ ID NO: 9165 - protein, 35 aa, Artificial Sequence
  Cyclic GFR-binding peptide
  MOD_RES (5)..(6): Xaa is C or S
VGKAXXVPTKLNAISVLYFDDMGVPTLKKYREGMS

SEQ ID NO: 9166 - protein, 32 aa, Artificial Sequence
  Cyclic GFR-binding peptide
  MOD_RES (30)..(32): Xaa is C or S
NAISVLYFEIVRKKPIFLKKYRTLEDHLAXKX

SEQ ID NO: 9167 - protein, 32 aa, Artificial Sequence
  Cyclic GFR-binding peptide
  MOD_RES (3)..(4): Xaa is C or S
APXXVPQALNAISILYFVGRKPKVLKKYRMIV

SEQ ID NO: 9168 - protein, 30 aa, Artificial Sequence
  Cyclic GFR-binding peptide
  MOD_RES (28)..(30): Xaa is C or S
DLSATSILYYIGKTPKILRKHRMIVKSXKX

SEQ ID NO: 9169 - protein, 29 aa, Artificial Sequence
  Cyclic GFR-binding peptide
  MOD_RES (3)..(4): Xaa is C or S
SPXXVPQDLSPISILYKVGRTPKVLKYHY

SEQ ID NO: 9170 - protein, 37 aa, Artificial Sequence
  Cyclic GFR-binding peptide
  MOD_RES (4)..(5)..(36): Xaa is C or S
ASPXXVSQDLSPISILYKIGKTPKILKYHYMIVKSXK

SEQ ID NO: 9171 - protein, 33 aa, Artificial Sequence
  Cyclic GFR-binding peptide
  MOD_RES (4)..(5): Xaa is C or S
PKAXXVPTELSPISMLYKDEYDKVVLKYHYEMV

SEQ ID NO: 9172 - protein, 31 aa, Artificial Sequence
  Cyclic GFR-binding peptide
  MOD_RES (31)..(31): Xaa is C or S
PTELNAISMLYFDENEKVVLKKYRDMVVEGX

SEQ ID NO: 9173 - protein, 28 aa, Artificial Sequence
  Cyclic GFR-binding peptide
  MOD_RES (2)..(2): Xaa is C or S
TXAPTKLSPISVLYKDDSSNVILKYHYN

SEQ ID NO: 9174 - protein, 29 aa, Artificial Sequence
  Cyclic GFR-binding peptide
  MOD_RES (29)..(29): Xaa is C or S
QDLSPISILYKIGKTPKILKYHYMIVKSX

SEQ ID NO: 9175 - protein, 34 aa, Artificial Sequence
  Cyclic GFR-binding peptide
  MOD_RES (1)..(2)..(33): Xaa is C or S
XXVSQDLSAISILYLIGKTPKILKNYQMIVKSXK

SEQ ID NO: 9176 - protein, 35 aa, Artificial Sequence
  Cyclic GFR-binding peptide
  MOD_RES (6)..(7): Xaa is C or S
ASASPXXVPQDLNAISILYFVGRTPKVLKKYRMVV

SEQ ID NO: 9177 - protein, 32 aa, Artificial Sequence
  Cyclic GFR-binding peptide
  MOD_RES (29)..(31): Xaa is C or S
QDLSPISILYKVGRTPKVLKYHYMVVKSXKXS

SEQ ID NO: 9178 - protein, 24 aa, Artificial Sequence
  Cyclic GFR-binding peptide
SPISMLYKDEYDKVVLKYHYEMVV

SEQ ID NO: 9179 - protein, 41 aa, Artificial Sequence
  Cyclic GFR-binding peptide
  MOD_RES (6)..(7)..(39)..(41): Xaa is C or S
YVPKPXXAPTKLSAISVLYLDDSSNVILKNYQNMVVRSXGX

SEQ ID NO: 9180 - protein, 36 aa, Artificial Sequence
  Cyclic GFR-binding peptide
  MOD_RES (6)..(7): Xaa is C or S
AVPKAXXAPTKLNAISVLYFDSSNNVILKKYRNMVV

SEQ ID NO: 9181 - protein, 38 aa, Artificial Sequence
  Cyclic GFR-binding peptide
  MOD_RES (6)..(7)..(38): Xaa is C or S
ASASPXXVSQDLSAISILYLIGKTPKILKNYQMIVKSX

SEQ ID NO: 9182 - protein, 27 aa, Artificial Sequence
  Cyclic GFR-binding peptide
  MOD_RES (1)..(2): Xaa is C or S
XXAPTKLNAISVLYFDSSNNVILKKYR

SEQ ID NO: 9183 - protein, 34 aa, Artificial Sequence
  Cyclic GFR-binding peptide
  MOD_RES (34)..(34): Xaa is C or S
QVQLSAISVLYLEIVRKKPIFLKNYQTLEDHLAX

SEQ ID NO: 9184 - protein, 35 aa, Artificial Sequence
  Cyclic GFR-binding peptide
  MOD_RES (2)..(3)..(35): Xaa is C or S
AXXAPTKLSPISVLYKDSSNNVILKYHYNMVVKAX

SEQ ID NO: 9185 - protein, 32 aa, Artificial Sequence
  Cyclic GFR-binding peptide
VPTKLSATSVLYYDDMGVPTLRKHREGMSVAE

SEQ ID NO: 9186 - protein, 33 aa, Artificial Sequence
  Cyclic GFR-binding peptide
QVQLSATSVLYYEIVRKKPIFLRKHRTLEDHLA

SEQ ID NO: 9187 - protein, 33 aa, Artificial Sequence
  Cyclic GFR-binding peptide
  MOD_RES (30)..(32): Xaa is C or S
KLSATSVLYYDDMGVPTLRKHREGMSVAEXGXR

SEQ ID NO: 9188 - protein, 31 aa, Artificial Sequence
  Cyclic GFR-binding peptide
  MOD_RES (2)..(2): Xaa is C or S
QXRPTQVQLNAISVLYFEIVRKKPIFLKKYR

SEQ ID NO: 9189 - protein, 31 aa, Artificial Sequence
  Cyclic GFR-binding peptide
  MOD_RES (1)..(2): Xaa is C or S
XXVPQDLSAISILYLVGRTPKVLKNYQMVVK

SEQ ID NO: 9190 - protein, 38 aa, Artificial Sequence
  Cyclic GFR-binding peptide
  MOD_RES (4)..(5)..(36)..(38): Xaa is C or S
ASPXXVPQDLSAISILYLVGRTPKVLKNYQMVVKSXKX

SEQ ID NO: 9191 - protein, 41 aa, Artificial Sequence
  Cyclic GFR-binding peptide
  MOD_RES (6)..(7)..(39)..(41): Xaa is C or S
YVPKPXXAPTKLSPISVLYKDDSSNVILKYHYNMVVRSXGX

SEQ ID NO: 9192 - protein, 30 aa, Artificial Sequence
  Cyclic GFR-binding peptide
TKLSATSVLYYDDMGVPTLRKHREGMSVAE

SEQ ID NO: 9193 - protein, 29 aa, Artificial Sequence
  Cyclic GFR-binding peptide
PTKLNAISVLYFDDMGVPTLKKYREGMSV

SEQ ID NO: 9194 - protein, 28 aa, Artificial Sequence
  Cyclic GFR-binding peptide
QVQLSATSVLYYEIVRKKPIFLRKHRTL

SEQ ID NO: 9195 - protein, 34 aa, Artificial Sequence
  Cyclic GFR-binding peptide
  MOD_RES (4)..(5): Xaa is C or S
PKPXXAPTKLSPISVLYKDDSSNVILKYHYNMVV

SEQ ID NO: 9196 - protein, 36 aa, Artificial Sequence
  Cyclic GFR-binding peptide
  MOD_RES (3)..(3): Xaa is C or S
VQXRPTQVQLSPISVLYKEIVRKKPIFLKYHYTLED

SEQ ID NO: 9197 - protein, 29 aa, Artificial Sequence
  Cyclic GFR-binding peptide
  MOD_RES (2)..(3): Xaa is C or S
AXXVPTELSPISMLYKDENEKVVLKYHYD

SEQ ID NO: 9198 - protein, 23 aa, Artificial Sequence
  Cyclic GFR-binding peptide
LSAISILYLVGRTPKVLKNYQMV

SEQ ID NO: 9199 - protein, 37 aa, Artificial Sequence
  Cyclic GFR-binding peptide
  MOD_RES (3)..(4)..(36): Xaa is C or S
KAXXVPTELNAISMLYFDEYDKVVLKKYREMVVEGXG

SEQ ID NO: 9200 - protein, 29 aa, Artificial Sequence
  Cyclic GFR-binding peptide
TKLSPISVLYKDDSSNVILKYHYNMVVRS

SEQ ID NO: 9201 - protein, 20 aa, Artificial Sequence
  Cyclic GFR-binding peptide
SPISILYKVGRKPKVLKYHY

SEQ ID NO: 9202 - protein, 25 aa, Artificial Sequence
  Cyclic GFR-binding peptide
ALSATSILYYVGRKPKVLRKHRMIV

SEQ ID NO: 9203 - protein, 32 aa, Artificial Sequence
  Cyclic GFR-binding peptide
  MOD_RES (5)..(6): Xaa is C or S
VPKPXXAPTKLSATSVLYYDDSSNVILRKHRN

SEQ ID NO: 9204 - protein, 32 aa, Artificial Sequence
  Cyclic GFR-binding peptide
  MOD_RES (30)..(32): Xaa is C or S
PQALSPISILYKVGRKPKVLKYHYMIVRSXKX

SEQ ID NO: 9205 - protein, 34 aa, Artificial Sequence
  Cyclic GFR-binding peptide
  MOD_RES (4)..(5): Xaa is C or S
PKAXXVPTELSATSMLYYDEYDKVVLRKHREMVV

SEQ ID NO: 9206 - protein, 30 aa, Artificial Sequence
  Cyclic GFR-binding peptide
  MOD_RES (1)..(2): Xaa is C or S
XXVPTKLSATSVLYYDDMGVPTLRKHREGM

SEQ ID NO: 9207 - protein, 26 aa, Artificial Sequence
  Cyclic GFR-binding peptide
  MOD_RES (26)..(26): Xaa is C or S
SATSILYYIGKTPKILRKHRMIVKSX

SEQ ID NO: 9208 - protein, 39 aa, Artificial Sequence
  Cyclic GFR-binding peptide
  MOD_RES (6)..(7)..(39): Xaa is C or S
TVPKPXXAPTQLSATSVLYYDDSSNVILRKHRNMVVRAX

SEQ ID NO: 9209 - protein, 37 aa, Artificial Sequence
  Cyclic GFR-binding peptide
  MOD_RES (2)..(3)..(34)..(36): Xaa is C or S
PXXVPQDLSAISILYLVGRTPKVLKNYQMVVKSXKXS

SEQ ID NO: 9210 - protein, 32 aa, Artificial Sequence
  Cyclic GFR-binding peptide
  MOD_RES (30)..(32): Xaa is C or S
SQDLSAISILYLIGKTPKILKNYQMIVKSXKX

SEQ ID NO: 9211 - protein, 41 aa, Artificial Sequence
  Cyclic GFR-binding peptide
  MOD_RES (6)..(7)..(39)..(41): Xaa is C or S
KIPKAXXVPTELSATSMLYYDENEKVVLRKHRDMVVEGXGX

SEQ ID NO: 9212 - protein, 21 aa, Artificial Sequence
  Cyclic GFR-binding peptide
LNAISILYFVGRKPKVLKKYR

SEQ ID NO: 9213 - protein, 32 aa, Artificial Sequence
  Cyclic GFR-binding peptide
  MOD_RES (2)..(3): Xaa is C or S
AXXAPTKLSPISVLYKDSSNNVILKYHYNMVV

SEQ ID NO: 9214 - protein, 27 aa, Artificial Sequence
  Cyclic GFR-binding peptide
TKLSPISVLYKDSSNNVILKYHYNMVV

SEQ ID NO: 9215 - protein, 32 aa, Artificial Sequence
  Cyclic GFR-binding peptide
  MOD_RES (30)..(32): Xaa is C or S
KLSAISVLYLDDMGVPTLKNYQEGMSVAEXGX

SEQ ID NO: 9216 - protein, 32 aa, Artificial Sequence
  Cyclic GFR-binding peptide
  MOD_RES (32)..(32): Xaa is C or S
QLSAISVLYLEIVRKKPIFLKNYQTLEDHLAX

SEQ ID NO: 9217 - protein, 22 aa, Artificial Sequence
  Cyclic GFR-binding peptide
LSPISILYKVGRKPKVLKYHYM

SEQ ID NO: 9218 - protein, 37 aa, Artificial Sequence
  Cyclic GFR-binding peptide
  MOD_RES (4)..(36): Xaa is C or S
KPTXAPTKLSATSVLYYDDSSNVILRKHRNMVVRSXG

SEQ ID NO: 9219 - protein, 37 aa, Artificial Sequence
  Cyclic GFR-binding peptide
  MOD_RES (2)..(3)..(35)..(37): Xaa is C or S
PXXAPTKLSATSVLYYDDSSNVILRKHRNMVVRSXGX

SEQ ID NO: 9220 - protein, 27 aa, Artificial Sequence
  Cyclic GFR-binding peptide
  MOD_RES (1)..(1): Xaa is C or S
XAPTKLSPISVLYKDSSNNVILKYHYN

SEQ ID NO: 9221 - protein, 33 aa, Artificial Sequence
  Cyclic GFR-binding peptide
  MOD_RES (2)..(3): Xaa is C or S
PXXAPTKLSATSVLYYDDSSNVILRKHRNMVVR

SEQ ID NO: 9222 - protein, 36 aa, Artificial Sequence
  Cyclic GFR-binding peptide
  MOD_RES (4)..(36): Xaa is C or S
KPTXAPTKLSAISVLYLDDSSNVILKNYQNMVVRSX

SEQ ID NO: 9223 - protein, 31 aa, Artificial Sequence
  Cyclic GFR-binding peptide
  MOD_RES (31)..(31): Xaa is C or S
PTQLSAISVLYLDDSSNVILKNYQNMVVRAX

SEQ ID NO: 9224 - protein, 42 aa, Artificial Sequence
  Cyclic GFR-binding peptide
  MOD_RES (7)..(39)..(41): Xaa is C or S
HVTKPTXAPTKLSATSVLYYDDSSNVILRKHRNMVVRSXGXH

SEQ ID NO: 9225 - protein, 24 aa, Artificial Sequence
  Cyclic GFR-binding peptide
LSATSVLYYEIVRKKPIFLRKHRT

SEQ ID NO: 9226 - protein, 35 aa, Artificial Sequence
  Cyclic GFR-binding peptide
  MOD_RES (3)..(4): Xaa is C or S
KAXXVPTELSATSMLYYDEYDKVVLRKHREMVVEG

SEQ ID NO: 9227 - protein, 31 aa, Artificial Sequence
  Cyclic GFR-binding peptide
  MOD_RES (29)..(31): Xaa is C or S
ELSPISMLYKDENEKVVLKYHYDMVVEGXGX

SEQ ID NO: 9228 - protein, 34 aa, Artificial Sequence
  Cyclic GFR-binding peptide
  MOD_RES (31)..(33): Xaa is C or S
PTKLSAISVLYLDSSNNVILKNYQNMVVKAXGXH

SEQ ID NO: 9229 - protein, 38 aa, Artificial Sequence
  Cyclic GFR-binding peptide
  MOD_RES (2)..(3)..(35)..(37): Xaa is C or S
AXXAPTKLSPISVLYKDSSNNVILKYHYNMVVKAXGXH

SEQ ID NO: 9230 - protein, 34 aa, Artificial Sequence
  Cyclic GFR-binding peptide
  MOD_RES (31)..(33): Xaa is C or S
VPQALSAISILYLVGRKPKVLKNYQMIVRSXKXS

SEQ ID NO: 9231 - protein, 31 aa, Artificial Sequence
  Cyclic GFR-binding peptide
  MOD_RES (31)..(31): Xaa is C or S
TKLNAISVLYFDDMGVPTLKKYREGMSVAEX

SEQ ID NO: 9232 - protein, 23 aa, Artificial Sequence
  Cyclic GFR-binding peptide
SPISVLYKEIVRKKPIFLKYHYT

SEQ ID NO: 9233 - protein, 30 aa, Artificial Sequence
  Cyclic GFR-binding peptide
PTKLSATSVLYYDDMGVPTLRKHREGMSVA

SEQ ID NO: 9234 - protein, 29 aa, Artificial Sequence
  Cyclic GFR-binding peptide
  MOD_RES (1)..(1): Xaa is C or S
XAPTKLSPISVLYKDDSSNVILKYHYNMV

SEQ ID NO: 9235 - protein, 38 aa, Artificial Sequence
  Cyclic GFR-binding peptide
  MOD_RES (3)..(35)..(37): Xaa is C or S
PTXAPTKLSATSVLYYDDSSNVILRKHRNMVVRSXGXH

SEQ ID NO: 9236 - protein, 21 aa, Artificial Sequence
  Cyclic GFR-binding peptide
NAISVLYFDSSNNVILKKYRN

SEQ ID NO: 9237 - protein, 35 aa, Artificial Sequence
  Cyclic GFR-binding peptide
  MOD_RES (32)..(34): Xaa is C or S
APTKLSPISVLYKDSSNNVILKYHYNMVVKAXGXH

SEQ ID NO: 9238 - protein, 34 aa, Artificial Sequence
  Cyclic GFR-binding peptide
  MOD_RES (1)..(2)..(33): Xaa is C or S
XXVSQDLNAISILYFIGKTPKILKKYRMIVKSXK

SEQ ID NO: 9239 - protein, 30 aa, Artificial Sequence
  Cyclic GFR-binding peptide
  MOD_RES (1)..(2): Xaa is C or S
XXVSQDLNAISILYFIGKTPKILKKYRMIV

SEQ ID NO: 9240 - protein, 34 aa, Artificial Sequence
  Cyclic GFR-binding peptide
  MOD_RES (2)..(3): Xaa is C or S
AXXAPTKLSPISVLYKDSSNNVILKYHYNMVVKA

SEQ ID NO: 9241 - protein, 34 aa, Artificial Sequence
  Cyclic GFR-binding peptide
  MOD_RES (1)..(33): Xaa is C or S
XAPTKLNAISVLYFDSSNNVILKKYRNMVVKAXG

SEQ ID NO: 9242 - protein, 25 aa, Artificial Sequence
  Cyclic GFR-binding peptide
PQALSATSILYYVGRKPKVLRKHRM

SEQ ID NO: 9243 - protein, 38 aa, Artificial Sequence
  Cyclic GFR-binding peptide
  MOD_RES (5)..(37): Xaa is C or S
TKPTXAPTKLSAISVLYLDDSSNVILKNYQNMVVRSXG

SEQ ID NO: 9244 - protein, 40 aa, Artificial Sequence
  Cyclic GFR-binding peptide
  MOD_RES (6)..(7)..(38)..(40): Xaa is C or S
ASASPXXVSQDLSATSILYYIGKTPKILRKHRMIVKSXKX

SEQ ID NO: 9245 - protein, 39 aa, Artificial Sequence
  Cyclic GFR-binding peptide
  MOD_RES (3)..(4)..(36)..(38): Xaa is C or S
KPXXAPTQLSAISVLYLDDSSNVILKNYQNMVVRAXGXH

SEQ ID NO: 9246 - protein, 35 aa, Artificial Sequence
  Cyclic GFR-binding peptide
  MOD_RES (6)..(7): Xaa is C or S
ASAAPXXVPQALNAISILYFVGRKPKVLKKYRMIV

SEQ ID NO: 9247 - protein, 25 aa, Artificial Sequence
  Cyclic GFR-binding peptide
VPQALSATSILYYVGRKPKVLRKHR

SEQ ID NO: 9248 - protein, 28 aa, Artificial Sequence
  Cyclic GFR-binding peptide
  MOD_RES (1)..(1): Xaa is C or S
XVPTELSATSMLYYDENEKVVLRKHRDM

SEQ ID NO: 9249 - protein, 34 aa, Artificial Sequence
  Cyclic GFR-binding peptide
  MOD_RES (3)..(4): Xaa is C or S
KAXXVPTELSPISMLYKDEYDKVVLKYHYEMVVE

SEQ ID NO: 9250 - protein, 34 aa, Artificial Sequence
  Cyclic GFR-binding peptide
  MOD_RES (5)..(6): Xaa is C or S
SASPXXVSQDLSAISILYLIGKTPKILKNYQMIV

SEQ ID NO: 9251 - protein, 27 aa, Artificial Sequence
  Cyclic GFR-binding peptide
  MOD_RES (1)..(2): Xaa is C or S
XXVPTELSATSMLYYDEYDKVVLRKHR

SEQ ID NO: 9252 - protein, 30 aa, Artificial Sequence
  Cyclic GFR-binding peptide
  MOD_RES (4)..(5): Xaa is C or S
AAPXXVPQALSATSILYYVGRKPKVLRKHR

SEQ ID NO: 9253 - protein, 33 aa, Artificial Sequence
  Cyclic GFR-binding peptide
  MOD_RES (30)..(32): Xaa is C or S
TKLSPISVLYKDDSSNVILKYHYNMVVRSXGXH

SEQ ID NO: 9254 - protein, 30 aa, Artificial Sequence
  Cyclic GFR-binding peptide
VQLSPISVLYKEIVRKKPIFLKYHYTLEDH

SEQ ID NO: 9255 - protein, 23 aa, Artificial Sequence
  Cyclic GFR-binding peptide
NAISMLYFDEYDKVVLKKYREMV

SEQ ID NO: 9256 - protein, 26 aa, Artificial Sequence
  Cyclic GFR-binding peptide
PTKLSAISVLYLDSSNNVILKNYQNM

SEQ ID NO: 9257 - protein, 38 aa, Artificial Sequence
  Cyclic GFR-binding peptide
  MOD_RES (5)..(6)..(38): Xaa is C or S
VPKPXXAPTKLSATSVLYYDDSSNVILRKHRNMVVRSX

SEQ ID NO: 9258 - protein, 32 aa, Artificial Sequence
  Cyclic GFR-binding peptide
TQVQLSATSVLYYEIVRKKPIFLRKHRTLEDH

SEQ ID NO: 9259 - protein, 20 aa, Artificial Sequence
  Cyclic GFR-binding peptide
SAISILYLVGRKPKVLKNYQ

SEQ ID NO: 9260 - protein, 39 aa, Artificial Sequence
  Cyclic GFR-binding peptide
  MOD_RES (37)..(39): Xaa is C or S
RPTQVQLSATSVLYYEIVRKKPIFLRKHRTLEDHLAXKX

SEQ ID NO: 9261 - protein, 28 aa, Artificial Sequence
  Cyclic GFR-binding peptide
SQDLNAISILYFIGKTPKILKKYRMIVK

SEQ ID NO: 9262 - protein, 29 aa, Artificial Sequence
  Cyclic GFR-binding peptide
  MOD_RES (1)..(2): Xaa is C or S
XXAPTKLSATSVLYYDDSSNVILRKHRNM

SEQ ID NO: 9263 - protein, 34 aa, Artificial Sequence
  Cyclic GFR-binding peptide
  MOD_RES (5)..(5): Xaa is C or S
TKPTXAPTKLSATSVLYYDDSSNVILRKHRNMVV

SEQ ID NO: 9264 - protein, 36 aa, Artificial Sequence
  Cyclic GFR-binding peptide
  MOD_RES (3)..(4)..(35): Xaa is C or S
SPXXVSQDLSATSILYYIGKTPKILRKHRMIVKSXK

SEQ ID NO: 9265 - protein, 39 aa, Artificial Sequence
  Cyclic GFR-binding peptide
  MOD_RES (4)..(5)..(37)..(39): Xaa is C or S
PKAXXVPTELNAISMLYFDEYDKVVLKKYREMVVEGXGX

SEQ ID NO: 9266 - protein, 36 aa, Artificial Sequence
  Cyclic GFR-binding peptide
  MOD_RES (6)..(7): Xaa is C or S
ASAAPXXVPQALSATSILYYVGRKPKVLRKHRMIVR

SEQ ID NO: 9267 - protein, 31 aa, Artificial Sequence
  Cyclic GFR-binding peptide
  MOD_RES (30)..(30): Xaa is C or S
SQDLSAISILYLIGKTPKILKNYQMIVKSXK

SEQ ID NO: 9268 - protein, 33 aa, Artificial Sequence
  Cyclic GFR-binding peptide
  MOD_RES (33)..(33): Xaa is C or S
VQLSPISVLYKEIVRKKPIFLKYHYTLEDHLAX

SEQ ID NO: 9269 - protein, 41 aa, Artificial Sequence
  Cyclic GFR-binding peptide
  MOD_RES (6)..(7)..(39)..(41): Xaa is C or S
KIPKAXXVPTELSPISMLYKDENEKVVLKYHYDMVVEGXGX

SEQ ID NO: 9270 - protein, 32 aa, Artificial Sequence
  Cyclic GFR-binding peptide
  MOD_RES (5)..(6): Xaa is C or S
SASPXXVSQDLSPISILYKIGKTPKILKYHYM

SEQ ID NO: 9271 - protein, 21 aa, Artificial Sequence
  Cyclic GFR-binding peptide
SATSILYYVGRTPKVLRKHRM

SEQ ID NO: 9272 - protein, 22 aa, Artificial Sequence
  Cyclic GFR-binding peptide
KLSATSVLYYDDMGVPTLRKHR

SEQ ID NO: 9273 - protein, 26 aa, Artificial Sequence
  Cyclic GFR-binding peptide
NAISVLYFDDMGVPTLKKYREGMSVA

SEQ ID NO: 9274 - protein, 26 aa, Artificial Sequence
  Cyclic GFR-binding peptide
  MOD_RES (1)..(1): Xaa is C or S
XAPTKLSATSVLYYDDSSNVILRKHR

SEQ ID NO: 9275 - protein, 35 aa, Artificial Sequence
  Cyclic GFR-binding peptide
  MOD_RES (4)..(5): Xaa is C or S
GKAXXVPTKLSATSVLYYDDMGVPTLRKHREGMSV

SEQ ID NO: 9276 - protein, 38 aa, Artificial Sequence
  Cyclic GFR-binding peptide
  MOD_RES (6)..(7): Xaa is C or S
KIPKAXXVPTELSPISMLYKDENEKVVLKYHYDMVVEG

SEQ ID NO: 9277 - protein, 27 aa, Artificial Sequence
  Cyclic GFR-binding peptide
SPISVLYKEIVRKKPIFLKYHYTLEDH

SEQ ID NO: 9278 - protein, 27 aa, Artificial Sequence
  Cyclic GFR-binding peptide
TELSPISMLYKDENEKVVLKYHYDMVV

SEQ ID NO: 9279 - protein, 29 aa, Artificial Sequence
  Cyclic GFR-binding peptide
TKLSAISVLYLDSSNNVILKNYQNMVVKA

SEQ ID NO: 9280 - protein, 20 aa, Artificial Sequence
  Cyclic GFR-binding peptide
SPISVLYKDDSSNVILKYHY

SEQ ID NO: 9281 - protein, 36 aa, Artificial Sequence
  Cyclic GFR-binding peptide
  MOD_RES (6)..(7): Xaa is C or S
ASAAPXXVPQALSPISILYKVGRKPKVLKYHYMIVR

SEQ ID NO: 9282 - protein, 31 aa, Artificial Sequence
  Cyclic GFR-binding peptide
  MOD_RES (4)..(5): Xaa is C or S
PKPXXAPTQLSATSVLYYDDSSNVILRKHRN

SEQ ID NO: 9283 - protein, 31 aa, Artificial Sequence
  Cyclic GFR-binding peptide
APTKLSAISVLYLDDSSNVILKNYQNMVVRS

SEQ ID NO: 9284 - protein, 28 aa, Artificial Sequence
  Cyclic GFR-binding peptide
  MOD_RES (1)..(1): Xaa is C or S
XVPTELSPISMLYKDENEKVVLKYHYDM

SEQ ID NO: 9285 - protein, 41 aa, Artificial Sequence
  Cyclic GFR-binding peptide
  MOD_RES (5)..(5): Xaa is C or S
RNVQXRPTQVQLNAISVLYFEIVRKKPIFLKKYRTLEDHLA

SEQ ID NO: 9286 - protein, 33 aa, Artificial Sequence
  Cyclic GFR-binding peptide
  MOD_RES (32)..(32): Xaa is C or S
QLSPISVLYKEIVRKKPIFLKYHYTLEDHLAXK

SEQ ID NO: 9287 - protein, 34 aa, Artificial Sequence
  Cyclic GFR-binding peptide
  MOD_RES (6)..(6): Xaa is C or S
VTKPTXAPTKLSATSVLYYDDSSNVILRKHRNMV

SEQ ID NO: 9288 - protein, 33 aa, Artificial Sequence
  Cyclic GFR-binding peptide
  MOD_RES (6)..(7): Xaa is C or S
SIPKAXXVPTELSPISMLYKDEYDKVVLKYHYE

SEQ ID NO: 9289 - protein, 32 aa, Artificial Sequence
  Cyclic GFR-binding peptide
  MOD_RES (4)..(5): Xaa is C or S
GKAXXVPTKLSAISVLYLDDMGVPTLKNYQEG

SEQ ID NO: 9290 - protein, 21 aa, Artificial Sequence
  Cyclic GFR-binding peptide
NAISVLYFDDMGVPTLKKYRE

SEQ ID NO: 9291 - protein, 27 aa, Artificial Sequence
  Cyclic GFR-binding peptide
PTKLSATSVLYYDDMGVPTLRKHREGM

SEQ ID NO: 9292 - protein, 30 aa, Artificial Sequence
  Cyclic GFR-binding peptide
  MOD_RES (4)..(5): Xaa is C or S
PKPXXAPTQLSATSVLYYDDSSNVILRKHR

SEQ ID NO: 9293 - protein, 36 aa, Artificial Sequence
  Cyclic GFR-binding peptide
RPTQVQLSPISVLYKEIVRKKPIFLKYHYTLEDHLA

SEQ ID NO: 9294 - protein, 29 aa, Artificial Sequence
  Cyclic GFR-binding peptide
  MOD_RES (29)..(29): Xaa is C or S
QLSAISVLYLDDSSNVILKNYQNMVVRAX

SEQ ID NO: 9295 - protein, 33 aa, Artificial Sequence
  Cyclic GFR-binding peptide
  MOD_RES (5)..(5): Xaa is C or S
TKPTXAPTKLSPISVLYKDDSSNVILKYHYNMV

SEQ ID NO: 9296 - protein, 25 aa, Artificial Sequence
  Cyclic GFR-binding peptide
SPISVLYKEIVRKKPIFLKYHYTLE

SEQ ID NO: 9297 - protein, 33 aa, Artificial Sequence
  Cyclic GFR-binding peptide
  MOD_RES (3)..(3): Xaa is C or S
PTXAPTKLSAISVLYLDDSSNVILKNYQNMVVR

SEQ ID NO: 9298 - protein, 33 aa, Artificial Sequence
  Cyclic GFR-binding peptide
  MOD_RES (1)..(2)..(33): Xaa is C or S
XXVPQALSAISILYLVGRKPKVLKNYQMIVRSX

SEQ ID NO: 9299 - protein, 28 aa, Artificial Sequence
  Cyclic GFR-binding peptide
APTQLSPISVLYKDDSSNVILKYHYNMV

SEQ ID NO: 9300 - protein, 23 aa, Artificial Sequence
  Cyclic GFR-binding peptide
SATSVLYYDDSSNVILRKHRNMV

SEQ ID NO: 9301 - protein, 35 aa, Artificial Sequence
  Cyclic GFR-binding peptide
  MOD_RES (32)..(34): Xaa is C or S
PTKLSAISVLYLDDMGVPTLKNYQEGMSVAEXGXR

SEQ ID NO: 9302 - protein, 36 aa, Artificial Sequence
  Cyclic GFR-binding peptide
  MOD_RES (3)..(4)..(36): Xaa is C or S
KPXXAPTQLSAISVLYLDDSSNVILKNYQNMVVRAX

SEQ ID NO: 9303 - protein, 33 aa, Artificial Sequence
  Cyclic GFR-binding peptide
  MOD_RES (5)..(5): Xaa is C or S
TKPTXAPTKLSATSVLYYDDSSNVILRKHRNMV

SEQ ID NO: 9304 - protein, 24 aa, Artificial Sequence
  Cyclic GFR-binding peptide
SATSVLYYDDSSNVILRKHRNMVV

SEQ ID NO: 9305 - protein, 27 aa, Artificial Sequence
  Cyclic GFR-binding peptide
TKLNAISVLYFDDMGVPTLKKYREGMS

SEQ ID NO: 9306 - protein, 40 aa, Artificial Sequence
  Cyclic GFR-binding peptide
  MOD_RES (5)..(6)..(38)..(40): Xaa is C or S
VPKPXXAPTQLSATSVLYYDDSSNVILRKHRNMVVRAXGX

SEQ ID NO: 9307 - protein, 36 aa, Artificial Sequence
  Cyclic GFR-binding peptide
  MOD_RES (4)..(4): Xaa is C or S
NVQXRPTQVQLSATSVLYYEIVRKKPIFLRKHRTLE

SEQ ID NO: 9308 - protein, 27 aa, Artificial Sequence
  Cyclic GFR-binding peptide
TQVQLNAISVLYFEIVRKKPIFLKKYR

SEQ ID NO: 9309 - protein, 31 aa, Artificial Sequence
  Cyclic GFR-binding peptide
  MOD_RES (3)..(4): Xaa is C or S
APXXVPQALSPISILYKVGRKPKVLKYHYMI

SEQ ID NO: 9310 - protein, 31 aa, Artificial Sequence
  Cyclic GFR-binding peptide
  MOD_RES (28)..(30): Xaa is C or S
LSATSVLYYDDSSNVILRKHRNMVVRAXGXH

SEQ ID NO: 9311 - protein, 34 aa, Artificial Sequence
  Cyclic GFR-binding peptide
  MOD_RES (1)..(32)..(34): Xaa is C or S
XVPQALSATSILYYVGRKPKVLRKHRMIVRSXKX

SEQ ID NO: 9312 - protein, 34 aa, Artificial Sequence
  Cyclic GFR-binding peptide
  MOD_RES (1)..(32)..(34): Xaa is C or S
XVPQDLNAISILYFVGRTPKVLKKYRMVVKSXKX

SEQ ID NO: 9313 - protein, 21 aa, Artificial Sequence
  Cyclic GFR-binding peptide
LSPISILYKVGRKPKVLKYHY

SEQ ID NO: 9314 - protein, 28 aa, Artificial Sequence
  Cyclic GFR-binding peptide
  MOD_RES (3)..(3): Xaa is C or S
PTXAPTKLSATSVLYYDDSSNVILRKHR

SEQ ID NO: 9315 - protein, 30 aa, Artificial Sequence
  Cyclic GFR-binding peptide
  MOD_RES (3)..(4): Xaa is C or S
SPXXVSQDLSAISILYLIGKTPKILKNYQM

SEQ ID NO: 9316 - protein, 22 aa, Artificial Sequence
  Cyclic GFR-binding peptide
SPISMLYKDENEKVVLKYHYDM

SEQ ID NO: 9317 - protein, 36 aa, Artificial Sequence
  Cyclic GFR-binding peptide
  MOD_RES (1)..(2)..(33)..(35): Xaa is C or S
XXVSQDLSPISILYKIGKTPKILKYHYMIVKSXKXS

SEQ ID NO: 9318 - protein, 23 aa, Artificial Sequence
  Cyclic GFR-binding peptide
SPISVLYKDDSSNVILKYHYNMV

SEQ ID NO: 9319 - protein, 34 aa, Artificial Sequence
  Cyclic GFR-binding peptide
  MOD_RES (3)..(4): Xaa is C or S
KAXXAPTKLSPISVLYKDSSNNVILKYHYNMVVK

SEQ ID NO: 9320 - protein, 24 aa, Artificial Sequence
  Cyclic GFR-binding peptide
PTKLSATSVLYYDDSSNVILRKHR

SEQ ID NO: 9321 - protein, 28 aa, Artificial Sequence
  Cyclic GFR-binding peptide
APTQLSATSVLYYDDSSNVILRKHRNMV

SEQ ID NO: 9322 - protein, 38 aa, Artificial Sequence
  Cyclic GFR-binding peptide
  MOD_RES (3)..(3): Xaa is C or S
VQXRPTQVQLSATSVLYYEIVRKKPIFLRKHRTLEDHL

SEQ ID NO: 9323 - protein, 38 aa, Artificial Sequence
  Cyclic GFR-binding peptide
  MOD_RES (36)..(38): Xaa is C or S
PTQVQLNAISVLYFEIVRKKPIFLKKYRTLEDHLAXKX

SEQ ID NO: 9324 - protein, 30 aa, Artificial Sequence
  Cyclic GFR-binding peptide
  MOD_RES (30)..(30): Xaa is C or S
TKLSPISVLYKDSSNNVILKYHYNMVVKAX

SEQ ID NO: 9325 - protein, 40 aa, Artificial Sequence
  Cyclic GFR-binding peptide
  MOD_RES (6)..(38)..(40): Xaa is C or S
VTKPTXAPTKLSATSVLYYDDSSNVILRKHRNMVVRSXGX

SEQ ID NO: 9326 - protein, 36 aa, Artificial Sequence
  Cyclic GFR-binding peptide
  MOD_RES (1)..(2)..(34)..(36): Xaa is C or S
XXAPTKLSAISVLYLDDSSNVILKNYQNMVVRSXGX

SEQ ID NO: 9327 - protein, 26 aa, Artificial Sequence
  Cyclic GFR-binding peptide
VPTELNAISMLYFDEYDKVVLKKYRE

SEQ ID NO: 9328 - protein, 34 aa, Artificial Sequence
  Cyclic GFR-binding peptide
  MOD_RES (31)..(33): Xaa is C or S
LNAISVLYFEIVRKKPIFLKKYRTLEDHLAXKXE

SEQ ID NO: 9329 - protein, 37 aa, Artificial Sequence
  Cyclic GFR-binding peptide
  MOD_RES (3)..(4)..(36): Xaa is C or S
KAXXAPTKLSAISVLYLDSSNNVILKNYQNMVVKAXG

SEQ ID NO: 9330 - protein, 31 aa, Artificial Sequence
  Cyclic GFR-binding peptide
  MOD_RES (4)..(5): Xaa is C or S
PKAXXAPTKLSPISVLYKDSSNNVILKYHYN

SEQ ID NO: 9331 - protein, 33 aa, Artificial Sequence
  Cyclic GFR-binding peptide
  MOD_RES (1)..(33): Xaa is C or S
XAPTQLSPISVLYKDDSSNVILKYHYNMVVRAX

SEQ ID NO: 9332 - protein, 35 aa, Artificial Sequence
  Cyclic GFR-binding peptide
  MOD_RES (6)..(7): Xaa is C or S
ASAAPXXVPQALSAISILYLVGRKPKVLKNYQMIV

SEQ ID NO: 9333 - protein, 20 aa, Artificial Sequence
  Cyclic GFR-binding peptide
NAISILYFVGRKPKVLKKYR

SEQ ID NO: 9334 - protein, 35 aa, Artificial Sequence
  Cyclic GFR-binding peptide
  MOD_RES (2)..(2): Xaa is C or S
QXRPTQVQLSAISVLYLEIVRKKPIFLKNYQTLED

SEQ ID NO: 9335 - protein, 38 aa, Artificial Sequence
  Cyclic GFR-binding peptide
  MOD_RES (2)..(3)..(36)..(38): Xaa is C or S
AXXVPTKLSAISVLYLDDMGVPTLKNYQEGMSVAEXGX

SEQ ID NO: 9336 - protein, 33 aa, Artificial Sequence
  Cyclic GFR-binding peptide
  MOD_RES (31)..(33): Xaa is C or S
PTELSPISMLYKDEYDKVVLKYHYEMVVEGXGX

SEQ ID NO: 9337 - protein, 34 aa, Artificial Sequence
  Cyclic GFR-binding peptide
  MOD_RES (6)..(6): Xaa is C or S
VTKPTXAPTKLSPISVLYKDDSSNVILKYHYNMV

SEQ ID NO: 9338 - protein, 31 aa, Artificial Sequence
  Cyclic GFR-binding peptide
  MOD_RES (31)..(31): Xaa is C or S
VSQDLSATSILYYIGKTPKILRKHRMIVKSX

SEQ ID NO: 9339 - protein, 31 aa, Artificial Sequence
  Cyclic GFR-binding peptide
  MOD_RES (5)..(5): Xaa is C or S
TKPTXAPTKLSAISVLYLDDSSNVILKNYQN

SEQ ID NO: 9340 - protein, 37 aa, Artificial Sequence
  Cyclic GFR-binding peptide
  MOD_RES (3)..(35)..(37): Xaa is C or S
PTXAPTKLSAISVLYLDDSSNVILKNYQNMVVRSXGX

SEQ ID NO: 9341 - protein, 36 aa, Artificial Sequence
  Cyclic GFR-binding peptide
  MOD_RES (4)..(5)..(36): Xaa is C or S
AAPXXVPQALSAISILYLVGRKPKVLKNYQMIVRSX

SEQ ID NO: 9342 - protein, 34 aa, Artificial Sequence
  Cyclic GFR-binding peptide
  MOD_RES (3)..(4): Xaa is C or S
KAXXAPTKLSAISVLYLDSSNNVILKNYQNMVVK

SEQ ID NO: 9343 - protein, 33 aa, Artificial Sequence
  Cyclic GFR-binding peptide
  MOD_RES (31)..(33): Xaa is C or S
VSQDLNAISILYFIGKTPKILKKYRMIVKSXKX

SEQ ID NO: 9344 - protein, 29 aa, Artificial Sequence
  Cyclic GFR-binding peptide
  MOD_RES (29)..(29): Xaa is C or S
ELNAISMLYFDEYDKVVLKKYREMVVEGX

SEQ ID NO: 9345 - protein, 27 aa, Artificial Sequence
  Cyclic GFR-binding peptide
QVQLSPISVLYKEIVRKKPIFLKYHYT

SEQ ID NO: 9346 - protein, 32 aa, Artificial Sequence
  Cyclic GFR-binding peptide
  MOD_RES (32)..(32): Xaa is C or S
PTKLSATSVLYYDDMGVPTLRKHREGMSVAEX

SEQ ID NO: 9347 - protein, 37 aa, Artificial Sequence
  Cyclic GFR-binding peptide
  MOD_RES (3)..(4)..(36): Xaa is C or S
KPXXAPTQLSAISVLYLDDSSNVILKNYQNMVVRAXG

SEQ ID NO: 9348 - protein, 31 aa, Artificial Sequence
  Cyclic GFR-binding peptide
  MOD_RES (29)..(31): Xaa is C or S
ELSATSMLYYDENEKVVLRKHRDMVVEGXGX

SEQ ID NO: 9349 - protein, 31 aa, Artificial Sequence
  Cyclic GFR-binding peptide
  MOD_RES (29)..(31): Xaa is C or S
QDLNAISILYFIGKTPKILKKYRMIVKSXKX

SEQ ID NO: 9350 - protein, 34 aa, Artificial Sequence
  Cyclic GFR-binding peptide
  MOD_RES (33)..(33): Xaa is C or S
VQLSPISVLYKEIVRKKPIFLKYHYTLEDHLAXK

SEQ ID NO: 9351 - protein, 31 aa, Artificial Sequence
  Cyclic GFR-binding peptide
  MOD_RES (30)..(30): Xaa is C or S
TQLSATSVLYYDDSSNVILRKHRNMVVRAXG

SEQ ID NO: 9352 - protein, 32 aa, Artificial Sequence
  Cyclic GFR-binding peptide
  MOD_RES (6)..(7): Xaa is C or S
AVPKAXXAPTKLSPISVLYKDSSNNVILKYHY

SEQ ID NO: 9353 - protein, 38 aa, Artificial Sequence
  Cyclic GFR-binding peptide
  MOD_RES (2)..(3)..(35)..(37): Xaa is C or S
PXXAPTKLSAISVLYLDDSSNVILKNYQNMVVRSXGXH

SEQ ID NO: 9354 - protein, 28 aa, Artificial Sequence
  Cyclic GFR-binding peptide
PTKLSAISVLYLDDSSNVILKNYQNMVV

SEQ ID NO: 9355 - protein, 27 aa, Artificial Sequence
  Cyclic GFR-binding peptide
TELSATSMLYYDENEKVVLRKHRDMVV

SEQ ID NO: 9356 - protein, 29 aa, Artificial Sequence
  Cyclic GFR-binding peptide
PTQVQLSPISVLYKEIVRKKPIFLKYHYT

SEQ ID NO: 9357 - protein, 23 aa, Artificial Sequence
  Cyclic GFR-binding peptide
LNAISILYFIGKTPKILKKYRMI

SEQ ID NO: 9358 - protein, 35 aa, Artificial Sequence
  Cyclic GFR-binding peptide
  MOD_RES (3)..(4): Xaa is C or S
KPXXAPTKLSPISVLYKDDSSNVILKYHYNMVVRS

SEQ ID NO: 9359 - protein, 29 aa, Artificial Sequence
  Cyclic GFR-binding peptide
  MOD_RES (3)..(4): Xaa is C or S
KPXXAPTKLSAISVLYLDDSSNVILKNYQ

SEQ ID NO: 9360 - protein, 27 aa, Artificial Sequence
  Cyclic GFR-binding peptide
VPTELSATSMLYYDEYDKVVLRKHREM

SEQ ID NO: 9361 - protein, 29 aa, Artificial Sequence
  Cyclic GFR-binding peptide
  MOD_RES (29)..(29): Xaa is C or S
KLSATSVLYYDDSSNVILRKHRNMVVRSX

SEQ ID NO: 9362 - protein, 34 aa, Artificial Sequence
  Cyclic GFR-binding peptide
  MOD_RES (33)..(33): Xaa is C or S
VPTKLSAISVLYLDDMGVPTLKNYQEGMSVAEXG

SEQ ID NO: 9363 - protein, 28 aa, Artificial Sequence
  Cyclic GFR-binding peptide
  MOD_RES (1)..(2): Xaa is C or S
XXVPQALSATSILYYVGRKPKVLRKHRM

SEQ ID NO: 9364 - protein, 41 aa, Artificial Sequence
  Cyclic GFR-binding peptide
  MOD_RES (5)..(6)..(38)..(40): Xaa is C or S
VPKAXXAPTKLNAISVLYFDSSNNVILKKYRNMVVKAXGXH

SEQ ID NO: 9365 - protein, 21 aa, Artificial Sequence
  Cyclic GFR-binding peptide
SATSILYYIGKTPKILRKHRM

SEQ ID NO: 9366 - protein, 33 aa, Artificial Sequence
  Cyclic GFR-binding peptide
  MOD_RES (32)..(32): Xaa is C or S
VPTELSPISMLYKDENEKVVLKYHYDMVVEGXG

SEQ ID NO: 9367 - protein, 24 aa, Artificial Sequence
  Cyclic GFR-binding peptide
TKLSPISVLYKDSSNNVILKYHYN

SEQ ID NO: 9368 - protein, 38 aa, Artificial Sequence
  Cyclic GFR-binding peptide
  MOD_RES (4)..(5)..(36)..(38): Xaa is C or S
ASPXXVPQDLNAISILYFVGRTPKVLKKYRMVVKSXKX

SEQ ID NO: 9369 - protein, 22 aa, Artificial Sequence
  Cyclic GFR-binding peptide
SATSVLYYDDMGVPTLRKHREG

SEQ ID NO: 9370 - protein, 28 aa, Artificial Sequence
  Cyclic GFR-binding peptide
PTQVQLSAISVLYLEIVRKKPIFLKNYQ

SEQ ID NO: 9371 - protein, 29 aa, Artificial Sequence
  Cyclic GFR-binding peptide
QVQLSPISVLYKEIVRKKPIFLKYHYTLE

SEQ ID NO: 9372 - protein, 32 aa, Artificial Sequence
  Cyclic GFR-binding peptide
  MOD_RES (6)..(7): Xaa is C or S
KVGKAXXVPTKLNAISVLYFDDMGVPTLKKYR

SEQ ID NO: 9373 - protein, 40 aa, Artificial Sequence
  Cyclic GFR-binding peptide
  MOD_RES (5)..(6)..(38)..(40): Xaa is C or S
IPKAXXVPTELSPISMLYKDEYDKVVLKYHYEMVVEGXGX

SEQ ID NO: 9374 - protein, 37 aa, Artificial Sequence
  Cyclic GFR-binding peptide
  MOD_RES (4)..(4): Xaa is C or S
NVQXRPTQVQLSATSVLYYEIVRKKPIFLRKHRTLED

SEQ ID NO: 9375 - protein, 31 aa, Artificial Sequence
  Cyclic GFR-binding peptide
  MOD_RES (4)..(5): Xaa is C or S
PKAXXVPTELSATSMLYYDEYDKVVLRKHRE

SEQ ID NO: 9376 - protein, 43 aa, Artificial Sequence
  Cyclic GFR-binding peptide
  MOD_RES (4)..(41)..(43): Xaa is C or S
NVQXRPTQVQLSAISVLYLEIVRKKPIFLKNYQTLEDHLAXKX

SEQ ID NO: 9377 - protein, 36 aa, Artificial Sequence
  Cyclic GFR-binding peptide
  MOD_RES (3)..(4)..(36): Xaa is C or S
KPXXAPTKLSATSVLYYDDSSNVILRKHRNMVVRSX

SEQ ID NO: 9378 - protein, 32 aa, Artificial Sequence
  Cyclic GFR-binding peptide
  MOD_RES (2)..(3): Xaa is C or S
PXXVPQDLSPISILYKVGRTPKVLKYHYMVVK

SEQ ID NO: 9379 - protein, 32 aa, Artificial Sequence
  Cyclic GFR-binding peptide
  MOD_RES (4)..(5): Xaa is C or S
PKAXXVPTELNAISMLYFDENEKVVLKKYRDM

SEQ ID NO: 9380 - protein, 30 aa, Artificial Sequence
  Cyclic GFR-binding peptide
  MOD_RES (30)..(30): Xaa is C or S
NAISVLYFEIVRKKPIFLKKYRTLEDHLAX

SEQ ID NO: 9381 - protein, 32 aa, Artificial Sequence
  Cyclic GFR-binding peptide
  MOD_RES (30)..(32): Xaa is C or S
TELNAISMLYFDENEKVVLKKYRDMVVEGXGX

SEQ ID NO: 9382 - protein, 34 aa, Artificial Sequence
  Cyclic GFR-binding peptide
  MOD_RES (5)..(6): Xaa is C or S
VPKPXXAPTKLSPISVLYKDDSSNVILKYHYNMV

SEQ ID NO: 9383 - protein, 33 aa, Artificial Sequence
  Cyclic GFR-binding peptide
  MOD_RES (3)..(4): Xaa is C or S
SPXXVPQDLSAISILYLVGRTPKVLKNYQMVVK

SEQ ID NO: 9384 - protein, 33 aa, Artificial Sequence
  Cyclic GFR-binding peptide
  MOD_RES (5)..(6): Xaa is C or S
VPKPXXAPTQLSAISVLYLDDSSNVILKNYQNM

SEQ ID NO: 9385 - protein, 38 aa, Artificial Sequence
  Cyclic GFR-binding peptide
  MOD_RES (4)..(5)..(36)..(38): Xaa is C or S
ASPXXVSQDLNAISILYFIGKTPKILKKYRMIVKSXKX

SEQ ID NO: 9386 - protein, 37 aa, Artificial Sequence
  Cyclic GFR-binding peptide
  MOD_RES (6)..(6): Xaa is C or S
VTKPTXAPTKLSPISVLYKDDSSNVILKYHYNMVVRS

SEQ ID NO: 9387 - protein, 26 aa, Artificial Sequence
  Cyclic GFR-binding peptide
QLSATSVLYYEIVRKKPIFLRKHRTL

SEQ ID NO: 9388 - protein, 37 aa, Artificial Sequence
  Cyclic GFR-binding peptide
  MOD_RES (4)..(5)..(36): Xaa is C or S
AAPXXVPQALSATSILYYVGRKPKVLRKHRMIVRSXK

SEQ ID NO: 9389 - protein, 23 aa, Artificial Sequence
  Cyclic GFR-binding peptide
TKLSPISVLYKDDSSNVILKYHY

SEQ ID NO: 9390 - protein, 37 aa, Artificial Sequence
  Cyclic GFR-binding peptide
  MOD_RES (3)..(35)..(37): Xaa is C or S
PTXAPTKLSPISVLYKDDSSNVILKYHYNMVVRSXGX

SEQ ID NO: 9391 - protein, 39 aa, Artificial Sequence
  Cyclic GFR-binding peptide
  MOD_RES (5)..(6)..(37)..(39): Xaa is C or S
SASPXXVPQDLSATSILYYVGRTPKVLRKHRMVVKSXKX

SEQ ID NO: 9392 - protein, 31 aa, Artificial Sequence
  Cyclic GFR-binding peptide
  MOD_RES (31)..(31): Xaa is C or S
VPQDLSPISILYKVGRTPKVLKYHYMVVKSX

SEQ ID NO: 9393 - protein, 27 aa, Artificial Sequence
  Cyclic GFR-binding peptide
SQDLSAISILYLIGKTPKILKNYQMIV

SEQ ID NO: 9394 - protein, 30 aa, Artificial Sequence
  Cyclic GFR-binding peptide
  MOD_RES (3)..(4): Xaa is C or S
KAXXAPTKLNAISVLYFDSSNNVILKKYRN

SEQ ID NO: 9395 - protein, 28 aa, Artificial Sequence
  Cyclic GFR-binding peptide
  MOD_RES (2)..(3): Xaa is C or S
PXXVPQDLSAISILYLVGRTPKVLKNYQ

SEQ ID NO: 9396 - protein, 34 aa, Artificial Sequence
  Cyclic GFR-binding peptide
  MOD_RES (5)..(6): Xaa is C or S
VPKPXXAPTKLSATSVLYYDDSSNVILRKHRNMV

SEQ ID NO: 9397 - protein, 33 aa, Artificial Sequence
  Cyclic GFR-binding peptide
QVQLSAISVLYLEIVRKKPIFLKNYQTLEDHLA

SEQ ID NO: 9398 - protein, 22 aa, Artificial Sequence
  Cyclic GFR-binding peptide
SATSMLYYDENEKVVLRKHRDM

SEQ ID NO: 9399 - protein, 32 aa, Artificial Sequence
  Cyclic GFR-binding peptide
  MOD_RES (1)..(1): Xaa is C or S
XVPTELSATSMLYYDENEKVVLRKHRDMVVEG

SEQ ID NO: 9400 - protein, 29 aa, Artificial Sequence
  Cyclic GFR-binding peptide
  MOD_RES (3)..(4): Xaa is C or S
KAXXVPTKLNAISVLYFDDMGVPTLKKYR

SEQ ID NO: 9401 - protein, 27 aa, Artificial Sequence
  Cyclic GFR-binding peptide
  MOD_RES (27)..(27): Xaa is C or S
LSAISILYLVGRTPKVLKNYQMVVKSX

SEQ ID NO: 9402 - protein, 32 aa, Artificial Sequence
  Cyclic GFR-binding peptide
  MOD_RES (3)..(4): Xaa is C or S
APXXVPQALSATSILYYVGRKPKVLRKHRMIV

SEQ ID NO: 9403 - protein, 31 aa, Artificial Sequence
  Cyclic GFR-binding peptide
VPTELNAISMLYFDENEKVVLKKYRDMVVEG

SEQ ID NO: 9404 - protein, 31 aa, Artificial Sequence
  Cyclic GFR-binding peptide
  MOD_RES (4)..(5): Xaa is C or S
ASPXXVSQDLSPISILYKIGKTPKILKYHYM

SEQ ID NO: 9405 - protein, 31 aa, Artificial Sequence
  Cyclic GFR-binding peptide
  MOD_RES (29)..(31): Xaa is C or S
QDLSATSILYYVGRTPKVLRKHRMVVKSXKX

SEQ ID NO: 9406 - protein, 31 aa, Artificial Sequence
  Cyclic GFR-binding peptide
  MOD_RES (1)..(2): Xaa is C or S
XXVPTKLSAISVLYLDDMGVPTLKNYQEGMS

SEQ ID NO: 9407 - protein, 40 aa, Artificial Sequence
  Cyclic GFR-binding peptide
  MOD_RES (5)..(6)..(38)..(40): Xaa is C or S
VPKPXXAPTQLSAISVLYLDDSSNVILKNYQNMVVRAXGX

SEQ ID NO: 9408 - protein, 24 aa, Artificial Sequence
  Cyclic GFR-binding peptide
LSATSMLYYDEYDKVVLRKHREMV

SEQ ID NO: 9409 - protein, 28 aa, Artificial Sequence
  Cyclic GFR-binding peptide
TELSATSMLYYDENEKVVLRKHRDMVVE

SEQ ID NO: 9410 - protein, 28 aa, Artificial Sequence
  Cyclic GFR-binding peptide
TKLNAISVLYFDDMGVPTLKKYREGMSV

SEQ ID NO: 9411 - protein, 28 aa, Artificial Sequence
  Cyclic GFR-binding peptide
KLSAISVLYLDDSSNVILKNYQNMVVRS

SEQ ID NO: 9412 - protein, 28 aa, Artificial Sequence
  Cyclic GFR-binding peptide
  MOD_RES (1)..(2): Xaa is C or S
XXAPTKLSAISVLYLDSSNNVILKNYQN

SEQ ID NO: 9413 - protein, 31 aa, Artificial Sequence
  Cyclic GFR-binding peptide
  MOD_RES (3)..(3): Xaa is C or S
PTXAPTKLSAISVLYLDDSSNVILKNYQNMV

SEQ ID NO: 9414 - protein, 39 aa, Artificial Sequence
  Cyclic GFR-binding peptide
  MOD_RES (5)..(6)..(37)..(39): Xaa is C or S
SASPXXVSQDLSATSILYYIGKTPKILRKHRMIVKSXKX

SEQ ID NO: 9415 - protein, 37 aa, Artificial Sequence
  Cyclic GFR-binding peptide
  MOD_RES (5)..(6): Xaa is C or S
VPKPXXAPTQLSATSVLYYDDSSNVILRKHRNMVVRA

SEQ ID NO: 9416 - protein, 30 aa, Artificial Sequence
  Cyclic GFR-binding peptide
  MOD_RES (28)..(30): Xaa is C or S
LSPISMLYKDENEKVVLKYHYDMVVEGXGX

SEQ ID NO: 9417 - protein, 32 aa, Artificial Sequence
  Cyclic GFR-binding peptide
  MOD_RES (30)..(32): Xaa is C or S
SQDLNAISILYFIGKTPKILKKYRMIVKSXKX

SEQ ID NO: 9418 - protein, 29 aa, Artificial Sequence
  Cyclic GFR-binding peptide
  MOD_RES (29)..(29): Xaa is C or S
ELNAISMLYFDENEKVVLKKYRDMVVEGX

SEQ ID NO: 9419 - protein, 30 aa, Artificial Sequence
  Cyclic GFR-binding peptide
  MOD_RES (28)..(30): Xaa is C or S
LSATSMLYYDENEKVVLRKHRDMVVEGXGX

SEQ ID NO: 9420 - protein, 25 aa, Artificial Sequence
  Cyclic GFR-binding peptide
KLSATSVLYYDDMGVPTLRKHREGM

SEQ ID NO: 9421 - protein, 34 aa, Artificial Sequence
  Cyclic GFR-binding peptide
  MOD_RES (5)..(6): Xaa is C or S
VGKAXXVPTKLSATSVLYYDDMGVPTLRKHREGM

SEQ ID NO: 9422 - protein, 25 aa, Artificial Sequence
  Cyclic GFR-binding peptide
PTKLSPISVLYKDSSNNVILKYHYN

SEQ ID NO: 9423 - protein, 29 aa, Artificial Sequence
  Cyclic GFR-binding peptide
  MOD_RES (2)..(3): Xaa is C or S
PXXAPTQLSATSVLYYDDSSNVILRKHRN

SEQ ID NO: 9424 - protein, 29 aa, Artificial Sequence
  Cyclic GFR-binding peptide
  MOD_RES (3)..(4): Xaa is C or S
SPXXVSQDLNAISILYFIGKTPKILKKYR

SEQ ID NO: 9425 - protein, 40 aa, Artificial Sequence
  Cyclic GFR-binding peptide
  MOD_RES (6)..(7)..(39): Xaa is C or S
YVPKPXXAPTKLSATSVLYYDDSSNVILRKHRNMVVRSXG

SEQ ID NO: 9426 - protein, 40 aa, Artificial Sequence
  Cyclic GFR-binding peptide
  MOD_RES (1)..(38)..(40): Xaa is C or S
XRPTQVQLNAISVLYFEIVRKKPIFLKKYRTLEDHLAXKX

SEQ ID NO: 9427 - protein, 37 aa, Artificial Sequence
  Cyclic GFR-binding peptide
  MOD_RES (3)..(4)..(35)..(37): Xaa is C or S
APXXVPQALSATSILYYVGRKPKVLRKHRMIVRSXKX

SEQ ID NO: 9428 - protein, 27 aa, Artificial Sequence
  Cyclic GFR-binding peptide
QLSAISVLYLEIVRKKPIFLKNYQTLE

SEQ ID NO: 9429 - protein, 36 aa, Artificial Sequence
  Cyclic GFR-binding peptide
  MOD_RES (3)..(4)..(35): Xaa is C or S
SPXXVSQDLNAISILYFIGKTPKILKKYRMIVKSXK

SEQ ID NO: 9430 - protein, 42 aa, Artificial Sequence
  Cyclic GFR-binding peptide
  MOD_RES (5)..(42): Xaa is C or S
RNVQXRPTQVQLSATSVLYYEIVRKKPIFLRKHRTLEDHLAX

SEQ ID NO: 9431 - protein, 36 aa, Artificial Sequence
  Cyclic GFR-binding peptide
  MOD_RES (35)..(35): Xaa is C or S
TQVQLSPISVLYKEIVRKKPIFLKYHYTLEDHLAXK

SEQ ID NO: 9432 - protein, 30 aa, Artificial Sequence
  Cyclic GFR-binding peptide
  MOD_RES (27)..(29): Xaa is C or S
SATSMLYYDENEKVVLRKHRDMVVEGXGXR

SEQ ID NO: 9433 - protein, 32 aa, Artificial Sequence
  Cyclic GFR-binding peptide
  MOD_RES (1)..(32): Xaa is C or S
XVPQDLNAISILYFVGRTPKVLKKYRMVVKSX

SEQ ID NO: 9434 - protein, 27 aa, Artificial Sequence
  Cyclic GFR-binding peptide
  MOD_RES (1)..(1): Xaa is C or S
XVPTKLSATSVLYYDDMGVPTLRKHRE

SEQ ID NO: 9435 - protein, 34 aa, Artificial Sequence
  Cyclic GFR-binding peptide
  MOD_RES (4)..(5): Xaa is C or S
PKPXXAPTKLSATSVLYYDDSSNVILRKHRNMVV

SEQ ID NO: 9436 - protein, 27 aa, Artificial Sequence
  Cyclic GFR-binding peptide
VPTELSPISMLYKDEYDKVVLKYHYEM

SEQ ID NO: 9437 - protein, 31 aa, Artificial Sequence
  Cyclic GFR-binding peptide
  MOD_RES (1)..(1): Xaa is C or S
XRPTQVQLSATSVLYYEIVRKKPIFLRKHRT

SEQ ID NO: 9438 - protein, 32 aa, Artificial Sequence
  Cyclic GFR-binding peptide
  MOD_RES (29)..(31): Xaa is C or S
ELSPISMLYKDEYDKVVLKYHYEMVVEGXGXR

SEQ ID NO: 9439 - protein, 31 aa, Artificial Sequence
  Cyclic GFR-binding peptide
  MOD_RES (28)..(30): Xaa is C or S
LSAISVLYLDSSNNVILKNYQNMVVKAXGXH

SEQ ID NO: 9440 - protein, 24 aa, Artificial Sequence
  Cyclic GFR-binding peptide
LSPISMLYKDEYDKVVLKYHYEMV

SEQ ID NO: 9441 - protein, 31 aa, Artificial Sequence
  Cyclic GFR-binding peptide
  MOD_RES (3)..(4): Xaa is C or S
APXXVPQALSATSILYYVGRKPKVLRKHRMI

SEQ ID NO: 9442 - protein, 28 aa, Artificial Sequence
  Cyclic GFR-binding peptide
  MOD_RES (28)..(28): Xaa is C or S
LSPISMLYKDENEKVVLKYHYDMVVEGX

SEQ ID NO: 9443 - protein, 31 aa, Artificial Sequence
  Cyclic GFR-binding peptide
  MOD_RES (28)..(30): Xaa is C or S
LSPISMLYKDEYDKVVLKYHYEMVVEGXGXR

SEQ ID NO: 9444 - protein, 31 aa, Artificial Sequence
  Cyclic GFR-binding peptide
  MOD_RES (31)..(31): Xaa is C or S
PTELSATSMLYYDEYDKVVLRKHREMVVEGX

SEQ ID NO: 9445 - protein, 24 aa, Artificial Sequence
  Cyclic GFR-binding peptide
QALSATSILYYVGRKPKVLRKHRM

SEQ ID NO: 9446 - protein, 33 aa, Artificial Sequence
  Cyclic GFR-binding peptide
  MOD_RES (30)..(32): Xaa is C or S
TQLSATSVLYYDDSSNVILRKHRNMVVRAXGXH

SEQ ID NO: 9447 - protein, 30 aa, Artificial Sequence
  Cyclic GFR-binding peptide
  MOD_RES (30)..(30): Xaa is C or S
TQLSAISVLYLDDSSNVILKNYQNMVVRAX

SEQ ID NO: 9448 - protein, 31 aa, Artificial Sequence
  Cyclic GFR-binding peptide
  MOD_RES (6)..(6): Xaa is C or S
VTKPTXAPTKLSPISVLYKDDSSNVILKYHY

SEQ ID NO: 9449 - protein, 39 aa, Artificial Sequence
  Cyclic GFR-binding peptide
  MOD_RES (6)..(7)..(39): Xaa is C or S
AVPKAXXAPTKLNAISVLYFDSSNNVILKKYRNMVVKAX

SEQ ID NO: 9450 - protein, 34 aa, Artificial Sequence
  Cyclic GFR-binding peptide
  MOD_RES (1)..(2)..(33): Xaa is C or S
XXVPQDLNAISILYFVGRTPKVLKKYRMVVKSXK

SEQ ID NO: 9451 - protein, 29 aa, Artificial Sequence
  Cyclic GFR-binding peptide
  MOD_RES (3)..(3): Xaa is C or S
PTXAPTKLSATSVLYYDDSSNVILRKHRN

SEQ ID NO: 9452 - protein, 38 aa, Artificial Sequence
  Cyclic GFR-binding peptide
  MOD_RES (5)..(6)..(38): Xaa is C or S
VPKPXXAPTQLSAISVLYLDDSSNVILKNYQNMVVRAX

SEQ ID NO: 9453 - protein, 28 aa, Artificial Sequence
  Cyclic GFR-binding peptide
  MOD_RES (1)..(2): Xaa is C or S
XXAPTKLSATSVLYYDDSSNVILRKHRN

SEQ ID NO: 9454 - protein, 25 aa, Artificial Sequence
  Cyclic GFR-binding peptide
QALSPISILYKVGRKPKVLKYHYMI

SEQ ID NO: 9455 - protein, 32 aa, Artificial Sequence
  Cyclic GFR-binding peptide
  MOD_RES (2)..(3): Xaa is C or S
PXXAPTKLSAISVLYLDDSSNVILKNYQNMVV

SEQ ID NO: 9456 - protein, 32 aa, Artificial Sequence
  Cyclic GFR-binding peptide
  MOD_RES (5)..(5): Xaa is C or S
TKPTXAPTKLSATSVLYYDDSSNVILRKHRNM

SEQ ID NO: 9457 - protein, 39 aa, Artificial Sequence
  Cyclic GFR-binding peptide
  MOD_RES (3)..(4)..(36)..(38): Xaa is C or S
KAXXAPTKLSAISVLYLDSSNNVILKNYQNMVVKAXGXH

SEQ ID NO: 9458 - protein, 35 aa, Artificial Sequence
  Cyclic GFR-binding peptide
  MOD_RES (1)..(2)..(33)..(35): Xaa is C or S
XXVPQDLSAISILYLVGRTPKVLKNYQMVVKSXKX

SEQ ID NO: 9459 - protein, 38 aa, Artificial Sequence
  Cyclic GFR-binding peptide
  MOD_RES (3)..(4)..(35)..(37): Xaa is C or S
APXXVPQALNAISILYFVGRKPKVLKKYRMIVRSXKXS

SEQ ID NO: 9460 - protein, 34 aa, Artificial Sequence
  Cyclic GFR-binding peptide
  MOD_RES (1)..(2)..(34): Xaa is C or S
XXAPTKLNAISVLYFDSSNNVILKKYRNMVVKAX

SEQ ID NO: 9461 - protein, 36 aa, Artificial Sequence
  Cyclic GFR-binding peptide
  MOD_RES (1)..(2)..(34)..(36): Xaa is C or S
XXVPTELNAISMLYFDENEKVVLKKYRDMVVEGXGX

SEQ ID NO: 9462 - protein, 36 aa, Artificial Sequence
  Cyclic GFR-binding peptide
  MOD_RES (6)..(7): Xaa is C or S
KIPKAXXVPTELSATSMLYYDENEKVVLRKHRDMVV

SEQ ID NO: 9463 - protein, 24 aa, Artificial Sequence
  Cyclic GFR-binding peptide
PTQLSATSVLYYDDSSNVILRKHR

SEQ ID NO: 9464 - protein, 33 aa, Artificial Sequence
  Cyclic GFR-binding peptide
  MOD_RES (3)..(4): Xaa is C or S
KPXXAPTQLSATSVLYYDDSSNVILRKHRNMVV

SEQ ID NO: 9465 - protein, 37 aa, Artificial Sequence
  Cyclic GFR-binding peptide
  MOD_RES (5)..(6)..(37): Xaa is C or S
SAAPXXVPQALNAISILYFVGRKPKVLKKYRMIVRSX

SEQ ID NO: 9466 - protein, 29 aa, Artificial Sequence
  Cyclic GFR-binding peptide
  MOD_RES (26)..(28): Xaa is C or S
SAISILYLVGRTPKVLKNYQMVVKSXKXS

SEQ ID NO: 9467 - protein, 37 aa, Artificial Sequence
  Cyclic GFR-binding peptide
  MOD_RES (3)..(3): Xaa is C or S
VQXRPTQVQLSAISVLYLEIVRKKPIFLKNYQTLEDH

SEQ ID NO: 9468 - protein, 25 aa, Artificial Sequence
  Cyclic GFR-binding peptide
PQALNAISILYFVGRKPKVLKKYRM

SEQ ID NO: 9469 - protein, 25 aa, Artificial Sequence
  Cyclic GFR-binding peptide
APTKLSAISVLYLDSSNNVILKNYQ

SEQ ID NO: 9470 - protein, 22 aa, Artificial Sequence
  Cyclic GFR-binding peptide
SPISVLYKDDSSNVILKYHYNM

SEQ ID NO: 9471 - protein, 37 aa, Artificial Sequence
  Cyclic GFR-binding peptide
  MOD_RES (3)..(3): Xaa is C or S
VQXRPTQVQLSATSVLYYEIVRKKPIFLRKHRTLEDH

SEQ ID NO: 9472 - protein, 39 aa, Artificial Sequence
  Cyclic GFR-binding peptide
  MOD_RES (4)..(5)..(37)..(39): Xaa is C or S
PKPXXAPTKLSATSVLYYDDSSNVILRKHRNMVVRSXGX

SEQ ID NO: 9473 - protein, 24 aa, Artificial Sequence
  Cyclic GFR-binding peptide
LNAISMLYFDEYDKVVLKKYREMV

SEQ ID NO: 9474 - protein, 37 aa, Artificial Sequence
  Cyclic GFR-binding peptide
  MOD_RES (5)..(6): Xaa is C or S
VPKPXXAPTKLSAISVLYLDDSSNVILKNYQNMVVRS

SEQ ID NO: 9475 - protein, 35 aa, Artificial Sequence
  Cyclic GFR-binding peptide
  MOD_RES (6)..(6): Xaa is C or S
VTKPTXAPTKLSPISVLYKDDSSNVILKYHYNMVV

SEQ ID NO: 9476 - protein, 23 aa, Artificial Sequence
  Cyclic GFR-binding peptide
ALSATSILYYVGRKPKVLRKHRM

SEQ ID NO: 9477 - protein, 24 aa, Artificial Sequence
  Cyclic GFR-binding peptide
PTKLSPISVLYKDSSNNVILKYHY

SEQ ID NO: 9478 - protein, 22 aa, Artificial Sequence
  Cyclic GFR-binding peptide
SAISILYLVGRKPKVLKNYQMI

SEQ ID NO: 9479 - protein, 33 aa, Artificial Sequence
  Cyclic GFR-binding peptide
  MOD_RES (2)..(3): Xaa is C or S
AXXVPTELSPISMLYKDENEKVVLKYHYDMVVE

SEQ ID NO: 9480 - protein, 32 aa, Artificial Sequence
  Cyclic GFR-binding peptide
  MOD_RES (1)..(2): Xaa is C or S
XXVPTELNAISMLYFDENEKVVLKKYRDMVVE

SEQ ID NO: 9481 - protein, 33 aa, Artificial Sequence
  Cyclic GFR-binding peptide
  MOD_RES (6)..(7): Xaa is C or S
TVPKPXXAPTQLSAISVLYLDDSSNVILKNYQN

SEQ ID NO: 9482 - protein, 30 aa, Artificial Sequence
  Cyclic GFR-binding peptide
QVQLSATSVLYYEIVRKKPIFLRKHRTLED

SEQ ID NO: 9483 - protein, 35 aa, Artificial Sequence
  Cyclic GFR-binding peptide
  MOD_RES (33)..(35): Xaa is C or S
VPTKLSATSVLYYDDMGVPTLRKHREGMSVAEXGX

SEQ ID NO: 9484 - protein, 31 aa, Artificial Sequence
  Cyclic GFR-binding peptide
  MOD_RES (28)..(30): Xaa is C or S
ALSAISILYLVGRKPKVLKNYQMIVRSXKXS

SEQ ID NO: 9485 - protein, 27 aa, Artificial Sequence
  Cyclic GFR-binding peptide
QVQLSATSVLYYEIVRKKPIFLRKHRT

SEQ ID NO: 9486 - protein, 37 aa, Artificial Sequence
  Cyclic GFR-binding peptide
  MOD_RES (37)..(37): Xaa is C or S
RPTQVQLNAISVLYFEIVRKKPIFLKKYRTLEDHLAX

SEQ ID NO: 9487 - protein, 40 aa, Artificial Sequence
  Cyclic GFR-binding peptide
  MOD_RES (6)..(7)..(38)..(40): Xaa is C or S
ASASPXXVPQDLSPISILYKVGRTPKVLKYHYMVVKSXKX

SEQ ID NO: 9488 - protein, 29 aa, Artificial Sequence
  Cyclic GFR-binding peptide
  MOD_RES (2)..(3): Xaa is C or S
PXXVPQDLSATSILYYVGRTPKVLRKHRM

SEQ ID NO: 9489 - protein, 28 aa, Artificial Sequence
  Cyclic GFR-binding peptide
  MOD_RES (1)..(1): Xaa is C or S
XVSQDLSAISILYLIGKTPKILKNYQMI

SEQ ID NO: 9490 - protein, 24 aa, Artificial Sequence
  Cyclic GFR-binding peptide
NAISMLYFDEYDKVVLKKYREMVV

SEQ ID NO: 9491 - protein, 29 aa, Artificial Sequence
  Cyclic GFR-binding peptide
VQLNAISVLYFEIVRKKPIFLKKYRTLED

SEQ ID NO: 9492 - protein, 30 aa, Artificial Sequence
  Cyclic GFR-binding peptide
  MOD_RES (1)..(2): Xaa is C or S
XXVSQDLSPISILYKIGKTPKILKYHYMIV

SEQ ID NO: 9493 - protein, 30 aa, Artificial Sequence
  Cyclic GFR-binding peptide
  MOD_RES (4)..(5): Xaa is C or S
PKPXXAPTKLSATSVLYYDDSSNVILRKHR

SEQ ID NO: 9494 - protein, 25 aa, Artificial Sequence
  Cyclic GFR-binding peptide
SATSMLYYDENEKVVLRKHRDMVVE

SEQ ID NO: 9495 - protein, 32 aa, Artificial Sequence
  Cyclic GFR-binding peptide
  MOD_RES (31)..(31): Xaa is C or S
PTELSATSMLYYDEYDKVVLRKHREMVVEGXG

SEQ ID NO: 9496 - protein, 29 aa, Artificial Sequence
  Cyclic GFR-binding peptide
  MOD_RES (27)..(29): Xaa is C or S
LSAISILYLVGRTPKVLKNYQMVVKSXKX

SEQ ID NO: 9497 - protein, 41 aa, Artificial Sequence
  Cyclic GFR-binding peptide
  MOD_RES (1)..(38)..(40): Xaa is C or S
XRPTQVQLNAISVLYFEIVRKKPIFLKKYRTLEDHLAXKXE

SEQ ID NO: 9498 - protein, 27 aa, Artificial Sequence
  Cyclic GFR-binding peptide
  MOD_RES (2)..(2): Xaa is C or S
TXAPTKLSATSVLYYDDSSNVILRKHR

SEQ ID NO: 9499 - protein, 23 aa, Artificial Sequence
  Cyclic GFR-binding peptide
NAISVLYFDSSNNVILKKYRNMV

SEQ ID NO: 9500 - protein, 32 aa, Artificial Sequence
  Cyclic GFR-binding peptide
  MOD_RES (2)..(3): Xaa is C or S
AXXVPTELNAISMLYFDENEKVVLKKYRDMVV

SEQ ID NO: 9501 - protein, 33 aa, Artificial Sequence
  Cyclic GFR-binding peptide
  MOD_RES (4)..(5): Xaa is C or S
PKPXXAPTKLSPISVLYKDDSSNVILKYHYNMV

SEQ ID NO: 9502 - protein, 31 aa, Artificial Sequence
  Cyclic GFR-binding peptide
PTQVQLNAISVLYFEIVRKKPIFLKKYRTLE

SEQ ID NO: 9503 - protein, 37 aa, Artificial Sequence
  Cyclic GFR-binding peptide
  MOD_RES (6)..(7): Xaa is C or S
ASASPXXVPQDLNAISILYFVGRTPKVLKKYRMVVKS

SEQ ID NO: 9504 - protein, 25 aa, Artificial Sequence
  Cyclic GFR-binding peptide
ALSPISILYKVGRKPKVLKYHYMIV

SEQ ID NO: 9505 - protein, 32 aa, Artificial Sequence
  Cyclic GFR-binding peptide
  MOD_RES (6)..(7): Xaa is C or S
KVGKAXXVPTKLSAISVLYLDDMGVPTLKNYQ

SEQ ID NO: 9506 - protein, 33 aa, Artificial Sequence
  Cyclic GFR-binding peptide
  MOD_RES (2)..(3): Xaa is C or S
PXXVSQDLNAISILYFIGKTPKILKKYRMIVKS

SEQ ID NO: 9507 - protein, 29 aa, Artificial Sequence
  Cyclic GFR-binding peptide
  MOD_RES (27)..(29): Xaa is C or S
LSAISILYLIGKTPKILKNYQMIVKSXKX

SEQ ID NO: 9508 - protein, 37 aa, Artificial Sequence
  Cyclic GFR-binding peptide
  MOD_RES (2)..(3)..(35)..(37): Xaa is C or S
AXXVPTELNAISMLYFDEYDKVVLKKYREMVVEGXGX

SEQ ID NO: 9509 - protein, 27 aa, Artificial Sequence
  Cyclic GFR-binding peptide
  MOD_RES (1)..(2): Xaa is C or S
XXVPQALSPISILYKVGRKPKVLKYHY

SEQ ID NO: 9510 - protein, 31 aa, Artificial Sequence
  Cyclic GFR-binding peptide
  MOD_RES (30)..(30): Xaa is C or S
TELNAISMLYFDEYDKVVLKKYREMVVEGXG

SEQ ID NO: 9511 - protein, 23 aa, Artificial Sequence
  Cyclic GFR-binding peptide
LSPISILYKVGRTPKVLKYHYMV

SEQ ID NO: 9512 - protein, 30 aa, Artificial Sequence
  Cyclic GFR-binding peptide
  MOD_RES (1)..(1): Xaa is C or S
XAPTKLSAISVLYLDSSNNVILKNYQNMVV

SEQ ID NO: 9513 - protein, 26 aa, Artificial Sequence
  Cyclic GFR-binding peptide
LSATSMLYYDENEKVVLRKHRDMVVE

SEQ ID NO: 9514 - protein, 32 aa, Artificial Sequence
  Cyclic GFR-binding peptide
  MOD_RES (6)..(6): Xaa is C or S
VTKPTXAPTKLSPISVLYKDDSSNVILKYHYN

SEQ ID NO: 9515 - protein, 34 aa, Artificial Sequence
  Cyclic GFR-binding peptide
  MOD_RES (4)..(5): Xaa is C or S
ASPXXVPQDLNAISILYFVGRTPKVLKKYRMVVK

SEQ ID NO: 9516 - protein, 29 aa, Artificial Sequence
  Cyclic GFR-binding peptide
LNAISVLYFEIVRKKPIFLKKYRTLEDHL

SEQ ID NO: 9517 - protein, 34 aa, Artificial Sequence
  Cyclic GFR-binding peptide
  MOD_RES (3)..(4): Xaa is C or S
KAXXVPTELNAISMLYFDENEKVVLKKYRDMVVE

SEQ ID NO: 9518 - protein, 38 aa, Artificial Sequence
  Cyclic GFR-binding peptide
  MOD_RES (3)..(4)..(36)..(38): Xaa is C or S
KPXXAPTQLSATSVLYYDDSSNVILRKHRNMVVRAXGX

SEQ ID NO: 9519 - protein, 30 aa, Artificial Sequence
  Cyclic GFR-binding peptide
  MOD_RES (30)..(30): Xaa is C or S
PQDLNAISILYFVGRTPKVLKKYRMVVKSX

SEQ ID NO: 9520 - protein, 33 aa, Artificial Sequence
  Cyclic GFR-binding peptide
  MOD_RES (2)..(2): Xaa is C or S
QXRPTQVQLSAISVLYLEIVRKKPIFLKNYQTL

SEQ ID NO: 9521 - protein, 39 aa, Artificial Sequence
  Cyclic GFR-binding peptide
  MOD_RES (5)..(5): Xaa is C or S
RNVQXRPTQVQLSAISVLYLEIVRKKPIFLKNYQTLEDH

SEQ ID NO: 9522 - protein, 33 aa, Artificial Sequence
  Cyclic GFR-binding peptide
RPTQVQLSATSVLYYEIVRKKPIFLRKHRTLED

SEQ ID NO: 9523 - protein, 36 aa, Artificial Sequence
  Cyclic GFR-binding peptide
  MOD_RES (4)..(4): Xaa is C or S
NVQXRPTQVQLSPISVLYKEIVRKKPIFLKYHYTLE

SEQ ID NO: 9524 - protein, 24 aa, Artificial Sequence
  Cyclic GFR-binding peptide
SAISVLYLEIVRKKPIFLKNYQTL

SEQ ID NO: 9525 - protein, 35 aa, Artificial Sequence
  Cyclic GFR-binding peptide
  MOD_RES (1)..(1): Xaa is C or S
XRPTQVQLSATSVLYYEIVRKKPIFLRKHRTLEDH

SEQ ID NO: 9526 - protein, 28 aa, Artificial Sequence
  Cyclic GFR-binding peptide
  MOD_RES (28)..(28): Xaa is C or S
LNAISVLYFDSSNNVILKKYRNMVVKAX

SEQ ID NO: 9527 - protein, 38 aa, Artificial Sequence
  Cyclic GFR-binding peptide
  MOD_RES (6)..(7): Xaa is C or S
YVPKPXXAPTKLSPISVLYKDDSSNVILKYHYNMVVRS

SEQ ID NO: 9528 - protein, 31 aa, Artificial Sequence
  Cyclic GFR-binding peptide
  MOD_RES (4)..(5): Xaa is C or S
PKPXXAPTKLSATSVLYYDDSSNVILRKHRN

SEQ ID NO: 9529 - protein, 33 aa, Artificial Sequence
  Cyclic GFR-binding peptide
  MOD_RES (6)..(7): Xaa is C or S
KIPKAXXVPTELNAISMLYFDENEKVVLKKYRD

SEQ ID NO: 9530 - protein, 33 aa, Artificial Sequence
  Cyclic GFR-binding peptide
  MOD_RES (31)..(33): Xaa is C or S
VSQDLSAISILYLIGKTPKILKNYQMIVKSXKX

SEQ ID NO: 9531 - protein, 31 aa, Artificial Sequence
  Cyclic GFR-binding peptide
  MOD_RES (2)..(3): Xaa is C or S
PXXAPTKLSATSVLYYDDSSNVILRKHRNMV

SEQ ID NO: 9532 - protein, 24 aa, Artificial Sequence
  Cyclic GFR-binding peptide
PTELSPISMLYKDENEKVVLKYHY

SEQ ID NO: 9533 - protein, 29 aa, Artificial Sequence
  Cyclic GFR-binding peptide
  MOD_RES (29)..(29): Xaa is C or S
QDLSATSILYYIGKTPKILRKHRMIVKSX

SEQ ID NO: 9534 - protein, 30 aa, Artificial Sequence
  Cyclic GFR-binding peptide
  MOD_RES (4)..(5): Xaa is C or S
ASPXXVPQDLNAISILYFVGRTPKVLKKYR

SEQ ID NO: 9535 - protein, 39 aa, Artificial Sequence
  Cyclic GFR-binding peptide
  MOD_RES (5)..(6)..(37)..(39): Xaa is C or S
SAAPXXVPQALSAISILYLVGRKPKVLKNYQMIVRSXKX

SEQ ID NO: 9536 - protein, 21 aa, Artificial Sequence
  Cyclic GFR-binding peptide
LNAISILYFIGKTPKILKKYR

SEQ ID NO: 9537 - protein, 33 aa, Artificial Sequence
  Cyclic GFR-binding peptide
  MOD_RES (31)..(33): Xaa is C or S
VSQDLSPISILYKIGKTPKILKYHYMIVKSXKX

SEQ ID NO: 9538 - protein, 41 aa, Artificial Sequence
  Cyclic GFR-binding peptide
  MOD_RES (6)..(7)..(39)..(41): Xaa is C or S
YVPKPXXAPTKLSATSVLYYDDSSNVILRKHRNMVVRSXGX

SEQ ID NO: 9539 - protein, 26 aa, Artificial Sequence
  Cyclic GFR-binding peptide
  MOD_RES (1)..(1): Xaa is C or S
XAPTKLSPISVLYKDDSSNVILKYHY

SEQ ID NO: 9540 - protein, 24 aa, Artificial Sequence
  Cyclic GFR-binding peptide
KLSATSVLYYDDSSNVILRKHRNM

SEQ ID NO: 9541 - protein, 40 aa, Artificial Sequence
  Cyclic GFR-binding peptide
  MOD_RES (5)..(6)..(37)..(39): Xaa is C or S
SAAPXXVPQALNAISILYFVGRKPKVLKKYRMIVRSXKXS

SEQ ID NO: 9542 - protein, 30 aa, Artificial Sequence
  Cyclic GFR-binding peptide
  MOD_RES (1)..(2): Xaa is C or S
XXVPTELSPISMLYKDEYDKVVLKYHYEMV

SEQ ID NO: 9543 - protein, 29 aa, Artificial Sequence
  Cyclic GFR-binding peptide
  MOD_RES (27)..(29): Xaa is C or S
LSPISILYKVGRTPKVLKYHYMVVKSXKX

SEQ ID NO: 9544 - protein, 33 aa, Artificial Sequence
  Cyclic GFR-binding peptide
  MOD_RES (30)..(32): Xaa is C or S
TELNAISMLYFDEYDKVVLKKYREMVVEGXGXR

SEQ ID NO: 9545 - protein, 23 aa, Artificial Sequence
  Cyclic GFR-binding peptide
QLSAISVLYLDDSSNVILKNYQN

SEQ ID NO: 9546 - protein, 25 aa, Artificial Sequence
  Cyclic GFR-binding peptide
ALNAISILYFVGRKPKVLKKYRMIV

SEQ ID NO: 9547 - protein, 32 aa, Artificial Sequence
  Cyclic GFR-binding peptide
  MOD_RES (2)..(3): Xaa is C or S
PXXAPTQLSAISVLYLDDSSNVILKNYQNMVV

SEQ ID NO: 9548 - protein, 37 aa, Artificial Sequence
  Cyclic GFR-binding peptide
  MOD_RES (4)..(4): Xaa is C or S
NVQXRPTQVQLNAISVLYFEIVRKKPIFLKKYRTLED

SEQ ID NO: 9549 - protein, 20 aa, Artificial Sequence
  Cyclic GFR-binding peptide
SATSVLYYDDSSNVILRKHR

SEQ ID NO: 9550 - protein, 27 aa, Artificial Sequence
  Cyclic GFR-binding peptide
SAISMLYLDEYDKVVLKNYQDEYDKVV

SEQ ID NO: 9551 - protein, 29 aa, Artificial Sequence
  Cyclic GFR-binding peptide
VPQALSAISILYLVGRKPKVLKNYQMIVR

SEQ ID NO: 9552 - protein, 35 aa, Artificial Sequence
  Cyclic GFR-binding peptide
  MOD_RES (4)..(4): Xaa is C or S
KPTXAPTKLSPISVLYKDDSSNVILKYHYNMVVRS

SEQ ID NO: 9553 - protein, 36 aa, Artificial Sequence
  Cyclic GFR-binding peptide
  MOD_RES (33)..(35): Xaa is C or S
VPTKLSATSVLYYDDMGVPTLRKHREGMSVAEXGXR

SEQ ID NO: 9554 - protein, 30 aa, Artificial Sequence
  Cyclic GFR-binding peptide
  MOD_RES (28)..(30): Xaa is C or S
LSAISVLYLDDSSNVILKNYQNMVVRAXGX

SEQ ID NO: 9555 - protein, 28 aa, Artificial Sequence
  Cyclic GFR-binding peptide
QDLNAISILYFVGRTPKVLKKYRMVVKS

SEQ ID NO: 9556 - protein, 31 aa, Artificial Sequence
  Cyclic GFR-binding peptide
  MOD_RES (1)..(2): Xaa is C or S
XXAPTQLSPISVLYKDDSSNVILKYHYNMVV

SEQ ID NO: 9557 - protein, 38 aa, Artificial Sequence
  Cyclic GFR-binding peptide
  MOD_RES (5)..(6)..(38): Xaa is C or S
VPKPXXAPTQLSATSVLYYDDSSNVILRKHRNMVVRAX

SEQ ID NO: 9558 - protein, 30 aa, Artificial Sequence
  Cyclic GFR-binding peptide
VPQDLSATSILYYVGRTPKVLRKHRMVVKS

SEQ ID NO: 9559 - protein, 33 aa, Artificial Sequence
  Cyclic GFR-binding peptide
  MOD_RES (30)..(32): Xaa is C or S
PQALSATSILYYVGRKPKVLRKHRMIVRSXKXS

SEQ ID NO: 9560 - protein, 36 aa, Artificial Sequence
  Cyclic GFR-binding peptide
  MOD_RES (5)..(6): Xaa is C or S
SASPXXVSQDLSATSILYYIGKTPKILRKHRMIVKS

SEQ ID NO: 9561 - protein, 32 aa, Artificial Sequence
  Cyclic GFR-binding peptide
  MOD_RES (29)..(31): Xaa is C or S
QLSAISVLYLDDSSNVILKNYQNMVVRAXGXH

SEQ ID NO: 9562 - protein, 22 aa, Artificial Sequence
  Cyclic GFR-binding peptide
SAISVLYLDDMGVPTLKNYQEG

SEQ ID NO: 9563 - protein, 42 aa, Artificial Sequence
  Cyclic GFR-binding peptide
  MOD_RES (6)..(7)..(39)..(41): Xaa is C or S
KIPKAXXVPTELSPISMLYKDENEKVVLKYHYDMVVEGXGXR

SEQ ID NO: 9564 - protein, 35 aa, Artificial Sequence
  Cyclic GFR-binding peptide
  MOD_RES (4)..(4): Xaa is C or S
NVQXRPTQVQLSAISVLYLEIVRKKPIFLKNYQTL

SEQ ID NO: 9565 - protein, 32 aa, Artificial Sequence
  Cyclic GFR-binding peptide
  MOD_RES (29)..(31): Xaa is C or S
LNAISVLYFDDMGVPTLKKYREGMSVAEXGXR

SEQ ID NO: 9566 - protein, 38 aa, Artificial Sequence
  Cyclic GFR-binding peptide
  MOD_RES (5)..(6)..(37): Xaa is C or S
SAAPXXVPQALSATSILYYVGRKPKVLRKHRMIVRSXK

SEQ ID NO: 9567 - protein, 27 aa, Artificial Sequence
  Cyclic GFR-binding peptide
  MOD_RES (1)..(1): Xaa is C or S
XAPTKLSATSVLYYDDSSNVILRKHRN

SEQ ID NO: 9568 - protein, 31 aa, Artificial Sequence
  Cyclic GFR-binding peptide
  MOD_RES (3)..(4): Xaa is C or S
SPXXVSQDLSATSILYYIGKTPKILRKHRMI

SEQ ID NO: 9569 - protein, 31 aa, Artificial Sequence
  Cyclic GFR-binding peptide
  MOD_RES (2)..(3): Xaa is C or S
PXXVPQALSATSILYYVGRKPKVLRKHRMIV

SEQ ID NO: 9570 - protein, 38 aa, Artificial Sequence
  Cyclic GFR-binding peptide
  MOD_RES (5)..(6)..(37): Xaa is C or S
SAAPXXVPQALSAISILYLVGRKPKVLKNYQMIVRSXK

SEQ ID NO: 9571 - protein, 35 aa, Artificial Sequence
  Cyclic GFR-binding peptide
  MOD_RES (5)..(5): Xaa is C or S
TKPTXAPTKLSATSVLYYDDSSNVILRKHRNMVVR

SEQ ID NO: 9572 - protein, 36 aa, Artificial Sequence
  Cyclic GFR-binding peptide
  MOD_RES (5)..(6): Xaa is C or S
SAAPXXVPQALSAISILYLVGRKPKVLKNYQMIVRS

SEQ ID NO: 9573 - protein, 34 aa, Artificial Sequence
  Cyclic GFR-binding peptide
  MOD_RES (31)..(33): Xaa is C or S
PTQLSPISVLYKDDSSNVILKYHYNMVVRAXGXH

SEQ ID NO: 9574 - protein, 38 aa, Artificial Sequence
  Cyclic GFR-binding peptide
  MOD_RES (5)..(5): Xaa is C or S
RNVQXRPTQVQLSPISVLYKEIVRKKPIFLKYHYTLED

SEQ ID NO: 9575 - protein, 33 aa, Artificial Sequence
  Cyclic GFR-binding peptide
  MOD_RES (31)..(33): Xaa is C or S
VPQALSPISILYKVGRKPKVLKYHYMIVRSXKX

SEQ ID NO: 9576 - protein, 34 aa, Artificial Sequence
  Cyclic GFR-binding peptide
  MOD_RES (3)..(4): Xaa is C or S
KPXXAPTQLSAISVLYLDDSSNVILKNYQNMVVR

SEQ ID NO: 9577 - protein, 30 aa, Artificial Sequence
  Cyclic GFR-binding peptide
QLNAISVLYFEIVRKKPIFLKKYRTLEDHL

SEQ ID NO: 9578 - protein, 35 aa, Artificial Sequence
  Cyclic GFR-binding peptide
  MOD_RES (1)..(1): Xaa is C or S
XRPTQVQLSAISVLYLEIVRKKPIFLKNYQTLEDH

SEQ ID NO: 9579 - protein, 29 aa, Artificial Sequence
  Cyclic GFR-binding peptide
VSQDLNAISILYFIGKTPKILKKYRMIVK

SEQ ID NO: 9580 - protein, 39 aa, Artificial Sequence
  Cyclic GFR-binding peptide
  MOD_RES (4)..(5)..(36)..(38): Xaa is C or S
ASPXXVSQDLSPISILYKIGKTPKILKYHYMIVKSXKXS

SEQ ID NO: 9581 - protein, 32 aa, Artificial Sequence
  Cyclic GFR-binding peptide
  MOD_RES (4)..(5): Xaa is C or S
AAPXXVPQALNAISILYFVGRKPKVLKKYRMI

SEQ ID NO: 9582 - protein, 29 aa, Artificial Sequence
  Cyclic GFR-binding peptide
  MOD_RES (3)..(4): Xaa is C or S
SPXXVPQDLSATSILYYVGRTPKVLRKHR

SEQ ID NO: 9583 - protein, 33 aa, Artificial Sequence
  Cyclic GFR-binding peptide
  MOD_RES (31)..(33): Xaa is C or S
VPQALSATSILYYVGRKPKVLRKHRMIVRSXKX

SEQ ID NO: 9584 - protein, 33 aa, Artificial Sequence
  Cyclic GFR-binding peptide
  MOD_RES (30)..(32): Xaa is C or S
SATSVLYYEIVRKKPIFLRKHRTLEDHLAXKXE

SEQ ID NO: 9585 - protein, 37 aa, Artificial Sequence
  Cyclic GFR-binding peptide
  MOD_RES (2)..(3)..(35)..(37): Xaa is C or S
AXXAPTKLNAISVLYFDSSNNVILKKYRNMVVKAXGX

SEQ ID NO: 9586 - protein, 31 aa, Artificial Sequence
  Cyclic GFR-binding peptide
  MOD_RES (31)..(31): Xaa is C or S
PTQLSATSVLYYDDSSNVILRKHRNMVVRAX

SEQ ID NO: 9587 - protein, 22 aa, Artificial Sequence
  Cyclic GFR-binding peptide
SATSILYYVGRTPKVLRKHRMV

SEQ ID NO: 9588 - protein, 32 aa, Artificial Sequence
  Cyclic GFR-binding peptide
  MOD_RES (32)..(32): Xaa is C or S
APTQLSATSVLYYDDSSNVILRKHRNMVVRAX

SEQ ID NO: 9589 - protein, 33 aa, Artificial Sequence
  Cyclic GFR-binding peptide
  MOD_RES (5)..(6): Xaa is C or S
SASPXXVPQDLSAISILYLVGRTPKVLKNYQMV

SEQ ID NO: 9590 - protein, 25 aa, Artificial Sequence
  Cyclic GFR-binding peptide
PQDLSPISILYKVGRTPKVLKYHYM

SEQ ID NO: 9591 - protein, 27 aa, Artificial Sequence
  Cyclic GFR-binding peptide
ELSPISMLYKDEYDKVVLKYHYEMVVE

SEQ ID NO: 9592 - protein, 31 aa, Artificial Sequence
  Cyclic GFR-binding peptide
  MOD_RES (2)..(3): Xaa is C or S
AXXVPTELSATSMLYYDENEKVVLRKHRDMV

SEQ ID NO: 9593 - protein, 29 aa, Artificial Sequence
  Cyclic GFR-binding peptide
VPTELSPISMLYKDEYDKVVLKYHYEMVV

SEQ ID NO: 9594 - protein, 30 aa, Artificial Sequence
  Cyclic GFR-binding peptide
  MOD_RES (1)..(1): Xaa is C or S
XVPQDLSATSILYYVGRTPKVLRKHRMVVK

SEQ ID NO: 9595 - protein, 29 aa, Artificial Sequence
  Cyclic GFR-binding peptide
  MOD_RES (3)..(4): Xaa is C or S
APXXVPQALSAISILYLVGRKPKVLKNYQ

SEQ ID NO: 9596 - protein, 27 aa, Artificial Sequence
  Cyclic GFR-binding peptide
SATSVLYYEIVRKKPIFLRKHRTLEDH

SEQ ID NO: 9597 - protein, 33 aa, Artificial Sequence
  Cyclic GFR-binding peptide
  MOD_RES (31)..(33): Xaa is C or S
PTQLSAISVLYLDDSSNVILKNYQNMVVRAXGX

SEQ ID NO: 9598 - protein, 33 aa, Artificial Sequence
  Cyclic GFR-binding peptide
  MOD_RES (31)..(33): Xaa is C or S
PTELNAISMLYFDEYDKVVLKKYREMVVEGXGX

SEQ ID NO: 9599 - protein, 31 aa, Artificial Sequence
  Cyclic GFR-binding peptide
  MOD_RES (1)..(1): Xaa is C or S
XVPQDLSATSILYYVGRTPKVLRKHRMVVKS

SEQ ID NO: 9600 - protein, 31 aa, Artificial Sequence
  Cyclic GFR-binding peptide
  MOD_RES (31)..(31): Xaa is C or S
PTKLSAISVLYLDDSSNVILKNYQNMVVRSX

SEQ ID NO: 9601 - protein, 37 aa, Artificial Sequence
  Cyclic GFR-binding peptide
  MOD_RES (4)..(5)..(37): Xaa is C or S
PKAXXAPTKLSPISVLYKDSSNNVILKYHYNMVVKAX

SEQ ID NO: 9602 - protein, 31 aa, Artificial Sequence
  Cyclic GFR-binding peptide
  MOD_RES (2)..(3): Xaa is C or S
PXXVPQALSAISILYLVGRKPKVLKNYQMIV

SEQ ID NO: 9603 - protein, 37 aa, Artificial Sequence
  Cyclic GFR-binding peptide
  MOD_RES (5)..(6): Xaa is C or S
IPKAXXVPTELNAISMLYFDENEKVVLKKYRDMVVEG

SEQ ID NO: 9604 - protein, 39 aa, Artificial Sequence
  Cyclic GFR-binding peptide
  MOD_RES (4)..(5)..(38): Xaa is C or S
GKAXXVPTKLNAISVLYFDDMGVPTLKKYREGMSVAEXG

SEQ ID NO: 9605 - protein, 33 aa, Artificial Sequence
  Cyclic GFR-binding peptide
  MOD_RES (1)..(2)..(33): Xaa is C or S
XXVSQDLNAISILYFIGKTPKILKKYRMIVKSX

SEQ ID NO: 9606 - protein, 37 aa, Artificial Sequence
  Cyclic GFR-binding peptide
  MOD_RES (6)..(7): Xaa is C or S
KIPKAXXVPTELSPISMLYKDENEKVVLKYHYDMVVE

SEQ ID NO: 9607 - protein, 28 aa, Artificial Sequence
  Cyclic GFR-binding peptide
QLSAISVLYLDDSSNVILKNYQNMVVRA

SEQ ID NO: 9608 - protein, 32 aa, Artificial Sequence
  Cyclic GFR-binding peptide
  MOD_RES (7)..(7): Xaa is C or S
HVTKPTXAPTKLSAISVLYLDDSSNVILKNYQ

SEQ ID NO: 9609 - protein, 33 aa, Artificial Sequence
  Cyclic GFR-binding peptide
  MOD_RES (1)..(32): Xaa is C or S
XVPQALSAISILYLVGRKPKVLKNYQMIVRSXK

SEQ ID NO: 9610 - protein, 34 aa, Artificial Sequence
  Cyclic GFR-binding peptide
  MOD_RES (5)..(6): Xaa is C or S
SASPXXVSQDLSATSILYYIGKTPKILRKHRMIV

SEQ ID NO: 9611 - protein, 35 aa, Artificial Sequence
  Cyclic GFR-binding peptide
  MOD_RES (1)..(2)..(33)..(35): Xaa is C or S
XXVPQDLSPISILYKVGRTPKVLKYHYMVVKSXKX

SEQ ID NO: 9612 - protein, 41 aa, Artificial Sequence
  Cyclic GFR-binding peptide
  MOD_RES (5)..(6)..(38)..(40): Xaa is C or S
VPKAXXAPTKLSAISVLYLDSSNNVILKNYQNMVVKAXGXH

SEQ ID NO: 9613 - protein, 39 aa, Artificial Sequence
  Cyclic GFR-binding peptide
  MOD_RES (6)..(7)..(39): Xaa is C or S
TVPKPXXAPTQLSAISVLYLDDSSNVILKNYQNMVVRAX

SEQ ID NO: 9614 - protein, 36 aa, Artificial Sequence
  Cyclic GFR-binding peptide
  MOD_RES (5)..(6): Xaa is C or S
SASPXXVPQDLSAISILYLVGRTPKVLKNYQMVVKS

SEQ ID NO: 9615 - protein, 33 aa, Artificial Sequence
  Cyclic GFR-binding peptide
  MOD_RES (5)..(6): Xaa is C or S
SASPXXVSQDLSAISILYLIGKTPKILKNYQMI

SEQ ID NO: 9616 - protein, 28 aa, Artificial Sequence
  Cyclic GFR-binding peptide
  MOD_RES (27)..(27): Xaa is C or S
LNAISILYFIGKTPKILKKYRMIVKSXK

SEQ ID NO: 9617 - protein, 23 aa, Artificial Sequence
  Cyclic GFR-binding peptide
KLSATSVLYYDDMGVPTLRKHRE

SEQ ID NO: 9618 - protein, 26 aa, Artificial Sequence
  Cyclic GFR-binding peptide
  MOD_RES (1)..(1): Xaa is C or S
XVPQALSATSILYYVGRKPKVLRKHR

SEQ ID NO: 9619 - protein, 37 aa, Artificial Sequence
  Cyclic GFR-binding peptide
  MOD_RES (6)..(7): Xaa is C or S
ASAAPXXVPQALSAISILYLVGRKPKVLKNYQMIVRS

SEQ ID NO: 9620 - protein, 24 aa, Artificial Sequence
  Cyclic GFR-binding peptide
NAISVLYFDDMGVPTLKKYREGMS

SEQ ID NO: 9621 - protein, 28 aa, Artificial Sequence
  Cyclic GFR-binding peptide
  MOD_RES (1)..(1): Xaa is C or S
XAPTKLSATSVLYYDDSSNVILRKHRNM

SEQ ID NO: 9622 - protein, 36 aa, Artificial Sequence
  Cyclic GFR-binding peptide
  MOD_RES (4)..(5)..(36): Xaa is C or S
AAPXXVPQALSATSILYYVGRKPKVLRKHRMIVRSX

SEQ ID NO: 9623 - protein, 43 aa, Artificial Sequence
  Cyclic GFR-binding peptide
  MOD_RES (3)..(40)..(42): Xaa is C or S
VQXRPTQVQLSATSVLYYEIVRKKPIFLRKHRTLEDHLAXKXE

SEQ ID NO: 9624 - protein, 38 aa, Artificial Sequence
  Cyclic GFR-binding peptide
  MOD_RES (2)..(3)..(35)..(37): Xaa is C or S
AXXVPTELSPISMLYKDEYDKVVLKYHYEMVVEGXGXR

SEQ ID NO: 9625 - protein, 39 aa, Artificial Sequence
  Cyclic GFR-binding peptide
  MOD_RES (4)..(5)..(36)..(38): Xaa is C or S
ASPXXVPQDLSAISILYLVGRTPKVLKNYQMVVKSXKXS

SEQ ID NO: 9626 - protein, 29 aa, Artificial Sequence
  Cyclic GFR-binding peptide
  MOD_RES (27)..(29): Xaa is C or S
LNAISILYFVGRKPKVLKKYRMIVRSXKX

SEQ ID NO: 9627 - protein, 33 aa, Artificial Sequence
  Cyclic GFR-binding peptide
  MOD_RES (1)..(1): Xaa is C or S
XRPTQVQLSPISVLYKEIVRKKPIFLKYHYTLE

SEQ ID NO: 9628 - protein, 28 aa, Artificial Sequence
  Cyclic GFR-binding peptide
  MOD_RES (26)..(28): Xaa is C or S
NAISILYFVGRTPKVLKKYRMVVKSXKX

SEQ ID NO: 9629 - protein, 33 aa, Artificial Sequence
  Cyclic GFR-binding peptide
  MOD_RES (31)..(33): Xaa is C or S
PTKLSAISVLYLDDSSNVILKNYQNMVVRSXGX

SEQ ID NO: 9630 - protein, 27 aa, Artificial Sequence
  Cyclic GFR-binding peptide
  MOD_RES (27)..(27): Xaa is C or S
LSAISILYLIGKTPKILKNYQMIVKSX

SEQ ID NO: 9631 - protein, 22 aa, Artificial Sequence
  Cyclic GFR-binding peptide
ELNAISMLYFDENEKVVLKKYR

SEQ ID NO: 9632 - protein, 32 aa, Artificial Sequence
  Cyclic GFR-binding peptide
  MOD_RES (1)..(1): Xaa is C or S
XVPTELNAISMLYFDENEKVVLKKYRDMVVEG

SEQ ID NO: 9633 - protein, 37 aa, Artificial Sequence
  Cyclic GFR-binding peptide
  MOD_RES (2)..(3)..(35)..(37): Xaa is C or S
PXXAPTKLSAISVLYLDDSSNVILKNYQNMVVRSXGX

SEQ ID NO: 9634 - protein, 27 aa, Artificial Sequence
  Cyclic GFR-binding peptide
  MOD_RES (1)..(2): Xaa is C or S
XXVPTELSATSMLYYDENEKVVLRKHR

SEQ ID NO: 9635 - protein, 38 aa, Artificial Sequence
  Cyclic GFR-binding peptide
  MOD_RES (4)..(5)..(37): Xaa is C or S
PKAXXAPTKLSAISVLYLDSSNNVILKNYQNMVVKAXG

SEQ ID NO: 9636 - protein, 26 aa, Artificial Sequence
  Cyclic GFR-binding peptide
LSAISILYLVGRTPKVLKNYQMVVKS

SEQ ID NO: 9637 - protein, 33 aa, Artificial Sequence
  Cyclic GFR-binding peptide
  MOD_RES (3)..(3): Xaa is C or S
VQXRPTQVQLNAISVLYFEIVRKKPIFLKKYRT

SEQ ID NO: 9638 - protein, 31 aa, Artificial Sequence
  Cyclic GFR-binding peptide
  MOD_RES (28)..(30): Xaa is C or S
LNAISVLYFDSSNNVILKKYRNMVVKAXGXH

SEQ ID NO: 9639 - protein, 29 aa, Artificial Sequence
  Cyclic GFR-binding peptide
  MOD_RES (29)..(29): Xaa is C or S
QALSATSILYYVGRKPKVLRKHRMIVRSX

SEQ ID NO: 9640 - protein, 24 aa, Artificial Sequence
  Cyclic GFR-binding peptide
TKLSATSVLYYDDSSNVILRKHRN

SEQ ID NO: 9641 - protein, 24 aa, Artificial Sequence
  Cyclic GFR-binding peptide
DLNAISILYFVGRTPKVLKKYRMV

SEQ ID NO: 9642 - protein, 26 aa, Artificial Sequence
  Cyclic GFR-binding peptide
  MOD_RES (1)..(1): Xaa is C or S
XVPQALSAISILYLVGRKPKVLKNYQ

SEQ ID NO: 9643 - protein, 32 aa, Artificial Sequence
  Cyclic GFR-binding peptide
  MOD_RES (1)..(1): Xaa is C or S
XVPTELNAISMLYFDEYDKVVLKKYREMVVEG

SEQ ID NO: 9644 - protein, 36 aa, Artificial Sequence
  Cyclic GFR-binding peptide
  MOD_RES (2)..(3)..(34)..(36): Xaa is C or S
PXXVSQDLSAISILYLIGKTPKILKNYQMIVKSXKX

SEQ ID NO: 9645 - protein, 36 aa, Artificial Sequence
  Cyclic GFR-binding peptide
  MOD_RES (2)..(3)..(34)..(36): Xaa is C or S
PXXVPQALSAISILYLVGRKPKVLKNYQMIVRSXKX

SEQ ID NO: 9646 - protein, 36 aa, Artificial Sequence
  Cyclic GFR-binding peptide
  MOD_RES (1)..(34)..(36): Xaa is C or S
XVPTKLNAISVLYFDDMGVPTLKKYREGMSVAEXGX

SEQ ID NO: 9647 - protein, 40 aa, Artificial Sequence
  Cyclic GFR-binding peptide
  MOD_RES (6)..(7)..(39): Xaa is C or S
SIPKAXXVPTELNAISMLYFDEYDKVVLKKYREMVVEGXG

SEQ ID NO: 9648 - protein, 25 aa, Artificial Sequence
  Cyclic GFR-binding peptide
ELSPISMLYKDEYDKVVLKYHYEMV

SEQ ID NO: 9649 - protein, 26 aa, Artificial Sequence
  Cyclic GFR-binding peptide
LSATSVLYYDDSSNVILRKHRNMVVR

SEQ ID NO: 9650 - protein, 36 aa, Artificial Sequence
  Cyclic GFR-binding peptide
  MOD_RES (6)..(7): Xaa is C or S
ASASPXXVPQDLNAISILYFVGRTPKVLKKYRMVVK

SEQ ID NO: 9651 - protein, 28 aa, Artificial Sequence
  Cyclic GFR-binding peptide
SPISVLYKEIVRKKPIFLKYHYTLEDHL

SEQ ID NO: 9652 - protein, 30 aa, Artificial Sequence
  Cyclic GFR-binding peptide
  MOD_RES (1)..(2): Xaa is C or S
XXVSQDLSAISILYLIGKTPKILKNYQMIV

SEQ ID NO: 9653 - protein, 27 aa, Artificial Sequence
  Cyclic GFR-binding peptide
PTQLSAISVLYLDDSSNVILKNYQNMV

SEQ ID NO: 9654 - protein, 28 aa, Artificial Sequence
  Cyclic GFR-binding peptide
ELSATSMLYYDEYDKVVLRKHREMVVEG

SEQ ID NO: 9655 - protein, 30 aa, Artificial Sequence
  Cyclic GFR-binding peptide
PTQLSAISVLYLDDSSNVILKNYQNMVVRA

SEQ ID NO: 9656 - protein, 34 aa, Artificial Sequence
  Cyclic GFR-binding peptide
  MOD_RES (3)..(4): Xaa is C or S
KPXXAPTQLSPISVLYKDDSSNVILKYHYNMVVR

SEQ ID NO: 9657 - protein, 31 aa, Artificial Sequence
  Cyclic GFR-binding peptide
  MOD_RES (1)..(2): Xaa is C or S
XXVPTELNAISMLYFDENEKVVLKKYRDMVV

SEQ ID NO: 9658 - protein, 26 aa, Artificial Sequence
  Cyclic GFR-binding peptide
ALSAISILYLVGRKPKVLKNYQMIVR

SEQ ID NO: 9659 - protein, 35 aa, Artificial Sequence
  Cyclic GFR-binding peptide
  MOD_RES (2)..(3)..(34): Xaa is C or S
PXXVSQDLSATSILYYIGKTPKILRKHRMIVKSXK

SEQ ID NO: 9660 - protein, 36 aa, Artificial Sequence
  Cyclic GFR-binding peptide
  MOD_RES (5)..(5): Xaa is C or S
RNVQXRPTQVQLSATSVLYYEIVRKKPIFLRKHRTL

SEQ ID NO: 9661 - protein, 27 aa, Artificial Sequence
  Cyclic GFR-binding peptide
QDLSPISILYKVGRTPKVLKYHYMVVK

SEQ ID NO: 9662 - protein, 31 aa, Artificial Sequence
  Cyclic GFR-binding peptide
  MOD_RES (2)..(3): Xaa is C or S
PXXVPQDLSPISILYKVGRTPKVLKYHYMVV

SEQ ID NO: 9663 - protein, 30 aa, Artificial Sequence
  Cyclic GFR-binding peptide
  MOD_RES (3)..(4): Xaa is C or S
APXXVPQALSAISILYLVGRKPKVLKNYQM

SEQ ID NO: 9664 - protein, 20 aa, Artificial Sequence
  Cyclic GFR-binding peptide
SAISILYLIGKTPKILKNYQ

SEQ ID NO: 9665 - protein, 31 aa, Artificial Sequence
  Cyclic GFR-binding peptide
  MOD_RES (2)..(3): Xaa is C or S
PXXVPQDLSATSILYYVGRTPKVLRKHRMVV

SEQ ID NO: 9666 - protein, 25 aa, Artificial Sequence
  Cyclic GFR-binding peptide
LSPISVLYKDDSSNVILKYHYNMVV

SEQ ID NO: 9667 - protein, 30 aa, Artificial Sequence
  Cyclic GFR-binding peptide
APTQLSATSVLYYDDSSNVILRKHRNMVVR

SEQ ID NO: 9668 - protein, 41 aa, Artificial Sequence
  Cyclic GFR-binding peptide
  MOD_RES (6)..(7)..(39)..(41): Xaa is C or S
SIPKAXXVPTELNAISMLYFDEYDKVVLKKYREMVVEGXGX

SEQ ID NO: 9669 - protein, 25 aa, Artificial Sequence
  Cyclic GFR-binding peptide
VPQALSPISILYKVGRKPKVLKYHY

SEQ ID NO: 9670 - protein, 36 aa, Artificial Sequence
  Cyclic GFR-binding peptide
  MOD_RES (5)..(6): Xaa is C or S
SASPXXVPQDLSPISILYKVGRTPKVLKYHYMVVKS

SEQ ID NO: 9671 - protein, 20 aa, Artificial Sequence
  Cyclic GFR-binding peptide
SATSILYYIGKTPKILRKHR

SEQ ID NO: 9672 - protein, 40 aa, Artificial Sequence
  Cyclic GFR-binding peptide
  MOD_RES (4)..(5)..(37)..(39): Xaa is C or S
PKAXXAPTKLNAISVLYFDSSNNVILKKYRNMVVKAXGXH

SEQ ID NO: 9673 - protein, 37 aa, Artificial Sequence
  Cyclic GFR-binding peptide
  MOD_RES (5)..(6)..(37): Xaa is C or S
SAAPXXVPQALSAISILYLVGRKPKVLKNYQMIVRSX

SEQ ID NO: 9674 - protein, 37 aa, Artificial Sequence
  Cyclic GFR-binding peptide
  MOD_RES (2)..(3)..(34)..(36): Xaa is C or S
PXXVSQDLSAISILYLIGKTPKILKNYQMIVKSXKXS

SEQ ID NO: 9675 - protein, 31 aa, Artificial Sequence
  Cyclic GFR-binding peptide
  MOD_RES (1)..(1): Xaa is C or S
XVSQDLSAISILYLIGKTPKILKNYQMIVKS

SEQ ID NO: 9676 - protein, 28 aa, Artificial Sequence
  Cyclic GFR-binding peptide
QALSATSILYYVGRKPKVLRKHRMIVRS

SEQ ID NO: 9677 - protein, 29 aa, Artificial Sequence
  Cyclic GFR-binding peptide
  MOD_RES (1)..(2): Xaa is C or S
XXVSQDLSAISILYLIGKTPKILKNYQMI

SEQ ID NO: 9678 - protein, 39 aa, Artificial Sequence
  Cyclic GFR-binding peptide
  MOD_RES (3)..(4)..(36)..(38): Xaa is C or S
KAXXVPTELNAISMLYFDEYDKVVLKKYREMVVEGXGXR

SEQ ID NO: 9679 - protein, 29 aa, Artificial Sequence
  Cyclic GFR-binding peptide
  MOD_RES (2)..(3): Xaa is C or S
PXXVSQDLSATSILYYIGKTPKILRKHRM

SEQ ID NO: 9680 - protein, 34 aa, Artificial Sequence
  Cyclic GFR-binding peptide
  MOD_RES (1)..(33): Xaa is C or S
XAPTKLSAISVLYLDDSSNVILKNYQNMVVRSXG

SEQ ID NO: 9681 - protein, 34 aa, Artificial Sequence
  Cyclic GFR-binding peptide
  MOD_RES (2)..(3): Xaa is C or S
AXXVPTELSPISMLYKDEYDKVVLKYHYEMVVEG

SEQ ID NO: 9682 - protein, 29 aa, Artificial Sequence
  Cyclic GFR-binding peptide
  MOD_RES (29)..(29): Xaa is C or S
KLSAISVLYLDSSNNVILKNYQNMVVKAX

SEQ ID NO: 9683 - protein, 37 aa, Artificial Sequence
  Cyclic GFR-binding peptide
  MOD_RES (6)..(7): Xaa is C or S
ASASPXXVSQDLSATSILYYIGKTPKILRKHRMIVKS

SEQ ID NO: 9684 - protein, 24 aa, Artificial Sequence
  Cyclic GFR-binding peptide
PTELNAISMLYFDEYDKVVLKKYR

SEQ ID NO: 9685 - protein, 32 aa, Artificial Sequence
  Cyclic GFR-binding peptide
VPTKLNAISVLYFDDMGVPTLKKYREGMSVAE

SEQ ID NO: 9686 - protein, 31 aa, Artificial Sequence
  Cyclic GFR-binding peptide
  MOD_RES (1)..(1): Xaa is C or S
XVSQDLSPISILYKIGKTPKILKYHYMIVKS

SEQ ID NO: 9687 - protein, 37 aa, Artificial Sequence
  Cyclic GFR-binding peptide
  MOD_RES (3)..(4)..(35)..(37): Xaa is C or S
SPXXVSQDLNAISILYFIGKTPKILKKYRMIVKSXKX

SEQ ID NO: 9688 - protein, 27 aa, Artificial Sequence
  Cyclic GFR-binding peptide
  MOD_RES (1)..(2): Xaa is C or S
XXAPTKLSPISVLYKDDSSNVILKYHY

SEQ ID NO: 9689 - protein, 27 aa, Artificial Sequence
  Cyclic GFR-binding peptide
  MOD_RES (27)..(27): Xaa is C or S
SAISVLYLDDSSNVILKNYQNMVVRSX

SEQ ID NO: 9690 - protein, 25 aa, Artificial Sequence
  Cyclic GFR-binding peptide
KLNAISVLYFDDMGVPTLKKYREGM

SEQ ID NO: 9691 - protein, 33 aa, Artificial Sequence
  Cyclic GFR-binding peptide
  MOD_RES (5)..(6): Xaa is C or S
IPKAXXVPTELNAISMLYFDEYDKVVLKKYREM

SEQ ID NO: 9692 - protein, 30 aa, Artificial Sequence
  Cyclic GFR-binding peptide
  MOD_RES (28)..(30): Xaa is C or S
LSATSVLYYDDSSNVILRKHRNMVVRSXGX

SEQ ID NO: 9693 - protein, 27 aa, Artificial Sequence
  Cyclic GFR-binding peptide
  MOD_RES (27)..(27): Xaa is C or S
LSAISILYLVGRKPKVLKNYQMIVRSX

SEQ ID NO: 9694 - protein, 34 aa, Artificial Sequence
  Cyclic GFR-binding peptide
  MOD_RES (1)..(2)..(34): Xaa is C or S
XXVPTELSATSMLYYDENEKVVLRKHRDMVVEGX

SEQ ID NO: 9695 - protein, 33 aa, Artificial Sequence
  Cyclic GFR-binding peptide
  MOD_RES (6)..(7): Xaa is C or S
ASAAPXXVPQALSAISILYLVGRKPKVLKNYQM

SEQ ID NO: 9696 - protein, 30 aa, Artificial Sequence
  Cyclic GFR-binding peptide
  MOD_RES (1)..(1): Xaa is C or S
XAPTKLSAISVLYLDDSSNVILKNYQNMVV

SEQ ID NO: 9697 - protein, 21 aa, Artificial Sequence
  Cyclic GFR-binding peptide
LSAISVLYLDDMGVPTLKNYQ

SEQ ID NO: 9698 - protein, 24 aa, Artificial Sequence
  Cyclic GFR-binding peptide
SAISILYLIGKTPKILKNYQMIVK

SEQ ID NO: 9699 - protein, 30 aa, Artificial Sequence
  Cyclic GFR-binding peptide
  MOD_RES (1)..(2): Xaa is C or S
XXVPTKLNAISVLYFDDMGVPTLKKYREGM

SEQ ID NO: 9700 - protein, 29 aa, Artificial Sequence
  Cyclic GFR-binding peptide
  MOD_RES (1)..(2): Xaa is C or S
XXVPQDLSAISILYLVGRTPKVLKNYQMV

SEQ ID NO: 9701 - protein, 34 aa, Artificial Sequence
  Cyclic GFR-binding peptide
  MOD_RES (2)..(3): Xaa is C or S
AXXVPTELSPISMLYKDENEKVVLKYHYDMVVEG

SEQ ID NO: 9702 - protein, 34 aa, Artificial Sequence
  Cyclic GFR-binding peptide
  MOD_RES (32)..(34): Xaa is C or S
VPTELSPISMLYKDEYDKVVLKYHYEMVVEGXGX

SEQ ID NO: 9703 - protein, 38 aa, Artificial Sequence
  Cyclic GFR-binding peptide
  MOD_RES (7)..(7): Xaa is C or S
HVTKPTXAPTKLSPISVLYKDDSSNVILKYHYNMVVRS

SEQ ID NO: 9704 - protein, 28 aa, Artificial Sequence
  Cyclic GFR-binding peptide
  MOD_RES (1)..(2): Xaa is C or S
XXVSQDLSPISILYKIGKTPKILKYHYM

SEQ ID NO: 9705 - protein, 30 aa, Artificial Sequence
  Cyclic GFR-binding peptide
  MOD_RES (2)..(3): Xaa is C or S
PXXVSQDLSATSILYYIGKTPKILRKHRMI

SEQ ID NO: 9706 - protein, 32 aa, Artificial Sequence
  Cyclic GFR-binding peptide
  MOD_RES (4)..(5): Xaa is C or S
PKAXXAPTKLSPISVLYKDSSNNVILKYHYNM

SEQ ID NO: 9707 - protein, 33 aa, Artificial Sequence
  Cyclic GFR-binding peptide
  MOD_RES (30)..(32): Xaa is C or S
PQDLNAISILYFVGRTPKVLKKYRMVVKSXKXS

SEQ ID NO: 9708 - protein, 36 aa, Artificial Sequence
  Cyclic GFR-binding peptide
  MOD_RES (36)..(36): Xaa is C or S
PTQVQLSATSVLYYEIVRKKPIFLRKHRTLEDHLAX

SEQ ID NO: 9709 - protein, 24 aa, Artificial Sequence
  Cyclic GFR-binding peptide
SPISILYKVGRTPKVLKYHYMVVK

SEQ ID NO: 9710 - protein, 32 aa, Artificial Sequence
  Cyclic GFR-binding peptide
  MOD_RES (30)..(32): Xaa is C or S
TKLSAISVLYLDDSSNVILKNYQNMVVRSXGX

SEQ ID NO: 9711 - protein, 33 aa, Artificial Sequence
  Cyclic GFR-binding peptide
  MOD_RES (1)..(33): Xaa is C or S
XVPTELSATSMLYYDEYDKVVLRKHREMVVEGX

SEQ ID NO: 9712 - protein, 29 aa, Artificial Sequence
  Cyclic GFR-binding peptide
PQDLNAISILYFVGRTPKVLKKYRMVVKS

SEQ ID NO: 9713 - protein, 29 aa, Artificial Sequence
  Cyclic GFR-binding peptide
VPQDLSATSILYYVGRTPKVLRKHRMVVK

SEQ ID NO: 9714 - protein, 34 aa, Artificial Sequence
  Cyclic GFR-binding peptide
  MOD_RES (1)..(32)..(34): Xaa is C or S
XVPQDLSAISILYLVGRTPKVLKNYQMVVKSXKX

SEQ ID NO: 9715 - protein, 28 aa, Artificial Sequence
  Cyclic GFR-binding peptide
PQDLSATSILYYVGRTPKVLRKHRMVVK

SEQ ID NO: 9716 - protein, 39 aa, Artificial Sequence
  Cyclic GFR-binding peptide
  MOD_RES (6)..(7)..(38): Xaa is C or S
ASASPXXVPQDLNAISILYFVGRTPKVLKKYRMVVKSXK

SEQ ID NO: 9717 - protein, 41 aa, Artificial Sequence
  Cyclic GFR-binding peptide
  MOD_RES (6)..(7)..(38)..(40): Xaa is C or S
ASAAPXXVPQALSPISILYKVGRKPKVLKYHYMIVRSXKXS

SEQ ID NO: 9718 - protein, 39 aa, Artificial Sequence
  Cyclic GFR-binding peptide
  MOD_RES (37)..(39): Xaa is C or S
RPTQVQLNAISVLYFEIVRKKPIFLKKYRTLEDHLAXKX

SEQ ID NO: 9719 - protein, 28 aa, Artificial Sequence
  Cyclic GFR-binding peptide
  MOD_RES (2)..(3): Xaa is C or S
AXXVPTELSATSMLYYDENEKVVLRKHR

SEQ ID NO: 9720 - protein, 32 aa, Artificial Sequence
  Cyclic GFR-binding peptide
  MOD_RES (3)..(4): Xaa is C or S
APXXVPQALSAISILYLVGRKPKVLKNYQMIV

SEQ ID NO: 9721 - protein, 36 aa, Artificial Sequence
  Cyclic GFR-binding peptide
  MOD_RES (3)..(4)..(36): Xaa is C or S
KPXXAPTQLSATSVLYYDDSSNVILRKHRNMVVRAX

SEQ ID NO: 9722 - protein, 30 aa, Artificial Sequence
  Cyclic GFR-binding peptide
TKLSAISVLYLDDMGVPTLKNYQEGMSVAE

SEQ ID NO: 9723 - protein, 36 aa, Artificial Sequence
  Cyclic GFR-binding peptide
  MOD_RES (5)..(6): Xaa is C or S
SAAPXXVPQALSPISILYKVGRKPKVLKYHYMIVRS

SEQ ID NO: 9724 - protein, 29 aa, Artificial Sequence
  Cyclic GFR-binding peptide
APTKLSAISVLYLDSSNNVILKNYQNMVV

SEQ ID NO: 9725 - protein, 30 aa, Artificial Sequence
  Cyclic GFR-binding peptide
  MOD_RES (1)..(1): Xaa is C or S
XVPTELSPISMLYKDEYDKVVLKYHYEMVV

SEQ ID NO: 9726 - protein, 25 aa, Artificial Sequence
  Cyclic GFR-binding peptide
PTKLSATSVLYYDDSSNVILRKHRN

SEQ ID NO: 9727 - protein, 35 aa, Artificial Sequence
  Cyclic GFR-binding peptide
  MOD_RES (33)..(35): Xaa is C or S
VQLNAISVLYFEIVRKKPIFLKKYRTLEDHLAXKX

SEQ ID NO: 9728 - protein, 33 aa, Artificial Sequence
  Cyclic GFR-binding peptide
  MOD_RES (4)..(5): Xaa is C or S
ASPXXVPQDLSPISILYKVGRTPKVLKYHYMVV

SEQ ID NO: 9729 - protein, 33 aa, Artificial Sequence
  Cyclic GFR-binding peptide
  MOD_RES (1)..(2): Xaa is C or S
XXVPTELSATSMLYYDENEKVVLRKHRDMVVEG

SEQ ID NO: 9730 - protein, 26 aa, Artificial Sequence
  Cyclic GFR-binding peptide
VPTKLSATSVLYYDDMGVPTLRKHRE

SEQ ID NO: 9731 - protein, 32 aa, Artificial Sequence
  Cyclic GFR-binding peptide
  MOD_RES (6)..(7): Xaa is C or S
KIPKAXXVPTELSATSMLYYDENEKVVLRKHR

SEQ ID NO: 9732 - protein, 33 aa, Artificial Sequence
  Cyclic GFR-binding peptide
  MOD_RES (30)..(32): Xaa is C or S
TKLSPISVLYKDSSNNVILKYHYNMVVKAXGXH

SEQ ID NO: 9733 - protein, 34 aa, Artificial Sequence
  Cyclic GFR-binding peptide
  MOD_RES (1)..(2)..(33): Xaa is C or S
XXVSQDLSATSILYYIGKTPKILRKHRMIVKSXK

SEQ ID NO: 9734 - protein, 37 aa, Artificial Sequence
  Cyclic GFR-binding peptide
  MOD_RES (36)..(36): Xaa is C or S
PTQVQLNAISVLYFEIVRKKPIFLKKYRTLEDHLAXK

SEQ ID NO: 9735 - protein, 30 aa, Artificial Sequence
  Cyclic GFR-binding peptide
  MOD_RES (1)..(1): Xaa is C or S
XVPQALSAISILYLVGRKPKVLKNYQMIVR

SEQ ID NO: 9736 - protein, 32 aa, Artificial Sequence
  Cyclic GFR-binding peptide
PTQVQLNAISVLYFEIVRKKPIFLKKYRTLED

SEQ ID NO: 9737 - protein, 33 aa, Artificial Sequence
  Cyclic GFR-binding peptide
  MOD_RES (4)..(5): Xaa is C or S
ASPXXVPQDLSATSILYYVGRTPKVLRKHRMVV

SEQ ID NO: 9738 - protein, 30 aa, Artificial Sequence
  Cyclic GFR-binding peptide
  MOD_RES (2)..(3): Xaa is C or S
AXXVPTELNAISMLYFDENEKVVLKKYRDM

SEQ ID NO: 9739 - protein, 27 aa, Artificial Sequence
  Cyclic GFR-binding peptide
ALSAISILYLVGRKPKVLKNYQMIVRS

SEQ ID NO: 9740 - protein, 32 aa, Artificial Sequence
  Cyclic GFR-binding peptide
  MOD_RES (4)..(5): Xaa is C or S
GKAXXVPTKLSATSVLYYDDMGVPTLRKHREG

SEQ ID NO: 9741 - protein, 35 aa, Artificial Sequence
  Cyclic GFR-binding peptide
  MOD_RES (1)..(1): Xaa is C or S
XRPTQVQLSPISVLYKEIVRKKPIFLKYHYTLEDH

SEQ ID NO: 9742 - protein, 33 aa, Artificial Sequence
  Cyclic GFR-binding peptide
  MOD_RES (3)..(4): Xaa is C or S
KAXXVPTELSATSMLYYDENEKVVLRKHRDMVV

SEQ ID NO: 9743 - protein, 26 aa, Artificial Sequence
  Cyclic GFR-binding peptide
TELSATSMLYYDENEKVVLRKHRDMV

SEQ ID NO: 9744 - protein, 21 aa, Artificial Sequence
  Cyclic GFR-binding peptide
NAISMLYFDEYDKVVLKKYRE

SEQ ID NO: 9745 - protein, 25 aa, Artificial Sequence
  Cyclic GFR-binding peptide
SQDLSAISILYLIGKTPKILKNYQM

SEQ ID NO: 9746 - protein, 33 aa, Artificial Sequence
  Cyclic GFR-binding peptide
  MOD_RES (4)..(5): Xaa is C or S
PKAXXVPTELNAISMLYFDEYDKVVLKKYREMV

SEQ ID NO: 9747 - protein, 29 aa, Artificial Sequence
  Cyclic GFR-binding peptide
  MOD_RES (1)..(2): Xaa is C or S
XXVPTELSATSMLYYDENEKVVLRKHRDM

SEQ ID NO: 9748 - protein, 36 aa, Artificial Sequence
  Cyclic GFR-binding peptide
  MOD_RES (3)..(4)..(36): Xaa is C or S
KPXXAPTKLSAISVLYLDDSSNVILKNYQNMVVRSX

SEQ ID NO: 9749 - protein, 35 aa, Artificial Sequence
  Cyclic GFR-binding peptide
  MOD_RES (2)..(3)..(35): Xaa is C or S
PXXAPTKLSPISVLYKDDSSNVILKYHYNMVVRSX

SEQ ID NO: 9750 - protein, 23 aa, Artificial Sequence
  Cyclic GFR-binding peptide
SAISILYLIGKTPKILKNYQMIV

SEQ ID NO: 9751 - protein, 29 aa, Artificial Sequence
  Cyclic GFR-binding peptide
PTELSPISMLYKDEYDKVVLKYHYEMVVE

SEQ ID NO: 9752 - protein, 43 aa, Artificial Sequence
  Cyclic GFR-binding peptide
  MOD_RES (4)..(41)..(43): Xaa is C or S
NVQXRPTQVQLSPISVLYKEIVRKKPIFLKYHYTLEDHLAXKX

SEQ ID NO: 9753 - protein, 27 aa, Artificial Sequence
  Cyclic GFR-binding peptide
  MOD_RES (2)..(2): Xaa is C or S
TXAPTKLSPISVLYKDDSSNVILKYHY

SEQ ID NO: 9754 - protein, 21 aa, Artificial Sequence
  Cyclic GFR-binding peptide
LNAISMLYFDENEKVVLKKYR

SEQ ID NO: 9755 - protein, 29 aa, Artificial Sequence
  Cyclic GFR-binding peptide
  MOD_RES (2)..(3): Xaa is C or S
PXXVPQALSAISILYLVGRKPKVLKNYQM

SEQ ID NO: 9756 - protein, 30 aa, Artificial Sequence
  Cyclic GFR-binding peptide
  MOD_RES (2)..(3): Xaa is C or S
PXXVPQDLSATSILYYVGRTPKVLRKHRMV

SEQ ID NO: 9757 - protein, 31 aa, Artificial Sequence
  Cyclic GFR-binding peptide
APTQLSATSVLYYDDSSNVILRKHRNMVVRA

SEQ ID NO: 9758 - protein, 33 aa, Artificial Sequence
  Cyclic GFR-binding peptide
  MOD_RES (31)..(33): Xaa is C or S
PTKLSAISVLYLDSSNNVILKNYQNMVVKAXGX

SEQ ID NO: 9759 - protein, 28 aa, Artificial Sequence
  Cyclic GFR-binding peptide
  MOD_RES (2)..(3): Xaa is C or S
AXXVPTELNAISMLYFDEYDKVVLKKYR

SEQ ID NO: 9760 - protein, 35 aa, Artificial Sequence
  Cyclic GFR-binding peptide
  MOD_RES (5)..(6): Xaa is C or S
SAAPXXVPQALNAISILYFVGRKPKVLKKYRMIVR

SEQ ID NO: 9761 - protein, 27 aa, Artificial Sequence
  Cyclic GFR-binding peptide
  MOD_RES (1)..(1): Xaa is C or S
XVPTELNAISMLYFDEYDKVVLKKYRE

SEQ ID NO: 9762 - protein, 33 aa, Artificial Sequence
  Cyclic GFR-binding peptide
  MOD_RES (1)..(32): Xaa is C or S
XVSQDLSATSILYYIGKTPKILRKHRMIVKSXK

SEQ ID NO: 9763 - protein, 21 aa, Artificial Sequence
  Cyclic GFR-binding peptide
LSPISMLYKDEYDKVVLKYHY

SEQ ID NO: 9764 - protein, 38 aa, Artificial Sequence
  Cyclic GFR-binding peptide
  MOD_RES (4)..(36)..(38): Xaa is C or S
KPTXAPTKLSPISVLYKDDSSNVILKYHYNMVVRSXGX

SEQ ID NO: 9765 - protein, 34 aa, Artificial Sequence
  Cyclic GFR-binding peptide
  MOD_RES (32)..(34): Xaa is C or S
QLSAISVLYLEIVRKKPIFLKNYQTLEDHLAXKX

SEQ ID NO: 9766 - protein, 23 aa, Artificial Sequence
  Cyclic GFR-binding peptide
LSATSMLYYDEYDKVVLRKHREM

SEQ ID NO: 9767 - protein, 33 aa, Artificial Sequence
  Cyclic GFR-binding peptide
  MOD_RES (1)..(2): Xaa is C or S
XXVPTELSATSMLYYDEYDKVVLRKHREMVVEG

SEQ ID NO: 9768 - protein, 35 aa, Artificial Sequence
  Cyclic GFR-binding peptide
  MOD_RES (3)..(35): Xaa is C or S
PTXAPTKLSAISVLYLDDSSNVILKNYQNMVVRSX

SEQ ID NO: 9769 - protein, 26 aa, Artificial Sequence
  Cyclic GFR-binding peptide
QDLSAISILYLIGKTPKILKNYQMIV

SEQ ID NO: 9770 - protein, 33 aa, Artificial Sequence
  Cyclic GFR-binding peptide
  MOD_RES (6)..(7): Xaa is C or S
YVPKPXXAPTKLSAISVLYLDDSSNVILKNYQN

SEQ ID NO: 9771 - protein, 29 aa, Artificial Sequence
  Cyclic GFR-binding peptide
  MOD_RES (1)..(1): Xaa is C or S
XVPQDLSATSILYYVGRTPKVLRKHRMVV

SEQ ID NO: 9772 - protein, 37 aa, Artificial Sequence
  Cyclic GFR-binding peptide
  MOD_RES (3)..(4)..(36): Xaa is C or S
KAXXAPTKLNAISVLYFDSSNNVILKKYRNMVVKAXG

SEQ ID NO: 9773 - protein, 36 aa, Artificial Sequence
  Cyclic GFR-binding peptide
  MOD_RES (2)..(3)..(35): Xaa is C or S
PXXAPTKLSPISVLYKDDSSNVILKYHYNMVVRSXG

SEQ ID NO: 9774 - protein, 34 aa, Artificial Sequence
  Cyclic GFR-binding peptide
  MOD_RES (31)..(33): Xaa is C or S
VPQALSPISILYKVGRKPKVLKYHYMIVRSXKXS

SEQ ID NO: 9775 - protein, 35 aa, Artificial Sequence
  Cyclic GFR-binding peptide
  MOD_RES (3)..(4)..(35): Xaa is C or S
SPXXVPQDLSAISILYLVGRTPKVLKNYQMVVKSX

SEQ ID NO: 9776 - protein, 38 aa, Artificial Sequence
  Cyclic GFR-binding peptide
  MOD_RES (6)..(7)..(38): Xaa is C or S
ASASPXXVPQDLSATSILYYVGRTPKVLRKHRMVVKSX

SEQ ID NO: 9777 - protein, 33 aa, Artificial Sequence
  Cyclic GFR-binding peptide
  MOD_RES (1)..(2)..(33): Xaa is C or S
XXVSQDLSAISILYLIGKTPKILKNYQMIVKSX

SEQ ID NO: 9778 - protein, 31 aa, Artificial Sequence
  Cyclic GFR-binding peptide
  MOD_RES (2)..(3): Xaa is C or S
AXXVPTKLNAISVLYFDDMGVPTLKKYREGM

SEQ ID NO: 9779 - protein, 26 aa, Artificial Sequence
  Cyclic GFR-binding peptide
APTKLSAISVLYLDDSSNVILKNYQN

SEQ ID NO: 9780 - protein, 31 aa, Artificial Sequence
  Cyclic GFR-binding peptide
QLSATSVLYYEIVRKKPIFLRKHRTLEDHLA

SEQ ID NO: 9781 - protein, 30 aa, Artificial Sequence
  Cyclic GFR-binding peptide
VPTKLSATSVLYYDDMGVPTLRKHREGMSV

SEQ ID NO: 9782 - protein, 28 aa, Artificial Sequence
  Cyclic GFR-binding peptide
  MOD_RES (1)..(1): Xaa is C or S
XVPQDLSAISILYLVGRTPKVLKNYQMV

SEQ ID NO: 9783 - protein, 31 aa, Artificial Sequence
  Cyclic GFR-binding peptide
  MOD_RES (5)..(6): Xaa is C or S
SAAPXXVPQALNAISILYFVGRKPKVLKKYR

SEQ ID NO: 9784 - protein, 21 aa, Artificial Sequence
  Cyclic GFR-binding peptide
LSPISVLYKDSSNNVILKYHY

SEQ ID NO: 9785 - protein, 36 aa, Artificial Sequence
  Cyclic GFR-binding peptide
  MOD_RES (1)..(2)..(33)..(35): Xaa is C or S
XXVPQDLSATSILYYVGRTPKVLRKHRMVVKSXKXS

SEQ ID NO: 9786 - protein, 26 aa, Artificial Sequence
  Cyclic GFR-binding peptide
SAISVLYLDSSNNVILKNYQNMVVKA

SEQ ID NO: 9787 - protein, 30 aa, Artificial Sequence
  Cyclic GFR-binding peptide
  MOD_RES (29)..(29): Xaa is C or S
ELNAISMLYFDEYDKVVLKKYREMVVEGXG

SEQ ID NO: 9788 - protein, 35 aa, Artificial Sequence
  Cyclic GFR-binding peptide
  MOD_RES (5)..(5): Xaa is C or S
RNVQXRPTQVQLNAISVLYFEIVRKKPIFLKKYRT

SEQ ID NO: 9789 - protein, 36 aa, Artificial Sequence
  Cyclic GFR-binding peptide
  MOD_RES (4)..(5): Xaa is C or S
GKAXXVPTKLSATSVLYYDDMGVPTLRKHREGMSVA

SEQ ID NO: 9790 - protein, 36 aa, Artificial Sequence
  Cyclic GFR-binding peptide
  MOD_RES (1)..(33)..(35): Xaa is C or S
XAPTKLSPISVLYKDDSSNVILKYHYNMVVRSXGXH

SEQ ID NO: 9791 - protein, 24 aa, Artificial Sequence
  Cyclic GFR-binding peptide
PTQLSPISVLYKDDSSNVILKYHY

SEQ ID NO: 9792 - protein, 34 aa, Artificial Sequence
  Cyclic GFR-binding peptide
  MOD_RES (4)..(5): Xaa is C or S
PKPXXAPTQLSATSVLYYDDSSNVILRKHRNMVV

SEQ ID NO: 9793 - protein, 31 aa, Artificial Sequence
  Cyclic GFR-binding peptide
  MOD_RES (2)..(3): Xaa is C or S
PXXVPQDLNAISILYFVGRTPKVLKKYRMVV

SEQ ID NO: 9794 - protein, 42 aa, Artificial Sequence
  Cyclic GFR-binding peptide
  MOD_RES (2)..(39)..(41): Xaa is C or S
QXRPTQVQLSATSVLYYEIVRKKPIFLRKHRTLEDHLAXKXE

SEQ ID NO: 9795 - protein, 30 aa, Artificial Sequence
  Cyclic GFR-binding peptide
  MOD_RES (1)..(1): Xaa is C or S
XVPTELSATSMLYYDEYDKVVLRKHREMVV

SEQ ID NO: 9796 - protein, 27 aa, Artificial Sequence
  Cyclic GFR-binding peptide
  MOD_RES (27)..(27): Xaa is C or S
SAISVLYLDDSSNVILKNYQNMVVRAX

SEQ ID NO: 9797 - protein, 30 aa, Artificial Sequence
  Cyclic GFR-binding peptide
  MOD_RES (4)..(5): Xaa is C or S
PKPXXAPTKLSAISVLYLDDSSNVILKNYQ

SEQ ID NO: 9798 - protein, 27 aa, Artificial Sequence
  Cyclic GFR-binding peptide
QALSPISILYKVGRKPKVLKYHYMIVR

SEQ ID NO: 9799 - protein, 36 aa, Artificial Sequence
  Cyclic GFR-binding peptide
  MOD_RES (6)..(7): Xaa is C or S
SIPKAXXVPTELNAISMLYFDEYDKVVLKKYREMVV

SEQ ID NO: 9800 - protein, 26 aa, Artificial Sequence
  Cyclic GFR-binding peptide
KLSAISVLYLDDSSNVILKNYQNMVV

SEQ ID NO: 9801 - protein, 33 aa, Artificial Sequence
  Cyclic GFR-binding peptide
  MOD_RES (30)..(32): Xaa is C or S
TQLSPISVLYKDDSSNVILKYHYNMVVRAXGXH

SEQ ID NO: 9802 - protein, 26 aa, Artificial Sequence
  Cyclic GFR-binding peptide
VQLSATSVLYYEIVRKKPIFLRKHRT

SEQ ID NO: 9803 - protein, 38 aa, Artificial Sequence
  Cyclic GFR-binding peptide
  MOD_RES (3)..(4)..(35)..(37): Xaa is C or S
SPXXVPQDLNAISILYFVGRTPKVLKKYRMVVKSXKXS

SEQ ID NO: 9804 - protein, 24 aa, Artificial Sequence
  Cyclic GFR-binding peptide
PTELSATSMLYYDENEKVVLRKHR

SEQ ID NO: 9805 - protein, 33 aa, Artificial Sequence
  Cyclic GFR-binding peptide
  MOD_RES (4)..(5): Xaa is C or S
PKPXXAPTKLSATSVLYYDDSSNVILRKHRNMV

SEQ ID NO: 9806 - protein, 31 aa, Artificial Sequence
  Cyclic GFR-binding peptide
QLSAISVLYLEIVRKKPIFLKNYQTLEDHLA

SEQ ID NO: 9807 - protein, 25 aa, Artificial Sequence
  Cyclic GFR-binding peptide
NAISVLYFDDMGVPTLKKYREGMSV

SEQ ID NO: 9808 - protein, 33 aa, Artificial Sequence
  Cyclic GFR-binding peptide
  MOD_RES (3)..(3): Xaa is C or S
VQXRPTQVQLSPISVLYKEIVRKKPIFLKYHYT

SEQ ID NO: 9809 - protein, 38 aa, Artificial Sequence
  Cyclic GFR-binding peptide
  MOD_RES (5)..(6)..(37): Xaa is C or S
SASPXXVPQDLNAISILYFVGRTPKVLKKYRMVVKSXK

SEQ ID NO: 9810 - protein, 27 aa, Artificial Sequence
  Cyclic GFR-binding peptide
LSATSVLYYDDSSNVILRKHRNMVVRA

SEQ ID NO: 9811 - protein, 26 aa, Artificial Sequence
  Cyclic GFR-binding peptide
DLSPISILYKIGKTPKILKYHYMIVK

SEQ ID NO: 9812 - protein, 28 aa, Artificial Sequence
  Cyclic GFR-binding peptide
QLNAISVLYFEIVRKKPIFLKKYRTLED

SEQ ID NO: 9813 - protein, 24 aa, Artificial Sequence
  Cyclic GFR-binding peptide
QDLSPISILYKVGRTPKVLKYHYM

SEQ ID NO: 9814 - protein, 36 aa, Artificial Sequence
  Cyclic GFR-binding peptide
  MOD_RES (1)..(2)..(34)..(36): Xaa is C or S
XXVPTELSATSMLYYDEYDKVVLRKHREMVVEGXGX

SEQ ID NO: 9815 - protein, 31 aa, Artificial Sequence
  Cyclic GFR-binding peptide
  MOD_RES (2)..(3): Xaa is C or S
AXXVPTELNAISMLYFDEYDKVVLKKYREMV

SEQ ID NO: 9816 - protein, 42 aa, Artificial Sequence
  Cyclic GFR-binding peptide
  MOD_RES (4)..(41): Xaa is C or S
NVQXRPTQVQLSAISVLYLEIVRKKPIFLKNYQTLEDHLAXK

SEQ ID NO: 9817 - protein, 28 aa, Artificial Sequence
  Cyclic GFR-binding peptide
VPQDLSATSILYYVGRTPKVLRKHRMVV

SEQ ID NO: 9818 - protein, 34 aa, Artificial Sequence
  Cyclic GFR-binding peptide
TQVQLSPISVLYKEIVRKKPIFLKYHYTLEDHLA

SEQ ID NO: 9819 - protein, 33 aa, Artificial Sequence
  Cyclic GFR-binding peptide
  MOD_RES (5)..(6): Xaa is C or S
SASPXXVSQDLSPISILYKIGKTPKILKYHYMI

SEQ ID NO: 9820 - protein, 30 aa, Artificial Sequence
  Cyclic GFR-binding peptide
  MOD_RES (2)..(3): Xaa is C or S
PXXVPQALSAISILYLVGRKPKVLKNYQMI

SEQ ID NO: 9821 - protein, 35 aa, Artificial Sequence
  Cyclic GFR-binding peptide
  MOD_RES (1)..(2)..(34): Xaa is C or S
XXVPTELNAISMLYFDENEKVVLKKYRDMVVEGXG

SEQ ID NO: 9822 - protein, 32 aa, Artificial Sequence
  Cyclic GFR-binding peptide
  MOD_RES (2)..(3): Xaa is C or S
AXXVPTELSPISMLYKDENEKVVLKYHYDMVV

SEQ ID NO: 9823 - protein, 27 aa, Artificial Sequence
  Cyclic GFR-binding peptide
LSATSVLYYDDSSNVILRKHRNMVVRS

SEQ ID NO: 9824 - protein, 39 aa, Artificial Sequence
  Cyclic GFR-binding peptide
  MOD_RES (3)..(4)..(36)..(38): Xaa is C or S
KPXXAPTKLSATSVLYYDDSSNVILRKHRNMVVRSXGXH

SEQ ID NO: 9825 - protein, 31 aa, Artificial Sequence
  Cyclic GFR-binding peptide
  MOD_RES (1)..(2): Xaa is C or S
XXVPQALSAISILYLVGRKPKVLKNYQMIVR

SEQ ID NO: 9826 - protein, 31 aa, Artificial Sequence
  Cyclic GFR-binding peptide
  MOD_RES (1)..(1): Xaa is C or S
XVPQDLSPISILYKVGRTPKVLKYHYMVVKS

SEQ ID NO: 9827 - protein, 31 aa, Artificial Sequence
  Cyclic GFR-binding peptide
  MOD_RES (3)..(4): Xaa is C or S
APXXVPQALSAISILYLVGRKPKVLKNYQMI

SEQ ID NO: 9828 - protein, 27 aa, Artificial Sequence
  Cyclic GFR-binding peptide
  MOD_RES (26)..(26): Xaa is C or S
SPISILYKVGRTPKVLKYHYMVVKSXK

SEQ ID NO: 9829 - protein, 31 aa, Artificial Sequence
  Cyclic GFR-binding peptide
  MOD_RES (30)..(30): Xaa is C or S
TKLNAISVLYFDSSNNVILKKYRNMVVKAXG

SEQ ID NO: 9830 - protein, 34 aa, Artificial Sequence
  Cyclic GFR-binding peptide
  MOD_RES (4)..(4): Xaa is C or S
NVQXRPTQVQLSAISVLYLEIVRKKPIFLKNYQT

SEQ ID NO: 9831 - protein, 27 aa, Artificial Sequence
  Cyclic GFR-binding peptide
  MOD_RES (27)..(27): Xaa is C or S
SATSMLYYDENEKVVLRKHRDMVVEGX

SEQ ID NO: 9832 - protein, 39 aa, Artificial Sequence
  Cyclic GFR-binding peptide
  MOD_RES (4)..(5)..(37)..(39): Xaa is C or S
PKAXXAPTKLNAISVLYFDSSNNVILKKYRNMVVKAXGX

SEQ ID NO: 9833 - protein, 23 aa, Artificial Sequence
  Cyclic GFR-binding peptide
DLSPISILYKVGRTPKVLKYHYM

SEQ ID NO: 9834 - protein, 33 aa, Artificial Sequence
  Cyclic GFR-binding peptide
  MOD_RES (2)..(3): Xaa is C or S
PXXVPQALSATSILYYVGRKPKVLRKHRMIVRS

SEQ ID NO: 9835 - protein, 37 aa, Artificial Sequence
  Cyclic GFR-binding peptide
  MOD_RES (3)..(4)..(35)..(37): Xaa is C or S
SPXXVPQDLNAISILYFVGRTPKVLKKYRMVVKSXKX

SEQ ID NO: 9836 - protein, 31 aa, Artificial Sequence
  Cyclic GFR-binding peptide
  MOD_RES (30)..(30): Xaa is C or S
TQLSAISVLYLDDSSNVILKNYQNMVVRAXG

SEQ ID NO: 9837 - protein, 27 aa, Artificial Sequence
  Cyclic GFR-binding peptide
  MOD_RES (1)..(2): Xaa is C or S
XXVPTELNAISMLYFDEYDKVVLKKYR

SEQ ID NO: 9838 - protein, 39 aa, Artificial Sequence
  Cyclic GFR-binding peptide
  MOD_RES (2)..(39): Xaa is C or S
QXRPTQVQLSPISVLYKEIVRKKPIFLKYHYTLEDHLAX

SEQ ID NO: 9839 - protein, 37 aa, Artificial Sequence
  Cyclic GFR-binding peptide
  MOD_RES (1)..(2)..(35)..(37): Xaa is C or S
XXVPTKLSAISVLYLDDMGVPTLKNYQEGMSVAEXGX

SEQ ID NO: 9840 - protein, 33 aa, Artificial Sequence
  Cyclic GFR-binding peptide
  MOD_RES (5)..(6): Xaa is C or S
VPKPXXAPTQLSPISVLYKDDSSNVILKYHYNM

SEQ ID NO: 9841 - protein, 27 aa, Artificial Sequence
  Cyclic GFR-binding peptide
ALSPISILYKVGRKPKVLKYHYMIVRS

SEQ ID NO: 9842 - protein, 24 aa, Artificial Sequence
  Cyclic GFR-binding peptide
SAISILYLVGRKPKVLKNYQMIVR

SEQ ID NO: 9843 - protein, 29 aa, Artificial Sequence
  Cyclic GFR-binding peptide
  MOD_RES (26)..(28): Xaa is C or S
SAISILYLIGKTPKILKNYQMIVKSXKXS

SEQ ID NO: 9844 - protein, 37 aa, Artificial Sequence
  Cyclic GFR-binding peptide
  MOD_RES (5)..(6)..(37): Xaa is C or S
SASPXXVSQDLSPISILYKIGKTPKILKYHYMIVKSX

SEQ ID NO: 9845 - protein, 22 aa, Artificial Sequence
  Cyclic GFR-binding peptide
ALSPISILYKVGRKPKVLKYHY

SEQ ID NO: 9846 - protein, 37 aa, Artificial Sequence
  Cyclic GFR-binding peptide
  MOD_RES (1)..(34)..(36): Xaa is C or S
XVPTKLSAISVLYLDDMGVPTLKNYQEGMSVAEXGXR

SEQ ID NO: 9847 - protein, 30 aa, Artificial Sequence
  Cyclic GFR-binding peptide
PTKLSAISVLYLDDMGVPTLKNYQEGMSVA

SEQ ID NO: 9848 - protein, 33 aa, Artificial Sequence
  Cyclic GFR-binding peptide
  MOD_RES (5)..(5): Xaa is C or S
TKPTXAPTKLSAISVLYLDDSSNVILKNYQNMV

SEQ ID NO: 9849 - protein, 37 aa, Artificial Sequence
  Cyclic GFR-binding peptide
  MOD_RES (6)..(7): Xaa is C or S
ASAAPXXVPQALSPISILYKVGRKPKVLKYHYMIVRS

SEQ ID NO: 9850 - protein, 36 aa, Artificial Sequence
  Cyclic GFR-binding peptide
  MOD_RES (2)..(3)..(35): Xaa is C or S
AXXVPTELSATSMLYYDEYDKVVLRKHREMVVEGXG

SEQ ID NO: 9851 - protein, 36 aa, Artificial Sequence
  Cyclic GFR-binding peptide
  MOD_RES (6)..(7): Xaa is C or S
YVPKPXXAPTKLSAISVLYLDDSSNVILKNYQNMVV

SEQ ID NO: 9852 - protein, 40 aa, Artificial Sequence
  Cyclic GFR-binding peptide
  MOD_RES (37)..(39): Xaa is C or S
RPTQVQLSPISVLYKEIVRKKPIFLKYHYTLEDHLAXKXE

SEQ ID NO: 9853 - protein, 28 aa, Artificial Sequence
  Cyclic GFR-binding peptide
  MOD_RES (28)..(28): Xaa is C or S
SATSVLYYDDMGVPTLRKHREGMSVAEX

SEQ ID NO: 9854 - protein, 26 aa, Artificial Sequence
  Cyclic GFR-binding peptide
APTKLSPISVLYKDSSNNVILKYHYN

SEQ ID NO: 9855 - protein, 31 aa, Artificial Sequence
  Cyclic GFR-binding peptide
  MOD_RES (2)..(3): Xaa is C or S
PXXAPTKLSPISVLYKDDSSNVILKYHYNMV

SEQ ID NO: 9856 - protein, 28 aa, Artificial Sequence
  Cyclic GFR-binding peptide
KLSAISVLYLDDMGVPTLKNYQEGMSVA

SEQ ID NO: 9857 - protein, 27 aa, Artificial Sequence
  Cyclic GFR-binding peptide
DLSATSILYYIGKTPKILRKHRMIVKS

SEQ ID NO: 9858 - protein, 34 aa, Artificial Sequence
  Cyclic GFR-binding peptide
  MOD_RES (2)..(34): Xaa is C or S
TXAPTKLSATSVLYYDDSSNVILRKHRNMVVRSX

SEQ ID NO: 9859 - protein, 32 aa, Artificial Sequence
  Cyclic GFR-binding peptide
  MOD_RES (29)..(31): Xaa is C or S
ELNAISMLYFDENEKVVLKKYRDMVVEGXGXR

SEQ ID NO: 9860 - protein, 33 aa, Artificial Sequence
  Cyclic GFR-binding peptide
  MOD_RES (2)..(2): Xaa is C or S
TXAPTKLSPISVLYKDDSSNVILKYHYNMVVRS

SEQ ID NO: 9861 - protein, 33 aa, Artificial Sequence
  Cyclic GFR-binding peptide
  MOD_RES (2)..(3): Xaa is C or S
PXXAPTKLSPISVLYKDDSSNVILKYHYNMVVR

SEQ ID NO: 9862 - protein, 40 aa, Artificial Sequence
  Cyclic GFR-binding peptide
  MOD_RES (3)..(4)..(37)..(39): Xaa is C or S
KAXXVPTKLSATSVLYYDDMGVPTLRKHREGMSVAEXGXR

SEQ ID NO: 9863 - protein, 32 aa, Artificial Sequence
  Cyclic GFR-binding peptide
  MOD_RES (1)..(1): Xaa is C or S
XAPTKLSAISVLYLDDSSNVILKNYQNMVVRS

SEQ ID NO: 9864 - protein, 28 aa, Artificial Sequence
  Cyclic GFR-binding peptide
  MOD_RES (1)..(1): Xaa is C or S
XVPTELNAISMLYFDENEKVVLKKYRDM

SEQ ID NO: 9865 - protein, 36 aa, Artificial Sequence
  Cyclic GFR-binding peptide
  MOD_RES (5)..(5): Xaa is C or S
TKPTXAPTKLSATSVLYYDDSSNVILRKHRNMVVRS

SEQ ID NO: 9866 - protein, 30 aa, Artificial Sequence
  Cyclic GFR-binding peptide
  MOD_RES (2)..(3): Xaa is C or S
PXXAPTQLSPISVLYKDDSSNVILKYHYNM

SEQ ID NO: 9867 - protein, 30 aa, Artificial Sequence
  Cyclic GFR-binding peptide
  MOD_RES (30)..(30): Xaa is C or S
PQDLSAISILYLVGRTPKVLKNYQMVVKSX

SEQ ID NO: 9868 - protein, 28 aa, Artificial Sequence
  Cyclic GFR-binding peptide
PQALSATSILYYVGRKPKVLRKHRMIVR

SEQ ID NO: 9869 - protein, 27 aa, Artificial Sequence
  Cyclic GFR-binding peptide
TELNAISMLYFDEYDKVVLKKYREMVV

SEQ ID NO: 9870 - protein, 37 aa, Artificial Sequence
  Cyclic GFR-binding peptide
  MOD_RES (6)..(7): Xaa is C or S
ASASPXXVSQDLSPISILYKIGKTPKILKYHYMIVKS

SEQ ID NO: 9871 - protein, 32 aa, Artificial Sequence
  Cyclic GFR-binding peptide
  MOD_RES (32)..(32): Xaa is C or S
QLSPISVLYKEIVRKKPIFLKYHYTLEDHLAX

SEQ ID NO: 9872 - protein, 35 aa, Artificial Sequence
  Cyclic GFR-binding peptide
  MOD_RES (1)..(33)..(35): Xaa is C or S
XAPTKLSPISVLYKDDSSNVILKYHYNMVVRSXGX

SEQ ID NO: 9873 - protein, 29 aa, Artificial Sequence
  Cyclic GFR-binding peptide
  MOD_RES (3)..(4): Xaa is C or S
APXXVPQALSATSILYYVGRKPKVLRKHR

SEQ ID NO: 9874 - protein, 37 aa, Artificial Sequence
  Cyclic GFR-binding peptide
  MOD_RES (3)..(3): Xaa is C or S
VQXRPTQVQLSPISVLYKEIVRKKPIFLKYHYTLEDH

SEQ ID NO: 9875 - protein, 38 aa, Artificial Sequence
  Cyclic GFR-binding peptide
  MOD_RES (1)..(2)..(35)..(37): Xaa is C or S
XXVPTKLNAISVLYFDDMGVPTLKKYREGMSVAEXGXR

SEQ ID NO: 9876 - protein, 42 aa, Artificial Sequence
  Cyclic GFR-binding peptide
  MOD_RES (6)..(7)..(40)..(42): Xaa is C or S
KVGKAXXVPTKLSAISVLYLDDMGVPTLKNYQEGMSVAEXGX

SEQ ID NO: 9877 - protein, 34 aa, Artificial Sequence
  Cyclic GFR-binding peptide
  MOD_RES (2)..(3): Xaa is C or S
PXXAPTQLSATSVLYYDDSSNVILRKHRNMVVRA

SEQ ID NO: 9878 - protein, 27 aa, Artificial Sequence
  Cyclic GFR-binding peptide
NAISVLYFEIVRKKPIFLKKYRTLEDH

SEQ ID NO: 9879 - protein, 30 aa, Artificial Sequence
  Cyclic GFR-binding peptide
  MOD_RES (1)..(2): Xaa is C or S
XXVPTELSATSMLYYDEYDKVVLRKHREMV

SEQ ID NO: 9880 - protein, 23 aa, Artificial Sequence
  Cyclic GFR-binding peptide
SAISVLYLDDSSNVILKNYQNMV

SEQ ID NO: 9881 - protein, 37 aa, Artificial Sequence
  Cyclic GFR-binding peptide
  MOD_RES (5)..(6): Xaa is C or S
IPKAXXVPTELNAISMLYFDEYDKVVLKKYREMVVEG

SEQ ID NO: 9882 - protein, 36 aa, Artificial Sequence
  Cyclic GFR-binding peptide
  MOD_RES (33)..(35): Xaa is C or S
VQLSATSVLYYEIVRKKPIFLRKHRTLEDHLAXKXE

SEQ ID NO: 9883 - protein, 43 aa, Artificial Sequence
  Cyclic GFR-binding peptide
  MOD_RES (4)..(41)..(43): Xaa is C or S
NVQXRPTQVQLSATSVLYYEIVRKKPIFLRKHRTLEDHLAXKX

SEQ ID NO: 9884 - protein, 33 aa, Artificial Sequence
  Cyclic GFR-binding peptide
  MOD_RES (31)..(33): Xaa is C or S
PTKLSPISVLYKDSSNNVILKYHYNMVVKAXGX

SEQ ID NO: 9885 - protein, 23 aa, Artificial Sequence
  Cyclic GFR-binding peptide
TELSPISMLYKDEYDKVVLKYHY

SEQ ID NO: 9886 - protein, 31 aa, Artificial Sequence
  Cyclic GFR-binding peptide
RPTQVQLSAISVLYLEIVRKKPIFLKNYQTL

SEQ ID NO: 9887 - protein, 31 aa, Artificial Sequence
  Cyclic GFR-binding peptide
  MOD_RES (29)..(31): Xaa is C or S
KLNAISVLYFDSSNNVILKKYRNMVVKAXGX

SEQ ID NO: 9888 - protein, 31 aa, Artificial Sequence
  Cyclic GFR-binding peptide
  MOD_RES (30)..(30): Xaa is C or S
TKLSPISVLYKDSSNNVILKYHYNMVVKAXG

SEQ ID NO: 9889 - protein, 30 aa, Artificial Sequence
  Cyclic GFR-binding peptide
  MOD_RES (27)..(29): Xaa is C or S
NAISVLYFDSSNNVILKKYRNMVVKAXGXH

SEQ ID NO: 9890 - protein, 32 aa, Artificial Sequence
  Cyclic GFR-binding peptide
  MOD_RES (2)..(3): Xaa is C or S
AXXVPTELSATSMLYYDENEKVVLRKHRDMVV

SEQ ID NO: 9891 - protein, 32 aa, Artificial Sequence
  Cyclic GFR-binding peptide
  MOD_RES (31)..(31): Xaa is C or S
PTELSPISMLYKDENEKVVLKYHYDMVVEGXG

SEQ ID NO: 9892 - protein, 42 aa, Artificial Sequence
  Cyclic GFR-binding peptide
  MOD_RES (6)..(7)..(39)..(41): Xaa is C or S
SIPKAXXVPTELSATSMLYYDEYDKVVLRKHREMVVEGXGXR

SEQ ID NO: 9893 - protein, 39 aa, Artificial Sequence
  Cyclic GFR-binding peptide
  MOD_RES (1)..(38): Xaa is C or S
XRPTQVQLSAISVLYLEIVRKKPIFLKNYQTLEDHLAXK

SEQ ID NO: 9894 - protein, 31 aa, Artificial Sequence
  Cyclic GFR-binding peptide
  MOD_RES (2)..(3): Xaa is C or S
AXXVPTELSPISMLYKDENEKVVLKYHYDMV

SEQ ID NO: 9895 - protein, 40 aa, Artificial Sequence
  Cyclic GFR-binding peptide
  MOD_RES (6)..(7)..(39): Xaa is C or S
YVPKPXXAPTKLSAISVLYLDDSSNVILKNYQNMVVRSXG

SEQ ID NO: 9896 - protein, 30 aa, Artificial Sequence
  Cyclic GFR-binding peptide
  MOD_RES (2)..(2): Xaa is C or S
TXAPTKLSAISVLYLDDSSNVILKNYQNMV

SEQ ID NO: 9897 - protein, 31 aa, Artificial Sequence
  Cyclic GFR-binding peptide
VQLNAISVLYFEIVRKKPIFLKKYRTLEDHL

SEQ ID NO: 9898 - protein, 30 aa, Artificial Sequence
  Cyclic GFR-binding peptide
TQVQLSATSVLYYEIVRKKPIFLRKHRTLE

SEQ ID NO: 9899 - protein, 35 aa, Artificial Sequence
  Cyclic GFR-binding peptide
  MOD_RES (1)..(33)..(35): Xaa is C or S
XAPTQLSAISVLYLDDSSNVILKNYQNMVVRAXGX

SEQ ID NO: 9900 - protein, 33 aa, Artificial Sequence
  Cyclic GFR-binding peptide
  MOD_RES (30)..(32): Xaa is C or S
SQDLNAISILYFIGKTPKILKKYRMIVKSXKXS

SEQ ID NO: 9901 - protein, 29 aa, Artificial Sequence
  Cyclic GFR-binding peptide
  MOD_RES (28)..(28): Xaa is C or S
SAISVLYLDDMGVPTLKNYQEGMSVAEXG

SEQ ID NO: 9902 - protein, 37 aa, Artificial Sequence
  Cyclic GFR-binding peptide
  MOD_RES (5)..(5): Xaa is C or S
RNVQXRPTQVQLNAISVLYFEIVRKKPIFLKKYRTLE

SEQ ID NO: 9903 - protein, 22 aa, Artificial Sequence
  Cyclic GFR-binding peptide
LSATSVLYYDDMGVPTLRKHRE

SEQ ID NO: 9904 - protein, 26 aa, Artificial Sequence
  Cyclic GFR-binding peptide
VSQDLNAISILYFIGKTPKILKKYRM

SEQ ID NO: 9905 - protein, 29 aa, Artificial Sequence
  Cyclic GFR-binding peptide
APTQLSPISVLYKDDSSNVILKYHYNMVV

SEQ ID NO: 9906 - protein, 26 aa, Artificial Sequence
  Cyclic GFR-binding peptide
DLSATSILYYIGKTPKILRKHRMIVK

SEQ ID NO: 9907 - protein, 32 aa, Artificial Sequence
  Cyclic GFR-binding peptide
  MOD_RES (2)..(3): Xaa is C or S
PXXVSQDLNAISILYFIGKTPKILKKYRMIVK

SEQ ID NO: 9908 - protein, 36 aa, Artificial Sequence
  Cyclic GFR-binding peptide
  MOD_RES (5)..(6): Xaa is C or S
IPKAXXVPTELNAISMLYFDEYDKVVLKKYREMVVE

SEQ ID NO: 9909 - protein, 40 aa, Artificial Sequence
  Cyclic GFR-binding peptide
  MOD_RES (6)..(7)..(40): Xaa is C or S
KVGKAXXVPTKLSATSVLYYDDMGVPTLRKHREGMSVAEX

SEQ ID NO: 9910 - protein, 20 aa, Artificial Sequence
  Cyclic GFR-binding peptide
SPISVLYKDSSNNVILKYHY

SEQ ID NO: 9911 - protein, 24 aa, Artificial Sequence
  Cyclic GFR-binding peptide
PTKLSAISVLYLDDSSNVILKNYQ

SEQ ID NO: 9912 - protein, 23 aa, Artificial Sequence
  Cyclic GFR-binding peptide
LSPISILYKIGKTPKILKYHYMI

SEQ ID NO: 9913 - protein, 33 aa, Artificial Sequence
  Cyclic GFR-binding peptide
  MOD_RES (3)..(4): Xaa is C or S
KAXXAPTKLSAISVLYLDSSNNVILKNYQNMVV

SEQ ID NO: 9914 - protein, 24 aa, Artificial Sequence
  Cyclic GFR-binding peptide
LSPISVLYKDDSSNVILKYHYNMV

SEQ ID NO: 9915 - protein, 36 aa, Artificial Sequence
  Cyclic GFR-binding peptide
  MOD_RES (5)..(6): Xaa is C or S
SASPXXVSQDLSPISILYKIGKTPKILKYHYMIVKS

SEQ ID NO: 9916 - protein, 28 aa, Artificial Sequence
  Cyclic GFR-binding peptide
TELSPISMLYKDEYDKVVLKYHYEMVVE

SEQ ID NO: 9917 - protein, 32 aa, Artificial Sequence
  Cyclic GFR-binding peptide
RPTQVQLSATSVLYYEIVRKKPIFLRKHRTLE

SEQ ID NO: 9918 - protein, 42 aa, Artificial Sequence
  Cyclic GFR-binding peptide
  MOD_RES (6)..(7)..(39)..(41): Xaa is C or S
AVPKAXXAPTKLSAISVLYLDSSNNVILKNYQNMVVKAXGXH

SEQ ID NO: 9919 - protein, 36 aa, Artificial Sequence
  Cyclic GFR-binding peptide
  MOD_RES (3)..(4)..(36): Xaa is C or S
KAXXAPTKLNAISVLYFDSSNNVILKKYRNMVVKAX

SEQ ID NO: 9920 - protein, 29 aa, Artificial Sequence
  Cyclic GFR-binding peptide
SAISVLYLEIVRKKPIFLKNYQTLEDHLA

SEQ ID NO: 9921 - protein, 28 aa, Artificial Sequence
  Cyclic GFR-binding peptide
  MOD_RES (28)..(28): Xaa is C or S
DLSPISILYKIGKTPKILKYHYMIVKSX

SEQ ID NO: 9922 - protein, 28 aa, Artificial Sequence
  Cyclic GFR-binding peptide
TQLSPISVLYKDDSSNVILKYHYNMVVR

SEQ ID NO: 9923 - protein, 28 aa, Artificial Sequence
  Cyclic GFR-binding peptide
APTKLNAISVLYFDSSNNVILKKYRNMV

SEQ ID NO: 9924 - protein, 35 aa, Artificial Sequence
  Cyclic GFR-binding peptide
  MOD_RES (5)..(5): Xaa is C or S
TKPTXAPTKLSPISVLYKDDSSNVILKYHYNMVVR

SEQ ID NO: 9925 - protein, 35 aa, Artificial Sequence
  Cyclic GFR-binding peptide
  MOD_RES (1)..(2)..(33)..(35): Xaa is C or S
XXVSQDLSAISILYLIGKTPKILKNYQMIVKSXKX

SEQ ID NO: 9926 - protein, 31 aa, Artificial Sequence
  Cyclic GFR-binding peptide
  MOD_RES (1)..(1): Xaa is C or S
XVPTELSATSMLYYDENEKVVLRKHRDMVVE

SEQ ID NO: 9927 - protein, 28 aa, Artificial Sequence
  Cyclic GFR-binding peptide
  MOD_RES (2)..(3): Xaa is C or S
AXXVPTELSPISMLYKDENEKVVLKYHY

SEQ ID NO: 9928 - protein, 28 aa, Artificial Sequence
  Cyclic GFR-binding peptide
TKLNAISVLYFDSSNNVILKKYRNMVVK

SEQ ID NO: 9929 - protein, 37 aa, Artificial Sequence
  Cyclic GFR-binding peptide
  MOD_RES (1)..(2)..(34)..(36): Xaa is C or S
XXAPTQLSATSVLYYDDSSNVILRKHRNMVVRAXGXH

SEQ ID NO: 9930 - protein, 25 aa, Artificial Sequence
  Cyclic GFR-binding peptide
QDLNAISILYFVGRTPKVLKKYRMV

SEQ ID NO: 9931 - protein, 36 aa, Artificial Sequence
  Cyclic GFR-binding peptide
  MOD_RES (2)..(3)..(35): Xaa is C or S
AXXVPTELSPISMLYKDENEKVVLKYHYDMVVEGXG

SEQ ID NO: 9932 - protein, 30 aa, Artificial Sequence
  Cyclic GFR-binding peptide
VPTKLSAISVLYLDDMGVPTLKNYQEGMSV

SEQ ID NO: 9933 - protein, 31 aa, Artificial Sequence
  Cyclic GFR-binding peptide
  MOD_RES (29)..(31): Xaa is C or S
QDLSPISILYKIGKTPKILKYHYMIVKSXKX

SEQ ID NO: 9934 - protein, 27 aa, Artificial Sequence
  Cyclic GFR-binding peptide
  MOD_RES (1)..(2): Xaa is C or S
XXVPQALSATSILYYVGRKPKVLRKHR

SEQ ID NO: 9935 - protein, 29 aa, Artificial Sequence
  Cyclic GFR-binding peptide
  MOD_RES (28)..(28): Xaa is C or S
DLSPISILYKVGRTPKVLKYHYMVVKSXK

SEQ ID NO: 9936 - protein, 38 aa, Artificial Sequence
  Cyclic GFR-binding peptide
  MOD_RES (6)..(7): Xaa is C or S
AVPKAXXAPTKLNAISVLYFDSSNNVILKKYRNMVVKA

SEQ ID NO: 9937 - protein, 32 aa, Artificial Sequence
  Cyclic GFR-binding peptide
  MOD_RES (32)..(32): Xaa is C or S
VPTELSATSMLYYDENEKVVLRKHRDMVVEGX

SEQ ID NO: 9938 - protein, 32 aa, Artificial Sequence
  Cyclic GFR-binding peptide
TQVQLNAISVLYFEIVRKKPIFLKKYRTLEDH

SEQ ID NO: 9939 - protein, 37 aa, Artificial Sequence
  Cyclic GFR-binding peptide
  MOD_RES (6)..(7): Xaa is C or S
ASASPXXVPQDLSPISILYKVGRTPKVLKYHYMVVKS

SEQ ID NO: 9940 - protein, 27 aa, Artificial Sequence
  Cyclic GFR-binding peptide
SATSVLYYDDMGVPTLRKHREGMSVAE

SEQ ID NO: 9941 - protein, 35 aa, Artificial Sequence
  Cyclic GFR-binding peptide
  MOD_RES (1)..(33)..(35): Xaa is C or S
XAPTKLSPISVLYKDSSNNVILKYHYNMVVKAXGX

SEQ ID NO: 9942 - protein, 29 aa, Artificial Sequence
  Cyclic GFR-binding peptide
  MOD_RES (3)..(4): Xaa is C or S
SPXXVPQDLSAISILYLVGRTPKVLKNYQ

SEQ ID NO: 9943 - protein, 24 aa, Artificial Sequence
  Cyclic GFR-binding peptide
QALNAISILYFVGRKPKVLKKYRM

SEQ ID NO: 9944 - protein, 34 aa, Artificial Sequence
  Cyclic GFR-binding peptide
  MOD_RES (6)..(7): Xaa is C or S
TVPKPXXAPTQLSAISVLYLDDSSNVILKNYQNM

SEQ ID NO: 9945 - protein, 39 aa, Artificial Sequence
  Cyclic GFR-binding peptide
  MOD_RES (4)..(36)..(38): Xaa is C or S
KPTXAPTKLSATSVLYYDDSSNVILRKHRNMVVRSXGXH

SEQ ID NO: 9946 - protein, 33 aa, Artificial Sequence
  Cyclic GFR-binding peptide
  MOD_RES (6)..(6): Xaa is C or S
VTKPTXAPTKLSAISVLYLDDSSNVILKNYQNM

SEQ ID NO: 9947 - protein, 20 aa, Artificial Sequence
  Cyclic GFR-binding peptide
SPISMLYKDEYDKVVLKYHY

SEQ ID NO: 9948 - protein, 38 aa, Artificial Sequence
  Cyclic GFR-binding peptide
  MOD_RES (2)..(3)..(35)..(37): Xaa is C or S
PXXAPTQLSAISVLYLDDSSNVILKNYQNMVVRAXGXH

SEQ ID NO: 9949 - protein, 23 aa, Artificial Sequence
  Cyclic GFR-binding peptide
SPISVLYKDSSNNVILKYHYNMV

SEQ ID NO: 9950 - protein, 37 aa, Artificial Sequence
  Cyclic GFR-binding peptide
  MOD_RES (2)..(2): Xaa is C or S
QXRPTQVQLSAISVLYLEIVRKKPIFLKNYQTLEDHL

SEQ ID NO: 9951 - protein, 38 aa, Artificial Sequence
  Cyclic GFR-binding peptide
  MOD_RES (3)..(3): Xaa is C or S
VQXRPTQVQLSPISVLYKEIVRKKPIFLKYHYTLEDHL

SEQ ID NO: 9952 - protein, 33 aa, Artificial Sequence
  Cyclic GFR-binding peptide
  MOD_RES (5)..(6): Xaa is C or S
SAAPXXVPQALSATSILYYVGRKPKVLRKHRMI

SEQ ID NO: 9953 - protein, 26 aa, Artificial Sequence
  Cyclic GFR-binding peptide
  MOD_RES (1)..(1): Xaa is C or S
XVPTKLNAISVLYFDDMGVPTLKKYR

SEQ ID NO: 9954 - protein, 41 aa, Artificial Sequence
  Cyclic GFR-binding peptide
  MOD_RES (6)..(7)..(40): Xaa is C or S
KVGKAXXVPTKLSATSVLYYDDMGVPTLRKHREGMSVAEXG

SEQ ID NO: 9955 - protein, 36 aa, Artificial Sequence
  Cyclic GFR-binding peptide
  MOD_RES (4)..(5)..(36): Xaa is C or S
ASPXXVPQDLNAISILYFVGRTPKVLKKYRMVVKSX

SEQ ID NO: 9956 - protein, 27 aa, Artificial Sequence
  Cyclic GFR-binding peptide
KLSATSVLYYDDSSNVILRKHRNMVVR

SEQ ID NO: 9957 - protein, 23 aa, Artificial Sequence
  Cyclic GFR-binding peptide
ALNAISILYFVGRKPKVLKKYRM

SEQ ID NO: 9958 - protein, 29 aa, Artificial Sequence
  Cyclic GFR-binding peptide
APTQLSATSVLYYDDSSNVILRKHRNMVV

SEQ ID NO: 9959 - protein, 31 aa, Artificial Sequence
  Cyclic GFR-binding peptide
APTKLSATSVLYYDDSSNVILRKHRNMVVRS

SEQ ID NO: 9960 - protein, 30 aa, Artificial Sequence
  Cyclic GFR-binding peptide
  MOD_RES (4)..(5): Xaa is C or S
PKPXXAPTQLSPISVLYKDDSSNVILKYHY

SEQ ID NO: 9961 - protein, 32 aa, Artificial Sequence
  Cyclic GFR-binding peptide
  MOD_RES (4)..(5): Xaa is C or S
PKAXXAPTKLSAISVLYLDSSNNVILKNYQNM

SEQ ID NO: 9962 - protein, 27 aa, Artificial Sequence
  Cyclic GFR-binding peptide
TKLSATSVLYYDDSSNVILRKHRNMVV

SEQ ID NO: 9963 - protein, 30 aa, Artificial Sequence
  Cyclic GFR-binding peptide
  MOD_RES (27)..(29): Xaa is C or S
SAISVLYLDDSSNVILKNYQNMVVRAXGXH

SEQ ID NO: 9964 - protein, 34 aa, Artificial Sequence
  Cyclic GFR-binding peptide
  MOD_RES (4)..(5): Xaa is C or S
ASPXXVSQDLSAISILYLIGKTPKILKNYQMIVK

SEQ ID NO: 9965 - protein, 37 aa, Artificial Sequence
  Cyclic GFR-binding peptide
  MOD_RES (1)..(2)..(34)..(36): Xaa is C or S
XXVPTELSPISMLYKDEYDKVVLKYHYEMVVEGXGXR

SEQ ID NO: 9966 - protein, 33 aa, Artificial Sequence
  Cyclic GFR-binding peptide
  MOD_RES (4)..(5): Xaa is C or S
GKAXXVPTKLNAISVLYFDDMGVPTLKKYREGM

SEQ ID NO: 9967 - protein, 26 aa, Artificial Sequence
  Cyclic GFR-binding peptide
TKLNAISVLYFDDMGVPTLKKYREGM

SEQ ID NO: 9968 - protein, 33 aa, Artificial Sequence
  Cyclic GFR-binding peptide
  MOD_RES (3)..(4): Xaa is C or S
KAXXVPTELNAISMLYFDEYDKVVLKKYREMVV

SEQ ID NO: 9969 - protein, 35 aa, Artificial Sequence
  Cyclic GFR-binding peptide
  MOD_RES (5)..(5): Xaa is C or S
TKPTXAPTKLSAISVLYLDDSSNVILKNYQNMVVR

SEQ ID NO: 9970 - protein, 30 aa, Artificial Sequence
  Cyclic GFR-binding peptide
VPTELNAISMLYFDEYDKVVLKKYREMVVE

SEQ ID NO: 9971 - protein, 28 aa, Artificial Sequence
  Cyclic GFR-binding peptide
TQLSAISVLYLDDSSNVILKNYQNMVVR

SEQ ID NO: 9972 - protein, 24 aa, Artificial Sequence
  Cyclic GFR-binding peptide
LSATSVLYYDDSSNVILRKHRNMV

SEQ ID NO: 9973 - protein, 35 aa, Artificial Sequence
  Cyclic GFR-binding peptide
  MOD_RES (3)..(4)..(35): Xaa is C or S
APXXVPQALSATSILYYVGRKPKVLRKHRMIVRSX

SEQ ID NO: 9974 - protein, 32 aa, Artificial Sequence
  Cyclic GFR-binding peptide
  MOD_RES (6)..(7): Xaa is C or S
KVGKAXXVPTKLSATSVLYYDDMGVPTLRKHR

SEQ ID NO: 9975 - protein, 34 aa, Artificial Sequence
  Cyclic GFR-binding peptide
  MOD_RES (1)..(33): Xaa is C or S
XAPTQLSPISVLYKDDSSNVILKYHYNMVVRAXG

SEQ ID NO: 9976 - protein, 31 aa, Artificial Sequence
  Cyclic GFR-binding peptide
  MOD_RES (31)..(31): Xaa is C or S
VPQALSATSILYYVGRKPKVLRKHRMIVRSX

SEQ ID NO: 9977 - protein, 35 aa, Artificial Sequence
  Cyclic GFR-binding peptide
  MOD_RES (33)..(35): Xaa is C or S
VPTKLNAISVLYFDDMGVPTLKKYREGMSVAEXGX

SEQ ID NO: 9978 - protein, 26 aa, Artificial Sequence
  Cyclic GFR-binding peptide
TKLSAISVLYLDSSNNVILKNYQNMV

SEQ ID NO: 9979 - protein, 36 aa, Artificial Sequence
  Cyclic GFR-binding peptide
  MOD_RES (5)..(6): Xaa is C or S
SASPXXVSQDLSAISILYLIGKTPKILKNYQMIVKS

SEQ ID NO: 9980 - protein, 30 aa, Artificial Sequence
  Cyclic GFR-binding peptide
  MOD_RES (1)..(2): Xaa is C or S
XXVPTELNAISMLYFDEYDKVVLKKYREMV

SEQ ID NO: 9981 - protein, 37 aa, Artificial Sequence
  Cyclic GFR-binding peptide
  MOD_RES (7)..(7): Xaa is C or S
HVTKPTXAPTKLSATSVLYYDDSSNVILRKHRNMVVR

SEQ ID NO: 9982 - protein, 32 aa, Artificial Sequence
  Cyclic GFR-binding peptide
  MOD_RES (1)..(2): Xaa is C or S
XXVSQDLNAISILYFIGKTPKILKKYRMIVKS

SEQ ID NO: 9983 - protein, 36 aa, Artificial Sequence
  Cyclic GFR-binding peptide
  MOD_RES (1)..(34)..(36): Xaa is C or S
XVPTKLSATSVLYYDDMGVPTLRKHREGMSVAEXGX

SEQ ID NO: 9984 - protein, 28 aa, Artificial Sequence
  Cyclic GFR-binding peptide
  MOD_RES (1)..(2): Xaa is C or S
XXVPQDLSAISILYLVGRTPKVLKNYQM

SEQ ID NO: 9985 - protein, 28 aa, Artificial Sequence
  Cyclic GFR-binding peptide
LNAISVLYFEIVRKKPIFLKKYRTLEDH

SEQ ID NO: 9986 - protein, 26 aa, Artificial Sequence
  Cyclic GFR-binding peptide
SPISVLYKDDSSNVILKYHYNMVVRS

SEQ ID NO: 9987 - protein, 33 aa, Artificial Sequence
  Cyclic GFR-binding peptide
  MOD_RES (31)..(33): Xaa is C or S
VPQDLSPISILYKVGRTPKVLKYHYMVVKSXKX

SEQ ID NO: 9988 - protein, 22 aa, Artificial Sequence
  Cyclic GFR-binding peptide
QLSAISVLYLDDSSNVILKNYQ

SEQ ID NO: 9989 - protein, 41 aa, Artificial Sequence
  Cyclic GFR-binding peptide
  MOD_RES (5)..(6)..(38)..(40): Xaa is C or S
VPKPXXAPTKLSPISVLYKDDSSNVILKYHYNMVVRSXGXH

SEQ ID NO: 9990 - protein, 31 aa, Artificial Sequence
  Cyclic GFR-binding peptide
  MOD_RES (1)..(2): Xaa is C or S
XXAPTKLSPISVLYKDDSSNVILKYHYNMVV

SEQ ID NO: 9991 - protein, 26 aa, Artificial Sequence
  Cyclic GFR-binding peptide
LSPISILYKVGRTPKVLKYHYMVVKS

SEQ ID NO: 9992 - protein, 26 aa, Artificial Sequence
  Cyclic GFR-binding peptide
SPISVLYKDDSSNVILKYHYNMVVRA

SEQ ID NO: 9993 - protein, 22 aa, Artificial Sequence
  Cyclic GFR-binding peptide
SAISVLYLDDSSNVILKNYQNM

SEQ ID NO: 9994 - protein, 27 aa, Artificial Sequence
  Cyclic GFR-binding peptide
  MOD_RES (1)..(2): Xaa is C or S
XXAPTQLSAISVLYLDDSSNVILKNYQ

SEQ ID NO: 9995 - protein, 31 aa, Artificial Sequence
  Cyclic GFR-binding peptide
  MOD_RES (5)..(6): Xaa is C or S
VPKPXXAPTQLSPISVLYKDDSSNVILKYHY

SEQ ID NO: 9996 - protein, 37 aa, Artificial Sequence
  Cyclic GFR-binding peptide
  MOD_RES (3)..(4)..(36): Xaa is C or S
KPXXAPTQLSATSVLYYDDSSNVILRKHRNMVVRAXG

SEQ ID NO: 9997 - protein, 34 aa, Artificial Sequence
  Cyclic GFR-binding peptide
  MOD_RES (1)..(2): Xaa is C or S
XXVPTKLSATSVLYYDDMGVPTLRKHREGMSVAE

SEQ ID NO: 9998 - protein, 28 aa, Artificial Sequence
  Cyclic GFR-binding peptide
  MOD_RES (2)..(3): Xaa is C or S
PXXVSQDLSPISILYKIGKTPKILKYHY

SEQ ID NO: 9999 - protein, 40 aa, Artificial Sequence
  Cyclic GFR-binding peptide
  MOD_RES (5)..(37)..(39): Xaa is C or S
TKPTXAPTKLSATSVLYYDDSSNVILRKHRNMVVRSXGXH

SEQ ID NO: 10000 - protein, 24 aa, Artificial Sequence
  Cyclic GFR-binding peptide
LSPISVLYKEIVRKKPIFLKYHYT

SEQ ID NO: 10001 - protein, 30 aa, Artificial Sequence
  Cyclic GFR-binding peptide
  MOD_RES (4)..(5): Xaa is C or S
AAPXXVPQALNAISILYFVGRKPKVLKKYR

SEQ ID NO: 10002 - protein, 37 aa, Artificial Sequence
  Cyclic GFR-binding peptide
  MOD_RES (5)..(6): Xaa is C or S
VPKPXXAPTQLSAISVLYLDDSSNVILKNYQNMVVRA

SEQ ID NO: 10003 - protein, 30 aa, Artificial Sequence
  Cyclic GFR-binding peptide
  MOD_RES (1)..(1): Xaa is C or S
XVSQDLNAISILYFIGKTPKILKKYRMIVK

SEQ ID NO: 10004 - protein, 33 aa, Artificial Sequence
  Cyclic GFR-binding peptide
  MOD_RES (3)..(4): Xaa is C or S
APXXVPQALSAISILYLVGRKPKVLKNYQMIVR

SEQ ID NO: 10005 - protein, 32 aa, Artificial Sequence
  Cyclic GFR-binding peptide
  MOD_RES (31)..(31): Xaa is C or S
PTKLSATSVLYYDDSSNVILRKHRNMVVRSXG

SEQ ID NO: 10006 - protein, 33 aa, Artificial Sequence
  Cyclic GFR-binding peptide
  MOD_RES (3)..(4): Xaa is C or S
SPXXVSQDLSATSILYYIGKTPKILRKHRMIVK

SEQ ID NO: 10007 - protein, 25 aa, Artificial Sequence
  Cyclic GFR-binding peptide
QLSPISVLYKEIVRKKPIFLKYHYT

SEQ ID NO: 10008 - protein, 27 aa, Artificial Sequence
  Cyclic GFR-binding peptide
  MOD_RES (1)..(2): Xaa is C or S
XXVPTELSPISMLYKDENEKVVLKYHY

SEQ ID NO: 10009 - protein, 38 aa, Artificial Sequence
  Cyclic GFR-binding peptide
  MOD_RES (4)..(5)..(37): Xaa is C or S
PKAXXVPTELNAISMLYFDEYDKVVLKKYREMVVEGXG

SEQ ID NO: 10010 - protein, 32 aa, Artificial Sequence
  Cyclic GFR-binding peptide
  MOD_RES (32)..(32): Xaa is C or S
APTKLNAISVLYFDSSNNVILKKYRNMVVKAX

SEQ ID NO: 10011 - protein, 31 aa, Artificial Sequence
  Cyclic GFR-binding peptide
  MOD_RES (1)..(2): Xaa is C or S
XXAPTKLSATSVLYYDDSSNVILRKHRNMVV

SEQ ID NO: 10012 - protein, 24 aa, Artificial Sequence
  Cyclic GFR-binding peptide
DLNAISILYFIGKTPKILKKYRMI

SEQ ID NO: 10013 - protein, 28 aa, Artificial Sequence
  Cyclic GFR-binding peptide
  MOD_RES (2)..(3): Xaa is C or S
AXXVPTKLSAISVLYLDDMGVPTLKNYQ

SEQ ID NO: 10014 - protein, 27 aa, Artificial Sequence
  Cyclic GFR-binding peptide
TKLSPISVLYKDDSSNVILKYHYNMVV

SEQ ID NO: 10015 - protein, 37 aa, Artificial Sequence
  Cyclic GFR-binding peptide
  MOD_RES (6)..(7): Xaa is C or S
ASASPXXVSQDLSAISILYLIGKTPKILKNYQMIVKS

SEQ ID NO: 10016 - protein, 32 aa, Artificial Sequence
  Cyclic GFR-binding peptide
  MOD_RES (1)..(32): Xaa is C or S
XVPQALSPISILYKVGRKPKVLKYHYMIVRSX

SEQ ID NO: 10017 - protein, 29 aa, Artificial Sequence
  Cyclic GFR-binding peptide
  MOD_RES (1)..(1): Xaa is C or S
XAPTKLNAISVLYFDSSNNVILKKYRNMV

SEQ ID NO: 10018 - protein, 29 aa, Artificial Sequence
  Cyclic GFR-binding peptide
  MOD_RES (2)..(3): Xaa is C or S
PXXVPQDLNAISILYFVGRTPKVLKKYRM

SEQ ID NO: 10019 - protein, 34 aa, Artificial Sequence
  Cyclic GFR-binding peptide
  MOD_RES (6)..(7): Xaa is C or S
YVPKPXXAPTKLSPISVLYKDDSSNVILKYHYNM

SEQ ID NO: 10020 - protein, 30 aa, Artificial Sequence
  Cyclic GFR-binding peptide
  MOD_RES (1)..(1): Xaa is C or S
XAPTQLSPISVLYKDDSSNVILKYHYNMVV

SEQ ID NO: 10021 - protein, 42 aa, Artificial Sequence
  Cyclic GFR-binding peptide
  MOD_RES (4)..(41): Xaa is C or S
NVQXRPTQVQLSATSVLYYEIVRKKPIFLRKHRTLEDHLAXK

SEQ ID NO: 10022 - protein, 34 aa, Artificial Sequence
  Cyclic GFR-binding peptide
  MOD_RES (6)..(7): Xaa is C or S
ASASPXXVSQDLNAISILYFIGKTPKILKKYRMI

SEQ ID NO: 10023 - protein, 39 aa, Artificial Sequence
  Cyclic GFR-binding peptide
  MOD_RES (6)..(7)..(39): Xaa is C or S
KIPKAXXVPTELNAISMLYFDENEKVVLKKYRDMVVEGX

SEQ ID NO: 10024 - protein, 36 aa, Artificial Sequence
  Cyclic GFR-binding peptide
  MOD_RES (1)..(2)..(33)..(35): Xaa is C or S
XXVPQALNAISILYFVGRKPKVLKKYRMIVRSXKXS

SEQ ID NO: 10025 - protein, 30 aa, Artificial Sequence
  Cyclic GFR-binding peptide
  MOD_RES (1)..(1): Xaa is C or S
XAPTQLSATSVLYYDDSSNVILRKHRNMVV

SEQ ID NO: 10026 - protein, 29 aa, Artificial Sequence
  Cyclic GFR-binding peptide
  MOD_RES (28)..(28): Xaa is C or S
ALSATSILYYVGRKPKVLRKHRMIVRSXK

SEQ ID NO: 10027 - protein, 21 aa, Artificial Sequence
  Cyclic GFR-binding peptide
NAISILYFIGKTPKILKKYRM

SEQ ID NO: 10028 - protein, 33 aa, Artificial Sequence
  Cyclic GFR-binding peptide
  MOD_RES (3)..(4): Xaa is C or S
SPXXVSQDLSPISILYKIGKTPKILKYHYMIVK

SEQ ID NO: 10029 - protein, 30 aa, Artificial Sequence
  Cyclic GFR-binding peptide
PTKLNAISVLYFDDMGVPTLKKYREGMSVA

SEQ ID NO: 10030 - protein, 31 aa, Artificial Sequence
  Cyclic GFR-binding peptide
  MOD_RES (1)..(1): Xaa is C or S
XVPQDLSAISILYLVGRTPKVLKNYQMVVKS

SEQ ID NO: 10031 - protein, 38 aa, Artificial Sequence
  Cyclic GFR-binding peptide
  MOD_RES (6)..(7): Xaa is C or S
AVPKAXXAPTKLSAISVLYLDSSNNVILKNYQNMVVKA

SEQ ID NO: 10032 - protein, 31 aa, Artificial Sequence
  Cyclic GFR-binding peptide
  MOD_RES (3)..(4): Xaa is C or S
KPXXAPTKLSAISVLYLDDSSNVILKNYQNM

SEQ ID NO: 10033 - protein, 29 aa, Artificial Sequence
  Cyclic GFR-binding peptide
  MOD_RES (28)..(28): Xaa is C or S
LSAISVLYLDDSSNVILKNYQNMVVRAXG

SEQ ID NO: 10034 - protein, 36 aa, Artificial Sequence
  Cyclic GFR-binding peptide
  MOD_RES (2)..(3)..(35): Xaa is C or S
AXXVPTELNAISMLYFDENEKVVLKKYRDMVVEGXG

SEQ ID NO: 10035 - protein, 28 aa, Artificial Sequence
  Cyclic GFR-binding peptide
  MOD_RES (28)..(28): Xaa is C or S
DLSAISILYLVGRTPKVLKNYQMVVKSX

SEQ ID NO: 10036 - protein, 36 aa, Artificial Sequence
  Cyclic GFR-binding peptide
  MOD_RES (3)..(4)..(36): Xaa is C or S
KAXXVPTELSATSMLYYDEYDKVVLRKHREMVVEGX

SEQ ID NO: 10037 - protein, 28 aa, Artificial Sequence
  Cyclic GFR-binding peptide
  MOD_RES (27)..(27): Xaa is C or S
SATSMLYYDENEKVVLRKHRDMVVEGXG

SEQ ID NO: 10038 - protein, 35 aa, Artificial Sequence
  Cyclic GFR-binding peptide
  MOD_RES (1)..(33)..(35): Xaa is C or S
XAPTQLSPISVLYKDDSSNVILKYHYNMVVRAXGX

SEQ ID NO: 10039 - protein, 22 aa, Artificial Sequence
  Cyclic GFR-binding peptide
DLSAISILYLIGKTPKILKNYQ

SEQ ID NO: 10040 - protein, 35 aa, Artificial Sequence
  Cyclic GFR-binding peptide
  MOD_RES (32)..(34): Xaa is C or S
APTKLSPISVLYKDDSSNVILKYHYNMVVRSXGXH

SEQ ID NO: 10041 - protein, 27 aa, Artificial Sequence
  Cyclic GFR-binding peptide
  MOD_RES (27)..(27): Xaa is C or S
LNAISILYFVGRKPKVLKKYRMIVRSX

SEQ ID NO: 10042 - protein, 24 aa, Artificial Sequence
  Cyclic GFR-binding peptide
LSPISILYKVGRKPKVLKYHYMIV

SEQ ID NO: 10043 - protein, 41 aa, Artificial Sequence
  Cyclic GFR-binding peptide
  MOD_RES (6)..(38)..(40): Xaa is C or S
VTKPTXAPTKLSPISVLYKDDSSNVILKYHYNMVVRSXGXH

SEQ ID NO: 10044 - protein, 22 aa, Artificial Sequence
  Cyclic GFR-binding peptide
NAISVLYFDDMGVPTLKKYREG

SEQ ID NO: 10045 - protein, 40 aa, Artificial Sequence
  Cyclic GFR-binding peptide
  MOD_RES (2)..(39): Xaa is C or S
QXRPTQVQLNAISVLYFEIVRKKPIFLKKYRTLEDHLAXK

SEQ ID NO: 10046 - protein, 30 aa, Artificial Sequence
  Cyclic GFR-binding peptide
  MOD_RES (3)..(3): Xaa is C or S
PTXAPTKLSPISVLYKDDSSNVILKYHYNM

SEQ ID NO: 10047 - protein, 31 aa, Artificial Sequence
  Cyclic GFR-binding peptide
  MOD_RES (28)..(30): Xaa is C or S
LSATSMLYYDEYDKVVLRKHREMVVEGXGXR

SEQ ID NO: 10048 - protein, 34 aa, Artificial Sequence
  Cyclic GFR-binding peptide
  MOD_RES (2)..(3): Xaa is C or S
AXXVPTKLNAISVLYFDDMGVPTLKKYREGMSVA

SEQ ID NO: 10049 - protein, 26 aa, Artificial Sequence
  Cyclic GFR-binding peptide
QALSPISILYKVGRKPKVLKYHYMIV

SEQ ID NO: 10050 - protein, 36 aa, Artificial Sequence
  Cyclic GFR-binding peptide
  MOD_RES (3)..(4)..(36): Xaa is C or S
KAXXVPTELSATSMLYYDENEKVVLRKHRDMVVEGX

SEQ ID NO: 10051 - protein, 32 aa, Artificial Sequence
  Cyclic GFR-binding peptide
  MOD_RES (4)..(5): Xaa is C or S
PKAXXVPTELSATSMLYYDENEKVVLRKHRDM

SEQ ID NO: 10052 - protein, 30 aa, Artificial Sequence
  Cyclic GFR-binding peptide
  MOD_RES (29)..(29): Xaa is C or S
LNAISVLYFDDMGVPTLKKYREGMSVAEXG

SEQ ID NO: 10053 - protein, 32 aa, Artificial Sequence
  Cyclic GFR-binding peptide
  MOD_RES (3)..(4): Xaa is C or S
KPXXAPTQLSAISVLYLDDSSNVILKNYQNMV

SEQ ID NO: 10054 - protein, 29 aa, Artificial Sequence
  Cyclic GFR-binding peptide
TQVQLSAISVLYLEIVRKKPIFLKNYQTL

SEQ ID NO: 10055 - protein, 37 aa, Artificial Sequence
  Cyclic GFR-binding peptide
  MOD_RES (5)..(6)..(37): Xaa is C or S
SASPXXVSQDLSATSILYYIGKTPKILRKHRMIVKSX

SEQ ID NO: 10056 - protein, 31 aa, Artificial Sequence
  Cyclic GFR-binding peptide
  MOD_RES (3)..(4): Xaa is C or S
APXXVPQALNAISILYFVGRKPKVLKKYRMI

SEQ ID NO: 10057 - protein, 32 aa, Artificial Sequence
  Cyclic GFR-binding peptide
  MOD_RES (1)..(2): Xaa is C or S
XXVPQALNAISILYFVGRKPKVLKKYRMIVRS

SEQ ID NO: 10058 - protein, 32 aa, Artificial Sequence
  Cyclic GFR-binding peptide
  MOD_RES (30)..(32): Xaa is C or S
PQALNAISILYFVGRKPKVLKKYRMIVRSXKX

SEQ ID NO: 10059 - protein, 30 aa, Artificial Sequence
  Cyclic GFR-binding peptide
APTQLSAISVLYLDDSSNVILKNYQNMVVR

SEQ ID NO: 10060 - protein, 35 aa, Artificial Sequence
  Cyclic GFR-binding peptide
  MOD_RES (1)..(2)..(34): Xaa is C or S
XXVPTELSPISMLYKDENEKVVLKYHYDMVVEGXG

SEQ ID NO: 10061 - protein, 31 aa, Artificial Sequence
  Cyclic GFR-binding peptide
  MOD_RES (5)..(6): Xaa is C or S
SAAPXXVPQALSAISILYLVGRKPKVLKNYQ

SEQ ID NO: 10062 - protein, 35 aa, Artificial Sequence
  Cyclic GFR-binding peptide
  MOD_RES (6)..(6): Xaa is C or S
VTKPTXAPTKLSATSVLYYDDSSNVILRKHRNMVV

SEQ ID NO: 10063 - protein, 34 aa, Artificial Sequence
  Cyclic GFR-binding peptide
  MOD_RES (6)..(7): Xaa is C or S
ASASPXXVPQDLNAISILYFVGRTPKVLKKYRMV

SEQ ID NO: 10064 - protein, 34 aa, Artificial Sequence
  Cyclic GFR-binding peptide
  MOD_RES (1)..(32)..(34): Xaa is C or S
XVPQDLSPISILYKVGRTPKVLKYHYMVVKSXKX

SEQ ID NO: 10065 - protein, 38 aa, Artificial Sequence
  Cyclic GFR-binding peptide
  MOD_RES (4)..(5)..(38): Xaa is C or S
GKAXXVPTKLSATSVLYYDDMGVPTLRKHREGMSVAEX

SEQ ID NO: 10066 - protein, 32 aa, Artificial Sequence
  Cyclic GFR-binding peptide
  MOD_RES (3)..(4): Xaa is C or S
KAXXVPTELNAISMLYFDENEKVVLKKYRDMV

SEQ ID NO: 10067 - protein, 32 aa, Artificial Sequence
  Cyclic GFR-binding peptide
  MOD_RES (32)..(32): Xaa is C or S
VPTELSATSMLYYDEYDKVVLRKHREMVVEGX

SEQ ID NO: 10068 - protein, 30 aa, Artificial Sequence
  Cyclic GFR-binding peptide
VQLNAISVLYFEIVRKKPIFLKKYRTLEDH

SEQ ID NO: 10069 - protein, 28 aa, Artificial Sequence
  Cyclic GFR-binding peptide
VPQALSAISILYLVGRKPKVLKNYQMIV

SEQ ID NO: 10070 - protein, 22 aa, Artificial Sequence
  Cyclic GFR-binding peptide
NAISMLYFDEYDKVVLKKYREM

SEQ ID NO: 10071 - protein, 33 aa, Artificial Sequence
  Cyclic GFR-binding peptide
  MOD_RES (3)..(4): Xaa is C or S
KPXXAPTQLSPISVLYKDDSSNVILKYHYNMVV

SEQ ID NO: 10072 - protein, 32 aa, Artificial Sequence
  Cyclic GFR-binding peptide
  MOD_RES (31)..(31): Xaa is C or S
PTKLSAISVLYLDSSNNVILKNYQNMVVKAXG

SEQ ID NO: 10073 - protein, 31 aa, Artificial Sequence
  Cyclic GFR-binding peptide
  MOD_RES (31)..(31): Xaa is C or S
PTKLSPISVLYKDSSNNVILKYHYNMVVKAX

SEQ ID NO: 10074 - protein, 28 aa, Artificial Sequence
  Cyclic GFR-binding peptide
PTKLSAISVLYLDSSNNVILKNYQNMVV

SEQ ID NO: 10075 - protein, 29 aa, Artificial Sequence
  Cyclic GFR-binding peptide
  MOD_RES (27)..(29): Xaa is C or S
SPISMLYKDEYDKVVLKYHYEMVVEGXGX

SEQ ID NO: 10076 - protein, 40 aa, Artificial Sequence
  Cyclic GFR-binding peptide
  MOD_RES (37)..(39): Xaa is C or S
RPTQVQLNAISVLYFEIVRKKPIFLKKYRTLEDHLAXKXE

SEQ ID NO: 10077 - protein, 38 aa, Artificial Sequence
  Cyclic GFR-binding peptide
  MOD_RES (6)..(7)..(38): Xaa is C or S
ASASPXXVPQDLSPISILYKVGRTPKVLKYHYMVVKSX

SEQ ID NO: 10078 - protein, 32 aa, Artificial Sequence
  Cyclic GFR-binding peptide
  MOD_RES (5)..(6): Xaa is C or S
VPKPXXAPTQLSPISVLYKDDSSNVILKYHYN

SEQ ID NO: 10079 - protein, 24 aa, Artificial Sequence
  Cyclic GFR-binding peptide
DLSAISILYLVGRTPKVLKNYQMV

SEQ ID NO: 10080 - protein, 26 aa, Artificial Sequence
  Cyclic GFR-binding peptide
QALSATSILYYVGRKPKVLRKHRMIV

SEQ ID NO: 10081 - protein, 36 aa, Artificial Sequence
  Cyclic GFR-binding peptide
  MOD_RES (3)..(4)..(35): Xaa is C or S
SPXXVPQDLNAISILYFVGRTPKVLKKYRMVVKSXK

SEQ ID NO: 10082 - protein, 37 aa, Artificial Sequence
  Cyclic GFR-binding peptide
  MOD_RES (5)..(6)..(37): Xaa is C or S
SASPXXVPQDLSPISILYKVGRTPKVLKYHYMVVKSX

SEQ ID NO: 10083 - protein, 25 aa, Artificial Sequence
  Cyclic GFR-binding peptide
ELNAISMLYFDEYDKVVLKKYREMV

SEQ ID NO: 10084 - protein, 32 aa, Artificial Sequence
  Cyclic GFR-binding peptide
VPTKLSAISVLYLDDMGVPTLKNYQEGMSVAE

SEQ ID NO: 10085 - protein, 31 aa, Artificial Sequence
  Cyclic GFR-binding peptide
  MOD_RES (28)..(30): Xaa is C or S
DLSPISILYKIGKTPKILKYHYMIVKSXKXS

SEQ ID NO: 10086 - protein, 23 aa, Artificial Sequence
  Cyclic GFR-binding peptide
LSPISVLYKEIVRKKPIFLKYHY

SEQ ID NO: 10087 - protein, 24 aa, Artificial Sequence
  Cyclic GFR-binding peptide
LSATSILYYVGRKPKVLRKHRMIV

SEQ ID NO: 10088 - protein, 38 aa, Artificial Sequence
  Cyclic GFR-binding peptide
  MOD_RES (1)..(38): Xaa is C or S
XRPTQVQLSAISVLYLEIVRKKPIFLKNYQTLEDHLAX

SEQ ID NO: 10089 - protein, 25 aa, Artificial Sequence
  Cyclic GFR-binding peptide
QLSPISVLYKDDSSNVILKYHYNMV

SEQ ID NO: 10090 - protein, 35 aa, Artificial Sequence
  Cyclic GFR-binding peptide
  MOD_RES (1)..(33)..(35): Xaa is C or S
XAPTKLSAISVLYLDSSNNVILKNYQNMVVKAXGX

SEQ ID NO: 10091 - protein, 26 aa, Artificial Sequence
  Cyclic GFR-binding peptide
QLSPISVLYKDDSSNVILKYHYNMVV

SEQ ID NO: 10092 - protein, 38 aa, Artificial Sequence
  Cyclic GFR-binding peptide
  MOD_RES (3)..(4)..(36)..(38): Xaa is C or S
KPXXAPTKLSATSVLYYDDSSNVILRKHRNMVVRSXGX

SEQ ID NO: 10093 - protein, 35 aa, Artificial Sequence
  Cyclic GFR-binding peptide
  MOD_RES (3)..(4)..(35): Xaa is C or S
SPXXVPQDLNAISILYFVGRTPKVLKKYRMVVKSX

SEQ ID NO: 10094 - protein, 25 aa, Artificial Sequence
  Cyclic GFR-binding peptide
QLSATSVLYYDDSSNVILRKHRNMV

SEQ ID NO: 10095 - protein, 36 aa, Artificial Sequence
  Cyclic GFR-binding peptide
  MOD_RES (4)..(5): Xaa is C or S
PKPXXAPTKLSPISVLYKDDSSNVILKYHYNMVVRS

SEQ ID NO: 10096 - protein, 41 aa, Artificial Sequence
  Cyclic GFR-binding peptide
  MOD_RES (7)..(39)..(41): Xaa is C or S
HVTKPTXAPTKLSPISVLYKDDSSNVILKYHYNMVVRSXGX

SEQ ID NO: 10097 - protein, 38 aa, Artificial Sequence
  Cyclic GFR-binding peptide
  MOD_RES (5)..(6)..(38): Xaa is C or S
IPKAXXVPTELSPISMLYKDENEKVVLKYHYDMVVEGX

SEQ ID NO: 10098 - protein, 26 aa, Artificial Sequence
  Cyclic GFR-binding peptide
  MOD_RES (1)..(1): Xaa is C or S
XVPQDLSATSILYYVGRTPKVLRKHR

SEQ ID NO: 10099 - protein, 36 aa, Artificial Sequence
  Cyclic GFR-binding peptide
  MOD_RES (3)..(4): Xaa is C or S
KAXXVPTKLNAISVLYFDDMGVPTLKKYREGMSVAE

SEQ ID NO: 10100 - protein, 24 aa, Artificial Sequence
  Cyclic GFR-binding peptide
QDLSAISILYLIGKTPKILKNYQM

SEQ ID NO: 10101 - protein, 33 aa, Artificial Sequence
  Cyclic GFR-binding peptide
  MOD_RES (3)..(4): Xaa is C or S
KPXXAPTKLSAISVLYLDDSSNVILKNYQNMVV

SEQ ID NO: 10102 - protein, 31 aa, Artificial Sequence
  Cyclic GFR-binding peptide
  MOD_RES (31)..(31): Xaa is C or S
PTKLNAISVLYFDSSNNVILKKYRNMVVKAX

SEQ ID NO: 10103 - protein, 37 aa, Artificial Sequence
  Cyclic GFR-binding peptide
  MOD_RES (3)..(4)..(36): Xaa is C or S
KAXXVPTELSATSMLYYDENEKVVLRKHRDMVVEGXG

SEQ ID NO: 10104 - protein, 31 aa, Artificial Sequence
  Cyclic GFR-binding peptide
  MOD_RES (31)..(31): Xaa is C or S
VSQDLSPISILYKIGKTPKILKYHYMIVKSX

SEQ ID NO: 10105 - protein, 39 aa, Artificial Sequence
  Cyclic GFR-binding peptide
  MOD_RES (3)..(3): Xaa is C or S
VQXRPTQVQLSAISVLYLEIVRKKPIFLKNYQTLEDHLA

SEQ ID NO: 10106 - protein, 21 aa, Artificial Sequence
  Cyclic GFR-binding peptide
LSPISVLYKDDSSNVILKYHY

SEQ ID NO: 10107 - protein, 26 aa, Artificial Sequence
  Cyclic GFR-binding peptide
LSPISVLYKDDSSNVILKYHYNMVVR

SEQ ID NO: 10108 - protein, 26 aa, Artificial Sequence
  Cyclic GFR-binding peptide
  MOD_RES (1)..(1): Xaa is C or S
XVSQDLNAISILYFIGKTPKILKKYR

SEQ ID NO: 10109 - protein, 26 aa, Artificial Sequence
  Cyclic GFR-binding peptide
  MOD_RES (1)..(1): Xaa is C or S
XVPTKLSAISVLYLDDMGVPTLKNYQ

SEQ ID NO: 10110 - protein, 32 aa, Artificial Sequence
  Cyclic GFR-binding peptide
  MOD_RES (4)..(5): Xaa is C or S
ASPXXVPQDLNAISILYFVGRTPKVLKKYRMV

SEQ ID NO: 10111 - protein, 39 aa, Artificial Sequence
  Cyclic GFR-binding peptide
  MOD_RES (3)..(3): Xaa is C or S
VQXRPTQVQLSATSVLYYEIVRKKPIFLRKHRTLEDHLA

SEQ ID NO: 10112 - protein, 26 aa, Artificial Sequence
  Cyclic GFR-binding peptide
VPQALSPISILYKVGRKPKVLKYHYM

SEQ ID NO: 10113 - protein, 30 aa, Artificial Sequence
  Cyclic GFR-binding peptide
  MOD_RES (28)..(30): Xaa is C or S
LNAISVLYFDSSNNVILKKYRNMVVKAXGX

SEQ ID NO: 10114 - protein, 39 aa, Artificial Sequence
  Cyclic GFR-binding peptide
  MOD_RES (4)..(4): Xaa is C or S
NVQXRPTQVQLSATSVLYYEIVRKKPIFLRKHRTLEDHL

SEQ ID NO: 10115 - protein, 25 aa, Artificial Sequence
  Cyclic GFR-binding peptide
TELSATSMLYYDEYDKVVLRKHREM

SEQ ID NO: 10116 - protein, 26 aa, Artificial Sequence
  Cyclic GFR-binding peptide
SPISMLYKDEYDKVVLKYHYEMVVEG

SEQ ID NO: 10117 - protein, 34 aa, Artificial Sequence
  Cyclic GFR-binding peptide
  MOD_RES (6)..(7): Xaa is C or S
TVPKPXXAPTQLSATSVLYYDDSSNVILRKHRNM

SEQ ID NO: 10118 - protein, 32 aa, Artificial Sequence
  Cyclic GFR-binding peptide
  MOD_RES (1)..(2): Xaa is C or S
XXVPQALSAISILYLVGRKPKVLKNYQMIVRS

SEQ ID NO: 10119 - protein, 33 aa, Artificial Sequence
  Cyclic GFR-binding peptide
  MOD_RES (31)..(33): Xaa is C or S
PTQLSPISVLYKDDSSNVILKYHYNMVVRAXGX

SEQ ID NO: 10120 - protein, 40 aa, Artificial Sequence
  Cyclic GFR-binding peptide
  MOD_RES (5)..(6)..(38)..(40): Xaa is C or S
VPKAXXAPTKLSAISVLYLDSSNNVILKNYQNMVVKAXGX

SEQ ID NO: 10121 - protein, 28 aa, Artificial Sequence
  Cyclic GFR-binding peptide
APTKLSATSVLYYDDSSNVILRKHRNMV

SEQ ID NO: 10122 - protein, 29 aa, Artificial Sequence
  Cyclic GFR-binding peptide
  MOD_RES (27)..(29): Xaa is C or S
LSATSILYYVGRKPKVLRKHRMIVRSXKX

SEQ ID NO: 10123 - protein, 35 aa, Artificial Sequence
  Cyclic GFR-binding peptide
  MOD_RES (1)..(2)..(34): Xaa is C or S
XXAPTKLNAISVLYFDSSNNVILKKYRNMVVKAXG

SEQ ID NO: 10124 - protein, 40 aa, Artificial Sequence
  Cyclic GFR-binding peptide
  MOD_RES (5)..(6)..(37)..(39): Xaa is C or S
SAAPXXVPQALSAISILYLVGRKPKVLKNYQMIVRSXKXS

SEQ ID NO: 10125 - protein, 30 aa, Artificial Sequence
  Cyclic GFR-binding peptide
  MOD_RES (29)..(29): Xaa is C or S
QDLSATSILYYIGKTPKILRKHRMIVKSXK

SEQ ID NO: 10126 - protein, 27 aa, Artificial Sequence
  Cyclic GFR-binding peptide
  MOD_RES (1)..(2): Xaa is C or S
XXVPTELNAISMLYFDENEKVVLKKYR

SEQ ID NO: 10127 - protein, 37 aa, Artificial Sequence
  Cyclic GFR-binding peptide
  MOD_RES (6)..(7): Xaa is C or S
ASASPXXVSQDLNAISILYFIGKTPKILKKYRMIVKS

SEQ ID NO: 10128 - protein, 41 aa, Artificial Sequence
  Cyclic GFR-binding peptide
  MOD_RES (6)..(7)..(38)..(40): Xaa is C or S
ASAAPXXVPQALSAISILYLVGRKPKVLKNYQMIVRSXKXS

SEQ ID NO: 10129 - protein, 26 aa, Artificial Sequence
  Cyclic GFR-binding peptide
LNAISILYFVGRTPKVLKKYRMVVKS

SEQ ID NO: 10130 - protein, 32 aa, Artificial Sequence
  Cyclic GFR-binding peptide
  MOD_RES (3)..(4): Xaa is C or S
KPXXAPTQLSPISVLYKDDSSNVILKYHYNMV

SEQ ID NO: 10131 - protein, 35 aa, Artificial Sequence
  Cyclic GFR-binding peptide
  MOD_RES (2)..(3): Xaa is C or S
AXXVPTKLSAISVLYLDDMGVPTLKNYQEGMSVAE

SEQ ID NO: 10132 - protein, 32 aa, Artificial Sequence
  Cyclic GFR-binding peptide
  MOD_RES (2)..(3): Xaa is C or S
PXXAPTKLSATSVLYYDDSSNVILRKHRNMVV

SEQ ID NO: 10133 - protein, 30 aa, Artificial Sequence
  Cyclic GFR-binding peptide
  MOD_RES (29)..(29): Xaa is C or S
QLSATSVLYYDDSSNVILRKHRNMVVRAXG

SEQ ID NO: 10134 - protein, 25 aa, Artificial Sequence
  Cyclic GFR-binding peptide
TELSPISMLYKDEYDKVVLKYHYEM

SEQ ID NO: 10135 - protein, 27 aa, Artificial Sequence
  Cyclic GFR-binding peptide
KLNAISVLYFDDMGVPTLKKYREGMSV

SEQ ID NO: 10136 - protein, 36 aa, Artificial Sequence
  Cyclic GFR-binding peptide
  MOD_RES (4)..(5)..(36): Xaa is C or S
ASPXXVPQDLSAISILYLVGRTPKVLKNYQMVVKSX

SEQ ID NO: 10137 - protein, 32 aa, Artificial Sequence
  Cyclic GFR-binding peptide
  MOD_RES (29)..(31): Xaa is C or S
KLNAISVLYFDSSNNVILKKYRNMVVKAXGXH

SEQ ID NO: 10138 - protein, 35 aa, Artificial Sequence
  Cyclic GFR-binding peptide
  MOD_RES (1)..(2)..(34): Xaa is C or S
XXVPTELSATSMLYYDEYDKVVLRKHREMVVEGXG

SEQ ID NO: 10139 - protein, 35 aa, Artificial Sequence
  Cyclic GFR-binding peptide
  MOD_RES (1)..(32)..(34): Xaa is C or S
XVPQDLSPISILYKVGRTPKVLKYHYMVVKSXKXS

SEQ ID NO: 10140 - protein, 35 aa, Artificial Sequence
  Cyclic GFR-binding peptide
  MOD_RES (2)..(2): Xaa is C or S
QXRPTQVQLNAISVLYFEIVRKKPIFLKKYRTLED

SEQ ID NO: 10141 - protein, 26 aa, Artificial Sequence
  Cyclic GFR-binding peptide
LNAISVLYFEIVRKKPIFLKKYRTLE

SEQ ID NO: 10142 - protein, 33 aa, Artificial Sequence
  Cyclic GFR-binding peptide
  MOD_RES (30)..(32): Xaa is C or S
TKLSAISVLYLDDSSNVILKNYQNMVVRSXGXH

SEQ ID NO: 10143 - protein, 31 aa, Artificial Sequence
  Cyclic GFR-binding peptide
  MOD_RES (1)..(1): Xaa is C or S
XAPTQLSAISVLYLDDSSNVILKNYQNMVVR

SEQ ID NO: 10144 - protein, 30 aa, Artificial Sequence
  Cyclic GFR-binding peptide
  MOD_RES (1)..(2): Xaa is C or S
XXAPTKLSAISVLYLDDSSNVILKNYQNMV

SEQ ID NO: 10145 - protein, 22 aa, Artificial Sequence
  Cyclic GFR-binding peptide
LNAISVLYFDDMGVPTLKKYRE

SEQ ID NO: 10146 - protein, 30 aa, Artificial Sequence
  Cyclic GFR-binding peptide
  MOD_RES (3)..(4): Xaa is C or S
SPXXVSQDLSATSILYYIGKTPKILRKHRM

SEQ ID NO: 10147 - protein, 30 aa, Artificial Sequence
  Cyclic GFR-binding peptide
TQVQLNAISVLYFEIVRKKPIFLKKYRTLE

SEQ ID NO: 10148 - protein, 35 aa, Artificial Sequence
  Cyclic GFR-binding peptide
  MOD_RES (5)..(6): Xaa is C or S
VGKAXXVPTKLSATSVLYYDDMGVPTLRKHREGMS

SEQ ID NO: 10149 - protein, 29 aa, Artificial Sequence
  Cyclic GFR-binding peptide
  MOD_RES (27)..(29): Xaa is C or S
SPISVLYKDSSNNVILKYHYNMVVKAXGX

SEQ ID NO: 10150 - protein, 25 aa, Artificial Sequence
  Cyclic GFR-binding peptide
SAISVLYLDDSSNVILKNYQNMVVR

SEQ ID NO: 10151 - protein, 34 aa, Artificial Sequence
  Cyclic GFR-binding peptide
  MOD_RES (1)..(32)..(34): Xaa is C or S
XVPQALSPISILYKVGRKPKVLKYHYMIVRSXKX

SEQ ID NO: 10152 - protein, 35 aa, Artificial Sequence
  Cyclic GFR-binding peptide
  MOD_RES (32)..(34): Xaa is C or S
APTKLSAISVLYLDDSSNVILKNYQNMVVRSXGXH

SEQ ID NO: 10153 - protein, 24 aa, Artificial Sequence
  Cyclic GFR-binding peptide
PQALSATSILYYVGRKPKVLRKHR

SEQ ID NO: 10154 - protein, 36 aa, Artificial Sequence
  Cyclic GFR-binding peptide
  MOD_RES (3)..(4)..(35): Xaa is C or S
APXXVPQALSATSILYYVGRKPKVLRKHRMIVRSXK

SEQ ID NO: 10155 - protein, 35 aa, Artificial Sequence
  Cyclic GFR-binding peptide
  MOD_RES (4)..(5): Xaa is C or S
PKPXXAPTKLSATSVLYYDDSSNVILRKHRNMVVR

SEQ ID NO: 10156 - protein, 32 aa, Artificial Sequence
  Cyclic GFR-binding peptide
  MOD_RES (2)..(2): Xaa is C or S
QXRPTQVQLSPISVLYKEIVRKKPIFLKYHYT

SEQ ID NO: 10157 - protein, 37 aa, Artificial Sequence
  Cyclic GFR-binding peptide
  MOD_RES (5)..(6): Xaa is C or S
VGKAXXVPTKLSATSVLYYDDMGVPTLRKHREGMSVA

SEQ ID NO: 10158 - protein, 25 aa, Artificial Sequence
  Cyclic GFR-binding peptide
TKLSAISVLYLDSSNNVILKNYQNM

SEQ ID NO: 10159 - protein, 39 aa, Artificial Sequence
  Cyclic GFR-binding peptide
  MOD_RES (2)..(3)..(36)..(38): Xaa is C or S
AXXVPTKLNAISVLYFDDMGVPTLKKYREGMSVAEXGXR

SEQ ID NO: 10160 - protein, 30 aa, Artificial Sequence
  Cyclic GFR-binding peptide
QLSATSVLYYEIVRKKPIFLRKHRTLEDHL

SEQ ID NO: 10161 - protein, 38 aa, Artificial Sequence
  Cyclic GFR-binding peptide
  MOD_RES (3)..(4)..(36)..(38): Xaa is C or S
KAXXVPTELNAISMLYFDENEKVVLKKYRDMVVEGXGX

SEQ ID NO: 10162 - protein, 21 aa, Artificial Sequence
  Cyclic GFR-binding peptide
SAISVLYLDDSSNVILKNYQN

SEQ ID NO: 10163 - protein, 37 aa, Artificial Sequence
  Cyclic GFR-binding peptide
  MOD_RES (3)..(4)..(37): Xaa is C or S
KAXXVPTKLNAISVLYFDDMGVPTLKKYREGMSVAEX

SEQ ID NO: 10164 - protein, 34 aa, Artificial Sequence
  Cyclic GFR-binding peptide
  MOD_RES (5)..(6): Xaa is C or S
SASPXXVSQDLNAISILYFIGKTPKILKKYRMIV

SEQ ID NO: 10165 - protein, 36 aa, Artificial Sequence
  Cyclic GFR-binding peptide
  MOD_RES (1)..(33)..(35): Xaa is C or S
XVPTELSPISMLYKDEYDKVVLKYHYEMVVEGXGXR

SEQ ID NO: 10166 - protein, 40 aa, Artificial Sequence
  Cyclic GFR-binding peptide
  MOD_RES (5)..(6)..(38)..(40): Xaa is C or S
IPKAXXVPTELNAISMLYFDEYDKVVLKKYREMVVEGXGX

SEQ ID NO: 10167 - protein, 39 aa, Artificial Sequence
  Cyclic GFR-binding peptide
  MOD_RES (6)..(7)..(38): Xaa is C or S
ASASPXXVSQDLSAISILYLIGKTPKILKNYQMIVKSXK

SEQ ID NO: 10168 - protein, 35 aa, Artificial Sequence
  Cyclic GFR-binding peptide
  MOD_RES (7)..(7): Xaa is C or S
HVTKPTXAPTKLSAISVLYLDDSSNVILKNYQNMV

SEQ ID NO: 10169 - protein, 36 aa, Artificial Sequence
  Cyclic GFR-binding peptide
  MOD_RES (2)..(2): Xaa is C or S
QXRPTQVQLSAISVLYLEIVRKKPIFLKNYQTLEDH

SEQ ID NO: 10170 - protein, 32 aa, Artificial Sequence
  Cyclic GFR-binding peptide
  MOD_RES (31)..(31): Xaa is C or S
VPQDLSPISILYKVGRTPKVLKYHYMVVKSXK

SEQ ID NO: 10171 - protein, 30 aa, Artificial Sequence
  Cyclic GFR-binding peptide
  MOD_RES (4)..(5): Xaa is C or S
ASPXXVPQDLSAISILYLVGRTPKVLKNYQ

SEQ ID NO: 10172 - protein, 27 aa, Artificial Sequence
  Cyclic GFR-binding peptide
TELNAISMLYFDENEKVVLKKYRDMVV

SEQ ID NO: 10173 - protein, 35 aa, Artificial Sequence
  Cyclic GFR-binding peptide
  MOD_RES (1)..(32)..(34): Xaa is C or S
XVPQALSAISILYLVGRKPKVLKNYQMIVRSXKXS

SEQ ID NO: 10174 - protein, 38 aa, Artificial Sequence
  Cyclic GFR-binding peptide
  MOD_RES (6)..(7): Xaa is C or S
KIPKAXXVPTELSATSMLYYDENEKVVLRKHRDMVVEG

SEQ ID NO: 10175 - protein, 36 aa, Artificial Sequence
  Cyclic GFR-binding peptide
  MOD_RES (4)..(5)..(36): Xaa is C or S
ASPXXVSQDLSATSILYYIGKTPKILRKHRMIVKSX

SEQ ID NO: 10176 - protein, 29 aa, Artificial Sequence
  Cyclic GFR-binding peptide
  MOD_RES (2)..(3): Xaa is C or S
PXXVPQALSPISILYKVGRKPKVLKYHYM

SEQ ID NO: 10177 - protein, 28 aa, Artificial Sequence
  Cyclic GFR-binding peptide
  MOD_RES (27)..(27): Xaa is C or S
LSAISILYLVGRKPKVLKNYQMIVRSXK

SEQ ID NO: 10178 - protein, 26 aa, Artificial Sequence
  Cyclic GFR-binding peptide
LSATSMLYYDEYDKVVLRKHREMVVE

SEQ ID NO: 10179 - protein, 31 aa, Artificial Sequence
  Cyclic GFR-binding peptide
  MOD_RES (28)..(30): Xaa is C or S
DLSAISILYLIGKTPKILKNYQMIVKSXKXS

SEQ ID NO: 10180 - protein, 29 aa, Artificial Sequence
  Cyclic GFR-binding peptide
  MOD_RES (1)..(2): Xaa is C or S
XXVPQDLSATSILYYVGRTPKVLRKHRMV

SEQ ID NO: 10181 - protein, 43 aa, Artificial Sequence
  Cyclic GFR-binding peptide
  MOD_RES (3)..(40)..(42): Xaa is C or S
VQXRPTQVQLSAISVLYLEIVRKKPIFLKNYQTLEDHLAXKXE

SEQ ID NO: 10182 - protein, 40 aa, Artificial Sequence
  Cyclic GFR-binding peptide
  MOD_RES (6)..(7)..(39): Xaa is C or S
KIPKAXXVPTELSATSMLYYDENEKVVLRKHRDMVVEGXG

SEQ ID NO: 10183 - protein, 34 aa, Artificial Sequence
  Cyclic GFR-binding peptide
  MOD_RES (6)..(7): Xaa is C or S
ASAAPXXVPQALSPISILYKVGRKPKVLKYHYMI

SEQ ID NO: 10184 - protein, 27 aa, Artificial Sequence
  Cyclic GFR-binding peptide
QDLSATSILYYIGKTPKILRKHRMIVK

SEQ ID NO: 10185 - protein, 41 aa, Artificial Sequence
  Cyclic GFR-binding peptide
  MOD_RES (5)..(6)..(38)..(40): Xaa is C or S
IPKAXXVPTELSATSMLYYDEYDKVVLRKHREMVVEGXGXR

SEQ ID NO: 10186 - protein, 29 aa, Artificial Sequence
  Cyclic GFR-binding peptide
  MOD_RES (26)..(28): Xaa is C or S
SPISILYKVGRKPKVLKYHYMIVRSXKXS

SEQ ID NO: 10187 - protein, 34 aa, Artificial Sequence
  Cyclic GFR-binding peptide
  MOD_RES (5)..(6): Xaa is C or S
VPKAXXAPTKLSAISVLYLDSSNNVILKNYQNMV

SEQ ID NO: 10188 - protein, 35 aa, Artificial Sequence
  Cyclic GFR-binding peptide
  MOD_RES (2)..(3)..(35): Xaa is C or S
PXXAPTKLSAISVLYLDDSSNVILKNYQNMVVRSX

SEQ ID NO: 10189 - protein, 31 aa, Artificial Sequence
  Cyclic GFR-binding peptide
RPTQVQLSPISVLYKEIVRKKPIFLKYHYTL

SEQ ID NO: 10190 - protein, 39 aa, Artificial Sequence
  Cyclic GFR-binding peptide
  MOD_RES (5)..(6)..(38): Xaa is C or S
VPKPXXAPTKLSPISVLYKDDSSNVILKYHYNMVVRSXG

SEQ ID NO: 10191 - protein, 23 aa, Artificial Sequence
  Cyclic GFR-binding peptide
QDLSPISILYKIGKTPKILKYHY

SEQ ID NO: 10192 - protein, 42 aa, Artificial Sequence
  Cyclic GFR-binding peptide
  MOD_RES (3)..(40)..(42): Xaa is C or S
VQXRPTQVQLSAISVLYLEIVRKKPIFLKNYQTLEDHLAXKX

SEQ ID NO: 10193 - protein, 42 aa, Artificial Sequence
  Cyclic GFR-binding peptide
  MOD_RES (6)..(7)..(39)..(41): Xaa is C or S
TVPKPXXAPTQLSAISVLYLDDSSNVILKNYQNMVVRAXGXH

SEQ ID NO: 10194 - protein, 26 aa, Artificial Sequence
  Cyclic GFR-binding peptide
VSQDLSPISILYKIGKTPKILKYHYM

SEQ ID NO: 10195 - protein, 35 aa, Artificial Sequence
  Cyclic GFR-binding peptide
  MOD_RES (1)..(33)..(35): Xaa is C or S
XVPTELNAISMLYFDENEKVVLKKYRDMVVEGXGX

SEQ ID NO: 10196 - protein, 31 aa, Artificial Sequence
  Cyclic GFR-binding peptide
  MOD_RES (1)..(1): Xaa is C or S
XAPTKLSATSVLYYDDSSNVILRKHRNMVVR

(The sequence listing continues in the following parts.)

1. A cyclic peptide or a cyclic peptidomimetic, with between 15 and 60 amino acids, having a growth factor receptor-binding capability and comprising a peptide with four amino acids PEP1, a peptide with five amino acids PEP2, a peptide with three amino acids PEP3, and a peptide with three amino acids PEP4;
wherein PEP1 is SAIS;
wherein PEP2 is LKNYQ
wherein PEP3 is selected from the group consisting of VPT, VPE, APT, TPT, VPA, APV, VPQ, VSQ, SRV and TQV;
and wherein PEP4 is selected from the group consisting of VVE, TVE, VVR, VVK, VAE, AVS, VVD, VEE, VRS, VKS, QHN, EHS, EEH and EDH.

2.-9. (canceled)

10. A cyclic peptide or a cyclic peptidomimetic according to claim 1, wherein said growth factor receptor is selected from the group consisting of platelet-derived growth factor, platelet-derived angiogenesis factor, vascular endothelial growth factor, platelet-derived epidermal growth factor, transforming growth factor beta, transforming growth factor A, epidermal growth factor, fibroblast growth factor, acidic fibroblast growth factor, basic fibroblast growth factor, insulin-like growth factors 1 and 2, keratinocyte growth factor, tumor necrosis factor, fibroblast growth factor and interleukin-1, Keratinocyte Growth Factor-2, and combinations thereof.

11.-15. (canceled)

16. A cyclic peptide or a cyclic peptidomimetic according to claim 1, comprising a peptide with between six and twelve amino acids PEP9 and a peptide with between six and eleven amino acids PEP10; wherein PEP9 is a peptide of general formula PEP7-PEP5; wherein PEP5 is a cyclic peptide of formula PEP3-AA¹¹-AA¹²; wherein PEP3 is selected from the group consisting of VPT, VPE, APT, TPT, VPA, APV, VPQ, VSQ, SRV and TQV; wherein AA¹¹ is selected from the group consisting of E, K, Q, R, A, D, G and H; and wherein AA¹² is selected from the group consisting of L, M, T, E, Q and H; wherein PEP7 is an amino acid or a peptide with between two and seven amino acids of general formula AA¹-AA²-AA³-AA⁴-AA⁵-AA⁶-AA⁷; wherein AA¹, AA², AA³, AA⁴, and AA⁵ are independently absent or any amino acids; wherein AA⁶ is absent or selected from the group consisting of S, T, C, E, Q, P and R; wherein AA⁷ is absent or is selected from the group consisting of S, T, C, E, Q, P and R; wherein PEP10 is a peptide of general formula PEP6-PEP8; wherein PEP6 is a cyclic peptide of formula AA²⁶-AA²⁷-AA²⁸-AA²⁹-PEP4; wherein PEP4 is selected from the group consisting of VVE, TVE, VVR, VVK, VAE, AVS, VVD, VEE, VRS, VKS, QHN, EHS, EEH and EDH; wherein AA²⁶ is absent or selected from the group consisting of amino acids having an acidic group-containing side chain; wherein AA²⁷ and AA²⁸ are independently selected from the group consisting of amino acids having an acidic group-containing side chain and amino acids having an apolar side chain; and wherein AA²⁹ is absent or selected from the group consisting of amino acids having a polar, non-charged group-containing side chain; wherein PEP8 is an amino acid or a peptide with between two and six amino acids of general formula AA³³-AA³⁴-AA³⁵-AA³⁶-AA³⁷-AA³⁸; AA³³ is absent or is selected from the group consisting of any amino acids at the exception of amino acids having an aromatic group-containing side chain; AA³⁴ is absent or is selected from the group consisting of amino acids having an acidic group-containing side chain and amino acids having an aliphatic side chain; wherein AA³⁵ is absent or is selected from the group consisting of amino acids having a polar, non-charged group-containing side chain; wherein AA³⁶ is absent or is selected from the group consisting of amino acids having an acidic group-containing side chain and amino acids having an aliphatic side chain; wherein AA³⁷ is absent or is selected from the group consisting of amino acids having a polar, non-charged group-containing side chain; wherein AA³⁸ is absent or is selected from the group consisting of any amino acids.

17.-24. (canceled)

25. A cyclic peptide or a cyclic peptidomimetic according to claim 1, comprising a peptide with three amino acids PEP3, an amino acid or a peptide with between two and seven amino acids PEP7, and a peptide with three amino acids PEP4; wherein PEP7 is an amino acid or a peptide with between two and seven amino acids of general formula AA¹-AA²-AA³-AA⁴-AA⁵-AA⁶-AA⁷; wherein AA¹, AA², AA³, AA⁴, and AA⁵ are independently absent or any amino acids; wherein AA⁶ is absent or selected from the group consisting of S, T, C, E, Q, P and R; wherein AA⁷ is absent or is selected from the group consisting of S, T, C, E, Q, P and R; wherein at least one of AA¹, AA², AA³, AA⁴, AA⁵, AA⁶ or AA⁷ is not absent; wherein PEP8 is an amino acid or a peptide with between two and six amino acids of general formula AA³³-AA³⁴-AA³⁵-AA³⁶-AA³⁷-AA³⁸; wherein AA³³ is absent or is selected from the group consisting of any amino acids at the exception of amino acids having an aromatic group-containing side chain; AA³⁴ is absent or is selected from the group consisting of amino acids having an acidic group-containing side chain and amino acids having an aliphatic side chain; wherein AA³⁵ is absent or is selected from the group consisting of amino acids having a polar, non-charged group-containing side chain; wherein AA³⁶ is absent or is selected from the group consisting of amino acids having an acidic group-containing side chain and amino acids having an aliphatic side chain; wherein AA³⁷ is absent or is selected from the group consisting of amino acids having a polar, non-charged group-containing side chain; wherein AA³⁸ is absent or is selected from the group consisting of any amino acids; and wherein at least one of AA³³, AA³⁴, AA³⁵, AA³⁶, AA³⁷ or AA³⁸ is not absent.

26.-56. (canceled)

57. A cyclic peptide or a cyclic peptidomimetic according to claim 16, wherein the pair PEP3:PEP4 is selected from the group consisting of VPT:VVE, VPE:TVE, APT:VVR, APT:VVK, VPT:VAE, VPT:AVS, TPT:VVD, VPA:VVE, APV:VEE, VPQ:VRS, VSQ:VKS, VPQ:VKS, VPT:QHN, VPT:EHS, SRV:EEH and TQV:EDH.

58.-66. (canceled)

67. A cyclic peptide or a cyclic peptidomimetic according to claim 16, wherein the quadruplet PEP5:PEP1:PEP2:PEP6 is selected from the group consisting of VPTKM:SAIS:LKNYQ:NMVVE, VPTKL:SAIS:LKNYQ:NMVVE, VPTQL:SAIS:LKNYQ:NMVVE, VPTKL:SAIS:LKNYQ:EGMSVVE, VPTKL:SAIS:LKNYQ:GMVVE, VPTKM:SAIS:LKNYQ:GMVVE, VPTRL:SAIS:LKNYQ:DMVVE, VPTKT:SAIS:LKNYQ:MIVVE, VPTAL:SAIS:LKNYQ:MIVVE, VPTDL:SAIS:LKNYQ:MIVVE, VPTDL:SAIS:LKNYQ:MVVVE, VPEKM:SAIS:LKNYQ:NMTVE, APTKL:SAIS:LKNYQ:NMVVR, APTQL:SAIS:LKNYQ:NMVVR, APTKL:SAIS:LKNYQ:NMVVK, VPTKL:SAIS:LKNYQ:EGMSVAE, VPTKL:SAIS:LKNYQ:GMAVS, TPTKM:SAIS:LKNYQ:GMVVD, VPARL:SAIS:LKNYQ:DMVVE, APVKT:SAIS:LKNYQ:MIVEE, VPQAL:SAIS:LKNYQ:MIVRS, VSQDL:SAIS:LKNYQ:MIVKS, VPQDL:SAIS:LKNYQ:MVVKS, VPTEE:SAIS:LKNYQ:FLQHN, VPTGQ:SAIS:LKNYQ:LEEHS, SRVHH:SAIS:LKNYQ:RLEEH, and TQVQL:SAIS:LKNYQ:TLEDH.

68. (canceled)

69. A cyclic peptide or a cyclic peptidomimetic according to claim 25, wherein the hexaplet PEP7:PEP3:PEP1:PEP2:PEP4:PEP8 is selected from the group consisting of GIPEPXX:VPT:SAIS:LKNYQ:VVE:SXAXR, HVTKPTX:VPT:SAIS:LKNYQ:VVE:SXGXH, YVPKPXX:VPT:SAIS:LKNYQ:VVE:SXGXH, TVPKPXX:VPT:SAIS:LKNYQ:VVE:AXGXH, AVPKAXX:VPT:SAIS:LKNYQ:VVE:AXGXH, KVGKAXX:VPT:SAIS:LKNYQ:VVE:XGXR, KASKAXX:VPT:SAIS:LKNYQ:VVE:EXGXR, GSAGPXX:VPT:SAIS:LKNYQ:VVE:RXGXS, AAPASXX:VPT:SAIS:LKNYQ:VVE:AXGXR, STPPTXX:VPT:SAIS:LKNYQ:VVE:SXGXR, HVPKPXX:VPT:SAIS:LKNYQ:VVE:SXGXH, RVPSTXX:VPT:SAIS:LKNYQ:VVE:XGXL, ASAAPXX:VPT:SAIS:LKNYQ:VVE:XKXS, ASASPXX:VPT:SAIS:LKNYQ:VVE:XKXS, GIPEPXX:VPE:SAIS:LKNYQ:TVE:SXAXR, HVTKPTX:APT:SAIS:LKNYQ:VVR:SXGXH, YVPKPXX:APT:SAIS:LKNYQ:VVR:SXGXH, TVPKPXX:APT:SAIS:LKNYQ:VVR:AXGXH, AVPKAXX:APT:SAIS:LKNYQ:VVK:AXGXH, KVGKAXX:VPT:SAIS:LKNYQ:VAE:XGXR, KASKAXX:VPT:SAIS:LKNYQ:AVS:EXGXR, GSAGPXX:TPT:SAIS:LKNYQ:VVD:RXGXS, AAPASXX:VPA:SAIS:LKNYQ:VVE:AXGXR, HVPKPXX:APT:SAIS:LKNYQ:VVR:SXGXH, RVPSTXX:APV:SAIS:LKNYQ:VEE:XGXL, ASAAPXX:VPQ:SAIS:LKNYQ:VRS:XKXS, ASASPXX:VSQ:SAIS:LKNYQ:VKS:XKXS, ASASPXX:VPQ:SAIS:LKNYQ:VKS:XKXS, NDEGLEX:VPT:SAIS:LKNYQ:QHN:KXEXR, NDEGLEX:VPT:SAIS:LKNYQ:EHS:QXEXR, SSVKXQP:SRV:SAIS:LKNYQ:EEH:LEXAXA, and RNVQXRP:TQV:SAIS:LKNYQ:EDH:LAXKXE.

70. (canceled)

71. A cyclic peptide or a cyclic peptidomimetic according to claim 1, wherein said cyclic peptide or cyclic peptidomimetic may be any one of cyclic peptides of SEQ ID NO: 1 to 130880.

72.-79. (canceled)

80. A cyclic peptide or a cyclic peptidomimetic, having growth factor receptor-binding capability, according to claim 1, comprising at least one biomaterial-affinity-containing group, wherein said at least one biomaterial-affinity-containing group provides said cyclic peptide or cyclic peptidomimetic, with the ability to covalently or non-covalently interact with a biomaterial.

81.-86. (canceled)

87. A functionalized biomaterial comprising at least one cyclic peptide or a cyclic peptidomimetic according to claim 1, and a biomaterial.

88.-90. (canceled)

91. A medical device comprising at least one cyclic peptide or cyclic peptidomimetic according to claim 1.

92. A medical composition comprising at least one cyclic peptide or cyclic peptidomimetic according to claim 1, and a medically acceptable carrier.

93.-120. (canceled)

121. A method of inducing cell differentiation, tissue regeneration, or tissue formation comprising the in-vitro, ex-vivo or in-vivo administration of an effective amount of a peptide or peptidomimetic according to claim 1; wherein said method is selected from the group consisting of pharmaceutical, surgical, dermatological, prophylactic, diagnostic, imaging methods, and any combination thereof.

122. A method of inducing cell differentiation, tissue regeneration, or tissue formation comprising the in-vitro, ex-vivo or in-vivo administration of an effective amount of a functionalized biomaterial according to claim 87; wherein said method is selected from the group consisting of pharmaceutical, surgical, dermatological, prophylactic, diagnostic, imaging methods, and any combination thereof.

123. A method of inducing cell differentiation, tissue regeneration, or tissue formation comprising the in-vitro, ex-vivo or in-vivo administration of an effective amount of a medical composition according to claim 92; wherein said method is selected from the group consisting of pharmaceutical, surgical, dermatological, prophylactic, diagnostic, imaging methods, and any combination thereof.

124. The method according to claim 121, wherein said method may be used for protecting a patient from a disease, condition, disorder, or pathology selected from the group consisting of enhancing osteogenesis, inducing bone formation, inducing osteocyte maturation, treating, preventing or diagnosing osteoporosis, enhancing chondrogenesis, inducing cartilage formation, inducing chondrocyte maturation, treating or preventing osteoarthritis, treating or preventing costochondritis, treating or preventing herniation, treating or preventing achondroplasia, treating, preventing or diagnosing relapsing polychondritis; enhancing tissue closure; treating obesity, Dercum's disease, Multiple symmetric lipomatosis, Familial multiple lipomatosis, Lipodystrophy, Lipedema, Atherosclerosis, and any combination thereof.

125. The method according to claim 122, wherein said method may be used for protecting a patient from a disease, condition, disorder, or pathology selected from the group consisting of enhancing osteogenesis, inducing bone formation, inducing osteocyte maturation, treating, preventing or diagnosing osteoporosis, enhancing chondrogenesis, inducing cartilage formation, inducing chondrocyte maturation, treating or preventing osteoarthritis, treating or preventing costochondritis, treating or preventing herniation, treating or preventing achondroplasia, treating, preventing or diagnosing relapsing polychondritis; enhancing tissue closure; treating obesity, Dercum's disease, Multiple symmetric lipomatosis, Familial multiple lipomatosis, Lipodystrophy, Lipedema, Atherosclerosis, and any combination thereof.

126. The method according to claim 123, wherein said method may be used for protecting a patient from a disease, condition, disorder, or pathology selected from the group consisting of enhancing osteogenesis, inducing bone formation, inducing osteocyte maturation, treating, preventing or diagnosing osteoporosis, enhancing chondrogenesis, inducing cartilage formation, inducing chondrocyte maturation, treating or preventing osteoarthritis, treating or preventing costochondritis, treating or preventing herniation, treating or preventing achondroplasia, treating, preventing or diagnosing relapsing polychondritis; enhancing tissue closure; treating obesity, Dercum's disease, Multiple symmetric lipomatosis, Familial multiple lipomatosis, Lipodystrophy, Lipedema, Atherosclerosis, and any combination thereof.

127. A method of producing a physiologically functional and healthy cell, comprising the administration in-vitro, ex-vivo or in-vivo to a mesenchymal stem cell or progenitor cell, at any stage of differentiation thereof, of an effective amount of a peptide or a peptidomimetic according to claim 1, and wherein said physiologically functional and healthy cell is selected from the group consisting of an osteoblast, osteocyte, chondroblast, chondrocyte, neuroblast, neurocyte, Sertoli cells, Leydig cell, Germ cell, myoblast, myocyte, keratinocyte, endothelial cells, angioblast, fibroblast, fibrocyte, podocyte, areolar connective cells, adipocytes, pre-adipocytes/lipoblasts, epithelial cells, erythrocytes, alveolar cells, hematopoietic stem cells (HSC), myeloid progenitors, lymphoid progenitors, mast cells, myeloblasts, monocytes, macrophages, neutrophils, basophils, eosinophils, erythrocytes, megakaryocytes, thrombocytes, dendritic cells, small lymphocytes, T-lymphocytes (T-cells), B-lymphocytes (B-cells), and natural killer (NK)-cells.

128. A method of producing a physiologically functional and healthy cell, comprising the administration in-vitro, ex-vivo or in-vivo to a mesenchymal stem cell or progenitor cell, at any stage of differentiation thereof, of an effective amount of a functionalized biomaterial according to claim 87, and wherein said physiologically functional and healthy cell is selected from the group consisting of an osteoblast, osteocyte, chondroblast, chondrocyte, neuroblast, neurocyte, Sertoli cells, Leydig cell, Germ cell, myoblast, myocyte, keratinocyte, endothelial cells, angioblast, fibroblast, fibrocyte, podocyte, areolar connective cells, adipocytes, pre-adipocytes/lipoblasts, epithelial cells, erythrocytes, alveolar cells, hematopoietic stem cells (HSC), myeloid progenitors, lymphoid progenitors, mast cells, myeloblasts, monocytes, macrophages, neutrophils, basophils, eosinophils, erythrocytes, megakaryocytes, thrombocytes, dendritic cells, small lymphocytes, T-lymphocytes (T-cells), B-lymphocytes (B-cells), and natural killer (NK)-cells.

129. A method of producing a physiologically functional and healthy cell, comprising the administration in-vitro, ex-vivo or in-vivo to a mesenchymal stem cell or progenitor cell, at any stage of differentiation thereof, of an effective amount of a medical composition according to claim 92, and wherein said physiologically functional and healthy cell is selected from the group consisting of an osteoblast, osteocyte, chondroblast, chondrocyte, neuroblast, neurocyte, Sertoli cells, Leydig cell, Germ cell, myoblast, myocyte, keratinocyte, endothelial cells, angioblast, fibroblast, fibrocyte, podocyte, areolar connective cells, adipocytes, pre-adipocytes/lipoblasts, epithelial cells, erythrocytes, alveolar cells, hematopoietic stem cells (HSC), myeloid progenitors, lymphoid progenitors, mast cells, myeloblasts, monocytes, macrophages, neutrophils, basophils, eosinophils, erythrocytes, megakaryocytes, thrombocytes, dendritic cells, small lymphocytes, T-lymphocytes (T-cells), B-lymphocytes (B-cells), and natural killer (NK)-cells.

130. A surgical method for surgical treatment comprising the contacting of a peptide or a peptidomimetic according to claim 1 with a body part of a patient to be treated, wherein said contacting induces stem cell differentiation and tissue formation.

131. A surgical method for surgical treatment comprising the contacting of a functionalized biomaterial according to claim 87 with a body part of a patient to be treated, wherein said contacting induces stem cell differentiation and tissue formation.

132. A surgical method for surgical treatment comprising the contacting of a medical device according to claim 91 with a body part of a patient to be treated, wherein said contacting induces stem cell differentiation and tissue formation.

133. Kits for pharmaceutical, surgical, dermatological, prophylactic, diagnostic, or imaging functional association production, comprising at least one peptide or peptidomimetic according to claim 1, at least one bioactive carrier, each and every one of them provided in an amount effective to produce a pharmaceutical, surgical, dermatological, prophylactic, diagnostic, or imaging association to induce cell differentiation, promote tissue regeneration or protect a subject from a disease, disorder, pathology or condition selected from the group consisting of enhancing osteogenesis, inducing bone formation, inducing osteocyte maturation, treating, preventing or diagnosing osteoporosis, enhancing chondrogenesis, inducing cartilage formation, inducing chondrocyte maturation, treating or preventing osteoarthritis, treating or preventing costochondritis, treating or preventing herniation, treating or preventing achondroplasia, treating, preventing or diagnosing relapsing polychondritis; enhancing tissue closure; treating obesity, Dercum's disease, Multiple symmetric lipomatosis, Familial multiple lipomatosis, Lipodystrophy, Lipedema, Atherosclerosis, and any combination thereof, when administered in-vitro, ex-vivo or in-vivo to a mesenchymal stem cell, progenitor cell, at any stage of differentiation thereof, or to a subject carrying such a cell, and packaging and instructions.

134. Kits for pharmaceutical, surgical, dermatological, prophylactic, diagnostic, or imaging functional association production, comprising at least one functionalized biomaterial according to claim 87, at least one bioactive carrier, each and every one of them provided in an amount effective to produce a pharmaceutical, surgical, dermatological, prophylactic, diagnostic, or imaging association to induce cell differentiation, promote tissue regeneration or protect a subject from a disease, disorder, pathology or condition selected from the group consisting of enhancing osteogenesis, inducing bone formation, inducing osteocyte maturation, treating, preventing or diagnosing osteoporosis, enhancing chondrogenesis, inducing cartilage formation, inducing chondrocyte maturation, treating or preventing osteoarthritis, treating or preventing costochondritis, treating or preventing herniation, treating or preventing achondroplasia, treating, preventing or diagnosing relapsing polychondritis; enhancing tissue closure; treating obesity, Dercum's disease, Multiple symmetric lipomatosis, Familial multiple lipomatosis, Lipodystrophy, Lipedema, Atherosclerosis, and any combination thereof, when administered in-vitro, ex-vivo or in-vivo to a mesenchymal stem cell, progenitor cell, at any stage of differentiation thereof, or to a subject carrying such a cell, and packaging and instructions.

135. A cyclic peptide or a cyclic peptidomimetic according to claim 25, wherein the pair PEP3:PEP4 is selected from the group consisting of VPT:VVE, VPE:TVE, APT:VVR, APT:VVK, VPT:VAE, VPT:AVS, TPT:VVD, VPA:VVE, APV:VEE, VPQ:VRS, VSQ:VKS, VPQ:VKS, VPT:QHN, VPT:EHS, SRV:EEH and TQV:EDH.

136. A cyclic peptide or a cyclic peptidomimetic, having growth factor receptor-binding capability, according to claim 16, comprising at least one biomaterial-affinity-containing group, wherein said at least one biomaterial-affinity-containing group provides said cyclic peptide or cyclic peptidomimetic, with the ability to covalently or non-covalently interact with a biomaterial.

137. A cyclic peptide or a cyclic peptidomimetic, having growth factor receptor-binding capability, according to claim 25, comprising at least one biomaterial-affinity-containing group, wherein said at least one biomaterial-affinity-containing group provides said cyclic peptide or cyclic peptidomimetic, with the ability to covalently or non-covalently interact with a biomaterial.

138. A functionalized biomaterial comprising at least one cyclic peptide or a cyclic peptidomimetic according to claim 16, and a biomaterial.

139. A functionalized biomaterial comprising at least one cyclic peptide or a cyclic peptidomimetic according to claim 25, and a biomaterial.

140. A medical device comprising at least one cyclic peptide or cyclic peptidomimetic according to claim 16.

141. A medical device comprising at least one cyclic peptide or cyclic peptidomimetic according to claim 25.

142. A medical device comprising at least one functionalized biomaterial according to claim 87.

143. A medical composition comprising at least one cyclic peptide or cyclic peptidomimetic according to claim 16, and a medically acceptable carrier.

144. A medical composition comprising at least one cyclic peptide or cyclic peptidomimetic according to claim 25, and a medically acceptable carrier.

145. A medical composition comprising at least one functionalized biomaterial according to claim 87, and a medically acceptable carrier.
